(19) United States
(12) Patent Application Publication
(10) Pub. No.: US 2020/0248168 A1
(43) Pub. Date: Aug. 6, 2020

(54) COMPOSITIONS AND METHODS FOR TREATMENT OF PROPROTEIN CONVERTASE SUBTILISIN/KEXIN TYPE 9 (PCSK9)-RELATED DISORDERS

(71) Applicant: CRISPR Therapeutics AG, Zug (CH)

(72) Inventors: Ante Sven LUNDBERG, Cambridge, MA (US); Samarth KULKARNI, Cambridge, MA (US); Lawrence KLEIN, Cambridge, MA (US); Yvonne Sarah ARATYN, Cambridge, MA (US); Roman Lvovitch BOGORAD, Zug (CH); Hari Kumar PADMANABHAN, Cambridge, MA (US)

(21) Appl. No.: 16/488,149

(22) PCT Filed: Feb. 15, 2018
(86) PCT No.: PCT/IB2018/000208

§ 371 Date: Aug. 22, 2019

Related U.S. Application Data
(60) Provisional application No. 62/526,646, filed on Jun. 29, 2017.
(60) Provisional application No. 62/461,852, filed on Feb. 22, 2017.

(51) Int. Cl. C12N 15/10; C12N 9/22; A61K 35/407; A61K 9/127; C12N 9/64

(52) U.S. Cl. CPC C12N 15/102; C12N 9/22; A61K 35/407; A61K 9/0019; C12N 9/6405; C12N 2310/20; C12N 2750/14143; A61K 9/127

(57) ABSTRACT

The present application provides materials and methods for treating a patient with one or more conditions associated with PCSK9 whether ex vivo or in vivo. In addition, the present application provides materials and methods for editing and/or modulating the expression of PCSK9 gene in a cell by genome editing.

### RELATED APPLICATIONS

[0001] This application claims priority to, and the benefit of U.S. Provisional Application No. 62/461,852, filed on Feb. 22, 2017, and U.S. Provisional Application No. 62/526,646, filed on Jun. 29, 2017, the contents of each of which are hereby incorporated in their entireties.

### SEQUENCE LISTING

[0002] The present application is being filed along with a Sequence Listing in electronic format. The Sequence Listing file, entitled “CRIS-017_001WO_SequenceListing_ST25.txt”, was created on Feb. 8, 2018, and is 16.9 MB in size. The information in electronic format of the Sequence Listing is incorporated herein by reference in its entirety.

### FIELD

[0003] The invention relates to the field of gene editing and specifically to the alteration of the Proprotein Convertase Subtilisin/Kexin Type 9 (PCSK9) gene.

### BACKGROUND

[0004] Genome engineering refers to the strategies and techniques for the targeted, specific modification of the genetic information (genome) of living organisms. Genome engineering is a very active field of research because of the wide range of possible applications, particularly in the areas of human health. For example, genome engineering can be used to alter (e.g., correct or knock-out) a gene carrying a harmful mutation or to explore the function of a gene. Early technologies developed to insert a transgene into a living cell were often limited by the random nature of the insertion of the new sequence into the genome. Random insertions into the genome may result in disrupting normal regulation of neighboring genes leading to severe unwanted effects. Furthermore, random integration technologies offer little reproducibility, as there is no guarantee that the sequence would be inserted at the same place in two different cells. Recent genome engineering strategies, such as zinc finger nucleases (ZFNs), transcription activator like effector nucleases (TALENs), homing endonucleases (HEs) and MegaTALs, enable a specific area of the DNA to be modified, thereby increasing the precision of the alteration compared to early technologies. These newer platforms offer a much larger degree of reproducibility, but still have their limitations.

[0005] Despite efforts from researchers and medical professionals worldwide who have been trying to address genetic disorders, and despite the promise of genome engineering approaches, there still remains a critical need for developing safe and effective treatments involving PCSK9 related indications.

[0006] By using genome engineering tools to create permanent changes to the genome that can address the PCSK9 related disorders or conditions with a single treatment, the resulting therapy may completely remedy certain PCSK9 related indications and/or diseases.

### SUMMARY

[0007] Provided herein are cellular, ex vivo and in vivo methods for creating permanent changes to the genome by introducing insertions, deletions or mutations of at least one nucleotide within or near the Proprotein Convertase Subtilisin/Kexin Type 9 (PCSK9) gene or other DNA sequences that encode regulatory elements of the PCSK9 gene by genome editing and reducing or eliminating the expression or function of PCSK9 gene products, which can be used to treat a PCSK9 related condition or disorder such as Dyslipidemias. Also provided herein are components and compositions, and vectors for performing such methods.

[0008] Provided herein is a method for editing a Proprotein Convertase Subtilisin/Kexin Type 9 (PCSK9) gene in a cell by genome editing comprising the step of introducing into the cell one or more deoxyribonucleic acid (DNA) endonucleases to effect one or more single-strand breaks (SSBs) or double-strand breaks (DSBs) within or near the PCSK9 gene or PCSK9 regulatory elements that results in one or more permanent insertions, deletions or mutations of at least one nucleotide within or near the PCSK9 gene, thereby reducing or eliminating the expression or function of PCSK9 gene products.

[0009] Also provided herein is an ex vivo method for treating a patient having a PCSK9 related condition or disorder comprising the steps of: isolating a hepatocyte from a patient; editing within or near a Proprotein Convertase Subtilisin/Kexin Type 9 (PCSK9) gene or other DNA sequences that encode regulatory elements of the PCSK9 gene of the hepatocyte; and implanting the genome-edited hepatocyte into the patient.

[0010] In some aspects, the editing step comprises introducing into the hepatocyte one or more deoxyribonucleic acid (DNA) endonucleases to effect one or more single-strand breaks (SSBs) or double-strand breaks (DSBs) within or near the PCSK9 gene or PCSK9 regulatory elements that results in one or more permanent insertions, deletions or mutations of at least one nucleotide within or near the PCSK9 gene, thereby reducing or eliminating the expression or function of PCSK9 gene products.

[0011] Also provided herein is an ex vivo method for treating a patient having a PCSK9 related condition or disorder comprising the steps of: creating a patient specific induced pluripotent stem cell (iPSC); editing within or near a Proprotein Convertase Subtilisin/Kexin Type 9 (PCSK9) gene or other DNA sequences that encode regulatory elements of the PCSK9 gene of the iPSC; differentiating the genome-edited iPSC into a hepatocyte; and implanting the hepatocyte into the patient.

[0012] In some aspects, the editing step comprises introducing into the iPSC one or more deoxyribonucleic acid (DNA) endonucleases to effect one or more single-strand breaks (SSBs) or double-strand breaks (DSBs) within or near the PCSK9 gene or PCSK9 regulatory elements that results in one or more permanent insertions, deletions or mutations of at least one nucleotide within or near the PCSK9 gene, thereby reducing or eliminating the expression or function of PCSK9 gene products.

[0013] Also provided herein is an ex vivo method for treating a patient having a PCSK9 related condition or disorder comprising the steps of: isolating a mesenchymal stem cell from the patient; editing within or near a Proprotein Convertase SubtilisintKexin Type 9 (PCSK9) gene or other DNA sequences that encode regulatory elements of the PCSK9 gene of the mesenchymal stern cell; differentiating the genome-edited mesenchymal stem cell into a hepatocyte; and implanting the hepatocyte into the patient.

[0014] In some aspects, the editing step comprises introducing into the mesenchymal stem cell one or more deoxyribonucleic acid (DNA) endonucleases to effect one or more single-strand breaks (SSBs) or double-strand breaks (DSBs) within or near the PCSK9 gene or PCSK9 regulatory elements that results in one or more permanent insertions, deletions or mutations of at least one nucleotide within or near the PCSK9 gene, thereby reducing or eliminating the expression or function of PCSK9 gene products.

[0015] Also provided herein is an in vivo method for treating a patient with a PCSK9 related disorder comprising the step of editing the Proprotein Convertase Subtilisin/Kexin Type 9 (PCSK9) gene in a cell of the patient. In some aspects, the editing step comprises introducing into the cell one or more deoxyribonucleic acid (DNA) endonucleases to effect one or more single-strand breaks (SSBs) or double-strand breaks (DSBs) within or near the PCSK9 gene or PCSK9 regulatory elements that results in one or more permanent insertions, deletions or mutations of at least one nucleotide within or near the PCSK9 gene, thereby reducing or eliminating the expression or function of PCSK9 gene products. In some aspects, the cell is a hepatocyte. In some aspects, the one or more deoxyribonucleic acid (DNA) endonuclease is delivered to the hepatocyte by local injection, systemic infusion, or combinations thereof.

[0016] Also provided herein is a method of altering the contiguous genomic sequence of a PCSK9 gene in a cell comprising contacting the cell with one or more deoxyribonucleic acid (DNA) endonuclease to effect one or more single-strand breaks (SSBs) or double-strand breaks (DSBs). In some aspects, the alteration of the contiguous genomic sequence occurs in one or more exons of the PCSK9 gene.

[0017] In some aspects, the one or more deoxyribonucleic acid (DNA) endonuclease is selected from any of those listed in SEQ ID NO: 1-620, and variants having at least 70% homology to any of those listed in SEQ ID NO: 1-620.

[0018] In some aspects, the one or more deoxyribonucleic acid (DNA) endonuclease is one or more protein or polypeptide. In some aspects, the one or more deoxyribonucleic acid (DNA) endonuclease is one or more polynucleotide encoding the one or more DNA endonuclease. In some aspects, the one or more deoxyribonucleic acid (DNA) endonuclease is one or more ribonucleic acid (RNA) encoding the one or more DNA endonuclease. In some aspects, the one or more ribonucleic acid (RNA) is one or more chemically modified RNA. In some aspects, the one or more ribonucleic acid (RNA) is chemically modified in the coding region. In some aspects, the one or more polynucleotide or one or more ribonucleic acid (RNA) is codon optimized.

[0019] In some aspects, the methods further comprise introducing into the cell one or more gRNA or one or more sgRNA. In some aspects, the one or more gRNA or one or more sgRNA comprises a spacer sequence that is complementary to a segment of the coding sequence of the PCSK9 gene. In some aspects, the one or more gRNA or one or more sgRNA is chemically modified.

[0020] In some aspects, the one or more gRNA or one or more sgRNA is pre-complexed with the one or more deoxyribonucleic acid (DNA) endonuclease. In some aspects, the pre-complexing involves a covalent attachment of the one or more gRNA or one or more sgRNA to the one or more deoxyribonucleic acid (DNA) endonuclease.

[0021] In some aspects, the one or more deoxyribonucleic acid (DNA) endonuclease is formulated in a liposome or lipid nanoparticle. In some aspects, the one or more deoxyribonucleic acid (DNA) endonuclease is formulated in a liposome or a lipid nanoparticle which also comprises the one or more gRNA or one or more sgRNA.

[0022] In some aspects, the one or more deoxyribonucleic acid (DNA) endonuclease is encoded in an AAV vector particle, where the AAV vector serotype is selected from those listed in Tables 4 and 5. In some aspects, the one or more gRNA or one or more sgRNA is encoded in an AAV vector particle, where the AAV vector serotype is selected from those listed in Tables 4 and 5. In some aspects, the one or more deoxyribonucleic acid (DNA) endonuclease is encoded in an AAV vector particle which also encodes the one or more gRNA or one or more sgRNA, where the AAV vector serotype is selected from those listed in Tables 4 and 5.

[0023] Also provided herein is a single-molecule guide polynucleotide comprising at least a spacer sequence that is an RNA sequence corresponding to any of SEQ ID NOs: 5,305-28,696. In some aspects, the single-molecule guide polynucleotide further comprises a spacer extension region. In some aspects, the single-molecule guide polynucleotide further comprises a tracrRNA extension region. In some aspects, the single-molecule guide polynucleotide is chemically modified.

[0024] Also provided herein is a non-naturally occurring CRISPR/Cas system comprising a polynucleotide encoding a Cas9 or Cpf1 enzyme and at least one single-molecule guide polynucleotide described herein. In some aspects, the polynucleotide encoding a Cas9 or Cpf1 enzyme is selected from S. pyogenes Cas9, S. aureus Cas9, N. meningitides Cas9, S. thermophilus CRISPR Cas9, S. thermophilus CRISPR 3 Cas9, T. denticola Cas9, L. bacterium ND2006 Cpf1 and Acidaminococcus sp. BV3L6 Cpf1, and variants having at least 70% homology to these enzymes. In some aspects, the polynucleotide encoding a Cas9 or Cpf1 enzyme comprises one or more nuclear localization signals (NCSs). In some aspects, at least one NLS is at or within 50 amino acids of the amino-terminus of the polynucleotide encoding a Cas9 or Cpf1 enzyme and/or at least one NTS is at or within 50 amino acids of the carboxy-terminus of the polynucleotide encoding a Cas9 or Cpf1 enzyme. In some aspects, polynucleotide encoding a Cas9 or Cpf1 enzyme is codon optimized for expression in a eukaryotic cell.

[0025] Also provided herein is a DNA encoding the single-molecule guide polynucleotide described herein.

[0026] Also provided herein is a DNA encoding the CRISPR/Cas system described herein.

[0027] Also provided herein is a vector comprising a DNA encoding the single-molecule guide polynucleotide and CRISPR/Cas system. In some aspects, the vector is a plasmid. In some aspects, the vector is an AAV vector particle, wherein the AAV vector serotype is selected from those listed in SEQ ID NOs: 4,734-5,302 and in Table 2.

### BRIEF DESCRIPTION OF THE DRAWINGS

[0028] Various aspects of materials and methods disclosed and described in this specification can be better understood by reference to the accompanying figures, in which:

[0029] FIGS. 1A-B depict the type II CRISPR/Cas system:

[0030] FIG. 1A is a depiction of the type II CRISPR/Cas system including gRNA; and

[0031] FIG. 1B is another depiction of the type II CRISPR/Cas system including sgRNA.

[0032] FIGS. 2, 3, and 4 describe the cutting efficiency of gRNAs with an S. pyogenes Cas9 in HEK293T cells targeting the PCSK9 gene.

[0033] FIG. 5 describes the cutting efficiencies of gRNAs targeting PCSK9 in HuH7 cells.

[0034] FIGS. 6A and 6B describe the cutting efficiency of gRNA targeting PCSK9 in Human Primary Hepatocytes isolated from Pig, Monkey and Human.

[0035] FIG. 7A describes the cutting efficiency of gRNA targeting PCSK9 in primary hepatocytes.

[0036] FIG. 7B describes the cutting efficiency of gRNA targeting C3 in primary hepatocytes.

[0037] FIG. 7C describes the effect of gene editing by gRNA on PCSK9 protein secretion in primary hepatocytes.

### BRIEF DESCRIPTION OF SEQUENCE LISTING

[0038] SEQ ID NOs: 1-620 are Cas endonuclease ortholog sequences.

[0039] SEQ NOs: 621-631 are intentionally blank.

[0040] SEQ ID NOs: 632-4,715 are microRNA sequences.

[0041] SEQ ID NOs: 4,716-4,733 are intentionally blank.

[0042] SEQ ID NOs: 4,734-5,302 are AAV serotype sequences.

[0043] SEQ ID NO: 5,303 is a PCSK9 nucleotide sequence.

[0044] SEQ ID NO: 5,304 is a gene sequence including 1-5 kilobase pairs upstream and/or downstream of the PCSK9 gene.

[0045] SEQ ID NOs: 5,305-5,365 are 20 bp spacer sequences for targeting within or near a PCSK9 gene or other DNA sequence that encodes a regulatory element of the PCSK9 gene with a T. denticola Cas9 endonuclease.

[0046] SEQ ID NOs: 5,366-5,545 are 20 bp spacer sequences for targeting within or near a PCSK9 gene or other DNA sequence that encodes a regulatory element of the PCSK9 gene with a S. thermophilus Cas9 endonuclease.

[0047] SEQ ID NOs: 5,546-6,579 are 20 bp spacer sequences for targeting within or near a PCSK9 gene or other DNA sequence that encodes a regulatory element of the PCSK9 gene with a S. aureus Cas9 endonuclease.

[0048] SEQ ID NOs: 6,580-7,269 are 20 bp spacer sequences for targeting within or near a PCSK9 gene or other DNA sequence that encodes a regulatory element of the PCSK9 gene with a N. meningitides Cas9 endonuclease.

[0049] SEQ ID NOs: 7,270-18,791 are 20 bp spacer sequences for targeting within or near a PCSK9 gene or other DNA sequence that encodes a regulatory element of the PCSK9 gene with a S. pyogenes Cas9 endonuclease.

[0050] SEQ ID NOs: 18,792-28,696 are 22 bp spacer sequences for targeting within or near a PCSK9 gene or other DNA sequence that encodes a regulatory element of the PCSK9 gene with an Acidaminococcus, a Lachnospiraceae, and a Francisella Novicida Cpf1 endonuclease.

[0051] SEQ ID NOs: 28,697-28,726 are intentionally blank.

[0052] SEQ ID NO: 28,727 is a sample guide RNA (gRNA) for a S. pyogenes Cas9 endonuclease.

[0053] SEQ ID NOs: 28,728-28730 show sample sgRNA sequences.

### DETAILED DESCRIPTION OF THE INVENTION

### I. INTRODUCTION

### Genuine Editing

[0054] The present invention provides strategies and techniques for the targeted, specific alteration of the genetic information (genome) of living organisms. As used herein, the term “alteration” or “alteration of genetic information” refers to any change in the genome of a cell. In the context of treating genetic disorders, alterations may include, but are not limited to, insertion, deletion and correction. As used herein, the term “insertion” refers to an addition of one or more nucleotides in a DNA sequence. Insertions can range from small insertions of a few nucleotides to insertions of large segments such as a cDNA or a gene. The term “deletion” refers to a loss or removal of one or more nucleotides in a DNA sequence or a loss or removal of the function of a gene. In some cases, a deletion can include, for example, a loss of a few nucleotides, an exon, an intron, a gene segment, or the entire sequence of a gene. In some cases, deletion of a gene refers to the elimination or reduction of the function or expression of a gene or its gene product. This can result from not only a deletion of sequences within or near the gene, but also other events (e.g., insertion, nonsense mutation) that disrupt the expression of the gene. The term “correction” as used herein, refers to a change of one or more nucleotides of a genome in a cell, whether by insertion, deletion or substitution. Such correction may result in a more favorable genotypic or phenotypic outcome, whether in structure or function, to the genomic site which was corrected. One non-limiting example of a “correction” includes the correction of a mutant or defective sequence to a wild-type sequence which restores structure or function to a gene or its gene product(s). Depending on the nature of the mutation, correction may be achieved via various strategies disclosed herein. In one non-limiting example, a missense mutation may be corrected by replacing the region containing the mutation with its wild-type counterpart. As another example, duplication mutations (e.g., repeat expansions) in a gene may be corrected by removing the extra sequences.

[0055] In some aspects, alterations may also include a gene knock-in, knock-out or knock-down. As used herein, the term “knock-in” refers to an addition of a DNA sequence, or fragment thereof into a genome. Such DNA sequences to be knocked-in may include an entire gene or genes, may include regulatory sequences associated with a gene or any portion or fragment of the foregoing. For example, a cDNA encoding the wild-type protein may be inserted into the genome of a cell carrying a mutant gene. Knock-in strategies need not replace the defective gene, in whole or in part. In some cases, a knock-in strategy may further involve substitution of an existing sequence with the provided sequence, e.g., substitution of a mutant allele with a wild-type copy. On the other hand, the term “knock-out” refers to the elimination of a gene or the expression of a gene. For example, a gene can be knocked out by either a deletion or an addition of a nucleotide sequence that leads to a disruption of the reading frame. As another example, a gene may be knocked out by replacing a part of the gene with an irrelevant sequence. Finally, the term “knock-down” as used herein refers to reduction in the expression of a gene or its gene product(s). As a result of a gene knock-down, the protein activity or function may be attenuated or the protein levels may be reduced or eliminated.

[0056] Genome editing generally refers to the process of modifying the nucleotide sequence of a genome, preferably in a precise or pre-determined manner. Examples of methods of genome editing described herein include methods of using site-directed nucleases to cut deoxyribonucleic acid (DNA) at precise target locations in the genome, thereby creating single-strand or double-strand DNA breaks at particular locations within the genome. Such breaks can be and regularly are repaired by natural, endogenous cellular processes, such as homology-directed repair (HDR) and non-homologous end joining (NHEJ), as recently reviewed in Cox et al., Nature Medicine 21(2), 121-31 (2015). These two main DNA repair processes consist of a family of alternative pathways. NHEJ directly joins the DNA ends resulting from a double-strand break, sometimes with the loss or addition of nucleotide sequence, which may disrupt or enhance gene expression. HDR utilizes a homologous sequence, or donor sequence, as a template for inserting a defined DNA sequence at the break point. The homologous sequence can be in the endogenous genome, such as a sister chromatid. Alternatively, the donor can be an exogenous nucleic acid, such as a plasmid, a single-strand oligonucleotide, a double-stranded oligonucleotide, a duplex oligonucleotide or a virus, that has regions of high homology with the nuclease-cleaved locus, but which can also contain additional sequence or sequence changes including deletions that can be incorporated into the cleaved target locus. A third repair mechanism can be microhomology-mediated end joining (MMEJ), also referred to as “Alternative NHEJ,” in which the genetic outcome is similar to NHEJ in that small deletions and insertions can occur at the cleavage site. MMEJ can make use of homologous sequences of a few basepairs flanking the DNA break site to drive a more favored DNA end joining repair outcome, and recent reports have further elucidated the molecular mechanism of this process; see, e.g., Cho and Greenberg, Nature 518, 174-76 (2015); Kent et al., Nature Structural and Molecular Biology, Adv. Online doi:10.1038/nsmb.2961(2015); Mateos-Gomez et al., Nature 518, 254-57 (2015); Ceccaldi et al., Nature 528, 258-62 (2015). In some instances, it may be possible to predict likely repair outcomes based on analysis of potential microhomologies at the site of the DNA break.

[0057] Each of these genome editing mechanisms can be used to create desired genomic alterations. A step in the genome editing process can be to create one or two DNA breaks, the latter as double-strand breaks or as two single-stranded breaks, in the target locus as near the site of intended mutation. This can be achieved via the use of site-directed polypeptides, as described and illustrated herein.

### CRISPR Endonuclease System

[0058] A CRISPR (Clustered Regularly Interspaced Short Palindromic Repeats) genomic locus can be found in the genomes of many prokaryotes (e.g., bacteria and archaea). In prokaryotes, the CRISPR locus encodes products that function as a type of immune system to help defend the prokaryotes against foreign invaders, such as virus and phage. There are three stages of CRISPR locus function: integration of new sequences into the CRISPR locus, expression of CRISPR RNA (crRNA), and silencing of foreign invader nucleic acid. Five types of CRISPR systems (e.g., Type I, Type II, Type III, Type U, and Type V) have been identified.

[0059] A CRISPR locus includes a number of short repeating sequences referred to as “repeats.” When expressed, the repeats can form secondary structures (e.g., hairpins) and/or comprise unstructured single-stranded sequences. The repeats usually occur in clusters and frequently diverge between species. The repeats are regularly interspaced with unique intervening sequences referred to as “spacers,” resulting in a repeat-spacer-repeat locus architecture. The spacers are identical to or have high homology with known foreign invader sequences. A spacer-repeat unit encodes a crisprRNA (crRNA), which is processed into a mature form of the spacer-repeat unit. A crRNA comprises a “seed” or spacer sequence that is involved in targeting a target nucleic acid (in the naturally occurring form in prokaryotes, the spacer sequence targets the foreign invader nucleic acid). A spacer sequence is located at the 5′ or 3′ end of the crRNA.

[0060] A CRISPR locus also comprises polynucleotide sequences encoding CRISPR Associated (Cas) genes. Cas genes encode endonucleases involved in the biogenesis and the interference stages of crRNA function in prokaryotes. Some Cas genes comprise homologous secondary and/or tertiary structures.

### Type II CRISPR Systems

[0061] crRNA biogenesis in a Type II CRISPR system in nature requires a trans-activating CRISPR RNA (tracrRNA). Non-limiting examples of Type II CRISPR systems are shown in FIGS. 1A and 1B. The tracrRNA can be modified by endogenous RNaseIII, and then hybridizes to a crRNA repeat in the pre-crRNA array. Endogenous RNaseIII can be recruited to cleave the pre-crRNA. Cleaved crRNAs can be subjected to exoribonuclease trimming to produce the mature crRNA form (e.g., 5′ trimming). The tracrRNA can remain hybridized to the crRNA, and the tracrRNA and the crRNA associate with a site-directed polypeptide (e.g., Cas9). The crRNA of the crRNA-tracrRNA-Cas9 complex can guide the complex to a target nucleic acid to which the crRNA can hybridize. Hybridization of the crRNA to the target nucleic acid can activate Cas9 for targeted nucleic acid cleavage. The target nucleic acid in a Type II CRISPR system is referred to as a protospacer adjacent motif (PAM). In nature, the PAM is essential to facilitate binding of a site-directed polypeptide (e.g., Cas9) to the target nucleic acid. Type II systems (also referred to as Nmeni or CASS4) are further subdivided into Type II-A (CASS4) and II-B (CASS4a). Jinek et al., Science, 337(6096):816-821 (2012) showed that the CRISPR/Cas9 system is useful for RNA-programmable genome editing, and international patent application publication number WO2013/176772 provides numerous examples and applications of the CRISPR/Cas endonuclease system for site-specific gene editing.

### Type V CRISPR Systems

[0062] Type V CRISPR systems have several important differences from Type II systems. For example, Cpf1 is a single RNA-guided endonuclease that, in contrast to Type II systems, lacks tracrRNA. In fact, Cpf1-associated CRISPR arrays can be processed into mature crRNAs without the requirement of an additional trans-activating tracrRNA. The Type V CRISPR array can be processed into short mature crRNAs of 42-44 nucleotides in length, with each mature crRNA beginning with 19 nucleotides of direct repeat followed by 23-25 nucleotides of spacer sequence. In contrast, mature crRNAs in Type II systems can start with 20-24 nucleotides of spacer sequence followed by about 22 nucleotides of direct repeat. Also, Cpf1 can utilize a T-rich protospacer-adjacent motif such that Cpf1-crRNA complexes efficiently cleave target DNA preceded by a short T-rich PAM, which is in contrast to the G-rich PAM following the target DNA for Type II systems. Thus, Type V systems cleave at a point that is distant from the PAM, while Type II systems cleave at a point that is adjacent to the PAM. In addition, in contrast to Type II systems, Cpf1 cleaves DNA via a staggered DNA double-stranded break with a 4 or 5 nucleotide 5′ overhang. Type II systems cleave via a blunt double-stranded break. Similar to Type II systems, Cpf1 contains a predicted RuvC-like endonuclease domain, but lacks a second HNH endonuclease domain, which is in contrast to Type II systems.

### Cas Genes/Polypeptides and Protospacer Adjacent Motifs

[0063] Exemplary CRISPR/Cas polypeptides include the Cas9 polypeptides as published in Fonfara et al., Nucleic Acids Research, 42: 2577-2590 (2014). The CRISPR/Cas gene naming system has undergone extensive rewriting since the Cas genes were discovered. Fonfara et al. also provides PAM sequences for the Cas9 polypeptides from various species (see also SEQ NOs: 1-620).

### II. COMPOSITIONS AND METHODS OF THE INVENTION

[0064] Provided herein are cellular, ex vivo and in vivo methods for using genome engineering tools to create permanent changes to the genome by deleting or mutating the PCSK9 gene or other DNA sequences that encode regulatory elements of the PCSK9 gene. Such methods use endonucleases, such as CRISPR-associated (Cas9, Cpf1 and the like) nucleases, to permanently edit within or near the genomic locus of the PCSK9 gene or other DNA sequences that encode regulatory elements of the PCSK9 gene. In this way, examples set forth in the present disclosure can help to reduce or eliminate the expression of the PCSK9 gene with a single treatment (rather than deliver potential therapies for the lifetime of the patient).

### Site-Directed Polypeptides (Endonucleases, Enzymes)

[0065] A site-directed polypeptide is a nuclease used in genome editing to cleave DNA. The site-directed polypeptide can be administered to a cell or a patient as either: one or more polypeptides, or one or more mRNAs encoding the polypeptide. Any of the enzymes or orthologs listed in SEQ ID NO: 1-620, or disclosed herein, may be utilized in the methods herein.

[0066] In the context of a CRISPR/Cas9 or CRISPR/Cpf1, system, the site-directed polypeptide can bind to a guide RNA that, in turn, specifies the site in the target DNA to which the polypeptide is directed. In the CRISPR/Cas9 or CRISPR/Cpf1 systems disclosed herein, the site-directed polypeptide can be an endonuclease, such as a DNA endonuclease.

[0067] A site-directed polypeptide can comprise a plurality of nucleic acid-cleaving (i.e., nuclease) domains. Two or more nucleic acid-cleaving domains can be linked together via a linker. For example, the linker can comprise a flexible linker. Linkers can comprise 1, 2, 3, 4, 5, 6, 7, 8, 9, 10, 11, 12, 13, 14, 15, 16, 17, 18, 19, 20, 21, 22, 23, 24, 25, 30, 35, 40 or more amino acids in length.

[0068] Naturally-occurring wild-type Cas9 enzymes comprise two nuclease domains, a HNH nuclease domain and a RuvC domain. Herein, the term “Cas9” refers to both a naturally-occurring and a recombinant Cas9. Cas9 enzymes contemplated herein can comprise a HNH or HNH-like nuclease domain, and/or a RuvC or RuvC-like nuclease domain.

[0069] HNH or HNH-like domains comprise a McrA-like fold. HNH or HNH-like domains comprises two antiparallel β-strands and an α-helix. HNH or HNH-like domains comprises a metal binding site (e.g., a divalent cation binding site). HNH or HNH-like domains can cleave one strand of a target nucleic acid (e.g., the complementary strand of the crRNA targeted strand).

[0070] RuvC or RuvC-like domains comprise an RNaseH or RNaseH-like fold. RuvC/RNaseH domains are involved in a diverse set of nucleic acid-based functions including acting on both RNA and DNA. The RNaseH domain comprises 5 β-strands surrounded by a plurality of α-helices. RuvC/RNaseH or RuvC/RNaseH-like domains comprise a metal binding site (e.g., a divalent cation binding site). RuvC/RNaseH or RuvC/RNaseH-like domains can cleave one strand of a target nucleic acid (e.g., the non-complementary strand of a double-stranded target DNA).

[0071] Site-directed polypeptides can introduce double-strand breaks or single-strand breaks in nucleic acids, e.g., genomic DNA. The double-strand break can stimulate a cell's endogenous DNA-repair pathways (e.g., homology-dependent repair (HDR) or NHEJ or alternative non-homologous end joining (A-NHEJ) or microhomology-mediated end joining (MMEJ)). NHEJ can repair cleaved target nucleic acid without the need for a homologous template. This can sometimes result in small deletions or insertions (indels) in the target nucleic acid at the site of cleavage, and can lead to disruption or alteration of gene expression. HDR can occur when a homologous repair template, or donor, is available. The homologous donor template can comprise sequences that are homologous to sequences flanking the target nucleic acid cleavage site. The sister chromatid can be used by the cell as the repair template. However, for the purposes of genome editing, the repair template can be supplied as an exogenous nucleic acid, such as a plasmid, duplex oligonucleotide, single-strand oligonucleotide or viral nucleic acid. With exogenous donor templates, an additional nucleic acid sequence (such as a transgene) or modification (such as a single or multiple base change or a deletion) can be introduced between the flanking regions of homology so that the additional or altered nucleic acid sequence also becomes incorporated into the target locus. MMEJ can result in a genetic outcome that is similar to NHEJ in that small deletions and insertions can occur at the cleavage site. MMEJ can make use of homologous sequences of a few basepairs flanking the cleavage site to drive a favored end-joining DNA repair outcome. In some instances, it may be possible to predict likely repair outcomes based on analysis of potential microhomologies in the nuclease target regions.

[0072] Thus, in some cases, homologous recombination can be used to insert an exogenous polynucleotide sequence into the target nucleic acid cleavage site. An exogenous polynucleotide sequence is termed a “donor polynucleotide” (or donor or donor sequence) herein. The donor polynucleotide, a portion of the donor polynucleotide, a copy of the donor polynucleotide, or a portion of a copy of the donor polynucleotide can be inserted into the target nucleic acid cleavage site. The donor polynucleotide can be an exogenous polynucleotide sequence, i.e., a sequence that does not naturally occur at the target nucleic acid cleavage site.

[0073] The modifications of the target DNA due to NHEJ and/or HDR can lead to, for example, mutations, deletions, alterations, integrations, gene correction, gene replacement, gene tagging, transgene insertion, nucleotide deletion, gene disruption, translocations and/or gene mutation. The processes of deleting genomic DNA and integrating non-native nucleic acid into genomic DNA are examples of genome editing.

[0074] The site-directed polypeptide can comprise an amino acid sequence having at least 10%, at least 15%, at least 20%, at least 30%, at least 40%, at least 50%, at least 60%, at least 70%, at least 75%, at least 80%, at least 85%, at least 90%, at least 95%, at least 99%, or 100% amino acid sequence identity to a wild-type exemplary site-directed polypeptide [e.g., Cas9 from S. pyogenes, US2014/0068797 Sequence ID No. 8 or Sapranauskas et al., Nucleic Acids Res, 39(21): 9275-9282 (2011)], and various other site-directed polypeptides. The site-directed polypeptide can comprise at least 70, 75, 80, 85, 90, 95, 97, 99, or 100% identity to a wild-type site-directed polypeptide (e.g., Cas9 from S. pyogenes, supra) over 10 contiguous amino acids.

[0075] The site-directed polypeptide can comprise at most: 70, 75, 80, 85, 90, 95, 97, 99, or 100% identity to a wild-type site-directed polypeptide (e.g., Cas9 from S. pyogenes, supra) over 10 contiguous amino acids. The site-directed polypeptide can comprise at least: 70, 75, 80, 85, 90, 95, 97, 99, or 100% identity to a wild-type site-directed polypeptide (e.g., Cas9 from S. pyogenes, supra) over 10 contiguous amino acids in a HNH nuclease domain of the site-directed polypeptide. The site-directed polypeptide can comprise at most: 70, 75, 80, 85, 90, 95, 97, 99, or 100% identity to a wild-type site-directed polypeptide (e.g., Cas9 from S. pyogenes, supra) over 10 contiguous amino acids in a HNH nuclease domain of the site-directed polypeptide. The site-directed polypeptide can comprise at least: 70, 75, 80, 85, 90, 95, 97, 99, or 100% identity to a wild-type site-directed polypeptide (e.g., Cas9 from S. pyogenes, supra) over 10 contiguous amino acids in a RuvC nuclease domain of the site-directed polypeptide. The site-directed polypeptide can comprise at most: 70, 75, 80, 85, 90, 95, 97, 99, or 100% identity to a wild-type site-directed polypeptide (e.g., Cas9 from S. pyogenes, supra) over 10 contiguous amino acids in a RuvC nuclease domain of the site-directed polypeptide.

[0076] The site-directed polypeptide can comprise a modified form of a wild-type exemplary site-directed polypeptide. The modified form of the wild-type exemplary site-directed polypeptide can comprise a mutation that reduces the nucleic acid-cleaving activity of the site-directed polypeptide. The modified form of the wild-type exemplary site-directed polypeptide can have less than 90%, less than 80%, less than 70%, less than 60%, less than 50%, less than 40%, less than 30%, less than 20%, less than 10%, less than 5%, or less than 1% of the nucleic acid-cleaving activity of the wild-type exemplary site-directed polypeptide (e.g., Cas9 from S. pyogenes, supra). The modified form of the site-directed polypeptide can have no substantial nucleic acid-cleaving activity. When a site-directed polypeptide is a modified form that has no substantial nucleic acid-cleaving activity, it is referred to herein as “enzymatically inactive.”

[0077] The modified form of the site-directed polypeptide can comprise a mutation such that it can induce a single-strand break (SSB) on a target nucleic acid (e.g., by cutting only one of the sugar-phosphate backbones of a double-strand target nucleic acid). In some aspects, the mutation can result in less than 90%, less than 80%, less than 70%, less than 60%, less than 50%, less than 40%, less than 30%, less than 20%, less than 10%, less than 5%, or less than 1% of the nucleic acid-cleaving activity in one or more of the plurality of nucleic acid-cleaving caving domains of the wild-type site directed polypeptide (e.g., Cas9 from S. pyogenes, supra). In some aspects, the mutation can result in one or more of the plurality of nucleic acid-cleaving domains retaining the ability to cleave the complementary strand of the target nucleic acid, but reducing its ability to cleave the non-complementary strand of the target nucleic acid. The mutation can result in one or more of the plurality of nucleic acid-cleaving domains retaining the ability to cleave the non-complementary strand of the target nucleic acid, but reducing its ability to cleave the complementary strand of the target nucleic acid. For example, residues in the wild-type exemplary S. pyogenes Cas9 polypeptide, such as Asp10, His840, Asn854 and Asn856, are mutated to inactivate one or more of the plurality of nucleic acid-cleaving domains (e.g., nuclease domains). The residues to be mutated can correspond to residues Asp10, His840, Asn854 and Asn856 in the wild-type exemplary S. pyogenes Cas9 polypeptide (e.g., as determined by sequence and/or structural alignment). Non-limiting examples of mutations include D10A, H840A, N854A or N856A. One skilled in the art will recognize that mutations other than alanine substitutions can be suitable.

[0078] In some aspects, a D10A mutation can be combined with one or more of H840A, N854A, or N856A mutations to produce a site-directed polypeptide substantially lacking DNA cleavage activity. A H840A mutation can be combined with one or more of D10A, N854A, or N856A mutations to produce a site-directed polypeptide substantially lacking DNA cleavage activity. A N854A mutation can be combined with one or more of H840A, D10A, or N856A mutations to produce a site-directed polypeptide substantially lacking DNA cleavage activity. A N856A mutation can be combined with one or more of H840A, N854A, or D10A mutations to produce a site-directed polypeptide substantially lacking DNA cleavage activity. Site-directed polypeptides that comprise one substantially inactive nuclease domain are referred to as “nickases.”

[0079] Nickase variants of RNA-guided endonucleases, for example Cas9, can be used to increase the specificity of CRISPR-mediated genome editing. Wild type Cas9 is typically guided by a single guide RNA designed to hybridize with a specified ˜20 nucleotide sequence in the target sequence (such as an endogenous genomic locus). However, several mismatches can be tolerated between the guide RNA and the target locus, effectively reducing the length of required homology in the target site to, for example, as little as 13 nt of homology, and thereby resulting in elevated potential for binding and double-strand nucleic acid cleavage by the CRISPR/Cas9 complex elsewhere in the target genome also known as off-target cleavage. Because nickase variants of Cas9 each only cut one strand, in order to create a double-strand break it is necessary for a pair of nickases to bind in close proximity and on opposite strands of the target nucleic acid, thereby creating a pair of nicks, which is the equivalent of a double-strand break. This requires that two separate guide RNAs—one for each nickase—must bind in close proximity and on opposite strands of the target nucleic acid. This requirement essentially doubles the minimum length of homology needed for the double-strand break to occur, thereby reducing the likelihood that a double-strand cleavage event will occur elsewhere in the genome, where the two guide RNA sites—if they exist—are unlikely to be sufficiently close to each other to enable the double-strand break to form. As described in the art, nickases can also be used to promote HDR versus NHEJ. HDR can be used to introduce selected changes into target sites in the genome through the use of specific donor sequences that effectively mediate the desired changes. Descriptions of various CRISPR/Cas systems for use in gene editing can be found, e.g., in international patent application publication number WO2013/176772, and in Nature Biotechnology 32, 347-355 (2014), and references cited therein.

[0080] Mutations contemplated can include substitutions, additions, and deletions, or any combination thereof. The mutation converts the mutated amino acid to alanine. The mutation converts the mutated amino acid to another amino acid (e.g., glycine, serine, threonine, cysteine, valine, leucine, isoleucine, methionine, proline, phenylalanine, tyrosine, tryptophan, aspartic acid, glutamic acid, asparagine, glutamine, histidine, lysine, or arginine). The mutation converts the mutated amino acid to a non-natural amino acid (e.g., selenomethionine). The mutation converts the mutated amino acid to amino acid mimics (e.g., phosphomimics). The mutation can be a conservative mutation. For example, the mutation converts the mutated amino acid to amino acids that resemble the size, shape, charge, polarity, conformation, and/or rotamers of the mutated amino acids (e.g., cysteine/serine mutation, lysine/asparagine mutation, histidine/phenylalanine mutation). The mutation can cause a shift in reading frame and/or the creation of a premature stop codon. Mutations can cause changes to regulatory regions of genes or loci that affect expression of one or more genes.

[0081] The site-directed polypeptide (e.g., variant, mutated, enzymatically inactive and/or conditionally enzymatically inactive site-directed polypeptide) can target nucleic acid. The site-directed polypeptide (e.g., variant, mutated, enzymatically inactive and/or conditionally enzymatically inactive endoribonuclease) can target DNA. The site-directed polypeptide (e.g., variant, mutated, enzymatically inactive and/or conditionally enzymatically inactive endoribonuclease) can target RNA.

[0082] The site-directed polypeptide can comprise one or more non-native sequences (e.g., the site-directed polypeptide is a fusion protein).

[0083] The site-directed polypeptide can comprise an amino acid sequence comprising at least 15% amino acid identity to a Cas9 from a bacterium (e.g., S. pyogenes), a nucleic acid binding domain, and two nucleic acid cleaving domains (i.e., a HNH domain and a RuvC domain).

[0084] The site-directed polypeptide can comprise an amino acid sequence comprising at least 15% amino acid identity to a Cas9 from a bacterium (e.g., S. pyogenes), and two nucleic acid cleaving domains (i.e., a HNH domain and a RuvC domain).

[0085] The site-directed polypeptide can comprise an amino acid sequence comprising at least 15% amino acid identity to a Cas9 from a bacterium (e.g., S. pyogenes), and two nucleic acid cleaving domains, wherein one or both of the nucleic acid cleaving domains comprise at least 50% amino acid identity to a nuclease domain from Cas9 from a bacterium (e.g., S. pyogenes).

[0086] The site-directed polypeptide can comprise an amino acid sequence comprising at least 15% amino acid identity to a Cas9 from a bacterium (e.g., S. pyogenes), two nucleic acid cleaving domains (i.e., a HNH domain and a RuvC domain), and non-native sequence (for example, a nuclear localization signal) or a linker linking the site-directed polypeptide to a non-native sequence.

[0087] The site-directed polypeptide can comprise an amino acid sequence comprising at least 15% amino acid identity to a Cas9 from a bacterium (e.g., S. pyogenes), two nucleic acid cleaving domains (i.e., a HNH domain and a RuvC domain), wherein the site-directed polypeptide comprises a mutation in one or both of the nucleic acid cleaving domains that reduces the cleaving activity of the nuclease domains by at least 50%.

[0088] The site-directed polypeptide can comprise an amino acid sequence comprising at least 15% amino acid identity to a Cas9 from a bacterium (e.g., S. pyogenes), and two nucleic acid cleaving domains (i.e., a HNH domain and a RuvC domain), wherein one of the nuclease domains comprises mutation of aspartic acid 10, and/or wherein one of the nuclease domains can comprise a mutation of histidine 840, and wherein the mutation reduces the cleaving activity of the nuclease domain(s) by at least 50%.

[0089] The one or more site-directed polypeptides, e.g. DNA endonucleases, can comprise two nickases that together effect one double-strand break at a specific locus in the genome, or four nickases that together effect or cause two double-strand breaks at specific loci in the genome. Alternatively, one site-directed polypeptide, e.g. DNA endonuclease, can effect or cause one double-strand break at a specific locus in the genome.

[0090] Non-limiting examples of Cas9 orthologs from other bacterial strains include but are not limited to, Cas proteins identified in Acaryochloris marina MBIC11017; Acetohalobium arabaticum DSM 5501; Acidithiobacillus caldus; Acidithiobacillus ferrooxidans ATCC 23270; Alicyclobacillus acidocaldarius LAA1; Alicyclohacillus acidocaldarius subsp. acidocaldarius DSM 446; Allochromatium vinosum DSM 180; Ammonifex degensii KC4; Anabaena variabilis ATCC 29413; Arthrospira maxima CS-328; Arthrospira platensis str. Paraca; Arihrospira sp. PCC 8005; Bacillus pseudomycoides DSM 12442; Bacillus selenitireducens MLS10; Burkholderiales bacterium 1_1_47; Caldicelulosiruptor becscii DSM 6725; Candidatus Desulfbrudis audaxviator MP104C; Caldicellulosiruptor hydrothermalis_108; Clostridium phage c-st; Clostridium botulinum A3 sir. Loch Maree; Clostridium botulinum Ba4 str. 657; Clostridium difficile QCD-63q42; Crocosphaera watsonii WH 8501; Cyanothece sp. ATCC 51142; Cyanothece sp. CCY0110; Cyanothece sp. PCC 7424; Cyanothece sp. PCC 7822; Exiguobacterium sibiricum 255-15; Finegoldia magna ATCC 29328; Ktedonobacter racemifer DSM 44963; Lactobacillus delbrueckii subsp. bulgaricus PB2003/044-T3-4; Lactobacillus salivarius ATCC 11741; Listeria innocua; Lyngbya p. PCC 8106; Marinobacter sp. ELB17; Methanohalobium evestigatum Z-7303; Microcystis phage Ma-LMM01; Microcystis aeruginosa NIES-843; Microscilla marina ATCC 23134; Microcoleus chthonoplastes PCC 7420; Neisseria meningitidis; Aritrosococcus halophilus Nc4; Nocardiopsis dassonvillei subsp. dassonvillei DSM 43111; Nodularia spumigena CCY9414; Nostoc sp. PCC 7120; Oscillatoria sp. PCC 6506; Pelotomaculum_thermopropionicum_SI; Petrotoga mobifis SJ95; Polaromonas naphthalenivorans CJ2; Polaromonas sp. JS666; Pseudoalteromonas haloplanktis TAC125; Streptomyces pristinaespiralis ATCC 25486; Streptomyces pristinaespiralis ATCC 25486; Streptococcus thermophiles; Streptomyces viridochromogenes DSM 40736; Streptosporangium roseum DSM 43021; Synechococcus sp. PCC 7335; and Thermosipho africanus TCF52B (Chylinski et al., RNA Biol., 2013; 10(5): 726-737).

[0091] In addition to Cas9 orthologs, other Cas9 variants such as fusion proteins of inactive dCas9 and effector domains with different functions may be served as a platform for genetic modulation. Any of the foregoing enzymes may be useful in the present disclosure.

[0092] Further examples of endonucleases which may be utilized in the present invention are given in SEQ ID NOs: 1-620. These proteins may be modified before use or may be encoded in a nucleic acid sequence such as a DNA, RNA or mRNA or within a vector construct such as the plasmids or AAV vectors taught herein. Further, they may be codon optimized.

[0093] SEQ ID NOs: 1-620 disclose a non-exhaustive list of endonucleases sequences.

### Genome-Targeting Nucleic Acid

[0094] The present disclosure provides a genome-targeting nucleic acid that can direct the activities of an associated polypeptide (e.g., a site-directed polypeptide) to a specific target sequence within a target nucleic acid. The genome-targeting nucleic acid can be an RNA. A genome-targeting RNA is referred to as a “guide RNA” or “gRNA” herein. A guide RNA can comprise at least a spacer sequence that hybridizes to a target nucleic acid sequence of interest, and a CRISPR repeat sequence. In Type II systems, the gRNA also comprises a second RNA called the tracrRNA sequence. In the Type II guide RNA (gRNA), the CRISPR repeat sequence and tracrRNA sequence hybridize to each other to form a duplex. In the Type V guide RNA (gRNA), the crRNA forms a duplex. In both systems, the duplex can bind a site-directed polypeptide, such that the guide RNA and site-direct polypeptide form a complex. The genome-targeting nucleic acid can provide target specificity to the complex by virtue of its association with the site-directed polypeptide. The genome-targeting nucleic acid thus can direct the activity of the site-directed polypeptide.

[0095] Exemplary guide RNAs include the spacer sequences 15-200 bases wherein the genome location is based on the GRCh38 human genome assembly. Exemplary guide RNAs include the spacer sequences based on the RNA version of the DNA sequences presented in SEQ ID NOs: 5,305-28,696. As is understood by the person of ordinary skill in the art, each guide RNA can be designed to include a spacer sequence complementary to its genomic target sequence. For example, each of the spacer sequences, e.g., the RNA version of the DNA sequences presented in SEQ ID NOs: 5,305-28,696, can be put into a single RNA chimera or a crRNA (along with a corresponding tracrRNA). See Jinek et al., Science, 337, 816-821 (2012) and Deltcheva et al., Nature, 471, 602-607 (2011).

[0096] The genome-targeting nucleic acid can be a double-molecule guide RNA. The genome-targeting nucleic acid can be a single-molecule guide RNA.

[0097] A double-molecule guide RNA can comprise two strands of RNA. The first strand comprises in the 5′ to 3′ direction, an optional spacer extension sequence, a spacer sequence and a minimum CRISPR repeat sequence. The second strand can comprise a minimum tracrRNA sequence(complementary to the minimum CRISPR repeat sequence), a 3′ tracrRNA sequence and an optional tracrRNA extension sequence.

[0098] A single-molecule guide RNA (sgRNA) in a Type II system can comprise, in the 5′ to 3′ direction, an optional spacer extension sequence, a spacer sequence, a minimum CRISPR repeat sequence, a single-molecule guide linker, a minimum tracrRNA sequence, a 3′ tracrRNA sequence and an optional tracrRNA extension sequence. The optional tracrRNA extension can comprise elements that contribute additional functionality (e.g., stability) to the guide RNA. The single-molecule guide linker can link the minimum CRISPR repeat and the minimum tracrRNA sequence to form a hairpin structure. The optional tracrRNA extension can comprise one or more hairpins.

[0099] The sgRNA can comprise a 20 nucleotide spacer sequence at the 5′ end of the sgRNA sequence. The sgRNA can comprise a less than a 20 nucleotide spacer sequence at the 5′ end of the sgRNA sequence. The sgRNA can comprise a more than 20 nucleotide spacer sequence at the 5′ end of the sgRNA sequence. The sgRNA can comprise a variable length spacer sequence with 17-30 nucleotides at the 5′ end of the sgRNA sequence (see Table I).

[0100] The sgRNA can comprise no uracil at the 3′end of the sgRNA sequence, such as in SEQ ID NO: 28,729 of Table 1. The sgRNA can comprise one or more uracil at the 3′end of the sgRNA sequence, such as in SEQ ID NO: 28,730 in Table 1. For example, the sgRNA can comprise 1 uracil (U) at the 3′ end of the sgRNA sequence. The sgRNA can comprise 2 uracil (UU) at the 3′ end of the sgRNA sequence. The sgRNA can comprise 3 uracil (UUU) at the 3′ end of the sgRNA sequence. The sgRNA can comprise 4 uracil (UUUU) at the 3′ end of the sgRNA sequence. The sgRNA can comprise 5 uracil (UUUUU) at the 3′ end of the sgRNA sequence. The sgRNA can comprise 6 uracil (UUUUUU) at the 3′ end of the sgRNA sequence. The sgRNA can comprise 7 uracil (UUUUUUU) at the 3′ end of the sgRNA sequence. The sgRNA can comprise 8 uracil (UUUUUUUU) at the 3′ end of the sgRNA sequence.

[0101] The sgRNA can be unmodified or modified. For example, modified sgRNAs can comprise one or more 2′-O-methyl phosphorothioate nucleotides.

TABLE 1

| SEQ ID NO. | sgRNA sequence |
|---|---|
| 28,728 | nnnnnnnnnnnnnnnnnnnnguuuuagagcuagaaauag |
| | caaguuaaaauaaggcuaguccguuaucaacuugaaaaa |
| | guggcaccgagucggugcuuuu |
| 28,729 | nnnnnnnnnnnnnnnnnnnnguuuuagagcuagaaauag |
| | caaguuaaaauaaggcuaguccguuaucaacuugaaaaa |
| | guggcaccgagucggugc |
| 28,730 | n₍₁₇₋₃₀₎guuuuagagcuagaaauagcaaguuaaaauaag |
| | gcuaguccguuaucaacuugaaaaaguggcaccgagucg |
| | gugcu₍₁₋₈₎ |

[0102] A single-molecule guide RNA (sgRNA) in a Type V system can comprise, in the 5′ to 3′ direction, a minimum CRISPR repeat sequence and a spacer sequence.

[0103] By way of illustration, guide RNAs used in the CRISPR/Cas9 or CRISPR/Cpf1 system, or other smaller RNAs can be readily synthesized by chemical means, as illustrated below and described in the art. While chemical synthetic procedures are continually expanding, purifications of such RNAs by procedures such as high performance liquid chromatography (HPLC, which avoids the use of gels such as PAGE) tends to become more challenging as polynucleotide lengths increase significantly beyond a hundred or so nucleotides. One approach used for generating RNAs of greater length is to produce two or more molecules that are ligated together. Much longer RNAs, such as those encoding a Cas9 or Cpf1 endonuclease, are more readily generated enzymatically. Various types of RNA modifications can be introduced during or after chemical synthesis and/or enzymatic generation of RNAs, e.g., modifications that enhance stability, reduce the likelihood or degree of innate immune response, and/or enhance other attributes, as described in the art.

### Spacer Extension Sequence

[0104] In some examples of genome-targeting nucleic acids, a spacer extension sequence can modify activity, provide stability and/or provide a location for modifications of a genome-targeting nucleic acid. A spacer extension sequence can modify on- or off-target activity or specificity. In some examples, a spacer extension sequence can be provided. The spacer extension sequence can have a length of more than 1, 5, 10, 15, 20, 25, 30, 35, 40, 45, 50, 60, 70, 80, 90, 100, 120, 140, 160, 180, 200, 220, 240, 260, 280, 300, 320, 340, 360, 380, 400, 1000, 2000, 3000, 4000, 5000, 6000, or 7000 or more nucleotides. The spacer extension sequence can have a length of less than 1, 5, 10, 15, 20, 25, 30, 35, 40, 45, 50, 60, 70, 80, 90, 100, 120, 140, 160, 180, 200, 220, 240, 260, 280, 300, 320, 340, 360, 380, 400, 1000, 2000, 3000, 4000, 5000, 6000, 7000 or more nucleotides. The spacer extension sequence can be less than 10 nucleotides in length. The spacer extension sequence can be between 10-30 nucleotides in length. The spacer extension sequence can be between 30-70 nucleotides in length.

[0105] The spacer extension sequence can comprise another moiety (e.g., a stability control sequence, an endoribonuclease binding sequence, a ribozyme). The moiety can decrease or increase the stability of a nucleic acid targeting nucleic acid. The moiety can be a transcriptional terminator segment (i.e., a transcription termination sequence). The moiety can function in a eukaryotic cell. The moiety can function in a prokaryotic cell. The moiety can function in both eukaryotic and prokaryotic cells. Non-limiting examples of suitable moieties include: a 5′ cap (e.g., a 7-methylguanylate cap (m7 G)), a riboswitch sequence (e.g., to allow for regulated stability and/or regulated accessibility by proteins and protein complexes), a sequence that forms a dsRNA duplex (i.e., a hairpin), a sequence that targets the RNA to a subcellular location (e.g., nucleus, mitochondria, chloroplasts, and the like), a modification or sequence that provides for tracking (e.g., direct conjugation to a fluorescent molecule, conjugation to a moiety that facilitates fluorescent detection, a sequence that allows for fluorescent detection, etc.), and/or a modification or sequence that provides a binding site for proteins (e.g., proteins that act on DNA, including transcriptional activators, transcriptional repressors, DNA methyltransferases, DNA demethylases, histone acetyltransferases, histone deacetylases, and the like).

### Spacer Sequence

[0106] The spacer sequence hybridizes to a sequence in a target nucleic acid of interest. The spacer of a genome-targeting nucleic acid can interact with a target nucleic acid in a sequence-specific manner via hybridization (i.e., base pairing). The nucleotide sequence of the spacer can vary depending on the sequence of the target nucleic acid of interest.

[0107] In a CRISPR/Cas system herein, the spacer sequence can be designed to hybridize to a target nucleic acid that is located 5′ of a PAM of the Cas9 enzyme used in the system. The spacer may perfectly match the target sequence or may have mismatches. Each Cas9 enzyme has a particular PAM sequence that it recognizes in a target DNA. For example, S. pyogenes recognizes in a target nucleic acid a PAM that comprises the sequence 5′-NRG-3′, where R comprises either A or G, where N is any nucleotide and N is immediately 3′ of the target nucleic acid sequence targeted by the spacer sequence.

[0108] The target nucleic acid sequence can comprise 20 nucleotides. The target nucleic acid can comprise less than 20 nucleotides. The target nucleic acid can comprise more than 20 nucleotides. The target nucleic acid can comprise at least: 5, 10, 15, 16, 17, 18, 19, 20, 21, 22, 24, 25, 30 or more nucleotides. The target nucleic acid can comprise at most: 5, 10, 15, 16, 17, 18, 19, 20, 21, 22, 23, 24, 25, 30 or more nucleotides. The target nucleic acid sequence can comprise 20 bases immediately 5′ of the first nucleotide of the PAM. For example, in a sequence comprising 5′-NNNNNNNNNNNNNNNNNNNNNRG-3′ (SEQ ID NO: 28727), the target nucleic acid can comprise the sequence that corresponds to the Ns, wherein N is any nucleotide, and the underlined NRG sequence is the S. pyogenes PAM. This target nucleic acid sequence is often referred to as the PAM strand, and the complementary nucleic acid sequence is often referred to the non-PAM strand. One of skill in the art would recognize that the spacer sequence hybridizes to the non-PAM strand of the target nucleic acid (FIGS. 1A and 1B).

[0109] The spacer sequence that hybridizes to the target nucleic acid can have a length of at least about 6 nucleotides (nt). The spacer sequence can be at least about 6 nt, at least about 10 nt, at least about 15 nt, at least about 18 nt, at least about 19 nt, at least about 20 nt, at least about 25 nt, at least about 30 nt, at least about 35 nt or at least about 40 nt, from about 6 nt to about 80 nt, from about 6 nt to about 50 nt, from about 6 nt to about 45 nt, from about 6 nt to about 40 nt, from about 6 nt to about 35 nt, from about 6 nt to about 30 nt, from about 6 nt to about 25 nt, from about 6 nt to about 20 nt, from about 6 nt to about 19 nt, from about 10 nt to about 50 nt, from about 10 nt to about 45 nt, from about 10 nt to about 40 nt, from about 10 nt to about 35 nt, from about 10 nt to about 30 nt, from about 10 nt to about 25 nt, from about 10 nt to about 20 nt, from about 10 nt to about 19 nt, from about 19 nt to about 25 nt, from about 19 nt to about 30 nt, from about 19 nt to about 35 nt, from about 19 nt to about 40 nt, from about 19 nt to about 45 nt, from about 19 nt to about 50 nt, from about 19 nt to about 60 nt, from about 20 nt to about 25 nt, from about 20 nt to about 30 nt, from about 20 nt to about 35 nt, from about 20 nt to about 40 nt, from about 20 nt to about 45 nt, from about 20 nt to about 50 nt, or from about 20 nt to about 60 nt. In some examples, the spacer sequence can comprise 20 nucleotides. In some examples, the spacer can comprise 19 nucleotides. In some examples, the spacer can comprise 18 nucleotides. In some examples, the spacer can comprise 22 nucleotides.

[0110] In some examples, the percent complementarity between the spacer sequence and the target nucleic acid is at least about 30%, at least about 40%, at least about 50%, at least about 60%, at least about 65%, at least about 70%, at least about 75%, at least about 80%, at least about 85%, at least about 90%, at least about 95%, at least about 97%, at least about 98%, at least about 99%, or 100%. In some examples, the percent complementarity between the spacer sequence and the target nucleic acid is at most about 30%, at most about 40%, at most about 50%, at most about 60%, at most about 65%, at most about 70%, at most about 75%, at most about 80%, at most about 85%, at most about 90%, at most about 95%, at most about 97%, at most about 98%, at most about 99%, or 100%. In some examples, the percent complementarity between the spacer sequence and the target nucleic acid is 100% over the six contiguous 5′-most nucleotides of the target sequence of the complementary strand of the target nucleic acid. The percent complementarily between the spacer sequence and the target nucleic acid can be at least 60% over about 20 contiguous nucleotides. The length of the spacer sequence and the target nucleic acid can differ by 1 to 6 nucleotides, which may be thought of as a bulge or bulges.

[0111] The spacer sequence can be designed or chosen using a computer program. The computer program can use variables, such as predicted melting temperature, secondary structure formation, predicted annealing temperature, sequence identity, genomic context, chromatin accessibility, % GC, frequency of genomic occurrence (e.g., of sequences that are identical or are similar but vary in one or more spots as a result of mismatch, insertion or deletion), methylation status, presence of SNPs, and the like.

### Minimum CRISPR Repeat Sequence

[0112] In some aspects, a minimum CRISPR repeat sequence is a sequence with at least about 30%, about 40%, about 50%, about 60%, about 65%, about 70%, about 75%, about 80%, about 85%, about 90%, about 95%, or 100% sequence identity to a reference CRISPR repeat sequence (e.g., crRNA from S. pyogenes).

[0113] In some aspects, a minimum CRISPR repeat sequence comprises nucleotides that can hybridize to a minimum tracrRNA sequence in a cell. The minimum CRISPR repeat sequence and a minimum tracrRNA sequence can form a duplex, i.e. a base-paired double-stranded structure. Together, the minimum CRISPR repeat sequence and the minimum tracrRNA sequence can bind to the site-directed polypeptide. At least a part of the minimum CRISPR repeat sequence can hybridize to the minimum tracrRNA sequence. In some aspects, at least a part of the minimum CRISPR repeat sequence comprises at least about 30%, about 40%, about 50%, about 60%, about 65%, about 70%, about 75%, about 80%, about 85%, about 90%, about 95%, or 100% complementary to the minimum tracrRNA sequence. At least a part of the minimum CRISPR repeat sequence can comprise at most about 30%, about 40%, about 50%, about 60%, about 65%, about 70%, about 75%, about 80%, about 85%, about 90%, about 95%, or 100% complementary to the minimum tracrRNA sequence.

[0114] The minimum CRISPR repeat sequence can have a length from about 7 nucleotides to about 100 nucleotides. For example, the length of the minimum CRISPR repeat sequence is from about 7 nucleotides (nt) to about 50 nt, from about 7 nt to about 40 nt, from about 7 nt to about 30 nt, from about 7 nt to about 25 nt, from about 7 nt to about 20 nt, from about 7 nt to about 15 nt, from about 8 nt to about 40 nt, from about 8 nt to about 30 nt, from about 8 nt to about 25 nt, from about 8 nt to about 20 nt, from about 8 nt to about 15 nt, from about 15 nt to about 100 nt, from about 15 nt to about 80 nt, from about 15 nt to about 50 nt, from about 15 nt to about 40 nt, from about 15 nt to about 30 nt, or from about 15 nt to about 25 nt. In some aspects, the minimum CRISPR repeat sequence is approximately 9 nucleotides in length. In some aspects, the minimum CRISPR repeat sequence is approximately 12 nucleotides in length.

[0115] The minimum CRISPR repeat sequence can be at least about 60% identical to a reference minimum CRISPR repeat sequence (e.g., wild-type crRNA from S. pyogenes) over a stretch of at least 6, 7, or 8 contiguous nucleotides. For example, the minimum CRISPR repeat sequence can be at least about 65% identical, at least about 70% identical, at least about 75% identical, at least about 80% identical, at least about 85% identical, at least about 90% identical, at least about 95% identical, at least about 98% identical, at least about 99% identical or 100% identical to a reference minimum CRISPR repeat sequence over a stretch of at least 6, 7, or 8 contiguous nucleotides.

Minimum tracrRNA Sequence

[0116] A minimum tracrRNA sequence can be a sequence with at least about 30%, about 40%, about 50%, about 60%, about 65%, about 70%, about 75%, about 80%, about 85%, about 90%, about 95%, or 100% sequence identity to a reference tracrRNA sequence (e.g., wild type tracrRNA from S. pyogenes).

[0117] A minimum tracrRNA sequence can comprise nucleotides that hybridize to a minimum CRISPR repeat sequence in a cell. A minimum tracrRNA sequence and a minimum CRISPR repeat sequence form a duplex, i.e. a base-paired double-stranded structure. Together, the minimum tracrRNA sequence and the minimum CRISPR repeat can bind to a site-directed polypeptide. At least a part of the minimum tracrRNA sequence can hybridize to the minimum CRISPR repeat sequence. The minimum tracrRNA sequence can be at least about 30%, about 40%, about 50%, about 60%, about 65%, about 70%, about 75%, about 80%, about 85%, about 90%, about 95%, or 100% complementary to the minimum CRISPR repeat sequence.

[0118] The minimum tracrRNA sequence can have a length from about 7 nucleotides to about 100 nucleotides. For example, the minimum tracrRNA sequence can be from about 7 nucleotides (nt) to about 50 nt, from about 7 nt to about 40 nt, from about 7 nt to about 30 nt, from about 7 nt to about 25 nt, from about 7 nt to about 20 nt, from about 7 nt to about 15 nt, from about 8 nt to about 40 nt, from about 8 nt to about 30 nt, from about 8 nt to about 25 nt, from about 8 nt to about 20 nt, from about 8 nt to about 15 nt, from about 15 nt to about 100 nt, from about 15 nt to about 80 nt, from about 15 nt to about 50 nt, from about 15 nt to about 40 nt, from about 15 nt to about 30 nt or from about 15 nt to about 25 nt long. The minimum tracrRNA sequence can be approximately 9 nucleotides in length. The minimum tracrRNA sequence can be approximately 12 nucleotides. The minimum tracrRNA can consist of tracrRNA nt 23-48 described in Jinek et al. supra,

[0119] The minimum tracrRNA sequence can be at least about 60% identical to a reference minimum tracrRNA (e.g., wild type, tracrRNA from S. pyogenes) sequence over a stretch of at least 6, 7, or 8 contiguous nucleotides. For example, the minimum tracrRNA sequence can be at least about 65% identical, about 70% identical, about 75% identical, about 80% identical, about 85% identical, about 90% identical, about 95% identical, about 98% identical, about 99% identical or 100% identical to a reference minimum tracrRNA sequence over a stretch of at least 6, 7, or 8 contiguous nucleotides.

[0120] The duplex between the minimum CRISPR RNA and the minimum tracrRNA can comprise a double helix. The duplex between the minimum CRISPR RNA and the minimum tracrRNA can comprise at least about 1, 2, 4, 5, 6, 7, 8, 9, or 10 or more nucleotides. The duplex between the minimum CRISPR RNA and the minimum tracrRNA can comprise at most about 1, 2, 3, 4, 5, 6, 7, 8, 9, or 10 or more nucleotides.

[0121] The duplex can comprise a mismatch (i.e., the two strands of the duplex are not 100% complementary). The duplex can comprise at least about 1, 2, 3, 4, or 5 or mismatches. The duplex can comprise at most about 1, 2, 3, 4, or 5 or mismatches. The duplex can comprise no more than 2 mismatches.

### Bulges

[0122] In some cases, there can be a “bulge” in the duplex between the minimum CRISPR RNA and the minimum tracrRNA. A bulge is an unpaired region of nucleotides within the duplex. A bulge can contribute to the binding of the duplex to the site-directed polypeptide. The bulge can comprise, on one side of the duplex, an unpaired 5′-XXXY-3′ (SEQ ID NO: 28,731) where X is any purine and Y comprises a nucleotide that can form a wobble pair with a nucleotide on the opposite strand, and an unpaired nucleotide region on the other side of the duplex. The number of unpaired nucleotides on the two sides of the duplex can be different.

[0123] In one example, the bulge can comprise an unpaired purine (e.g., adenine) on the minimum CRISPR repeat strand of the bulge. In some examples, the bulge can comprise an unpaired 5′-AAGY-3′ of the minimum tracrRNA sequence strand of the bulge, where Y comprises a nucleotide that can form a wobble pairing with a nucleotide on the minimum CRISPR repeat strand.

[0124] A bulge on the minimum CRISPR repeat side of the duplex can comprise at least 1, 2, 3, 4, or 5 or more unpaired nucleotides. A bulge on the minimum CRISPR repeat side of the duplex can comprise at most 1, 2, 3, 4, or 5 or more unpaired nucleotides. A bulge on the minimum CRISPR repeat side of the duplex can comprise 1 unpaired nucleotide.

[0125] A bulge on the minimum tracrRNA sequence side of the duplex can comprise at least 1, 2, 3, 4, 5, 6, 7, 8, 9, or 10 or more unpaired nucleotides. A bulge on the minimum tracrRNA sequence side of the duplex can comprise at most 1, 2, 3, 4, 5, 6, 7, 8, 9, or 10 or more unpaired nucleotides. A bulge on a second side of the duplex (e.g., the minimum tracrRNA sequence side of the duplex) can comprise 4 unpaired nucleotides.

[0126] A bulge can comprise at least one wobble pairing. In some examples, a bulge can comprise at most one wobble pairing. A bulge can comprise at least one purine nucleotide. A bulge can comprise at least 3 purine nucleotides. A bulge sequence can comprise at least 5 purine nucleotides. A bulge sequence can comprise at least one guanine nucleotide. In some examples, a bulge sequence can comprise at least one adenine nucleotide.

### Hairpins

[0127] In various examples, one or more hairpins can be located 3′ to the minimum tracrRNA in the 3′ tracrRNA sequence.

[0128] The hairpin can start at least about 1, 2, 3, 4, 5, 6, 7, 8, 9, 10, 15, or 20 or more nucleotides 3′ from the last paired nucleotide in the minimum CRISPR repeat and minimum tracrRNA sequence duplex. The hairpin can start at most about 1, 2, 3, 4, 5, 6, 7, 8, 9 or 10 or more nucleotides 3′ of the last paired nucleotide in the minimum CRISPR repeat and minimum tracrRNA sequence duplex.

[0129] The hairpin can comprise at least about 1, 2, 3, 4, 6, 7, 8, 9, 10, 15, or 20 or more consecutive nucleotides. The hairpin can comprise at most about 1, 2, 3, 4, 5, 6, 7, 8, 9, 10, 15, or more consecutive nucleotides.

[0130] The hairpin can comprise a CC dinucleotide (i.e., two consecutive cytosine nucleotides).

[0131] The hairpin can comprise duplexed nucleotides (e.g., nucleotides in a hairpin, hybridized together). For example, a hairpin can comprise a CC dinucleotide that is hybridized to a GG dinucleotide in a hairpin duplex of the 3′ tracrRNA sequence.

[0132] One or more of the hairpins can interact with guide RNA-interacting regions of a site-directed polypeptide.

[0133] In some examples, there are two or more hairpins, and in other examples there are three or more hairpins.

3′ tracrRNA Sequence

[0134] A 3′ tracrRNA sequence can comprise a sequence with at least about 30%, about 40%, about 50%, about 60%, about 65%, about 70%, about 75%, about 80%, about 85%, about 90%, about 95%, or 100% sequence identity to a reference tracrRNA sequence (e.g., a tracrRNA from S. pyogenes).

[0135] The 3′ tracrRNA sequence can have a length from about 6 nucleotides to about 100 nucleotides. For example, the 3′ tracrRNA sequence can have a length from about 6 nucleotides (nt) to about 50 nt, from about 6 nt to about 40 nt, from about 6 nt to about 30 nt, from about 6 nt to about 25 nt, from about 6 nt to about 20 nt, from about 6 nt to about 15 nt, from about 8 nt to about 40 nt, from about 8 nt to about 30 nt, from about 8 nt to about 25 nt, from about 8 nt to about 20 nt, from about 8 nt to about 15 nt, from about 15 nt to about 100 nt, from about 15 nt to about 80 nt, from about 15 nt to about 50 nt, from about 15 nt to about 40 nt, from about 15 nt to about 30 nt, or from about 15 nt to about 25 nt. The 3′ tracrRNA sequence can have a length of approximately 14 nucleotides.

[0136] The 3′ tracrRNA sequence can be at least about 60% identical to a reference 3′ tracrRNA sequence (e.g., wild type 3′ tracrRNA sequence from S. pyogenes) over a stretch of at least 6, 7, or 8 contiguous nucleotides. For example, the 3′ tracrRNA sequence can be at least about 60% identical, about 65% identical, about 70% identical, about 75% identical, about 80% identical, about 85% identical, about 90% identical, about 95% identical, about 98% identical, about 99% identical, or 100% identical, to a reference 3′ tracrRNA sequence (e.g., wild type 3′ tracrRNA sequence from S. pyogenes) over a stretch of at least 6, 7, or 8 contiguous nucleotides.

[0137] The 3′ tracrRNA sequence can comprise more than one duplexed region (e.g., hairpin, hybridized region). The 3′ tracrRNA sequence can comprise two duplexed regions.

[0138] The 3′ tracrRNA sequence can comprise a stem loop structure. The stem loop structure in the 3′ tracrRNA can comprise at least 1, 2, 3, 4, 5, 6, 7, 8, 9, 10, 15 or 20 or more nucleotides. The stem loop structure in the 3′ tracrRNA can comprise at most 1, 2, 3, 4, 5, 6, 7, 8, 9 or 10 or more nucleotides. The stem loop structure can comprise a functional moiety. For example, the stem loop structure can comprise an aptamer, a ribozyme, a protein-interacting hairpin, a CRISPR array, an intron, or an exon. The stem loop structure can comprise at least about 1, 2, 3, 4, or 5 or more functional moieties. The stem loop structure can comprise at most about 1, 2, 3, 4, or 5 or more functional moieties.

[0139] The hairpin in the 3′ tracrRNA sequence can comprise a P-domain. In some examples, the P-domain can comprise a double-stranded region in the hairpin.

tracrRNA Extension Sequence

[0140] A tracrRNA extension sequence may be provided whether the tracrRNA is in the context of single-molecule guides or double-molecule guides. The tracrRNA extension sequence can have a length from about 1 nucleotide to about 400 nucleotides. The tracrRNA extension sequence can have a length of more than 1, 5, 10, 15, 20, 25, 30, 35, 40, 45, 50, 60, 70, 80, 90, 100, 120, 140, 160, 180, 200, 220, 240, 260, 280, 300, 320, 340, 360, 380, or 400 nucleotides. The tracrRNA extension sequence can have a length from about 20 to about 5000 or more nucleotides. The tracrRNA extension sequence can have a length of more than 1000 nucleotides. The tracrRNA extension sequence can have a length of less than 1, 5, 10, 15, 20, 25, 30, 35, 40, 45, 50, 60, 70, 80, 90, 100, 120, 140, 160, 180, 200, 220, 240, 260, 280, 300, 320, 340, 360, 380, 400 or more nucleotides. The tracrRNA extension sequence can have a length of less than 1000 nucleotides. The tracrRNA extension sequence can comprise less than 10 nucleotides in length. The tracrRNA extension sequence can be 10-30 nucleotides in length. The tracrRNA extension sequence can be 30-70 nucleotides in length.

[0141] The tracrRNA extension sequence can comprise a functional moiety (e.g., a stability control sequence, ribozyme, endoribonuclease binding sequence). The functional moiety can comprise a transcriptional terminator segment (i.e., a transcription termination sequence). The functional moiety can have a total length from about 10 nucleotides (nt) to about 100 nucleotides, from about 10 nt to about 20 nt, from about 20 nt to about 30 nt, from about 30 nt to about 40 nt, from about 40 nt to about 50 nt, from about 50 nt to about 60 nt, from about 60 nt to about 70 nt, from about 70 nt to about 80 nt, from about 80 nt to about 90 nt, or from about 90 nt to about 100 nt, from about 15 nt to about 80 nt, from about 15 nt to about 50 nt, from about 15 nt to about 40 nt, from about 15 nt to about 30 nt, or from about 15 nt to about 25 nt. The functional moiety can function in a eukaryotic cell. The functional moiety can function in a prokaryotic cell. The functional moiety can function in both eukaryotic and prokaryotic cells.

[0142] Non-limiting examples of suitable tracrRNA extension functional moieties include a 3′ poly-adenylated tail, a riboswitch sequence (e.g., to allow for regulated stability and/or regulated accessibility by proteins and protein complexes), a sequence that forms a dsRNA duplex (i.e., a hairpin), a sequence that targets the RNA to a subcellular location (e.g., nucleus, mitochondria, chloroplasts, and the like), a modification or sequence that provides for tracking (e.g., direct conjugation to a fluorescent molecule, conjugation to a moiety that facilitates fluorescent detection, a sequence that allows for fluorescent detection, etc.), and/or a modification or sequence that provides a binding site for proteins (e.g., proteins that act on DNA, including transcriptional activators, transcriptional repressors, DNA methyltransferases, DNA demethylases, histone acetyltransferases, histone deacetylases, and the like). The tracrRNA extension sequence can comprise a primer binding site or a molecular index (e.g., barcode sequence). The tracrRNA extension sequence can comprise one or more affinity tags.

### Single-Molecule Guide Linker Sequence

[0143] The linker sequence of a single-molecule guide nucleic acid can have a length from about 3 nucleotides to about 100 nucleotides. In Jinek et al., supra, for example, a simple 4 nucleotide “tetraloop” (-GAAA-) was used, Science, 337(6096):816-821 (2012). An illustrative linker has a length from about 3 nucleotides (nt) to about 90 nt, from about 3 nt to about 80 nt, from about 3 nt to about 70 nt, from about 3 nt to about 60 nt, from about 3 nt to about 50 nt, from about 3 nt to about 40 nt, from about 3 nt to about 30 nt, from about 3 nt to about 20 nt, from about 3 nt to about 10 nt. For example, the linker can have a length from about 3 nt to about 5 nt, from about 5 nt to about 10 nt, from about 10 nt to about 15 nt, from about 15 nt to about 20 nt, from about 20 nt to about 25 nt, from about 25 nt to about 30 nt, from about 30 nt to about 35 nt, from about 35 nt to about 40 nt, from about 40 nt to about 50 nt, from about 50 nt to about 60 nt, from about 60 nt to about 70 nt, from about 70 nt to about 80 nt, from about 80 nt to about 90 nt, or from about 90 nt to about 100 nt. The linker of a single-molecule guide nucleic acid can be between 4 and 40 nucleotides. The linker can be at least about 100, 500, 1000, 1500, 2000, 2500, 3000, 3500, 4000, 4500, 5000, 5500, 6000, 6500, or 7000 or more nucleotides. The linker can be at most about 100, 500, 1000, 1500, 2000, 2500, 3000, 3500, 4000, 4500, 5000, 5500, 6000, 6500, or 7000 or more nucleotides.

[0144] Linkers can comprise any of a variety of sequences, although in some examples the linker will not comprise sequences that have extensive regions of homology with other portions of the guide RNA, which might cause intramolecular binding that could interfere with other functional regions of the guide. In Jinek et al., supra, a simple 4 nucleotide sequence -GAAA- was used, Science, 337(6096):816-821 (2012), but numerous other sequences, including longer sequences can likewise be used.

[0145] The linker sequence can comprise a functional moiety. For example, the linker sequence can comprise one or more features, including an aptamer, a ribozyme, a protein-interacting hairpin, a protein binding site, a CRISPR array, an intron, or an exon. The linker sequence can comprise at least about 1, 2, 3, 4, or 5 or more functional moieties. In some examples, the linker sequence can comprise at most about 1, 2, 3, 4, or 5 or more functional moieties.

### Nucleic Acid Modifications (Chemical and Structural Modifications)

[0146] In some aspects, polynucleotides introduced into cells can comprise one or more modifications that can be used individually or in combination, for example, to enhance activity, stability or specificity, alter delivery, reduce innate immune responses in host cells, or for other enhancements, as further described herein and known in the art.

[0147] In certain examples, modified polynucleotides can be used in the CRISPR/Cas9 or CRISPR/Cpf1 system, in which case the guide RNAs (either single-molecule guides or double-molecule guides) and/or a DNA or an RNA encoding a Cas9 or Cpf1 endonuclease introduced into a cell can be modified, as described and illustrated below. Such modified polynucleotides can be used in the CRISPR/Cas9 or CRISPR/Cpf1 system to edit any one or more genomic loci.

[0148] Using the CRISPR/Cas9 or CRISPR/Cpf1 system for purposes of nonlimiting illustrations of such uses, modifications of guide RNAs can be used to enhance the formation or stability of the CRISPR/Cas9 or CRISPR/Cpf1 genome editing complex comprising guide RNAs, which can be single-molecule guides or double-molecule, and a Cas9 or Cpf1 endonuclease. Modifications of guide RNAs can also or alternatively be used to enhance the initiation, stability or kinetics of interactions between the genome editing complex with the target sequence in the genome, which can be used, for example, to enhance on-target activity. Modifications of guide RNAs can also or alternatively be used to enhance specificity, e.g., the relative rates of genome editing at the on-target site as compared to effects at other (off-target) sites.

[0149] Modifications can also or alternatively be used to increase the stability of a guide RNA, e.g., by increasing its resistance to degradation by ribonucleases (RNases) present in a cell, thereby causing its half-life in the cell to be increased. Modifications enhancing guide RNA half-life can be particularly useful in aspects in which a Cas9 or Cpf1 endonuclease is introduced into the cell to be edited via an RNA that needs to be translated in order to generate endonuclease, because increasing the half-life of guide RNAs introduced at the same time as the RNA encoding the endonuclease can be used to increase the time that the guide RNAs and the encoded Cas9 or Cpf1 endonuclease co-exist in the cell.

[0150] Modifications can also or alternatively be used to decrease the likelihood or degree to which RNAs introduced into cells elicit innate immune responses. Such responses, which have been well characterized in the context of RNA interference (RNAi), including small-interfering RNAs (siRNAs), as described below and in the art, tend to be associated with reduced half-life of the RNA and/or the elicitation of cytokines or other factors associated with immune responses.

[0151] One or more types of modifications can also be made to RNAs encoding an endonuclease that are introduced into a cell, including, without limitation, modifications that enhance the stability of the RNA (such as by increasing its degradation by RNases present in the cell), modifications that enhance translation of the resulting product (i.e. the endonuclease), and/or modifications that decrease the likelihood or degree to which the RNAs introduced into cells elicit innate immune responses.

[0152] Combinations of modifications, such as the foregoing and others, can likewise be used. In the case of CRISPR/Cas9 or CRISPR/Cpf1, for example, one or more types of modifications can be made to guide RNAs (including those exemplified above), and/or one or more types of modifications can be made to RNAs encoding Cas endonuclease (including those exemplified above).

[0153] By way of illustration, guide RNAs used in the CRISPR/Cas9 or CRISPR/Cpf1 system, or other smaller RNAs can be readily synthesized by chemical means, enabling a number of modifications to be readily incorporated, as illustrated below and described in the art. While chemical synthetic procedures are continually expanding, purifications of such RNAs by procedures such as high performance liquid chromatography (HPLC, which avoids the use of gels such as PAGE) tends to become more challenging as polynucleotide lengths increase significantly beyond a hundred or so nucleotides. One approach that can be used for generating chemically-modified RNAs of greater length is to produce two or more molecules that are ligated together. Much longer RNAs, such as those encoding a Cas9 endonuclease, are more readily generated enzymatically. While fewer types of modifications are available for use in enzymatically produced RNAs, there are still modifications that can be used to, e.g., enhance stability, reduce the likelihood or degree of innate immune response, and/or enhance other attributes, as described further below and in the art; and new types of modifications are regularly being developed.

[0154] By way of illustration of various types of modifications, especially those used frequently with smaller chemically synthesized RNAs, modifications can comprise one or more nucleotides modified at the 2′ position of the sugar, in some aspects a 2′-O-alkyl, 2′-O-alkyl-O-alkyl, or 2′-fluoro-modified nucleotide. In some examples, RNA modifications include 2′-fluoro, 2′-amino or 2′-O-methyl modifications on the ribose of pyrimidines, abasic residues, or an inverted base at the 3′ end of the RNA. Such modifications are routinely incorporated into oligonucleotides and these oligonucleotides have been shown to have a higher Tm (i.e., higher target binding affinity) than 2′-deoxyoligonucleotides against a given target.

[0155] A number of nucleotide and nucleoside modifications have been shown to make the oligonucleotide into which they are incorporated more resistant to nuclease digestion than the native oligonucleotide; these modified oligos survive intact for a longer time than unmodified oligonucleotides. Specific examples of modified oligonucleotides include those comprising modified backbones, for example, phosphorothioates, phosphotriesters, methyl phosphonates, short chain alkyl or cycloalkyl intersugar linkages or short chain heteroatomic or heterocyclic intersugar linkages. Some oligonucleotides are oligonucleotides with phosphorothioate backbones and those with heteroatom backbones, particularly CH₂—NH—O—CH₂, CH,˜N(CH₃)˜O—CH₂ (known as a methylene(methylimino) or MMI backbone), CH₂—O—N (CH₃)—CH₂, CH₂—N (CH₃)—N(CH₃)—CH₂ and O—N (CH₃)—CH₂—CH₂ backbones, wherein the native phosphodiester backbone is represented as O—P—O—CH,); amide backbones [see De Mesmaeker et al., Ace. Chem. Res., 28:366-374 (1995)]; morpholino backbone structures (see Summerton and Weller, U.S. Pat. No. 5,034,506); peptide nucleic acid (PNA) backbone (wherein the phosphodiester backbone of the oligonucleotide is replaced with a polyamide backbone, the nucleotides being bound directly or indirectly to the aza nitrogen atoms of the polyamide backbone, see Nielsen et al., Science 1991, 254, 1497). Phosphorus-containing linkages include, but are not limited to, phosphorothioates, chiral phosphorothioates, phosphorodithioates, phosphotriesters, aminoalkylphosphotriesters, methyl and other alkyl phosphonates comprising 3′alkylene phosphonates and chiral phosphonates, phosphinates, phosphoramidates comprising 3′-amino phosphoramidate and aminoalkylphosphoramidates, thionophosphoramidates, thionoalkylphosphonates, thionoalkylphosphotriesters, and boranophosphates having normal 3′-5′ linkages, 2′-5′ linked analogs of these, and those having inverted polarity wherein the adjacent pairs of nucleoside units are linked 3′-5′ to 5′-3′ or 2′-5′ to 5′-2; see U.S. Pat. Nos. 3,687,808; 4,469,863; 4,476,301; 5,023,243; 5,177,196; 5,188,897; 5,264,423; 5,276,019; 5,278,302; 5,286,717; 5,321,131; 5,399,676; 5,405,939; 5,453,496; 5,455,233; 5,466,677; 5,476,925; 5,519,126; 5,536,821; 5,541,306; 5,550,111; 5,563,253; 5,571,799; 5,587,361; and 5,625,050.

[0156] Morpholino-based oligomeric compounds are described in Braasch and David Corey, Biochemistry, 41(14): 4503-4510 (2002); Genesis, Volume 30, Issue 3, (2001); Heasman, Dev. Biol., 243: 209-214 (2002); Nasevicius et al., Nat. Genet., 26:216-220 (2000); Lacerra et al., Proc. Natl. Acad. Sci., 97: 9591-9596 (2000); and U.S. Pat. No. 5,034,506, issued Jul. 23, 1991.

[0157] Cyclohexenyl nucleic acid oligonucleotide mimetics are described in Wang et al., J. Am. Chem. Soc., 122: 8595-8602 (2000).

[0158] Modified oligonucleotide backbones that do not include a phosphorus atom therein have backbones that are formed by short chain alkyl or cycloalkyl internucleoside linkages, mixed heteroatom and alkyl or cycloalkyl internucleoside linkages, or one or more short chain heteroatomic or heterocyclic internucleoside linkages. These comprise those having morpholino linkages (formed in part from the sugar portion of a nucleoside); siloxane backbones; sulfide, sulfoxide and sulfone backbones; formacetyl and thioformacetyl backbones; methylene formacetyl and thioformacetyl backbones; alkene containing backbones; sulfamate backbones; methyleneimino and methylenehydrazino backbones; sulfonate and sulfonamide backbones; amide backbones; and others having mixed N, O, S, and CH₂ component parts; see U.S. Pat. Nos. 5,034,506; 5,166,315; 5,185,444; 5,214,134; 5,216,141; 5,235,033; 5,264,562; 5,264,564; 5,405,938; 5,434,257; 5,466,677; 5,470,967; 5,489,677; 5,541,307; 5,561,225; 5,596,086; 5,602,240; 5,610,289; 5,602,240; 5,608,046; 5,610,289; 5,618,704; 5,623,070; 5,663,312; 5,633,360; 5,677,437; and 5,677,439.

[0159] One or more substituted sugar moieties can also be included, e.g., one of the following at the 2′ position: OH, SH, SCH₃; F, OCN, OCH₃ OCH₃, OCH₃ O(CH₂)n CH₃, O(CH₂)n NH₂, or O(CH₂)n CH₃, where n is from 1 to about 10; C1 to C10 lower alkyl, alkoxyalkoxy, substituted lower alkyl, alkaryl or aralkyl; Cl; Br; CN; CF₃; OCF₃; O—, S—, or N— alkyl; O—, S—, or N-alkenyl; SOCH₃, SO₂ CH₃; ONO₂; NO₂, N₃; NH₂; heterocycloalkyl; heterocycloalkaryl; aminoalkylamino; polyalkylamino; substituted silyl; an RNA cleaving group; a reporter group; an intercalator; a group for improving the pharmacokinetic properties of an oligonucleotide; or a group for improving the pharmacodynamic properties of an oligonucleotide and other substituents having similar properties. In sonic aspects, a modification includes 2′-methoxyethoxy (2′-O—CH₂CH₂OCH₃, also known as 2′-O-(2-methoxyethyl)) (Martin et al, HeIv. Chim. Acta, 1995, 78, 486). Other modifications include 2′-methoxy (2′-O—CH₃), 2′-propoxy (2′-OCH₂ CH₂CH₃) and 2′-fluoro (2′-F). Similar modifications may also be made at other positions on the oligonucleotide, particularly the 3′ position of the sugar on the 3′ terminal nucleotide and the 5′ position of 5′ terminal nucleotide. Oligonucleotides may also have sugar mimetics, such as cyclobutyls in place of the pentofuranosyl group.

[0160] In some examples, both a sugar and an internucleoside linkage, i.e., the backbone, of the nucleotide units can be replaced with novel groups. The base units can be maintained for hybridization with an appropriate nucleic acid target compound. One such oligomeric compound, an oligonucleotide mimetic that has been shown to have excellent hybridization properties, is referred to as a peptide nucleic acid (PNA). In PNA compounds, the sugar-backbone of an oligonucleotide can be replaced with an amide containing backbone, for example, an aminoethylglycine backbone. The nucleobases can be retained and bound directly or indirectly to azo nitrogen atoms of the amide portion of the backbone. Representative United States patents that teach the preparation of PNA compounds comprise, but are not limited to, U.S. Pat. Nos. 5,539,082; 5,714,331; and 5,719,262. Further teaching of PNA compounds can be found in Nielsen et al, Science, 254: 1497-1500 (1991).

[0161] Guide RNAs can also include, additionally or alternatively, nucleobase (often referred to in the art simply as “base”) modifications or substitutions. As used herein, “unmodified” or “natural” nucleobases include adenine (A), guanine (G), thymine (T), cytosine (C), and uracil (U). Modified nucleobases include nucleobases found only infrequently or transiently in natural nucleic acids, e.g., hypoxanthine, 6-methyladenine, 5-Me pyrimidines, particularly 5-methylcytosine (also referred to as 5-methyl-2′ deoxycytosine and often referred to in the art as 5-Me-C), 5-hydroxymethylcytosine (HMC), glycosyl HMC and gentobiosyl HMC, as well as synthetic nucleobases, e.g., 2-aminoadenine, 2-(methylamino)adenine, 2-(imidazolylalkyl)adenine, 2-(aminoalklyamino)adenine or other heterosubstituted alkyladenines, 2-thiouracil, 2-thiothymine, 5-bromouracil, 5-hydroxymethyluracil, 8-azaguanine, 7-deazaguanine, N6 (6-aminohexyl)adenine, and 2,6-diaminopurine. Komberg, A., DNA Replication, W. H. Freeman & Co., San Francisco, pp 75-77 (1980); Gebeyehu et al., Nucl. Acids Res. 15:4513 (1997). A “universal” base known in the art, e.g., inosine, can also be included. 5-Me-C substitutions have been shown to increase nucleic acid duplex stability by 0.6-1.2° C. (Sanghvi, Y. S., in Crooke, S. T. and Lebleu, B., eds., Antisense Research and Applications, CRC Press, Boca Raton, 1993, pp. 276-278) and are aspects of base substitutions.

[0162] Modified nucleobases can comprise other synthetic and natural nucleobases, such as 5-methylcytosine (5-me-C)_{;} 5-hydroxymethyl cytosine, xanthine, hypoxanthine, 2-aminoadenine, 6-methyl and other alkyl derivatives of adenine and guanine, 2-propyl and other alkyl derivatives of adenine and guanine, 2-thiouracil, 2-thiothymine and 2-thiocytosine, 5-halouracil and cytosine, 5-propynyl uracil and cytosine, 6-azo uracil, cytosine and thymine, 5-uracil (pseudo-uracil), 4-thiouracil, 8-halo, 8-amino, 8-thiol, 8-thioalkyl, 8-hydroxyl and other 8-substituted adenines and guanines, 5-halo particularly 5-bromo, 5-trifluoromethyl and other 5-substituted uracils and cytosines, 7-methylquanine and 7-methyladenine, 8-azaguanine and 8-azaadenine, 7-deazaguanine and 7-deazaadenine, and 3-deazaguanine and 3-deazaadenine.

[0163] Further, nucleobases can comprise those disclosed in U.S. Pat. No. 3,687,808, those disclosed in ‘The Concise Encyclopedia of Polymer Science And Engineering’, pages 858-859, Kroschwitz, J. I., ed. John Wiley & Sons, 1990, those disclosed by Englisch et al., Angewandle Chemie, International Edition’, 1991, 30, page 613, and those disclosed by Sanghvi, Y. S., Chapter 15, Antisense Research and Applications’, pages 289-302, Crooke, S. T. and Lebleu, B. ea., CRC Press, 1993. Certain of these nucleobases are particularly useful for increasing the binding affinity of the oligomeric compounds of the invention. These include 5-substituted pyrimidines, 6-azapyrimidines and N-2, N-6 and 0-6 substituted purines, comprising 2-aminopropyladenine, 5-propynyluracil and 5-propynylcytosine. 5-methylcytosine substitutions have been shown to increase nucleic acid duplex stability by 0.6-1.2° C. (Sanghvi, Y. S. Crooke, S. T. and Lebleu, B., eds, ‘Antisense Research and Applications’, CRC Press, Boca Raton, 1993, pp. 276-278) and are aspects of base substitutions, even more particularly when combined with 2′-O-methoxyethyl sugar modifications. Modified nucleobases are described in U.S. Pat. Nos. 3,687,808, as well as 4,845,205; 5,130,302; 5,134,066; 5,175,273; 5,367,066; 5,432,272; 5,457,187; 5,459,255; 5,484,908; 5,502,177; 5,525,711; 5,552,540; 5,587,469; 5,596,091; 5,614,617; 5,681,941; 5,750,692; 5,763,588; 5,830,653; 6,005,096; and US Patent Application Publication 2003/0158403.

[0164] Thus, the term “modified” refers to a non-natural sugar, phosphate, or base that is incorporated into a guide RNA, an endonuclease, or both a guide RNA and an endonuclease. It is not necessary for all positions in a given oligonucleotide to be uniformly modified, and in fact more than one of the aforementioned modifications can be incorporated in a single oligonucleotide, or even in a single nucleoside within an oligonucleotide.

[0165] The guide RNAs and/or mRNA (or DNA) encoding an endonuclease can be chemically linked to one or more moieties or conjugates that enhance the activity, cellular distribution, or cellular uptake of the oligonucleotide. Such moieties comprise, but are not limited to, lipid moieties such as a cholesterol moiety [Letsinger et al., Proc. Natl. Acad. Sci. USA, 86: 6553-6556 (1989)]; cholic acid [Manoharan et al., Bioorg. Med. Chem. Let., 4: 1053-1060 (1994)]; a thioether, e.g., hexyl-S-tritylthiol [Manoharan et al, Ann. N.Y. Acad. Sci., 660: 306-309 (1992) and Manoharan et al., Bioorg. Med. Chem. Let., 3: 2765-2770 (1993)]; a thiocholesterol [Oberhauser et al., Nucl. Acids Res., 20: 533-538 (1992)]; an aliphatic chain, e.g., dodecandiol or undecyl residues [Kabanov et al., FEBS Lett., 259: 327-330 (1990) and Svinarchuk et al., Biochimie, 75: 49-54 (1993)]; a phospholipid, e.g., di-hexadecyl-rac-glycerol or triethylammonium 1,2-di-O-hexadecyl-rac-glycero-3-H-phosphonate [Manoharan et al., Tetrahedron Lett., 36: 3651-3654 (1995) and Shea et al., Nucl. Acids Res., 18: 3777-3783 (1990)]; a polyamine or a polyethylene glycol chain [Mancharan et al., Nucleosides & Nucleotides, 14: 969-973 (1995)]; admantane acetic acid [Manoharan et al., Tetrahedron Lett., 36: 3651-3654 (1995)]; a palmityl moiety [(Mishra et al., Biochim. Biophys. Acta, 1264: 229-237 (1995)]; or an octadecylamine or hexylamino-carbonyl-t oxycholesterol moiety [Crooke et al., J. Pharmacol. Exp. Ther., 277: 923-937 (1996)]. See also U.S. Pat. Nos. 4,828,979; 4,948,882; 5,218,105; 5,525,465; 5,541,313; 5,545,730; 5,552,538; 5,578,717; 5,580,731; 5,580,731; 5,591,584; 5,109,124; 5,118,802; 5,138,045; 5,414,077; 5,486,603; 5,512,439; 5,578,718; 5,608,046; 4,587,044; 4,605,735; 4,667,025; 4,762,779; 4,789,737; 4,824,941; 4,835,263; 4,876,335; 4,904,582; 4,958,013; 5,082,830; 5,112,963; 5,214,136; 5,082,830; 5,112,963; 5,214,136; 5,245,022; 5,254,469; 5,258,506; 5,262,536; 5,272,250; 5,292,873; 5,317,098; 5,371,241, 5,391,723; 5,416,203, 5,451,463; 5,510,475; 5,512,667; 5,514,785; 5,565,552; 5,567,810; 5,574,142; 5,585,481; 5,587,371; 5,595,726; 5,597,696; 5,599,923; 5,599,928 and 5,688,941.

[0166] Sugars and other moieties can be used to target proteins and complexes comprising nucleotides, such as cationic polysomes and liposomes, to particular sites. For example, hepatic cell directed transfer can be mediated via asialoglycoprotein receptors (ASGPRs); see, e.g., Hu, et al., Protein Pept Lett. 21(10):1025-30 (2014). Other systems known in the art and regularly developed can be used to target biomolecules of use in the present case and/or complexes thereof to particular target cells of interest.

[0167] These targeting moieties or conjugates can include conjugate groups covalently bound to functional groups, such as primary or secondary hydroxyl groups. Conjugate groups of the invention include intercalators, reporter molecules, polyamines, polyamides, polyethylene glycols, polyethers, groups that enhance the pharmacodynamic properties of oligomers, and groups that enhance the pharmacokinetic properties of oligomers. Typical conjugate groups include cholesterols, lipids, phospholipids, biotin, phenazine, folate, phenanthridine, anthraquinone, acridine, fluoresceins, rhodamines, coumarins, and dyes. Groups that enhance the pharmacodynamic properties, in the context of this disclosure, include groups that improve uptake, enhance resistance to degradation, and/or strengthen sequence-specific hybridization with the target nucleic acid. Groups that enhance the pharmacokinetic properties, in the context of this invention, include groups that improve uptake, distribution, metabolism or excretion of the compounds of the present invention. Representative conjugate groups are disclosed in International Patent Application No. PCT/US92/09196, filed Oct. 23, 1992 (published as WO1993007883), and U.S. Pat. No. 6,287,860. Conjugate moieties include, but are not limited to, lipid moieties such as a cholesterol moiety, cholic acid, a thioether, e.g., hexyl-5-tritylthiol, a thiocholesterol, an aliphatic chain, e.g., dodecandiol or undecyl residues, a phospholipid, e.g., di-hexadecyl-rac-glycerol or triethylammonium 1,2-di-O-hexadecyl-rac-glycero-3-H-phosphonate, a polyamine or a polyethylene glycol chain, or adamantane acetic acid, a palmityl moiety, or an octadecylamine or hexylamino-carbonyl-oxy cholesterol moiety. See, e.g., U.S. Pat. Nos. 4,828,979; 4,948,882; 5,218,105; 5,525,465; 5,541,313; 5,545,730; 5,552,538; 5,578,717, 5,580,731; 5,580,731; 5,591,584; 5,109,124; 5,118,802; 5,138,045; 5,414,077; 5,486,603; 5,512,439; 5,578,718; 5,608,046; 4,587,044; 4,605,735; 4,667,025; 4,762,779; 4,789,737; 4,824,941; 4,835,263; 4,876,335; 4,904,582; 4,958,013; 5,082,830; 5,112,963; 5,214,136; 5,082,830; 5,112,963; 5,214,136; 5,245,022; 5,254,469; 5,258,506; 5,262,536; 5,272,250; 5,292,873; 5,317,098; 5,371,241, 5,391,723; 5,416,203, 5,451,463; 5,510,475; 5,512,667; 5,514,785; 5,565,552; 5,567,810; 5,574,142; 5,585,481; 5,587,371; 5,595,726; 5,597,696; 5,599,923; 5,599,928 and 5,688,941.

[0168] Longer polynucleotides that are less amenable to chemical synthesis and are typically produced by enzymatic synthesis can also be modified by various means. Such modifications can include, for example, the introduction of certain nucleotide analogs, the incorporation of particular sequences or other moieties at the 5′ or 3′ ends of molecules, and other modifications. By way of illustration, the mRNA encoding Cas9 is approximately 4 kb in length and can be synthesized by in vitro transcription. Modifications to the mRNA can be applied to, e.g., increase its translation or stability (such as by increasing its resistance to degradation with a cell), or to reduce the tendency of the RNA to elicit an innate immune response that is often observed in cells following introduction of exogenous RNAs, particularly longer RNAs such as that encoding Cas9.

[0169] Numerous such modifications have been described in the art, such as polyA tails, 5′ cap analogs (e.g., Anti Reverse Cap Analog (ARCA) or m7G(5′)ppp(5′)G (mCAP)), modified 5′ or 3′ untranslated regions (UTRs), use of modified bases (such as Pseudo-UTP, 2-Thio-UTP, 5-Methylcytidine-5′-Triphosphate (5-Methyl-CTP) or N6-Methyl-ATP), or treatment with phosphatase to remove 5′ terminal phosphates. These and other modifications are known in the art, and new modifications of RNAs are regularly being developed.

[0170] There are numerous commercial suppliers of modified RNAs, including for example, TriLink Biotech, AxoLabs, Bio-Synthesis Inc., Dharmacon and many others. As described by TriLink, for example, 5-Methyl-CTP can be used to impart desirable characteristics, such as increased nuclease stability, increased translation or reduced interaction of innate immune receptors with in vitro transcribed RNA. 5-Methylcytidine-5′-Triphosphate (5-Methyl-CTP), N6-Methyl-ATP, as well as Pseudo-UTP and 2-Thio-UTP, have also been shown to reduce innate immune stimulation in culture and in vivo while enhancing translation, as illustrated in publications by Kormann et al. and Warren et al. referred to below.

[0171] It has been shown that chemically modified mRNA delivered in vivo can be used to achieve improved therapeutic effects; see, e.g., Kormann et al., Nature Biotechnology 29, 154-157 (2011). Such modifications can be used, for example, to increase the stability of the RNA molecule and/or reduce its immunogenicity. Using chemical modifications such as Pseudo-U, N6-Methyl-A, 2-Thio-U and 5-Methyl-C, it was found that substituting just one quarter of the uridine and cytidine residues with 2-Thio-U and 5-Methyl-C respectively resulted in a significant decrease in toll-like receptor (TLR) mediated recognition of the mRNA in mice. By reducing the activation of the innate immune system, these modifications can be used to effectively increase the stability and longevity of the mRNA in vivo; see, e.g., Kormann et al., supra.

[0172] It has also been shown that repeated administration of synthetic messenger RNAs incorporating modifications designed to bypass innate anti-viral responses can reprogram differentiated human cells to pluripotency. See, e.g., Warren, et al., Cell Stem Cell, 7(5):618-30 (2010). Such modified mRNAs that act as primary reprogramming proteins can be an efficient means of reprogramming multiple human cell types. Such cells are referred to as induced pluripotency stem cells (iPSCs), and it was found that enzymatically synthesized RNA incorporating 5-Methyl-CTP, Pseudo-UTP and an Anti Reverse Cap Analog (ARCA) could be used to effectively evade the cell's antiviral response; see, e.g., Warren et al., supra.

[0173] Other modifications of polynucleotides described in the art include, for example, the use of polyA tails, the addition of 5′ cap analogs (such as m7G(5′)ppp(5′)G (mCAP)), modifications of 5′ or 3′ untranslated regions (UTRs), or treatment with phosphatase to remove 5′ terminal phosphates—and new approaches are regularly being developed.

[0174] A number of compositions and techniques applicable to the generation of modified RNAs for use herein have been developed in connection with the modification of RNA interference (RNAi), including small-interfering RNAs (siRNAs). siRNAs present particular challenges in vivo because their effects on gene silencing via mRNA interference are generally transient, which can require repeat administration. In addition, siRNAs are double-stranded RNAs (dsRNA) and mammalian cells have immune responses that have evolved to detect and neutralize dsRNA, which is often a by-product of viral infection. Thus, there are mammalian enzymes such as PKR (dsRNA-responsive kinase), and potentially retinoic acid-inducible gene I (RIG-I), that can mediate cellular responses to dsRNA, as well as Toll-like receptors (such as TLR3, TLR7 and TLR8) that can trigger the induction of cytokines in response to such molecules; see, e.g., the reviews by Angart et at., Pharmaceuticals (Basel) 6(4): 440-468 (2013); Kanasty et al., Molecular Therapy 20(3): 513-524 (2012); Burnett et al., Biotechnol J. 6(9):1130-46 (2011); Judge and MacLachlan, Hum Gene Ther 19(2):111-24 (2008); and references cited therein.

[0175] A large variety of modifications have been developed and applied to enhance RNA stability, reduce innate immune responses, and/or achieve other benefits that can be useful in connection with the introduction of polynucleotides into human cells, as described herein; see, e.g., the reviews by Whitehead K A et al., Annual Review of Chemical and Biomolecular Engineering, 2: 77-96 (2011); Gaglione and Messere, Mini Rev Med Chem, 10(7):578-95 (2010); Chernolovskaya et al, Curr Opin Mol Ther., 12(2):158-67 (2010); Deleavey et al., Curr Protoc Nucleic Acid Chem Chapter 16:Unit 16.3 (2009); Behlke, Oligonucleotides 18(4):305-19 (2008); Fucini et al., Nucleic Acid. Ther 22(3): 205-210 (2012); Bremsen et al., Front Genet 3:154 (2012).

[0176] As noted above, there are a number of commercial suppliers of modified RNAs, many of which have specialized in modifications designed to improve the effectiveness of siRNAs. A variety of approaches are offered based on various findings reported in the literature. For example, Dharmacon notes that replacement of a non-bridging oxygen with sulfur (phosphorothioate, PS) has been extensively used to improve nuclease resistance of siRNAs, as reported by Kole, Nature Reviews Drug Discovery 11:125-140 (2012). Modifications of the 2′-position of the ribose have been reported to improve nuclease resistance of the internucleotide phosphate bond while increasing duplex stability (Tm), which has also been shown to provide protection from immune activation. A combination of moderate PS backbone modifications with small, well-tolerated 2′-substitutions (2′-O-Methyl, 2′-Fluoro, 2′-Hydro) have been associated with highly stable siRNAs for applications in vivo, as reported by Soutschek et al. Nature 432:173-178 (2004); and 2′-O-Methyl modifications have been reported to be effective in improving stability as reported by Volkov, Oligonucleotides 19:191-202 (2009). With respect to decreasing the induction of innate immune responses, modifying specific sequences with 2′-O-Methyl, 2′-Fluoro, 2′-Hydro have been reported to reduce TLR7/TLR8 interaction while generally preserving silencing activity; see, e.g., Judge et al., Mol. Ther. 13:494-505 (2006); and Cekaite et al., J. Mol. Biol. 365:90-108 (2007). Additional modifications, such as 2-thiouracil, pseudouracil, 5-methylcytosine, 5-methyluracil, and N6-methyladenosine have also been shown to minimize the immune effects mediated by TLR3, TLR7, and TLR8; see, e.g., Kariko, K. et al., Immunity 23:165-175 (2005).

[0177] As is also known in the art, and commercially available, a number of conjugates can be applied to polynucleotides, such as RNAs, for use herein that can enhance their delivery and/or uptake by cells, including for example, cholesterol, tocopherol and folic acid, lipids, peptides, polymers, linkers and aptamers; see, e.g., the review by Winkler, Ther. Deliv. 4:791-809 (2013), and references cited therein.

### Codon-Optimization

[0178] A polynucleotide encoding a site-directed polypeptide can be codon-optimized according to methods standard in the art for expression in the cell containing the target DNA of interest. For example, if the intended target nucleic acid is in a human cell, a human codon-optimized polynucleotide encoding Cas9 is contemplated for use for producing the Cas9 polypeptide.

### Complexes of a Genome-Targeting Nucleic Acid and a Site-Directed Polypeptide

[0179] A genome-targeting nucleic acid interacts with a site-directed polypeptide (e.g., a nucleic acid-guided nuclease such as Cas9), thereby forming a complex. The genome-targeting nucleic acid guides the site-directed polypeptide to a target nucleic acid.

### Ribonucleoprotein Complexes (RNPs)

[0180] The site-directed polypeptide and genome-targeting nucleic acid can each be administered separately to a cell or a patient. On the other hand, the site-directed polypeptide can be pre-complexed with one or more guide RNAs, or one or more crRNA together with a tracrRNA. The pre-complexed material can then be administered to a cell or a patient. Such pre-complexed material is known as a ribonucleoprotein particle (RNP). The site-directed polypeptide in the RNP can be, for example, a Cas9 endonuclease or a Cpf1 endonuclease. The site-directed polypeptide can be flanked at the N-terminus, the C-terminus, or both the N-terminus and C-terminus by one or more nuclear localization signals (NLSs). For example, a Cas9 endonuclease can be flanked by two NLSs, one NLS located at the N-terminus and the second NLS located at the C-terminus. The NLS can be any NLS known in the art, such as a SV40 NLS. The weight ratio of genome-targeting nucleic acid to site-directed polypeptide in the RNP can be 1:1. For example, the weight ratio of sgRNA to Cas9 endonuclease in the RNP can be 1:1.

### Nucleic Acids Encoding System Components

[0181] The present disclosure provides a nucleic acid comprising a nucleotide sequence encoding a genome-targeting nucleic acid of the disclosure, a site-directed polypeptide of the disclosure, and/or any nucleic acid or proteinaceous molecule necessary to carry out the aspects of the methods of the disclosure.

[0182] The nucleic acid encoding a genome-targeting nucleic acid of the disclosure, a site-directed polypeptide of the disclosure, and/or any nucleic acid or proteinaceous molecule necessary to carry out the aspects of the methods of the disclosure can comprise a vector (e.g., a recombinant expression vector).

[0183] The term “vector” refers to a nucleic acid molecule capable of transporting another nucleic acid to which it has been linked. One type of vector is a “plasmid”, which refers to a circular double-stranded DNA loop into which additional nucleic acid segments can be ligated. Another type of vector is a viral vector, wherein additional nucleic acid segments can be ligated into the viral genome. Certain vectors are capable of autonomous replication in a host cell into which they are introduced (e.g., bacterial vectors having a bacterial origin of replication and episomal mammalian vectors). Other vectors (e.g, non-episomal mammalian vectors) are integrated into the genome of a host cell upon introduction into the host cell, and thereby are replicated along with the host genome.

[0184] In some examples, vectors can be capable of directing the expression of nucleic acids to which they are operatively linked. Such vectors are referred to herein as “recombinant expression vectors”, or more simply “expression vectors”, which serve equivalent functions.

[0185] The term “operably linked” means that the nucleotide sequence of interest is linked to regulatory sequence(s) in a manner that allows for expression of the nucleotide sequence. The term “regulatory sequence” is intended to include, for example, promoters, enhancers and other expression control elements (e.g., polyadenylation signals). Such regulatory sequences are well known in the art and are described, for example, in Goeddel; Gene Expression Technology: Methods in Enzymology 185, Academic Press, San Diego, Calif. (1990). Regulatory sequences include those that direct constitutive expression of a nucleotide sequence in many types of host cells, and those that direct expression of the nucleotide sequence only in certain host cells (e.g., tissue-specific regulatory sequences). It will be appreciated by those skilled in the art that the design of the expression vector can depend on such factors as the choice of the target cell, the level of expression desired, and the like.

[0186] Expression vectors contemplated include, but are not limited to, viral vectors based on vaccinia virus, poliovirus, adenovirus, adeno-associated virus, SV40, herpes simplex virus, human immunodeficiency virus, retrovirus (e.g., Murine Leukemia Virus, spleen necrosis virus, and vectors derived from retroviruses such as Rous Sarcoma Virus, Harvey Sarcoma Virus, avian leukosis virus, a lentivirus, human immunodeficiency virus, myeloproliferative sarcoma virus, and mammaly tumor virus) and other recombinant vectors. Other vectors contemplated for eukaryotic target cells include, but are not limited to, the vectors pXT1, pSG5, pSVK3, pBPV, pMSG, and pSVLSV40 (Pharmacia). Other vectors can be used so long as they are compatible with the host cell.

[0187] In some examples, a vector can comprise one or more transcription and/or translation control elements. Depending on the host/vector system utilized, any of a number of suitable transcription and translation control elements, including constitutive and inducible promoters, transcription enhancer elements, transcription terminators, etc. can be used in the expression vector. The vector can be a self-inactivating vector that either inactivates the viral sequences or the components of the CRISPR machinery or other elements.

[0188] Non-limiting examples of suitable eukaryotic promoters (i.e., promoters functional in a eukaryotic cell) include those from cytomegalovirus (CMV) immediate early, herpes simplex virus (HSV) thymidine kinase, early and late SV40, long terminal repeats (LTRs) from retrovirus, human elongation factor-1 promoter (EF1), a hybrid construct comprising the cytomegalovirus (CMV) enhancer fused to the chicken beta-actin promoter (CAG), murine stem cell virus promoter (MSCV), phosphoglycerate kinase-1 locus promoter (PGK), and mouse metallothionein-I.

[0189] For expressing small RNAs, including guide RNAs used in connection with Cas endonuclease, various promoters such as RNA polymerase III promoters, including for example U6 and H1, can be advantageous. Descriptions of and parameters for enhancing the use of such promoters are known in art, and additional information and approaches are regularly being described; see, e.g., Ma, H. et al., Molecular Therapy—Nucleic Acids 3, e161 (2014) doi:10.1038/mtna.2014.12.

[0190] The expression vector can also contain a ribosome binding site for translation initiation and a transcription terminator. The expression vector can also comprise appropriate sequences for amplifying expression. The expression vector can also include nucleotide sequences encoding non-native tags (e.g., histidine tag, hemagglutinin tag, green fluorescent protein, etc.) that are fused to the site-directed polypeptide, thus resulting in a fusion protein.

[0191] A promoter can be an inducible promoter (e.g., a heat shock promoter, tetracycline-regulated promoter, steroid-regulated promoter, metal-regulated promoter, estrogen receptor-regulated promoter, etc.). The promoter can be a constitutive promoter (e.g., CMV promoter, UBC promoter). In some cases, the promoter can be a spatially restricted and/or temporally restricted promoter (e.g., a tissue specific promoter, a cell type specific promoter, etc.).

[0192] The nucleic acid encoding a genome-targeting nucleic acid of the disclosure and/or a site-directed polypeptide can be packaged into or on the surface of delivery vehicles for delivery to cells. Delivery vehicles contemplated include, but are not limited to, nanospheres, liposomes, quantum dots, nanoparticles, polyethylene glycol particles, hydrogels, and micelles. As described in the art, a variety of targeting moieties can be used to enhance the preferential interaction of such vehicles with desired cell types or locations.

[0193] Introduction of the complexes, polypeptides, and nucleic acids of the disclosure into cells can occur by viral or bacteriophage infection, transfection, conjugation, protoplast fusion, lipofection, electroporation, nucleofection, calcium phosphate precipitation, polyethyleneimine (PEI)-mediated transfection, DEAE-dextran mediated transfection, liposome-mediated transfection, particle gun technology, calcium phosphate precipitation, direct micro-injection, nanoparticle-mediated nucleic acid delivery, and the like.

### Therapeutic Approach

[0194] Provided herein are methods for treating a patient with Dyslipidemias. An aspect of such method is an ex vivo cell-based therapy. For example, a biopsy of the patient's liver is performed. Then, a liver specific progenitor cell or primary hepatocyte is isolated from the biopsied material. Next, the chromosomal DNA of these progenitor cells or primary hepatocytes is corrected using the materials and methods described herein. Finally, the progenitor cells or primary hepatocytes are implanted into the patient. Any source or type of cell may be used as the progenitor cell.

[0195] Another aspect of such method is an ex vivo cell-based therapy. For example, a patient specific induced pluripotent stem cell (iPSC) can be created. Then, the chromosomal DNA of these iPS cells can be edited using the materials and methods described herein. Next, the genome-edited iPSCs can be differentiated into other cells. Finally, the differentiated cells are implanted into the patient.

[0196] Yet another aspect of such method is an ex vivo cell-based therapy. For example, a mesenchymal stem cell can be isolated from the patient, which can be isolated from the patient's bone marrow or peripheral blood. Next, the chromosomal DNA of these mesenchymal stem cells can be edited using the materials and methods described herein. Next, the genome-edited mesenchymal stem cells can be differentiated into any type of cell, e.g., epatocytes. Finally, the differentiated cells, e.g., hepatocytes are implanted into the patient.

[0197] One advantage of an ex vivo cell therapy approach is the ability to conduct a comprehensive analysis of the therapeutic prior to administration. Nuclease-based therapeutics can have some level of off-target effects. Performing gene editing ex vivo allows one to characterize the edited cell population prior to implantation. The present disclosure includes sequencing the entire genome of the edited cells to ensure that the off-target effects, if any, can be in genomic locations associated with minimal risk to the patient. Furthermore, populations of specific cells, including clonal populations, can be isolated prior to implantation.

[0198] Another advantage of ex vivo cell therapy relates to genetic modification in iPSCs compared to other primary cell sources. iPSCs are prolific, making it easy to obtain the large number of cells that will be required for a cell-based therapy. Furthermore, iPSCs are an ideal cell type for performing clonal isolations. This allows screening for the correct genomic modification, without risking a decrease in viability. In contrast, other primary cells, such as hepatocytes, are viable for only a few passages and difficult to clonally expand. Thus, manipulation of iPSCs for the treatment of Dyslipidemias can be much easier, and can shorten the amount of time needed to make the desired genetic modification.

[0199] Methods can also include an in vivo based therapy. Chromosomal DNA of the cells in the patient is edited using the materials and methods described herein.

[0200] Although certain cells present an attractive target for ex vivo treatment and therapy, increased efficacy in delivery may permit direct in vivo delivery to such cells. Ideally the targeting and editing would be directed to the relevant cells. Cleavage in other cells can also be prevented by the use of promoters only active in certain cells and or developmental stages. Additional promoters are inducible, and therefore can be temporally controlled if the nuclease is delivered as a plasmid. The amount of time that delivered RNA and protein remain in the cell can also be adjusted using treatments or domains added to change the half-life. In vivo treatment would eliminate a number of treatment steps, but a lower rate of delivery can require higher rates of editing. In vivo treatment can eliminate problems and losses from ex vivo treatment and engraftment.

[0201] An advantage of in vivo gene therapy can be the ease of therapeutic production and administration. The same therapeutic approach and therapy will have the potential to be used to treat more than one patient, for example a number of patients who share the same or similar genotype or allele. In contrast, ex vivo cell therapy typically requires using a patient's own cells, which are isolated, manipulated and returned to the same patient.

[0202] Also provided herein is a cellular method for editing the PCSK9 gene in a cell by genome editing. For example, a cell can be isolated from a patient or animal. Then, the chromosomal DNA of the cell can be edited using the materials and methods described herein.

[0203] The methods provided herein, regardless of whether a cellular or ex vivo or in vivo method, can involve reducing (knock-down) or eliminating (knock-out) the expression of the PCSK9 gene by introducing one or more insertions, deletions or mutations within or near the PCSK9 gene or other DNA sequences that encode regulatory elements of the PCSK9 gene.

[0204] For example, the knock-down or knock-out strategy can involve disrupting the reading frame in the PCSK9 gene by introducing random insertions or deletions (indels) that arise due to the imprecise NEU repair pathway. This can be achieved by inducing one single stranded break or double stranded break in the gene of interest with one or more CRISPR endonucleases and a gRNA (e.g., crRNA+tracrRNA, or sgRNA), or two or more single stranded breaks or double stranded breaks in the gene of interest with two or more CRISPR endonucleases and two or more sgRNAs. This approach can require development and optimization of sgRNAs for the PCSK9 gene.

[0205] Alternatively, the knock-down or knock-out strategy can also involve deletion of one or more segments within or near the PCSK9 gene or other DNA sequences that encode regulatory elements of the PCSK9 gene. This deletion strategy requires at least a pair of gRNAs (e.g., crRNA+tracrRNA, or sgRNA) capable of binding to two different sites within or near the PCSK9 gene and one or more CRISPR endonucleases. The CRISPR endonucleases, configured with the two gRNAs, induce two double stranded breaks at the desired locations. After cleavage, the two ends, regardless of whether blunt or with overhangs, can be joined by NHEJ, leading to the deletion of the intervening segment. NHEJ repair pathways can lead to insertions, deletions or mutations at the joints.

[0206] In addition to the above genome editing strategies, another strategy involves modulating expression, function, or activity of PCSK9 by editing in the regulatory sequence.

[0207] In addition to the editing options listed above, Cas9 or similar proteins can be used to target effector domains to the same target sites that can be identified for editing, or additional target sites within range of the effector domain. A range of chromatin modifying enzymes, methylases or demethylases can be used to alter expression of the target gene. One possibility is reducing the expression of the PCSK9 protein if a mutation leads to undesirable activity. These types of epigenetic regulation have some advantages, particularly as they are limited in possible off-target effects.

[0208] A number of types of genomic target sites can be present in addition to the coding and splicing sequences.

[0209] The regulation of transcription and translation implicates a number of different classes of sites that interact with cellular proteins or nucleotides. Often the DNA binding sites of transcription factors or other proteins can be targeted for mutation or deletion to study the role of the site, though they can also be targeted to change gene expression. Sites can be added through non-homologous end joining NHEJ or direct genome editing by homology directed repair (HDR). Increased use of genome sequencing, RNA expression and genome-wide studies of transcription factor binding have increased our ability to identify how the sites lead to developmental or temporal gene regulation. These control systems can be direct or can involve extensive cooperative regulation that can require the integration of activities from multiple enhancers. Transcription factors typically bind 6-12 bp-long degenerate DNA sequences. The low level of specificity provided by individual sites suggests that complex interactions and rules are involved in binding and the functional outcome. Binding sites with less degeneracy can provide simpler means of regulation. Artificial transcription factors can be designed to specify longer sequences that have less similar sequences in the genome and have lower potential for off-target cleavage. Any of these types of binding sites can be mutated, deleted or even created to enable changes in gene regulation or expression (Canver, M. C. et al., Nature (2015)).

[0210] Another class of gene regulatory regions having these features is microRNA (miRNA) binding sites. miRNAs are non-coding RNAs that play key roles in post-transcriptional gene regulation. miRNA can regulate the expression of 30% of all mammalian protein-encoding genes. Specific and potent gene silencing by double stranded RNA (RNAi) was discovered, plus additional small noncoding RNA (Canver, M. C. et al., Nature (2015)). The largest class of noncoding RNAs important for gene silencing are miRNAs. In mammals, miRNAs are first transcribed as a long RNA transcript, which can be separate transcriptional units, part of protein introns, or other transcripts. The long transcripts are called primary miRNA (pri-miRNA) that include imperfectly base-paired hairpin structures. These pri-miRNA can be cleaved into one or more shorter precursor miRNAs (pre-miRNAs) by Microprocessor, a protein complex in the nucleus, involving Drosha.

[0211] Pre-miRNAs are short stem loops ˜70 nucleotides in length with a 2-nucleotide 3′-overhang that are exported, into the mature 19-25 nucleotide miRNA:miRNA* duplexes. The miRNA strand with lower base pairing stability (the guide strand) can be loaded onto the RNA-induced silencing complex (RISC). The passenger strand (marked with *), can be functional, but is usually degraded. The mature miRNA tethers RISC to partly complementary sequence motifs in target mRNAs predominantly found within the 3′ untranslated regions (UTRs) and induces posttranscriptional gene silencing (Bartel, D. P. Cell 136, 215-233 (2009); Saj, & Lai, E. C. Curr Opin Genet Dev 21, 504-510 (2011)).

[0212] miRNAs can be important in development, differentiation, cell cycle and growth control, and in virtually all biological pathways in mammals and other multicellular organisms, miRNAs can also be involved in cell cycle control, apoptosis and stem cell differentiation, hematopoiesis, hypoxia, muscle development, neurogenesis, insulin secretion, cholesterol metabolism, aging, viral replication and immune responses.

[0213] A single miRNA can target hundreds of different mRNA transcripts, while an individual miRNA transcript can be targeted by many different miRNAs. More than 28645 microRNAs have been annotated in the latest release of miRBase (v.21). Some miRNAs can be encoded by multiple loci, some of which can be expressed from tandemly co-transcribed clusters. The features allow for complex regulatory networks with multiple pathways and feedback controls. miRNAs can be integral parts of these feedback and regulatory circuits and can help regulate gene expression by keeping protein production within limits (Herranz, H. & Cohen, S. M. Genes Dev 24, 1339-1344 (2010); Posadas, D. M. & Carthew, R. W. Curr Opin Genet Dev 27, 1-6 (2014)).

[0214] miRNA can also be important in a large number of human diseases that are associated with abnormal miRNA expression. This association underscores the importance of the miRNA regulatory pathway. Recent miRNA deletion studies have linked miRNA with regulation of the immune responses (Stern-Ginossar, N. et al., Science 317, 376-381 (2007)).

[0215] miRNA also has a strong link to cancer and can play a role in different types of cancer. miRNAs have been found to be downregulated in a number of tumors. miRNA can be important in the regulation of key cancer-related pathways, such as cell cycle control and the DNA damage response, and can therefore be used in diagnosis and can be targeted clinically. MicroRNAs can delicately regulate the balance of angiogenesis, such that experiments depleting all microRNAs suppresses tumor angiogenesis (Chen, S. et al., Genes Dev 28, 1054-1067 (2014)).

[0216] As has been shown for protein coding genes, miRNA genes can also be subject to epigenetic changes occurring with cancer. Many miRNA loci can be associated with CpG islands increasing their opportunity for regulation by DNA methylation (Weber, B., Stresemann, C., Brueckner, B. & Lyko, F. Cell Cycle 6, 1001-1005 (2007)). The majority of studies have used treatment with chromatin remodeling drugs to reveal epigenetically silenced miRNAs.

[0217] In addition to their role in RNA silencing, miRNA can also activate translation (Posadas, D. M. &. Carthew, R. W. Curr Opin Genet Dev 27, 1-6 (2014)). Knocking out miRNA sites may lead to decreased expression of the targeted gene, while introducing these sites may increase expression.

[0218] Individual miRNA can be knocked out most effectively by mutating the seed sequence (bases 2-8 of the microRNA), which can be important for binding specificity. Cleavage in this region, followed by mis-repair by NHEJ can effectively abolish miRNA function by blocking binding to target sites. miRNA could also be inhibited by specific targeting of the special loop region adjacent to the palindromic sequence. Catalytically inactive Cas9 can also be used to inhibit shRNA expression (Zhao, Y. et al., Sci Rep 4, 3943 (2014)). In addition to targeting the miRNA, the binding sites can also be targeted and mutated to prevent the silencing by miRNA.

[0219] According to the present disclosure, any of the microRNA (miRNA) or their binding sites may be incorporated into the compositions of the invention.

[0220] The compositions may have a region such as, but not limited to, a region comprising the sequence of any of the microRNAs listed in SEQ ID NOs: 632-4,715 the reverse complement of the microRNAs listed in SEQ ID NOs: 632-4,715 or the microRNA anti-seed region of any of the microRNAs listed in SEQ ID NOs: 632-4,715.

[0221] The compositions of the invention may comprise one or more microRNA target sequences, microRNA sequences, or microRNA seeds. Such sequences may correspond to any known microRNA such as those taught in US Publication US2005/0261218 and US Publication US2005/0059005. As a non-limiting embodiment, known microRNAs, their sequences and their binding site sequences in the human genome are listed below in SEQ ID NOs: 632-4,715.

[0222] A microRNA sequence comprises a “seed” sequence, i.e., a sequence in the region of positions 2-8 of the mature microRNA, which sequence has perfect Watson-Crick complementarity to the miRNA target sequence. A microRNA seed may comprise positions 2-8 or 2-7 of the mature microRNA. In some aspects, a microRNA seed may comprise 7 nucleotides (e.g., nucleotides 2-8 of the mature microRNA), wherein the seed-complementary site in the corresponding miRNA target is flanked by an adenine (A) opposed to microRNA position 1. In some aspects, a microRNA seed may comprise 6 nucleotides (e.g., nucleotides 2-7 of the mature microRNA), wherein the seed-complementary site in the corresponding miRNA target is flanked by an adenine (A) opposed to microRNA position 1. See for example, Grimson A, Farh K K, Johnston W K, Garrett-Engele P, Lim L P, Bartel D P; Mol Cell. 2007 Jul. 6; 27(1):91-105. The bases of the microRNA seed have complete complementarity with the target sequence.

[0223] Identification of microRNA, microRNA target regions, and their expression patterns and role in biology have been reported (Bonauer et al., Curr Drug Targets 2010 11:943-949; Anand and Cheresh Curr Opin Hematol 2011 18:171-176; Contreras and Rao Leukemia 2012 26:404-413 (2011 Dec. 20. dol: 10.1038/leu.201.1.356); Bartel Cell 2009 136:215-233; Landgraf et al, Cell, 2007 129:1401-1414; Gentner and Naldini, Tissue Antigens. 2012 80:393-403).

[0224] For example, if the composition is not intended to be delivered to the liver but ends up there, then miR-122, a microRNA abundant in liver, can inhibit the expression of the sequence delivered if one or multiple target sites of miR-122 are engineered into the polynucleotide encoding that target sequence. Introduction of one or multiple binding sites for different microRNA can be engineered to further decrease the longevity, stability, and protein translation hence providing an additional layer of tenability.

[0225] As used herein, the term “microRNA site” refers to a microRNA target site or a microRNA recognition site, or any nucleotide sequence to which a microRNA binds or associates. It should be understood that “binding” may follow traditional Watson-Crick hybridization rules or may reflect any stable association of the microRNA with the target sequence at or adjacent to the microRNA site.

[0226] Conversely, for the purposes of the compositions of the present invention, microRNA binding sites can be engineered out of (i.e. removed from) sequences in which they naturally occur in order to increase protein expression in specific tissues. For example, miR-122 binding sites may be removed to improve protein expression in the liver.

[0227] Specifically, microRNAs are known to be differentially expressed in immune cells (also called hematopoietic cells), such as antigen presenting cells (APCs) (e.g. dendritic cells and macrophages), macrophages, monocytes, B lymphocytes, T lymphocytes, granulocytes, natural killer cells, etc. Immune cell specific microRNAs are involved in immunogenicity, autoimmunity, the immune-response to infection, inflammation, as well as unwanted immune response after gene therapy and tissue/organ transplantation, Immune cells specific microRNAs also regulate many aspects of development, proliferation, differentiation and apoptosis of hematopoietic cells (immune cells). For example, miR-142 and miR-146 are exclusively expressed in the immune cells, particularly abundant in myeloid dendritic cells. Introducing the miR-142 binding site into the 3′-UTR of a polypeptide of the present invention can selectively suppress the gene expression in the antigen presenting cells through miR-142 mediated mRNA degradation, limiting antigen presentation in professional APCs (e.g. dendritic cells) and thereby preventing antigen-mediated immune response after gene delivery (see, Annoni A et al., blood, 2009, 114, 5152-5161).

[0228] In one embodiment, microRNAs binding sites that are known to be expressed in immune cells, in particular, the antigen presenting cells, can be engineered into the polynucleotides to suppress the expression of the polynucleotide in APCs through microRNA mediated RNA degradation, subduing the antigen-mediated immune response, while the expression of the polynucleotide is maintained in non-immune cells where the immune cell specific microRNAs are not expressed.

[0229] Many microRNA expression studies have been conducted, and are described in the art, to profile the differential expression of microRNAs in various cancer cells/tissues and other diseases. Some microRNAs are abnormally over-expressed in certain cancer cells and others are under-expressed. For example, microRNAs are differentially expressed in cancer cells (WO2008/154098, US2013/0059015, US2013/0042333, WO2011/157294); cancer stem cells (US2012/0053224); pancreatic cancers and diseases (US2009/0131348, US2011/0171646, US2010/0286232, U.S. Pat. No. 8,389,210); asthma and inflammation (U.S. Pat. No. 8,415,096); prostate cancer (US2013/0053264); hepatocellular carcinoma (WO2012/151212, US2012/0329672, WO2008/054828, U.S. Pat. No. 8,252,538); lung cancer cells (WO2011/076143, WO2013/033640, WO2009/070653, US2010/0323357); cutaneous T cell lymphoma (WO2013/01137 colorectal cancer cells (WO2011/0281756, WO2011/076142); cancer positive lymph nodes (WO2009/100430, US2009/0263803); nasopharyngeal carcinoma (EP2112235); chronic obstructive pulmonary disease (US2012/0264626, US2013/0053263); thyroid cancer (WO2013/066678); ovarian cancer cells (US2012/0309645, WO2011/095623); breast cancer cells (WO2008/154098, WO2007/081740, US2012/0214699), leukemia and lymphoma (WO2008/073915, US2009/0092974, US2012/0316081, US2012/0283310, WO2010/018563).

[0230] Non-limiting examples of microRNA sequences and the targeted tissues and/or cells are described in SEQ ID NOs: 632-4,715.

### Genuine Engineering Strategies

[0231] In some aspects, the methods of the present disclosure can involve editing of one or both of the alleles. Gene editing to modify the allele(s) has the advantage of permanently altering the target gene or gene products.

[0232] A step of the ex vivo methods of the present disclosure can comprise editing the hepatocytes isolated from the patient using genome engineering. Alternatively, a step of the ex vivo methods of the present disclosure can comprise editing the patient specific iPSC or mesenchymal stern cell. Likewise, a step of the in vivo methods of the invention involves editing the cells in Dyslipidemias patient using genome engineering. Similarly, a step in the cellular methods of the present disclosure can comprise editing the PCSK9 gene in a human cell by genome engineering.

[0233] Any CRISPR endonuclease may be used in the methods of the present disclosure, each CRISPR endonuclease having its own associated PAM, which may or may not be disease specific.

[0234] For example, expression of the PCSK9 gene may be disrupted or eliminated by introducing random insertions or deletions (indels) that arise due to the imprecise NHEJ repair pathway. The target region may be the coding sequences of the PCSK9 gene (i.e., exons). Inserting or deleting nucleotides into the coding sequence of a gene may cause a “frame shift” where the normal 3-letter codon pattern is disturbed. In this way, gene expression and therefore protein production can be reduced or eliminated. This approach may also be used to target any intron, intron:exon junction, or regulatory DNA element of the PCSK9 gene where sequence alteration may interfere with the expression of the PCSK9 gene.

[0235] As another example, NHEJ can also be used to delete segments within or near the gene, either directly or by altering splice donor or acceptor sites through cleavage by one gRNA targeting several locations, or several gRNAs. This can be useful if small random indels are inefficient to knock-out the target gene. Pairs of guide strands have been used for this type of deletions.

[0236] Without a donor present, the ends from a DNA break or ends from different breaks can be joined using the several nonhomologous repair pathways in which the DNA ends are joined with little or no base-pairing at the junction. In addition to canonical NHEJ, there are similar repair mechanisms, such as alt-NHEJ. If there are two breaks, the intervening segment can be deleted or inverted. NHEJ repair pathways can lead to insertions, deletions or mutations at the joints.

[0237] NHEJ can also lead to homology-independent target integration. For example, inclusion of a nuclease target site on a donor plasmid can promote integration of a transgene into the chromosomal double-strand break following in vivo nuclease cleavage of both the donor and the chromosome (Cristea., Biotechnol Bioeng. 2013 March; 110(3):871-80).

[0238] NHEJ was used to insert a 15-kb inducible gene expression cassette into a defined locus in human cell lines after nuclease cleavage, (See e.g., Maresca, M., Lin, V. G., Guo, N. & Yang, Y., Genome Res 23, 539-546 (2013); Cristea et al. Biotechnology and Bioengineering 2013, 871-80, 10.1002/bit.24733; Suzuki et al. Nature, 540, 144-149 (2016)). The integrated sequence may disrupt the reading frame of the PCSK9 gene or alter the structure of the gene.

[0239] As a further alternative, homology directed repair (HDR) can also be used to knock-out a gene or alter the gene function. HDR is essentially an error-free mechanism that uses a supplied homologous DNA sequence as a template during DSB repair. The rate of HDR is a function of the distance between the mutation and the cut site so choosing overlapping or nearest target sites is important. Templates can include extra sequences flanked by the homologous regions or can contain a sequence that differs from the genomic sequence, thus allowing sequence editing.

[0240] For example, the HDR knock-out strategy can involve disrupting the structure or function of the PCSK9 gene by inserting into the gene or replacing a part of the gene with a non-functional or irrelevant sequence. This can be achieved by inducing one single stranded break or double stranded break in the gene of interest with one or more CRISPR endonucleases and a gRNA (e.g., crRNA+tracrRNA, or sgRNA), or two or more single stranded breaks or double stranded breaks in the gene of interest with one or more CRISPR endonucleases and two or more gRNAs, in the presence of a donor DNA template introduced exogenously to direct the cellular DSB response to HDR (the donor DNA template can be a short single stranded oligonucleotide, a short double stranded oligonucleotide, a long single or double stranded DNA molecule). This approach can require development and optimization of gRNAs and donor DNA molecules for the PCSK9 gene.

[0241] Homology directed repair is a cellular mechanism for repairing DSBs. The most common form is homologous recombination. There are additional pathways for HDR, including single-strand annealing and alternative-HDR. Genome engineering tools allow researchers to manipulate the cellular homologous recombination pathways to create site-specific modifications to the genome. It has been found that cells can repair a double-stranded break using a synthetic donor molecule provided in trans. Specific cleavage increases the rate of HDR more than 1,000 fold above the rate of 1 in 10⁶ cells receiving a homologous donor alone. The rate of homology directed repair (HDR) at a particular nucleotide is a function of the distance to the cut site, so choosing overlapping or nearest target sites is important.

[0242] Supplied donors for editing by HDR vary markedly but can contain the intended sequence with small or large flanking homology arms to allow annealing to the genomic DNA. The homology regions flanking the introduced genetic changes can be 30 bp or smaller, or as large as a multi-kilobase cassette that can contain promoters, cDNAs, etc. Both single-stranded and double-stranded oligonucleotide donors have been used. These oligonucleotides range in size from less than 100 nt to over many kb, though longer ssDNA can also be generated and used. Double-stranded donors can be used, including PCR amplicons, plasmids, and mini-circles. In general, it has been found that an AAV vector can be a very effective means of delivery of a donor template, though the packaging limits for individual donors is <5 kb. Active transcription of the donor increased HDR three-fold, indicating the inclusion of promoter may increase conversion. Conversely, CpG methylation of the donor decreased gene expression and HDR.

[0243] In addition to wild-type endonucleases, such as Cas9, nickase variants exist that have one or the other nuclease domain inactivated resulting in cutting of only one DNA strand. HDR can be directed from individual Cas nickases or using pairs of nickases that flank the target area. Donors can be single-stranded, nicked, or dsDNA.

[0244] The donor DNA can be supplied with the nuclease or independently by a variety of different methods, for example by transfection, nano-particle, micro-injection, or viral transduction. A range of tethering options have been proposed to increase the availability of the donors for HDR. Examples include attaching the donor to the nuclease, attaching to DNA binding proteins that bind nearby, or attaching to proteins that are involved in DNA end binding or repair.

[0245] The repair pathway choice can be guided by a number of culture conditions, such as those that influence cell cycling, or by targeting of DNA repair and associated proteins. For example, to increase HDR, key NHEJ molecules can be suppressed, such as KU70, KU80 or DNA ligase IV.

[0246] In addition to genome editing by NHEJ or HDR, site-specific gene insertions have been conducted that use both the NHEJ pathway and HDR.

[0247] The PCSK9 gene contains a number of exons as shown in Table 3. Any one or more of these exons or nearby introns can be targeted in order to create one or more insertions or deletions that disrupt the reading frame and eventually eliminate PCSK9 protein activity.

[0248] In some embodiments, the methods can provide gRNA pairs that make a deletion by cutting the gene twice at locations flanking an unwanted sequence. This sequence may include one or more exons, introns, intron:exon junctions, other DNA sequences encoding regulatory elements of the PCSK9 gene or combinations thereof. The cutting can be accomplished by a pair of DNA endonucleases that each makes a DSB in the genome, or by multiple nickases that together make a DSB in the genome.

[0249] Alternatively, the methods can provide one gRNA to make one double-strand cut within a coding or splicing sequence. The double-strand cut can be made by a single DNA endonuclease or multiple nickases that together make a DSB in the genome.

[0250] Splicing donor and acceptors are generally within 100 base pairs of the neighboring intron. In some examples, methods can provide gRNAs that cut approximately +/−100-3100 bp with respect to each exon/intron junction of interest.

[0251] For any of the genome editing strategies, gene editing can be confirmed by sequencing or PCR analysis.

### Target Sequence Selection

[0252] Shifts in the location of the 5′ boundary and/or the 3′ boundary relative to particular reference loci can be used to facilitate or enhance particular applications of gene editing, which depend in part on the endonuclease system selected for the editing, as further described and illustrated herein.

[0253] In a first non-limiting example of such target sequence selection, many endonuclease systems have rules or criteria that can guide the initial selection of potential target sites for cleavage, such as the requirement of a PAM sequence motif in a particular position adjacent to the DNA cleavage sites in the case of CRISPR Type II or Type V endonucleases.

[0254] In another non-limiting example of target sequence selection or optimization, the frequency of off-target activity for a particular combination of target sequence and gene editing endonuclease (i.e. the frequency of DSBs occurring at sites other than the selected target sequence) can be assessed relative to the frequency of on-target activity. In some cases, cells that have been correctly edited at the desired locus can have a selective advantage relative to other cells. Illustrative, but non-limiting, examples of a selective advantage include the acquisition of attributes such as enhanced rates of replication, persistence, resistance to certain conditions, enhanced rates of successful engraftment or persistence in vivo following introduction into a patient, and other attributes associated with the maintenance or increased numbers or viability of such cells. In other cases, cells that have been correctly edited at the desired locus can be positively selected for by one or more screening methods used to identify, sort or otherwise select for cells that have been correctly edited. Both selective advantage and directed selection methods can take advantage of the phenotype associated with the alteration. In some cases, cells can be edited two or more times in order to create a second modification that creates a new phenotype that is used to select or purify the intended population of cells. Such a second modification could be created by adding a second gRNA for a selectable or screenable marker. In some cases, cells can be correctly edited at the desired locus using a DNA fragment that contains the cDNA and also a selectable marker.

[0255] Whether any selective advantage is applicable or any directed selection is to be applied in a particular case, target sequence selection can also be guided by consideration of off-target frequencies in order to enhance the effectiveness of the application and/or reduce the potential for undesired alterations at sites other than the desired target. As described further and illustrated herein and in the art, the occurrence of off-target activity can be influenced by a number of factors including similarities and dissimilarities between the target site and various off-target sites, as well as the particular endonuclease used. Bioinformatics tools are available that assist in the prediction of off-target activity, and frequently such tools can also be used to identify the most likely sites of off-target activity, which can then be assessed in experimental settings to evaluate relative frequencies of off-target to on-target activity, thereby allowing the selection of sequences that have higher relative on-target activities. Illustrative examples of such techniques are provided herein, and others are known in the art.

[0256] Another aspect of target sequence selection relates to homologous recombination events. Sequences sharing regions of homology can serve as focal points for homologous recombination events that result in deletion of intervening sequences. Such recombination events occur during the normal course of replication of chromosomes and other DNA sequences, and also at other times when DNA sequences are being synthesized, such as in the case of repairs of double-strand breaks (DSBs), which occur on a regular basis during the normal cell replication cycle but can also be enhanced by the occurrence of various events (such as UV light and other inducers of DNA breakage) or the presence of certain agents (such as various chemical inducers). Many such inducers cause DSBs to occur indiscriminately in the genome, and DSBs can be regularly induced and repaired in normal cells. During repair, the original sequence can be reconstructed with complete fidelity, however, in some cases, small insertions or deletions (referred to as “indels”) are introduced at the DSB site.

[0257] DSBs can also be specifically induced at particular locations, as in the case of the endonucleases systems described herein, which can be used to cause directed or preferential gene modification events at selected chromosomal locations. The tendency for homologous sequences to be subject to recombination in the context of DNA repair (as well as replication) can be taken advantage of in a number of circumstances, and is the basis for one application of gene editing systems, such as CRISPR, in which homology directed repair is used to insert a sequence of interest, provided through use of a “donor” polynucleotide, into a desired chromosomal location.

[0258] Regions of homology between particular sequences, which can be small regions of “microhomology” that can comprise as few as ten basepairs or less, can also be used to bring about desired deletions. For example, a single DSB can be introduced at a site that exhibits microhomology with a nearby sequence. During the normal course of repair of such DSB, a result that occurs with high frequency is the deletion of the intervening sequence as a result of recombination being facilitated by the DSB and concomitant cellular repair process.

[0259] In some circumstances, however, selecting target sequences within regions of homology can also give rise to much larger deletions, including gene fusions (when the deletions are in coding regions), which may or may not be desired given the particular circumstances.

[0260] The examples provided herein further illustrate the selection of various target regions for the creation of DSBs designed to induce insertions, deletions or mutations that result in reduction or elimination of PCSK9 protein activity, as well as the selection of specific target sequences within such regions that are designed to minimize off-target events relative to on-target events.

### Human Cells

[0261] For ameliorating Dyslipidemias or any disorder associated with PCSK9, as described and illustrated herein, the principal targets for gene editing are human cells. For example, in the ex vivo methods, the human cells can be somatic cells, which after being modified using the techniques as described, can give rise to differentiated cells, e.g., hepatocytes or progenitor cells. For example, in the in vivo methods, the human cells may be hepatocytes, renal cells or cells from other affected organs.

[0262] By performing gene editing in autologous cells that are derived from and therefore already completely matched with the patient in need, it is possible to generate cells that can be safely re-introduced into the patient, and effectively give rise to a population of cells that will be effective in ameliorating one or more clinical conditions associated with the patient's disease.

[0263] Stem cells are capable of both proliferation and giving rise to more progenitor cells, these in turn having the ability to generate a large number of mother cells that can in turn give rise to differentiated or differentiable daughter cells. The daughter cells themselves can be induced to proliferate and produce progeny that subsequently differentiate into one or more mature cell types, while also retaining one or more cells with parental developmental potential. The term “stem cell” refers then, to a cell with the capacity or potential, under particular circumstances, to differentiate to a more specialized or differentiated phenotype, and which retains the capacity, under certain circumstances, to proliferate without substantially differentiating. In one aspect, the term progenitor or stem cell refers to a generalized mother cell whose descendants (progeny) specialize, often in different directions, by differentiation, e.g., by acquiring completely individual characters, as occurs in progressive diversification of embryonic cells and tissues. Cellular differentiation is a complex process typically occurring through many cell divisions. A differentiated cell may derive from a multipotent cell that itself is derived from a multipotent cell, and so on. While each of these multipotent cells may be considered stem cells, the range of cell types that each can give rise to may vary considerably. Some differentiated cells also have the capacity to give rise to cells of greater developmental potential. Such capacity may be natural or may be induced artificially upon treatment with various factors. In many biological instances, stem cells can also be “multipotent” because they can produce progeny of more than one distinct cell type, but this is not required for “stem-ness.”

[0264] Self-renewal can be another important aspect of the stem cell. In theory, self-renewal can occur by either of two major mechanisms. Stem cells can divide asymmetrically, with one daughter retaining the stem state and the other daughter expressing some distinct other specific function and phenotype. Alternatively, some of the stem cells in a population can divide symmetrically into two stems, thus maintaining some stem cells in the population as a whole, while other cells in the population give rise to differentiated progeny only. Generally, “progenitor cells” have a cellular phenotype that is more primitive (i.e., is at an earlier step along a developmental pathway or progression than is a fully differentiated cell). Often, progenitor cells also have significant or very high proliferative potential. Progenitor cells can give rise to multiple distinct differentiated cell types or to a single differentiated cell type, depending on the developmental pathway and on the environment in which the cells develop and differentiate.

[0265] In the context of cell ontogeny, the adjective “differentiated,” or “differentiating” is a relative term. A “differentiated cell” is a cell that has progressed further down the developmental pathway than the cell to which it is being compared. Thus, stem cells can differentiate into lineage-restricted precursor cells (such as a myocyte progenitor cell), which in turn can differentiate into other types of precursor cells further down the pathway (such as a myocyte precursor), and then to an end-stage differentiated cell, such as a myocyte, which plays a characteristic role in a certain tissue type, and may or may not retain the capacity to proliferate further.

### Induced Pluripotent Stem Cells

[0266] The genetically engineered human cells described herein can be induced pluripotent stem cells (iPSCs). An advantage of using iPSCs is that the cells can be derived from the same subject to which the progenitor cells are to be administered. That is, a somatic cell can be obtained from a subject, reprogrammed to an induced pluripotent stem cell, and then re-differentiated into a progenitor cell to be administered to the subject (e.g., autologous cells). Because the progenitors are essentially derived from an autologous source, the risk of engraftment rejection or allergic response can be reduced compared to the use of cells from another subject or group of subjects. In addition, the use of iPSCs negates the need for cells obtained from an embryonic source. Thus, in one aspect, the stem cells used in the disclosed methods are not embryonic stem cells.

[0267] Although differentiation is generally irreversible under physiological contexts, several methods have been recently developed to reprogram somatic cells to iPSCs. Exemplary methods are known to those of skill in the art and are described briefly herein below.

[0268] The term “reprogramming” refers to a process that alters or reverses the differentiation state of a differentiated cell (e.g., a somatic cell). Stated another way, reprogramming refers to a process of driving the differentiation of a cell backwards to a more undifferentiated or more primitive type of cell. It should be noted that placing many primary cells in culture can lead to some loss of fully differentiated characteristics. Thus, simply culturing such cells included in the term differentiated cells does not render these cells non-differentiated cells (e.g., undifferentiated cells) or pluripotent cells. The transition of a differentiated cell to pluripotency requires a reprogramming stimulus beyond the stimuli that lead to partial loss of differentiated character in culture. Reprogrammed cells also have the characteristic of the capacity of extended passaging without loss of growth potential, relative to primary cell parents, which generally have capacity for only a limited number of divisions in culture.

[0269] The cell to be reprogrammed can be either partially or terminally differentiated prior to reprogramming. Reprogramming can encompass complete reversion of the differentiation state of a differentiated cell (e.g., a somatic cell) to a pluripotent state or a multipotent state. Reprogramming can encompass complete or partial reversion of the differentiation state of a differentiated cell (e.g., a somatic cell) to an undifferentiated cell (e.g., an embryonic-like cell). Reprogramming can result in expression of particular genes by the cells, the expression of which further contributes to reprogramming. In certain examples described herein, reprogramming of a differentiated cell (e.g., a somatic cell) can cause the differentiated cell to assume an undifferentiated state (e.g., is an undifferentiated cell). The resulting cells are referred to as “reprogrammed cells,” or “induced pluripotent stem cells (iPSCs or iPS cells).”

[0270] Reprogramming can involve alteration, e.g., reversal, of at least some of the heritable patterns of nucleic acid modification (e.g., methylation), chromatin condensation, epigenetic changes, genomic imprinting, etc., that occur during cellular differentiation. Reprogramming is distinct from simply maintaining the existing undifferentiated state of a cell that is already pluripotent or maintaining the existing less than fully differentiated state of a cell that is already a multipotent cell (e.g., a myogenic stem cell). Reprogramming is also distinct from promoting the self-renewal or proliferation of cells that are already pluripotent or multipotent, although the compositions and methods described herein can also be of use for such purposes, in some examples.

[0271] Many methods are known in the art that can be used to generate pluripotent stem cells from somatic cells. Any such method that reprograms a somatic cell to the pluripotent phenotype would be appropriate for use in the methods described herein.

[0272] Reprogramming methodologies for generating pluripotent cells using defined combinations of transcription factors have been described. Mouse somatic cells can be converted to ES cell-like cells with expanded developmental potential by the direct transduction of Oct4, Sox2, Klf4, and c-Myc; see, e.g. Takahashi and Yamanaka, Cell 126(4): 663-76 (2006). iPSCs resemble ES cells, as they restore the pluripotency-associated transcriptional circuitry and much of the epigenetic landscape. In addition, mouse iPSCs satisfy all the standard assays for pluripotency: specifically, in vitro differentiation into cell types of the three germ layers, teratoma formation, contribution to chimeras, germline transmission [see, e.g., Maherali and Hochedlinger, Cell Stem Cell. 3(6):595-605 (2008)]; and tetraploid complementation.

[0273] Human iPSCs can be obtained using similar transduction methods, and the transcription factor trio, OCT4, SOX2, and NANOG, has been established as the core set of transcription factors that govern pluripotency; see, e.g., Budniatzky and Gepstein, Stem Cells Transl Med. 3(4):448-57 (2014); Barrett et al., Stem Cells Trans Med 3:1-6 sctm.2014-0121 (2014); Focosi et al., Blood Cancer Journal 4: e211 (2014); and references cited therein. The production of iPSCs can be achieved by the introduction of nucleic acid sequences encoding stem cell-associated genes into an adult, somatic cell, historically using viral vectors.

[0274] iPSCs can be generated or derived from terminally differentiated somatic cells, as well as from adult stem cells, or somatic stem cells. That is, a non-pluripotent progenitor cell can be rendered pluripotent or multipotent by reprogramming. In such instances, it may not be necessary to include as many reprogramming factors as required to reprogram a terminally differentiated cell. Further, reprogramming can be induced by the non-viral introduction of reprogramming factors, e.g., by introducing the proteins themselves, or by introducing nucleic acids that encode the reprogramming factors, or by introducing messenger RNAs that upon translation produce the reprogramming factors (see e.g., Warren et al., Cell Stem Cell, 7(5):618-30 (2010). Reprogramming can be achieved by introducing a combination of nucleic acids encoding stem cell-associated genes, including, for example, Oct-4 (also known as Oct-3/4 or Pouf51), Sox1, Sox2, Sox3, Sox 15, Sox 18, NANOG, Klf1, Klf2, Klf4, Klf5, NRSA2, c-Myc, 1-Myc, n-Myc, Rem2, Tert, and LIN28. Reprogramming using the methods and compositions described herein can further comprise introducing one or more of Oct-3/4, a member of the Sox family, a member of the Klf family, and a member of the Myc family to a somatic cell. The methods and compositions described herein can further comprise introducing one or more of each of Oct-4, Sox2, Nanog, c-MYC and Klf4 for reprogramming. As noted above, the exact method used for reprogramming is not necessarily critical to the methods and compositions described herein. However, where cells differentiated from the reprogrammed cells are to be used in, e.g., human therapy, in one aspect the reprogramming is not effected by a method that alters the genome. Thus, in such examples, reprogramming can be achieved, e.g., without the use of viral or plasmid vectors.

[0275] The efficiency of reprogramming (i.e., the number of reprogrammed cells) derived from a population of starting cells can be enhanced by the addition of various agents, e.g., small molecules, as shown by Shi et al., Cell-Stem Cell 2:525-528 (2008); Huangfu et al., Nature Biotechnology 26(7):795-797 (2008) and Marson et al., Cell-Stem Cell 3: 132-135 (2008). Thus, an agent or combination of agents that enhance the efficiency or rate of induced pluripotent stem cell production can be used in the production of patient-specific or disease-specific iPSCs. Some non-limiting examples of agents that enhance reprogramming efficiency include soluble Wnt, Wnt conditioned media, BIX-01294 (a G9a histone methyltransferase), PD0325901 (a MEK inhibitor), DNA methyltransferase inhibitors, histone deacetylase (HDAC) inhibitors, valproic acid, 5′-azacytidine, dexamethasone, suberoylanilide, hydroxamic acid (SAHA), vitamin C, and trichostatin (TSA), among others.

[0276] Other non-limiting examples of reprogramming enhancing agents include: Suberoylanilide Hydroxamic Acid (SAHA (e.g., MK0683, vorinostat) and other hydroxamic acids), BML-210, Depudecin (e.g., (−)-Depudecin), HC Toxin, Nullscript (4-(1,3-Dioxo-1H,3H-benzo[de]isoquinolin-2-yl)-N-hydroxybutanamide), Phenylbutyrate (e.g., sodium phenylbutyrate) and Valproic Acid ((VP A) and other short chain fatty acids), Scriptaid, Suramin Sodium, Trichostatin A (TSA), APHA Compound 8, Apicidin, Sodium Butyrate, pivaloyloxymethyl butyrate (Pivanex, AN-9), Trapoxin B, Chlamydocin, Depsipeptide (also known as FR901228 or FK228), benzamides (e.g., CI-994 (e.g., N-acetyl dinaline) and MS-27-275), MGCD0103, NVP-LAQ-824, CBHA (m-carboxycinnaminic acid bishydroxamic acid), JNJ16241199, Tubacin, A-161906, proxamide, oxamflatin, 3-Cl-UCHA (e.g., 6-(3-chlorophenylureido)caproic hydroxamic acid), AOE (2-amino-8-oxo-9,10-epoxydecanoic acid), CHAP31 and CHAP 50. Other reprogramming enhancing agents include, for example, dominant negative forms of the HDACs (e.g., catalytically inactive forms), siRNA inhibitors of the HDACs, and antibodies that specifically bind to the HDACs. Such inhibitors are available, e.g., from BIOMOL International, Fukasawa, Merck Biosciences, Novartis, Gloucester Pharmaceuticals, Titan Pharmaceuticals, MethylGene, and Sigma Aldrich.

[0277] To confirm the induction of pluripotent stem cells for use with the methods described herein, isolated clones can be tested for the expression of a stem cell marker. Such expression in a cell derived from a somatic cell identifies the cells as induced pluripotent stem cells. Stem cell markers can be selected from the non-limiting group including SSEA3, SSEA4, CD9, Nanog, Fbx15, Ecat1, Esg1, Eras, Gdf3, Fgf4, Cripto, Dax1, Zpf296, Slc2a3, Rex1, Utf1, and Nat1 . In one case, for example, a cell that expresses Oct4 or Nanog is identified as pluripotent. Methods for detecting the expression of such markers can include, for example, RT-PCR and immunological methods that detect the presence of the encoded polypeptides, such as Western blots or flow cytometric analyses. Detection can involve not only RT-PCR, but can also include detection of protein markers. Intracellular markers may be best identified via RT-PCR, or protein detection methods such as immunocytochemistry, while cell surface markers are readily identified, e.g., by immunocytochemistry.

[0278] The pluripotent stem cell character of isolated cells can be confirmed by tests evaluating the ability of the iPSCs to differentiate into cells of each of the three germ layers. As one example, teratoma formation in nude mice can be used to evaluate the pluripotent character of the isolated clones. The cells can be introduced into nude mice and histology and/or immunohistochemistry can be performed on a tumor arising from the cells. The growth of a tumor comprising cells from all three germ layers, for example, further indicates that the cells are pluripotent stem cells.

### Hepatocytes

[0279] In some aspects, the genetically engineered human cells described herein are hepatocytes. A hepatocyte is a cell of the main parenchymal tissue of the liver. Hepatocytes make up 70-85% of the liver's mass. These cells are involved in: protein synthesis; protein storage; transformation of carbohydrates; synthesis of cholesterol, bile salts and phospholipids; detoxification, modification, and excretion of exogenous and endogenous substances; and initiation of formation and secretion of bile.

Creating Patient Specific iPSCs

[0280] One step of the ex vivo methods of the present disclosure can involve creating a patient specific iPS cell, patient specific iPS cells, or a patient specific iPS cell line. There are many established methods in the art for creating patient specific iPS cells, as described in Takahashi and Yamanaka 2006; Takahashi, Tanabe et al. 2007. For example, the creating step can comprise: a) isolating a somatic cell, such as a skin cell or fibroblast, from the patient; and b) introducing a set of pluripotency-associated genes into the somatic cell in order to induce the cell to become a pluripotent stem cell. The set of pluripotency-associated genes can be one or more of the genes selected from the group consisting of OCT4, SOX1, SOX2, SOX3, SOX15, SOX18, NANOG, KLF1, KLF2, KLF4, KLF5, c-MYC, n-MYC, REM2, TERT and LIN28.

### Performing a Biopsy or Aspirate of the Patient's Liver or Bone Marrow

[0281] A biopsy or aspirate is a sample of tissue or fluid taken from the body. There are many different kinds of biopsies or aspirates. Nearly all of them involve using a sharp tool to remove a small amount of tissue. If the biopsy will be on the skin or other sensitive area, numbing medicine can be applied first. A biopsy or aspirate may be performed according to any of the known methods in the art. For example, in a biopsy, a needle is injected into the liver through the skin of the belly, capturing the liver tissue. For example, in a bone marrow aspirate, a large needle is used to enter the pelvis bone to collect bone marrow.

### Isolating a Liver Specific Progenitor Cell or Primary Hepatocyte

[0282] Liver specific progenitor cells and primary hepatocytes may be isolated according to any method known in the art. For example, human hepatocytes are isolated from fresh surgical specimens. Healthy liver tissue is used to isolate hepatocytes by collagenase digestion. The obtained cell suspension is filtered through a 100-mm nylon mesh and sedimented by centrifugation at 50 g for 5 minutes, resuspended, and washed two to three times in cold wash medium. Human liver stem cells are obtained by culturing under stringent conditions of hepatocytes obtained from fresh liver preparations. Hepatocytes seeded on collagen-coated plates are cultured for 2 weeks. After 2 weeks, surviving cells are removed, and characterized for expression of stem cells markers (Herrera et al., STEM CELLS 2006; 24: 2840-2850).

### Isolating a Mesenchymal Stem Cell

[0283] Mesenchymal stem cells can be isolated according to any method known in the art, such as from a patient's bone marrow or peripheral blood. For example, marrow aspirate can be collected into a syringe with heparin. Cells can be washed and centrifuged on a Percoll. The cells can be cultured in Dulbecco's modified Eagle's medium (DMEM) (low glucose) containing 10% fetal bovine serum (FBS) (Pittinger M F, Mackay A M, Beck S C et al., Science 1999; 284:143-147).

### Genetically Modified Cells

[0284] The term “genetically modified cell” refers to a cell that comprises at least one genetic modification introduced by genome editing (e.g., using the CRISPR/Cas9 or CRISPR/Cpf1 system). In some ex vivo examples herein, the genetically modified cell can be genetically modified progenitor cell. In some in vivo examples herein, the genetically modified cell can be a genetically modified liver cell. A genetically modified cell comprising an exogenous genome-targeting nucleic acid and/or an exogenous nucleic acid encoding a genome-targeting nucleic acid is contemplated herein.

[0285] The term “control treated population” describes a population of cells that has been treated with identical media, viral induction, nucleic acid sequences, temperature, confluency, flask size, pH, etc., with the exception of the addition of the genome editing components. Any method known in the art can be used to measure transcription of PCSK9 gene or protein expression or activity, for example Western Blot analysis of the PCSK9 protein or real time PCR for quantifying PCSK9 mRNA.

[0286] The term “isolated cell” refers to a cell that has been removed from an organism in which it was originally found, or a descendant of such a cell. Optionally, the cell can be cultured in vitro, e.g., under defined conditions or in the presence of other cells. Optionally, the cell can be later introduced into a second organism or re-introduced into the organism from which it (or the cell from which it is descended) was isolated.

[0287] The term “isolated population” with respect to an isolated population of cells refers to a population of cells that has been removed and separated from a mixed or heterogeneous population of cells. In some cases, the isolated population can be a substantially pure population of cells, as compared to the heterogeneous population from which the cells were isolated or enriched. In some cases, the isolated population can be an isolated population of human progenitor cells, e.g., a substantially pure population of human progenitor cells, as compared to a heterogeneous population of cells comprising human progenitor cells and cells from which the human progenitor cells were derived.

[0288] The term “substantially enhanced,” with respect to a particular cell population, refers to a population of cells in which the occurrence of a particular type of cell is increased relative to pre-existing or reference levels, by at least 2-fold, at least 3-, at least 4-, at least 5-, at least 6-, at least 7-, at least 8-, at least 9, at least 10-, at least 20-, at least 50-, at least 100-, at least 400-, at least 1000-, at least 5000-, at least 20000-, at least 100000- or more fold depending, e.g., on the desired levels of such cells for ameliorating Dyslipidemias.

[0289] The term “substantially enriched” with respect to a particular cell population, refers to a population of cells that is at least about 10%, about 20%, about 30%, about 40%, about 50%, about 60%, about 70% or more with respect to the cells making up a total cell population.

[0290] The terms “substantially enriched” or “substantially pure” with respect to a particular cell population, refers to a population of cells that is at least about 75%, at least about 85%, at least about 90%, or at least about 95% pure, with respect to the cells making up a total cell population. That is, the terms “substantially pure” or “essentially purified,” with regard to a population of progenitor cells, refers to a population of cells that contain fewer than about 20%, about 15%, about 10%, about 9%, about 8%, about 7%, about 6%, about 5%, about 4%, about 3%, about 2%, about 1%, or less than 1%, of cells that are not progenitor cells as defined by the terms herein.

Differentiation of Genome-Edited iPSCs into Other Cell Types

[0291] Another step of the ex vivo methods of the present disclosure can comprise differentiating the genome-edited iPSCs into hepatocytes. The differentiating step may be performed according to any method known in the art. For example, hiPSC are differentiated into definitive endoderm using various treatments, including activin and B27 supplement (Life Technology). The definitive endoderm is further differentiated into hepatocyte, the treatment includes: FGF4, HGF, BMP2, BMP4, Oncostatin M, Dexametason, etc. (Duan et al, STEM CELLS; 2010; 28:674-686, Ma et al, STEM CELLS TRANSLATIONAL MEDICINE 2013; 2:409-419).

Differentiation of Genome-Edited Mesenchymal Stem Cells into Hepatocytes

[0292] Another step of the ex vivo methods of the present disclosure can comprise differentiating the genome-edited mesenchymal stem cells into hepatocytes. The differentiating step may be performed according to any method known in the art. For example, hMSC are treated with various factors and hormones, including insulin, transferrin, FGF4, HGF, bile acids (Sawitza I et al, Sci Rep. 2015; 5: 13320).

Implanting Cells into Patients

[0293] Another step of the ex vivo methods of the present disclosure can comprise implanting the hepatocytes into patients. This implanting step may be accomplished using any method of implantation known in the art. For example, the genetically modified cells may be injected directly in the patient's blood or otherwise administered to the patient.

[0294] Another step of the ex vivo methods of the invention involves implanting the progenitor cells or primary hepatocytes into patients. This implanting step may be accomplished using any method of implantation known in the art. For example, the genetically modified cells may be injected directly in the patient's liver or otherwise administered to the patient.

### III. FORMULATIONS AND DELIVERY

### Pharmaceutically Acceptable Carriers

[0295] The ex vivo methods of administering progenitor cells to a subject contemplated herein involve the use of therapeutic compositions comprising progenitor cells.

[0296] Therapeutic compositions can contain a physiologically tolerable carrier together with the cell composition, and optionally at least one additional bioactive agent as described herein, dissolved or dispersed therein as an active ingredient. In some cases, the therapeutic composition is not substantially immunogenic when administered to a mammal or human patient for therapeutic purposes, unless so desired.

[0297] In general, the progenitor cells described herein can be administered as a suspension with a pharmaceutically acceptable carrier. One of skill in the art will recognize that a pharmaceutically acceptable carrier to be used in a cell composition will not include buffers, compounds, cryopreservation agents, preservatives, or other agents in amounts that substantially interfere with the viability of the cells to be delivered to the subject. A formulation comprising cells can include e.g., osmotic buffers that permit cell membrane integrity to be maintained, and optionally, nutrients to maintain cell viability or enhance engraftment upon administration. Such formulations and suspensions are known to those of skill in the art and/or can be adapted for use with the progenitor cells, as described herein, using routine experimentation.

[0298] A cell composition can also be emulsified or presented as a liposome composition, provided that the emulsification procedure does not adversely affect cell viability. The cells and any other active ingredient can be mixed with excipients that are pharmaceutically acceptable and compatible with the active ingredient, and in amounts suitable for use in the therapeutic methods described herein.

[0299] Additional agents included in a cell composition can include pharmaceutically acceptable salts of the components therein. Pharmaceutically acceptable salts include the acid addition salts (formed with the free amino groups of the polypeptide) that are formed with inorganic acids, such as, for example, hydrochloric or phosphoric acids, or such organic acids as acetic, tartaric, mandelic and the like. Salts formed with the free carboxyl groups can also be derived from inorganic bases, such as, for example, sodium, potassium, ammonium, calcium or ferric hydroxides, and such organic bases as isopropylatnine, trimethylamine, 2-ethylamino ethanol, histidine, procaine and the like.

[0300] Physiologically tolerable carriers are well known in the art. Exemplary liquid carriers are sterile aqueous solutions that contain no materials in addition to the active ingredients and water, or contain a buffer such as sodium phosphate at physiological pH value, physiological saline or both, such as phosphate-buffered saline. Still further, aqueous carriers can contain more than one buffer salt, as well as salts such as sodium and potassium chlorides, dextrose, polyethylene glycol and other solutes. Liquid compositions can also contain liquid phases in addition to and to the exclusion of water. Exemplary of such additional liquid phases are glycerin, vegetable oils such as cottonseed oil, and water-oil emulsions. The amount of an active compound used in the cell compositions that is effective in the treatment of a particular disorder or condition can depend on the nature of the disorder or condition, and can be determined by standard clinical techniques.

### Guide RNA Formulation

[0301] Guide RNAs of the present disclosure can be formulated with pharmaceutically acceptable excipients such as carriers, solvents, stabilizers, adjuvants, diluents, etc., depending upon the particular mode of administration and dosage form. Guide RNA compositions can be formulated to achieve a physiologically compatible pH, and range from a pH of about 3 to a pH of about 11, about pH 3 to about pH 7, depending on the formulation and route of administration. In some cases, the pH can be adjusted to a range from about pH 5.0 to about pH 8. In some cases, the compositions can comprise a therapeutically effective amount of at least one compound as described herein, together with one or more pharmaceutically acceptable excipients. Optionally, the compositions can comprise a combination of the compounds described herein, or can include a second active ingredient useful in the treatment or prevention of bacterial growth (for example and without limitation, anti-bacterial or anti-microbial agents), or can include a combination of reagents of the present disclosure.

[0302] Suitable excipients include, for example, carrier molecules that include large, slowly metabolized macromolecules such as proteins, polysaccharides, polylactic acids, polyglycolic acids, polymeric amino acids, amino acid copolymers, and inactive virus particles. Other exemplary excipients can include antioxidants (for example and without limitation, ascorbic acid), chelating agents (for example and without limitation, EDTA), carbohydrates (for example and without limitation, dextrin, hydroxyalkylcellulose, and hydroxyalkylmethylcellulose), stearic acid, liquids (for example and without limitation, oils, water, saline, glycerol and ethanol), wetting or emulsifying agents, pH buffering substances, and the like.

### Delivery

[0303] Guide RNA polynucleotides (RNA or DNA) and/or endonuclease polynucleotide(s) (RNA or DNA) can be delivered by viral or non-viral delivery vehicles known in the art. Alternatively, endonuclease polypeptide(s) can be delivered by viral or non-viral delivery vehicles known in the art, such as electroporation or lipid nanoparticles. In further alternative aspects, the DNA endonuclease can be delivered as one or more polypeptides, either alone or pre-complexed with one or more guide RNAs, or one or more crRNA together with a tracrRNA.

[0304] Polynucleotides can be delivered by non-viral delivery vehicles including, but not limited to, nanoparticles, liposomes, ribonucleoproteins, positively charged peptides, small molecule RNA-conjugates, aptamer-RNA chimeras, and RNA-fusion protein complexes. Some exemplary non-viral delivery vehicles are described in Peer and Lieberman, Gene Therapy, 18: 1127-1133 (2011) (which focuses on non-viral delivery vehicles for siRNA that are also useful for delivery of other polynucleotides).

[0305] For polynucleotides of the invention, the formulation may be selected from any of those taught, for example, in International Application PCT/US2012/069610.

[0306] Polynucleotides, such as guide RNA, sgRNA, and mRNA encoding an endonuclease, may be delivered to a cell or a patient by a lipid nanoparticle (LNP).

[0307] A LNP refers to any particle having a diameter of less than 1000 nm, 500 nm, 250 nm, 200 nm, 150 nm, 100 nm, 75 nm, 50 nm, or 25 nm. Alternatively, a nanoparticle may range in size from 1-1000 nm, 1-500 nm, 1-250 nm, 25-200 nm, 25-100 nm, 35-75 nm, or 25-60 nm.

[0308] LNPs may be made from cationic, anionic, or neutral lipids. Neutral lipids, such as the fusogenic phospholipid DOPE or the membrane component cholesterol, may be included in LNPs as ‘helper lipids’ to enhance transfection activity and nanoparticle stability. Limitations of cationic lipids include low efficacy owing to poor stability and rapid clearance, as well as the generation of inflammatory or anti-inflammatory responses.

[0309] LNPs may also be comprised of hydrophobic lipids, hydrophilic lipids, or both hydrophobic and hydrophilic lipids.

[0310] Any lipid or combination of lipids that are known in the art can be used to produce a LNP. Examples of lipids used to produce LNPs are: DOTMA, DOSPA, DOTAP, DMRIE, DC-cholesterol, DOTAP-cholesterol, GAP-DMORIE-DPyPE, and GL67A-DOPE-DMPE-polyethylene glycol (PEG). Examples of cationic lipids are: 98N12-5, C12-200, DLin-KC2-DMA (KC2), DLin-MC3-DMA (MC3), XTC, MD1, and 7C1. Examples of neutral lipids are: DPSC, DPPC, POPC, DOPE, and SM. Examples of PEG-modified lipids are: PEG-DMG, PEG-CerC14, and PEG-CerC20.

[0311] The lipids can be combined in any number of molar ratios to produce a LNP. In addition, the polynucleotide(s) can be combined with lipid(s) in a wide range of molar ratios to produce a LNP.

[0312] As stated previously, the site-directed polypeptide and genome-targeting nucleic acid can each be administered separately to a cell or a patient. On the other hand, the site-directed polypeptide can be pre-complexed with one or more guide RNAs, or one or more crRNA together with a tracrRNA. The pre-complexed material can then be administered to a cell or a patient. Such pre-complexed material is known as a ribonucleoprotein particle (RNP).

[0313] RNA is capable of forming specific interactions with RNA or DNA. While this property is exploited in many biological processes, it also comes with the risk of promiscuous interactions in a nucleic acid-rich cellular environment. One solution to this problem is the formation of ribonucleoprotein particles (RNPs), in which the RNA is pre-complexed with an endonuclease. Another benefit of the RNP is protection of the RNA from degradation.

[0314] The endonuclease in the RNP can be modified or unmodified. Likewise, the gRNA, crRNA, tracrRNA, or sgRNA can be modified or unmodified. Numerous modifications are known in the art and can be used.

[0315] The endonuclease and sgRNA can be generally combined in a 1:1 molar ratio. Alternatively, the endonuclease, crRNA and tracrRNA can be generally combined in a 1:1:1 molar ratio. However, a wide range of molar ratios can be used to produce a RNP.

### AAV (Adeno Associated Virus)

[0316] A recombinant adeno-associated virus (AAV) vector can be used for delivery. Techniques to produce rAAV particles, in which an AAV genome to be packaged that includes the polynucleotide to be delivered, rep and cap genes, and helper virus functions are provided to a cell are standard in the art. Production of rAAV typically requires that the following components are present within a single cell (denoted herein as a packaging cell): a rAAV genome, AAV rep and cap genes separate from (i.e., not in) the rAAV genome, and helper virus functions. The AAV rep and cap genes may be from any AAV serotype for which recombinant virus can be derived, and may be from a different AAV serotype than the rAAV genome ITRs, including, but not limited to, AAV serotypes described herein. Production of pseudotyped rAAV is disclosed in, for example, international patent application publication number WO 01/83692.

### AAV Serotypes

[0317] AAV particles packaging polynucleotides encoding compositions of the invention, e.g., endonucleases, donor sequences, or RNA guide molecules, of the present invention may comprise or be derived from any natural or recombinant AAV serotype. According to the present invention, the AAV particles may utilize or be based on a serotype selected from any of the following serotypes, and variants thereof including but not limited to AAV1, AAV10, AAV106.1/hu.37, AAV11, AAV114.3/hu.40, AAV12, AAV127.2/hu.41, AAV127.5/hu,42, AAV128.1/hu.43, AAV128.3/hu.44, AAV130.4/hu.48, AAV145.1/hu.53, AAV145.5/hu.54, AAV145.6/hu.55, AAV16.12/hu.11, AAV16.3, AAV16.8./hu.10, AAV161.10/hu.60, AAV161.6/hu.61, AAV1-7/rh.48, AAV1-8/rh.49, AAV2, AAV2.5T, AAV2-15/rh.62, AAV223.1, AAV223.2, AAV223.4, AAV223.5, AAV223.6, AAV223.7, AAV2-3/rh.61, AAV24.1, AAV2-4/rh.50, AAV2-5/rh.51, AAV27.3, AAV29.3/bb.1, AAV29.5/bb.2, AAV2G9, AAV-2-pre-miRNA-101, AAV3, AAV3.1/hu.6. AAV3.1/hu.9, AAV3-11/rh.53, AAV3-3, AAV33.12/hu.17, AAV33.4/hu.15, AAV33.8/hu.16, AAV3-9/rh.52, AAV3a, AAV3b, AAV4, AAV4-19/rh.55, AAV42.12, AAV42-10, AAV42-11, AAV42-12, AAV42-13, AAV42-15, AAV42-1b, AAV42-2, AAV42-3a, AAV42-3b, AAV42-4, AAV42-5a, AAV42-5b, AAV42-6b, AAV42-8, AAV42-aa, AAV43-1, AAV43-12, AAV43-20, AAV43-21, AAV43-23, AAV43-25, AAV43-5, AAV4-4, AAV44.1, AAV44.2, AAV44.5, AAV46.2/hu.28, AAV46.6/hu.29, AAV4-8/r11.64, AAV4-8/rh.64, AAV4-9/rh.54, AAV5, AAV52.1/hu.20, AAV52/hu.19, AAV5-22/rh.58, AAV5-3/rh.57, AAV54.1/hu.21, AAV54.2/hu.22, AAV54.4R/hu.27, AAV54.5/hu.23, AAV54.7/hu.24, AAV58.2/hu.25, AAV6, AAV6.1, AAV6.1.2, AAV6.2, AAV7, AAV7.2, AAV7.3/hu.7, AAV8, AAV-8b, AAV-8h, AAV9, AAV9.11, AAV9.13, AAV9.16, AAV9.24, AAV9.45, AAV9.47, AAV9.61, AAV9.68, AAV9.84, AAV9.9, AAVA3.3, AAVA3.4, AAVA3.5, AAVA3.7, AAV-b, AAVC1, AAVC2, AAVC5, AAVCh.5, AAVCh.5R1, AAVcy.2, AAVcy.3, AAVcy.4, AAVcy.5, AAVCy.5R1, AAVCy.5R2, AAVCy.5R3, AAVCy.5R4, AAVcy.6, AAV-DJU, AAV-DJ8, AAVF3, AAVF5, AAV-h, AAVH-1/hu.1, AAVH2, AAVH-5/hu.3, AAVH6, AAVhE1.1, AAVhER1.14, AAVhEr1.16, AAVhEr1.18, AAVhER1.23, AAVhEr1.35, AAVhEr1.36, AAVhEr1.5, AAVhEr1.7, AAVhEr1.8, AAVhEr2.16, AAVhEr2.29, AAVhEr2.30, AAVhEr2.31, AAVhEr2.36, AAVhEr2.4, AAVhEr3.1, AAVhu.1, AAVhu.10, AAVhu.11, AAVhu.11, AAVhu.12, AAVhu.13, AAVhu.14/9, AAVhu.15, AAVhu.16, AAVhu.17, AAVhu.18, AAVhu.19, AAVhu.2, AAVhu.20, AAVhu.21, AAVhu.22, AAVhu.23.2, AAVhu.24, AAVhu.25, AAVhu.27, AAVhu.28, AAVhu.29, AAVhu.29R, AAVhu.3, AAVhu.31, AAVhu.32, AAVhu.34, AAVhu.35, AAVhu.37, AAVhu.39, AAVhu.4, AAVhu.40, AAVhu.41, AAVhu.42, AAVhu.43, AAVhu.44, AAVhu.44R1, AAVhu.44R2, AAVhu.44R3, AAVhu.45, AAVhu.46, AAVhu.47, AAVhu.48, AAVhu.48R1, AAVhu.48R2, AAVhu.48R3, AAVhu.49, AAVhu.5, AAVhu.51, AAVhu.52, AAVhu.53, AAVhu.54, AAVhu.55, AAVhu.56, AAVhu.57, AAVhu.58, AAVhu.6, AAVhu.60, AAVhu.61, AAVhu.63, AAVhu.64, AAVhu.66, AAVhu.67, AAVhu.7, AAVhu.8, AAVhu.9, AAVhu.t 19, AAVLG-10/rh.40, AAVLG-4/rh.38, AAVLG-9/hu.39, AAVLG-9/hu.39, AAV-LK01, AAV-LK02, AAVLK03, AAV-LK03, AAV-LK04, AAV-LK05, AAV-LK06, AAV-LK07, AAV-LK08, AAV-LK09, AAV-LK10, AAV-LK11, AAV-LK12, AAV-LK13, AAV-LK14, AAV-LK15, AAV-LK17, AAV-LK18, AAV-LK19, AAVN721-8/rh.43, AAV-PAEC, AAV-PAEC11, AAV-PAEC12, AAV-PAEC2, ANV-PAEC4, AAV-PAEC6, AAV-PAEC7, AAV-PAEC8, AAVpi.1, AAVpi.2, AAVpi.3, AAVrh.10, AAVrh.12, AAVrh.13, AAVrh.13R, AAVrh.14, AAVrh.17, AAVrh.18, AAVrh.19, AAVrh.2, AAVrh.20, AAVrh.21, AAVrh.22, AAVrh.23, AAVrh.24, AAVrh.25, AAVrh.2R, AAVrh.31, AAVrh.32, AAVrh.33, AAVrh.34, AAVrh.35, AAVrh.36, AAVrh.37, AAVrh.37R2, AAVrh.38, AAVrh.39, AAVrh.40, AAVrh.43, AAVrh.44, AAVrh.45, AAVrh.46, AAVrh.47, AAVrh.48, AA.Vrh.48, AAVrh.48.1, AA.Vrh.48.1.2, AAVrh.48.2, AAVrh.49, AAVrh.50, AAVrh.51, AAVrh.52, AAVrh.53, AAVrh.54, AAVrh.55, AAVrh.56, AAVrh.57, AAVrh.58, AAVrh.59, AAVrh.60, AAVrh.61, AAVrh.62, AAVrh.64, AAVrh.64R1, AAVrh.64R2, AAVrh.65, AAVrh.67, AAVrh.68, AAVrh.69, AAVrh.70, AAVrh.72, AAVrh.73, AAVrh.74, AAVrh.8, AAVrh.8R, AAVrh8R, AAVrh8R A586R mutant, AAVrh8R R533A mutant, BAAV, BNP61 AAV, BNP62 AAV, BNP63 AAV, bovine AAV, caprine AAV, Japanese AAV 10, true type AAV (ttAAV), UPENN AAV 10, AAV-LK16, AAAV, AAV Shuffle 100-1, AAV Shuffle 100-2, AAV Shuffle 100-3, AAV Shuffle 100-7, AAV Shuffle 10-2, AAV Shuffle 10-6, AAV Shuffle 10-8, AAV SM 100-10, AAV SM 100-3, AAV SM 10-1, AAV SM 10-2, and/or AAV SM 10-8.

[0318] In some aspects, the AAV serotype may be, or have, a mutation in the AAV9 sequence as described by N Pulicherla et al. (Molecular Therapy 19(6):1070-1078 (2011)), such as but not limited to, AAV9.9, AAV9.11, AAV9.13, AAV9.16, AAV9.24, AAV9.45, AAV9.47, AAV9.61, AAV9.68, AAV9.84.

[0319] In some aspects, the AAV serotype may be, or have, a sequence as described in U.S. Pat. No. 6,156,303, such as, but not limited to, AAV3B (SEQ ID NO: 1 and 10 of U.S. Pat. No. 6,156,303), AAV6 (SEQ ID NO: 2, 7 and 11 of U.S. Pat. No. 6,156,303), AAV2 (SEQ ID NO: 3 and 8 of U.S. Pat. No. 6,156,303), AAV3A (SEQ ID NO: 4 and 9, of U.S. Pat. No. 6,156,303), or derivatives thereof.

[0320] In some aspects, the serotype may be AAVDJ or a variant thereof, such as AAVDJ8 (or AAV-DJ8), as described by Grimm et al. (Journal of Virology 82(12): 5887-5911 (2008). The amino acid sequence of AAVDJ8 may comprise two or more mutations in order to remove the heparin binding domain (HBD). As a non-limiting example, the AAV-DJ sequence described as SEQ ID NO: 1 in U.S. Pat. No. 7,588,772 may comprise two mutations: (1) R587Q where arginine (R; Arg) at amino acid 587 is changed to glutamine (Q; Gln) and (2) R590T where arginine (R; Arg) at amino acid 590 is changed to threonine (T; Thr). As another non-limiting example, may comprise three mutations: (1) K406R where lysine (K; Lys) at amino acid 406 is changed to arginine (R; Arg), (2) R587Q where arginine (R; Arg) at amino acid 587 is changed to glutamine (Q; Gln) and (3) R590T where arginine (R; Arg) at amino acid 590 is changed to threonine (T; Thr).

[0321] In some embodiments, the AAV serotype may be, or have, a sequence as described in International Publication No. WO2015121501, such as, but not limited to, true type AAV (ttAAV) (SEQ ID NO: 2 of WO2015121501), “UPenn AAV10” (SEQ ID NO: 8 of WO2015121501), “Japanese AAV10” (SEQ ID NO: 9 of WO2015121501), or variants thereof.

[0322] According to the present invention, AAV capsid serotype selection or use may be from a variety of species. In one embodiment, the AAV may be an avian AAV (AAAV). The AAAV serotype may be, or have, a sequence as described in U.S. Pat. No. 9,238,800; such as, but not limited to, AAAV (SEQ ID NO: 1, 2, 4, 6, 8, 10, 12, and 14 of U.S. Pat. No. 9,238,800), or variants thereof.

[0323] In one embodiment, the AAV may be a bovine AAV (BAAV). The BAAV serotype may be, or have, a sequence as described in U.S. Pat. No. 9,193,769, such as, but not limited to, BAAV (SEQ ID NO: 1 and 6 of U.S. Pat. No. 9,193,769), or variants thereof. The BAAV serotype may be or have a sequence as described in U.S. Pat. No. 7,427,396, such as, but not limited to, BAAV (SEQ ID NO: 5 and 6 of U.S. Pat. No. 7,427,396), or variants thereof.

[0324] In one embodiment, the AAV may be a caprine AAV. The caprine AAV serotype may be, or have, a sequence as described in U.S. Pat. No. 7,427,396, such as, but not limited to, caprine AAV (SEQ ID NO: 3 of U.S. Pat. No. 7,427,396), or variants thereof.

[0325] In other embodiments the AAV may be engineered as a hybrid AAV from two or more parental serotypes. In one embodiment, the AAV may be AAV2G9 which comprises sequences from AAV2 and AAV9. The AAV2G9 AAV serotype may be, or have, a sequence as described in United States Patent Publication No. US20160017005.

[0326] In one embodiment, the AAV may be a serotype generated by the AAV9 capsid library with mutations in amino acids 390-627 (VP1 numbering) as described by Pulicherla et al. (Molecular Therapy 19(6):1070-1078 (2011). The serotype and corresponding nucleotide and amino acid substitutions may be, but is not limited to, AAV9.1 (G1594C; D532H), AAV6.2 (T1418A and T1436X; V473D and I479K), AAV9.3 (T1238A; F413Y), AAV9.4 (T1250C and A1617T; F417S), AAV9.5 (A1235G, A1314T, A1642G, C1760T; Q412R, T548A, A587V), AAV9.6 (T1231A; F411I), AAV9.9 (G1203A, G1785T, W595C), AAV9.10 (A1500G, T1676C; M559T), AAV9.11 (A1425T, A1702C, A1769T; T568P, Q590L), AAV9.13 (A1369C, A1720T; N457H, T574S), AAV9.14 (T1340A, T1362C, T1560C, G1713A; L447H), AAV9.16 (A1775T; Q592L), AAV9.24 (T1507C, T1521G; W503R), AAV9.26 (A1337G, A1769C; Y446C, Q590P), AAV9.33 (A1667C; D556A), AAV9.34 (A1534G, C1794T; N512D), AAV935 (A1289T, T1450A, C1494T, A1515T, C1794A, G1816A; Q430L, Y484N, N98K, V606I), AAV9.40 (A1694T, E565V), AAV941 (A1348T, T1362C; T450S), AAV9.44 (A1684C, A1701T, A1737G; N562H, K567N), AAV9.45 (A1492T, C1804T; N498Y, L602F), AAV9.46 (G1441C, T1525C, T1549G; G481R, W509R, L517V), 9.47 (G1241A, G1358A, A1669G, C1745T; S414N, G453D, K557E, T582I), AAV9.48 (C1445T, A1736T; P482L, Q579L), AAV9.50 (A1638T, C1683T, T1805A; Q546H, L602H), AAV9.53 (G1301A, A1405C, C1664T, G1811T; R134Q, S469R, A555V, C1604V), AAV9.54 (C1531A, T1609A, L511I, L537M), AAV9.55 (T1605A; F535L), AAV9.58 (C1475T, C1579A; T492I, H527N), AAV.59 (T1336C; Y446H), AAV9.61 (A1493T; N498I), AAV9.64 (C1531A, A1617T; L511I), AAV9.65 (C1335T, T1530C, C1568A, A523D), AAV9.68 (C1510A; P504T), AAV9.80 (G1441A; G481R), AAV9.83 (C1402A, A1500T; P468T, E500D), AAV9.87 (T1464C, T1468C; S490P), AAV9.90 (A1196T; Y399F), AAV9.91 (T1316G, A1583T, C1782G, T1806C; L439R, K528I), AAV9.93 (A1273G, A1421G, A1638C, C1712T, G1732A, A1744T, A1832T; S425G, Q474R, Q546H, P571L, G578R, T582S, D611V), AAV9.94 (A1675T; M559L) and AAV9.95 (T1605A; F535L).

[0327] In one embodiment, the AAV may be a serotype comprising at least one AAV capsid CD8+ T-cell epitope. As a non-limiting example, the serotype may be AAV1, AAV2 or AAV8.

[0328] In one example, the AAV may be a variant, such as PHP.A or PHP.B as described in Deverman. 2016. Nature Biotechnology. 34(2): 204-209.

[0329] In one example, the AAV may be a serotype selected from any of those found in SEQ ID NOs: 4,734-5,302 and Table 2.

[0330] In one example, the AAV may be encoded by a sequence, fragment or variant as disclosed in SEQ NOs: 734-5,302 and Table 2.

[0331] General principles of rAAV production are reviewed in, for example, Carter, 1992, Current Opinions in Biotechnology, 1533-539; and Muzyczka, 1992, Curr. Topics in Microbial. and Immunol., 158:97-129). Various approaches are described in Ratschin et al., Mol. Cell. Biol. 4:2072 (1984); Hermonat et al., Proc. Natl. Acad. Sci. USA, 81:6466 (1984); Tratschin et al., Mol. Cell. Biol. 5:3251 (1985); McLaughlin et al., J. Virol., 62:1963 (1988); and Lebkowski et al., 1988 Mol. Cell. Biol., 7:349 (1988). Samulski et al. (1989, J. Virol., 63:3822-3828); U.S. Pat. No. 5,173,414; WO95/13365 and corresponding U.S. Pat. No. 5,658,776; WO 95/13392; WO 96/17947; PCT/US98/18600; WO 97/09441 (PCT/US96/14423); WO 97/08298 (PCT/US96/13872); WO 97/21825 (PCT/US96/20777); WO97/06243 (PCT/FR96/01064); WO 99/11764; Perrin et al. (1995) Vaccine 13:1244-1250; Paul et al. (1993) Human Gene Therapy 4:609-615; Clark et al. (1996) Gene Therapy 3:1124-1132; U.S. Pat. No. 5,786,211; U.S. Pat. No. 5,871,982; and U.S. Pat. No. 6,258,595.

[0332] AAV vector serotypes can be matched to target cell types. For example, the following exemplary cell types can be transduced by the indicated AAV serotypes among others.

TABLE 2
Tissue/Cell Types and Serotypes

| Tissue/Cell Type | Serotype |
|---|---|
| Liver | AAV3, AAV5, AAV8, AAV9 |
| Skeletal muscle | AAV1, AAV7, AAV6, AAV8, |
| | AAV9 |
| Central nervous system | AAV5, AAV1, AAV4, AAV9 |
| RPE | AAV5, AAV4 |
| Photoreceptor cells | AAV5 |
| Lung | AAV9 |
| Heart | AAV8 |
| Pancreas | AAV8 |
| Kidney | AAV2, AAV8 |
| Hematopoietic stem cells | AAV6 |

[0333] In addition to adeno-associated viral vectors, other viral vectors can be used. Such viral vectors include, but are not limited to, lentivirus, alphavirus, enterovirus, pestivirus, baculovirus, herpesvirus, Epstein Barr virus, papovavirus, poxvirus, vaccinia virus, and herpes simplex virus.

[0334] In some aspects, Cas9 mRNA, sgRNA targeting one or two loci in PCSK9 gene, and donor DNA can each be separately formulated into lipid nanoparticles, or are all co-formulated into one lipid nanoparticle.

[0335] In some aspects, Cas9 mRNA can be formulated in a lipid nanoparticle, while sgRNA and donor DNA can be delivered in an AAV vector.

[0336] Options are available to deliver the Cas9 nuclease as a DNA plasmid, as mRNA or as a protein. The guide RNA can be expressed from the same DNA, or can also be delivered as an RNA. The RNA can be chemically modified to alter or improve its half-life, or decrease the likelihood or degree of immune response. The endonuclease protein can be complexed with the gRNA prior to delivery. Viral vectors allow efficient delivery; split versions of Cas9 and smaller orthologs of Cas9 can be packaged in AAV, as can donors for HDR. A range of non-viral delivery methods also exist that can deliver each of these components, or non-viral and viral methods can be employed in tandem. For example, nano-particles can be used to deliver the protein and guide RNA, while AAV can be used to deliver a donor DNA.

### IV. DOSING AND ADMINISTRATION

[0337] The terms “administering,” “introducing” an “transplanting” are used interchangeably in the context of the placement of cells, e.g., progenitor cells, into a subject, by a method or route that results in at least partial localization of the introduced cells at a desired site, such as a site of injury or repair, such that a desired effect(s) is produced. The cells e.g., progenitor cells, or their differentiated progeny can be administered by any appropriate route that results in delivery to a desired location in the subject where at least a portion of the implanted cells or components of the cells remain viable. The period of viability of the cells after administration to a subject can be as short as a few hours, e,g., twenty-four hours, to a few days, to as long as several years, or even the life time of the patient, i.e., long-term engraftment. For example, in some aspects described herein, an effective amount of liver progenitor cells is administered via a systemic route of administration, such as an intraperitoneal or intravenous route.

[0338] The terms “individual,” “subject,” “host” and “patient” are used interchangeably herein and refer to any subject for whom diagnosis, treatment or therapy is desired. In some aspects, the subject is a mammal. In some aspects, the subject is a human being.

[0339] When provided prophylactically, progenitor cells described herein can be administered to a subject in advance of any symptom of Dyslipidemia. Accordingly, the prophylactic administration of a progenitor cell population serves to prevent Dyslipidemia.

[0340] A progenitor cell population being administered according to the methods described herein can comprise allogeneic progenitor cells obtained from one or more donors. Such progenitors may be of any cellular or tissue origin, e.g., liver, muscle, cardiac, etc. “Allogeneic” refers to a progenitor cell or biological samples comprising progenitor cells obtained from one or more different donors of the same species, where the genes at one or more loci are not identical. For example, a liver progenitor cell population being administered to a subject can be derived from one more unrelated donor subjects, or from one or more non-identical siblings. In some cases, syngeneic progenitor cell populations can be used, such as those obtained from genetically identical animals, or from identical twins. The progenitor cells can be autologous cells; that is, the progenitor cells are obtained or isolated from a subject and administered to the same subject, i.e., the donor and recipient are the same.

[0341] The term “effective amount” refers to the amount of a population of progenitor cells or their progeny needed to prevent or alleviate at least one or more signs or symptoms of Dyslipidemia, and relates to a sufficient amount of a composition to provide the desired effect, e.g., to treat a subject having Dyslipidemia. The term “therapeutically effective amount” therefore refers to an amount of progenitor cells or a composition comprising progenitor cells that is sufficient to promote a particular effect when administered to a typical subject, such as one who has or is at risk for Dyslipidemia. An effective amount would also include an amount sufficient to prevent or delay the development of a symptom of the disease, alter the course of a symptom of the disease (for example but not limited to, slow the progression of a symptom of the disease), or reverse a symptom of the disease. It is understood that for any given case, an appropriate “effective amount” can be determined by one of ordinary skill in the art using routine experimentation.

[0342] For use in the various aspects described herein, an effective amount of progenitor cells comprises at least 10² progenitor cells, at least 5×10² progenitor cells, at least 10³ progenitor cells, at least 5×10³ progenitor cells, at least 10⁴ progenitor cells, at least 5×10⁴ progenitor cells, at least 10⁵ progenitor cells, at least 2×10⁵ progenitor cells, at least 3×10⁵ progenitor cells, at least 4×10⁵ progenitor cells, at least 5×10⁵ progenitor cells, at least 6×10⁵ progenitor cells, at least 7×10⁵ progenitor cells, at least 8×10⁵ progenitor cells, at least 9×10⁵ progenitor cells, at least 1×10⁶ progenitor cells, at least 2×10⁶ progenitor cells, at least 3×10⁶ progenitor cells, at least 4×10⁶ progenitor cells, at least 5×106 progenitor cells, at least 6×10⁶ progenitor cells, at least 7×10⁶ progenitor cells, at least 8×10⁶ progenitor cells, at least 9×10⁶ progenitor cells, or multiples thereof. The progenitor cells can be derived from one or more donors, or can be obtained from an autologous source. In some examples described herein, the progenitor cells can be expanded in culture prior to administration to a subject in need thereof.

[0343] Modest and incremental decreases in the levels of PCSK9 expressed in cells of patients having a PCSK9 related disorder can be beneficial for ameliorating one or more symptoms of the disease, for increasing long-term survival, and/or for reducing side effects associated with other treatments. Upon administration of such cells to human patients, the presence of progenitors that are producing decreased levels of PCSK9 is beneficial. In some cases, effective treatment of a subject gives rise to at least about 3%, 5% or 7% reduction in PCSK9 level relative to total PCSK9 in the treated subject. In some examples, the reduction in PCSK9 will be at least about 10% of total PCSK9. In some examples, the reduction in PCSK9 will be at least about 20% to 30% of total PCSK9. Similarly, the introduction of even relatively limited subpopulations of cells having significantly reduced levels of PCSK9 can be beneficial in various patients because in some situations normalized cells will have a selective advantage relative to diseased cells. However, even modest levels of progenitors with reduced levels of PCSK9 can be beneficial for ameliorating one or more aspects of Dyslipidemias in patients. In some examples, about 10%, about 20%, about 30%, about 40%, about 50%, about 60%, about 70%, about 80%, about 90% or more of the liver progenitors in patients to whom such cells are administered are producing decreased levels of PCSK9.

[0344] “Administered” refers to the delivery of a progenitor cell composition into a subject by a method or route that results in at least partial localization of the cell composition at a desired site. A cell composition can be administered by any appropriate route that results in effective treatment in the subject, i.e. administration results in delivery to a desired location in the subject where at least a portion of the composition delivered, i.e. at least 1×10⁴ cells are delivered to the desired site for a period of time.

[0345] In one aspect of the method, the pharmaceutical composition may be administered via a route such as, but not limited to, enteral (into the intestine), gastroenteral, epidural (into the dura matter), oral (by way of the mouth), transdermal, peridural, intracerebral (into the cerebrum), intracerebroventricular (into the cerebral ventricles), epicutaneous (application onto the skin), intradermal, (into the skin itself), subcutaneous (under the skin), nasal administration (through the nose), intravenous (into a vein), intravenous bolus, intravenous drip, intraarterial (into an artery), intramuscular (into a muscle), intracardiac (into the heart), intraosseous infusion (into the bone marrow), intrathecal (into the spinal canal), intraperitoneal, (infusion or injection into the peritoneum), intravesical infusion, intravitreal, (through the eye), intracavernous injection (into a pathologic cavity) intracavitary (into the base of the penis), intravaginal administration, intrauterine, extra-amniotic administration, transdermal (diffusion through the intact skin for systemic distribution), transmucosal (diffusion through a mucous membrane), transvaginal, insufflation (snorting), sublingual, sublabial, enema, eye drops (onto the conjunctiva), in ear drops, auricular (in or by way of the ear), buccal (directed toward the cheek), conjunctival, cutaneous, dental (to a tooth or teeth), electro-osmosis, endocervical, endosinusial, endotracheal, extracorporeal, hemodialysis, infiltration, interstitial, intra-abdominal, intra-amniotic, intra-articular, intrabiliary, intrabronchial, intrabursal, intracartilaginous (within a cartilage), intracaudal (within the cauda equine), intracisternal (within the cisterna magna cerebellomedularis), intracorneal (within the cornea), dental intracornal, intracoronary (within the coronary arteries), intracorporus cavernosum (within the dilatable spaces of the corporus cavernosa of the penis), intradiscal (within a disc), intraductal (within a duct of a gland), intraduodenal (within the duodenum), intradural (within or beneath the dura), intraepidermal (to the epidermis), intraesophageal (to the esophagus), intragastric (within the stomach), intragingival (within the gingivae), intraileal (within the distal portion of the small intestine), intralesional (within or introduced directly to a localized lesion), intraluminal (within a lumen of a tube), intralymphatic (within the lymph), intramedullary (within the marrow cavity of a bone), intrameningeal (within the meninges), intramyocardial (within the myocardium), intraocular (within the eye), intraovarian (within the ovary), intrapericardial (within the pericardium), intrapleural (within the pleura), intraprostatic (within the prostate gland), intrapulmonary (within the lungs or its bronchi), intrasinal (within the nasal or periorbital sinuses), intraspinal (within the vertebral column), intrasynovial (within the synovial cavity of a joint), intratendinous (within a tendon), intratesticular (within the testicle), intrathecal (within the cerebrospinal fluid at any level of the cerebrospinal axis), intrathoracic (within the thorax), intratubular (within the tubules of an organ), intratumor (within a tumor), intratympanic (within the auras media), intravascular (within a vessel or vessels), intraventricular (within a ventricle), iontophoresis (by means of electric current where ions of soluble salts migrate into the tissues of the body), irrigation (to bathe or flush open wounds or body cavities), laryngeal (directly upon the larynx), nasogastric (through the nose and into the stomach), occlusive dressing technique (topical route administration which is then covered by a dressing which occludes the area), ophthalmic (to the external eye), oropharyngeal (directly to the mouth and pharynx), parenteral, percutaneous, periarticular, peridural, perineural, periodontal, rectal, respiratory (within the respiratory tract by inhaling orally or nasally for local or systemic effect), retrobulbar (behind the pons or behind the eyeball), intramyocardial (entering the myocardium), soft tissue, subarachnoid, subconjunctival, submucosal, topical, transplacental (through or across the placenta), transtracheal (through the wall of the trachea), transtympanic (across or through the tympanic cavity), ureteral (to the ureter), urethral (to the urethra), vaginal, caudal block, diagnostic, nerve block, biliary perfusion, cardiac perfusion, photopheresis and spinal.

[0346] Modes of administration include injection, infusion, instillation, and/or ingestion. “Injection” includes, without limitation, intravenous, intramuscular, intra-arterial, intrathecal, intraventricular, intracapsular, intraorbital, intracardiac, intradermal, intraperitoneal, transtracheal, subcutaneous, subcuticular, intraarticular, sub capsular, subarachnoid, intraspinal, intracerebro spinal, and intrasternal injection and infusion. In some examples, the route is intravenous. For the delivery of cells, administration by injection or infusion can be made.

[0347] The cells can be administered systemically. The phrases “systemic administration,” “administered systemically”, “peripheral administration” and “administered peripherally” refer to the administration of a population of progenitor cells other than directly into a target site, tissue, or organ, such that it enters, instead, the subject's circulatory system and, thus, is subject to metabolism and other like processes.

[0348] The efficacy of a treatment comprising a composition for the treatment of Dyslipidemias can be determined by the skilled clinician. However, a treatment is considered “effective treatment,” if any one or all of the signs or symptoms of, as but one example, levels of PCSK9 are altered in a beneficial manner (e.g., decreased by at least 10%), or other clinically accepted symptoms or markers of disease are improved or ameliorated. Efficacy can also be measured by failure of an individual to worsen as assessed by hospitalization or need for medical interventions (e.g., progression of the disease is halted or at least slowed). Methods of measuring these indicators are known to those of skill in the art and/or described herein. Treatment includes any treatment of a disease in an individual or an animal (some non-limiting examples include a human, or a mammal) and includes: (1) inhibiting the disease, e.g., arresting, or slowing the progression of symptoms; or (2) relieving the disease, e.g., causing regression of symptoms; and (3) preventing or reducing the likelihood of the development of symptoms.

[0349] The treatment according to the present disclosure can ameliorate one or more symptoms associated with Dyslipidemias by decreasing or altering the amount of PCSK9 in the individual.

### V. FEATURES AND PROPERTIES OF THE PROPROTEIN CONVERTASE SUBTILISIN/KEXIN TYPE 9 (PCSK9) GENE

[0350] PCSK9 has been associated with diseases and disorders such as, but not limited to, Abetalipoproteinemia, Adenoma, Arteriosclerosis, Atherosclerosis, Cardiovascular Diseases, Cholelithiasis, Coronary Arteriosclerosis, Coronary heart disease, Non-Insulin-Dependent Diabetes Mellitus, Hypercholesterolemia, Familial Hypercholesterolemia, Hyperinsulinism, Hyperlipidemia, Familial Combined Hyperlipidemia, Hypobetalipoproteinemias, Chronic Kidney Failure, Liver diseases, Liver neoplasms, melanoma, Myocardial Infarction, Narcolepsy, Neoplasm Metastasis, Nephroblastoma, Obesity, Peritonitis, Pseudoxanthoma Elasticum, Cerebrovascular accident, Vascular Diseases, Xanthomatosis, Peripheral Vascular Diseases, Myocardial Ischemia, Dyslipidemias, Impaired glucose tolerance, Xanthoma, Polygenic hypercholesterolemia, Secondary malignant neoplasm of liver, Dementia, Overweight, Hepatitis C, Chronic, Carotid Atherosclerosis, Hyperlipoproteinemia Type IIa, Intracranial Atherosclerosis, Ischemic stroke, Acute Coronary Syndrome, Aortic calcification, Cardiovascular morbidity, Hyperlipoproteinemia Type IIb, Peripheral Arterial Diseases, Familial Hyperaldosteronism Type II, Familial hypobetalipoproteinemia, Autosomal Recessive Hypercholesterolemia, Autosomal Dominant Hypercholesterolemia 3, Coronary Artery Disease, Liver carcinoma, Ischemic Cerebrovascular Accident, and Arteriosclerotic cardiovascular disease NOS. Editing the PCSK9 gene using any of the methods described herein may be used to treat, prevent and/or mitigate the symptoms of the diseases and disorders described herein.

[0351] The activity of PCSK9 is largely confined primarily to the liver and PCSK9 is associated with Dyslipidemias, PCSK9-related familial hypercholesterolemia, hypercholesterolemia (familial), gastric papillary adenocarcinoma, homozygous familial hypercholesterolemia, and nasopharyngitis, PCSK9-related familial hypercholesterolemia is an inherited disease (autosomal dominant) where the body develops dangerously blood cholesterol levels due to the lack of a receptor for the low-density lipoprotein cholesterol. PCSK9-related familial hypercholesterolemia affects between 1 in 500 heterozygotic and 1 in 1,000,000 homozygotic people worldwide and is more common in Afrikaner, French Canadians, Lebanese Christians, and Finns populations. Common symptoms of PCSK9-related familial hypercholesterolemia include elevated circulating cholesterol contained in either low-density lipoproteins alone or also in very-low-density lipoproteins. Current treatments of PCSK9-related familial hypercholesterolemia include administration of statins to inhibit hydroxymethylglutaryl CoA reductase (HMG-CoA-reductase) in the liver. Another option for treating PCSK9-related familial hypercholesterolemia is ezetimibe to inhibit cholesterol absorption in the gut.

[0352] Dyslipidemias is a genetic disease characterized by elevated level of lipids in the blood that contributes to the development of clogged arteries (atherosclerosis). These lipids include plasma cholesterol, triglycerides, or high-density lipoprotein. Dyslipidemia increases the risk of heart attacks, stroke, or other circulatory concerns. Current management includes lifestyle changes such as exercise and dietary modifications as well as use of lipid-lowering drugs such as statins. Non-statin lipid-lowering drugs include bile acid sequestrants, cholesterol absorption inhibitors, drugs for homozygous familial hypercholesteremia, fibrates, nicotinic acid, omega-3 fatty acids and/or combination products. Treatment options usually depend on the specific lipid abnormality, although different lipid abnormalities often coexist. Treatment of children is more challenging as dietary changes may be difficult to implement and lipid-lowering therapies have not been proven effective.

[0353] In one embodiment, the target tissue for the compositions and methods described herein is liver tissue.

[0354] In one embodiment, the gene is Proprotein Convertase Subtilisin/Kexin Type 9 (PCSK9) which may also be referred to as Subtilisin/Kexin-Like Protease PC9. PCSK9 has a cytogenetic location of 1p32.3 and the genomic coordinate are on Chromosome 1 on the forward strand at position 55,039,548-55,064,852. The nucleotide sequence of PCSK9 is shown as SEQ ID NO: 5,303. BSND is the gene upstream of PCSK9 on the forward strand and RP11-101C11.1 is the gene downstream of PCSK9 on the forward strand. PCSK9 has a NCBI gene ID of 255738, Uniprot ID of Q8NBP7 and Ensembl Gene ID of ENSG00000169174. PCSK9 has 2045 SNPs, 18 introns and 20 exons. The exon identifier from Ensembl and the start/stop sites of the introns and exons are shown in Table 3.

TABLE 3
Introns and Exons for PCSK9

| Exon | | | Intron | | |
|---|---|---|---|---|---|
| No. | Exon ID | Start/Stop | No. | Intron based on Exon ID | Start/Stop |
| EX1 | ENSE00001884398 | 55,039,548- | INT1 | Intron ENSE00001884398- | 55,040,045- |
| | | 55,040,044 | | ENSE00001279167 | 55,043,842 |
| EX2 | ENSE00001279167 | 55,043,843- | INT2 | Intron ENSE00001279167- | 55,044,035- |
| | | 55,044,034 | | ENSE00001279161 | 55,046,522 |
| EX3 | ENSE00001279161 | 55,046,523- | INT3 | Intron ENSE00001279161- | 55,046,647- |
| | | 55,046,646 | | ENSE00003646938 | 55,052,277 |
| EX4 | ENSE00003646938 | 55,052,278- | INT4 | Intron ENSE00003646938- | 55,052,412- |
| | | 55,052,411 | | ENSE00003683038 | 55,052,649 |
| EX5 | ENSE00003683038 | 55,052,650- | INT5 | Intron ENSE00003683038- | 55,052,792- |
| | | 55,052,791 | | ENSE00003626397 | 55,055,992 |
| EX6 | ENSE00003626397 | 55,055,993- | INT6 | Intron ENSE00003626397- | 55,056,190- |
| | | 55,056,189 | | ENSE00001156685 | 55,057,330 |
| EX7 | ENSE00001156685 | 55,057,331- | INT7 | Intron ENSE00001156685- | 55,057,515- |
| | | 55,057,514 | | ENSE00003509095 | 55,058,035 |
| EX8 | ENSE00003509095 | 55,058,036- | INT8 | Intron ENSE00003509095- | 55,058,210- |
| | | 55,058,209 | | ENSE00003602007 | 55,058,498 |
| EX9 | ENSE00003602007 | 55,058,499- | INT9 | Intron ENSE00003602007- | 55,058,648- |
| | | 55,058,647 | | ENSE00003683046 | 55,059,485 |
| EX10 | ENSE00003683046 | 55,059,486- | INT10 | Intron ENSE00003683046- | 55,059,664- |
| | | 55,059,663 | | ENSE00003645672 | 55,061,374 |
| EX11 | ENSE00003645672 | 55,061,375- | INT11 | Intron ENSE00003645672- | 55,061,557- |
| | | 55,061,556 | | ENSE00001922690 | 55,063,368 |
| EX12 | ENSE00001922690 | 55,063,369- | INT12 | Intron ENSE00001850558- | 55,052,412- |
| | | 55,064,852 | | ENSE00003631465 | 55,052,649 |
| EX13 | ENSE00001850558 | 55,050,934- | INT13 | Intron ENSE00003631465- | 55,052,792- |
| | | 55,052,411 | | ENSE00003646333 | 55,055,992 |
| EX14 | ENSE00003631465 | 55,052,650- | INT14 | Intron ENSE00003646333- | 55,056,190- |
| | | 55,052,791 | | ENSE00001907083 | 55,057,427 |
| EX15 | ENSE00003646333 | 55,055,993- | INT15 | Intron ENSE00001907083- | 55,057,515- |
| | | 55,056,189 | | ENSE00003605042 | 55,058,035 |
| EX16 | ENSE00001907083 | 55,057,428- | INT16 | Intron ENSE00003605042- | 55,058,210- |
| | | 55,057,514 | | ENSE00003530610 | 55,058,498 |
| EX17 | ENSE00003605042 | 55,058,036- | INT17 | Intron ENSE00003530610- | 55,058,648- |
| | | 55,058,209 | | ENSE00003576793 | 55,061,374 |
| EX18 | ENSE00003530610 | 55,058,499- | INT18 | Intron ENSE00003576793- | 55,061,557- |
| | | 55,058,647 | | ENSE00001427326 | 55,063,368 |
| EX19 | ENSE00003576793 | 55,061,375- | | | |
| | | 55,061,556 | | | |
| EX20 | ENSE00001427326 | 55,063,369- | | | |
| | | 55,064,850 | | | |

[0355] Table 4 provides information on all of the transcripts for the PCSK9 gene based on the Ensembl database. Provided in Table 4 are the transcript ID from Ensembl and corresponding NCBI RefSeq ID for the transcript, the translation ID from Ensembl and the corresponding NCBI RefSeq ID for the protein, the biotype of the transcript sequence as classified by Ensembl and the exons and introns in the transcript based on the information in Table 3.

TABLE 4
Transcript Information for PCSK9

| | Transcript | | Protein | | | |
|---|---|---|---|---|---|---|
| | NCBI | | NCBI | Sequence | Exon ID from | Intron ID from |
| Transcript ID | RefSeq ID | Translation ID | RefSeq ID | Biotype | Table 3 | Table 3 |
| ENST00000302118.5 | NM_174936 | ENSP00000303208 | NP_777596 | Protein | EX1, EX2, EX3, | INT1, INT2, INT3, |
| | | | | coding | EX4, EX5, EX6, | INT4, INT5, INT6, |
| | | | | | EX7, EX8, EX9, | INT7, INT8, INT9, |
| | | | | | EX10, EX11, | INT10, INT11 |
| | | | | | EX12 | |
| ENST00000490692.1 | — | — | — | Processed | EX13, EX14, | INT12, INT13, |
| | | | | transcript | EX15, EX16, | INT14, INT15, |
| | | | | | EX17, EX18, | INT16, INT17, |
| | | | | | EX 19, EX20 | INT18 |

[0356] PCSK9 has 2045 SNPs and the NCBI rs number and/or UniProt VAR number for this PCSK9 gene are rs10465831, rs10465832, rs10585118, rs10674598, rs10888896, rs10888897, rs10888898, rs111342911, rs111400659, rs111427099, rs111563724, rs111705971, rs111830949, rs111976283, rs11206513, rs11206514, rs11206515, rs11206516, rs11206517, rs112071856, rs112096465, rs112099148, rs112112496, rs112306654, rs112628598, rs112650015, rs112710386, rs11302533, rs11310630, rs113138552, rs113241059, rs113264796, rs113330492, rs113369527, rs113444059, rs113726125, rs113749908, rs114068578, rs114086698, rs114162366, rs114250794, rs11436234, rs114587475, rs114689424, rs115219247, rs115333270, rs115451406, rs115505813, rs115563225, rs115811249, rs11583680, rs11583723, rs11587071, rs11591147, rs116251210, rs116312787, rs1165286, rs1165287, rs116775212, rs116806204, rs116891328, rs117004014, rs117247152, rs117258312, rs117389879, rs11800231, rs11800243, rs11800265, rs11804420, rs11806638, rs11808052, rs12028752, rs12032266, rs12063962, rs12066265, rs12067569, rs12074122, rs12079495, rs12082241, rs12082591, rs12084215, rs12095249, rs12096557, rs12136600, rs13376071, rs137852912, rs137878146, rs137886411, rs137919160, rs138038246, rs138060509, rs138178437, rs138234000, rs138341177, rs138424279, rs138817353, rs138850707, rs138876953, rs139457113, rs139479766, rs139543111, rs139549599, rs139658497, rs139669564, rs139683719, rs139754947, rs139894975, rs140072072, rs140286279, rs140319509, rs140352206, rs140364657, rs140524698, rs140589509, rs140641462, rs140837910, rs140838551, rs140865730, rs140911969, rs141135099, rs141407779, rs141438059, rs141502002, rs141593516, rs141855360, rs141867978, rs141901482, rs141907042, rs141963171, rs141995194, rs142118418, rs142149050, rs142229832, rs142325411, rs142524469, rs142525671, rs142676213, rs142802279, rs142824171, rs143117125, rs143275858, rs143291739, rs143394031, rs143499560, rs143679701, rs144110510, rs144254692, rs144317880, rs144546842, rs144606068, rs144721237, rs144850665, rs145022773, rs145055674, rs145128768, rs145233626, rs145264023, rs145284813, rs145330737, rs145373574, rs145468572, rs145770391, rs145806888, rs145886902, rs145963799, rs146016823, rs146035580, rs146471967, rs146484322, rs146563151, rs146741639, rs146826106, rs146924245, rs146960060, rs147011373, rs147098883, rs147182054, rs147282475, rs147382971, rs147470944, rs147478188, rs147599496, rs147865087, rs147874240, rs148142685, rs148195424, rs148227180, rs148562777, rs148612296, rs148683687, rs148820549, rs148948597, rs149093957, rs149097297, rs149139428, rs149253579, rs149311926, rs149489325, rs149747752, rs149837083, rs149869492, rs150119739, rs150169598, rs150277231, rs150508731, rs150898485, rs151003010, rs151039689, rs151072668, rs151095149, rs151125363, rs151193009, rs1572033, rs17111503, rs17111555, rs17111557, rs180810345, rs180837564, rs181296942, rs181301488, rs181482853, rs181689943, rs181790306, rs181968956, rs182138201, rs182195151, rs182246133, rs182393710, rs182393980, rs182409542, rs182662871, rs182690515, rs182703185, rs182743566, rs183118876, rs183256161, rs183332019, rs183431767, rs183553812, rs183692354, rs183882050, rs183977334, rs184297608, rs184303022, rs184518483, rs184548073, rs184563367, rs184568630, rs184816632, rs185003821, rs185361730, rs185365167, rs185392267, rs185581617, rs185710397, rs185840193, rs185905805, rs185927385, rs186112040, rs186250869, rs186329941, rs186540433, rs186657530, rs186669805, rs186792359, rs186965335, rs186969681, rs187156578, rs187331267, rs187366792, rs187408994, rs187508037, rs187520589, rs187592053, rs187745544, rs187840234, rs187923900, rs188274059, rs188445083, rs188449532, rs188545032, rs188598917, rs188672699, rs188706018, rs188924547, rs189014927, rs189101152, rs189236568, rs189293781, rs189648416, rs189665759, rs189679060, rs189683228, rs189816801, rs189842754, rs190304195, rs190319756, rs190414826, rs190589916, rs190912065, rs191181573, rs191259798, rs191387055, rs191732735, rs192027144, rs192029564, rs192122768, rs192136991, rs192280354, rs192295486, rs192523503, rs192587393, rs192624952, rs192854667, rs192897632, rs192932224, rs199507318, rs199815786, rs199904849, rs199916214, rs200012644, rs200015888, rs200027662, rs200091654, rs200109442, rs200146448, rs200158301, rs200505188, rs200529774, rs200551844, rs200856421, rs200982000, rs201125943, rs201160931, rs201184195, rs201280059, rs201301220, rs201349983, rs201395805, rs201405859, rs201557607, rs201708428, rs201789841, rs201872056, rs2308166, rs2479408, rs2479409, rs2479410, rs2479411, rs2479412, rs2479413, rs2479414, rs2483205, rs2495477, rs2495478, rs2495479, rs2495480, rs2495481, rs2495482, rs2495483, rs267598660, rs267598661, rs28362195, rs28362196, rs28362197, rs28362198, rs28362199, rs28362200, rs28362201, rs28362202, rs28362203, rs28362204, rs28362205, rs28362206, rs28362207, rs28362208, rs28362209, rs28362210, rs28362211, rs28362212, rs28362213, rs28362214, rs28362215, rs28362216, rs28362217, rs28362218, rs28362219, rs28362220, rs28362221, rs28362222, rs28362223, rs28362224, rs28362225, rs28362226, rs28362227, rs28362228, rs28362229, rs28362230, rs28362231, rs28362232, rs28362233, rs28362234, rs28362235, rs28362236, rs28362237, rs28362238, rs28362239, rs28362240, rs28362241, rs28362242, rs28362243, rs28362244, rs28362245, rs28362246, rs28362247, rs28362248, rs28362249, rs28362250, rs28362251, rs28362252, rs28362253, rs28362254, rs28362255, rs28362256, rs28362257, rs28362258, rs28362259, rs28362260, rs28362261, rs28362262, rs28362263, rs28362264, rs28362265, rs28362266, rs28362267, rs28362268, rs28362269, rs28362270 4, rs28362271, rs28362272, rs28362273, rs28362274, rs28362275, rs28362276, rs28362277, rs28362278, rs28362279, rs28362280, rs28362281, rs28362282, rs28362283, rs28362284, rs28362285, rs28362286, rs28362287, rs28362288, rs28362289, rs28362290, rs28362291, rs28362292, rs28362293, rs28385700, rs28385701, rs28385702, rs28385703, rs28385704, rs28385705, rs28385706, rs28385707, rs28385708, rs28385709, rs28385710, rs28385711, rs28385712, rs28385713, rs28742568, rs28742569, rs28942111, rs28942112, rs33957760, rs34012833, rs34280200, rs34315892, rs34334686, rs34432457, rs34743950, rs34769205, rs35106008, rs35115360, rs35173520, rs35319197, rs35360090, rs35574083, rs35595930, rs35605815, rs35998241, rs36120999, rs367548452, rs367606156, rs367620267, rs367766879, rs367785668, rs367912777, rs368103912, rs368156218, rs368257906, rs368282130, rs368297335, rs368406783, rs368511429, rs368516937, rs368619039, rs368830572, rs368899514, rs369013756, rs369026446, rs369066144, rs369067856, rs369118278, rs369121160, rs369498204, rs369728383, rs369771799, rs369793427, rs369851423, rs369996097, rs370145766, rs370183058, rs370501906, rs370505879, rs370507566, rs370512936, rs370574590, rs370748390, rs370751343, rs370804853, rs370875867, rs370894526, rs370912056, rs371004381, rs371030381, rs371053631, rs371184937, rs371336612, rs371417285, rs371488778, rs371634882, rs371744393, rs371896750, rs371914056, rs372109954, rs372154758, rs372165281, rs372350423, rs372350482, rs372353877, rs372497060, rs372506466, rs372586224, rs372600893, rs372840049, rs372844138, rs372959642, rs373018373, rs373032840, rs373188090, rs373226998, rs373295327, rs373323910, rs373507733, rs373512612, rs373517174, rs373551845, rs373664939, rs373832219, rs373867523, rs373940700, rs374014696, rs374135225, rs374142123, rs374148155, rs374234343, rs374384108, rs374455190, rs374533424, rs374603772, rs374636177, rs374856617, rs374941781, rs375217981, rs375260684, rs375541628, rs375564642, rs375582388, rs375652741, rs375695759, rs375867150, rs375892354, rs375947790, rs376059328, rs376066497, rs376269994, rs376347379, rs376385276, rs376388695, rs376502208, rs376542717, rs376551477, rs376554821, rs376563480, rs376619733, rs376653409, rs376753957, rs376784227, rs376797037, rs376819769, rs376944580, rs376945520, rs377108798, rs377330787, rs377359709, rs377361152, rs377371005, rs377431897, rs377475507, rs377521747, rs377553033, rs377727000, rs397735050, rs397937098, rs41294819, rs41294821, rs41294823, rs41294825, rs41297881, rs41297883, rs41297885, rs4275490, rs45439391, rs45448095, rs45454392, rs45471898, rs45479392, rs45487891, rs45490396, rs45505898, rs45508296, rs45530931, rs45533031, rs45545732, rs45566638, rs45573036, rs45576433, rs45597632, rs45598138, rs45605539, rs45613943, rs471705, rs472495, rs479832, rs479910, rs483462, rs4927193, rs494198, rs498588, rs499718, rs499883, rs502576, rs505151, rs509504, rs516499, rs521662, rs527315756, rs527404360, rs527413419, rs527567394, rs527596898, rs527739434, rs527805281, rs528061974, rs528078615, rs528107757, rs528148800, rs528201725, rs528343955, rs528515821, rs528529582, rs528558749, rs528601797, rs528712708, rs528909926, rs528947361, rs529369549, rs529378080, rs529445737, rs529500286, rs529506779, rs529787, rs529816745, rs5298.36313, rs529912877, rs530019791, rs530081912, rs530146515, rs530285771, rs530374205, rs530597927, rs530671596, rs530722625, rs530765398, rs530851897, rs530917695, rs531208171, rs531249213, rs531258589, rs531275625, rs531430686, rs531460512, rs531520310, rs531525337, rs531634288, rs531701, rs531780033, rs531857720, rs531899439, rs532043512, rs532231087, rs532373489, rs532539127, rs532709577, rs532835056, rs532980331, rs533076442, rs533141112, rs533253922, rs533273863, rs533276573, rs533375, rs533461979, rs533474523, rs533555352, rs533575981, rs5.33612423, rs533653765, rs533662885, rs533843321, rs533852935, rs533993300, rs534072612, rs534113572, rs534318293, rs534347, rs534377991, rs534398243, rs534473, rs534563441, rs534608537, rs534734616, rs534769041, rs534885728, rs535214548, rs535359199, rs535471, rs535518776, rs535551586, rs535856008, rs535914324, rs536037529, rs536224897, rs536292091, rs536492847, rs536502255, rs536512341, rs536565868, rs537026366, rs537114569, rs537281156, rs537305256, rs537428570, rs537483343, rs537688009, rs538232798, rs538316722, rs538452399, rs538770846, rs538871989, rs538886648, rs538946478, rs539079464, rs539143142, rs539181156, rs539259897, rs539378519, rs539907428, rs539960849, rs540022278, rs540072276, rs540108245, rs540169841, rs540253000, rs540407536, rs540409272, rs540429866, rs540643080, rs540788651, rs540796, rs540828578, rs540874982, rs540995091, rs541024610, rs541035181, rs541207080, rs541706761, rs541766358, rs541848332, rs541985686, rs542099741, rs542172573, rs542200118, rs542235982, rs542423698, rs542483259, rs542507587, rs542704543, rs542708704, rs542745120, rs542863545, rs542900566, rs543434877, rs543436510, rs543442761, rs543490309, rs543568471, rs543667904, rs543871852, rs543990083, rs544043989, rs544176747, rs544236774, rs544407153, rs54440914, rs544676042, rs544915955, rs544937913, rs544975270, rs544975446, rs545041872, rs545187568, rs545205844, rs545282338, rs545454601, rs545576371, rs545843566, rs545851832, rs546058081, rs546209281, rs546221307, rs546354834, rs546440893, rs546489528, rs546600779, rs546770964, rs546774002, rs546908161, rs547075823, rs547177570, rs547246380, rs547497546, rs547641789, rs547790602, rs547798061, rs547860327, rs547965847, rs547966100, rs548007497, rs548052201, rs548070210, rs548302455, rs548323322, rs548924943, rs548989313, rs549045944, rs549068537, rs549297683, rs549317206, rs549554303, rs549990561, rs550127507, rs550247306, rs550263135, rs550300315, rs550366748, rs550413887, rs550549291, rs550562137, rs550577460, rs550679929, rs550791152, rs550944404, rs550947073, rs551315846, rs551379054, rs551467121, rs551502518, rs551558579, rs551620201, rs551632347, rs551707770, rs551814025, rs551862551, rs551998513, rs552075017, rs552083916, rs552087592, rs552291797, rs552340541, rs552475335, rs552545133, rs552715282, rs552716915, rs552885773, rs552947157, rs552949303, rs553074454, rs553095640, rs553120411, rs553203766, rs553341717, rs553341794, rs553478757, rs553682442, rs553715201, rs553723930, rs553741, rs553773319, rs553904542, rs554027658, rs554085640, rs554139080, rs554139221, rs554151127, rs554237555, rs554282974, rs554294824, rs554488891, rs554538997, rs554546729, rs554884005, rs555459049, rs555751342, rs556109521, rs556132902, rs556171621, rs556251798, rs556496428, rs556767639, rs556890708, rs556936672, rs557015993, rs557073832, rs557083629, rs557085909, rs557211, rs557227031, rs557324685, rs557341614, rs557435, rs557560743, rs557622245, rs557623104, rs557703061, rs557810558, rs557880940, rs557940883, rs558121512, rs558209642, rs558273096, rs558384375, rs558411775, rs55842726, rs558449478, rs558555095, rs558653269, rs55865516, rs558691070, rs558789529, rs558907257, rs559342447, rs559348823, rs55943901, rs559511576, rs559530158, rs559841367, rs559878234, rs560017580, rs560266371, rs560276251, rs560328287, rs560328715, rs560397661, rs560784, rs560855978, rs560890759, rs561021048, rs561043080, rs561108554, rs561233571, rs561634446, rs561885328, rs562011178, rs562025150, rs562026496, rs56215417, rs562305110, rs562305231, rs562311240, rs562318675, rs562480265, rs562491023, rs562556, rs562637429, rs562829799, rs56295417, rs562957212, rs563024336, rs563099655, rs563114423, rs563166632, rs563231860, rs563292676, rs563641, rs563665610, rs563834186, rs563839303, rs563869, rs563891220, rs563906778, rs563968359, rs564035485, rs564079114, rs564160446, rs564172899, rs564402889, rs564405084, rs564427867, rs564642204, rs564681731, rs564767065, rs565047820, rs565207804rs565436, rs565711111, rs565758475, rs565820151, rs565851054, rs565908479, rs566363207, rs566484618, rs566566901, rs566604075, rs566645488, rs566677016, rs566742505, rs566859574, rs566864318, rs567060267, rs567130597, rs567306852, rs567431134, rs567745998, rs567815733, rs568052, rs568053170, rs568138865, rs568487992, rs568542368, rs568591259, rs568618371, rs568792707, rs568853401, rs568858248, rs568895725, rs568918099, rs568945353, rs569241679, rs569356665, rs569379713, rs569539201, rs569555983, rs569570906, rs569602796, rs569816960, rs569984243, rs570372306, rs570445132, rs570552729, rs570762001, rs570936455, rs570936732, rs570936817, rs571159918, rs571280242, rs571412702, rs571486903, rs571565277, rs571576920, rs571592751, rs571706996, rs571711835, rs571953969, rs572111176, rs572351817, rs572435767, rs572469807, rs572512, rs572516069, rs572641115, rs572643297, rs572778710, rs572781035, rs572868033, rs572890454, rs573005144, rs573180793, rs573181287, rs573671530, rs573785574, rs573785699, rs573797853, rs573868842, rs573973101, rs573984387, rs573986041, rs574039144, rs574057413, rs574183020, rs574219200, rs574293036, rs574316353, rs574653669, rs574717787, rs574915649, rs574988519, rs575003139, rs575160133, rs575480935, rs575583588, rs575595988, rs575827041, rs575974291, rs576035975, rs576103835, rs576302293, rs576498018, rs576535214, rs576552402, rs576575389, rs576631869, rs576673821, rs576806431, rs576818517, rs577339951, rs577345763, rs577438610, rs577477333, rs577623275, rs577683612, rs577832979, rs577836632, rs577879799, rs578162610, rs578215446, rs58255540, rs584626, rs585131, rs58667756, rs587776545, rs599037, rs60229590, rs602705, rs603247, rs60868887, rs613855, rs615563, rs61769496, rs624612, rs625619, rs630431, rs6.31220, rs634272, rs639750, rs643257, rs644000, rs662145, rs6656066, rs6658758, rs6681159, rs6704061, rs67560679, rs67578331, rs67608943, rs676297, rs693668, rs71991605, rs72646503, rs72646504, rs72646505, rs72646506, rs72646507, rs72646508, rs72646509, rs72646510, rs72646511, rs72646512, rs72646513, rs72646514, rs72646515, rs72646516, rs72646517, rs72646518, rs72646519, rs72646520, rs72646521, rs72646522, rs72646523, rs72646524, rs72646525, rs72646526, rs72646527, rs72646528, rs72646529, rs72646530, rs72646531, rs72646532, rs72646533, rs72646534, rs72646535, rs72646536, rs72646537, rs72658883, rs72658884, rs72658885, rs72658886, rs72658887, rs72658888, rs72658889, rs72658890, rs72658891, rs728474, rs745314022, rs745333538, rs745372726, rs745384490, rs745410770, rs745444129, rs745578045, rs745633457, rs745637314, rs745662819, rs745692493, rs745829103, rs745864657, rs745886026, rs745916051, rs745934039, rs745962158, rs746024722, rs746085210, rs746115963, rs746121167, rs746134573, rs746166452, rs746219017, rs746221734, rs746234366, rs746423690, rs746438392, rs746442570, rs746457760, rs746504242, rs746529062, rs746639289, rs746695481, rs746705490, rs746723269, rs746734908, rs746754749, rs746767777, rs746870857, rs746960986, rs747002272, rs74700387, rs747039310, rs747072726, rs747243416, rs747245172, rs747317254, rs747391846, rs747401293, rs747532143, rs747568306, rs747568372, rs747713772, rs747797851, rs747811472, rs747857141, rs747875175, rs747943483, rs747965075, rs748136829, rs748155397, rs748233073, rs748277964, rs748301876, rs748386411, rs748403083, rs748466083, rs748481228, rs748509798, rs748702562, rs748705694, rs748719617, rs748770467, rs748846783, rs748933873, rs748956735, rs749010305, rs749032401, rs749049179, rs749067699, rs749072203, rs749090549, rs749159500, rs749283996, rs749422452, rs749502601, rs749573024, rs749580170, rs749630126, rs749758598, rs749789895, rs749813311, rs749849475, rs749906108, rs749915837, rs749928920, rs750013234, rs750097810, rs750156218, rs750176055, rs750429847, rs750453915, rs750475817, rs750542221, rs750609784, rs750617125, rs750686192, rs750829547, rs750830691, rs750836360, rs750886812, rs751048732, rs751063800, rs751077328, rs751118819, rs751139559, rs751193190, rs751217094, rs751357013, rs751405776, rs751572524, rs751649334, rs751658486, rs751675284, rs7517090, rs75172363, rs751731561, rs751739997, rs75175498, rs751829736, rs751846541, rs751873016, rs751899516, rs751918070, rs751939969, rs752160222, rs752175636, rs7521905, rs752222287, rs752278524, rs752354312, rs752401519, rs752406599, rs752444294, rs752456708, rs752506225, rs7525407, rs752543151, rs7525503, rs75266432, rs752684225, rs752741155, rs752905885, rs753017904, rs7530425, rs753062243, rs753086395, rs753141052, rs753308448, rs7533186, rs753332916, rs753353734, rs753359110, rs753505066, rs753523628, rs753546185, rs753603237, rs753657596, rs753695505, rs753856645, rs753857795, rs75396617, rs754143671, rs754174667, rs754232605, rs754243728, rs7543163, rs754417738, rs754420902, rs754506125, rs754648024, rs7546522, rs754720791, rs754744118, rs754821996, rs754936553, rs754989640, rs754991587, rs755134162, rs755197912, rs755205398, rs7552350, rs7552471, rs755260262, rs755268843, rs755272637, rs7552841, rs7554001, rs755429883, rs755447048, rs755522807, rs755549408, rs755549792, rs755741869, rs755750316, rs755767441, rs755817854, rs755818478, rs755836529, rs755953250, rs756041068, rs756060557, rs756133708, rs756179144, rs756189243, rs756223842, rs756311605, rs756348146, rs756500786, rs756504747, rs756557400, rs756559975, rs756624326, rs756680562, rs756689874, rs756831842, rs756925724, rs757109873, rs757143429, rs757194881, rs757196482, rs757213359, rs757243841, rs757279865, rs757335301, rs757385779, rs757510932, rs757535781, rs757588904, rs757669143, rs757702374, rs757753730, rs75777418, rs757777851, rs757804293, rs757858496, rs757913842, rs757944328, rs757972163, rs757982712, rs758028163, rs758072703, rs758088708, rs758109994, rs758110164, rs758153644, rs758165193, rs758189966, rs758249397, rs758252289, rs758282750, rs758441757, rs758481374, rs758526036, rs758576160, rs758580558, rs758616317, rs758634028, rs758693611, rs758726290, rs758812315, rs758893721, rs758939020, rs758946245, rs758997842, rs758999339, rs759099468, rs759160039, rs759214329, rs759250273, rs759303255, rs759388119, rs759475891, rs759503095, rs759519174, rs759545385, rs759554053, rs759557001, rs759590927, rs759618377, rs759688652, rs759797943, rs759818065, rs759896913, rs759986372, rs760011800, rs760055046, rs760064829, rs760180148, rs760320200, rs760346826, rs760382999, rs760437822, rs760439904, rs760558712, rs760611664, rs760614435, rs760649431, rs760649773, rs760655056, rs760888366, rs760947578, rs760961443, rs760981278, rs761029149, rs761104090, rs761118507, rs761162355, rs761287147, rs761293312, rs761383351, rs761390546, rs761411050, rs761417131, rs761549008, rs761603764, rs761654917, rs761682652, rs761708034, rs761714505, rs761767572, rs761839097, rs762083133, rs762110607, rs762155102, rs762155646, rs762169784, rs762182618, rs762196801, rs762226571, rs762247590, rs762279506, rs762298323, rs762353000, rs762380732, rs762427407, rs762456550, rs762621316, rs762781469, rs762792417, rs762829467, rs762870318, rs762881190, rs762910129, rs762967431, rs762968029, rs762974799, rs763029049, rs763089913, rs763214966, rs763241481, rs763293553, rs763298843, rs763300221, rs763310215, rs763353863, rs763387288, rs763406953, rs763487412, rs763487583, rs763498636, rs763507062, rs76353589, rs763604280, rs763608489, rs763713396, rs763759839, rs763801981, rs763855534, rs763903091, rs763903895, rs763955156, rs763958625, rs764025273, rs764087262rs764106969, rs764222133, rs764281048, rs764359695, rs764412640, rs764465225, rs764512090, rs764587283, rs764603059, rs764619970, rs764653616, rs764661862, rs764673359, rs764764062, rs764811266, rs764823864, rs764943197, rs764945034, rs764988917, rs765046016, rs765065118, rs765073505, rs765124810, rs765128313, rs765172295, rs765191013, rs765306221, rs765330219, rs765335983, rs765583923, rs765626863, rs765668920, rs765733763, rs765737080, rs765739572, rs765744739, rs765760837, rs765777205, rs765789797, rs765835051, rs765918391, rs765939807, rs766010409, rs766028349, rs766028813, rs766058392, rs766081343, rs766120678, rs766136945, rs766141951, rs766250575, rs766265495, rs766314770, rs766318805, rs766344278, rs766429500, rs766431468, rs766432573, rs766480911, rs766486561, rs766540707, rs766576526, rs766579998, rs766770810, rs766827854, rs766879196, rs766880067, rs766979930, rs766999045, rs767139884, rs767164134, rs767286042, rs767356682, rs767361942, rs76739566, rs767544859, rs7676.32479, rs767706622, rs767715574, rs767728320, rs767758484, rs767809932, rs767831611, rs767832788, rs767853260, rs767853868, rs767963875, rs767980056, rs767987139, rs768088952, rs768184812, rs768203908, rs768204124, rs768213924, rs768321924, rs768337538, rs768366526, rs768525356, rs768627415, rs768650771, rs768665236, rs768686622, rs768795323, rs768840467, rs768846693, rs768895535, rs768944317, rs768977430, rs768997509, rs769000401, rs769034027, rs769060209, rs769065276, rs769112641, rs769163891, rs769278867, rs769298958, rs769305486, rs769411894, rs769435346, rs769487037, rs769521310, rs769522231, rs769573992, rs769628328, rs769681001, rs769782435, rs769810248, rs769811641, rs769970556, rs770043235, rs770080583, rs770115074, rs77013485, rs770157543, rs770206660, rs770256556, rs770256564, rs770282850, rs770290145, rs770406237, rs770406862, rs770459215, rs770539255, rs770592607, rs770604249, rs770699863, rs770716587, rs770736511, rs770738096, rs770799532, rs770857069, rs770873858, rs770891714, rs770916869, rs771025479, rs771069624, rs771070411, rs771108863, rs771143407, rs771192382, rs771238985, rs771257845, rs771274473, rs771359523, rs771421073, rs771479424, rs771532186, rs771594920, rs771601056, rs771631244, rs771641933, rs771682043, rs771735364, rs771829687, rs771841266, rs771908797, rs771949878, rs771978846, rs771993084, rs772061889, rs772081241, rs772102827, rs772114791, rs772165799, rs772230963, rs772321046, rs772331713, rs772355707, rs772367329, rs772408319, rs772476377, rs772560022, rs772569020, rs772583304, rs772611513, rs772624198, rs772677312, rs772690919, rs772882309, rs773048821, rs773067887, rs773075461, rs773129861, rs773144458, rs773242558, rs773284824, rs773363923, rs773604584, rs773635248, rs773660398, rs773699134, rs773746049, rs773818469, rs773824067, rs773926276, rs773930699, rs773983528, rs774055146, rs774106816, rs774131641, rs774174877, rs774194697, rs774243161, rs774274606, rs774329093, rs774346961, rs774377088, rs774385716, rs774451626, rs774478819, rs774501381, rs774506287, rs774644236, rs774658675, rs774797541, rs774858487, rs775052433, rs775077080, rs775267996, rs775278198, rs775429340, rs775446800, rs775518256, rs775521571, rs775522541, rs775560225, rs775575765, rs775704112, rs775707869, rs775730362, rs775858019, rs775988212, rs776031156, rs776033355, rs776095307, rs776150122, rs776208295, rs776228832, rs776276715, rs776367625, rs776413701, rs776456935, rs776484622, rs776510126, rs776649189, rs776658758, rs776682841, rs776683819, rs776711931, rs776726326, rs776752113, rs777111934, rs777160912, rs777165252, rs777190873, rs777232480, rs777300852, rs777375849, rs777420566, rs777436798, rs777468285, rs777470856, rs777557934, rs777588877, rs777645981, rs777706463, rs777734307, rs777808429, rs777843526, rs777860859, rs777931489, rs777986573, rs778003838, rs778022785, rs778023879, rs778033635, rs778043694, rs778091649, rs778104784, rs778117521, rs778157885, rs778196427, rs778218461, rs778222312, rs778365092, rs778.382130, rs778435223, rs778486544, rs778555112, rs778562344, rs778578697, rs778595872, rs778617372, rs778624532, rs778639605, rs778738291, rs778769653, rs778796405, rs778837920, rs778849441, rs778856063, rs778894407, rs778900671, rs778956646, rs779110591, rs779149407, rs779169169, rs779238496, rs779246166, rs779264258, rs779288795, rs779384470, rs779424418, rs779469742, rs779528787, rs779635493, rs779641062, rs779651692, rs779683108, rs779758641, rs779792870, rs779824389, rs779829994, rs779899511, rs780021719, rs780068262, rs780193533, rs780214893, rs780243753, rs780277160, rs780379863, rs780509319, rs780564433, rs780649814, rs780748579, rs780774423, rs780783084, rs780785202, rs780787585, rs780792739, rs780836648, rs780878145, rs780944212, rs780948835, rs781066362, rs781268309, rs781413796, rs781431694, rs781466793, rs781492750, rs781519283, rs781590513, rs781641312, rs781740443, rs78356140, rs78827455, rs78984000, rs79448800, rs79512647, rs79670512, rs79710883, rs79805678, rs79844613, rs9326034, VAR_025451, VAR_025452, VAR_025454, VAR_025157, VAR_025458, VAR_058520, VAR_058522, VAR_058523, VAR_058524, VAR_058525, VAR_058526, VAR_058527, VAR_058528, VAR_058529, VAR_058530, VAR_058531, VAR_058532, VAR_058533, VAR_058534, VAR_058535, VAR_058536, VAR_058537, VAR_067282, VAR_067351, and VAR_073657.

[0357] In one example, the guide RNA used in the invention may comprise at least one 20 nucleotide (nt) target nucleic acid sequence listed in Table 5. Provided in Table 5 are the gene symbol and the sequence identifier of the gene (Gene SEQ ID NO), the gene sequence including 1-5 kilobase pairs upstream and/or downstream of the target gene (Extended Gene SEQ ID NO), and the 20 nt target nucleic acid sequence (20 nt Target Sequence SEQ ID NO). In the sequence listing the respective target gene, the strand for targeting the gene (noted by a (±) strand or (−) strand in the sequence listing), the associated PAM type and the PAM sequence are described for each of the 20 nt target nucleic acid sequences (SEQ ID NO: 5,305-28,696). It is understood in the art that the spacer sequence, where “T” is “U,” may be an RNA sequence corresponding to the 20 nt sequences listed in Table 5.

TABLE 5
Nucleic Acid Sequences

| Gene | Gene | Extended Gene | 20 nt Target Sequence |
|---|---|---|---|
| Symbol | SEQ ID NO | SEQ ID NO | SEQ ID NO |
| PCSK9 | 5,303 | 5,304 | 5,305-28,696 |

[0358] In one embodiment, the guide RNA used in the invention may comprise at least one spacer sequence that, where “T” is “U”, may be an RNA sequence corresponding to a 20 nucleotide (nt) target sequence such as, but not limited to, any of SEQ ID NO: 5,305-28,696.

[0359] In one embodiment, the guide RNA used in the invention may comprise at least one spacer sequence which, where “T” is “U,” is an RNA sequence corresponding to the 20 nt sequences such as, but not limited to, any of SEQ ID NO: 5,305-28,696.

[0360] In one embodiment, a guide RNA may comprise a 20 nucleotide (nt) target nucleic acid sequence associated with the PAM type such as, but not limited to, NAAAAC, NNAGAAW, NNGRRT, NNNNGHTT, NRG, or YTN. As a non-limiting example, the 20 nt target nucleic acid sequence for a specific target gene and a specific PAM type may be, where “T” is “U,” the RNA sequence corresponding to any one of the 20 nt nucleic acid sequences in Table 6.

TABLE 6
Nucleic Acid Sequences by PAM Type

| | PAM: | PAM: | PAM: | PAM: | PAM: | PAM: |
|---|---|---|---|---|---|---|
| | NAAAAC | NNAGAAW | NNGRRT | NNNNGHTT | NRG | YTN |
| | 20 nt Target | 20 nt Target | 20 nt Target | 20 nt Target | 20 nt Target | 20 nt Target |
| Gene | Nucleic Acid | Nucleic Acid | Nucleic Acid | Nucleic Acid | Nucleic Acid | Nucleic Acid |
| Symbol | SEQ ID NO | SEQ ID NO | SEQ ID NO | SEQ ID NO | SEQ ID NO | SEQ ID NO |
| PCKS9 | 5,305-5,365 | 5,366-,5545 | 5,546-6,579 | 6,580-7,269 | 7,270-18,791 | 18,792-28,696 |

[0361] In one embodiment, a guide RNA may comprise a 22 nucleotide (nt) target nucleic acid sequence associated with the YTN PAM type. As a non-limiting example, the 22 nt target nucleic acid sequence for a specific target gene may comprise a 20 nt core sequence where the 20 nt core sequence, where “T” is “U,” may be the RNA sequence corresponding to SEQ ID NO: 18,792-28,696. As another non-limiting example, the 22 nt target nucleic acid sequence for a specific target gene may comprise a core sequence where the core sequence, where “T” is “U,” may be a fragment, segment or region of the RNA sequence corresponding to any of SEQ ID NO: 18,792-28,696.

### VI. OTHER THERAPEUTIC APPROACHES

[0362] Gene editing can be conducted using nucleases engineered to target specific sequences. To date there are four major types of nucleases: meganucleases and their derivatives, zinc finger nucleases (ZFNs), transcription activator like effector nucleases (TALENs), and CRISPR-Cas9 nuclease systems. The nuclease platforms vary in difficulty of design, targeting density and mode of action, particularly as the specificity of ZFNs and TALENs is through protein-DNA interactions, while RNA-DNA interactions primarily guide Cas9.

[0363] CRISPR endonucleases, such as Cas9, can be used in the methods of the present disclosure. However, the teachings described herein, such as therapeutic target sites, could be applied to other forms of endonucleases, such as ZFNs, TALENs, HEs, or MegaTALs, or using combinations of nucleases. However, in order to apply the teachings of the present disclosure to such endonucleases, one would need to, among other things, engineer proteins directed to the specific target sites.

[0364] Additional binding domains can be fused to the Cas9 protein to increase specificity. The target sites of these constructs would map to the identified gRNA specified site, but would require additional binding motifs, such as for a zinc finger domain. In the case of Mega-TAL, a meganuclease can be fused to a TALE DNA-binding domain. The meganuclease domain can increase specificity and provide the cleavage. Similarly, inactivated or dead Cas9 (dCas9) can be fused to a cleavage domain and require the sgRNA/Cas9 target site and adjacent binding site for the fused DNA-binding domain. This likely would require some protein engineering of the dCas9, in addition to the catalytic inactivation, to decrease binding without the additional binding site.

### Zinc Finger Nucleases

[0365] Zinc finger nucleases (ZFNs) are modular proteins comprised of an engineered zinc finger DNA binding domain linked to the catalytic domain of the type II endonuclease FokI. Because FokI functions only as a dimer, a pair of ZFNs must be engineered to bind to cognate target “half-site” sequences on opposite DNA strands and with precise spacing between them to enable the catalytically active FokI dimer to form. Upon dimerization of the FokI domain, which itself has no sequence specificity per se, a DNA double-strand break is generated between the ZFN half-sites as the initiating step in genome editing.

[0366] The DNA binding domain of each ZFN is typically comprised of 3-6 zinc fingers of the abundant Cys2-His2 architecture, with each finger primarily recognizing a triplet of nucleotides on one strand of the target DNA sequence, although cross-strand interaction with a fourth nucleotide also can be important. Alteration of the amino acids of a finger in positions that make key contacts with the DNA alters the sequence specificity of a given finger. Thus, a four-finger zinc finger protein will selectively recognize a 12 bp target sequence, where the target sequence is a composite of the triplet preferences contributed by each finger, although triplet preference can be influenced to varying degrees by neighboring fingers. An important aspect of ZFNs is that they can be readily re-targeted to almost any genomic address simply by modifying individual fingers, although considerable expertise is required to do this well. In most applications of ZFNs, proteins of 4-6 fingers are used, recognizing 12-18 by respectively. Hence, a pair of ZFNs will typically recognize a combined target sequence of 24-36 bp, not including the typical 5-7 bp spacer between half-sites. The binding sites can be separated further with larger spacers, including 15-17 bp. A target sequence of this length is likely to be unique in the human genome, assuming repetitive sequences or gene homologs are excluded during the design process. Nevertheless, the ZFN protein-DNA interactions are not absolute in their specificity so off-target binding and cleavage events do occur, either as a heterodimer between the two ZFNs, or as a homodimer of one or the other of the ZFNs. The latter possibility has been effectively eliminated by engineering the dimerization interface of the FokI domain to create “plus” and “minus” variants, also known as obligate heterodimer variants, which can only dimerize with each other, and not with themselves. Forcing the obligate heterodimer prevents formation of the homodimer. This has greatly enhanced specificity of ZFNs, as well as any other nuclease that adopts these FokI variants.

[0367] A variety of ZFN-based systems have been described in the art, modifications thereof are regularly reported, and numerous references describe rules and parameters that are used to guide the design of ZFNs; see, e.g., Segal et al., Proc Natl Acad Sci USA 96(6):2758-63 (1999); Dreier B et al., J Mol Biol. 303(4):489-502 (2000); Liu Q et al., J Biol Chem. 277(6):3850-6 (2002); Dreier et al., J Biol Chem 280(42):35588-97 (2005); and Dreier et al., J Biol Chem. 276(31):29466-78 (2001).

### Transcription Activator-Like Effector Nucleases (TALENs)

[0368] TALENs represent another format of modular nucleases whereby, as with ZFNs, an engineered DNA binding domain is linked to the FokI nuclease domain, and a pair of TALENs operate in tandem to achieve targeted DNA cleavage. The major difference from ZFNs is the nature of the DNA binding domain and the associated target DNA sequence recognition properties. The TALEN DNA binding domain derives from TALE proteins, which were originally described in the plant bacterial pathogen Xanthomonas sp. TALEs are comprised of tandem arrays of 33-35 amino acid repeats, with each repeat recognizing a single basepair in the target DNA sequence that is typically up to 20 bp in length, giving a total target sequence length of up to 40 bp. Nucleotide specificity of each repeat is determined by the repeat variable diresidue (RVD), which includes just two amino acids at positions 12 and 13. The bases guanine, adenine, cytosine and thymine are predominantly recognized by the four RVDs: Asn-Asn, Asn-Ile, His-Asp and Asn-Gly, respectively. This constitutes a much simpler recognition code than for zinc fingers, and thus represents an advantage over the latter for nuclease design. Nevertheless, as with ZFNs, the protein-DNA interactions of TALENs are not absolute in their specificity, and TALENs have also benefitted from the use of obligate heterodimer variants of the FokI domain to reduce off-target activity.

[0369] Additional variants of the FokI domain have been created that are deactivated in their catalytic function. If one half of either a TALEN or a ZFN pair contains an inactive FokI domain, then only single-strand DNA cleavage (nicking) will occur at the target site, rather than a DSB. The outcome is comparable to the use of CRISPR/Cas9 or CRISPR/Cpf1 “nickase” mutants in which one of the Cas9 cleavage domains has been deactivated. DNA nicks can be used to drive genome editing by HDR, but at lower efficiency than with a DSB. The main benefit is that off-target nicks are quickly and accurately repaired, unlike the DSB, which is prone to NHEJ-mediated mis-repair.

[0370] A variety of TALEN-based systems have been described in the art, and modifications thereof are regularly reported; see, e.g., Boch, Science 326(5959):1509-12 (2009); Mak et al., Science 335(6069):716-9 (2012); and Moscou et al., Science 326(5959):1501 (2009). The use of TALENs based on the “Golden Gate” platform, or cloning scheme, has been described by multiple groups; see, e.g., Cermak et al., Nucleic Acids Res. 39(12):e82 (2011); Li et al., Nucleic Acids Res. 39(14):6315-25(2011), Weber et al., PLoS One. 6(2):e16765 (2011); Wang et al., J Genet Genomics 41(6):339-47, Epub 2014 May 17 (2014); and Cermak T et al., Methods Mol Biol. 1239:133-59 (2015).

### Homing Endonucleases

[0371] Homing endonucleases (HEs) are sequence-specific endonucleases that have long recognition sequences (14-44 base pairs) and cleave DNA with high specificity—often at sites unique in the genome. There are at least six known families of HEs as classified by their structure, including GIY-YIG, His-Cis box, H—N—H, PD-(D/E)xK, and Vsr-like that are derived from a broad range of hosts, including eukarya, protists, bacteria, archaea, cyanobacteria and phage. As with ZFNs and TALENs, HEs can be used to create a DSB at a target locus as the initial step in genome editing. In addition, some natural and engineered HEs cut only a single strand of DNA, thereby functioning as site-specific nickases. The large target sequence of HEs and the specificity that they offer have made them attractive candidates to create site-specific DSBs.

[0372] A variety of HE-based systems have been described in the art, and modifications thereof are regularly reported; see, e.g., the reviews by Steentoft et al., Glycobiology 24(8):663-80 (2014); Belfort and Bonocora, Methods Mol Biol. 1123:1-26 (2014); Hafez and Hausner, Genome 55(8):553-69 (2012); and references cited therein.

### MegaTAL/Tev-mTALEN/MegaTev

[0373] As further examples of hybrid nucleases, the MegaTAL platform and Tev-mTALEN platform use a fusion of TALE DNA binding domains and catalytically active HEs, taking advantage of both the tunable DNA binding and specificity of the TALE, as well as the cleavage sequence specificity of the HE; see, e.g., Boissel et al., NAR 42: 2591-2601 (2014); Kleinstiver et al., G3 4:1155-65 (2014); and Boissel and Scharenberg, Methods Mol. Biol. 1239: 171-96 (2015).

[0374] In a further variation, the MegaTev architecture is the fusion of a meganuclease (Mega) with the nuclease domain derived from the GIY-YIG homing endonuclease I-DevI (Tev). The two active sites are positioned ˜30 bp apart on a DNA substrate and generate two DSBs with non-compatible cohesive ends; see, e.g., Wolfs et al., NAR 42, 8816-29 (2014). It is anticipated that other combinations of existing nuclease-based approaches will evolve and be useful in achieving the targeted genome modifications described herein.

dCas9-FokI or dCpf1-FokI and Other Nucleases

[0375] Combining the structural and functional properties of the nuclease platforms described above offers a further approach to genome editing that can potentially overcome some of the inherent deficiencies. As an example, the CRISPR genome editing system typically uses a single Cas9 endonuclease to create a USB. The specificity of targeting is driven by a 20 or 24 nucleotide sequence in the guide RNA that undergoes Watson-Crick base-pairing with the target DNA (plus an additional 2 bases in the adjacent NAG or NGG PAM sequence in the case of Cas9 from S. pyogenes). Such a sequence is long enough to be unique in the human genome, however, the specificity of the RNA/DNA interaction is not absolute, with significant promiscuity sometimes tolerated, particularly in the 5′ half of the target sequence, effectively reducing the number of bases that drive specificity. One solution to this has been to completely deactivate the Cas9 or Cpf1 catalytic function retaining only the RNA-guided DNA binding function—and instead fusing a FokI domain to the deactivated Cas9; see, e.g., Tsai et al., Nature Biotech 32: 569-76 (2014); and Guilinger et al., Nature Biotech. 32: 577-82 (2014). Because FokI must dimerize to become catalytically active, two guide RNAs are required to tether two FokI fusions in close proximity to form the dimer and cleave DNA. This essentially doubles the number of bases in the combined target sites, thereby increasing the stringency of targeting by CRISPR-based systems.

[0376] As further example, fusion of the TALE DNA binding domain to a catalytically active HE, such as I-Devi, takes advantage of both the tunable DNA binding and specificity of the TALE, as well as the cleavage sequence specificity of I-Devi, with the expectation that off-target cleavage can be further reduced.

### VII. KITS

[0377] The present disclosure provides kits for carrying out the methods described herein. A kit can include one or more of a genome-targeting nucleic acid, a polynucleotide encoding a genome-targeting nucleic acid, a site-directed polypeptide, a polynucleotide encoding a site-directed polypeptide, and/or any nucleic acid or proteinaceous molecule necessary to carry out the aspects of the methods described herein, or any combination thereof.

[0378] A kit can comprise: (1) a vector comprising a nucleotide sequence encoding a genome-targeting nucleic acid, (2) the site-directed polypeptide or a vector comprising a nucleotide sequence encoding the site-directed polypeptide, and (3) a reagent for reconstitution and/or dilution of the vector(s) and or polypeptide.

[0379] A kit can comprise: (1) a vector comprising (i) a nucleotide sequence encoding a genome-targeting nucleic acid, and (ii) a nucleotide sequence encoding the site-directed polypeptide; and (2) a reagent for reconstitution and/or dilution of the vector.

[0380] In any of the above kits, the kit can comprise a single-molecule guide genome-targeting nucleic acid. In any of the above kits, the kit can comprise a double-molecule genome-targeting nucleic acid. In any of the above kits, the kit can comprise two or more double-molecule guides or single-molecule guides. The kits can comprise a vector that encodes the nucleic acid targeting nucleic acid.

[0381] In any of the above kits, the kit can further comprise a polynucleotide to be inserted to effect the desired genetic modification.

[0382] Components of a kit can be in separate containers, or combined in a single container.

[0383] Any kit described above can further comprise one or more additional reagents, where such additional reagents are selected from a buffer, a buffer for introducing a polypeptide or polynucleotide into a cell, a wash buffer, a control reagent, a control vector, a control RNA polynucleotide, a reagent for in vitro production of the polypeptide from DNA, adaptors for sequencing and the like. A buffer can be a stabilization buffer, a reconstituting buffer, a diluting buffer, or the like. A kit can also comprise one or more components that can be used to facilitate or enhance the on-target binding or the cleavage of DNA by the endonuclease, or improve the specificity of targeting.

[0384] In addition to the above-mentioned components, a kit can further comprise instructions for using the components of the kit to practice the methods. The instructions for practicing the methods can be recorded on a suitable recording medium. For example, the instructions can be printed on a substrate, such as paper or plastic, etc. The instructions can be present in the kits as a package insert, in the labeling of the container of the kit or components thereof (i.e., associated with the packaging or subpackaging), etc. The instructions can be present as an electronic storage data file present on a suitable computer readable storage medium, e.g. CD-ROM, diskette, flash drive, etc. In some instances, the actual instructions are not present in the kit, but means for obtaining the instructions from a remote source (e.g. via the Internet), can be provided. An example of this case is a kit that comprises a web address where the instructions can be viewed and/or from which the instructions can be downloaded. As with the instructions, this means for obtaining the instructions can be recorded on a suitable substrate.

### VIII. SPECIFIC METHODS AND COMPOSITIONS OF THE INVENTION

[0385] Accordingly, the present disclosure relates in particular to the following non-limiting methods according to the invention: In a first method, Method 1, the present disclosure provides a method for editing an Proprotein Convertase Subtilisin/Kexin Type 9 (PCSK9) gene in a cell by genome editing comprising the step of introducing into the cell one or more deoxyribonucleic acid (DNA) endonucleases to effect one or more single-strand breaks (SSBs) or double-strand breaks (DSBs) within or near the PCSK9 gene or PCSK9 regulatory elements that results in one or more permanent insertions, deletions or mutations of at least one nucleotide within or near the PCSK9 gene, thereby reducing or eliminating the expression or function of PCSK9 gene products.

[0386] In another method, Method 2, the present disclosure provides an ex vivo method for treating a patient having an PCSK9 related condition or disorder comprising the steps of: isolating a hepatocyte from a patient; editing within or near an Proprotein Convertase Subtilisin/Kexin Type 9 (PCSK9) gene or other DNA sequences that encode regulatory elements of the PCSK9 gene of the hepatocyte; and implanting the genome-edited hepatocyte into the patient.

[0387] In another method, Method 3, the present disclosure provides the method of Method 2, wherein the editing step comprises introducing into the hepatocyte one or more deoxyribonucleic acid (DNA) endonucleases to effect one or more single-strand breaks (SSBs) or double-strand breaks (DSBs) within or near the PCSK9 gene or PCSK9 regulatory elements that results in one or more permanent insertions, deletions or mutations of at least one nucleotide within or near the PCSK9 gene, thereby reducing or eliminating the expression or function of PCSK9 gene products.

[0388] In another method, Method 4, the present disclosure provides an ex vivo method for treating a patient having an PCSK9 related condition or disorder comprising the steps of: creating a patient specific induced pluripotent stem cell (iPSC); editing within or near an Proprotein Convertase Subtilisin/Kexin Type 9 (PCSK9) gene or other DNA sequences that encode regulatory elements of the PCSK9 gene of the iPSC; differentiating the genome-edited iPSC into a hepatocyte; and implanting the hepatocyte into the patient.

[0389] In another method, Method 5, the present disclosure provides the method of Method 4, wherein the editing step comprises introducing into the iPSC one or more deoxyribonucleic acid (DNA) endonucleases to effect one or more single-strand breaks (SSBs) or double-strand breaks (DSBs) within or near the PCSK9 gene or PCSK9 regulatory elements that results in one or more permanent insertions, deletions or mutations of at least one nucleotide within or near the PCSK9 gene, thereby reducing or eliminating the expression or function of PCSK9 gene products.

[0390] In another method, Method 6, the present disclosure provides an ex vivo method for treating a patient having an PCSK9 related condition or disorder comprising the steps of: isolating a mesenchymal stem cell from the patient; editing within or near an Proprotein Convertase Subtilisin/Kexin Type 9 (PCSK9) gene or other DNA sequences that encode regulatory elements of the PCSK9 gene of the mesenchymal stem cell; differentiating the genome-edited mesenchymal stem cell into a hepatocyte; and implanting the hepatocyte into the patient.

[0391] In another method, Method 7, the present disclosure provides the method of Method 6, wherein the editing step comprises introducing into the mesenchymal stem cell one or more deoxyribonucleic acid (DNA) endonucleases to effect one or more single-strand breaks (SSBs) or double-strand breaks (DSBs) within or near the PCSK9 gene or PCSK9 regulatory elements that results in one or more permanent insertions, deletions or mutations of at least one nucleotide within or near the PCSK9 gene, thereby reducing or eliminating the expression or function of PCSK9 gene products.

[0392] In another method, Method 8, the present disclosure provides an in vivo method for treating a patient with an PCSK9 related disorder comprising the step of editing the Proprotein Convertase Subtilisin/Kexin Type 9 (PCSK9) gene in a cell of the patient.

[0393] In another method, Method 9, the present disclosure provides the method of Method 8, wherein the editing step comprises introducing into the cell one or more deoxyribonucleic acid (DNA) endonucleases to effect one or more single-strand breaks (SSBs) or double-strand breaks (DSBs) within or near the PCSK9 gene or PCSK9 regulatory elements that results in one or more permanent insertions, deletions or mutations of at least one nucleotide within or near the PCSK9 gene, thereby reducing or eliminating the expression or function of PCSK9 gene products.

[0394] In another method, Method 10, the present disclosure provides the method of any one of Methods 8-9, wherein the cell is a hepatocyte.

[0395] In another method, Method 11, the present disclosure provides the method of Method 10, wherein the one or more deoxyribonucleic acid (DNA) endonuclease is delivered to the hepatocyte by local injection, systemic infusion, or combinations thereof.

[0396] In another method, Method 12, the present disclosure provides a method of altering the contiguous genomic sequence of an PCSK9 gene in a cell comprising contacting the cell with one or more deoxyribonucleic acid (DNA) endonuclease to effect one or more single-strand breaks (SSBs) or double-strand breaks (DSBs).

[0397] In another method, Method 13, the present disclosure provides the method of Method 12, wherein the alteration of the contiguous genomic sequence occurs in one or more exons of the PCSK9 gene.

[0398] In another method, Method 14, the present disclosure provides the method of any one of Methods 1-13, wherein the one or more deoxyribonucleic acid (DNA) endonuclease is selected from any of those listed in SEQ ID NO: 1-620, and variants having at least 70% homology to any of those listed in SEQ ID NO: 1-620.

[0399] In another method, Method 15, the present disclosure provides the method of Method 14, wherein the one or more deoxyribonucleic acid (DNA) endonuclease is one or more protein or polypeptide.

[0400] In another method, Method 16, the present disclosure provides the method of Method 14, wherein the one or more deoxyribonucleic acid (DNA) endonuclease is one or more polynucleotide encoding the one or more DNA endonuclease.

[0401] In another method, Method 17, the present disclosure provides the method of Method 16, wherein the one or more deoxyribonucleic acid (DNA) endonuclease is one or more ribonucleic acid (RNA) encoding the one or more DNA endonuclease.

[0402] In another method, Method 18, the present disclosure provides the method of Method 17, wherein the one or more ribonucleic acid (RNA) is one or more chemically modified RNA.

[0403] In another method, Method 19, the present disclosure provides the method of Method 18, wherein the one or more ribonucleic acid (RNA) is chemically modified in the coding region.

[0404] In another method, Method 20, the present disclosure provides the method of any one of Methods 16-19, wherein the one or more polynucleotide or one or more ribonucleic acid (RNA) is codon optimized.

[0405] In another method, Method 21, the present disclosure provides the method of any one of Methods 1-20, wherein the method further comprises introducing into the cell one or more gRNA or one or more sgRNA.

[0406] In another method, Method 22, the present disclosure provides the method of Method 21, wherein the one or more gRNA or one or more sgRNA comprises a spacer sequence that is complementary to a segment of the coding sequence of the PCSK9 gene.

[0407] In another method, Method 23, the present disclosure provides the method of any of the Methods 21-22, wherein the one or more gRNA or one or more sgRNA is chemically modified.

[0408] In another method, Method 24, the present disclosure provides the method of any one of Methods 21-23, wherein the or more gRNA or one or more sgRNA is pre-complexed with the one or more deoxyribonucleic acid (DNA) endonuclease.

[0409] In another method, Method 25, the present disclosure provides the method of Method 24, wherein the pre-complexing involves a covalent attachment of the one or more gRNA or one or more sgRNA to the one or more deoxyribonucleic acid (DNA) endonuclease.

[0410] In another method, Method 26, the present disclosure provides the method of any one of Methods 14-25, wherein the one or more deoxyribonucleic acid (DNA) endonuclease is formulated in a liposome or lipid nanoparticle.

[0411] In another method, Method 27, the present disclosure provides the method of any one of Methods 21-25, wherein the one or more deoxyribonucleic acid (DNA) endonuclease is formulated in a liposome or lipid nanoparticle which also comprises the one or more gRNA or one or more sgRNA.

[0412] In another method, Method 28, the present disclosure provides the method of any one of Methods 12, or 21-22, wherein the one or more deoxyribonucleic acid (DNA) endonuclease is encoded in an AAV vector particle, where the AAV vector serotype is selected from those listed in Tables 4 and 5.

[0413] In another method, Method 29, the present disclosure provides the method of any of the Methods 21-22, wherein the one or more gRNA or one or more sgRNA is encoded in an AAV vector particle, where the AAV vector serotype is selected from those listed in Tables 4 and 5.

[0414] In another method, Method 30, the present disclosure provides the method of any of the Methods 21-22, wherein the one or more deoxyribonucleic acid (DNA) endonuclease is encoded in an AAV vector particle which also encodes the one or more gRNA or one or more sgRNA, where the AAV vector serotype is selected from those listed in Tables 4 and 5.

[0415] The present disclosure also provides a composition, Composition 1, comprising a single-molecule guide RNA comprising at least a spacer sequence that is an RNA sequence corresponding to any of SEQ ID NOs: 5,305-28,696.

[0416] In another composition, Composition 2, the present disclosure provides the single-molecule guide RNA of Composition 1, wherein the single-molecule guide RNA further comprises a spacer extension region.

[0417] In another composition, Composition 3, the present disclosure provides the single-molecule guide RNA of Composition 1, wherein the single-molecule guide RNA further comprises a tracrRNA extension region.

[0418] In another composition, Composition 4, the present disclosure provides the single-molecule guide RNA of Compositions 1-3, wherein the single-molecule guide RNA is chemically modified.

[0419] In another composition, Composition 5, the present disclosure provides a non-naturally occurring CRISPR/Cas system comprising a polynucleotide encoding a Cas9 or Cpf1 enzyme and at least one single-molecule guide RNA of Compositions 1-4.

[0420] In another composition, Composition 6, the present disclosure provides CRISPR/Cas system of Composition 5, wherein the polynucleotide encoding a Cas9 or Cpf1 enzyme is selected from S. pyogenes Cas9, S. aureus Cas9, N. meningitides Cas9, S. thermophilus CRLSPR1 Cas9, S. thermophilus CRISPR 3 Cas9, T. denticola Cas9, L. bacterium ND2006 Cpf1 and Acidaminococcus sp. BV3L6 Cpf1, and variants having at least 70% homology to these enzymes.

[0421] In another composition, Composition 7, the present disclosure provides CRISPR/Cas system of Composition 6, wherein the polynucleotide encoding a Cas9 or Cpf1 enzyme comprises one or more nuclear localization signals (NLSs).

[0422] In another composition, Composition 8, the present disclosure provides CRISPR/Cas system of Composition 7, wherein at least one NLS is at or within 50 amino acids of the amino-terminus of the polynucleotide encoding a Cas9 or Cpf1 enzyme and/or at least one NLS is at or within 50 amino acids of the carboxy-terminus of the polynucleotide encoding a Cas9 or Cpf1 enzyme.

[0423] In another composition, Composition 9, the present disclosure provides CRISPR/Cas system of Composition 8, wherein the polynucleotide encoding a Cas9 or Cpf1 enzyme is codon optimized for expression in a eukaryotic cell.

[0424] In another composition, Composition 10, the present disclosure provides a DNA encoding the single-molecule guide RNA of Compositions 1-3.

[0425] In another composition, Composition 11, the present disclosure provides a DNA encoding the CRISPR/Cas system of Compositions 7-9.

[0426] In another composition, Composition 12, the present disclosure provides a vector comprising the DNA of Compositions of 10 or 11.

[0427] In another composition, Composition 13, the present disclosure provides the vector of Composition 12, wherein the vector is a plasmid.

[0428] In another composition, Composition 14, the present disclosure provides the vector of Composition 12, wherein the vector is an AAV vector particle, and the AAV vector serotype is selected from those listed in SEQ ID NOs: 1-620 and in Table 2.

### IX. DEFINITIONS

[0429] The term “comprising” or “comprises” is used in reference to compositions, methods, and respective component(s) thereof, that are essential to the invention, yet open to the inclusion of unspecified elements, whether essential or not.

[0430] The term “consisting essentially of” refers to those elements required for a given aspect. The term permits the presence of additional elements that do not materially affect the basic and novel or functional characteristic(s) of that aspect of the invention.

[0431] The term “consisting of” refers to compositions, methods, and respective components thereof as described herein, which are exclusive of any element not recited in that description of the aspect.

[0432] The singular forms “a,” “an,” and “the” include plural references, unless the context clearly dictates otherwise.

[0433] Certain numerical values presented herein are preceded by the term “about.” The term “about” means numerical values within ±10% of the recited numerical value.

[0434] The details of one or more embodiments of the invention are set forth in the accompanying description below. Although any materials and methods similar or equivalent to those described herein can be used in the practice or testing of the present invention, the preferred materials and methods are now described. Other features, objects and advantages of the invention will be apparent from the description. In the description, the singular forms also include the plural unless the context clearly dictates otherwise. Unless defined otherwise, all technical and scientific terms used herein have the same meaning as commonly understood by one of ordinary skill in the art to which this invention belongs. In the case of conflict, the present description will control.

[0435] Any numerical range recited in this specification describes all sub-ranges of the same numerical precision (i.e., having the same number of specified digits) subsumed within the recited range. For example, a recited range of “1.0 to 10.0” describes all sub-ranges between (and including) the recited minimum value of 1.0 and the recited maximum value of 10.0, such as, for example, “2.4 to 7.6,” even if the range of “2.4 to 7.6” is not expressly recited in the text of the specification. Accordingly, the Applicant reserves the right to amend this specification, including the claims, to expressly recite any sub-range of the same numerical precision subsumed within the ranges expressly recited in this specification. All such ranges are inherently described in this specification such that amending to expressly recite any such sub-ranges will comply with written description, sufficiency of description, and added matter requirements, including the requirements under 35 U.S.C. § 112(a) and Article 123(2) EPC. Also, unless expressly specified or otherwise required by context, all numerical parameters described in this specification (such as those expressing values, ranges, amounts, percentages, and the like) may be read as if prefaced by the word “about,” even if the word “about” does not expressly appear before a number. Additionally, numerical parameters described in this specification should be construed in light of the number of reported significant digits, numerical precision, and by applying ordinary rounding techniques. It is also understood that numerical parameters described in this specification will necessarily possess the inherent variability characteristic of the underlying measurement techniques used to determine the numerical value of the parameter.

[0436] The details of one or more aspects of the present disclosure are set forth in the accompanying description below. Although any materials and methods similar or equivalent to those described herein can be used in the practice or testing of the present disclosure, the preferred materials and methods are now described. Other features, objects and advantages of the disclosure will be apparent from the description. In the description, the singular forms also include the plural unless the context clearly dictates otherwise. Unless defined otherwise, all technical and scientific terms used herein have the same meaning as commonly understood by one of ordinary skill in the art to which this disclosure belongs. In the case of conflict, the present description will control.

[0437] The present invention is further illustrated by the following non-limiting examples.

### X. EXAMPLES

[0438] The invention will be more fully understood by reference to the following examples, which provide illustrative non-limiting aspects of the invention.

[0439] The examples describe the use of the CRISPR system as an illustrative genome editing technique to create defined therapeutic genomic deletions, insertions, or replacements, termed “genomic modifications” herein, in the PCSK9 gene that lead to permanent deletion or mutation of the PCSK9 gene, that reduce or eliminate the PCSK9 protein activity. Introduction of the defined therapeutic modifications represents a novel therapeutic strategy for the potential amelioration of Dyslipidemias, as described and illustrated herein.

### Example 1

### CRISPR/SpCas9 Target Sites for the PCSK9 Gene

[0440] Regions of the PCSK9 gene are scanned for target sites. Each area is scanned for a protospacer adjacent motif (PAM) having the sequence NRG. gRNA 20 bp spacer sequences corresponding to the PAM are then identified, as shown in SEQ ID NOs7,270-18,791 of the Sequence Listing.

### Example 2

### CRISPR/SaCas9 Target Sites for the PCSK9 Gene

[0441] Regions of the PCSK9 gene are scanned for target sites. Each area is scanned for a protospacer adjacent motif (PAM) having the sequence NNGRRT. gRNA 20 bp spacer sequences corresponding to the PAM are then identified, as shown in SEQ ID NOs: 5,546-6,579 of the Sequence Listing.

### Example 3

### CRISPR/StCas9 Target Sites for the PCSK9 Gene

[0442] Regions of the PCSK9 gene are scanned for target sites. Each area is scanned for a protospacer adjacent motif (PAM) having the sequence NNAGAAW. gRNA 20 bp spacer sequences corresponding to the PAM are then identified, as shown in SEQ ID NOs: 5,366-5,545 of the Sequence Listing.

### Example 4

### CRISPR/TdCas9 Target Sites for the PCSK9 Gene

[0443] Regions of the PCSK9 gene are scanned for target sites. Each area is scanned for a protospacer adjacent motif (PAM) having the sequence NAAAAC. gRNA 20 bp spacer sequences corresponding to the PAM are then identified, as shown in SEQ ID NOs: 5,305-5,365 of the Sequence Listing.

### Example 5

### CRISPR/NmCas9 Target Sites for the PCSK9 Gene

[0444] Regions of the PCSK9 gene are scanned for target sites. Each area is scanned for a protospacer adjacent motif (PAM) having the sequence NNNNGATT. gRNA 20 bp spacer sequences corresponding to the PAM are then identified, as shown in SEQ ID NOs: 6,580-7,269 of the Sequence Listing.

### Example 6

### CRISPR/Cpf1 Target Sites for the PCSK9 Gene

[0445] Regions of the PCSK9 gene are scanned for target sites. Each area is scanned for a protospacer adjacent motif (PAM) having the sequence TTN or YTN. gRNA 22 bp spacer sequences corresponding to the PAM are then identified, as shown in SEQ D NOs: 18,792-28,696 of the Sequence Listing.

### Example 7

### Bioinformatics Analysis of the Guide Strands

[0446] Candidate guides are then screened and selected in a single process or multi-step process that involves both theoretical binding and experimentally assessed activity at both on and off-target sites. By way of illustration, candidate guides having sequences that match a particular on-target site, such as a site within the PCSK9 gene, with adjacent PAM can be assessed for their potential to cleave at off-target sites having similar sequences, using one or more of a variety of bioinformatics tools available for assessing off-target binding, as described and illustrated in more detail below, in order to assess the likelihood of effects at chromosomal positions other than those intended.

[0447] Candidates predicted to have relatively lower potential for off-target activity can then be assessed experimentally to measure their on-target activity, and then off-target activities at various sites. Preferred guides have sufficiently high on-target activity to achieve desired levels of gene editing at the selected locus, and relatively lower off-target activity to reduce the likelihood of alterations at other chromosomal loci. The ratio of on-target to off-target activity is often referred to as the “specificity” of a guide.

[0448] For initial screening of predicted off-target activities, there are a number of bioinformatics tools known and publicly available that can be used to predict the most likely off-target sites; and since binding to target sites in the CRISPR/Cas9 or CRISPR/Cpf1 nuclease system is driven by Watson-Crick base pairing between complementary sequences, the degree of dissimilarity (and therefore reduced potential for off-target binding) is essentially related to primary sequence differences: mismatches and bulges, i.e. bases that are changed to a non-complementary base, and insertions or deletions of bases in the potential off-target site relative to the target site. An exemplary bioinformatics tool called COSMID (CRISPR Off-target Sites with Mismatches, Insertions and Deletions) (available on the web at crispr.bme.gatech.edu) compiles such similarities. Other bioinformatics tools include, but are not limited to, autoCOSMID, and CCTop.

[0449] Bioinformatics are used to minimize off-target cleavage in order to reduce the detrimental effects of mutations and chromosomal rearrangements. Studies on CRISPR/Cas9 systems suggested the possibility of high off-target activity due to nonspecific hybridization of the guide strand to DNA sequences with base pair mismatches and/or bulges, particularly at positions distal from the PAM region. Therefore, it is important to have a bioinformatics tool that can identify potential off-target sites that have insertions and/or deletions between the RNA guide strand and genomic sequences, in addition to base-pair mismatches. Bioinformatics tools based upon the off-target prediction algorithm CCTop were used to search genomes for potential CRISPR off-target sites (CCTop is available on the web at crispr.cos.uni-heidelberg.de/). The output ranked lists of the potential off-target sites based on the number and location of mismatches, allowing more informed choice of target sites, and avoiding the use of sites with more likely off-target cleavage.

[0450] Additional bioinformatics pipelines are employed that weigh the estimated on- and/or off-target activity of gRNA targeting sites in a region. Other features that may be used to predict activity include information about the cell type in question, DNA accessibility, chromatin state, transcription factor binding sites, transcription factor binding data, and other CHIP-seq data. Additional factors are weighed that predict editing efficiency, such as relative positions and directions of pairs of gRNAs, local sequence features and micro-homologies.

[0451] Initial evaluation and guide design focused on Exons 1-3 and sequences 400-500 bp proximal to exon-intron junctions for Introns 1-3. Initial bioinformatic analysis identified approximately 650 CRISPR/Cas9 target sequences.

[0452] A prioritized list of guides was generated for in vitro transcription-based guide screening taking into consideration the predicted number and location of their Off-Target sites. This list was further prioritized gRNAs for screening based on their location within the Pcsk9 sequence; preference was given to gRNAs that target 5′ exons. Based on the above process 192 guides were selected for in vitro guide screening.

[0453] gRNAs within exon sequences can be used to create indels leading to loss of function of the protein through a change in the protein sequence and/or truncation of the protein. gRNAs in the 5′UTR sequence can be used either alone or in combination with gRNAs within exons to remove the translation start site and prevent protein synthesis, gRNAs in the introns can be used alone or in combination with gRNAs within exons to remove splice donor and acceptor sites leading to the production of truncated proteins and consequent loss of function. gRNAs within Exon 1 and upstream sequence can be used to remove transcription and/or translation start sites.

[0454] 192 guides (Table7) were then prioritized for in vitro transcription-based guide screening protocol taking into consideration the predicted number and location of their off-target sites. gRNAs were also prioritized for screening based on their location within the Pcsk9 sequence; preference was given to gRNAs that target 5′ exons for IVT screening.

[0455] gRNAs within exon sequences can be used to create indels leading to loss of function of the protein through a change in the protein sequence and/or truncation of the protein. gRNAs in the Intron 1 sequence can be used either alone or in combination with gRNAs within exons to remove the translation start site and prevent protein synthesis. gRNAs in the introns can be used alone or in combination with gRNAs within exons to remove splice donor and acceptor sites leading to the production of truncated proteins and consequent loss of function.

[0456] The following considerations were used in selecting guides: 1) Deleting Exon 1 (two guides) or creating frameshifts at the 5′ end of coding sequence can be used to disrupt Pcsk9 function. There is an overlapping IncRNA annotated with start site in Intron 1. A few guides beyond the start site of variant 2 within Intron 1 were selected: these can serve as controls to make sure that interfering with this transcript does not cause harmful effects. 2) Exons 2 and 3 are not present in non-coding variant RNA produced from Pcsk9 locus according to UCSC genome browser hg38 assembly. 3) Nonsense, splice acceptor, and splice donor mutations have been identified in Exon 3 in humans (see e.g., ExAC database-Broad Institute). Many guides in this exon were included for screening. 4) Guides in 5′ UTR, Exon 1, Intron 1, Exon 2, and Intron 2 can be used for safe harbor applications.

### Example 8

### Testing of Preferred Guides in Cells for On-Target Activity

[0457] To identify a large spectrum of pairs of gRNAs able to edit the cognate DNA target region, an in vitro transcribed (IVT) gRNA screen was conducted. The relevant genomic sequence was submitted for analysis using a gRNA design software. The resulting list of gRNAs were narrowed to a select list of gRNAs, as described above, based on uniqueness of sequence (only gRNAs without a perfect match somewhere else in the genome were screened) and minimal predicted off targets. This set of gRNAs was in vitro transcribed, and transfected using Lipofectamine MessengerMAX into HEK293T cells that constitutively express Cas9. Cells were harvested 48 hours post transfection, the genomic DNA was isolated, and cutting efficiency was evaluated using TIDE analysis. (FIGS. 2-4).

[0458] gRNA with significant activity was followed up in cultured cells to measure gene editing in PCSK9. Off-target events can be followed again. A variety of cells can be transfected and the level of gene correction and possible off-target events measured. These experiments allow optimization of nuclease and donor design and delivery.

TABLE 7
gRNA sequences and cutting efficiencies in HEK293T cells

| SEQ ID NO: | Guide Name | Guide Sequence (20 mer) | Indel | R² |
|---|---|---|---|---|
| 14237 | Pcsk9_Ex2-int3_T642 | CACCTACGTGGTGGTGCTGA | 99 | 0.9897 |
| 14318 | Pcsk9_Ex2-int3_T45 | GCTGCCTACGGAAACCTGTA | 92.7 | 0.9585 |
| 7905 | Pcsk9_T68 | TCAGGAGCAGGGCGCGTGAA | 90.8 | 0.9895 |
| 7887 | Pcsk9_T88 | TCAGACCCTGAACTGAACGG | 89.1 | 0.969 |
| 14234 | Pcsk9_Ex2-Int3_T176 | GAGGTTGCCTGGCACCTACG | 87.4 | 0.9495 |
| 14257 | Pcsk9_Ex2-Int3_T816 | GGCTTCCTGGTGAAGATGAG | 86.8 | 0.9828 |
| 8514 | Pcsk9_Ex2-Int3_7280 | CTCCTTCAGCACCACCACGT | 85.4 | 0.9236 |
| 7888 | Pcsk9_T241 | GGCTCAGACCCTGAACTGAA | 81.4 | 0.9778 |
| 13495 | Pcsk9_T81 | GGGCGCCGCCGTTCAGTTCA | 80.4 | 0.978 |
| 8581 | Pcsk9_Ex2-Int3_T109 | TGAAGATAGACGTACCACTG | 79.3 | 0.9291 |
| 7882 | Pcsk9_T33 | GTCGCTGCGGAAACCTTCTA | 79.1 | 0.918 |
| 14235 | Pcsk9_Ex2-Int3_T74 | GTTGCCTGGCACCTACGTGG | 78.9 | 0.8927 |
| 13671 | Pcsk9_T74 | TGCCTCGCCGCGGCACAGGT | 78.3 | 0.9711 |
| 8582 | Pcsk9_Ex2-Int3_T60 | ATGAAGATAGACGTACCACT | 78.2 | 0.9047 |
| 14197 | Pcsk9_T153 | GACCAGGCCCGTAGAGAGCT | 77.7 | 0.96 |
| 7928 | Pcsk9_T179 | GTCCTGGCGAGGAGACCTAG | 76.7 | 0.9149 |
| 8602 | Pcsk9_Ex2-Int3_T83 | TTGTCCCTACAGGTTTCCGT | 76.5 | 0.8469 |
| 7980 | Pcsk9_T63 | CACCTTGGCGCAGCGGTGGA | 75.8 | 0.9913 |
| 8040 | Pcsk9_T110 | ACCCCGCCCCTGTCTCGGGT | 75.4 | 0.7912 |
| 13603 | Pcsk9_T53 | GTCGCCGAGGGCTCTTCGCT | 74.8 | 0.9481 |
| 13563 | Pcsk9_T109 | GCCTTGCGTTCCGAGGAGGA | 74.7 | 0.9477 |
| 7979 | Pcsk9_T379 | CTTGGCGCAGCGGTGGAAGG | 74.6 | 0.9467 |
| 7873 | Pcsk9_T207 | TCACGCCACCAGAGCCCCAT | 74.4 | 0.8279 |
| 13555 | Pcsk9_T39 | GGACGAGGACGGCGACTACG | 74.4 | 0.9655 |
| 7892 | Pcsk9_T341 | CCCGAGCCAGTCTCACTGCC | 74.3 | 0.9769 |
| 13525 | Pcsk9_T274 | CCTCCCCACCGCAAGGCTCA | 73.8 | 0.9613 |
| 7904 | Pcsk9_T192 | CAGGAGCAGGGCGCGTGAAG | 73.7 | 0.9787 |
| 7970 | Pcsk9_T25 | GCCGTCCTCCTCGGAACGCA | 73.1 | 0.9574 |
| 13483 | Pcsk9_T175 | TCAAGCACCCACACCCTAGA | 72.4 | 0.9768 |
| 8028 | Pcsk9_T326 | TCCTTCACCCACCTGTGCCG | 71 | 0.8768 |
| 14239 | Pcsk9_Ex2-Int3_T807 | CTACGTGGTGGTGCTGAAGG | 71 | 0.958 |
| 13586 | Pcsk9_T180 | GGGCGAACCCGCAGCCGGGA | 69.9 | 0.8664 |
| 7989 | Pcsk9_T48 | GAAACAGCACCGCACCGTCC | 69.9 | 0.8443 |
| 8018 | Pcsk9_T249 | GAAATCTGGGCAGGATATCC | 69.6 | 0.9401 |
| 8549 | Pcsk9_Ex2-int3_T702 | GGTGGCTCACCAGCTCCAGC | 68.8 | 0.9621 |
| 7927 | Pcsk9_T197 | GGAGACCTAGAGGCCGTGCG | 67.5 | 0.9792 |
| 13477 | Posk9_T107 | ATCGTCCGATGGGGCTCTGG | 65 | 0.7483 |
| 7942 | Pcsk9_T246 | GGAGCTGACGGTGCCCATGA | 64.9 | 0.8872 |
| 7983 | Pcsk9_T131 | ACACCCGCACCTTGGCGCAG | 64.8 | 0.9612 |
| 13570 | Pcsk9_T92 | CACCTTCCACCGCTGCGCCA | 64.7 | 0.91 |
| 14263 | Pcsk9_Ex2-Int3_T177 | GCTGGTGAGCCACCCTTTTT | 64.4 | 0.7776 |
| 8023 | Pcsk9_T187 | GCCGCGGCGAGGCAGAAACT | 64.3 | 0.9459 |
| 13667 | Pcsk9_T211 | TCCCAGTTTCTGCCTCGCCG | 64.1 | 0.9624 |
| 13530 | Pcsk9_T75 | GTGGACCGCGCACGGCCTCT | 64 | 0.9604 |
| 13711 | Pcsk9_T227 | GGCCCTACCCGAGACAGGGG | 63.7 | 0.8092 |
| 13487 | Pcsk9_T22 | CAGCGACGTCGAGGCGCTCA | 63.2 | 0.952 |
| 7986 | Pcsk9_T56 | TCCCGGCTGCGGGTTCGCCC | 63.1 | 0.9618 |
| 7964 | PcSk9_T125 | CTCCTGCGCACGGGCGCCCG | 61.6 | 0.9493 |
| 13510 | Pcsk9_T251 | GCAGTGAGACTGGCTCGGGC | 61.4 | 0.9533 |
| 8547 | PcSk9_Ex2-Int3_T198 | GGTCGCCACTCATCTTCACC | 60.2 | 0.9248 |
| 13688 | Pcsk9_T47 | CATTATAGTGGGTTCCGATT | 59.9 | 0.9213 |
| 13615 | Pcsk9_T309 | GACTGCAGGCAAGGCGGCGG | 59.7 | 0.9425 |
| 7976 | Pcsk9_T210 | GTGGCTGTGGTTCCGTGCTC | 59 | 0.8991 |
| 13589 | Pcsk9_T310 | GTGCGGTGCTGTTTCCTCTC | 59 | 0.9565 |
| 13473 | Pcsk9_T11 | AATCAGATAGGATCGTCCGA | 58.8 | 0.9499 |
| 13614 | Pcsk9_T235 | GGACTGCAGGCAAGGCGGCG | 58.1 | 0.8872 |
| 8517 | Pcsk9_Ex2-Int3_T75 | GCGCTCTGACTGCGAGAGGT | 57.8 | 0.943 |
| 13709 | Pcsk9_T323 | AGAAGGCCCTACCCGAGACA | 57.1 | 0.9244 |
| 13572 | Pcsk9_T161 | CCACCGCTGCGCCAAGGTGC | 57 | 0.9464 |
| 13476 | Pcsk9_T73 | AGGATCGTCCGATGGGGCTC | 56.9 | 0.95 |
| 13539 | Pcsk9_T327 | TCATGGGCACCGTCAGCTCC | 56.7 | 0.9434 |
| 13491 | Pcsk9_T245 | AGGCGCTCATGGTTGCAGGC | 56.6 | 0.8711 |
| 13475 | Pcsk9_T4 | TCAGATAGGATCGTCCGATG | 56.4 | 0.7587 |
| 13648 | Pcsk9_T9 | ATTCAGTGGGAAGGTTCGCG | 56.3 | 0.973 |
| 13710 | Pcsk9_T106 | GAAGGCCCTACCCGAGACAG | 56 | 0.8502 |
| 7925 | Pcsk9_T27 | CCGTGCGCGGTCCACGCCGG | 55.8 | 0.9095 |
| 7895 | Pcsk9_T28 | GCTGCTGCAACGACGCGTCC | 55.4 | 0.9369 |
| 13679 | Pcsk9_T168 | AACGTACTGGGAACTGCACC | 54.8 | 0.9167 |
| 13654 | Pcsk9_T267 | CGCGGGGTTGGGAGACCCGG | 54.1 | 0 9762 |
| 7988 | Pcsk9_T183 | GCACCGCACCGTCCCGGCTG | 53.5 | 0.9532 |
| 7922 | Pcsk9_T61 | CGGCGCCTTGAGCCTTGCGG | 52.4 | 0.8083 |
| 13526 | Pcsk9_T29 | CGCAAGGCTCAAGGCGCCGC | 52.4 | 0.9829 |
| 7902 | Pcsk9_T41 | TGAAGGGGCGCGCGGAATCC | 51.5 | 0.9317 |
| 7883 | Pcsk9_T54 | CGTCGCTGCGGAAACCTTCT | 51.4 | 0.9398 |
| 13560 | Pcsk9_T7 | GGTGCTAGCCTTGCGTTCCG | 51.4 | 0.9637 |
| 13542 | Pcsk9_T352 | TCAGCTCCAGGCGGTCCTGG | 51.1 | 0.8959 |
| 7920 | Pcsk9_T121 | GCGCCTTGAGCCTTGCGGTG | 49.9 | 0.934 |
| 13541 | Pcsk9_T293 | CCGTCAGCTCCAGGCGGTCC | 49.9 | 0.9805 |
| 13602 | Pcsk9_T36 | AGTGGAGTGCAGGTCGCCGA | 49.6 | 0.9417 |
| 13571 | Pcsk9_T108 | TCCACCGCTGCGCCAAGGTG | 49.2 | 0.9541 |
| 13670 | Pcsk9_9217 | CTGCCTCGCCGCGGCACAGG | 49.2 | 0.9437 |
| 13686 | Pcsk9_T60 | AAGCGGGCTTGCCATTATAG | 48.5 | 0.9334 |
| 13677 | Pc939_T191 | GTGAATGCCTGGAACGTACT | 48.2 | 0.8756 |
| 8537 | Pcsk9_Ex2-Int3_T792 | GAAGGCCATGGAAGACATGC | 46.9 | 0.9556 |
| 13494 | Pcsk9_T12 | CGGGCGCCGCCGTTCAGTTC | 46.3 | 0.9088 |
| 7923 | Pcsk9_T90 | CGGCGGCGCCTTGAGCCTTG | 45.8 | 0.9472 |
| 13646 | Pcsk9_T196 | CTATTCAGTGGGAAGGTTCG | 45.1 | 0.9835 |
| 7877 | Pcsk9_T166 | GTGTGGGTGCTTGACGCCTG | 45 | 0.949 |
| 7977 | Pcsk9_T200 | GGTGGCTGTGGTTCCGTGCT | 44.9 | 0.9766 |
| 13546 | Pcsk9_T397 | CTGCTGCTCCTGGGTCCCGC | 44.1 | 0.9347 |
| 8035 | Pcsk9_T91 | CAAATCGGAACCCACTATAA | 43.3 | 0.5413 |
| 7966 | Pcsk9_T319 | CGTCCTCGTCCTCCTGCGCA | 43.1 | 0.9693 |
| 12642 | Pcsk9_T32 | GTGCGGCTGCGCTATTCAGT | 42.7 | 0.9242 |
| 7975 | Pcsk9_T70 | GGTTCCGTGCTCGGGTGCTT | 41.4 | 0.861 |
| 7880 | Pcsk9_T151 | GCGGAAACCTTCTAGGGTGT | 40.9 | 0.9587 |
| 7963 | Pcsk9_T96 | TCCTGCGCACGGGCGCCCGC | 40.8 | 0.9602 |
| 14260 | Pcsk9_Ex2-Int3_T356 | GAGTGGCGACCTGCTGGAGC | 40.6 | 0.9811 |
| 13669 | Pcsk9_T15 | TTTCTGCCTCGCCGCGGCAC | 40.1 | 0.9451 |
| 8583 | Pcsk9_Ex2-Int3_T47 | AATGAAGATAGACGTACCAC | 40.1 | 0.4377 |
| 13567 | Pcsk9_T134 | CTGGCCGAAGCACCCGAGCA | 39.8 | 0.959 |
| 13509 | Pcsk9_T303 | GGCAGTGAGACTGGCTCGGG | 39.2 | 0.973 |
| 13474 | Pcsk9_T1 | ATCAGATAGGATCGTCCGAT | 38.5 | 0.9791 |
| 7921 | Pcsk9_T176 | GGCGCCTTGAGCCTTGCGGT | 37.8 | 0.9449 |
| 13587 | Pcsk9_T111 | AACCCGCAGCCGGGACGGTG | 37.6 | 0.9228 |
| 13562 | Pcsk9_T21 | GCTAGCCTTGCGTTCCGAGG | 36.8 | 0.9184 |
| 7906 | Pcsk9_Tll6 | TTCAGGAGCAGGGCGCGTGA | 36.5 | 0.9772 |
| 12647 | Pcsk9_T51 | TATTCAGTGGGAAGGTTCGC | 36.5 | 0.8781 |
| 7885 | Pcsk9_T19 | TGAGCGCCTCGACGTCGCTG | 36.4 | 0.9682 |
| 7972 | Pcsk9_T172 | TTCGGCCAGGCCGTCCTCCT | 35.7 | 0.9511 |
| 74796 | Pcsk9_T93 | CGACCAGGCCCGTAGAGAGC | 35.5 | 0.95 |
| 8037 | Pcsk9_T239 | TCGGGTAGGGCCTTCTCTCC | 34.7 | 0.9737 |
| 14250 | Pcsk9_Ex2-Int3_T655 | CAGGCCCAGGCTGCCCGCCG | 34.3 | 0.9311 |
| 8026 | Pcsk9_T78 | CACCCACCTGTGCCGCGGCG | 33.9 | 0.9866 |
| 857.1 | Pcsk9_Ex2-Int3_T456 | TAGGTGCCAGGCAACCTCCA | 33.3 | 0.9869 |
| 13687 | Pcsk9_T65 | AGCGGGCTTGCCATTATAGT | 32.7 | 0.9579 |
| 8029 | Pcsk9_T135 | TGCAGTTCCCAGTACGTTCC | 32.3 | 0.9593 |
| 13650 | Pcsk9_T59 | GTGGGAAGGTTCGCGGGGTT | 32 | 0.982 |
| 13712 | Pcsk9_T222 | GCCCTACCCGAGACAGGGGC | 31.6 | 0.9719 |
| 7943 | Pcsk9_T258 | TGGAGCTGACGGTGCCCATG | 31.4 | 0.9582 |
| 13642 | Pcsk9_T18 | CGTGCGGCTGCGCTATTCAG | 30.9 | 0.9855 |
| 13515 | Pcsk9_T100 | GGGACGCGTCGTTGCAGCAG | 30.6 | 0.9879 |
| 13584 | Pcsk9_T94 | GGCCGGGGCGAACCCGCAGC | 30.6 | 0.9884 |
| 13689 | Pcsk9_T114 | TAGTGGGTTCCGATTTGGTT | 30.3 | 0.9583 |
| 13695 | Pcsk9_T275 | TTGGAAAACATGGGCAGCGG | 30 | 0.9385 |
| 7926 | Pcsk9_T31 | AGGCCGTGCGCGGTCCACGC | 29.1 | 0.9438 |
| 13636 | Pcsk9_T95 | CGGGGACGGCCGGCTCTTTG | 28.3 | 0.9864 |
| 8475 | Pcsk9_T142 | CACCCAGCTCTCTACGGGCC | 28 | 0.96 |
| 13605 | Pcsk9_T67 | TCTTCGCTTGGCACGATCTT | 27 | 0.9068 |
| 13574 | Pcsk9_T164 | CTGCGCCAAGGTGCGGGTGT | 26.5 | 0.9814 |
| 8479 | Pcsk9_T14 | TACGGGCCACACTCGACAAC | 26.5 | 0.9872 |
| 13489 | Pcsk9_T58 | GTCGAGGCGCTCATGGTTGC | 26.1 | 0.2736 |
| 7961 | Pcsk9_T342 | CACGGGCGCCCGCGGGACCC | 24.5 | 0.9745 |
| 7900 | Pcsk9_T152 | GGGCGCGCGGAATCCTGGCT | 23.8 | 0.9696 |
| 7982 | Pcsk9_T128 | CCCGCACCTTGGCGCAGCGG | 23.7 | 0.9835 |
| 13557 | Pcsk9_T115 | GGACGGCGACTACGAGGAGC | 22.8 | 0.9778 |
| 13486 | Pcsk9_T2 | AGGTTTCCGCAGCGACGTCG | 22.2 | 0.9855 |
| 7881 | Pcsk9_T143 | TGCGGAAACCTTCTAGGGTG | 21.6 | 0.9335 |
| 13594 | Pcsk9_T306 | AGTTTCCCCCCATGTAAGAG | 21.2 | 0.9814 |
| 13601 | Pcsk9_T42 | AAGTGGAGTGCAGGTCGCCG | 21.1 | 0.9771 |
| 7932 | Pcsk9_T298 | aAGAGGTTGCTGTCCTGGCG | 19.5 | 0.9646 |
| 13606 | Pcsk9_T34 | CTTCGCTTGGCACGATCTTG | 19.1 | 0.9909 |
| 7947 | Pcsk9_T360 | CAGCGGCCACCAGGACCGCC | 19 | 0.9738 |
| 13575 | Pcsk9_T50 | TGCGCCAAGGTGCGGGTGTA | 18.7 | 0.9928 |
| 13676 | Pcsk9_T157 | AGTGAATGCCTGGPACGTAC | 18.3 | 0.9798 |
| 8518 | Pcsk9_Ex2-Int3_T184 | TGCGCTCTGACTGCGAGAGG | 16.1 | 0.9913 |
| 13548 | Pcsk9_T148 | TCCCGCGGGCGCCCGTGCGC | 16 | 0.9761 |
| 13550 | Pcsk9_T224 | CGCGGGCGCCCGTGCGCAGG | 15.5 | 0.981 |
| 8519 | Pcsk9_Ex2-Int3_T96 | CkGTGCGCTCTGACTGCGAG | 15.2 | 0.993 |
| 7878 | Pcsk9_T97 | GGTGTGGGTGCTTGACGCCT | 14.7 | 0.964 |
| 8529 | Pcsk9_Ex2-Int3_T197 | GGTATCCCCGGCGGGCAGCC | 14.6 | 0.9527 |
| 7901 | Pcsk9_T144 | GGGGCGCGCGGAATCCTGGC | 14.4 | 0.9868 |
| 13645 | Pcsk9_T163 | GGCTGCGCTATTCAGTGGGA | 14.3 | 0.9843 |
| 7903 | Pcsk9_T220 | AGGGCGCGTGAAGGGGCGCG | 12.2 | 0.9887 |
| 13479 | Pcsk9_T82 | TGGCGTGATCTGCGCGCCCC | 11.2 | 0.9894 |
| 13649 | Pcsk9_T77 | AGTGGGAAGGTTCGCGGGGT | 10.5 | 0.9878 |
| 7987 | Pcsk9_T167 | CACCGCACCGTCCCGGCTGC | 10.4 | 0.9875 |
| 13585 | Pcsk9_7155 | GCCGGGGCGTACCCGCAGCC | 10.3 | 0.9927 |
| 13608 | Pcsk9_T261 | GGCACGATCTTGGGGACTGC | 10.3 | 0.9939 |
| 14262 | Pcsk9_Ex2-Int3_T782 | AGCTGGTGAGCCACCCTTTT | 9.7 | 0.9959 |
| 13604 | Pcsk9_T105 | CTCTTCGCTTGGCACGATCT | 9.6 | 0.9925 |
| 7973 | Pcsk9_T37 | CGTGCTCGGGTGCTTCGGCC | 9 | 0.9892 |
| 13635 | Pcsk9_T23 | GCGGGGACGGCCGGCTCTTT | 8.2 | 0.9888 |
| 13552 | Pcsk9_T287 | CGCCCGTGCGCAGGAGGACG | 7.5 | 0.9834 |
| 13656 | Pcsk9_T265 | GTTGGGAGACCCGGAGGCCG | 7.5 | 0.9876 |
| 13528 | Pcsk9_T57 | CCGCCGGCGTGGACCGCGCA | 6.9 | 0.9931 |
| 13638 | Pcsk9_T214 | CGGCTCTTTGGGGACTTGCT | 6.6 | 0.9912 |
| 13634 | Pcsk9_T30 | AGCGGGGACGGCCGGCTCTT | 5.4 | 0.9914 |
| 13637 | Pcsk9_T194 | CCGGCTCTTTGGGGACTTGC | 4.9 | 0.9918 |
| 8024 | Pcsk9_T112 | TGCCGCGGCGAGGCAGAAAC | 4.6 | 0.9825 |
| 14245 | Pcsk9_Ex2-Int3_T588 | GCGCACTGCCCGCCGCCTGC | 4.1 | 0.9964 |
| 13511 | Pcsk9_T204 | TGAGACTGGCTCGGGCGGGC | 3.9 | 0.9921 |
| 8512 | Pcsk9_Ex2-Int3_7143 | AGCACCACCACGTAGGTGCC | 3.8 | 0.9947 |
| 13532 | Pcsk9_T230 | GGCCTCTAGGTCTCCTCGCC | 3.6 | 0.9921 |
| 8528 | Pcsk9_Ex2-Int3_T173 | GTATCCCCGGCGGGCAGCCT | 3.3 | 0.9961 |
| 13564 | Pcsk9_T104 | GCGTTCCGAGGAGGACGGCC | 2.9 | 0.9895 |
| 8039 | Pcsk9_T80 | CCCCGCCCCTGTCTCGGGTA | 2.5 | 0.9715 |
| 13527 | Pcsk9_T156 | GGCTCAAGGCGCCGCCGGCG | 2.3 | 0.9931 |
| 13512 | Pcsk9_7237 | GAGACTGGCTCGGGCGGGCC | 2 | 0.9926 |
| 7879 | Pcsk9_7124 | GGGTGTGGGTGCTTGACGCC | 1.7 | 0.9913 |
| 13576 | Pcsk9_T372 | CCAAGGTGCGGGTGTAGGGA | | |
| 13577 | Pcsk9_T332 | CAAGGTGCGGGTGTAGGGAT | | |
| 7985 | Pcsk9_T270 | CCATCCCTACACCCGCACCT | | |
| 13713 | Pcsk9_T139 | CCCTACCCGAGACAGGGGCG | | |
| 13720 | Pcsk9_7264 | GTGGGAAGGACGGCAGATGC | | |
| 13721 | Pcsk9_T283 | TGGGAAGGACGGCAGATGCT | | |
| 8474 | Pcsk9_T71 | TCTACGGGCCTGGTCGCTCC | | |
| 8531 | Pcsk9_Ex2-Int3_T76 | CTTGGTGAGGTATCCCCGGC | | |
| 8532 | Pcsk9_Ex2-Int3_T55 | TCTTGGTGAGGTATCCCCGG | | |
| 8533 | Pcsk9_Ex2-Int3_T159 | GGATCTTGGTGAGGTATCCC | | |
| 8534 | Pcsk9_Ex2-Int3_T647 | AGACATGCAGGATCTTGGTG | | |
| 14258 | Pcsk9_Ex2-Int3_T123 | GAAGATGAGTGGCGACCTGC | | |
| 14317 | Pcsk9_Ex2-Int3_T119 | TGCTGCCTACGGAAACCTGT | | |

### Example 9

### Testing of Preferred Guides in Cells for Off-Target Activity

[0459] The gRNAs having the best on-target activity from the IVT screen in the above example are tested for off-target activity using Hybrid capture assays, GUIDE Seq and whole genome sequencing, in addition to other methods.

### Example 10

### Screening of gRNAs

[0460] The PCSK9 region (chr1:55,040,222-55,064,853) was used to design 20-nt recognition sites using the CCTop protocol (Stemmer, M., Thumberger, T., del Sol Keyer, M., Wittbrodt, J. and Mateo, J. L. CCTop: an intuitive, flexible and reliable CRISPR/Cas9 target prediction tool. PLOS ONE (2015). doi:10.1371/journal.pone.0124633) to design gRNA targeting various exons. Spacers highly homologous to PCSK9 exons of Sus scrofa and Macaca fascicularis (criteria of gRNA inclusion: presence of NGG PAM, not more than 1 mismatch at the 1^{st} or 2^{nd} position of the spacer sequence). The twenty three gRNAs designed to be cross-reactive for human, macaca and pig were purchased from Integrated DNA Technologies (Alt-R™ CRISPR crRNA).

[0461] The activity of the gRNAs was tested in HuH7 cells constitutively expressing the Cas9 (transduced by lentivirus), FIG. 5. 10K cells per well (96-well plate) were plated, and transfected in 16-18 h after plating, briefly, gRNAs were incubated with Lipofectamine® RNAiMAX (ThermoFisher Scientific) according to the manufacturer's protocol, final gRNA amount of 130 ng. Cells were incubated with gRNA-Lipofectamine complexes for 48 h in the complete media comprising DMEK supplemented by 10% FBS. Cells were lysed in prepGEM™ (ZyGem NX Ltd), according to the manufacture's protocol.

[0462] The efficiency of the gRNA was analyzed by Tracking of Indels by Decomposition (TIDE) analysis (Brinkman E K, Chen T, Amendola M, van Steensel B. Easy quantitative assessment of genome editing by sequence trace decomposition. Nucleic Acids Res. 2014 Dec. 16; 42(22):e168. doi: 10.1093/nar/gku936), briefly, genomic DNA was used as a template for PCR using KAPA HiFi PCR Kit.

[0463] PCR amplicons were purified using the AxyPrep Mag PCR clean-up kit (Axygen). Amplicons were sequenced and analyzed using the decomposition algorithm. gRNA activity was measured as a ratio of alleles with various indels (insertions of 1 to 50 nt, or deletions of 1 to 50 nt) adjacent to predicted cut site of the S.py. Cas9 between nucleotides −4 and −3 upstream of PAM (NGG) on a non-target strand and between 3 and 4 nucleotides downstream of PAM complementary sequence (CCN) on a target strand. The activity of the gRNA is listed in Table 8.

[0464] This study demonstrates that 1 guide targeting PCSK9 exon 1 and 1 guide targeting PCSK9 exon −18 had in vitro indel efficiency higher than 60%.

TABLE 8

| | (SEQ | | | |
|---|---|---|---|---|
| | ID | | Average | |
| guide ID | NO) | gRNA target sequence | Efficiency | SD |
| P9-1 (also, | 13555 | GGACGAGGACGGCGACTACG | 88.23 | 1.85 |
| Pcsk9_T39) | | | | |
| P9-2 | 15710 | ACCACCGGGAAATCGAGGGC | 16.67 | 0.1155 |
| P9-3 | 15711 | CCACCGGGAAATCGAGGGCA | 23.37 | 2.491 |
| P9-4 | 15780 | GTGGTCAGCGGCCGGGATGC | 10.17 | 0.9713 |
| P9-5 | 15781 | CAGCGGCCGGGATGCCGGCG | 0.80 | 0.3464 |
| P9-6 | 15783 | CCGGGATGCCGGCGTGGCCA | 2.70 | 0.8888 |
| P9-7 | 15784 | CGGGATGCCGGCGTGGCCAA | 10.73 | 0.7506 |
| P9-8 | 16665 | AAGACCAGCCGGTGACCCTG | ND | NA |
| P9-9 | 16812 | TGCCAAAGATGTCATCAATG | 39.90 | 2.828 |
| P9-10 | 16813 | AAGATGTCATCAATGAGGCC | 42.45 | 1.626 |
| P9-11 | 16815 | CAATGAGGCCTGGTTCCCTG | 18.17 | 0.8386 |
| P9-12 | 16817 | CCTGGTTCCCTGAGGACCAG | 36.73 | 2.255 |
| P9-13 | 16818 | CTGGTTCCCTGAGGACCAGC | 2.20 | 1.48 |
| P9-14 | 17423 | CTGCAGCTCCCACTGGGAGG | 5.9 | 2.0 |
| P9-15 | 17425 | CAGCTCCCACTGGGAGGTGG | 4.6 | 2.1 |
| P9-16 | 11250 | TAGCAGGCAGCACCTGGCAA | 22.70 | 2.17 |
| P9-17 | 11009 | CCGCTGGTCCTCAGGGAACC | 13.43 | 1.704 |
| P9-18 | 11008 | GGCCTCATTGATGACATCTT | 70.15 | 0.6364 |
| P9-19 | 11004 | TGACATCTTTGGCAGAGAAG | 47.97 | 6.667 |
| P9-20 | 10094 | CCTTGGCCACGCCGGCATCC | 15.87 | 5.367 |
| P9-21 | 10031 | TGACCCTGCCCTCGATTTCC | 33.57 | 5.59 |
| P9-22 | 10030 | CCCTGCCCTCGATTTCCCGG | 54.33 | 1.137 |
| P9-23 (also, | 7966 | CGTCCTCGTCCTCCTGCGCA | 43.00 | 2.128 |
| Pcsk9_T319) | | | | |

Average Efficiency = % indels;
ND—Not Detectable;
NA—Not Applicable;
Sample size includes 2 or 3 experimental replicates

### Example 11

### Cross-Reactive Activity of the gRNA Targeting PCSK9 in Primary Hepatocytes

[0465] This example demonstrates efficient cross-reactive activity of PCSK9 gRNAs in primary hepatocytes isolated from pig, cynomolgus monkey, and human donors after knockout by Lipofectamine transfection of Cas9:gRNA complexes.

[0466] Primary hepatocytes isolated from pig (BioreclamationIVT), cynomolgus monkey (In Vitro ADMET Laboratories), and human (In Vitro ADMET Laboratories) were plated in confluent monolayers in 24-well Collagen-Type I coated plates (Corning Biocoat Collagen I Multiwell Plates, cat #356408) at 0.35×10⁶ cells/well and incubated at 37 C in 5% CO₂ in InVitroGRO Culture Plating Medium (BioreclamationIVT, Z990003). Hepatocyte monolayers were transfected 3-5 hours after plating with either P9-1 gRNA or P9-18 gRNA in complex with Cas9 mRNA. Transfections of gRNA were performed using Lipofectamine MessengerMax, according to the manufacture's protocol, at a final gRNA amount of 200 ng. Hepatocytes were also transfected with Lipofectamine MessengerMax, absent of Cas9 and gRNA complexes to generate “MOCK” samples. Cells received a medium change for fresh InVitroGRO culture medium at 16 hours post transfection and were incubated with gRNA-Lipofectamine complexes for 48 h at which time they were lysed in prepGEM (ZyGem), according to the manufacture's protocol.

[0467] Hepatocytes transfected with Cas9 and PCSK9 gRNA and mock transfectants (control group) were analyzed by TIDE. TIDE analysis showed that both PCSK9 guide RNAs, P9-1 and PCSK9 P9-18, were both active in primary hepatocytes isolated from pig, monkey, and human (see FIGS. 6A-6B). Although, P9-1 and P9-18 exhibit greater than 60% cutting efficiency in HuH7 cells, only P9-1 exhibited similar cutting efficiency (˜60%) in primary human hepatocytes. In addition, P9-1 shows better cross-species activity compared to P9-18; P9-1 gRNA exhibits higher InDel frequencies across and within species.

### Example 12

### PCSK9 Protein Secretion in Gene-Edited Primary Human Hepatocytes

[0468] This example demonstrates the correlation between efficient gene-editing by P9-1 gRNA and reduction in secreted PCSK9 protein in primary human hepatocytes. Primary human hepatocytes (In Vitro ADMET Laboratories) were plated in confluent monolayers in 24-well Collagen-Type I coated plates (Corning Biocoat Collagen I Multiwell Plates, cat #356408) at 0.35×10⁶ cells/well and incubated at 37 C in 5% CO₂ in InVitroGRO Culture Plating Medium (BioreclamationIVT, Z990003). Hepatocyte monolayers were transfected 3-5 hours after plating with either P9-1 gRNA or hC3 gRNA (hC3 target sequence: TGGGACTCCCCAGAGCCAGG (SEQ ID NO: 28,732). hC3 is a non-relevant gRNA that efficiently knocks out the human C3 gene but does not edit the PCSK9 gene) in complex with Cas9 mRNA. Transfections of gRNA were performed using Lipofectamine MessengerMax, according to the manufacture's protocol, at a final gRNA amount of 200 ng. Hepatocytes were also transfected with Lipofectamine MessengerMax, absent of Cas9 and gRNA complexes to generate “MOCK” samples. Cells received a medium change for fresh InVitroGRO culture medium at 16 hours post transfection. The samples were incubated with gRNA-Lipofectamine complexes for 48 h, at which time supernatants were collected for PCSK9 protein analysis and cells were lysed in prepGEM (ZyGem), according to the manufacture's protocol.

[0469] Hepatocytes transfected with Cas9 and P9-1 gRNA, or Cas9 and hC3 gRNA, and mock transfectants (control group) were analyzed by TIDE. TIDE analysis showed that PCSK9 was edited by P9-1 gRNA (InDel ˜60%) but not hC3 gRNA, as expected. At the same time, hC3 efficiently edited the C3 gene, with InDel frequency of ˜65% in the same human donor (FIGS. 7A & 7B, respectively).

[0470] A Sandwich Enzyme-Linked Immunosorbent Assay (ELISA) for Human PCSK9 protein (BioLegend, Legend MAX™ Human PCSK9 ELISA kit, cat#443107) was used to detect concentrations of PCSK9 in supernatants collected from “MOCK” and gene-edited samples. This study revealed average levels of ˜11 ng/ml of PCSK9 in “MOCK” samples and similar levels of ˜9 ng/mL for supernatants gathered from the hC3 gene-edited hepatocytes. In contrast, supernatants from primary hepatocytes that revealed ˜60% gene editing of PCSK9 by P9-1 gRNA contained less than 1 ng/mL of PCSK9 protein, a significant reduction in PCSK9 protein levels relative to control groups (FIG. 7C). This study demonstrates that effective editing of the PCSK9 gene resulted in a functional reduction of secreted PCSK9 protein in primary hepatocytes.

### Example 13

### In Vivo Testing in Relevant Animal Model

[0471] After the CRISPR-Cas9/guide combinations have been assessed, the lead formulations will be tested in vivo in an animal model.

[0472] Following lead selection, gRNA and Cas9 complexes are formulated into lipid nanoparticles for delivery.

[0473] A heterozygous LDLR+/− pig is selected as a model for hypercholesterolemia, a condition characterized by elevated plasma concentrations of cholesterol, followed by accelerated atherosclerosis. Monoclonal antibody therapy for PCSK9 inhibition has been shown to reduce LDL-cholesterol in patients with familiar hypercholesterolemia, which manifests in patients with loss-of-function mutations in LDLR.

[0474] Lipid nanoparticles complexed with Cas9 mRNA and P9-1 gRNA are infused into the pigs and whole blood samples are collected hourly within the first day post-dose and every third day over the span of 7 days. A control group includes saline-infused animals. Pre-dose, baseline whole blood collections are also made.

[0475] Body weights are monitored throughout the study and plasma and serum samples are monitored for cytokines and complement activation (inflammatory response) and clinical lipid panels (Total cholesterol, HDL, LDL-C, and triglycerides). At the completion of the 7 days, liver tissue is collected and assessed for gene-editing of the PCSK9 gene.

[0476] Liver tissue is homogenized from both control and dosed animals and analyzed by TIDE analysis for evidence of effective PCSK9 gene-editing.

[0477] The outcomes of TIDE analysis and lipid chemistry over the course of the study will yield a correlation between InDel frequency and modification in cholesterol levels, with an emphasis in the reduction of LDL-C.

### XI. EQUIVALENTS AND SCOPE

[0478] Those skilled in the art will recognize, or be able to ascertain using no more than routine experimentation, many equivalents to the specific embodiments in accordance with the invention described herein. The scope of the present invention is not intended to be limited to the above Description, but rather is as set forth in the appended claims.

[0479] Claims or descriptions that include “or” between one or more members of a group are considered satisfied if one, more than one, or all of the group members are present in, employed in, or otherwise relevant to a given product or process unless indicated to the contrary or otherwise evident from the context. The invention includes embodiments in which exactly one member of the group is present in, employed in, or otherwise relevant to a given product or process. The invention includes embodiments in which more than one, or the entire group members are present in, employed in, or otherwise relevant to a given product or process.

[0480] In addition, it is to be understood that any particular embodiment of the present invention that falls within the prior art may be explicitly excluded from any one or more of the claims. Since such embodiments are deemed to be known to one of ordinary skill in the art, they may be excluded even if the exclusion is not set forth explicitly herein. Any particular embodiment of the compositions of the invention (e.g., any antibiotic, therapeutic or active ingredient; any method of production; any method of use; etc.) can be excluded from any one or more claims, for any reason, whether or not related to the existence of prior art.

[0481] It is to be understood that the words which have been used are words of description rather than limitation, and that changes may be made within the purview of the appended claims without departing from the true scope and spirit of the invention in its broader aspects.

[0482] While the present invention has been described at some length and with some particular with respect to the several described embodiments, it is not intended that it should be limited to any such particulars or embodiments or any particular embodiment, but it is to be construed with references to the appended claims so as to provide the broadest possible interpretation of such claims in view of the prior art and, therefore, to effectively encompass the intended scope of the invention.

### Note Regarding Illustrative Examples

[0483] While the present disclosure provides descriptions of various specific aspects for the purpose of illustrating various aspects of the present invention and/or its potential applications, it is understood that variations and modifications will occur to those skilled in the art. Accordingly, the invention or inventions described herein should be understood to be at least as broad as they are claimed, and not as more narrowly defined by particular illustrative aspects provided herein.

[0484] Any patent, publication, or other disclosure material identified herein is incorporated by reference into this specification in its entirety unless otherwise indicated, but only to the extent that the incorporated material does not conflict with existing descriptions, definitions, statements, or other disclosure material expressly set forth in this specification. As such, and to the extent necessary, the express disclosure as set forth in this specification supersedes any conflicting material incorporated by reference. Any material, or portion thereof, that is said to be incorporated by reference into this specification, but which conflicts with existing definitions, statements, or other disclosure material set forth herein, is only incorporated to the extent that no conflict arises between that incorporated material and the existing disclosure material. Applicants reserve the right to amend this specification to expressly recite any subject matter, or portion thereof, incorporated by reference herein.

The application's sequence listing, which the Patent Office published only in electronic form, follows.

SEQUENCE LISTING (28732 sequences)

SEQ ID NO: 1 - protein, 1368 aa, Streptococcus pyogenes [sequence omitted]

SEQ ID NO: 2 - DNA, 4107 bp, Streptococcus pyogenes
atggataagaaatactcaataggcttagatatcggcacaaatagcgtcggatgggcggtgatcactgatgaatataaggttccgtctaaaaagttcaaggttctgggaaatacagaccgccacagtatcaaaaaaaatcttataggggctcttttatttgacagtggagagacagcggaagcgactcgtctcaaacggacagctcgtagaaggtatacacgtcggaagaatcgtatttgttatctacaggagattttttcaaatgagatggcgaaagtagatgatagtttctttcatcgacttgaagagtcttttttggtggaagaagacaagaagcatgaacgtcatcctatttttggaaatatagtagatgaagttgcttatcatgagaaatatccaactatctatcatctgcgaaaaaaattggtagattctactgataaagcggatttgcgcttaatctatttggccttagcgcatatgattaagtttcgtggtcattttttgattgagggagatttaaatcctgataatagtgatgtggacaaactatttatccagttggtacaaacctacaatcaattatttgaagaaaaccctattaacgcaagtggagtagatgctaaagcgattctttctgcacgattgagtaaatcaagacgattagaaaatctcattgctcagctccccggtgagaagaaaaatggcttatttgggaatctcattgctttgtcattgggtttgacccctaattttaaatcaaattttgatttggcagaagatgctaaattacagctttcaaaagatacttacgatgatgatttagataatttattggcgcaaattggagatcaatatgctgatttgtttttggcagctaagaatttatcagatgctattttactttcagatatcctaagagtaaatactgaaataactaaggctcccctatcagcttcaatgattaaacgctacgatgaacatcatcaagacttgactcttttaaaagctttagttcgacaacaacttccagaaaagtataaagaaatcttttttgatcaatcaaaaaacggatatgcaggttatattgatgggggagctagccaagaagaattttataaatttatcaaaccaattttagaaaaaatggatggtactgaggaattattggtgaaactaaatcgtgaagatttgctgcgcaagcaacggacctttgacaacggctctattccccatcaaattcacttgggtgagctgcatgctattttgagaagacaagaagacttttatccatttttaaaagacaatcgtgagaagattgaaaaaatcttgacttttcgaattccttattatgttggtccattggcgcgtggcaatagtcgttttgcatggatgactcggaagtctgaagaaacaattaccccatggaattttgaagaagttgtcgataaaggtgcttcagctcaatcatttattgaacgcatgacaaactttgataaaaatcttccaaatgaaaaagtactaccaaaacatagtttgctttatgagtattttacggtttataacgaattgacaaaggtcaaatatgttactgaaggaatgcgaaaaccagcatttctttcaggtgaacagaagaaagccattgttgatttactcttcaaaacaaatcgaaaagtaaccgttaagcaattaaaagaagattatttcaaaaaaatagaatgttttgatagtgttgaaatttcaggagttgaagatagatttaatgcttcattaggtacctaccatgatttgctaaaaattattaaagataaagattttttggataatgaagaaaatgaagatatcttagaggatattgttttaacattgaccttatttgaagatagggagatgattgaggaaagacttaaaacatatgctcacctctttgatgataaggtgatgaaacagcttaaacgtcgccgttatactggttggggacgtttgtctcgaaaattgattaatggtattagggataagcaatctggcaaaacaatattagattttttgaaatcagatggttttgccaatcgcaattttatgcagctgatccatgatgatagtttgacatttaaagaagacattcaaaaagcacaagtgtctggacaaggcgatagtttacatgaacatattgcaaatttagctggtagccctgctattaaaaaaggtattttacagactgtaaaagttgttgatgaattggtcaaagtaatggggcggcataagccagaaaatatcgttattgaaatggcacgtgaaaatcagacaactcaaaagggccagaaaaattcgcgagagcgtatgaaacgaatcgaagaaggtatcaaagaattaggaagtcagattcttaaagagcatcctgttgaaaatactcaattgcaaaatgaaaagctctatctctattatctccaaaatggaagagacatgtatgtggaccaagaattagatattaatcgtttaagtgattatgatgtcgatcacattgttccacaaagtttccttaaagacgattcaatagacaataaggtcttaacgcgttctgataaaaatcgtggtaaatcggataacgttccaagtgaagaagtagtcaaaaagatgaaaaactattggagacaacttctaaacgccaagttaatcactcaacgtaagtttgataatttaacgaaagctgaacgtggaggtttgagtgaacttgataaagctggttttatcaaacgccaattggttgaaactcgccaaatcactaagcatgtggcacaaattttggatagtcgcatgaatactaaatacgatgaaaatgataaacttattcgagaggttaaagtgattaccttaaaatctaaattagtttctgacttccgaaaagatttccaattctataaagtacgtgagattaacaattaccatcatgcccatgatgcgtatctaaatgccgtcgttggaactgctttgattaagaaatatccaaaacttgaatcggagtttgtctatggtgattataaagtttatgatgttcgtaaaatgattgctaagtctgagcaagaaataggcaaagcaaccgcaaaatatttcttttactctaatatcatgaacttcttcaaaacagaaattacacttgcaaatggagagattcgcaaacgccctctaatcgaaactaatggggaaactggagaaattgtctgggataaagggcgagattttgccacagtgcgcaaagtattgtccatgccccaagtcaatattgtcaagaaaacagaagtacagacaggcggattctccaaggagtcaattttaccaaaaagaaattcggacaagcttattgctcgtaaaaaagactgggatccaaaaaaatatggtggttttgatagtccaacggtagcttattcagtcctagtggttgctaaggtggaaaaagggaaatcgaagaagttaaaatccgttaaagagttactagggatcacaattatggaaagaagttcctttgaaaaaaatccgattgactttttagaagctaaaggatataaggaagttaaaaaagacttaatcattaaactacctaaatatagtctttttgagttagaaaacggtcgtaaacggatgctggctagtgccggagaattacaaaaaggaaatgagctggctctgccaagcaaatatgtgaattttttatatttagctagtcattatgaaaagttgaagggtagtccagaagataacgaacaaaaacaattgtttgtggagcagcataagcattatttagatgagattattgagcaaatcagtgaattttctaagcgtgttattttagcagatgccaatttagataaagttcttagtgcatataacaaacatagagacaaaccaatacgtgaacaagcagaaaatattattcatttatttacgttgacgaatcttggagctcccgctgcttttaaatattttgatacaacaattgatcgtaaacgatatacgtctacaaaagaagttttagatgccactcttatccatcaatccatcactggtctttatgaaacacgcattgatttgagtcagctaggaggtgactga

SEQ ID NO: 3 - DNA, 4107 bp, Streptococcus pyogenes
atggacaagaagtactccattgggctcgctatcggcacaaacagcgtcggctgggccgtcattacggacgagtacaaggtgccgagcaaaaaattcaaagttctgggcaataccgatcgccacagcataaagaagaacctcattggcgccctcctgttcgactccggggagacggccgaagccacgcggctcaaaagaacagcacggcgcagatatacccgcagaaagaatcggatctgctacctgcaggagatctttagtaatgagatggctaaggtggatgactctttcttccataggctggaggagtcctttttggtggaggaggataaaaagcacgagcgccacccaatctttggcaatatcgtggacgaggtggcgtaccatgaaaagtacccaaccatatatcatctgaggaagaagcttgtagacagtactgataaggctgacttgcggttgatctatctcgcgctggcgcatatgatcaaatttcggggacacttcctcatcgagggggacctgaacccagacaacagcgatgtcgacaaactctttatccaactggttcagacttacaatcagcttttcgaagagaacccgatcaacgcatccggagttgacgccaaagcaatcctgagcgctaggctgtccaaatcccggcggctcgaaaacctcatcgcacagctccctggggagaagaagaacggcctgtttggtaatcttatcgccctgtcactcgggctgacccccaactttaaatctaacttcgacctggccgaagatgccaagcttcaactgagcaaagacacctacgatgatgatctcgacaatctgctggcccagatcggcgaccagtacgcagacctttttttggcggcaaagaacctgtcagacgccattctgctgagtgatattctgcgagtgaacacggagatcaccaaagctccgctgagcgctagtatgatcaagcgctatgatgagcaccaccaagacttgactttgctgaaggcccttgtcagacagcaactgcctgagaagtacaaggaaattttcttcgatcagtctaaaaatggctacgccggatacattgacggcggagcaagccaggaggaattttacaaatttattaagcccatcttggaaaaaatggacggcaccgaggagctgctggtaaagcttaacagagaagatctgttgcgcaaacagcgcactttcgacaatggaagcatcccccaccagattcacctgggcgaactgcacgctatcctcaggcggcaagaggatttctacccctttttgaaagataacagggaaaagattgagaaaatcctcacatttcggataccctactatgtaggccccctcgcccggggaaattccagattcgcgtggatgactcgcaaatcagaagagaccatcactccctggaacttcgaggaagtcgtggataagggggcctctgcccagtccttcatcgaaaggatgactaactttgataaaaatctgcctaacgaaaaggtgcttcctaaacactctctgctgtacgagtacttcacagtttataacgagctcaccaaggtcaaatacgtcacagaagggatgagaaagccagcattcctgtctggagagcagaagaaagctatcgtggacctcctcttcaagacgaaccggaaagttaccgtgaaacagctcaaagaagactatttcaaaaagattgaatgtttcgactctgttgaaatcagcggagtggaggatcgcttcaacgcatccctgggaacgtatcacgatctcctgaaaatcattaaagacaaggacttcctggacaatgaggagaacgaggacattcttgaggacattgtcctcacccttacgttgtttgaagatagggagatgattgaagaacgcttgaaaacttacgctcatctcttcgacgacaaagtcatgaaacagctcaagaggcgccgatatacaggatgggggcggctgtcaagaaaactgatcaatgggatccgagacaagcagagtggaaagacaatcctggattttcttaagtccgatggatttgccaaccggaacttcatgcagttgatccatgatgactctctcacctttaaggaggacatccagaaagcacaagtttctggccagggggacagtcttcacgagcacatcgctaatcttgcaggtagcccagctatcaaaaagggaatactgcagaccgttaaggtcgtggatgaactcgtcaaagtaatgggaaggcataagcccgagaatatcgttatcgagatggcccgagagaaccaaactacccagaagggacagaagaacagtagggaaaggatgaagaggattgaagagggtataaaagaactggggtcccaaatccttaaggaacacccagttgaaaacacccagcttcagaatgagaagctctacctgtactacctgcagaacggcagggacatgtacgtggatcaggaactggacatcaatcggctctccgactacgacgtggctgctatcgtgccccagtcttttctcaaagatgattctattgataataaagtgttgacaagatccgataaagctagagggaagagtgataacgtcccctcagaagaagttgtcaagaaaatgaaaaattattggcggcagctgctgaacgccaaactgatcacacaacggaagttcgataatctgactaaggctgaacgaggtggcctgtctgagttggataaagccggcttcatcaaaaggcagcttgttgagacacgccagatcaccaagcacgtggcccaaattctcgattcacgcatgaacaccaagtacgatgaaaatgacaaactgattcgagaggtgaaagttattactctgaagtctaagctggtctcagatttcagaaaggactttcagttttataaggtgagagagatcaacaattaccaccatgcgcatgatgcctacctgaatgcagtggtaggcactgcacttatcaaaaaatatcccaagcttgaatctgaatttgtttacggagactataaagtgtacgatgttaggaaaatgatcgcaaagtctgagcaggaaataggcaaggccaccgctaagtacttcttttacagcaatattatgaattttttcaagaccgagattacactggccaatggagagattcggaagcgaccacttatcgaaacaaacggagaaacaggagaaatcgtgtgggacaagggtagggatttcgcgacagtccggaaggtcctgtccatgccgcaggtgaacatcgttaaaaagaccgaagtacagaccggaggcttctccaaggaaagtatcctcccgaaaaggaacagcgacaagctgatcgcacgcaaaaaagattgggaccccaagaaatacggcggattcgattctcctacagtcgcttacagtgtactggttgtggccaaagtggagaaagggaagtctaaaaaactcaaaagcgtcaaggaactgctgggcatcacaatcatggagcgatcaagcttcgaaaaaaaccccatcgactttctcgaggcgaaaggatataaagaggtcaaaaaagacctcatcattaagcttcccaagtactctctctttgagcttgaaaacggccggaaacgaatgctcgctagtgcgggcgagctgcagaaaggtaacgagctggcactgccctctaaatacgttaatttcttgtatctggccagccactatgaaaagctcaaagggtctcccgaagataatgagcagaagcagctgttcgtggaacaacacaaacactaccttgatgagatcatcgagcaaataagcgaattctccaaaagagtgatcctcgccgacgctaacctcgataaggtgctttctgcttacaataagcacagggataagcccatcagggagcaggcagaaaacattatccacttgtttactctgaccaacttgggcgcgcctgcagccttcaagtacttcgacaccaccatagacagaaagcggtacacctctacaaaggaggtcctggacgccacactgattcatcagtcaattacggggctctatgaaacaagaatcgacctctctcagctcggtggagactaa

SEQ ID NO: 4 - DNA, 4140 bp, Streptococcus pyogenes
atggacaagaagtactccattgggctcgatatcggcacaaacagcgtcggctgggccgtcattacggacgagtacaaggtgccgagcaaaaaattcaaagttctgggcaataccgatcgccacagcataaagaagaacctcattggcgccctcctgttcgactccggggagacggccgaagccacgcggctcaaaagaacagcacggcgcagatatacccgcagaaagaatcggatctgctacctgcaggagatctttagtaatgagatggctaaggtggatgactctttcttccataggctggaggagtcctttttggtggaggaggataaaaagcacgagcgccacccaatctttggcaatatcgtggacgaggtggcgtaccatgaaaagtacccaaccatatatcatctgaggaagaagcttgtagacagtactgataaggctgacttgcggttgatctatctcgcgctggcgcatatgatcaaatttcggggacacttcctcatcgagggggacctgaacccagacaacagcgatgtcgacaaactctttatccaactggttcagacttacaatcagcttttcgaagagaacccgatcaacgcatccggagttgacgccaaagcaatcctgagcgctaggctgtccaaatcccggcggctcgaaaacctcatcgcacagctccctggggagaagaagaacggcctgtttggtaatcttatcgccctgtcactcgggctgacccccaactttaaatctaacttcgacctggccgaagatgccaagcttcaactgagcaaagacacctacgatgatgatctcgacaatctgctggcccagatcggcgaccagtacgcagacctttttttggcggcaaagaacctgtcagacgccattctgctgagtgatattctgcgagtgaacacggagatcaccaaagctccgctgagcgctagtatgatcaagcgctatgatgagcaccaccaagacttgactttgctgaaggcccttgtcagacagcaactgcctgagaagtacaaggaaattttcttcgatcagtctaaaaatggctacgccggatacattgacggcggagcaagccaggaggaattttacaaatttattaagcccatcttggaaaaaatggacggcaccgaggagctgctggtaaagcttaacagagaagatctgttgcgcaaacagcgcactttcgacaatggaagcatcccccaccagattcacctgggcgaactgcacgctatcctcaggcggcaagaggatttctacccctttttgaaagataacagggaaaagattgagaaaatcctcacatttcggataccctactatgtaggccccctcgcccggggaaattccagattcgcgtggatgactcgcaaatcagaagagaccatcactccctggaacttcgaggaagtcgtggataagggggcctctgcccagtccttcatcgaaaggatgactaactttgataaaaatctgcctaacgaaaaggtgcttcctaaacactctctgctgtacgagtacttcacagtttataacgagctcaccaaggtcaaatacgtcacagaagggatgagaaagccagcattcctgtctggagagcagaagaaagctatcgtggacctcctcttcaagacgaaccggaaagttaccgtgaaacagctcaaagaagactatttcaaaaagattgaatgtttcgactctgttgaaatcagcggagtggaggatcgcttcaacgcatccctgggaacgtatcacgatctcctgaaaatcattaaagacaaggacttcctggacaatgaggagaacgaggacattcttgaggacattgtcctcacccttacgttgtttgaagatagggagatgattgaagaacgcttgaaaacttacgctcatctcttcgacgacaaagtcatgaaacagctcaagaggcgccgatatacaggatgggggcggctgtcaagaaaactgatcaatgggatccgagacaagcagagtggaaagacaatcctggattttcttaagtccgatggatttgccaaccggaacttcatgcagttgatccatgatgactctctcacctttaaggaggacatccagaaagcacaagtttctggccagggggacagtcttcacgagcacatcgctaatcttgcaggtagcccagctatcaaaaagggaatactgcagaccgttaaggtcgtggatgaactcgtcaaagtaatgggaaggcataagcccgagaatatcgttatcgagatggcccgagagaaccaaactacccagaagggacagaagaacagtagggaaaggatgaagaggattgaagagggtataaaagaactggggtcccaaatccttaaggaacacccagttgaaaacacccagcttcagaatgagaagctctacctgtactacctgcagaacggcagggacatgtacgtggatcaggaactggacatcaatcggctctccgactacgacgtggatcatatcgtgccccagtcttttctcaaagatgattctattgataataaagtgttgacaagatccgataaaaatagagggaagagtgataacgtcccctcagaagaagttgtcaagaaaatgaaaaattattggcggcagctgctgaacgccaaactgatcacacaacggaagttcgataatctgactaaggctgaacgaggtggcctgtctgagttggataaagccggcttcatcaaaaggcagcttgttgagacacgccagatcaccaagcacgtggcccaaattctcgattcacgcatgaacaccaagtacgatgaaaatgacaaactgattcgagaggtgaaagttattactctgaagtctaagctggtctcagatttcagaaaggactttcagttttataaggtgagagagatcaacaattaccaccatgcgcatgatgcctacctgaatgcagtggtaggcactgcacttatcaaaaaatatcccaagcttgaatctgaatttgtttacggagactataaagtgtacgatgttaggaaaatgatcgcaaagtctgagcaggaaataggcaaggccaccgctaagtacttcttttacagcaatattatgaattttttcaagaccgagattacactggccaatggagagattcggaagcgaccacttatcgaaacaaacggagaaacaggagaaatcgtgtgggacaagggtagggatttcgcgacagtccggaaggtcctgtccatgccgcaggtgaacatcgttaaaaagaccgaagtacagaccggaggcttctccaaggaaagtatcctcccgaaaaggaacagcgacaagctgatcgcacgcaaaaaagattgggaccccaagaaatacggcggattcgattctcctacagtcgcttacagtgtactggttgtggccaaagtggagaaagggaagtctaaaaaactcaaaagcgtcaaggaactgctgggcatcacaatcatggagcgatcaagcttcgaaaaaaaccccatcgactttctcgaggcgaaaggatataaagaggtcaaaaaagacctcatcattaagcttcccaagtactctctctttgagcttgaaaacggccggaaacgaatgctcgctagtgcgggcgagctgcagaaaggtaacgagctggcactgccctctaaatacgttaatttcttgtatctggccagccactatgaaaagctcaaagggtctcccgaagataatgagcagaagcagctgttcgtggaacaacacaaacactaccttgatgagatcatcgagcaaataagcgaattctccaaaagagtgatcctcgccgacgctaacctcgataaggtgctttctgcttacaataagcacagggataagcccatcagggagcaggcagaaaacattatccacttgtttactctgaccaacttgggcgcgcctgcagccttcaagtacttcgacaccaccatagacagaaagcggtacacctctacaaaggaggtcctggacgccacactgattcatcagtcaattacggggctctatgaaacaagaatcgacctctctcagctcggtggagacagcagggctgaccccaagaagaagaggaaggtgtga

SEQ ID NO: 5 - DNA, 4200 bp, Streptococcus pyogenes
atggacaagaagtactccattgggctcgatatcggcacaaacagcgtcggctgggccgtcattacggacgagtacaaggtgccgagcaaaaaattcaaagttctgggcaataccgatcgccacagcataaagaagaacctcattggcgccctcctgttcgactccggggagacggccgaagccacgcggctcaaaagaacagcacggcgcagatatacccgcagaaagaatcggatctgctacctgcaggagatctttagtaatgagatggctaaggtggatgactctttcttccataggctggaggagtcctttttggtggaggaggataaaaagcacgagcgccacccaatctttggcaatatcgtggacgaggtggcgtaccatgaaaagtacccaaccatatatcatctgaggaagaagcttgtagacagtactgataaggctgacttgcggttgatctatctcgcgctggcgcatatgatcaaatttcggggacacttcctcatcgagggggacctgaacccagacaacagcgatgtcgacaaactctttatccaactggttcagacttacaatcagcttttcgaagagaacccgatcaacgcatccggagttgacgccaaagcaatcctgagcgctaggctgtccaaatcccggcggctcgaaaacctcatcgcacagctccctggggagaagaagaacggcctgtttggtaatcttatcgccctgtcactcgggctgacccccaactttaaatctaacttcgacctggccgaagatgccaagcttcaactgagcaaagacacctacgatgatgatctcgacaatctgctggcccagatcggcgaccagtacgcagacctttttttggcggcaaagaacctgtcagacgccattctgctgagtgatattctgcgagtgaacacggagatcaccaaagctccgctgagcgctagtatgatcaagcgctatgatgagcaccaccaagacttgactttgctgaaggcccttgtcagacagcaactgcctgagaagtacaaggaaattttcttcgatcagtctaaaaatggctacgccggatacattgacggcggagcaagccaggaggaattttacaaatttattaagcccatcttggaaaaaatggacggcaccgaggagctgctggtaaagcttaacagagaagatctgttgcgcaaacagcgcactttcgacaatggaagcatcccccaccagattcacctgggcgaactgcacgctatcctcaggcggcaagaggatttctacccctttttgaaagataacagggaaaagattgagaaaatcctcacatttcggataccctactatgtaggccccctcgcccggggaaattccagattcgcgtggatgactcgcaaatcagaagagaccatcactccctggaacttcgaggaagtcgtggataagggggcctctgcccagtccttcatcgaaaggatgactaactttgataaaaatctgcctaacgaaaaggtgcttcctaaacactctctgctgtacgagtacttcacagtttataacgagctcaccaaggtcaaatacgtcacagaagggatgagaaagccagcattcctgtctggagagcagaagaaagctatcgtggacctcctcttcaagacgaaccggaaagttaccgtgaaacagctcaaagaagactatttcaaaaagattgaatgtttcgactctgttgaaatcagcggagtggaggatcgcttcaacgcatccctgggaacgtatcacgatctcctgaaaatcattaaagacaaggacttcctggacaatgaggagaacgaggacattcttgaggacattgtcctcacccttacgttgtttgaagatagggagatgattgaagaacgcttgaaaacttacgctcatctcttcgacgacaaagtcatgaaacagctcaagaggcgccgatatacaggatgggggcggctgtcaagaaaactgatcaatgggatccgagacaagcagagtggaaagacaatcctggattttcttaagtccgatggatttgccaaccggaacttcatgcagttgatccatgatgactctctcacctttaaggaggacatccagaaagcacaagtttctggccagggggacagtcttcacgagcacatcgctaatcttgcaggtagcccagctatcaaaaagggaatactgcagaccgttaaggtcgtggatgaactcgtcaaagtaatgggaaggcataagcccgagaatatcgttatcgagatggcccgagagaaccaaactacccagaagggacagaagaacagtagggaaaggatgaagaggattgaagagggtataaaagaactggggtcccaaatccttaaggaacacccagttgaaaacacccagcttcagaatgagaagctctacctgtactacctgcagaacggcagggacatgtacgtggatcaggaactggacatcaatcggctctccgactacgacgtggatcatatcgtgccccagtcttttctcaaagatgattctattgataataaagtgttgacaagatccgataaaaatagagggaagagtgataacgtcccctcagaagaagttgtcaagaaaatgaaaaattattggcggcagctgctgaacgccaaactgatcacacaacggaagttcgataatctgactaaggctgaacgaggtggcctgtctgagttggataaagccggcttcatcaaaaggcagcttgttgagacacgccagatcaccaagcacgtggcccaaattctcgattcacgcatgaacaccaagtacgatgaaaatgacaaactgattcgagaggtgaaagttattactctgaagtctaagctggtctcagatttcagaaaggactttcagttttataaggtgagagagatcaacaattaccaccatgcgcatgatgcctacctgaatgcagtggtaggcactgcacttatcaaaaaatatcccaagcttgaatctgaatttgtttacggagactataaagtgtacgatgttaggaaaatgatcgcaaagtctgagcaggaaataggcaaggccaccgctaagtacttcttttacagcaatattatgaattttttcaagaccgagattacactggccaatggagagattcggaagcgaccacttatcgaaacaaacggagaaacaggagaaatcgtgtgggacaagggtagggatttcgcgacagtccggaaggtcctgtccatgccgcaggtgaacatcgttaaaaagaccgaagtacagaccggaggcttctccaaggaaagtatcctcccgaaaaggaacagcgacaagctgatcgcacgcaaaaaagattgggaccccaagaaatacggcggattcgattctcctacagtcgcttacagtgtactggttgtggccaaagtggagaaagggaagtctaaaaaactcaaaagcgtcaaggaactgctgggcatcacaatcatggagcgatcaagcttcgaaaaaaaccccatcgactttctcgaggcgaaaggatataaagaggtcaaaaaagacctcatcattaagcttcccaagtactctctctttgagcttgaaaacggccggaaacgaatgctcgctagtgcgggcgagctgcagaaaggtaacgagctggcactgccctctaaatacgttaatttcttgtatctggccagccactatgaaaagctcaaagggtctcccgaagataatgagcagaagcagctgttcgtggaacaacacaaacactaccttgatgagatcatcgagcaaataagcgaattctccaaaagagtgatcctcgccgacgctaacctcgataaggtgctttctgcttacaataagcacagggataagcccatcagggagcaggcagaaaacattatccacttgtttactctgaccaacttgggcgcgcctgcagccttcaagtacttcgacaccaccatagacagaaagcggtacacctctacaaaggaggtcctggacgccacactgattcatcagtcaattacggggctctatgaaacaagaatcgacctctctcagctcggtggagacgcggccgcagatccaaaaaagaagagaaaggtagatccaaaaaagaagagaaaggtagatccaaaaaagaagagaaaggtagatacggccgcatag

SEQ ID NO: 6 - DNA, 4326 bp, Streptococcus pyogenes
atggacaagaagtactccattgggctcgctatcggcacaaacagcgtcggctgggccgtcattacggacgagtacaaggtgccgagcaaaaaattcaaagttctgggcaataccgatcgccacagcataaagaagaacctcattggcgccctcctgttcgactccggggagacggccgaagccacgcggctcaaaagaacagcacggcgcagatatacccgcagaaagaatcggatctgctacctgcaggagatctttagtaatgagatggctaaggtggatgactctttcttccataggctggaggagtcctttttggtggaggaggataaaaagcacgagcgccacccaatctttggcaatatcgtggacgaggtggcgtaccatgaaaagtacccaaccatatatcatctgaggaagaagcttgtagacagtactgataaggctgacttgcggttgatctatctcgcgctggcgcatatgatcaaatttcggggacacttcctcatcgagggggacctgaacccagacaacagcgatgtcgacaaactctttatccaactggttcagacttacaatcagcttttcgaagagaacccgatcaacgcatccggagttgacgccaaagcaatcctgagcgctaggctgtccaaatcccggcggctcgaaaacctcatcgcacagctccctggggagaagaagaacggcctgtttggtaatcttatcgccctgtcactcgggctgacccccaactttaaatctaacttcgacctggccgaagatgccaagcttcaactgagcaaagacacctacgatgatgatctcgacaatctgctggcccagatcggcgaccagtacgcagacctttttttggcggcaaagaacctgtcagacgccattctgctgagtgatattctgcgagtgaacacggagatcaccaaagctccgctgagcgctagtatgatcaagcgctatgatgagcaccaccaagacttgactttgctgaaggcccttgtcagacagcaactgcctgagaagtacaaggaaattttcttcgatcagtctaaaaatggctacgccggatacattgacggcggagcaagccaggaggaattttacaaatttattaagcccatcttggaaaaaatggacggcaccgaggagctgctggtaaagcttaacagagaagatctgttgcgcaaacagcgcactttcgacaatggaagcatcccccaccagattcacctgggcgaactgcacgctatcctcaggcggcaagaggatttctacccctttttgaaagataacagggaaaagattgagaaaatcctcacatttcggataccctactatgtaggccccctcgcccggggaaattccagattcgcgtggatgactcgcaaatcagaagagaccatcactccctggaacttcgaggaagtcgtggataagggggcctctgcccagtccttcatcgaaaggatgactaactttgataaaaatctgcctaacgaaaaggtgcttcctaaacactctctgctgtacgagtacttcacagtttataacgagctcaccaaggtcaaatacgtcacagaagggatgagaaagccagcattcctgtctggagagcagaagaaagctatcgtggacctcctcttcaagacgaaccggaaagttaccgtgaaacagctcaaagaagactatttcaaaaagattgaatgtttcgactctgttgaaatcagcggagtggaggatcgcttcaacgcatccctgggaacgtatcacgatctcctgaaaatcattaaagacaaggacttcctggacaatgaggagaacgaggacattcttgaggacattgtcctcacccttacgttgtttgaagatagggagatgattgaagaacgcttgaaaacttacgctcatctcttcgacgacaaagtcatgaaacagctcaagaggcgccgatatacaggatgggggcggctgtcaagaaaactgatcaatgggatccgagacaagcagagtggaaagacaatcctggattttcttaagtccgatggatttgccaaccggaacttcatgcagttgatccatgatgactctctcacctttaaggaggacatccagaaagcacaagtttctggccagggggacagtcttcacgagcacatcgctaatcttgcaggtagcccagctatcaaaaagggaatactgcagaccgttaaggtcgtggatgaactcgtcaaagtaatgggaaggcataagcccgagaatatcgttatcgagatggcccgagagaaccaaactacccagaagggacagaagaacagtagggaaaggatgaagaggattgaagagggtataaaagaactggggtcccaaatccttaaggaacacccagttgaaaacacccagcttcagaatgagaagctctacctgtactacctgcagaacggcagggacatgtacgtggatcaggaactggacatcaatcggctctccgactacgacgtggctgctatcgtgccccagtcttttctcaaagatgattctattgataataaagtgttgacaagatccgataaagctagagggaagagtgataacgtcccctcagaagaagttgtcaagaaaatgaaaaattattggcggcagctgctgaacgccaaactgatcacacaacggaagttcgataatctgactaaggctgaacgaggtggcctgtctgagttggataaagccggcttcatcaaaaggcagcttgttgagacacgccagatcaccaagcacgtggcccaaattctcgattcacgcatgaacaccaagtacgatgaaaatgacaaactgattcgagaggtgaaagttattactctgaagtctaagctggtctcagatttcagaaaggactttcagttttataaggtgagagagatcaacaattaccaccatgcgcatgatgcctacctgaatgcagtggtaggcactgcacttatcaaaaaatatcccaagcttgaatctgaatttgtttacggagactataaagtgtacgatgttaggaaaatgatcgcaaagtctgagcaggaaataggcaaggccaccgctaagtacttcttttacagcaatattatgaattttttcaagaccgagattacactggccaatggagagattcggaagcgaccacttatcgaaacaaacggagaaacaggagaaatcgtgtgggacaagggtagggatttcgcgacagtccggaaggtcctgtccatgccgcaggtgaacatcgttaaaaagaccgaagtacagaccggaggcttctccaaggaaagtatcctcccgaaaaggaacagcgacaagctgatcgcacgcaaaaaagattgggaccccaagaaatacggcggattcgattctcctacagtcgcttacagtgtactggttgtggccaaagtggagaaagggaagtctaaaaaactcaaaagcgtcaaggaactgctgggcatcacaatcatggagcgatcaagcttcgaaaaaaaccccatcgactttctcgaggcgaaaggatataaagaggtcaaaaaagacctcatcattaagcttcccaagtactctctctttgagcttgaaaacggccggaaacgaatgctcgctagtgcgggcgagctgcagaaaggtaacgagctggcactgccctctaaatacgttaatttcttgtatctggccagccactatgaaaagctcaaagggtctcccgaagataatgagcagaagcagctgttcgtggaacaacacaaacactaccttgatgagatcatcgagcaaataagcgaattctccaaaagagtgatcctcgccgacgctaacctcgataaggtgctttctgcttacaataagcacagggataagcccatcagggagcaggcagaaaacattatccacttgtttactctgaccaacttgggcgcgcctgcagccttcaagtacttcgacaccaccatagacagaaagcggtacacctctacaaaggaggtcctggacgccacactgattcatcagtcaattacggggctctatgaaacaagaatcgacctctctcagctcggtggagacagcagggctgaccccaagaagaagaggaaggtggaggccagcggttccggacgggctgacgcattggacgattttgatctggatatgctgggaagtgacgccctcgatgattttgaccttgacatgcttggttcggatgcccttgatgactttgacctcgacatgctcggcagtgacgcccttgatgatttcgacctggacatgctgattaactctagatga

SEQ ID NO: 7 - DNA, 4359 bp, Streptococcus pyogenes
atgcccaagaagaagaggaaggtgggaagggggatggacaagaagtactccattgggctcgctatcggcacaaacagcgtcggctgggccgtcattacggacgagtacaaggtgccgagcaaaaaattcaaagttctgggcaataccgatcgccacagcataaagaagaacctcattggcgccctcctgttcgactccggggagacggccgaagccacgcggctcaaaagaacagcacggcgcagatatacccgcagaaagaatcggatctgctacctgcaggagatctttagtaatgagatggctaaggtggatgactctttcttccataggctggaggagtcctttttggtggaggaggataaaaagcacgagcgccacccaatctttggcaatatcgtggacgaggtggcgtaccatgaaaagtacccaaccatatatcatctgaggaagaagcttgtagacagtactgataaggctgacttgcggttgatctatctcgcgctggcgcatatgatcaaatttcggggacacttcctcatcgagggggacctgaacccagacaacagcgatgtcgacaaactctttatccaactggttcagacttacaatcagcttttcgaagagaacccgatcaacgcatccggagttgacgccaaagcaatcctgagcgctaggctgtccaaatcccggcggctcgaaaacctcatcgcacagctccctggggagaagaagaacggcctgtttggtaatcttatcgccctgtcactcgggctgacccccaactttaaatctaacttcgacctggccgaagatgccaagcttcaactgagcaaagacacctacgatgatgatctcgacaatctgctggcccagatcggcgaccagtacgcagacctttttttggcggcaaagaacctgtcagacgccattctgctgagtgatattctgcgagtgaacacggagatcaccaaagctccgctgagcgctagtatgatcaagcgctatgatgagcaccaccaagacttgactttgctgaaggcccttgtcagacagcaactgcctgagaagtacaaggaaattttcttcgatcagtctaaaaatggctacgccggatacattgacggcggagcaagccaggaggaattttacaaatttattaagcccatcttggaaaaaatggacggcaccgaggagctgctggtaaagcttaacagagaagatctgttgcgcaaacagcgcactttcgacaatggaagcatcccccaccagattcacctgggcgaactgcacgctatcctcaggcggcaagaggatttctacccctttttgaaagataacagggaaaagattgagaaaatcctcacatttcggataccctactatgtaggccccctcgcccggggaaattccagattcgcgtggatgactcgcaaatcagaagagaccatcactccctggaacttcgaggaagtcgtggataagggggcctctgcccagtccttcatcgaaaggatgactaactttgataaaaatctgcctaacgaaaaggtgcttcctaaacactctctgctgtacgagtacttcacagtttataacgagctcaccaaggtcaaatacgtcacagaagggatgagaaagccagcattcctgtctggagagcagaagaaagctatcgtggacctcctcttcaagacgaaccggaaagttaccgtgaaacagctcaaagaagactatttcaaaaagattgaatgtttcgactctgttgaaatcagcggagtggaggatcgcttcaacgcatccctgggaacgtatcacgatctcctgaaaatcattaaagacaaggacttcctggacaatgaggagaacgaggacattcttgaggacattgtcctcacccttacgttgtttgaagatagggagatgattgaagaacgcttgaaaacttacgctcatctcttcgacgacaaagtcatgaaacagctcaagaggcgccgatatacaggatgggggcggctgtcaagaaaactgatcaatgggatccgagacaagcagagtggaaagacaatcctggattttcttaagtccgatggatttgccaaccggaacttcatgcagttgatccatgatgactctctcacctttaaggaggacatccagaaagcacaagtttctggccagggggacagtcttcacgagcacatcgctaatcttgcaggtagcccagctatcaaaaagggaatactgcagaccgttaaggtcgtggatgaactcgtcaaagtaatgggaaggcataagcccgagaatatcgttatcgagatggcccgagagaaccaaactacccagaagggacagaagaacagtagggaaaggatgaagaggattgaagagggtataaaagaactggggtcccaaatccttaaggaacacccagttgaaaacacccagcttcagaatgagaagctctacctgtactacctgcagaacggcagggacatgtacgtggatcaggaactggacatcaatcggctctccgactacgacgtggctgctatcgtgccccagtcttttctcaaagatgattctattgataataaagtgttgacaagatccgataaagctagagggaagagtgataacgtcccctcagaagaagttgtcaagaaaatgaaaaattattggcggcagctgctgaacgccaaactgatcacacaacggaagttcgataatctgactaaggctgaacgaggtggcctgtctgagttggataaagccggcttcatcaaaaggcagcttgttgagacacgccagatcaccaagcacgtggcccaaattctcgattcacgcatgaacaccaagtacgatgaaaatgacaaactgattcgagaggtgaaagttattactctgaagtctaagctggtctcagatttcagaaaggactttcagttttataaggtgagagagatcaacaattaccaccatgcgcatgatgcctacctgaatgcagtggtaggcactgcacttatcaaaaaatatcccaagcttgaatctgaatttgtttacggagactataaagtgtacgatgttaggaaaatgatcgcaaagtctgagcaggaaataggcaaggccaccgctaagtacttcttttacagcaatattatgaattttttcaagaccgagattacactggccaatggagagattcggaagcgaccacttatcgaaacaaacggagaaacaggagaaatcgtgtgggacaagggtagggatttcgcgacagtccggaaggtcctgtccatgccgcaggtgaacatcgttaaaaagaccgaagtacagaccggaggcttctccaaggaaagtatcctcccgaaaaggaacagcgacaagctgatcgcacgcaaaaaagattgggaccccaagaaatacggcggattcgattctcctacagtcgcttacagtgtactggttgtggccaaagtggagaaagggaagtctaaaaaactcaaaagcgtcaaggaactgctgggcatcacaatcatggagcgatcaagcttcgaaaaaaaccccatcgactttctcgaggcgaaaggatataaagaggtcaaaaaagacctcatcattaagcttcccaagtactctctctttgagcttgaaaacggccggaaacgaatgctcgctagtgcgggcgagctgcagaaaggtaacgagctggcactgccctctaaatacgttaatttcttgtatctggccagccactatgaaaagctcaaagggtctcccgaagataatgagcagaagcagctgttcgtggaacaacacaaacactaccttgatgagatcatcgagcaaataagcgaattctccaaaagagtgatcctcgccgacgctaacctcgataaggtgctttctgcttacaataagcacagggataagcccatcagggagcaggcagaaaacattatccacttgtttactctgaccaacttgggcgcgcctgcagccttcaagtacttcgacaccaccatagacagaaagcggtacacctctacaaaggaggtcctggacgccacactgattcatcagtcaattacggggctctatgaaacaagaatcgacctctctcagctcggtggagacagcagggctgaccccaagaagaagaggaaggtggaggccagcggttccggacgggctgacgcattggacgattttgatctggatatgctgggaagtgacgccctcgatgattttgaccttgacatgcttggttcggatgcccttgatgactttgacctcgacatgctcggcagtgacgcccttgatgatttcgacctggacatgctgattaactctagatga

SEQ ID NO: 8 - protein, 1409 aa, Streptococcus thermophiles
MLFNKCIIISINLDFSNKEKCMTKPYSIGLDIGTNSVGWAVITDNYKVPSKKMKVLGNTSKKYIKKNLLGVLLFDSGITAEGRRLKRTARRRYTRRRNRILYLQEIFSTEMATLDDAFFQRLDDSFLVPDDKRDSKYPIFGNLVEEKVYHDEFPTIYHLRKYLADSTKKADLRLVYLALAHMIKYRGHFLIEGEFNSKNNDIQKNFQDFLDTYNAIFESDLSLENSKQLEEIVKDKISKLEKKDRILKLFPGEKNSGIFSEFLKLIVGNQADFRKCFNLDEKASLHFSKESYDEDLETLLGYIGDDYSDVFLKAKKLYDAILLSGFLTVTDNETEAPLSSAMIKRYNEHKEDLALLKEYIRNISLKTYNEVFKDDTKNGYAGYIDGKTNQEDFYVYLKNLLAEFEGADYFLEKIDREDFLRKQRTFDNGSIPYQIHLQEMRAILDKQAKFYPFLAKNKERIEKILTFRIPYYVGPLARGNSDFAWSIRKRNEKITPWNFEDVIDKESSAEAFINRMTSFDLYLPEEKVLPKHSLLYETFNVYNELTKVRFIAESMRDYQFLDSKQKKDIVRLYFKDKRKVTDKDIIEYLHAIYGYDGIELKGIEKQFNSSLSTYHDLLNIINDKEFLDDSSNEAIIEEIIHTLTIFEDREMIKQRLSKFENIFDKSVLKKLSRRHYTGWGKLSAKLINGIRDEKSGNTILDYLIDDGISNRNFMQLIHDDALSFKKKIQKAQIIGDEDKGNIKEVVKSLPGSPAIKKGILQSIKIVDELVKVMGGRKPESIVVEMARENQYTNQGKSNSQQRLKRLEKSLKELGSKILKENIPAKLSKIDNNALQNDRLYLYYLQNGKDMYTGDDLDIDRLSNYDIDHIIPQAFLKDNSIDNKVLVSSASNRGKSDDFPSLEVVKKRKTFWYQLLKSKLISQRKFDNLTKAERGGLLPEDKAGFIQRQLVETRQITKHVARLLDEKFNNKKDENNRAVRTVKIITLKSTLVSQFRKDFELYKVREINDFHHAHDAYLNAVIASALLKKYPKLEPEFVYGDYPKYNSFRERKSATEKVYFYSNIMNIFKKSISLADGRVIERPLIEVNEETGESVWNKESDLATVRRVLSYPQVNVVKKVEEQNHGLDRGKPKGLFNANLSSKPKPNSNENLVGAKEYLDPKKYGGYAGISNSFAVLVKGTIEKGAKKKITNVLEFQGISILDRINYRKDKLNFLLEKGYKDIELIIELPKYSLFELSDGSRRMLASILSTNNKRGEIHKGNQIFLSQKFVKLLYHAKRISNTINENHRKYVENHKKEFEELFYYILEFNENYVGAKKNGKLLNSAFQSWQNHSIDELCSSFIGPTGSERKGLFELTSRGSAADFEFLGVKIPRYRDYTPSSLLKDATLIHQSVTGLYETRIDLAKLGEG

SEQ ID NO: 9 - DNA, 4167 bp, Streptococcus thermophiles
atgactaagccatactcaattggacttgatattggaacgaatagtgttggatgggctgtaataactgataattacaaggttccgtctaaaaaaatgaaagtcttaggaaatacgagtaaaaagtatatcaaaaagaacctgttaggtgtattactctttgactctggaatcacagcagaaggaagaagattgaagcgtactgcaagaagacgttatactagacgccgtaatcgtatcctttatttgcaggaaatttttagcacggagatggctacattagatgatgctttctttcaaagacttgacgattcgtttttagttcctgatgataaacgtgatagtaagtatccgatatttggaaacttagtagaagaaaaagtctatcatgatgaatttccaactatctatcatttaaggaaatatttagcagatagtactaaaaaagcagatttgcgtctagtttatcttgcattggctcatatgattaaatatagaggtcacttcttaattgaaggagagtttaattcaaaaaataatgatattcagaagaattttcaagactttttggacacttataatgctatttttgaatcggatttatcacttgagaatagtaaacaacttgaggaaattgttaaagataagattagtaaattagaaaagaaagatcgtattttaaaactcttccctggggagaagaattcggggattttttcagagtttctaaagttgattgtaggaaatcaagctgattttaggaaatgttttaatttagacgaaaaagcctccttacatttttccaaagaaagctatgatgaagatttagagactttgttaggttatattggagatgattacagtgatgtctttctcaaagcaaagaaactttatgatgctattcttttatcgggttttctgactgtaactgataatgagacagaagcacctctctcttctgctatgataaagcgatataatgaacacaaagaagatttagcgttactaaaggaatatataagaaatatttcactaaaaacgtataatgaagtatttaaagatgacaccaaaaatggttatgctggttatattgatggaaaaacaaatcaggaagatttctacgtatatctaaaaaacctattggctgaatttgaaggtgcggattattttcttgaaaaaattgatcgagaagattttttgagaaagcaacgtacatttgacaatggttcgataccatatcagattcatcttcaagaaatgagagcaattcttgataagcaagctaaattttatcctttcttggctaaaaataaagaaagaatcgagaagattttaaccttccgaattccttattatgtaggtccacttgcgagagggaatagtgattttgcctggtcaataagaaaacgaaatgaaaaaattacaccttggaattttgaggacgttattgacaaagaatcttcggcagaggctttcattaatcgaatgactagttttgatttgtatttgccagaagagaaggtacttccaaagcatagtctcttatacgaaacttttaatgtatataatgaattaacaaaagttagatttattgccgaaagtatgagagattatcaatttttagatagtaagcagaagaaagatattgttagactttattttaaagataaaaggaaagttactgataaggatattattgaatatttacatgcaatttatgggtatgatggaattgaattaaaaggcatagagaaacagtttaattctagtttatctacttatcacgatcttttaaatattattaatgataaagagtttttggatgatagttcaaatgaagcgattatcgaagaaattatccatactttgacaatttttgaagatagagagatgataaaacaacgtctttcaaaatttgagaatatattcgataaatccgttttgaaaaagttatctcgtagacattacactggctggggtaagttatctgctaagcttattaatggtattcgagatgaaaaatctggtaatactattcttgattacttaattgatgatggtatttctaaccgtaatttcatgcaacttattcacgatgatgctctttcttttaaaaagaagatacagaaagcacaaattattggtgacgaagataaaggtaatattaaagaggtcgttaagtctttgccaggtagtcctgcgattaaaaaaggtattttacaaagcataaaaattgtagatgaattggtcaaagtaatgggaggaagaaaacccgagtcaattgttgttgagatggctcgtgaaaatcaatataccaatcaaggtaagtctaattcccaacaacgcttgaaacgtttagaaaaatctctcaaagagttaggtagtaagatacttaaggaaaatattcctgcaaaactttctaaaatagacaataacgcacttcaaaatgatcgactttacttatactatcttcaaaatggaaaagatatgtataccggagatgatttagatattgatagattaagtaattatgatattgatcatattattcctcaagcttttttgaaagataattctattgacaataaagtacttgtttcatctgctagtaaccgtggtaaatcagatgattttccaagtttagaggttgtcaaaaaaagaaagacattttggtatcaattattgaaatcaaaattaatttctcaacgaaaatttgataatctgacaaaagctgaacggggaggattgttacctgaggacaaagctggttttattcaacgccagttggttgaaacacgtcaaataacaaaacatgtagctcgtttacttgatgagaaatttaataataaaaaagatgaaaataatagagcggtacgaacagtaaaaattattaccttgaaatctaccttagtttctcaatttcgtaaggattttgaactttataaagttcgtgaaatcaatgattttcatcatgctcatgatgcttacttgaatgccgttatagcaagtgctttacttaagaaataccctaaactagagccagaatttgtgtacggtgattatccaaaatacaatagttttagagaaagaaagtccgctacagaaaaggtatatttctattcaaatatcatgaatatctttaaaaaatctatttctttagctgatggtagagttattgaaagaccacttattgaggtaaatgaggagaccggcgaatccgtttggaataaagaatctgatttagcaactgtaaggagagtactctcttatccgcaagtaaatgttgtgaaaaaagttgaggaacagaatcacggattggatagaggaaaaccaaagggattgtttaatgcaaatctttcctcaaagccaaaaccaaatagtaatgaaaatttagtaggtgctaaagagtatcttgaccccaaaaagtatggggggtatgctggaatttctaattcttttgctgttcttgttaaagggacaattgaaaaaggtgctaagaaaaaaataacaaatgtactagaatttcaaggtatttctattttagataggattaattatagaaaagataaacttaattttttacttgaaaaaggttataaagatattgagttaattattgaactacctaaatatagtttatttgaactttcagatggttcacgtcgtatgttggctagtattttgtcaacgaataataagaggggagagattcacaaaggaaatcagatttttctttcacagaagtttgtgaaattactttatcatgctaagagaataagtaacacaattaatgagaatcatagaaaatatgttgagaaccataaaaaagagtttgaagaattattttactacattcttgagtttaatgagaattatgttggagctaaaaagaatggtaaacttttaaactctgcctttcaatcttggcaaaatcatagtatagatgaactctgtagtagttttataggacctaccggaagtgaaagaaaggggctatttgaattaacctctcgtggaagtgctgctgattttgaatttttaggtgttaaaattccaaggtatagagactataccccatcatccctattaaaagatgccacacttattcatcaatctgttacaggcctctatgaaacacgaatagaccttgccaaactaggagagggttaa

SEQ ID NO: 10 - DNA, 3366 bp, Streptococcus thermophilus
atgagcgacctggtgctgggcctggacatcggcatcggcagcgtgggcgtgggcatcctgaacaaggtgaccggcgagatcatccacaagaacagtcgcatcttccctgctgctcaggctgagaacaacctggtgcgccgcaccaaccgccagggtcgccggcttgctcgccgcaagaagcaccggcgcgtgcgcctgaaccgcctgttcgaggagagcggcctgatcaccgacttcaccaagatcagcatcaacctgaacccctaccagctgcgcgtgaagggcctgaccgacgagctgagcaacgaggagctgttcatcgccctgaagaacatggtgaagcaccgcggcatcagctacctggacgacgccagcgacgacggcaacagcagcgtgggcgactacgcccagatcgtgaaggagaacagcaagcagctggagaccaagacccccggccagatccagctggagcgctaccagacctacggccagctgcgcggcgacttcaccgtggagaaggacggcaagaagcaccgcctgatcaacgtgttccccaccagcgcctaccgcagcgaggccctgcgcatcctgcagacccagcaggagttcaacccccagatcaccgacgagttcatcaaccgctacctggagatcctgaccggcaagcgcaagtactaccacggccccggcaacgagaagagccgcaccgactacggccgctaccgcaccagcggcgagaccctggacaacatcttcggcatcctgatcggcaagtgcaccttctaccccgacgagttccgcgccgccaaggccagctacaccgcccaggagttcaacctgctgaacgacctgaacaacctgaccgtgcccaccgagaccaagaagctgagcaaggagcagaagaaccagatcatcaactacgtgaagaacgagaaggccatgggccccgccaagctgttcaagtacatcgccaagctgctgagctgcgacgtggccgacatcaagggctaccgcatcgacaagagcggcaaggccgagatccacaccttcgaggcctaccgcaagatgaagaccctggagaccctggacatcgagcagatggaccgcgagaccctggacaagctggcctacgtgctgaccctgaacaccgagcgcgagggcatccaggaggccctggagcacgagttcgccgacggcagcttcagccagaagcaggtggacgagctggtgcagttccgcaaggccaacagcagcatcttcggcaagggctggcacaacttcagcgtgaagctgatgatggagctgatccccgagctgtacgagaccagcgaggagcagatgaccatcctgacccgcctgggcaagcagaagaccaccagcagcagcaacaagaccaagtacatcgacgagaagctgctgaccgaggagatctacaaccccgtggtggccaagagcgtgcgccaggccatcaagatcgtgaacgccgccatcaaggagtacggcgacttcgacaacatcgtgatcgagatggcccgcgagaccaacgaggacgacgagaagaaggccatccagaagatccagaaggccaacaaggacgagaaggacgccgccatgctgaaggccgccaaccagtacaacggcaaggccgagctgccccacagcgtgttccacggccacaagcagctggccaccaagatccgcctgtggcaccagcagggcgagcgctgcctgtacaccggcaagaccatcagcatccacgacctgatcaacaacagcaaccagttcgaggtggaccacatcctgcccctgagcatcaccttcgacgacagcctggccaacaaggtgctggtgtacgccaccgccaaccaggagaagggccagcgcaccccctaccaggccctggacagcatggacgacgcctggagcttccgcgagctgaaggccttcgtgcgcgagagcaagaccctgagcaacaagaagaaggagtacctgctgaccgaggaggacatcagcaagttcgacgtgcgcaagaagttcatcgagcgcaacctggtggacacccgctacgccagccgcgtggtgctgaacgccctgcaggagcacttccgcgcccacaagatcgacaccaaggtgagcgtggtgcgcggccagttcaccagccagctgcgccgccactggggcatcgagaagacccgcgacacctaccaccaccacgccgtggacgccctgatcattgcggcttctagccagctgaacctgtggaagaagcagaagaacaccctggtgagctacagcgaggaccagctgctggacatcgagaccggcgagctgatcagcgacgacgagtacaaggagagcgtgttcaaggccccctaccagcacttcgtggacaccctgaagagcaaggagttcgaggacagcatcctgttcagctaccaggtggacagcaagttcaaccgcaagatcagcgacgccaccatctacgccacccgccaggccaaggtgggcaaggacaaggccgacgagacctacgtgctgggcaagatcaaggacatctacacccaggacggctacgacgccttcatgaagatctacaagaaggacaagagcaagttcctgatgtaccgccacgacccccagaccttcgagaaggtgatcgagcccatcctggagaactaccccaacaagcagatcaacgataaaggcaaggaggtgccctgcaaccccttcctgaagtacaaggaggagcacggctacatccgcaagtacagcaagaagggcaacggccccgagatcaagagcctgaagtactacgacagcaagctgggcaaccacatcgacatcacccccaaggacagcaacaacaaggtggtgctgcagagcgtgagcccctggcgcgccgacgtgtacttcaacaagaccaccggcaagtacgagatcctgggcctgaagtacgccgacctgcagtttgataagggcaccggcacctacaagatcagccaggagaagtacaacgacatcaagaagaaggagggcgtggacagcgacagcgagttcaagttcaccctgtacaagaacgaccttctgctggtgaaggacaccgagaccaaggagcaacagctgttccgcttcctgagccgcaccatgcccaagcagaagcactacgtggagctgaagccctacgacaagcagaagttcgagggcggcgaggccctgatcaaggtgctgggcaacgtggccaacagcggccagtgcaagaagggcctgggcaagagcaacatcagcatctacaaggtgcgcaccgacgtgctgggcaaccagcacatcatcaagaacgagggcgacaagcccaagctggacttctaa

SEQ ID NO: 11 - DNA, 3366 bp, Streptococcus thermophilus
atgagcgacctggtgctgggcctggccatcggcatcggcagcgtgggcgtgggcatcctgaacaaggtgaccggcgagatcatccacaagaacagtcgcatcttccctgctgctcaggctgagaacaacctggtgcgccgcaccaaccgccagggtcgccggcttgctcgccgcaagaagcaccggcgcgtgcgcctgaaccgcctgttcgaggagagcggcctgatcaccgacttcaccaagatcagcatcaacctgaacccctaccagctgcgcgtgaagggcctgaccgacgagctgagcaacgaggagctgttcatcgccctgaagaacatggtgaagcaccgcggcatcagctacctggacgacgccagcgacgacggcaacagcagcgtgggcgactacgcccagatcgtgaaggagaacagcaagcagctggagaccaagacccccggccagatccagctggagcgctaccagacctacggccagctgcgcggcgacttcaccgtggagaaggacggcaagaagcaccgcctgatcaacgtgttccccaccagcgcctaccgcagcgaggccctgcgcatcctgcagacccagcaggagttcaacccccagatcaccgacgagttcatcaaccgctacctggagatcctgaccggcaagcgcaagtactaccacggccccggcaacgagaagagccgcaccgactacggccgctaccgcaccagcggcgagaccctggacaacatcttcggcatcctgatcggcaagtgcaccttctaccccgacgagttccgcgccgccaaggccagctacaccgcccaggagttcaacctgctgaacgacctgaacaacctgaccgtgcccaccgagaccaagaagctgagcaaggagcagaagaaccagatcatcaactacgtgaagaacgagaaggccatgggccccgccaagctgttcaagtacatcgccaagctgctgagctgcgacgtggccgacatcaagggctaccgcatcgacaagagcggcaaggccgagatccacaccttcgaggcctaccgcaagatgaagaccctggagaccctggacatcgagcagatggaccgcgagaccctggacaagctggcctacgtgctgaccctgaacaccgagcgcgagggcatccaggaggccctggagcacgagttcgccgacggcagcttcagccagaagcaggtggacgagctggtgcagttccgcaaggccaacagcagcatcttcggcaagggctggcacaacttcagcgtgaagctgatgatggagctgatccccgagctgtacgagaccagcgaggagcagatgaccatcctgacccgcctgggcaagcagaagaccaccagcagcagcaacaagaccaagtacatcgacgagaagctgctgaccgaggagatctacaaccccgtggtggccaagagcgtgcgccaggccatcaagatcgtgaacgccgccatcaaggagtacggcgacttcgacaacatcgtgatcgagatggcccgcgagaccaacgaggacgacgagaagaaggccatccagaagatccagaaggccaacaaggacgagaaggacgccgccatgctgaaggccgccaaccagtacaacggcaaggccgagctgccccacagcgtgttccacggccacaagcagctggccaccaagatccgcctgtggcaccagcagggcgagcgctgcctgtacaccggcaagaccatcagcatccacgacctgatcaacaacagcaaccagttcgaggtggctgccatcctgcccctgagcatcaccttcgacgacagcctggccaacaaggtgctggtgtacgccaccgccgctcaggagaagggccagcgcaccccctaccaggccctggacagcatggacgacgcctggagcttccgcgagctgaaggccttcgtgcgcgagagcaagaccctgagcaacaagaagaaggagtacctgctgaccgaggaggacatcagcaagttcgacgtgcgcaagaagttcatcgagcgcaacctggtggacacccgctacgccagccgcgtggtgctgaacgccctgcaggagcacttccgcgcccacaagatcgacaccaaggtgagcgtggtgcgcggccagttcaccagccagctgcgccgccactggggcatcgagaagacccgcgacacctaccaccaccacgccgtggacgccctgatcattgcggcttctagccagctgaacctgtggaagaagcagaagaacaccctggtgagctacagcgaggaccagctgctggacatcgagaccggcgagctgatcagcgacgacgagtacaaggagagcgtgttcaaggccccctaccagcacttcgtggacaccctgaagagcaaggagttcgaggacagcatcctgttcagctaccaggtggacagcaagttcaaccgcaagatcagcgacgccaccatctacgccacccgccaggccaaggtgggcaaggacaaggccgacgagacctacgtgctgggcaagatcaaggacatctacacccaggacggctacgacgccttcatgaagatctacaagaaggacaagagcaagttcctgatgtaccgccacgacccccagaccttcgagaaggtgatcgagcccatcctggagaactaccccaacaagcagatcaacgataaaggcaaggaggtgccctgcaaccccttcctgaagtacaaggaggagcacggctacatccgcaagtacagcaagaagggcaacggccccgagatcaagagcctgaagtactacgacagcaagctgggcaaccacatcgacatcacccccaaggacagcaacaacaaggtggtgctgcagagcgtgagcccctggcgcgccgacgtgtacttcaacaagaccaccggcaagtacgagatcctgggcctgaagtacgccgacctgcagtttgataagggcaccggcacctacaagatcagccaggagaagtacaacgacatcaagaagaaggagggcgtggacagcgacagcgagttcaagttcaccctgtacaagaacgaccttctgctggtgaaggacaccgagaccaaggagcaacagctgttccgcttcctgagccgcaccatgcccaagcagaagcactacgtggagctgaagccctacgacaagcagaagttcgagggcggcgaggccctgatcaaggtgctgggcaacgtggccaacagcggccagtgcaagaagggcctgggcaagagcaacatcagcatctacaaggtgcgcaccgacgtgctgggcaaccagcacatcatcaagaacgagggcgacaagcccaagctggacttctaa

SEQ ID NO: 12 - DNA, 3399 bp, Streptococcus thermophilus
atgagcgacctggtgctgggcctggacatcggcatcggcagcgtgggcgtgggcatcctgaacaaggtgaccggcgagatcatccacaagaacagtcgcatcttccctgctgctcaggctgagaacaacctggtgcgccgcaccaaccgccagggtcgccggcttgctcgccgcaagaagcaccggcgcgtgcgcctgaaccgcctgttcgaggagagcggcctgatcaccgacttcaccaagatcagcatcaacctgaacccctaccagctgcgcgtgaagggcctgaccgacgagctgagcaacgaggagctgttcatcgccctgaagaacatggtgaagcaccgcggcatcagctacctggacgacgccagcgacgacggcaacagcagcgtgggcgactacgcccagatcgtgaaggagaacagcaagcagctggagaccaagacccccggccagatccagctggagcgctaccagacctacggccagctgcgcggcgacttcaccgtggagaaggacggcaagaagcaccgcctgatcaacgtgttccccaccagcgcctaccgcagcgaggccctgcgcatcctgcagacccagcaggagttcaacccccagatcaccgacgagttcatcaaccgctacctggagatcctgaccggcaagcgcaagtactaccacggccccggcaacgagaagagccgcaccgactacggccgctaccgcaccagcggcgagaccctggacaacatcttcggcatcctgatcggcaagtgcaccttctaccccgacgagttccgcgccgccaaggccagctacaccgcccaggagttcaacctgctgaacgacctgaacaacctgaccgtgcccaccgagaccaagaagctgagcaaggagcagaagaaccagatcatcaactacgtgaagaacgagaaggccatgggccccgccaagctgttcaagtacatcgccaagctgctgagctgcgacgtggccgacatcaagggctaccgcatcgacaagagcggcaaggccgagatccacaccttcgaggcctaccgcaagatgaagaccctggagaccctggacatcgagcagatggaccgcgagaccctggacaagctggcctacgtgctgaccctgaacaccgagcgcgagggcatccaggaggccctggagcacgagttcgccgacggcagcttcagccagaagcaggtggacgagctggtgcagttccgcaaggccaacagcagcatcttcggcaagggctggcacaacttcagcgtgaagctgatgatggagctgatccccgagctgtacgagaccagcgaggagcagatgaccatcctgacccgcctgggcaagcagaagaccaccagcagcagcaacaagaccaagtacatcgacgagaagctgctgaccgaggagatctacaaccccgtggtggccaagagcgtgcgccaggccatcaagatcgtgaacgccgccatcaaggagtacggcgacttcgacaacatcgtgatcgagatggcccgcgagaccaacgaggacgacgagaagaaggccatccagaagatccagaaggccaacaaggacgagaaggacgccgccatgctgaaggccgccaaccagtacaacggcaaggccgagctgccccacagcgtgttccacggccacaagcagctggccaccaagatccgcctgtggcaccagcagggcgagcgctgcctgtacaccggcaagaccatcagcatccacgacctgatcaacaacagcaaccagttcgaggtggaccacatcctgcccctgagcatcaccttcgacgacagcctggccaacaaggtgctggtgtacgccaccgccaaccaggagaagggccagcgcaccccctaccaggccctggacagcatggacgacgcctggagcttccgcgagctgaaggccttcgtgcgcgagagcaagaccctgagcaacaagaagaaggagtacctgctgaccgaggaggacatcagcaagttcgacgtgcgcaagaagttcatcgagcgcaacctggtggacacccgctacgccagccgcgtggtgctgaacgccctgcaggagcacttccgcgcccacaagatcgacaccaaggtgagcgtggtgcgcggccagttcaccagccagctgcgccgccactggggcatcgagaagacccgcgacacctaccaccaccacgccgtggacgccctgatcattgcggcttctagccagctgaacctgtggaagaagcagaagaacaccctggtgagctacagcgaggaccagctgctggacatcgagaccggcgagctgatcagcgacgacgagtacaaggagagcgtgttcaaggccccctaccagcacttcgtggacaccctgaagagcaaggagttcgaggacagcatcctgttcagctaccaggtggacagcaagttcaaccgcaagatcagcgacgccaccatctacgccacccgccaggccaaggtgggcaaggacaaggccgacgagacctacgtgctgggcaagatcaaggacatctacacccaggacggctacgacgccttcatgaagatctacaagaaggacaagagcaagttcctgatgtaccgccacgacccccagaccttcgagaaggtgatcgagcccatcctggagaactaccccaacaagcagatcaacgataaaggcaaggaggtgccctgcaaccccttcctgaagtacaaggaggagcacggctacatccgcaagtacagcaagaagggcaacggccccgagatcaagagcctgaagtactacgacagcaagctgggcaaccacatcgacatcacccccaaggacagcaacaacaaggtggtgctgcagagcgtgagcccctggcgcgccgacgtgtacttcaacaagaccaccggcaagtacgagatcctgggcctgaagtacgccgacctgcagtttgataagggcaccggcacctacaagatcagccaggagaagtacaacgacatcaagaagaaggagggcgtggacagcgacagcgagttcaagttcaccctgtacaagaacgaccttctgctggtgaaggacaccgagaccaaggagcaacagctgttccgcttcctgagccgcaccatgcccaagcagaagcactacgtggagctgaagccctacgacaagcagaagttcgagggcggcgaggccctgatcaaggtgctgggcaacgtggccaacagcggccagtgcaagaagggcctgggcaagagcaacatcagcatctacaaggtgcgcaccgacgtgctgggcaaccagcacatcatcaagaacgagggcgacaagcccaagctggacttcagcagggctgaccccaagaagaagaggaaggtgtga

SEQ ID NO: 13 - DNA, 3459 bp, Streptococcus thermophilus
atgagcgacctggtgctgggcctggacatcggcatcggcagcgtgggcgtgggcatcctgaacaaggtgaccggcgagatcatccacaagaacagtcgcatcttccctgctgctcaggctgagaacaacctggtgcgccgcaccaaccgccagggtcgccggcttgctcgccgcaagaagcaccggcgcgtgcgcctgaaccgcctgttcgaggagagcggcctgatcaccgacttcaccaagatcagcatcaacctgaacccctaccagctgcgcgtgaagggcctgaccgacgagctgagcaacgaggagctgttcatcgccctgaagaacatggtgaagcaccgcggcatcagctacctggacgacgccagcgacgacggcaacagcagcgtgggcgactacgcccagatcgtgaaggagaacagcaagcagctggagaccaagacccccggccagatccagctggagcgctaccagacctacggccagctgcgcggcgacttcaccgtggagaaggacggcaagaagcaccgcctgatcaacgtgttccccaccagcgcctaccgcagcgaggccctgcgcatcctgcagacccagcaggagttcaacccccagatcaccgacgagttcatcaaccgctacctggagatcctgaccggcaagcgcaagtactaccacggccccggcaacgagaagagccgcaccgactacggccgctaccgcaccagcggcgagaccctggacaacatcttcggcatcctgatcggcaagtgcaccttctaccccgacgagttccgcgccgccaaggccagctacaccgcccaggagttcaacctgctgaacgacctgaacaacctgaccgtgcccaccgagaccaagaagctgagcaaggagcagaagaaccagatcatcaactacgtgaagaacgagaaggccatgggccccgccaagctgttcaagtacatcgccaagctgctgagctgcgacgtggccgacatcaagggctaccgcatcgacaagagcggcaaggccgagatccacaccttcgaggcctaccgcaagatgaagaccctggagaccctggacatcgagcagatggaccgcgagaccctggacaagctggcctacgtgctgaccctgaacaccgagcgcgagggcatccaggaggccctggagcacgagttcgccgacggcagcttcagccagaagcaggtggacgagctggtgcagttccgcaaggccaacagcagcatcttcggcaagggctggcacaacttcagcgtgaagctgatgatggagctgatccccgagctgtacgagaccagcgaggagcagatgaccatcctgacccgcctgggcaagcagaagaccaccagcagcagcaacaagaccaagtacatcgacgagaagctgctgaccgaggagatctacaaccccgtggtggccaagagcgtgcgccaggccatcaagatcgtgaacgccgccatcaaggagtacggcgacttcgacaacatcgtgatcgagatggcccgcgagaccaacgaggacgacgagaagaaggccatccagaagatccagaaggccaacaaggacgagaaggacgccgccatgctgaaggccgccaaccagtacaacggcaaggccgagctgccccacagcgtgttccacggccacaagcagctggccaccaagatccgcctgtggcaccagcagggcgagcgctgcctgtacaccggcaagaccatcagcatccacgacctgatcaacaacagcaaccagttcgaggtggaccacatcctgcccctgagcatcaccttcgacgacagcctggccaacaaggtgctggtgtacgccaccgccaaccaggagaagggccagcgcaccccctaccaggccctggacagcatggacgacgcctggagcttccgcgagctgaaggccttcgtgcgcgagagcaagaccctgagcaacaagaagaaggagtacctgctgaccgaggaggacatcagcaagttcgacgtgcgcaagaagttcatcgagcgcaacctggtggacacccgctacgccagccgcgtggtgctgaacgccctgcaggagcacttccgcgcccacaagatcgacaccaaggtgagcgtggtgcgcggccagttcaccagccagctgcgccgccactggggcatcgagaagacccgcgacacctaccaccaccacgccgtggacgccctgatcattgcggcttctagccagctgaacctgtggaagaagcagaagaacaccctggtgagctacagcgaggaccagctgctggacatcgagaccggcgagctgatcagcgacgacgagtacaaggagagcgtgttcaaggccccctaccagcacttcgtggacaccctgaagagcaaggagttcgaggacagcatcctgttcagctaccaggtggacagcaagttcaaccgcaagatcagcgacgccaccatctacgccacccgccaggccaaggtgggcaaggacaaggccgacgagacctacgtgctgggcaagatcaaggacatctacacccaggacggctacgacgccttcatgaagatctacaagaaggacaagagcaagttcctgatgtaccgccacgacccccagaccttcgagaaggtgatcgagcccatcctggagaactaccccaacaagcagatcaacgataaaggcaaggaggtgccctgcaaccccttcctgaagtacaaggaggagcacggctacatccgcaagtacagcaagaagggcaacggccccgagatcaagagcctgaagtactacgacagcaagctgggcaaccacatcgacatcacccccaaggacagcaacaacaaggtggtgctgcagagcgtgagcccctggcgcgccgacgtgtacttcaacaagaccaccggcaagtacgagatcctgggcctgaagtacgccgacctgcagtttgataagggcaccggcacctacaagatcagccaggagaagtacaacgacatcaagaagaaggagggcgtggacagcgacagcgagttcaagttcaccctgtacaagaacgaccttctgctggtgaaggacaccgagaccaaggagcaacagctgttccgcttcctgagccgcaccatgcccaagcagaagcactacgtggagctgaagccctacgacaagcagaagttcgagggcggcgaggccctgatcaaggtgctgggcaacgtggccaacagcggccagtgcaagaagggcctgggcaagagcaacatcagcatctacaaggtgcgcaccgacgtgctgggcaaccagcacatcatcaagaacgagggcgacaagcccaagctggacttcgcggccgcagatccaaaaaagaagagaaaggtagatccaaaaaagaagagaaaggtagatccaaaaaagaagagaaaggtagatacggccgcatag

SEQ ID NO: 14 - DNA, 3585 bp, Streptococcus thermophilus
atgagcgacctggtgctgggcctggccatcggcatcggcagcgtgggcgtgggcatcctgaacaaggtgaccggcgagatcatccacaagaacagtcgcatcttccctgctgctcaggctgagaacaacctggtgcgccgcaccaaccgccagggtcgccggcttgctcgccgcaagaagcaccggcgcgtgcgcctgaaccgcctgttcgaggagagcggcctgatcaccgacttcaccaagatcagcatcaacctgaacccctaccagctgcgcgtgaagggcctgaccgacgagctgagcaacgaggagctgttcatcgccctgaagaacatggtgaagcaccgcggcatcagctacctggacgacgccagcgacgacggcaacagcagcgtgggcgactacgcccagatcgtgaaggagaacagcaagcagctggagaccaagacccccggccagatccagctggagcgctaccagacctacggccagctgcgcggcgacttcaccgtggagaaggacggcaagaagcaccgcctgatcaacgtgttccccaccagcgcctaccgcagcgaggccctgcgcatcctgcagacccagcaggagttcaacccccagatcaccgacgagttcatcaaccgctacctggagatcctgaccggcaagcgcaagtactaccacggccccggcaacgagaagagccgcaccgactacggccgctaccgcaccagcggcgagaccctggacaacatcttcggcatcctgatcggcaagtgcaccttctaccccgacgagttccgcgccgccaaggccagctacaccgcccaggagttcaacctgctgaacgacctgaacaacctgaccgtgcccaccgagaccaagaagctgagcaaggagcagaagaaccagatcatcaactacgtgaagaacgagaaggccatgggccccgccaagctgttcaagtacatcgccaagctgctgagctgcgacgtggccgacatcaagggctaccgcatcgacaagagcggcaaggccgagatccacaccttcgaggcctaccgcaagatgaagaccctggagaccctggacatcgagcagatggaccgcgagaccctggacaagctggcctacgtgctgaccctgaacaccgagcgcgagggcatccaggaggccctggagcacgagttcgccgacggcagcttcagccagaagcaggtggacgagctggtgcagttccgcaaggccaacagcagcatcttcggcaagggctggcacaacttcagcgtgaagctgatgatggagctgatccccgagctgtacgagaccagcgaggagcagatgaccatcctgacccgcctgggcaagcagaagaccaccagcagcagcaacaagaccaagtacatcgacgagaagctgctgaccgaggagatctacaaccccgtggtggccaagagcgtgcgccaggccatcaagatcgtgaacgccgccatcaaggagtacggcgacttcgacaacatcgtgatcgagatggcccgcgagaccaacgaggacgacgagaagaaggccatccagaagatccagaaggccaacaaggacgagaaggacgccgccatgctgaaggccgccaaccagtacaacggcaaggccgagctgccccacagcgtgttccacggccacaagcagctggccaccaagatccgcctgtggcaccagcagggcgagcgctgcctgtacaccggcaagaccatcagcatccacgacctgatcaacaacagcaaccagttcgaggtggctgccatcctgcccctgagcatcaccttcgacgacagcctggccaacaaggtgctggtgtacgccaccgccgctcaggagaagggccagcgcaccccctaccaggccctggacagcatggacgacgcctggagcttccgcgagctgaaggccttcgtgcgcgagagcaagaccctgagcaacaagaagaaggagtacctgctgaccgaggaggacatcagcaagttcgacgtgcgcaagaagttcatcgagcgcaacctggtggacacccgctacgccagccgcgtggtgctgaacgccctgcaggagcacttccgcgcccacaagatcgacaccaaggtgagcgtggtgcgcggccagttcaccagccagctgcgccgccactggggcatcgagaagacccgcgacacctaccaccaccacgccgtggacgccctgatcattgcggcttctagccagctgaacctgtggaagaagcagaagaacaccctggtgagctacagcgaggaccagctgctggacatcgagaccggcgagctgatcagcgacgacgagtacaaggagagcgtgttcaaggccccctaccagcacttcgtggacaccctgaagagcaaggagttcgaggacagcatcctgttcagctaccaggtggacagcaagttcaaccgcaagatcagcgacgccaccatctacgccacccgccaggccaaggtgggcaaggacaaggccgacgagacctacgtgctgggcaagatcaaggacatctacacccaggacggctacgacgccttcatgaagatctacaagaaggacaagagcaagttcctgatgtaccgccacgacccccagaccttcgagaaggtgatcgagcccatcctggagaactaccccaacaagcagatcaacgataaaggcaaggaggtgccctgcaaccccttcctgaagtacaaggaggagcacggctacatccgcaagtacagcaagaagggcaacggccccgagatcaagagcctgaagtactacgacagcaagctgggcaaccacatcgacatcacccccaaggacagcaacaacaaggtggtgctgcagagcgtgagcccctggcgcgccgacgtgtacttcaacaagaccaccggcaagtacgagatcctgggcctgaagtacgccgacctgcagtttgataagggcaccggcacctacaagatcagccaggagaagtacaacgacatcaagaagaaggagggcgtggacagcgacagcgagttcaagttcaccctgtacaagaacgaccttctgctggtgaaggacaccgagaccaaggagcaacagctgttccgcttcctgagccgcaccatgcccaagcagaagcactacgtggagctgaagccctacgacaagcagaagttcgagggcggcgaggccctgatcaaggtgctgggcaacgtggccaacagcggccagtgcaagaagggcctgggcaagagcaacatcagcatctacaaggtgcgcaccgacgtgctgggcaaccagcacatcatcaagaacgagggcgacaagcccaagctggacttcagcagggctgaccccaagaagaagaggaaggtggaggccagcggttccggacgggctgacgcattggacgattttgatctggatatgctgggaagtgacgccctcgatgattttgaccttgacatgcttggttcggatgcccttgatgactttgacctcgacatgctcggcagtgacgcccttgatgatttcgacctggacatgctgattaactctagatga

SEQ ID NO: 15 - DNA, 3606 bp, Streptococcus thermophilus
atgcccaagaagaagaggaaggtgagcgacctggtgctgggcctggccatcggcatcggcagcgtgggcgtgggcatcctgaacaaggtgaccggcgagatcatccacaagaacagtcgcatcttccctgctgctcaggctgagaacaacctggtgcgccgcaccaaccgccagggtcgccggcttgctcgccgcaagaagcaccggcgcgtgcgcctgaaccgcctgttcgaggagagcggcctgatcaccgacttcaccaagatcagcatcaacctgaacccctaccagctgcgcgtgaagggcctgaccgacgagctgagcaacgaggagctgttcatcgccctgaagaacatggtgaagcaccgcggcatcagctacctggacgacgccagcgacgacggcaacagcagcgtgggcgactacgcccagatcgtgaaggagaacagcaagcagctggagaccaagacccccggccagatccagctggagcgctaccagacctacggccagctgcgcggcgacttcaccgtggagaaggacggcaagaagcaccgcctgatcaacgtgttccccaccagcgcctaccgcagcgaggccctgcgcatcctgcagacccagcaggagttcaacccccagatcaccgacgagttcatcaaccgctacctggagatcctgaccggcaagcgcaagtactaccacggccccggcaacgagaagagccgcaccgactacggccgctaccgcaccagcggcgagaccctggacaacatcttcggcatcctgatcggcaagtgcaccttctaccccgacgagttccgcgccgccaaggccagctacaccgcccaggagttcaacctgctgaacgacctgaacaacctgaccgtgcccaccgagaccaagaagctgagcaaggagcagaagaaccagatcatcaactacgtgaagaacgagaaggccatgggccccgccaagctgttcaagtacatcgccaagctgctgagctgcgacgtggccgacatcaagggctaccgcatcgacaagagcggcaaggccgagatccacaccttcgaggcctaccgcaagatgaagaccctggagaccctggacatcgagcagatggaccgcgagaccctggacaagctggcctacgtgctgaccctgaacaccgagcgcgagggcatccaggaggccctggagcacgagttcgccgacggcagcttcagccagaagcaggtggacgagctggtgcagttccgcaaggccaacagcagcatcttcggcaagggctggcacaacttcagcgtgaagctgatgatggagctgatccccgagctgtacgagaccagcgaggagcagatgaccatcctgacccgcctgggcaagcagaagaccaccagcagcagcaacaagaccaagtacatcgacgagaagctgctgaccgaggagatctacaaccccgtggtggccaagagcgtgcgccaggccatcaagatcgtgaacgccgccatcaaggagtacggcgacttcgacaacatcgtgatcgagatggcccgcgagaccaacgaggacgacgagaagaaggccatccagaagatccagaaggccaacaaggacgagaaggacgccgccatgctgaaggccgccaaccagtacaacggcaaggccgagctgccccacagcgtgttccacggccacaagcagctggccaccaagatccgcctgtggcaccagcagggcgagcgctgcctgtacaccggcaagaccatcagcatccacgacctgatcaacaacagcaaccagttcgaggtggctgccatcctgcccctgagcatcaccttcgacgacagcctggccaacaaggtgctggtgtacgccaccgccgctcaggagaagggccagcgcaccccctaccaggccctggacagcatggacgacgcctggagcttccgcgagctgaaggccttcgtgcgcgagagcaagaccctgagcaacaagaagaaggagtacctgctgaccgaggaggacatcagcaagttcgacgtgcgcaagaagttcatcgagcgcaacctggtggacacccgctacgccagccgcgtggtgctgaacgccctgcaggagcacttccgcgcccacaagatcgacaccaaggtgagcgtggtgcgcggccagttcaccagccagctgcgccgccactggggcatcgagaagacccgcgacacctaccaccaccacgccgtggacgccctgatcattgcggcttctagccagctgaacctgtggaagaagcagaagaacaccctggtgagctacagcgaggaccagctgctggacatcgagaccggcgagctgatcagcgacgacgagtacaaggagagcgtgttcaaggccccctaccagcacttcgtggacaccctgaagagcaaggagttcgaggacagcatcctgttcagctaccaggtggacagcaagttcaaccgcaagatcagcgacgccaccatctacgccacccgccaggccaaggtgggcaaggacaaggccgacgagacctacgtgctgggcaagatcaaggacatctacacccaggacggctacgacgccttcatgaagatctacaagaaggacaagagcaagttcctgatgtaccgccacgacccccagaccttcgagaaggtgatcgagcccatcctggagaactaccccaacaagcagatcaacgataaaggcaaggaggtgccctgcaaccccttcctgaagtacaaggaggagcacggctacatccgcaagtacagcaagaagggcaacggccccgagatcaagagcctgaagtactacgacagcaagctgggcaaccacatcgacatcacccccaaggacagcaacaacaaggtggtgctgcagagcgtgagcccctggcgcgccgacgtgtacttcaacaagaccaccggcaagtacgagatcctgggcctgaagtacgccgacctgcagtttgataagggcaccggcacctacaagatcagccaggagaagtacaacgacatcaagaagaaggagggcgtggacagcgacagcgagttcaagttcaccctgtacaagaacgaccttctgctggtgaaggacaccgagaccaaggagcaacagctgttccgcttcctgagccgcaccatgcccaagcagaagcactacgtggagctgaagccctacgacaagcagaagttcgagggcggcgaggccctgatcaaggtgctgggcaacgtggccaacagcggccagtgcaagaagggcctgggcaagagcaacatcagcatctacaaggtgcgcaccgacgtgctgggcaaccagcacatcatcaagaacgagggcgacaagcccaagctggacttcagcagggctgaccccaagaagaagaggaaggtggaggccagcggttccggacgggctgacgcattggacgattttgatctggatatgctgggaagtgacgccctcgatgattttgaccttgacatgcttggttcggatgcccttgatgactttgacctcgacatgctcggcagtgacgcccttgatgatttcgacctggacatgctgattaactctagatga

SEQ ID NO: 16 - DNA, 3366 bp, Streptococcus thermophilus
atgagtgacttagttttaggacttgatatcggtataggttctgttggtgtaggtatccttaacaaagtgacaggagaaattatccataaaaactcacgcatcttcccagcagctcaagcggaaaataacctagtacgtagaacgaatcgtcaaggaagacgcttgacacgacgtaaaaaacatcgtagagttcgtttaaatcgtctatttgaggaaagtggattaatcaccgattttacgaagatttcaattaatcttaacccatatcaattacgagttaagggcttgaccgatgaattgtctaatgaagaactgtttatcgctcttaaaaatatggtgaaacaccgtgggattagttacctcgatgatgctagtgatgacggaaattcatcaataggagactatgcacaaattgttaaggaaaatagtaaacaattagaaactaagacaccgggacagatacagttggaacgctaccaaacatatggtcaattacgtggtgattttactgttgagaaagatggcaaaaaacatcgcttgattaatgtctttccaacatcagcttatcgttcagaagccttaaggatactgcaaactcaacaagaatttaatccacagattacagatgaatttattaatcgttatctcgaaattttaactggaaaacggaaatattatcatggacccggaaatgaaaagtcacggactgattatggtcgttacagaacgagtggagaaactttagacaatatttttggaattctaattgggaaatgtacattttatccagacgagtttagagcagcaaaagcttcctacacggctcaagaattcaatttgctaaatgatttgaacaatctaacagttcctactgaaaccaaaaagttgagcaaagaacagaagaatcaaatcattaattatgtcaaaaatgaaaaggcaatggggccagcgaaactttttaaatatatcgctaagttactttcttgtgatgttgcagatatcaagggataccgtatcgacaaatcaggtaaggctgagattcatactttcgaagcctatcgaaaaatgaaaacgcttgaaaccttagatattgagcaaatggatagagaaacgcttgataaattagcctatgtcttaacattaaacactgagagggaaggtattcaagaagccttagaacatgaatttgctgatggtagctttagccagaagcaagttgacgaattggttcaattccgcaaagcaaatagttccatttttggaaaaggatggcataatttttctgtcaaactgatgatggagttaattccagaattgtatgagacgtcagaagagcaaatgactatcctaacacgacttggaaaacaaaaaacgacttcgtcttcaaataaaacaaaatatatagatgaaaaactattaactgaagaaatctataatcctgttgttgctaagtctgttcgccaggctataaaaatcgtaaatgcggcgattaaagaatacggagactttgacaatattgtcatcgaaatggctcgtgaaacaaatgaagatgatgaaaagaaagctattcaaaagattcaaaaagccaacaaagatgaaaaagatgcagcaatgcttaaggctgctaaccaatataatggaaaggctgaattaccacatagtgttttccacggtcataagcaattagcgactaaaatccgcctttggcatcagcaaggagaacgttgcctttatactggtaagacaatctcaatccatgatttgataaataattctaatcagtttgaagtagatcatattttacctctttctatcacattcgatgatagccttgcaaataaggttttggtttatgcaactgctaaccaagaaaaaggacaacgaacaccttatcaggctttagatagtatggatgatgcgtggtctttccgtgaattaaaagcttttgtacgtgagtcaaaaacactttcgaacaagaaaaaagaatacctccttacagaagaagatatttcaaagtttgatgttcgaaagaaatttattgaacgaaatcttgtagatacaagatacgcttcaagagttgtcctcaatgcccttcaagaacactttagagctcacaagattgatacaaaagtttccgtggttcgtggccaatttacatctcaattgagacgccattggggaattgagaagactcgtgatacttatcatcaccatgctgtcgatgcattgattattgccgcctcaagtcagttgaatttgtggaaaaaacaaaagaatacccttgtaagttattcagaagaccaactccttgatattgaaacaggtgaacttattagtgatgatgagtacaaggaatctgtgttcaaagccccttatcaacattttgttgatacattgaagagtaaagaatttgaagacagtatcttattctcttatcaagtggattctaagtttaatcgtaaaatatcagatgccactatttatgcgacaagacaggctaaagtaggaaaagataaggcggatgaaacttatgtcttagggaaaatcaaagatatttatactcaggatggttatgatgcctttatgaagatttataagaaggataagtcaaaattcctcatgtatcgtcacgacccacaaacctttgagaaagttatcgagccaattttagagaactatcctaataagcaaataaatgaaaaagggaaagaggtaccatgtaatcctttcctaaaatataaagaagaacatggctatattcgtaaatatagtaaaaaaggcaatggtcctgaaatcaagagtcttaaatactatgatagtaagctaggcaatcatattgatattactccgaaggatagtaacaataaagttgtcttacagtcagtttctccatggagagcggatgtctatttcaataagactactggaaaatacgaaatcctcggattgaaatatgctgatttacaatttgaaaaagggacaggaacatataagatttcccaggaaaaatacaatgacattaagaaaaaagagggtgtagattctgattcagaattcaagtttacactttataaaaatgatttgttactcgttaaagatacagaaacaaaagaacaacagcttttccgttttctttctcgaactatgcctaaacaaaagcattatgttgaattaaaaccttatgataaacagaaatttgaaggaggtgaggcgttaattaaagtgttgggtaacgttgctaatagtggtcaatgcaaaaaagggctaggaaaatcaaatatttctatttataaggtaagaacagatgtcctaggaaatcagcatatcatcaaaaatgagggtgataagcctaagctagatttttaa

SEQ ID NO: 17 - DNA, 4167 bp, Streptococcus thermophilus; identical to SEQ ID NO: 9

SEQ ID NO: 18 - DNA, 3249 bp, Neisseria meningitidis
atggccgccttcaagcccaaccccatcaactacatcctgggcctggacatcggcatcgccagcgtgggctgggccatggtggagatcgacgaggacgagaaccccatctgcctgatcgacctgggtgtgcgcgtgttcgagcgcgctgaggtgcccaagactggtgacagtctggctatggctcgccggcttgctcgctctgttcggcgccttactcgccggcgcgctcaccgccttctgcgcgctcgccgcctgctgaagcgcgagggtgtgctgcaggctgccgacttcgacgagaacggcctgatcaagagcctgcccaacactccttggcagctgcgcgctgccgctctggaccgcaagctgactcctctggagtggagcgccgtgctgctgcacctgatcaagcaccgcggctacctgagccagcgcaagaacgagggcgagaccgccgacaaggagctgggtgctctgctgaagggcgtggccgacaacgcccacgccctgcagactggtgacttccgcactcctgctgagctggccctgaacaagttcgagaaggagagcggccacatccgcaaccagcgcggcgactacagccacaccttcagccgcaaggacctgcaggccgagctgatcctgctgttcgagaagcagaaggagttcggcaacccccacgtgagcggcggcctgaaggagggcatcgagaccctgctgatgacccagcgccccgccctgagcggcgacgccgtgcagaagatgctgggccactgcaccttcgagccagccgagcccaaggccgccaagaacacctacaccgccgagcgcttcatctggctgaccaagctgaacaacctgcgcatcctggagcagggcagcgagcgccccctgaccgacaccgagcgcgccaccctgatggacgagccctaccgcaagagcaagctgacctacgcccaggcccgcaagctgctgggtctggaggacaccgccttcttcaagggcctgcgctacggcaaggacaacgccgaggccagcaccctgatggagatgaaggcctaccacgccatcagccgcgccctggagaaggagggcctgaaggacaagaagagtcctctgaacctgagccccgagctgcaggacgagatcggcaccgccttcagcctgttcaagaccgacgaggacatcaccggccgcctgaaggaccgcatccagcccgagatcctggaggccctgctgaagcacatcagcttcgacaagttcgtgcagatcagcctgaaggccctgcgccgcatcgtgcccctgatggagcagggcaagcgctacgacgaggcctgcgccgagatctacggcgaccactacggcaagaagaacaccgaggagaagatctacctgcctcctatccccgccgacgagatccgcaaccccgtggtgctgcgcgccctgagccaggcccgcaaggtgatcaacggcgtggtgcgccgctacggcagccccgcccgcatccacatcgagaccgcccgcgaggtgggcaagagcttcaaggaccgcaaggagatcgagaagcgccaggaggagaaccgcaaggaccgcgagaaggccgccgccaagttccgcgagtacttccccaacttcgtgggcgagcccaagagcaaggacatcctgaagctgcgcctgtacgagcagcagcacggcaagtgcctgtacagcggcaaggagatcaacctgggccgcctgaacgagaagggctacgtggagatcgaccacgccctgcccttcagccgcacctgggacgacagcttcaacaacaaggtgctggtgctgggcagcgagaaccagaacaagggcaaccagaccccctacgagtacttcaacggcaaggacaacagccgcgagtggcaggagttcaaggcccgcgtggagaccagccgcttcccccgcagcaagaagcagcgcatcctgctgcagaagttcgacgaggacggcttcaaggagcgcaacctgaacgacacccgctacgtgaaccgcttcctgtgccagttcgtggccgaccgcatgcgcctgaccggcaagggcaagaagcgcgtgttcgccagcaacggccagatcaccaacctgctgcgcggcttctggggcctgcgcaaggtgcgcgccgagaacgaccgccaccacgccctggacgccgtggtggtggcctgcagcaccgtggccatgcagcagaagatcacccgcttcgtgcgctacaaggagatgaacgccttcgacggtaaaaccatcgacaaggagaccggcgaggtgctgcaccagaagacccacttcccccagccctgggagttcttcgcccaggaggtgatgatccgcgtgttcggcaagcccgacggcaagcccgagttcgaggaggccgacacccccgagaagctgcgcaccctgctggccgagaagctgagcagccgccctgaggccgtgcacgagtacgtgactcctctgttcgtgagccgcgcccccaaccgcaagatgagcggtcagggtcacatggagaccgtgaagagcgccaagcgcctggacgagggcgtgagcgtgctgcgcgtgcccctgacccagctgaagctgaaggacctggagaagatggtgaaccgcgagcgcgagcccaagctgtacgaggccctgaaggcccgcctggaggcccacaaggacgaccccgccaaggccttcgccgagcccttctacaagtacgacaaggccggcaaccgcacccagcaggtgaaggccgtgcgcgtggagcaggtgcagaagaccggcgtgtgggtgcgcaaccacaacggcatcgccgacaacgccaccatggtgcgcgtggacgtgttcgagaagggcgacaagtactacctggtgcccatctacagctggcaggtggccaagggcatcctgcccgaccgcgccgtggtgcagggcaaggacgaggaggactggcagctgatcgacgacagcttcaacttcaagttcagcctgcaccccaacgacctggtggaggtgatcaccaagaaggcccgcatgttcggctacttcgccagctgccaccgcggcaccggcaacatcaacatccgcatccacgacctggaccacaagatcggcaagaacggcatcctggagggcatcggcgtgaagaccgccctgagcttccagaagtaccagatcgacgagctgggcaaggagatccgcccctgccgcctgaagaagcgccctcctgtgcgctaa

SEQ ID NO: 19 - DNA, 3249 bp, Neisseria meningitidis
atggccgccttcaagcccaaccccatcaactacatcctgggcctggccatcggcatcgccagcgtgggctgggccatggtggagatcgacgaggacgagaaccccatctgcctgatcgacctgggtgtgcgcgtgttcgagcgcgctgaggtgcccaagactggtgacagtctggctatggctcgccggcttgctcgctctgttcggcgccttactcgccggcgcgctcaccgccttctgcgcgctcgccgcctgctgaagcgcgagggtgtgctgcaggctgccgacttcgacgagaacggcctgatcaagagcctgcccaacactccttggcagctgcgcgctgccgctctggaccgcaagctgactcctctggagtggagcgccgtgctgctgcacctgatcaagcaccgcggctacctgagccagcgcaagaacgagggcgagaccgccgacaaggagctgggtgctctgctgaagggcgtggccgacaacgcccacgccctgcagactggtgacttccgcactcctgctgagctggccctgaacaagttcgagaaggagagcggccacatccgcaaccagcgcggcgactacagccacaccttcagccgcaaggacctgcaggccgagctgatcctgctgttcgagaagcagaaggagttcggcaacccccacgtgagcggcggcctgaaggagggcatcgagaccctgctgatgacccagcgccccgccctgagcggcgacgccgtgcagaagatgctgggccactgcaccttcgagccagccgagcccaaggccgccaagaacacctacaccgccgagcgcttcatctggctgaccaagctgaacaacctgcgcatcctggagcagggcagcgagcgccccctgaccgacaccgagcgcgccaccctgatggacgagccctaccgcaagagcaagctgacctacgcccaggcccgcaagctgctgggtctggaggacaccgccttcttcaagggcctgcgctacggcaaggacaacgccgaggccagcaccctgatggagatgaaggcctaccacgccatcagccgcgccctggagaaggagggcctgaaggacaagaagagtcctctgaacctgagccccgagctgcaggacgagatcggcaccgccttcagcctgttcaagaccgacgaggacatcaccggccgcctgaaggaccgcatccagcccgagatcctggaggccctgctgaagcacatcagcttcgacaagttcgtgcagatcagcctgaaggccctgcgccgcatcgtgcccctgatggagcagggcaagcgctacgacgaggcctgcgccgagatctacggcgaccactacggcaagaagaacaccgaggagaagatctacctgcctcctatccccgccgacgagatccgcaaccccgtggtgctgcgcgccctgagccaggcccgcaaggtgatcaacggcgtggtgcgccgctacggcagccccgcccgcatccacatcgagaccgcccgcgaggtgggcaagagcttcaaggaccgcaaggagatcgagaagcgccaggaggagaaccgcaaggaccgcgagaaggccgccgccaagttccgcgagtacttccccaacttcgtgggcgagcccaagagcaaggacatcctgaagctgcgcctgtacgagcagcagcacggcaagtgcctgtacagcggcaaggagatcaacctgggccgcctgaacgagaagggctacgtggagatcgccgctgccctgcccttcagccgcacctgggacgacagcttcaacaacaaggtgctggtgctgggcagcgaggctcagaacaagggcaaccagaccccctacgagtacttcaacggcaaggacaacagccgcgagtggcaggagttcaaggcccgcgtggagaccagccgcttcccccgcagcaagaagcagcgcatcctgctgcagaagttcgacgaggacggcttcaaggagcgcaacctgaacgacacccgctacgtgaaccgcttcctgtgccagttcgtggccgaccgcatgcgcctgaccggcaagggcaagaagcgcgtgttcgccagcaacggccagatcaccaacctgctgcgcggcttctggggcctgcgcaaggtgcgcgccgagaacgaccgccaccacgccctggacgccgtggtggtggcctgcagcaccgtggccatgcagcagaagatcacccgcttcgtgcgctacaaggagatgaacgccttcgacggtaaaaccatcgacaaggagaccggcgaggtgctgcaccagaagacccacttcccccagccctgggagttcttcgcccaggaggtgatgatccgcgtgttcggcaagcccgacggcaagcccgagttcgaggaggccgacacccccgagaagctgcgcaccctgctggccgagaagctgagcagccgccctgaggccgtgcacgagtacgtgactcctctgttcgtgagccgcgcccccaaccgcaagatgagcggtcagggtcacatggagaccgtgaagagcgccaagcgcctggacgagggcgtgagcgtgctgcgcgtgcccctgacccagctgaagctgaaggacctggagaagatggtgaaccgcgagcgcgagcccaagctgtacgaggccctgaaggcccgcctggaggcccacaaggacgaccccgccaaggccttcgccgagcccttctacaagtacgacaaggccggcaaccgcacccagcaggtgaaggccgtgcgcgtggagcaggtgcagaagaccggcgtgtgggtgcgcaaccacaacggcatcgccgacaacgccaccatggtgcgcgtggacgtgttcgagaagggcgacaagtactacctggtgcccatctacagctggcaggtggccaagggcatcctgcccgaccgcgccgtggtgcagggcaaggacgaggaggactggcagctgatcgacgacagcttcaacttcaagttcagcctgcaccccaacgacctggtggaggtgatcaccaagaaggcccgcatgttcggctacttcgccagctgccaccgcggcaccggcaacatcaacatccgcatccacgacctggaccacaagatcggcaagaacggcatcctggagggcatcggcgtgaagaccgccctgagcttccagaagtaccagatcgacgagctgggcaaggagatccgcccctgccgcctgaagaagcgccctcctgtgcgctaa

SEQ ID NO: 20 - DNA, 3282 bp, Neisseria meningitidis
atggccgccttcaagcccaaccccatcaactacatcctgggcctggacatcggcatcgccagcgtgggctgggccatggtggagatcgacgaggacgagaaccccatctgcctgatcgacctgggtgtgcgcgtgttcgagcgcgctgaggtgcccaagactggtgacagtctggctatggctcgccggcttgctcgctctgttcggcgccttactcgccggcgcgctcaccgccttctgcgcgctcgccgcctgctgaagcgcgagggtgtgctgcaggctgccgacttcgacgagaacggcctgatcaagagcctgcccaacactccttggcagctgcgcgctgccgctctggaccgcaagctgactcctctggagtggagcgccgtgctgctgcacctgatcaagcaccgcggctacctgagccagcgcaagaacgagggcgagaccgccgacaaggagctgggtgctctgctgaagggcgtggccgacaacgcccacgccctgcagactggtgacttccgcactcctgctgagctggccctgaacaagttcgagaaggagagcggccacatccgcaaccagcgcggcgactacagccacaccttcagccgcaaggacctgcaggccgagctgatcctgctgttcgagaagcagaaggagttcggcaacccccacgtgagcggcggcctgaaggagggcatcgagaccctgctgatgacccagcgccccgccctgagcggcgacgccgtgcagaagatgctgggccactgcaccttcgagccagccgagcccaaggccgccaagaacacctacaccgccgagcgcttcatctggctgaccaagctgaacaacctgcgcatcctggagcagggcagcgagcgccccctgaccgacaccgagcgcgccaccctgatggacgagccctaccgcaagagcaagctgacctacgcccaggcccgcaagctgctgggtctggaggacaccgccttcttcaagggcctgcgctacggcaaggacaacgccgaggccagcaccctgatggagatgaaggcctaccacgccatcagccgcgccctggagaaggagggcctgaaggacaagaagagtcctctgaacctgagccccgagctgcaggacgagatcggcaccgccttcagcctgttcaagaccgacgaggacatcaccggccgcctgaaggaccgcatccagcccgagatcctggaggccctgctgaagcacatcagcttcgacaagttcgtgcagatcagcctgaaggccctgcgccgcatcgtgcccctgatggagcagggcaagcgctacgacgaggcctgcgccgagatctacggcgaccactacggcaagaagaacaccgaggagaagatctacctgcctcctatccccgccgacgagatccgcaaccccgtggtgctgcgcgccctgagccaggcccgcaaggtgatcaacggcgtggtgcgccgctacggcagccccgcccgcatccacatcgagaccgcccgcgaggtgggcaagagcttcaaggaccgcaaggagatcgagaagcgccaggaggagaaccgcaaggaccgcgagaaggccgccgccaagttccgcgagtacttccccaacttcgtgggcgagcccaagagcaaggacatcctgaagctgcgcctgtacgagcagcagcacggcaagtgcctgtacagcggcaaggagatcaacctgggccgcctgaacgagaagggctacgtggagatcgaccacgccctgcccttcagccgcacctgggacgacagcttcaacaacaaggtgctggtgctgggcagcgagaaccagaacaagggcaaccagaccccctacgagtacttcaacggcaaggacaacagccgcgagtggcaggagttcaaggcccgcgtggagaccagccgcttcccccgcagcaagaagcagcgcatcctgctgcagaagttcgacgaggacggcttcaaggagcgcaacctgaacgacacccgctacgtgaaccgcttcctgtgccagttcgtggccgaccgcatgcgcctgaccggcaagggcaagaagcgcgtgttcgccagcaacggccagatcaccaacctgctgcgcggcttctggggcctgcgcaaggtgcgcgccgagaacgaccgccaccacgccctggacgccgtggtggtggcctgcagcaccgtggccatgcagcagaagatcacccgcttcgtgcgctacaaggagatgaacgccttcgacggtaaaaccatcgacaaggagaccggcgaggtgctgcaccagaagacccacttcccccagccctgggagttcttcgcccaggaggtgatgatccgcgtgttcggcaagcccgacggcaagcccgagttcgaggaggccgacacccccgagaagctgcgcaccctgctggccgagaagctgagcagccgccctgaggccgtgcacgagtacgtgactcctctgttcgtgagccgcgcccccaaccgcaagatgagcggtcagggtcacatggagaccgtgaagagcgccaagcgcctggacgagggcgtgagcgtgctgcgcgtgcccctgacccagctgaagctgaaggacctggagaagatggtgaaccgcgagcgcgagcccaagctgtacgaggccctgaaggcccgcctggaggcccacaaggacgaccccgccaaggccttcgccgagcccttctacaagtacgacaaggccggcaaccgcacccagcaggtgaaggccgtgcgcgtggagcaggtgcagaagaccggcgtgtgggtgcgcaaccacaacggcatcgccgacaacgccaccatggtgcgcgtggacgtgttcgagaagggcgacaagtactacctggtgcccatctacagctggcaggtggccaagggcatcctgcccgaccgcgccgtggtgcagggcaaggacgaggaggactggcagctgatcgacgacagcttcaacttcaagttcagcctgcaccccaacgacctggtggaggtgatcaccaagaaggcccgcatgttcggctacttcgccagctgccaccgcggcaccggcaacatcaacatccgcatccacgacctggaccacaagatcggcaagaacggcatcctggagggcatcggcgtgaagaccgccctgagcttccagaagtaccagatcgacgagctgggcaaggagatccgcccctgccgcctgaagaagcgccctcctgtgcgcagcagggctgaccccaagaagaagaggaaggtgtga

SEQ ID NO: 21 - DNA, 3342 bp, Neisseria meningitidis
atggccgccttcaagcccaaccccatcaactacatcctgggcctggacatcggcatcgccagcgtgggctgggccatggtggagatcgacgaggacgagaaccccatctgcctgatcgacctgggtgtgcgcgtgttcgagcgcgctgaggtgcccaagactggtgacagtctggctatggctcgccggcttgctcgctctgttcggcgccttactcgccggcgcgctcaccgccttctgcgcgctcgccgcctgctgaagcgcgagggtgtgctgcaggctgccgacttcgacgagaacggcctgatcaagagcctgcccaacactccttggcagctgcgcgctgccgctctggaccgcaagctgactcctctggagtggagcgccgtgctgctgcacctgatcaagcaccgcggctacctgagccagcgcaagaacgagggcgagaccgccgacaaggagctgggtgctctgctgaagggcgtggccgacaacgcccacgccctgcagactggtgacttccgcactcctgctgagctggccctgaacaagttcgagaaggagagcggccacatccgcaaccagcgcggcgactacagccacaccttcagccgcaaggacctgcaggccgagctgatcctgctgttcgagaagcagaaggagttcggcaacccccacgtgagcggcggcctgaaggagggcatcgagaccctgctgatgacccagcgccccgccctgagcggcgacgccgtgcagaagatgctgggccactgcaccttcgagccagccgagcccaaggccgccaagaacacctacaccgccgagcgcttcatctggctgaccaagctgaacaacctgcgcatcctggagcagggcagcgagcgccccctgaccgacaccgagcgcgccaccctgatggacgagccctaccgcaagagcaagctgacctacgcccaggcccgcaagctgctgggtctggaggacaccgccttcttcaagggcctgcgctacggcaaggacaacgccgaggccagcaccctgatggagatgaaggcctaccacgccatcagccgcgccctggagaaggagggcctgaaggacaagaagagtcctctgaacctgagccccgagctgcaggacgagatcggcaccgccttcagcctgttcaagaccgacgaggacatcaccggccgcctgaaggaccgcatccagcccgagatcctggaggccctgctgaagcacatcagcttcgacaagttcgtgcagatcagcctgaaggccctgcgccgcatcgtgcccctgatggagcagggcaagcgctacgacgaggcctgcgccgagatctacggcgaccactacggcaagaagaacaccgaggagaagatctacctgcctcctatccccgccgacgagatccgcaaccccgtggtgctgcgcgccctgagccaggcccgcaaggtgatcaacggcgtggtgcgccgctacggcagccccgcccgcatccacatcgagaccgcccgcgaggtgggcaagagcttcaaggaccgcaaggagatcgagaagcgccaggaggagaaccgcaaggaccgcgagaaggccgccgccaagttccgcgagtacttccccaacttcgtgggcgagcccaagagcaaggacatcctgaagctgcgcctgtacgagcagcagcacggcaagtgcctgtacagcggcaaggagatcaacctgggccgcctgaacgagaagggctacgtggagatcgaccacgccctgcccttcagccgcacctgggacgacagcttcaacaacaaggtgctggtgctgggcagcgagaaccagaacaagggcaaccagaccccctacgagtacttcaacggcaaggacaacagccgcgagtggcaggagttcaaggcccgcgtggagaccagccgcttcccccgcagcaagaagcagcgcatcctgctgcagaagttcgacgaggacggcttcaaggagcgcaacctgaacgacacccgctacgtgaaccgcttcctgtgccagttcgtggccgaccgcatgcgcctgaccggcaagggcaagaagcgcgtgttcgccagcaacggccagatcaccaacctgctgcgcggcttctggggcctgcgcaaggtgcgcgccgagaacgaccgccaccacgccctggacgccgtggtggtggcctgcagcaccgtggccatgcagcagaagatcacccgcttcgtgcgctacaaggagatgaacgccttcgacggtaaaaccatcgacaaggagaccggcgaggtgctgcaccagaagacccacttcccccagccctgggagttcttcgcccaggaggtgatgatccgcgtgttcggcaagcccgacggcaagcccgagttcgaggaggccgacacccccgagaagctgcgcaccctgctggccgagaagctgagcagccgccctgaggccgtgcacgagtacgtgactcctctgttcgtgagccgcgcccccaaccgcaagatgagcggtcagggtcacatggagaccgtgaagagcgccaagcgcctggacgagggcgtgagcgtgctgcgcgtgcccctgacccagctgaagctgaaggacctggagaagatggtgaaccgcgagcgcgagcccaagctgtacgaggccctgaaggcccgcctggaggcccacaaggacgaccccgccaaggccttcgccgagcccttctacaagtacgacaaggccggcaaccgcacccagcaggtgaaggccgtgcgcgtggagcaggtgcagaagaccggcgtgtgggtgcgcaaccacaacggcatcgccgacaacgccaccatggtgcgcgtggacgtgttcgagaagggcgacaagtactacctggtgcccatctacagctggcaggtggccaagggcatcctgcccgaccgcgccgtggtgcagggcaaggacgaggaggactggcagctgatcgacgacagcttcaacttcaagttcagcctgcaccccaacgacctggtggaggtgatcaccaagaaggcccgcatgttcggctacttcgccagctgccaccgcggcaccggcaacatcaacatccgcatccacgacctggaccacaagatcggcaagaacggcatcctggagggcatcggcgtgaagaccgccctgagcttccagaagtaccagatcgacgagctgggcaaggagatccgcccctgccgcctgaagaagcgccctcctgtgcgcgcggccgcagatccaaaaaagaagagaaaggtagatccaaaaaagaagagaaaggtagatccaaaaaagaagagaaaggtagatacggccgcatag

SEQ ID NO: 22 - DNA, 3468 bp, Neisseria meningitidis
atggccgccttcaagcccaaccccatcaactacatcctgggcctggccatcggcatcgccagcgtgggctgggccatggtggagatcgacgaggacgagaaccccatctgcctgatcgacctgggtgtgcgcgtgttcgagcgcgctgaggtgcccaagactggtgacagtctggctatggctcgccggcttgctcgctctgttcggcgccttactcgccggcgcgctcaccgccttctgcgcgctcgccgcctgctgaagcgcgagggtgtgctgcaggctgccgacttcgacgagaacggcctgatcaagagcctgcccaacactccttggcagctgcgcgctgccgctctggaccgcaagctgactcctctggagtggagcgccgtgctgctgcacctgatcaagcaccgcggctacctgagccagcgcaagaacgagggcgagaccgccgacaaggagctgggtgctctgctgaagggcgtggccgacaacgcccacgccctgcagactggtgacttccgcactcctgctgagctggccctgaacaagttcgagaaggagagcggccacatccgcaaccagcgcggcgactacagccacaccttcagccgcaaggacctgcaggccgagctgatcctgctgttcgagaagcagaaggagttcggcaacccccacgtgagcggcggcctgaaggagggcatcgagaccctgctgatgacccagcgccccgccctgagcggcgacgccgtgcagaagatgctgggccactgcaccttcgagccagccgagcccaaggccgccaagaacacctacaccgccgagcgcttcatctggctgaccaagctgaacaacctgcgcatcctggagcagggcagcgagcgccccctgaccgacaccgagcgcgccaccctgatggacgagccctaccgcaagagcaagctgacctacgcccaggcccgcaagctgctgggtctggaggacaccgccttcttcaagggcctgcgctacggcaaggacaacgccgaggccagcaccctgatggagatgaaggcctaccacgccatcagccgcgccctggagaaggagggcctgaaggacaagaagagtcctctgaacctgagccccgagctgcaggacgagatcggcaccgccttcagcctgttcaagaccgacgaggacatcaccggccgcctgaaggaccgcatccagcccgagatcctggaggccctgctgaagcacatcagcttcgacaagttcgtgcagatcagcctgaaggccctgcgccgcatcgtgcccctgatggagcagggcaagcgctacgacgaggcctgcgccgagatctacggcgaccactacggcaagaagaacaccgaggagaagatctacctgcctcctatccccgccgacgagatccgcaaccccgtggtgctgcgcgccctgagccaggcccgcaaggtgatcaacggcgtggtgcgccgctacggcagccccgcccgcatccacatcgagaccgcccgcgaggtgggcaagagcttcaaggaccgcaaggagatcgagaagcgccaggaggagaaccgcaaggaccgcgagaaggccgccgccaagttccgcgagtacttccccaacttcgtgggcgagcccaagagcaaggacatcctgaagctgcgcctgtacgagcagcagcacggcaagtgcctgtacagcggcaaggagatcaacctgggccgcctgaacgagaagggctacgtggagatcgccgctgccctgcccttcagccgcacctgggacgacagcttcaacaacaaggtgctggtgctgggcagcgaggctcagaacaagggcaaccagaccccctacgagtacttcaacggcaaggacaacagccgcgagtggcaggagttcaaggcccgcgtggagaccagccgcttcccccgcagcaagaagcagcgcatcctgctgcagaagttcgacgaggacggcttcaaggagcgcaacctgaacgacacccgctacgtgaaccgcttcctgtgccagttcgtggccgaccgcatgcgcctgaccggcaagggcaagaagcgcgtgttcgccagcaacggccagatcaccaacctgctgcgcggcttctggggcctgcgcaaggtgcgcgccgagaacgaccgccaccacgccctggacgccgtggtggtggcctgcagcaccgtggccatgcagcagaagatcacccgcttcgtgcgctacaaggagatgaacgccttcgacggtaaaaccatcgacaaggagaccggcgaggtgctgcaccagaagacccacttcccccagccctgggagttcttcgcccaggaggtgatgatccgcgtgttcggcaagcccgacggcaagcccgagttcgaggaggccgacacccccgagaagctgcgcaccctgctggccgagaagctgagcagccgccctgaggccgtgcacgagtacgtgactcctctgttcgtgagccgcgcccccaaccgcaagatgagcggtcagggtcacatggagaccgtgaagagcgccaagcgcctggacgagggcgtgagcgtgctgcgcgtgcccctgacccagctgaagctgaaggacctggagaagatggtgaaccgcgagcgcgagcccaagctgtacgaggccctgaaggcccgcctggaggcccacaaggacgaccccgccaaggccttcgccgagcccttctacaagtacgacaaggccggcaaccgcacccagcaggtgaaggccgtgcgcgtggagcaggtgcagaagaccggcgtgtgggtgcgcaaccacaacggcatcgccgacaacgccaccatggtgcgcgtggacgtgttcgagaagggcgacaagtactacctggtgcccatctacagctggcaggtggccaagggcatcctgcccgaccgcgccgtggtgcagggcaaggacgaggaggactggcagctgatcgacgacagcttcaacttcaagttcagcctgcaccccaacgacctggtggaggtgatcaccaagaaggcccgcatgttcggctacttcgccagctgccaccgcggcaccggcaacatcaacatccgcatccacgacctggaccacaagatcggcaagaacggcatcctggagggcatcggcgtgaagaccgccctgagcttccagaagtaccagatcgacgagctgggcaaggagatccgcccctgccgcctgaagaagcgccctcctgtgcgcagcagggctgaccccaagaagaagaggaaggtggaggccagcggttccggacgggctgacgcattggacgattttgatctggatatgctgggaagtgacgccctcgatgattttgaccttgacatgcttggttcggatgcccttgatgactttgacctcgacatgctcggcagtgacgcccttgatgatttcgacctggacatgctgattaactctagatga

SEQ ID NO: 23 - DNA, 3489 bp, Neisseria meningitidis
atgcccaagaagaagaggaaggtggccgccttcaagcccaaccccatcaactacatcctgggcctggccatcggcatcgccagcgtgggctgggccatggtggagatcgacgaggacgagaaccccatctgcctgatcgacctgggtgtgcgcgtgttcgagcgcgctgaggtgcccaagactggtgacagtctggctatggctcgccggcttgctcgctctgttcggcgccttactcgccggcgcgctcaccgccttctgcgcgctcgccgcctgctgaagcgcgagggtgtgctgcaggctgccgacttcgacgagaacggcctgatcaagagcctgcccaacactccttggcagctgcgcgctgccgctctggaccgcaagctgactcctctggagtggagcgccgtgctgctgcacctgatcaagcaccgcggctacctgagccagcgcaagaacgagggcgagaccgccgacaaggagctgggtgctctgctgaagggcgtggccgacaacgcccacgccctgcagactggtgacttccgcactcctgctgagctggccctgaacaagttcgagaaggagagcggccacatccgcaaccagcgcggcgactacagccacaccttcagccgcaaggacctgcaggccgagctgatcctgctgttcgagaagcagaaggagttcggcaacccccacgtgagcggcggcctgaaggagggcatcgagaccctgctgatgacccagcgccccgccctgagcggcgacgccgtgcagaagatgctgggccactgcaccttcgagccagccgagcccaaggccgccaagaacacctacaccgccgagcgcttcatctggctgaccaagctgaacaacctgcgcatcctggagcagggcagcgagcgccccctgaccgacaccgagcgcgccaccctgatggacgagccctaccgcaagagcaagctgacctacgcccaggcccgcaagctgctgggtctggaggacaccgccttcttcaagggcctgcgctacggcaaggacaacgccgaggccagcaccctgatggagatgaaggcctaccacgccatcagccgcgccctggagaaggagggcctgaaggacaagaagagtcctctgaacctgagccccgagctgcaggacgagatcggcaccgccttcagcctgttcaagaccgacgaggacatcaccggccgcctgaaggaccgcatccagcccgagatcctggaggccctgctgaagcacatcagcttcgacaagttcgtgcagatcagcctgaaggccctgcgccgcatcgtgcccctgatggagcagggcaagcgctacgacgaggcctgcgccgagatctacggcgaccactacggcaagaagaacaccgaggagaagatctacctgcctcctatccccgccgacgagatccgcaaccccgtggtgctgcgcgccctgagccaggcccgcaaggtgatcaacggcgtggtgcgccgctacggcagccccgcccgcatccacatcgagaccgcccgcgaggtgggcaagagcttcaaggaccgcaaggagatcgagaagcgccaggaggagaaccgcaaggaccgcgagaaggccgccgccaagttccgcgagtacttccccaacttcgtgggcgagcccaagagcaaggacatcctgaagctgcgcctgtacgagcagcagcacggcaagtgcctgtacagcggcaaggagatcaacctgggccgcctgaacgagaagggctacgtggagatcgccgctgccctgcccttcagccgcacctgggacgacagcttcaacaacaaggtgctggtgctgggcagcgaggctcagaacaagggcaaccagaccccctacgagtacttcaacggcaaggacaacagccgcgagtggcaggagttcaaggcccgcgtggagaccagccgcttcccccgcagcaagaagcagcgcatcctgctgcagaagttcgacgaggacggcttcaaggagcgcaacctgaacgacacccgctacgtgaaccgcttcctgtgccagttcgtggccgaccgcatgcgcctgaccggcaagggcaagaagcgcgtgttcgccagcaacggccagatcaccaacctgctgcgcggcttctggggcctgcgcaaggtgcgcgccgagaacgaccgccaccacgccctggacgccgtggtggtggcctgcagcaccgtggccatgcagcagaagatcacccgcttcgtgcgctacaaggagatgaacgccttcgacggtaaaaccatcgacaaggagaccggcgaggtgctgcaccagaagacccacttcccccagccctgggagttcttcgcccaggaggtgatgatccgcgtgttcggcaagcccgacggcaagcccgagttcgaggaggccgacacccccgagaagctgcgcaccctgctggccgagaagctgagcagccgccctgaggccgtgcacgagtacgtgactcctctgttcgtgagccgcgcccccaaccgcaagatgagcggtcagggtcacatggagaccgtgaagagcgccaagcgcctggacgagggcgtgagcgtgctgcgcgtgcccctgacccagctgaagctgaaggacctggagaagatggtgaaccgcgagcgcgagcccaagctgtacgaggccctgaaggcccgcctggaggcccacaaggacgaccccgccaaggccttcgccgagcccttctacaagtacgacaaggccggcaaccgcacccagcaggtgaaggccgtgcgcgtggagcaggtgcagaagaccggcgtgtgggtgcgcaaccacaacggcatcgccgacaacgccaccatggtgcgcgtggacgtgttcgagaagggcgacaagtactacctggtgcccatctacagctggcaggtggccaagggcatcctgcccgaccgcgccgtggtgcagggcaaggacgaggaggactggcagctgatcgacgacagcttcaacttcaagttcagcctgcaccccaacgacctggtggaggtgatcaccaagaaggcccgcatgttcggctacttcgccagctgccaccgcggcaccggcaacatcaacatccgcatccacgacctggaccacaagatcggcaagaacggcatcctggagggcatcggcgtgaagaccgccctgagcttccagaagtaccagatcgacgagctgggcaaggagatccgcccctgccgcctgaagaagcgccctcctgtgcgcagcagggctgaccccaagaagaagaggaaggtggaggccagcggttccggacgggctgacgcattggacgattttgatctggatatgctgggaagtgacgccctcgatgattttgaccttgacatgcttggttcggatgcccttgatgactttgacctcgacatgctcggcagtgacgcccttgatgatttcgacctggacatgctgattaactctagatga

SEQ ID NO: 24 - DNA, 3249 bp, Neisseria meningitidis
atggctgccttcaaacctaattcaatcaactacatcctcggcctcgatatcggcatcgcatccgtcggctgggcgatggtagaaattgacgaagaagaaaaccccatccgcctgattgatttgggcgtgcgcgtatttgagcgtgccgaagtaccgaaaacaggcgactcccttgccatggcaaggcgtttggcgcgcagtgttcgccgcctgacccgccgtcgcgcccaccgcctgcttcggacccgccgcctattgaaacgcgaaggcgtattacaagccgccaattttgacgaaaacggcttgattaaatccttaccgaatacaccatggcaacttcgcgcagccgcattagaccgcaaactgacgcctttagagtggtcggcagtcttgttgcatttaatcaaacatcgcggctatttatcgcaacggaaaaacgagggcgaaactgccgataaggagcttggcgctttgcttaaaggcgtagccggcaatgcccatgccttacagacaggcgatttccgcacaccggccgaattggctttaaataaatttgagaaagaaagcggccatatccgcaatcagcgcagcgattattcgcatacgttcagccgcaaagatttacaggcggagctgattttgctgtttgaaaaacaaaaagaatttggcaatccgcatgtttcaggcggccttaaagaaggtattgaaaccctactgatgacgcaacgccctgccctgtccggcgatgccgttcaaaaaatgttggggcattgcaccttcgaaccggcagagccgaaagccgctaaaaacacctacacagccgaacgtttcatctggctgaccaagctgaacaacctgcgtattttagagcaaggcagcgagcggccattgaccgataccgaacgcgccacgcttatggacgagccatacagaaaatccaaactgacttacgcacaagcccgtaagctgctgggtttagaagataccgcctttttcaaaggcttgcgctatggtaaagacaatgccgaagcctcaacattgatggaaatgaaggcctaccatgccatcagccgtgcactggaaaaagaaggattgaaagacaaaaaatccccattaaacctttctcccgaattacaagacgaaatcggcacggcattctccctgttcaaaaccgatgaagacattacaggccgtctgaaagaccgtatacagcccgaaatcttagaagcgctgttgaaacacatcagcttcgataagttcgtccaaatttccttgaaagcattgcgccgaattgtgcctctaatggaacaaggcaaacgttacgatgaagcctgcgccgaaatctacggagaccattacggcaagaagaatacggaagaaaagatttatctgccgccgattcccgccgacgaaatccgcaaccccgtcgtcttgcgcgccttatctcaagcacgtaaggtcattaacggcgtggtacgccgttacggctccccagctcgtatccatattgaaactgcaagggaagtaggtaaatcgtttaaagaccgcaaagaaattgagaaacgccaagaagaaaaccgcaaagaccgggaaaaagccgccgccaaattccgagagtatttccccaattttgtcggagaacccaaatccaaagatattctgaaactgcgcctgtacgagcaacaacacggcaaatgcctgtattcgggcaaagaaatcaacttaggccgtctgaacgaaaaaggctatgtcgaaatcgaccatgccctgccgttctcgcgcacatgggacgacagtttcaacaataaagtactggtattgggcagcgaaaaccaaaacaaaggcaatcaaaccccttacgaatacttcaacggcaaagacaacagccgcgaatggcaggaatttaaagcgcgtgtcgaaaccagccgtttcccgcgcagtaaaaaacaacggattctgctgcaaaaattcgatgaagacggctttaaagaacgcaatctgaacgacacgcgctacgtcaaccgtttcctgtgtcaatttgttgccgaccgtatgcggctgacaggtaaaggcaagaaacgtgtctttgcatccaacggacaaattaccaatctgttgcgcggcttttggggattgcgcaaagtgcgtgcggaaaacgaccgccatcacgccttggacgccgtcgtcgttgcctgctcgaccgttgccatgcagcagaaaattacccgttttgtacgctataaagagatgaacgcgtttgacggtaaaaccatagacaaagaaacaggagaagtgctgcatcaaaaaacacacttcccacaaccttgggaatttttcgcacaagaagtcatgattcgcgtcttcggcaaaccggacggcaaacccgaattcgaagaagccgataccctagaaaaactgcgcacgttgcttgccgaaaaattatcatctcgccccgaagccgtacacgaatacgttacgccactgtttgtttcacgcgcgcccaatcggaagatgagcgggcaagggcatatggagaccgtcaaatccgccaaacgactggacgaaggcgtcagcgtgttgcgcgtaccgctgacacagttaaaactgaaagacttggaaaaaatggtcaatcgggagcgcgaacctaagctatacgaagcactgaaagcacggctggaagcacataaagacgatcctgccaaagcctttgccgagccgttttacaaatacgataaagcaggcaaccgcacccaacaggtaaaagccgtacgcgtagagcaagtacagaaaaccggcgtatgggtgcgcaaccataacggtattgccgacaacgcaaccatggtgcgcgtagatgtgtttgagaaaggcgacaagtattatctggtaccgatttacagttggcaggtagcgaaagggattttgccggatagggctgttgtacaaggaaaagatgaagaagattggcaacttattgatgatagtttcaactttaaattctcattacaccctaatgatttagtcgaggttataacaaaaaaagctagaatgtttggttactttgccagctgccatcgaggcacaggtaatatcaatatacgcattcatgatcttgatcataaaattggcaaaaatggaatactggaaggtatcggcgtcaaaaccgccctttcattccaaaaataccaaattgacgaactgggcaaagaaatcagaccatgccgtctgaaaaaacgcccgcctgtccgttaa

SEQ ID NO: 25 - DNA, 4188 bp, Treponema denticola
atgaaaaaggaaattaaggattattttctcggattggatgtaggaaccggatcggttggttgggcagttactgatactgactataaactcttaaaggctaatcgtaaagacctttggggaatgaggtgttttgagacggcggaaactgcggaagtgagaaggcttcacaggggggctaggcgccgtattgagagaagaaaaaaaagaataaagctgcttcaagagcttttttcccaagaaattgcaaaaacagatgagggatttttccaaagaatgaaggaaagccctttctatgcagaagacaagactatattacaggaaaacactctttttaatgataaagattttgccgataagacctaccataaagcctatcctaccataaaccatctgataaaggcttggattgaaaacaaggtaaagccggatccaaggttattatacttagcctgtcataatattataaaaaaaagaggtcattttttattcgagggcgatttcgattcagaaaatcagtttgatacttctatacaagccctttttgaatatctgcgtgaagatatggaagtcgatattgatgccgatagccaaaaagtaaaagagattttaaaggatagctctttaaaaaattccgaaaaacaaagccgcctaaataagattttaggactgaaaccctccgacaaacaaaaaaaagctattactaatttaatatcaggcaacaaaataaactttgccgatctttatgataatccggatttaaaggatgcggagaaaaatagtatatctttttcgaaagatgattttgatgctttgagtgatgatcttgcttccattctaggagattcttttgagcttttattaaaagcaaaggctgtatataactgctcggttctttccaaggtaataggcgatgaacagtatctttcttttgcaaaggtaaaaatatatgaaaagcataaaaccgatttgactaaattaaaaaatgttataaaaaagcatttcccaaaagattataaaaaagtattcggatacaataaaaacgaaaaaaataacaacaattactccggatatgtaggcgtatgtaaaaccaagagtaaaaaactaattataaacaattctgtaaatcaagaagatttttacaaatttttaaaaactatcctttcagcaaaatccgagataaaggaagtaaatgatatattgaccgaaattgaaacagggacttttttacctaaacagatatctaaaagcaatgcggagattccttatcaattacgcaagatggagctggaaaaaatattatcaaacgcagaaaaacatttttcctttttaaaacaaaaagatgaaaaaggtttatctcacagtgaaaagattataatgcttttaacatttaagattccttattatattggacctataaacgataaccataaaaaattttttcccgatagatgctgggtagtaaaaaaagaaaaatcgccttccggtaaaactactccatggaacttttttgatcatatcgataaagaaaaaacagctgaagcatttattacaagcagaaccaatttttgcacatatttagtaggggaatccgttttaccaaaaagttctcttttatattccgagtataccgttttaaatgaaatcaacaatttacagattatcattgacggaaaaaatatctgcgatattaaactaaaacaaaaaatatacgaagatttatttaaaaaatataaaaagattacacaaaaacaaatttcaacttttatcaaacacgaaggtatttgcaataaaactgatgaagtaattattctaggtatcgataaagaatgtacatcttcgttaaaatcatatatagaacttaaaaacatattcggaaagcaagtagatgaaatttctacaaagaatatgcttgaagaaattatacgatgggctactatctatgatgaaggagaaggcaaaacaatacttaaaacaaaaataaaagccgaatatggaaaatattgttctgatgaacagatcaaaaaaattctaaatcttaaattttcaggttggggccgcttgtcacgcaaattccttgaaaccgtcacatcagaaatgccgggttttagcgaaccggtaaatataataactgcaatgcgggaaactcaaaataatttaatggagttgcttagcagtgaatttacatttactgaaaatattaaaaagataaattcgggatttgaagatgctgaaaagcaattttcatatgacggtttggttaagcctctgtttttatcaccatcggtaaaaaaaatgttgtggcagactctaaagcttgtaaaagaaatatcgcatattacccaagcccctcctaaaaaaatatttatagaaatggcaaagggtgcagagcttgaacctgcgaggactaagacaagattaaaaattttacaagacttatacaataactgtaaaaatgatgcggatgcttttagttccgagataaaagacctttcaggtaaaatagaaaatgaagataatttaaggcttcgaagcgacaaactttatctttattacacgcagcttggaaagtgcatgtattgcggtaaaccgattgaaataggccatgtatttgatacaagcaactatgatatagatcatatttatccccaatccaagattaaagatgacagtataagtaatcgggttttagtatgcagcagctgcaataaaaataaggaagataaatatcctttgaagtctgaaattcaatcaaagcaaaggggcttttggaattttttacaacgaaataactttataagccttgaaaaattgaataggttaacaagggccactccaatctcggatgacgaaacggcaaaattcattgccagacagcttgtagaaacaagacaggcgacaaaagtagctgcaaaagtattagaaaaaatgtttcccgaaactaagattgtttattctaaagctgaaaccgtatcaatgtttagaaataaattcgatattgtaaaatgcagagaaataaacgattttcatcatgctcatgatgcatatttaaatattgttgtcggaaatgtatataatacaaaatttacaaataatccttggaactttataaaggagaaacgggataatccaaagattgccgatacttacaattattataaagtttttgattatgatgtaaaaagaaataatattacggcatgggaaaaaggaaaaacaattatcactgtgaaggatatgcttaaaagaaatacccctatttatacacgccaagccgcctgcaaaaaaggagaactctttaaccaaaccattatgaaaaaaggattgggccagcatcctctaaaaaaagaaggtcctttttctaatatttcaaaatatgggggctataataaagtctctgctgcatattatactcttatagaatacgaagaaaaagggaataaaatacgaagcttagaaaccatccctctatatttggtaaaagacattcaaaaagatcaagatgtattaaagagttacttaacagatctgctagggaaaaaagaatttaagattttggttcctaaaataaaaatcaactccctcttaaaaattaacggtttcccttgtcatataacagggaaaaccaatgattctttcttactgcgtccggctgttcagttttgctgttcaaataatgaagttctttattttaaaaaaattataagattcagtgaaataagaagtcaaagagaaaagataggaaaaacaatttctccttatgaagacttatcctttagatcttatatcaaagaaaatttatggaaaaagacaaaaaatgatgaaataggagaaaaggagttttatgaccttcttcaaaagaagaatttggaaatctatgatatgcttttaacaaaacataaggatactatttataaaaaaagacctaactctgcaactattgatatcttagtcaaaggaaaagaaaagtttaaatctttaataatcgaaaatcagtttgaagttattttagagattttaaaactgttttctgccactagaaatgtatcagacttacaacatataggcggaagcaaatattcaggagttgcaaagataggaaataaaatatctagtcttgataactgtattttaatttaccaatcaataacaggtatttttgaaaaaaggattgatttgttaaaggtatga

SEQ ID NO: 26 - DNA, 4188 bp, Treponema denticola
atgaagaaggagatcaaggactacttcctgggcctggacgtgggcaccggcagcgtgggctgggccgtgaccgacaccgactacaagctgctgaaggccaaccgcaaggacctgtggggcatgcgctgcttcgagactgctgagaccgccgaggtgcgccggctgcaccgcggtgctcgccggcgcatcgagcgccgcaagaagcgcatcaagctgctgcaggagctgttcagccaggagatcgccaagaccgacgagggcttcttccagcgcatgaaggagagccccttctacgccgaggacaagaccatcctgcaggagaacaccctgttcaacgacaaggacttcgccgacaagacctaccacaaggcctaccccaccatcaaccacctgatcaaggcctggatcgagaacaaggtgaagcccgaccctcgcctgctgtacctggcctgccacaacatcatcaagaagcgcggccacttcctgttcgagggcgacttcgacagcgagaaccagttcgacaccagcatccaggccctgttcgagtacctgcgcgaggacatggaggtggacatcgacgccgacagccagaaggtgaaggagatcctgaaggacagcagcctgaagaacagcgagaagcagagccgcctgaacaagatcctgggcctgaagcccagcgacaagcagaagaaggccatcaccaacctgatcagcggcaacaagatcaacttcgccgacctgtacgacaaccccgacctgaaggacgccgagaagaacagcatcagcttcagcaaggacgacttcgacgccctgagcgacgacctggccagcatcctgggcgacagcttcgagctgctgctgaaggccaaggccgtgtacaactgcagcgtgctgagcaaggtgatcggcgacgagcagtacctgagcttcgccaaggtgaagatctacgagaagcacaagaccgaccttaccaagctgaagaacgtgatcaagaagcacttccccaaggactacaagaaggtgttcggctacaacaagaacgagaagaacaacaacaactacagcggctacgtgggcgtgtgcaagaccaagagcaagaagctgatcatcaacaacagcgtgaaccaggaggacttctacaagttcctgaagaccatcctgagcgccaagagcgagatcaaggaggtgaacgacatcctgaccgagatcgagaccggcaccttcctgcccaagcagatcagcaagagcaacgccgagatcccctaccagctgcgcaagatggagctggagaagatcctgagcaacgccgagaagcacttcagcttcctgaagcagaaggacgagaagggcctgagccacagcgagaagatcatcatgctgctgaccttcaagatcccctactacatcggccccatcaacgacaaccacaagaagttcttccccgaccgctgctgggtggtgaagaaggagaagagccccagcggcaagaccaccccctggaacttcttcgaccacatcgacaaggagaagaccgccgaggccttcatcaccagccgcaccaacttctgcacatacctggtgggcgagagcgtgctgcccaagagcagcctgctgtacagcgagtacaccgtgctgaacgagatcaacaacctgcagatcatcatcgacggcaagaacatctgcgacatcaagctgaagcagaagatctacgaggacctgttcaagaagtacaagaagatcacccagaagcagatcagcaccttcatcaagcacgagggcatctgcaacaagaccgacgaggtgatcatcctgggcatcgacaaggagtgcaccagcagcctgaagagctacatcgagctgaagaacatcttcggcaagcaggtggacgagatcagcaccaagaacatgctggaggagatcatccgctgggccaccatctacgacgagggcgagggcaagaccatcctgaagaccaagatcaaggccgagtacggcaagtactgcagcgacgagcagatcaagaagatcctgaacctgaagttcagcggctggggccgcctgagccgcaagttcctggagaccgtgaccagcgagatgcccggcttcagcgagcccgtgaacatcatcaccgccatgcgcgagacccagaacaacctgatggagctgctgagcagcgagttcaccttcaccgagaacatcaagaagatcaacagcggcttcgaggacgccgagaagcagttcagctacgacggcctggtgaagcccctgttcctgagccccagcgtgaagaagatgctgtggcagaccctgaagctggtgaaggagatcagccacatcacccaggctcctcctaagaagatcttcatcgagatggccaagggcgccgagctggagcctgctcgcaccaagacccgcctgaagatcctgcaggacctgtacaacaactgcaagaacgacgccgacgcattcagcagcgagatcaaggacctgagcggcaagatcgagaacgaggacaacctgcgcctgcgcagcgacaagctgtacctgtactacacccagctgggcaagtgcatgtactgcggcaagcccatcgagatcggccacgtgttcgacaccagcaactacgacatcgaccacatctacccccagagcaagatcaaggacgacagcatcagcaaccgcgtgctggtgtgcagcagctgcaacaagaacaaggaggacaagtaccctctgaagagcgagatccagagcaagcagcgcggcttctggaacttcctgcagcgcaacaacttcatcagcctggagaagctgaaccgcctgacccgcgccacccccatcagcgacgacgagaccgccaagttcatcgcccgccagctggtggagactcgccaagctaccaaggtggccgccaaggtgctggagaagatgttccccgagaccaagatcgtgtacagcaaggccgagaccgtgagcatgttccgcaacaagttcgacatcgtgaagtgccgcgagatcaacgacttccaccacgcccacgacgcctacctgaacatcgtggtgggcaacgtgtacaacaccaagttcaccaacaacccctggaatttcattaaggagaagcgcgacaaccccaagatcgccgacacctacaactactacaaggtgttcgactacgacgtgaagcgcaacaacatcaccgcctgggagaagggcaagaccatcatcaccgtgaaggacatgctgaagcgcaacacccccatctacacccgccaggccgcctgcaagaagggcgagctgttcaaccagaccatcatgaagaagggcctgggccagcaccccctgaagaaggagggccccttcagcaacatcagcaagtacggcggctacaacaaggtgagcgccgcctactacaccctgatcgagtacgaggagaagggcaacaagatccgcagcctggagaccatccccctgtacctggtgaaggacatccagaaggaccaggacgtgctgaagagctacctgaccgacctgctgggcaagaaggagttcaagatcctggtgcccaagatcaagatcaacagcctgctgaagatcaacggcttcccctgccacatcaccggcaagaccaacgacagcttcctgctgcgccccgccgtgcagttctgctgcagcaacaacgaggtgctgtacttcaagaagatcatccgcttcagcgagatccgcagccagcgcgagaagatcggcaagaccatcagcccctacgaggacctgagcttccgcagctacatcaaggagaacctgtggaagaagaccaagaacgacgagatcggcgagaaggagttctacgacctgctgcagaagaagaacctggagatctacgacatgctgctgaccaagcacaaggacaccatctacaagaagcgccccaacagcgccaccatcgacatcctggtgaagggcaaggagaagttcaagagcctgatcatcgagaaccagttcgaggtgatcctggagatcctgaagctgttcagcgccacccgcaacgtgagcgacctgcagcacatcggcggcagcaagtacagcggcgtggccaagatcggcaacaagatcagcagcctggacaactgcatcctgatctaccagagcatcaccggcatcttcgagaagcgcatcgacctgctgaaggtgtaa

SEQ ID NO: 27 - DNA, 4188 bp, Treponema denticola
atgaagaaggagatcaaggactacttcctgggcctggccgtgggcaccggcagcgtgggctgggccgtgaccgacaccgactacaagctgctgaaggccaaccgcaaggacctgtggggcatgcgctgcttcgagactgctgagaccgccgaggtgcgccggctgcaccgcggtgctcgccggcgcatcgagcgccgcaagaagcgcatcaagctgctgcaggagctgttcagccaggagatcgccaagaccgacgagggcttcttccagcgcatgaaggagagccccttctacgccgaggacaagaccatcctgcaggagaacaccctgttcaacgacaaggacttcgccgacaagacctaccacaaggcctaccccaccatcaaccacctgatcaaggcctggatcgagaacaaggtgaagcccgaccctcgcctgctgtacctggcctgccacaacatcatcaagaagcgcggccacttcctgttcgagggcgacttcgacagcgagaaccagttcgacaccagcatccaggccctgttcgagtacctgcgcgaggacatggaggtggacatcgacgccgacagccagaaggtgaaggagatcctgaaggacagcagcctgaagaacagcgagaagcagagccgcctgaacaagatcctgggcctgaagcccagcgacaagcagaagaaggccatcaccaacctgatcagcggcaacaagatcaacttcgccgacctgtacgacaaccccgacctgaaggacgccgagaagaacagcatcagcttcagcaaggacgacttcgacgccctgagcgacgacctggccagcatcctgggcgacagcttcgagctgctgctgaaggccaaggccgtgtacaactgcagcgtgctgagcaaggtgatcggcgacgagcagtacctgagcttcgccaaggtgaagatctacgagaagcacaagaccgaccttaccaagctgaagaacgtgatcaagaagcacttccccaaggactacaagaaggtgttcggctacaacaagaacgagaagaacaacaacaactacagcggctacgtgggcgtgtgcaagaccaagagcaagaagctgatcatcaacaacagcgtgaaccaggaggacttctacaagttcctgaagaccatcctgagcgccaagagcgagatcaaggaggtgaacgacatcctgaccgagatcgagaccggcaccttcctgcccaagcagatcagcaagagcaacgccgagatcccctaccagctgcgcaagatggagctggagaagatcctgagcaacgccgagaagcacttcagcttcctgaagcagaaggacgagaagggcctgagccacagcgagaagatcatcatgctgctgaccttcaagatcccctactacatcggccccatcaacgacaaccacaagaagttcttccccgaccgctgctgggtggtgaagaaggagaagagccccagcggcaagaccaccccctggaacttcttcgaccacatcgacaaggagaagaccgccgaggccttcatcaccagccgcaccaacttctgcacatacctggtgggcgagagcgtgctgcccaagagcagcctgctgtacagcgagtacaccgtgctgaacgagatcaacaacctgcagatcatcatcgacggcaagaacatctgcgacatcaagctgaagcagaagatctacgaggacctgttcaagaagtacaagaagatcacccagaagcagatcagcaccttcatcaagcacgagggcatctgcaacaagaccgacgaggtgatcatcctgggcatcgacaaggagtgcaccagcagcctgaagagctacatcgagctgaagaacatcttcggcaagcaggtggacgagatcagcaccaagaacatgctggaggagatcatccgctgggccaccatctacgacgagggcgagggcaagaccatcctgaagaccaagatcaaggccgagtacggcaagtactgcagcgacgagcagatcaagaagatcctgaacctgaagttcagcggctggggccgcctgagccgcaagttcctggagaccgtgaccagcgagatgcccggcttcagcgagcccgtgaacatcatcaccgccatgcgcgagacccagaacaacctgatggagctgctgagcagcgagttcaccttcaccgagaacatcaagaagatcaacagcggcttcgaggacgccgagaagcagttcagctacgacggcctggtgaagcccctgttcctgagccccagcgtgaagaagatgctgtggcagaccctgaagctggtgaaggagatcagccacatcacccaggctcctcctaagaagatcttcatcgagatggccaagggcgccgagctggagcctgctcgcaccaagacccgcctgaagatcctgcaggacctgtacaacaactgcaagaacgacgccgacgcattcagcagcgagatcaaggacctgagcggcaagatcgagaacgaggacaacctgcgcctgcgcagcgacaagctgtacctgtactacacccagctgggcaagtgcatgtactgcggcaagcccatcgagatcggccacgtgttcgacaccagcaactacgacatcgctgctatctacccccagagcaagatcaaggacgacagcatcagcaaccgcgtgctggtgtgcagcagctgcgccaagaacaaggaggacaagtaccctctgaagagcgagatccagagcaagcagcgcggcttctggaacttcctgcagcgcaacaacttcatcagcctggagaagctgaaccgcctgacccgcgccacccccatcagcgacgacgagaccgccaagttcatcgcccgccagctggtggagactcgccaagctaccaaggtggccgccaaggtgctggagaagatgttccccgagaccaagatcgtgtacagcaaggccgagaccgtgagcatgttccgcaacaagttcgacatcgtgaagtgccgcgagatcaacgacttccaccacgcccacgacgcctacctgaacatcgtggtgggcaacgtgtacaacaccaagttcaccaacaacccctggaatttcattaaggagaagcgcgacaaccccaagatcgccgacacctacaactactacaaggtgttcgactacgacgtgaagcgcaacaacatcaccgcctgggagaagggcaagaccatcatcaccgtgaaggacatgctgaagcgcaacacccccatctacacccgccaggccgcctgcaagaagggcgagctgttcaaccagaccatcatgaagaagggcctgggccagcaccccctgaagaaggagggccccttcagcaacatcagcaagtacggcggctacaacaaggtgagcgccgcctactacaccctgatcgagtacgaggagaagggcaacaagatccgcagcctggagaccatccccctgtacctggtgaaggacatccagaaggaccaggacgtgctgaagagctacctgaccgacctgctgggcaagaaggagttcaagatcctggtgcccaagatcaagatcaacagcctgctgaagatcaacggcttcccctgccacatcaccggcaagaccaacgacagcttcctgctgcgccccgccgtgcagttctgctgcagcaacaacgaggtgctgtacttcaagaagatcatccgcttcagcgagatccgcagccagcgcgagaagatcggcaagaccatcagcccctacgaggacctgagcttccgcagctacatcaaggagaacctgtggaagaagaccaagaacgacgagatcggcgagaaggagttctacgacctgctgcagaagaagaacctggagatctacgacatgctgctgaccaagcacaaggacaccatctacaagaagcgccccaacagcgccaccatcgacatcctggtgaagggcaaggagaagttcaagagcctgatcatcgagaaccagttcgaggtgatcctggagatcctgaagctgttcagcgccacccgcaacgtgagcgacctgcagcacatcggcggcagcaagtacagcggcgtggccaagatcggcaacaagatcagcagcctggacaactgcatcctgatctaccagagcatcaccggcatcttcgagaagcgcatcgacctgctgaaggtgtaa

SEQ ID NO: 28 - protein, 1053 aa, Streptococcus aureas
MKRNYILGLDIGITSVGYGIIDYETRDVIDAGVRLFKEANVENNEGRRSKRGARRLKRRRRHRIQRVKKLLFDYNLLTDHSELSGINPYEARVKGLSQKLSEEEFSAALLHLAKRRGVHNVNEVEEDTGNELSTKEQISRNSKALEEKYVAELQLERLKKDGEVRGSINRFKTSDYVKEAKQLLKVQKAYHQLDQSFIDTYIDLLETRRTYYEGPGEGSPFGWKDIKEWYEMLMGHCTYFPEELRSVKYAYNADLYNALNDLNNLVITRDENEKLEYYEKFQIIENVFKQKKKPTLKQIAKEILVNEEDIKGYRVTSTGKPEFTNLKVYHDIKDITARKEIIENAELLDQIAKILTIYQSSEDIQEELTNLNSELTQEEIEQISNLKGYTGTHNLSLKAINLILDELWHTNDNQIAIFNRLKLVPKKVDLSQQKEIPTTLVDDFILSPVVKRSFIQSIKVINAIIKKYGLPNDIIIELAREKNSKDAQKMINEMQKRNRQTNERIEEIIRTTGKENAKYLIEKIKLHDMQEGKCLYSLEAIPLEDLLNNPFNYEVDHIIPRSVSFDNSFNNKVLVKQEENSKKGNRTPFQYLSSSDSKISYETFKKHILNLAKGKGRISKTKKEYLLEERDINRFSVQKDFINRNLVDTRYATRGLMNLLRSYFRVNNLDVKVKSINGGFTSFLRRKWKFKKERNKGYKHHAEDALIIANADFIFKEWKKLDKAKKVMENQMFEEKQAESMPEIETEQEYKEIFITPHQIKHIKDFKDYKYSHRVDKKPNRELINDTLYSTRKDDKGNTLIVNNLNGLYDKDNDKLKKLINKSPEKLLMYHHDPQTYQKLKLIMEQYGDEKNPLYKYYEETGNYLTKYSKKDNGPVIKKIKYYGNKLNAHLDITDDYPNSRNKVVKLSLKPYRFDVYLDNGVYKFVTVKNLDVIKKENYYEVNSKCYEEAKKLKKISNQAEFIASFYNNDLIKINGELYRVIGVNNDLLNRIEVNMIDITYREYLENMNDKRPPRIIKTIASKTQSIKKYSTDILGNLYEVKSKKHPQIIKKG

SEQ ID NO: 29 - DNA, 3162 bp, Streptococcus aureas
atgaaaaggaattatatcttaggattagatatcggaattacatcagtgggttatggaattattgattatgaaactagagatgtcatagatgcgggcgtacgtttatttaaagaggctaatgttgaaaataatgaaggacgacgatcaaaaagaggtgccagaaggcttaagaggcgtcgtagacatagaatacaaagagtaaagaaacttttatttgattacaatttgttgacagatcatagtgagctaagtggaatcaatccttacgaggcgcgcgtaaagggattaagtcaaaaattaagtgaagaggaattttctgcggcattgctacatttagcaaagcgtagaggtgtacataatgttaatgaagtggaagaagatacaggtaatgaattatccactaaagaacaaatttcaagaaatagtaaagcgttagaagagaagtatgttgcagaattacagttggaacgtttgaaaaaagacggtgaagtgagaggttcgattaaccgtttcaaaacatctgactatgtaaaagaagcaaagcagttattaaaagtacaaaaagcatatcatcaacttgatcaatcatttatagacacttatattgatttattggaaacaagaagaacatattatgagggaccaggtgaaggtagcccatttggatggaaagatattaaagaatggtatgaaatgttaatgggacattgtacgtatttcccagaagaattacgtagtgtgaaatatgcctataatgctgatttatataatgcgctgaatgatttgaacaacttggttattacacgagatgagaatgagaagctagagtattatgaaaaattccaaattatcgagaatgtctttaaacaaaagaaaaagccgacgcttaaacaaattgcgaaggaaatcttggtgaatgaagaagacatcaaaggctatcgtgtcacaagtacaggtaaaccagaatttacaaacttgaaagtttatcacgatatcaaagatattacagcaagaaaagaaattatcgagaatgcagagctactcgatcaaatagctaaaatattaactatttaccagtcatcagaagatatacaagaagaattaacaaacctaaattcagaattgacacaagaagagattgaacaaatttcaaacttgaaaggttatacaggaactcataacctttcactaaaggcaataaatttaatattagacgaattgtggcatacgaacgataatcaaatagctattttcaatcgtttgaaacttgtacctaaaaaggtagatttaagccaacaaaaagaaattcctactactttagttgatgattttatactgtctccagtagtgaaacgttcatttatacaatctattaaagttattaacgctattattaaaaaatacggtttgccaaatgatattattattgaacttgcgagagaaaagaattctaaagatgcacaaaaaatgattaatgaaatgcagaagagaaatcgtcaaacgaatgaacgtattgaggaaattataagaacgacaggtaaagaaaatgctaaatatttaattgaaaaaattaagctgcacgatatgcaagaagggaaatgtttatactcgttagaagcaatccctctagaagatttacttaataatccattcaattacgaagtagaccatatcattccacgttctgtttctttcgataactctttcaataataaagtgttggtgaaacaagaagaaaatagtaaaaaaggtaatagaacgccatttcaatatttaagttcttcagattctaaaataagttatgagacattcaaaaagcatattttaaatcttgctaaaggcaaaggtagaatctctaagacgaaaaaagaatatttgttagaagaacgagatatcaatcgcttcagtgtccaaaaagattttattaaccgtaacttagtagatacacgctatgcgacaagagggttaatgaacttattaagatcttattttagagtgaataacttagatgtcaaagtgaaatcgattaatggcggattcacaagtttcttaagaaggaaatggaagttcaaaaaagaaagaaataagggctacaaacaccatgctgaagatgcactgattattgcgaacgctgattttattttcaaagaatggaaaaaactagataaagctaaaaaagtgatggaaaatcaaatgtttgaagaaaagcaagctgaaagtatgcctgaaattgagactgagcaagagtataaagaaatttttataacgcctcatcaaattaaacatattaaggattttaaagattataaatattcacatagagttgataaaaagccgaatagagagttaataaatgatacattatattctacgagaaaagatgacaagggtaatacattaatcgttaataacttaaatggtttatacgataaagataatgataaattgaaaaaattaattaataaatcacctgaaaaattattgatgtatcatcatgatccacaaacatatcaaaaattaaaattgatcatggaacaatatggcgatgagaaaaatccgctttataaatattatgaagaaacaggcaattacttaacaaaatatagtaaaaaagataacggaccagtcatcaaaaaaattaaatattatggtaacaagctaaatgcgcatttagatattacggatgattatccaaatagcagaaataaagtagtaaaactttcattaaaaccatatcgctttgatgtttatttagataatggggtatataaatttgtgacagttaaaaatttagatgttatcaaaaaagaaaactactatgaagttaattcaaagtgttatgaagaagcaaaaaaactgaagaaaattagtaatcaagcagaatttatcgcaagtttttacaataatgacttgattaagattaacggagaattatatagagtcataggtgtaaataatgatctacttaacagaattgaagtaaatatgatagacatcacatatagagaatatttagagaacatgaatgataaaagaccacctagaataattaaaacaatagcaagcaaaacacaatctattaaaaagtattctacagatattctaggcaatctttatgaagtgaagagtaaaaagcatcctcaaatcataaagaaaggatga

SEQ ID NO: 30 - protein, 1629 aa, Francisella tularensis
MNFKILPIAIDLGVKNTGVFSAFYQKGTSLERLDNKNGKVYELSKDSYTLLMNNRTARRHQRRGIDRKQLVKRLFKLIWTEQLNLEWDKDTQQAISFLFNRRGFSFITDGYSPEYLNIVPEQVKAILMDIFDDYNGEDDLDSYLKLATEQESKISEIYNKLMQKILEFKLMKLCTDIKDDKVSTKTLKEITSYEFELLADYLANYSESLKTQKFSYTDKQGNLKELSYYHHDKYNIQEFLKRHATINDRILDTLLTDDLDIWNFNFEKFDFDKNEEKLQNQEDKDHIQAHLHHFVFAVNKIKSEMASGGRHRSQYFQEITNVLDENNHQEGYLKNFCENLHNKKYSNLSVKNLVNLIGNLSNLELKPLRKYFNDKIHAKADHWDEQKFTETYCHWILGEWRVGVKDQDKKDGAKYSYKDLCNELKQKVTKAGLVDFLLELDPCRTIPPYLDNNNRKPPKCQSLILNPKFLDNQYPNWQQYLQELKKLQSIQNYLDSFETDLKVLKSSKDQPYFVEYKSSNQQIASGQRDYKDLDARILQFIFDRVKASDELLLNEIYFQAKKLKQKASSELEKLESSKKLDEVIANSQLSQILKSQHTNGIFEQGTFLHLVCKYYKQRQRARDSRLYIMPEYRYDKKLHKYNNTGRFDDDNQLLTYCNHKPRQKRYQLLNDLAGVLQVSPNFLKDKIGSDDDLFISKWLVEHIRGFKKACEDSLKIQKDNRGLLNHKINIARNTKGKCEKEIFNLICKIEGSEDKKGNYKHGLAYELGVLLFGEPNEASKPEFDRKIKKFNSIYSFAQIQQIAFAERKGNANTCAVCSADNAHRMQQIKITEPVEDNKDKIILSAKAQRLPAIPTRIVDGAVKKMATILAKNIVDDNWQNIKQVLSAKHQLHIPIITESNAFEFEPALADVKGKSLKDRRKKALERISPENIFKDKNNRIKEFAKGISAYSGANLTDGDFDGAKEELDHIIPRSHKKYGTLNDEANLICVTRGDNKNKGNRIFCLRDLADNYKLKQFETTDDLEIEKKIADTIWDANKKDFKFGNYRSFINLTPQEQKAFRHALFLADENPIKQAVIRAINNRNRTFVNGTQRYFAEVLANNIYLRAKKENLNTDKISFDYFGIPTIGNGRGIAEIRQLYEKVDSDIQAYAKGDKPQASYSHLIDAMLAFCIAADEHRNDGSIGLEIDKNYSLYPLDKNTGEVFTKDIFSQIKITDNEFSDKKLVRKKAIEGFNTHRQMTRDGIYAENYLPILIHKELNEVRKGYTWKNSEEIKIFKGKKYDIQQLNNLVYCLKFVDKPISIDIQISTLEELRNILTTNNIAATAEYYYINLKTQKLHEYYIENYNTALGYKKYSKEMEFLRSLAYRSERVKIKSIDDVKQVLDKDSNFIIGKITLPFKKEWQRLYREWQNTTIKDDYEFLKSFFNVKSITKLHKKVRKDFSLPISTNEGKFLVKRKTWDNNFIYQILNDSDSRADGTKPFIPAFDISKNEIVEAIIDSFTSKNIFWLPKNIELQKVDNKNIFAIDTSKWFEVETPSDLRDIGIATIQYKIDNNSRPKVRVKLDYVIDDDSKINYFMNHSLLKSRYPDKVLEILKQSTIIEFESSGFNKTIKEMLGMKLAGIYNETSNN

SEQ ID NO: 31 - DNA, 4890 bp, Francisella tularensis
atgaatttcaaaatattgccaatagcaatagatttaggtgttaaaaatactggtgtctttagcgcattttatcaaaaaggaacttctcttgagagattggataataaaaatggcaaagtatatgaactatcaaaagattcttatactttattgatgaataatagaacagcaagaagacatcaaagaagagggatagatagaaagcagctagtcaaaaggctctttaagcttatttggacagagcagctaaatttagagtgggataaagacactcaacaagcaattagctttttatttaatcgtagaggttttagttttattactgatggttattcgcctgaatatttaaatattgttccagagcaagtaaaagcgatacttatggatatatttgatgattacaacggtgaagatgatttagacagttatttaaaattagctactgagcaagaaagcaaaatttctgaaatttataacaagctaatgcaaaaaatattagagtttaaattaatgaaattatgtactgatattaaggatgataaagtaagtactaaaacgcttaaagaaatcacaagctatgaatttgagttattagctgattatttagcaaactatagcgagagtttaaaaacacaaaaatttagttatacagataaacaaggtaatttaaaagagctaagctactatcatcatgataaatataatattcaagaatttctaaagcgacatgctactataaatgatcgaattttagatactcttttaactgatgatttagatatttggaattttaattttgagaaatttgattttgataagaatgaagaaaagcttcagaatcaggaagataaagatcatatacaagcgcatttacatcattttgtttttgcagtaaataaaataaaaagtgaaatggcaagtggtggtcgtcatcgtagccaatattttcaagagataacaaatgtgctagatgaaaataatcatcaagagggatatctcaagaatttctgtgaaaatttgcataataaaaaatattcaaatttaagtgttaaaaatttagttaatctaattggtaacctaagtaatttagagctaaaaccgctaagaaaatattttaatgacaaaattcacgcaaaagctgatcattgggatgagcaaaagtttacagaaacttattgccactggatattaggagagtggcgagtaggtgtcaaagatcaagataagaaagatggcgctaaatatagttataaagatctgtgtaatgaattaaaacaaaaagttactaaggctggtttggtagattttttattagagttagatccatgtagaactataccaccatatctggataacaataaccgtaaaccaccaaaatgtcaaagtttgattttaaatccgaagtttttagataatcaatatccaaactggcaacaatatttacaagaattaaagaaactacaaagtattcaaaattatttagacagttttgaaactgatttaaaagtcttaaagtcaagtaaagatcaaccatattttgttgaatacaagagttcaaatcagcaaatagcaagtggtcaaagagattataaagatttagatgctcgaatattacagtttatatttgatagggtaaaagctagtgatgagttgcttttgaatgagatttattttcaggctaaaaaacttaaacaaaaagctagctctgagttagaaaaactcgagtcgagcaaaaagctagatgaagttatagcaaatagtcaactatcacagatactaaagtctcaacatacaaatggtatttttgaacagggtacttttttgcatttggtttgtaaatattataaacaaagacaaagagcgagagactctaggctatatattatgcctgaatatcgttatgataaaaaactacataaatataacaatacaggcaggtttgatgatgataatcagctgctaacatattgtaatcataagccaagacaaaaaagataccaattgttaaatgatttagctggggtgttgcaggtatcacctaattttttgaaagataaaattggttctgatgatgatctatttattagcaaatggttggtagagcatattagaggatttaaaaaagcttgtgaagatagtttaaaaatacaaaaagacaatagaggattattaaatcataaaataaatatagctaggaatacaaaaggcaaatgtgaaaaagaaatatttaatttaatatgtaaaatagaaggttcagaagataaaaaaggtaattacaagcatggtttagcttacgaattaggagtacttttatttggtgaacctaatgaagctagtaaacctgagttcgatagaaaaattaaaaaatttaactcaatatacagttttgcacagattcaacaaattgcttttgcagagcgtaaaggcaatgctaacacttgtgcagtttgtagtgctgataatgctcatagaatgcaacaaattaagatcactgagcctgtagaggacaataaagataagataatcttaagtgccaaagctcagagactaccagcgattccaactagaatagttgacggtgcggttaagaaaatggcaactatattagctaaaaatatagttgatgataattggcagaatatcaaacaagttttatcagcaaaacatcagttacatatacctattatcacagaatcaaatgcttttgagtttgaaccagcattagctgatgtaaaaggtaagagcctaaaagataggagaaaaaaagcattagagagaataagtcctgaaaatatattcaaggataaaaacaatagaataaaagaatttgctaaaggtatatcagcatatagtggtgctaatttaactgatggcgattttgatggtgcaaaagaagaattagatcatataatacctcgttcacataaaaaatacggtactctaaatgatgaagcaaatctaatttgtgtaactcgtggtgataataaaaataaaggtaatagaattttctgcctacgtgatcttgcagataactataaactaaaacagtttgagacaactgatgatttagaaattgaaaagaagatagctgatacaatctgggatgctaacaagaaagattttaaatttggtaattatcgtagttttattaacctaacaccacaagagcagaaagcatttcgtcacgcgctatttctggctgatgaaaatcctatcaaacaagcagtcataagagcgataaataatcgtaatcgtacatttgtaaatggcactcaacgctattttgcagaagtactggcaaacaatatctatctaagggctaaaaaagaaaatctaaatacagataaaatttcatttgattattttggtattccaactataggtaatggtagaggtattgctgaaatccgtcaactttatgaaaaagttgatagtgatatacaagcttatgcaaaaggtgataaacctcaagctagctactctcacctaatagatgcgatgctggctttttgtattgctgctgatgaacacagaaatgatggaagtataggtctagaaatcgataaaaattatagtttatatccattagataaaaatacaggagaagtctttaccaaagatatttttagtcaaattaaaattactgataatgagtttagcgataaaaaattagtaagaaaaaaagctatagagggctttaacacgcatagacaaatgactagagatggcatttatgcagaaaattacctaccaatactaatccataaagaactaaatgaagttagaaaaggctatacttggaaaaatagtgaagaaataaaaatattcaaaggtaaaaagtacgatatacaacaattgaataaccttgtgtattgtctaaaatttgtagataaacctatatctatagatatacaaattagtaccttagaagagttaagaaatatattaacaacaaataatatagctgctacagcagaatactattatataaatctaaaaacccaaaaattacatgagtattatatcgaaaactataatactgccttaggttataaaaaatacagtaaagaaatggagtttttgagaagcttagcttatcgtagcgaaagggtaaaaattaaatcaatagatgatgtaaagcaggttttggataaggatagtaactttatcatcggtaagattactttaccatttaaaaaagagtggcaaagactatatcgtgagtggcaaaatacaactatcaaagatgattatgagtttttaaaatcattctttaatgttaaaagtattactaagttgcataaaaaagttagaaaagatttctctttacctatttctacaaatgaaggtaaattcctggtcaaaagaaaaacatgggataacaattttatctatcagatattaaatgattctgattctagagcagacggaacaaagccatttattccagcttttgacatttctaaaaatgaaatagtcgaagccataattgattcatttacatcaaaaaatattttttggctgcctaaaaatatagaattacaaaaggtggataataaaaacatttttgctatagatactagtaaatggttcgaagtagaaacacctagtgatcttagagacattggaatagcaacaattcaatacaagatagataataattctcgccctaaagtcagagttaaacttgattatgttatcgatgatgatagtaagataaattattttatgaatcattctttattaaaatcaagatatcctgacaaagttttagaaattttaaaacaatcaactattatagaatttgaaagttcaggttttaataaaactatcaaagaaatgcttggtatgaaattagcaggtatttataatgaaacatctaataattag

SEQ ID NO: 32 - DNA, 3903 bp, Francisella tularensis
  Francisella tularensis subsp. novicida (strain U112)
atgtcaatttatcaagaatttgttaataaatatagtttaagtaaaactctaagatttgagttaatcccacagggtaaaacacttgaaaacataaaagcaagaggtttgattttagatgatgagaaaagagctaaagactacaaaaaggctaaacaaataattgataaatatcatcagttttttatagaggagatattaagttcggtttgtattagcgaagatttattacaaaactattctgatgtttattttaaacttaaaaagagtgatgatgataatctacaaaaagattttaaaagtgcaaaagatacgataaagaaacaaatatctgaatatataaaggactcagagaaatttaagaatttgtttaatcaaaaccttatcgatgctaaaaaagggcaagagtcagatttaattctatggctaaagcaatctaaggataatggtatagaactatttaaagccaatagtgatatcacagatatagatgaggcgttagaaataatcaaatcttttaaaggttggacaacttattttaagggttttcatgaaaatagaaaaaatgtttatagtagcaatgatattcctacatctattatttataggatagtagatgataatttgcctaaatttctagaaaataaagctaagtatgagagtttaaaagacaaagctccagaagctataaactatgaacaaattaaaaaagatttggcagaagagctaacctttgatattgactacaaaacatctgaagttaatcaaagagttttttcacttgatgaagtttttgagatagcaaactttaataattatctaaatcaaagtggtattactaaatttaatactattattggtggtaaatttgtaaatggtgaaaatacaaagagaaaaggtataaatgaatatataaatctatactcacagcaaataaatgataaaacactcaaaaaatataaaatgagtgttttatttaagcaaattttaagtgatacagaatctaaatcttttgtaattgataagttagaagatgatagtgatgtagttacaacgatgcaaagtttttatgagcaaatagcagcttttaaaacagtagaagaaaaatctattaaagaaacactatctttattatttgatgatttaaaagctcaaaaacttgatttgagtaaaatttattttaaaaatgataaatctcttactgatctatcacaacaagtttttgatgattatagtgttattggtacagcggtactagaatatataactcaacaaatagcacctaaaaatcttgataaccctagtaagaaagagcaagaattaatagccaaaaaaactgaaaaagcaaaatacttatctctagaaactataaagcttgccttagaagaatttaataagcatagagatatagataaacagtgtaggtttgaagaaatacttgcaaactttgcggctattccgatgatatttgatgaaatagctcaaaacaaagacaatttggcacagatatctatcaaatatcaaaatcaaggtaaaaaagacctacttcaagctagtgcggaagatgatgttaaagctatcaaggatcttttagatcaaactaataatctcttacataaactaaaaatatttcatattagtcagtcagaagataaggcaaatattttagacaaggatgagcatttttatctagtatttgaggagtgctactttgagctagcgaatatagtgcctctttataacaaaattagaaactatataactcaaaagccatatagtgatgagaaatttaagctcaattttgagaactcgactttggctaatggttgggataaaaataaagagcctgacaatacggcaattttatttatcaaagatgataaatattatctgggtgtgatgaataagaaaaataacaaaatatttgatgataaagctatcaaagaaaataaaggcgagggttataaaaaaattgtttataaacttttacctggcgcaaataaaatgttacctaaggttttcttttctgctaaatctataaaattttataatcctagtgaagatatacttagaataagaaatcattccacacatacaaaaaatggtagtcctcaaaaaggatatgaaaaatttgagtttaatattgaagattgccgaaaatttatagatttttataaacagtctataagtaagcatccggagtggaaagattttggatttagattttctgatactcaaagatataattctatagatgaattttatagagaagttgaaaatcaaggctacaaactaacttttgaaaatatatcagagagctatattgatagcgtagttaatcagggtaaattgtacctattccaaatctataataaagatttttcagcttatagcaaagggcgaccaaatctacatactttatattggaaagcgctgtttgatgagagaaatcttcaagatgtggtttataagctaaatggtgaggcagagcttttttatcgtaaacaatcaatacctaaaaaaatcactcacccagctaaagaggcaatagctaataaaaacaaagataatcctaaaaaagagagtgtttttgaatatgatttaatcaaagataaacgctttactgaagataagtttttctttcactgtcctattacaatcaattttaaatctagtggagctaataagtttaatgatgaaatcaatttattgctaaaagaaaaagcaaatgatgttcatatattaagtatagatagaggtgaaagacatttagcttactatactttggtagatggtaaaggcaatatcatcaaacaagatactttcaacatcattggtaatgatagaatgaaaacaaactaccatgataagcttgctgcaatagagaaagatagggattcagctaggaaagactggaaaaagataaataacatcaaagagatgaaagagggctatctatctcaggtagttcatgaaatagctaagctagttatagagtataatgctattgtggtttttgaggatttaaattttggatttaaaagagggcgtttcaaggtagagaagcaggtctatcaaaagttagaaaaaatgctaattgagaaactaaactatctagttttcaaagataatgagtttgataaaactgggggagtgcttagagcttatcagctaacagcaccttttgagacttttaaaaagatgggtaaacaaacaggtattatctactatgtaccagctggttttacttcaaaaatttgtcctgtaactggttttgtaaatcagttatatcctaagtatgaaagtgtcagcaaatctcaagagttctttagtaagtttgacaagatttgttataaccttgataagggctattttgagtttagttttgattataaaaactttggtgacaaggctgccaaaggcaagtggactatagctagctttgggagtagattgattaactttagaaattcagataaaaatcataattgggatactcgagaagtttatccaactaaagagttggagaaattgctaaaagattattctatcgaatatgggcatggcgaatgtatcaaagcagctatttgcggtgagagcgacaaaaagttttttgctaagctaactagtgtcctaaatactatcttacaaatgcgtaactcaaaaacaggtactgagttagattatctaatttcaccagtagcagatgtaaatggcaatttctttgattcgcgacaggcgccaaaaaatatgcctcaagatgctgatgccaatggtgcttatcatattgggctaaaaggtctgatgctactaggtaggatcaaaaataatcaagagggcaaaaaactcaatttggttatcaaaaatgaagagtattttgagttcgtgcagaataggaataactaa

SEQ ID NO: 33 - protein, 1300 aa, Francisella tularensis
  Francisella tularensis subsp. novicida (strain U112)
MSIYQEFVNKYSLSKTLRFELIPQGKTLENIKARGLILDDEKRAKDYKKAKQIIDKYHQFFIEEILSSVCISEDLLQNYSDVYFKLKKSDDDNLQKDFKSAKDTIKKQISEYIKDSEKFKNLFNQNLIDAKKGQESDLILWLKQSKDNGIELFKANSDITDIDEALEIIKSFKGWTTYFKGFHENRKNVYSSNDIPTSIIYRIVDDNLPKFLENKAKYESLKDKAPEAINYEQIKKDLAEELTFDIDYKTSEVNQRVFSLDEVFEIANFNNYLNQSGITKFNTIIGGKFVNGENTKRKGINEYINLYSQQINDKTLKKYKMSVLFKQILSDTESKSFVIDKLEDDSDVVTTMQSFYEQIAAFKTVEEKSIKETLSLLFDDLKAQKLDLSKIYFKNDKSLTDLSQQVFDDYSVIGTAVLEYITQQIAPKNLDNPSKKEQELIAKKTEKAKYLSLETIKLALEEFNKHRDIDKQCRFEEILANFAAIPMIFDEIAQNKDNLAQISIKYQNQGKKDLLQASAEDDVKAIKDLLDQTNNLLHKLKIFHISQSEDKANILDKDEHFYLVFEECYFELANIVPLYNKIRNYITQKPYSDEKFKLNFENSTLANGWDKNKEPDNTAILFIKDDKYYLGVMNKKNNKIFDDKAIKENKGEGYKKIVYKLLPGANKMLPKVFFSAKSIKFYNPSEDILRIRNHSTHTKNGSPQKGYEKFEFNIEDCRKFIDFYKQSISKHPEWKDFGFRFSDTQRYNSIDEFYREVENQGYKLTFENISESYIDSVVNQGKLYLFQIYNKDFSAYSKGRPNLHTLYWKALFDERNLQDVVYKLNGEAELFYRKQSIPKKITHPAKEAIANKNKDNPKKESVFEYDLIKDKRFTEDKFFFHCPITINFKSSGANKFNDEINLLLKEKANDVHILSIDRGERHLAYYTLVDGKGNIIKQDTFNIIGNDRMKTNYHDKLAAIEKDRDSARKDWKKINNIKEMKEGYLSQVVHEIAKLVIEYNAIVVFEDLNFGFKRGRFKVEKQVYQKLEKMLIEKLNYLVFKDNEFDKTGGVLRAYQLTAPFETFKKMGKQTGIIYYVPAGFTSKICPVTGFVNQLYPKYESVSKSQEFFSKFDKICYNLDKGYFEFSFDYKNFGDKAAKGKWTIASFGSRLINFRNSDKNHNWDTREVYPTKELEKLLKDYSIEYGHGECIKAAICGESDKKFFAKLTSVLNTILQMRNSKTGTELDYLISPVADVNGNFFDSRQAPKNMPQDADANGAYHIGLKGLMLLGRIKNNQEGKKLNLVIKNEEYFEFVQNRNN

SEQ ID NO: 34 - DNA, 3924 bp, Acidaminococcus sp.
  Acidaminococcus sp. (strain BV3L6)
atgacccaatttgaaggttttaccaatttataccaagtttcgaagacccttcgttttgaactgattccccaaggaaaaacactcaaacatatccaggagcaagggttcattgaggaggataaagctcgcaatgaccattacaaagagttaaaaccaatcattgaccgcatctataagacttatgctgatcaatgtctccaactggtacagcttgactgggagaatctatctgcagccatagactcctatcgtaaggaaaaaaccgaagaaacacgaaatgcgctgattgaggagcaagcaacatatagaaatgcgattcatgactactttataggtcggacggataatctgacagatgccataaataagcgccatgctgaaatctataaaggactttttaaagctgaacttttcaatggaaaagttttaaagcaattagggaccgtaaccacgacagaacatgaaaatgctctactccgttcgtttgacaaatttacgacctatttttccggcttttatgaaaaccgaaaaaatgtctttagcgctgaagatatcagcacggcaattccccatcgaatcgtccaggacaatttccctaaatttaaggaaaactgccatatttttacaagattgataaccgcagttccttctttgcgggagcattttgaaaatgtcaaaaaggccattggaatctttgttagtacgtctattgaagaagtcttttcctttcccttttataatcaacttctaacccaaacgcaaattgatctttataatcaacttctcggcggcatatctagggaagcaggcacagaaaaaatcaagggacttaatgaagttctcaatctggctatccaaaaaaatgatgaaacagcccatataatcgcgtccctgccgcatcgttttattcctctttttaaacaaattctttccgatcgaaatacgttatcctttattttggaagaattcaaaagcgatgaggaagtcatccaatccttctgcaaatataaaaccctcttgagaaacgaaaatgtactggagactgcagaagcccttttcaatgaattaaattccattgatttgactcatatctttatttcccataaaaagttagaaaccatctcttcagcgctttgtgaccattgggataccttgcgcaatgcactttacgaaagacggatttctgaactcactggcaaaataacaaaaagtgccaaagaaaaagttcaaaggtcattaaaacatgaggatataaatctccaagaaattatttctgctgcaggaaaagaactatcagaagcattcaaacaaaaaacaagtgaaattctttcccatgcccatgctgcacttgaccagcctcttcccacaacattaaaaaaacaggaagaaaaagaaatcctcaaatcacagctcgattcgcttttaggcctttatcatcttcttgattggtttgctgtcgatgaaagcaatgaagtcgacccagaattctcagcacggctgacaggcattaaactagaaatggaaccaagcctttcgttttataataaagcaagaaattatgcgacaaaaaagccctattcggtggaaaaatttaaattgaattttcaaatgccaacccttgcctctggttgggatgtcaataaagaaaaaaataatggagctattttattcgtaaaaaatggtctctattaccttggtatcatgcctaaacagaaggggcgctataaagccctgtcttttgagccgacagaaaaaacatcagaaggattcgataagatgtactatgactacttcccagatgccgcaaaaatgattcctaagtgttccactcagctaaaggctgtaaccgctcattttcaaactcataccacccccattcttctctcaaataatttcattgaacctcttgaaatcacaaaagaaatttatgacctgaacaatcctgaaaaggagcctaaaaagtttcaaacggcttatgcaaagaagacaggcgatcaaaaaggctatagagaagcgctttgcaaatggattgactttacgcgggattttctctctaaatatacgaaaacaacttcaatcgatttatcttcactccgcccttcttcgcaatataaagatttaggggaatattacgccgaactgaatccgcttctctatcatatctccttccaacgaattgctgaaaaggaaatcatggatgctgtagaaacgggaaaattgtatctgttccaaatctacaataaggattttgcgaagggccatcacgggaaaccaaatctccacaccctgtattggacaggtctcttcagtcctgaaaaccttgcgaaaaccagcatcaaacttaatggtcaagcagaattgttctatcgacctaaaagccgcatgaagcggatggcccatcgtcttggggaaaaaatgctgaacaaaaaactaaaggaccagaagacaccgattccagataccctctaccaagaactgtacgattatgtcaaccaccggctaagccatgatctttccgatgaagcaagggccctgcttccaaatgttatcaccaaagaagtctcccatgaaattataaaggatcggcggtttacttccgataaatttttcttccatgttcccattacactgaattatcaagcagccaatagtcccagtaaattcaaccagcgtgtcaatgcctaccttaaggagcatccggaaacgcccatcattggtatcgatcgtggagaacgcaatctaatctatattaccgtcattgacagtactgggaaaattttggagcagcgttccctgaataccatccagcaatttgactaccaaaaaaaattggacaacagggaaaaagagcgtgttgccgcccgtcaagcctggtccgtcgtcggaacgatcaaagaccttaaacaaggctacttgtcacaggtcatccatgaaattgtagacctgatgattcattaccaagctgttgtcgtccttgaaaacctcaacttcggatttaaatcaaaacggacaggcattgccgaaaaagcagtctaccaacaatttgaaaagatgctaatagataaactcaactgtttggttctcaaagattatcctgctgagaaagtgggaggcgtcttaaacccgtatcaacttacagatcagttcacgagctttgcaaaaatgggcacgcaaagcggcttccttttctatgtaccggccccttatacctcaaagattgatcccctgactggttttgtcgatccctttgtatggaagaccattaaaaatcatgaaagtcggaagcatttcctagaaggatttgatttcctgcattatgatgtcaaaacaggtgattttatcctccattttaaaatgaatcggaatctctctttccagagagggcttcctggcttcatgccagcttgggatattgttttcgaaaagaatgaaacccaatttgatgcaaaagggacgcccttcattgcaggaaaacgaattgttcctgtaatcgaaaatcatcgttttacgggtcgttacagagacctctatcccgctaatgaactcattgcccttctggaagaaaaaggcattgtctttagagacggaagtaatatattacccaaacttttagaaaatgatgattctcatgcaattgatacgatggtcgccttgattcgcagtgtactccaaatgagaaacagcaatgccgcaacgggggaagactacatcaactctcccgttagggatctgaacggggtgtgtttcgacagtcgattccaaaatccagaatggccaatggatgcggatgccaacggagcttatcatattgccttaaaagggcagcttcttctgaaccacctcaaagaaagcaaagatctgaaattacaaaacggcatcagcaaccaagattggctggcctacattcaggaactgagaaactga

SEQ ID NO: 35 - protein, 1307 aa, Acidaminococcus sp.
  Acidaminococcus sp. (strain BV3L6)
MTQFEGFTNLYQVSKTLRFELIPQGKTLKHIQEQGFIEEDKARNDHYKELKPIIDRIYKTYADQCLQLVQLDWENLSAAIDSYRKEKTEETRNALIEEQATYRNAIHDYFIGRTDNLTDAINKRHAEIYKGLFKAELFNGKVLKQLGTVTTTEHENALLRSFDKFTTYFSGFYENRKNVFSAEDISTAIPHRIVQDNFPKFKENCHIFTRLITAVPSLREHFENVKKAIGIFVSTSIEEVFSFPFYNQLLTQTQIDLYNQLLGGISREAGTEKIKGLNEVLNLAIQKNDETAHIIASLPHRFIPLFKQILSDRNTLSFILEEFKSDEEVIQSFCKYKTLLRNENVLETAEALFNELNSIDLTHIFISHKKLETISSALCDHWDTLRNALYERRISELTGKITKSAKEKVQRSLKHEDINLQEIISAAGKELSEAFKQKTSEILSHAHAALDQPLPTTLKKQEEKEILKSQLDSLLGLYHLLDWFAVDESNEVDPEFSARLTGIKLEMEPSLSFYNKARNYATKKPYSVEKFKLNFQMPTLASGWDVNKEKNNGAILFVKNGLYYLGIMPKQKGRYKALSFEPTEKTSEGFDKMYYDYFPDAAKMIPKCSTQLKAVTAHFQTHTTPILLSNNFIEPLEITKEIYDLNNPEKEPKKFQTAYAKKTGDQKGYREALCKWIDFTRDFLSKYTKTTSIDLSSLRPSSQYKDLGEYYAELNPLLYHISFQRIAEKEIMDAVETGKLYLFQIYNKDFAKGHHGKPNLHTLYWTGLFSPENLAKTSIKLNGQAELFYRPKSRMKRMAHRLGEKMLNKKLKDQKTPIPDTLYQELYDYVNHRLSHDLSDEARALLPNVITKEVSHEIIKDRRFTSDKFFFHVPITLNYQAANSPSKFNQRVNAYLKEHPETPIIGIDRGERNLIYITVIDSTGKILEQRSLNTIQQFDYQKKLDNREKERVAARQAWSVVGTIKDLKQGYLSQVIHEIVDLMIHYQAVVVLENLNFGFKSKRTGIAEKAVYQQFEKMLIDKLNCLVLKDYPAEKVGGVLNPYQLTDQFTSFAKMGTQSGFLFYVPAPYTSKIDPLTGFVDPFVWKTIKNHESRKHFLEGFDFLHYDVKTGDFILHFKMNRNLSFQRGLPGFMPAWDIVFEKNETQFDAKGTPFIAGKRIVPVIENHRFTGRYRDLYPANELIALLEEKGIVFRDGSNILPKLLENDDSHAIDTMVALIRSVLQMRNSNAATGEDYINSPVRDLNGVCFDSRFQNPEWPMDADANGAYHIALKGQLLLNHLKESKDLKLQNGISNQDWLAYIQELRN

SEQ ID NO: 36 - DNA, 3741 bp, Lachnospiraceae bacterium
  Lachnospiraceae bacterium (strain ND2006)
atgcttaagaatgttggaattgataggttagatgttgaaaaagggagaaaaaatatgtctaaattagagaagtttacaaattgttactctttgtcaaaaacacttcgttttaaggcgattcctgttggaaaaacccaagaaaatattgataataaaagattgcttgtcgaggatgaaaaacgtgcagaagattataagggggttaaaaaattacttgataggtattatttatcatttattaatgatgttcttcattccattaaactaaagaatttaaataattatatttcgttgtttagaaagaaaactcggacggaaaaagaaaacaaagaattagaaaatttagagataaatttacgtaaagaaatcgctaaggcttttaagggtaatgaaggttataaatctttatttaagaaggatattatcgagacgatattgcctgaatttcttgatgataaagatgaaattgctttggttaattcatttaatggatttacaacggcatttaccggtttttttgataatagggaaaatatgttttcggaagaagctaaatcaacctcaattgcttttcgttgtattaatgagaatttaacaagatatatatcaaatatggatatatttgaaaaagttgatgcaattttcgataagcatgaagtacaggaaataaaagaaaaaattctaaacagtgattatgatgttgaagatttcttcgaaggagaattttttaattttgttcttacgcaagaaggtatcgatgtttataacgctataattggtggctttgtgacagaatccggagaaaaaataaaaggattaaatgaatatattaatttatataatcagaaaactaagcaaaaattaccgaagtttaagcctttatataaacaggttttatcagatagagagtcactttctttttatggcgaaggttatacatctgatgaggaagttttagaagtatttagaaatactcttaataagaattcagaaatattttcttcaattaagaaattggaaaagttatttaaaaacttcgatgaatattcaagtgcaggaattttcgtaaaaaatggaccggctatttctacaatttctaaggatatatttggagagtggaatgtaattagagacaaatggaatgcggagtacgatgatatacatttaaaaaagaaggctgtagtaacagaaaaatatgaagatgacaggcgtaaatcattcaaaaaaataggaagtttttcattggagcagttgcaagaatacgctgatgctgatctatctgtggtagagaagttaaaagaaatcattatccaaaaagtggatgagatatataaagtttatggctcgtcagaaaaattgttcgatgctgattttgtactagaaaaatcgttaaaaaagaatgatgcagttgtagcaataatgaaagatttactagattctgtgaagtcttttgaaaattatataaaagccttttttggagagggaaaagaaacaaatcgagatgaatcattttatggtgattttgttttggcatatgacattcttttgaaagtggatcatatttatgatgcaatacgaaattatgtgacacaaaaaccgtattcgaaagataagtttaaattatattttcaaaacccgcaatttatggggggctgggataaggataaagagacagactatagggcaactatacttagatatggctcaaagtattacttggcgattatggataaaaaatatgctaagtgcttgcaaaaaatagataaggatgatgtaaatggaaactatgaaaaaataaattataagttgcttccaggacctaataagatgcttccaaaggtgttttttagtaagaagtggatggcttattataatccgtcggaagatattcaaaaaatatataaaaatggaacatttaaaaaaggagatatgtttaatttaaatgattgtcataaattaattgatttctttaaggattcaatcagtcggtatccgaaatggagtaacgcatatgattttaacttttctgagaccgagaaatataaggatatagcaggtttttacagagaggttgaagaacaaggatataaagtatcatttgaaagtgcgtctaaaaaagaagttgataaattggtagaagaaggaaaattatacatgttccaaatttataataaagacttttcggataaaagtcatggaacgccaaatcttcatacaatgtattttaagttgctgtttgatgaaaataatcatggtcaaattaggctttctggtggtgctgagctattcatgcgacgtgcaagtttgaaaaaggaagaattagttgtgcatcctgccaatagcccgatagcgaataaaaacccggataatccaaagaaaacgactacgttgtcatatgatgtatacaaggacaaaagattttcggaagatcagtatgagttgcatatacctattgcaataaataaatgccctaaaaatatatttaagataaatacagaggttagagtgctgctgaagcatgatgataatccttatgttataggaattgataggggggagagaaatttactttacattgtggtggttgatggtaagggtaatattgtggagcaatattcgctgaatgaaataattaataattttaatggaattagaattaagacggattaccattcacttttggataaaaaggagaaggaaagatttgaagctcgtcaaaattggacgtctatagaaaacattaaagaactaaaagccggatatattagtcaggttgttcataagatatgtgagttggtagaaaaatatgatgcggtaattgcacttgaagatttgaattctggttttaagaatagtcgagttaaagttgaaaagcaagtatatcagaaatttgaaaaaatgctgattgataaacttaactatatggtagataagaaatctaatccttgcgctacgggtggtgctctgaaaggctatcaaattactaacaagtttgagagttttaagtcgatgagtacacaaaatggttttattttttatattccggcgtggttgactagcaaaattgatccgtcaacaggatttgtaaatttgttgaaaacaaagtatacgagcattgcagattcaaagaaatttataagttcttttgacagaattatgtatgtacctgaagaagatttattcgagtttgcattagattataagaatttttctcggacagacgcggattatataaaaaaatggaaactctatagctatggtaacaggattagaatatttagaaatcctaaaaaaaataatgtatttgattgggaagaggtatgtcttacatcagcctataaggaactttttaataaatatgggattaattatcagcaaggagatatacgagctctcttatgtgaacagagtgataaggcattctatagctcttttatggcattaatgtcactcatgctgcaaatgagaaatagtataacaggtaggacggatgtagattttttgatttcaccagtaaaaaattctgacggtattttttatgattccagaaattatgaagctcaggaaaatgcaatattaccgaaaaatgcagatgctaatggggcttataatatcgcaagaaaagttttgtgggctataggtcagtttaaaaaggctgaagatgaaaaacttgataaggttaaaattgcaatatcaaataaggaatggctcgaatatgcgcaaacaagtgttaagcattga

SEQ ID NO: 37 - protein, 1228 aa, Lachnospiraceae bacterium
  Lachnospiraceae bacterium (strain ND2006)
MSKLEKFTNCYSLSKTLRFKAIPVGKTQENIDNKRLLVEDEKRAEDYKGVKKLLDRYYLSFINDVLHSIKLKNLNNYISLFRKKTRTEKENKELENLEINLRKEIAKAFKGNEGYKSLFKKDIIETILPEFLDDKDEIALVNSFNGFTTAFTGFFDNRENMFSEEAKSTSIAFRCINENLTRYISNMDIFEKVDAIFDKHEVQEIKEKILNSDYDVEDFFEGEFFNFVLTQEGIDVYNAIIGGFVTESGEKIKGLNEYINLYNQKTKQKLPKFKPLYKQVLSDRESLSFYGEGYTSDEEVLEVFRNTLNKNSEIFSSIKKLEKLFKNFDEYSSAGIFVKNGPAISTISKDIFGEWNVIRDKWNAEYDDIHLKKKAVVTEKYEDDRRKSFKKIGSFSLEQLQEYADADLSVVEKLKEIIIQKVDEIYKVYGSSEKLFDADFVLEKSLKKNDAVVAIMKDLLDSVKSFENYIKAFFGEGKETNRDESFYGDFVLAYDILLKVDHIYDAIRNYVTQKPYSKDKFKLYFQNPQFMGGWDKDKETDYRATILRYGSKYYLAIMDKKYAKCLQKIDKDDVNGNYEKINYKLLPGPNKMLPKVFFSKKWMAYYNPSEDIQKIYKNGTFKKGDMFNLNDCHKLIDFFKDSISRYPKWSNAYDFNFSETEKYKDIAGFYREVEEQGYKVSFESASKKEVDKLVEEGKLYMFQIYNKDFSDKSHGTPNLHTMYFKLLFDENNHGQIRLSGGAELFMRRASLKKEELVVHPANSPIANKNPDNPKKTTTLSYDVYKDKRFSEDQYELHIPIAINKCPKNIFKINTEVRVLLKHDDNPYVIGIDRGERNLLYIVVVDGKGNIVEQYSLNEIINNFNGIRIKTDYHSLLDKKEKERFEARQNWTSIENIKELKAGYISQVVHKICELVEKYDAVIALEDLNSGFKNSRVKVEKQVYQKFEKMLIDKLNYMVDKKSNPCATGGALKGYQITNKFESFKSMSTQNGFIFYIPAWLTSKIDPSTGFVNLLKTKYTSIADSKKFISSFDRIMYVPEEDLFEFALDYKNFSRTDADYIKKWKLYSYGNRIRIFRNPKKNNVFDWEEVCLTSAYKELFNKYGINYQQGDIRALLCEQSDKAFYSSFMALMSLMLQMRNSITGRTDVDFLISPVKNSDGIFYDSRNYEAQENAILPKNADANGAYNIARKVLWAIGQFKKAEDEKLDKVKIAISNKEWLEYAQTSVKH

SEQ ID NO: 38 - protein, 1064 aa, Bradyrhizobium sp.
  Bradyrhizobium sp. BTAi1
MKRTSLRAYRLGVDLGANSLGWFVVWLDDHGQPEGLGPGGVRIFPDGRNPQSKQSNAAGRRLARSARRRRDRYLQRRGKLMGLLVKHGLMPADEPARKRLECLDPYGLRAKALDEVLPLHHVGRALFHLNQRRGLFANRAIEQGDKDASAIKAAAGRLQTSMQACGARTLGEFLNRRHQLRATVRARSPVGGDVQARYEFYPTRAMVDAEFEAIWAAQAPHHPTMTAEAHDTIREAIFSQRAMKRPSIGKCSLDPATSQDDVDGFRCAWSHPLAQRFRIWQDVRNLAVVETGPTSSRLGKEDQDKVARALLQTDQLSFDEIRGLLGLPSDARFNLESDRRDHLKGDATGAILSARRHFGPAWHDRSLDRQIDIVALLESALDEAAIIASLGTTHSLDEAAAQRALSALLPDGYCRLGLRAIKRVLPLMEAGRTYAEAASAAGYDHALLPGGKLSPTGYLPYYGQWLQNDVVGSDDERDTNERRWGRLPNPTVHIGIGQLRRVVNELIRWHGPPAEITVELTRDLKLSPRRLAELEREQAENQRKNDKRTSLLRKLGLPASTHNLLKLRLWDEQGDVASECPYTGEAIGLERLVSDDVDIDHLIPFSISWDDSAANKVVCMRYANREKGNRTPFEAFGHRQGRPYDWADIAERAARLPRGKRWRFGPGARAQFEELGDFQARLLNETSWLARVAKQYLAAVTHPHRIHVLPGRLTALLRATWELNDLLPGSDDRAAKSRKDHRHHAIDALVAALTDQALLRRMANAHDDTRRKIEVLLPWPTFRIDLETRLKAMLVSHKPDHGLQARLHEDTAYGTVEHPETEDGANLVYRKTFVDISEKEIDRIRDRRLRDLVRAHVAGERQQGKTLKAAVLSFAQRRDIAGHPNGIRHVRLTKSIKPDYLVPIRDKAGRIYKSYNAGENAFVDILQAESGRWIARATTVFQANQANESHDAPAAQPIMRVFKGDMLRIDHAGAEKFVKIVRLSPSNNLLYLVEHHQAGVFQTRHDDPEDSFRWLFASFDKLREWNAELVRIDTLGQPWRRKRGLETGSEDATRIGWTRPKKWP

SEQ ID NO: 39 - protein, 1035 aa, Candidatus Puniceispirillum marinum
MRRLGLDLGTNSIGWCLLDLGDDGEPVSIFRTGARIFSDGRDPKSLGSLKATRREARLTRRRRDRFIQRQKNLINALVKYGLMPADEIQRQALAYKDPYPIRKKALDEAIDPYEMGRAIFHINQRRGFKSNRKSADNEAGVVKQSIADLEMKLGEAGARTIGEFLADRQATNDTVRARRLSGTNALYEFYPDRYMLEQEFDTLWAKQAAFNPSLYIEAARERLKEIVFFQRKLKPQEVGRCIFLSDEDRISKALPSFQRFRIYQELSNLAWIDHDGVAHRITASLALRDHLFDELEHKKKLTFKAMRAILRKQGVVDYPVGFNLESDNRDHLIGNLTSCIMRDAKKMIGSAWDRLDEEEQDSFILMLQDDQKGDDEVRSILTQQYGLSDDVAEDCLDVRLPDGHGSLSKKAIDRILPVLRDQGLIYYDAVKEAGLGEANLYDPYAALSDKLDYYGKALAGHVMGASGKFEDSDEKRYGTISNPTVHIALNQVRAVVNELIRLHGKPDEVVIEIGRDLPMGADGKRELERFQKEGRAKNERARDELKKLGHIDSRESRQKFQLWEQLAKEPVDRCCPFTGKMMSISDLFSDKVEIEHLLPFSLTLDDSMANKTVCFRQANRDKGNRAPFDAFGNSPAGYDWQEILGRSQNLPYAKRWRFLPDAMKRFEADGGFLERQLNDTRYISRYTTEYISTIIPKNKIWVVTGRLTSLLRGFWGLNSILRGHNTDDGTPAKKSRDDHRHHAIDAIVVGMTSRGLLQKVSKAARRSEDLDLTRLFEGRIDPWDGFRDEVKKHIDAIIVSHRPRKKSQGALHNDTAYGIVEHAENGASTVVHRVPITSLGKQSDIEKVRDPLIKSALLNETAGLSGKSFENAVQKWCADNSIKSLRIVETVSIIPITDKEGVAYKGYKGDGNAYMDIYQDPTSSKWKGEIVSRFDANQKGFIPSWQSQFPTARLIMRLRINDLLKLQDGEIEEIYRVQRLSGSKILMAPHTEANVDARDRDKNDTFKLTSKSPGKLQSASARKVHISPTGLIREG

SEQ ID NO: 40 - protein, 1358 aa, Acidaminococcus sp.
MGKMYYLGLDIGTNSVGYAVTDPSYHLLKFKGEPMWGAHVFAAGNQSAERRSFRTSRRRLDRRQQRVKLVQEIFAPVISPIDPRFFIRLHESALWRDDVAETDKHIFFNDPTYTDKEYYSDYPTIHHLIVDLMESSEKHDPRLVYLAVAWLVAHRGHFLNEVDKDNIGDVLSFDAFYPEFLAFLSDNGVSPWVCESKALQATLLSRNSVNDKYKALKSLIFGSQKPEDNFDANISEDGLIQLLAGKKVKVNKLFPQESNDASFTLNDKEDAIEEILGTLTPDECEWIAHIRRLFDWAIMKHALKDGRTISESKVKLYEQHHHDLTQLKYFVKTYLAKEYDDIFRNVDSETTKNYVAYSYHVKEVKGTLPKNKATQEEFCKYVLGKVKNIECSEADKVDFDEMIQRLTDNSFMPKQVSGENRVIPYQLYYYELKTILNKAASYLPFLTQCGKDAISNQDKLLSIMTFRIPYFVGPLRKDNSEHAWLERKAGKIYPWNFNDKVDLDKSEEAFIRRMTNTCTYYPGEDVLPLDSLIYEKFMILNEINNIRIDGYPISVDVKQQVFGLFEKKRRVTVKDIQNLLLSLGALDKHGKLTGIDTTIHSNYNTYHHFKSLMERGVLTRDDVERIVERMTYSDDTKRVRLWLNNNYGTLTADDVKHISRLRKHDFGRLSKMFLTGLKGVHKETGERASILDFMWNTNDNLMQLLSECYTFSDEITKLQEAYYAKAQLSLNDFLDSMYISNAVKRPIYRTLAVVNDIRKACGTAPKRIFIEMARDGESKKKRSVTRREQIKNLYRSIRKDFQQEVDFLEKILENKSDGQLQSDALYLYFAQLGRDMYTGDPIKLEHIKDQSFYNIDHIYPQSMVKDDSLDNKVLVQSEINGEKSSRYPLDAAIRNKMKPLWDAYYNHGLISLKKYQRLTRSTPFTDDEKWDFINRQLVETRQSTKALAILLKRKFPDTEIVYSKAGLSSDFRHEFGLVKSRNINDLHHAKDAFLAIVTGNVYHERFNRRWFMVNQPYSVKTKTLFTHSIKNGNFVAWNGEEDLGRIVKMLKQNKNTIHFTRFSFDRKEGLFDIQPLKASTGLVPRKAGLDVVKYGGYDKSTAAYYLLVRFTLEDKKTQHKLMMIPVEGLYKARIDHDKEFLTDYAQTTISEILQKDKQKVINIMFPMGTRHIKLNSMISIDGFYLSIGGKSSKGKSVLCHAMVPLIVPHKIECYIKAMESFARKFKENNKLRIVEKFDKITVEDNLNLYELFLQKLQHNPYNKFFSTQFDVLTNGRSTFTKLSPEEQVQTLLNILSIFKTCRSSGCDLKSINGSAQAARIMISADLTGLSKKYSDIRLVEQSASGLFVSKSQNLLEYL

SEQ ID NO: 41 - protein, 1358 aa, Acidaminococcus sp.; identical to SEQ ID NO: 40
  Acidaminococcus sp. D21

SEQ ID NO: 42 - protein, 1138 aa, Acidothermus cellulolyticus
MGGSEVGTVPVTWRLGVDVGERSIGLAAVSYEEDKPKEILAAVSWIHDGGVGDERSGASRLALRGMARRARRLRRFRRARLRDLDMLLSELGWTPLPDKNVSPVDAWLARKRLAEEYVVDETERRRLLGYAVSHMARHRGWRNPWTTIKDLKNLPQPSDSWERTRESLEARYSVSLEPGTVGQWAGYLLQRAPGIRLNPTQQSAGRRAELSNATAFETRLRQEDVLWELRCIADVQGLPEDVVSNVIDAVFCQKRPSVPAERIGRDPLDPSQLRASRACLEFQEYRIVAAVANLRIRDGSGSRPLSLEERNAVIEALLAQTERSLTWSDIALEILKLPNESDLTSVPEEDGPSSLAYSQFAPFDETSARIAEFIAKNRRKIPTFAQWWQEQDRTSRSDLVAALADNSIAGEEEQELLVHLPDAELEALEGLALPSGRVAYSRLTLSGLTRVMRDDGVDVHNARKTCFGVDDNWRPPLPALHEATGHPVVDRNLAILRKFLSSATMRWGPPQSIVVELARGASESRERQAEEEAARRAHRKANDRIRAELRASGLSDPSPADLVRARLLELYDCHCMYCGAPISWENSELDHIVPRTDGGSNRHENLAITCGACNKEKGRRPFASWAETSNRVQLRDVIDRVQKLKYSGNMYWTRDEFSRYKKSVVARLKRRTSDPEVIQSIESTGYAAVALRDRLLSYGEKNGVAQVAVFRGGVTAEARRWLDISIERLFSRVAIFAQSTSTKRLDRRHHAVDAVVLTTLTPGVAKTLADARSRRVSAEFWRRPSDVNRHSTEEPQSPAYRQWKESCSGLGDLLISTAARDSIAVAAPLRLRPTGALHEETLRAFSEHTVGAAWKGAELRRIVEPEVYAAFLALTDPGGRFLKVSPSEDVLPADENRHIVLSDRVLGPRDRVKLFPDDRGSIRVRGGAAYIASFHHARVFRWGSSHSPSFALLRVSLADLAVAGLLRDGVDVFTAELPPWTPAWRYASIALVKAVESGDAKQVGWLVPGDELDFGPEGVTTAAGDLSMFLKYFPERHWVVTGFEDDKRINLKPAFLSAEQAEVLRTERSDRPDTLTEAGEILAQFFPRCWRATVAKVLCHPGLTVIRRTALGQPRWRRGHLPYSWRPWSADPWSGGTP

SEQ ID NO: 43 - protein, 1045 aa, Acidovorax avenae
MQKEKPLAYRLALDLGSTSLGWAVLRLSAPGEPSAVIRAGSRIFSDGRNPKDGSSLAVTRRAARAMRRRRDRLLKRKARMLAALERHGFFPQDEAARKALEKLNPYGLRARGLESALKPEEFGRALFHLNQRRGFQSNRKTDRKDSDSGALKQAIGTLRAQMHESGCRTVGEWFWKVRMERKPEGVKGQGVRARYRETPFTTDEGKKRIDKRYDLYVDRAMVAQEFDALWAAQATFAPALFNEAARAELRDILLHQRKLRPVQPGRCTLVPEEPRALLALPSTQRFRIYQEVNHLRVLHDELREEALTLAQRDQIVALLERQAKVTFTAMRKALGFSALFNLEDAKRDGLKGNATTAALGKKDLFGPLWAGFDTALQDEIVTQLMTEESEPRLIAWLQEHTGVDEARAQAIANAGLPEGYGSLGRTALARIVPELQRDVITYDKAVQAAGFAHHSDLGFSFEHDADEVERIGERTIASTGEIKPVFAFKQLPYYGRALQRHVAFAKENPRNDEERYGKIANPTVHIGLNQVRVVVNALMCRYGRPTEVVIELARDLKQSREQKLEAQQRQADNQKRNARIRRSIAEVLGISEERVRTLDIQKWILWEELSHDAADRRCPYSGVQISASMLLGERVEIEHILPFSMTLDDSLNNRTVALREANRIKRNRTPWDARTDFEAHGWSYDGILQRAERMPQRKRHRFAPDGYERWLGEDKDFLARALNDTRYLSRVAAEYLRLVCPGSATRVIPGQMTALLRGKFGLNDVLGLDGEKNRNDHRHHAVDACVIGVTDQRMMQRFAQANAQAREDGLTRLVEDMPLPWPTYRAHVERAVRHIWVSHKPDHGFEGAMMEETSYGILRDGTIKQRRKADGSAGREISRLIRITEPSQPQRHGVDAEGRPLPYKGYVGGSNYCLEITVNDKGKWEGQVISTFDAYRIVREGGLRQLRHSTQGQNGQALAMRLVIGDSVRLEVDEQERVMRIVKINGNNGQVFMAPVHEANVDARNSDKNEAFAYTSKIAGSFQKTKARQVTISPIGELRDPGFKG

SEQ ID NO: 44 - protein, 1131 aa, Acidovorax ebreus
MAQHVFGLDIGIASVGWAILGEQRIIDLGVRCFDKAETAKEGDPLNLTRRQARLLRRRLYRRAWRLTQLSRLLKRKGLIADAKLFAKAPSYGDSAWELRRQGLDRLLTPLEWARVIYHQCKHRGFHWTSKAEEAKADSDAEGGRVKQGLAHTKALMQAKNYRSAAEMVLAEFPDAQRNKRGQYDKALSRVLLGEELALLFATQRRLGNPHASDFFEKLILGDGDRKSGLFWQQKPALSGADLLKMLGKCTFEKGEYRAPKASFSVERHVWLTRLNNLRIVVDGRSRPLNEAERQAALLLPYQTETSKYKTLKNAFIKAGLWGDGVRFGGLAYPSQAQIDAEKTKDPEDQFLVKLPAWHELRKAFKAAGHEALWQQISTPALDGDPTLLDQIATVLSVYKDGAEVVQQLRQLALPEPAASIAVLEKISFDKFSSLSLKALRRIVPLMQSGLRYDEAVAQIPEYGHHSQRIEPGAAKHLYLPPFYEAQRKYAGKGDHIGSMQFRDDADIPRNPVVLRALNQARKVVNALIREYGSPIAVNIEMARDLSRPLDERNKVKRAQEEFRDRNDRARSEFERDFGYKPKAAAFEKWMLYREQLGQCAYSQQPLDIQRVLDDHNYAQVDHALPYSRSYDDSKNNKVLVLTHENQNKGNRTAFEYLTSFPDGEDGERWRTFVAWVQGNKAYRMAKRNRLLRKNYGVDESKGFIDRNLNDTRYICKFFKNYVEEHLQLAARADGDTARRCVVVNGQLTAFLRARWGLTKVRGDSDRHHALDAAVVAACTHGMVKALADYSRRKEISFLQEGFPDPETGEILNPAAFDRARQHFPEPWTHFAHELKARLFTDDLAALREDMQRLGSYTTEDLGRLRTLFVSRAPQRRSGGAVHKETIYAQPESLKQQGGVIEKILLTSLKLQDFDKLLNPESNDHFVEPHRNERLYAAIRQRLEQFGGRADKAFGPDNLFHKPDKNNQPTGPVVRSIKLVRGKQTGIPIRGGLAKNDSMLRVDIFTKAGKFHLVPVYVHHRVTGLPNRAIVAFKDEDEWTLIDESFAFLFSVYPNDYVKVTLKKEQQSGYYSGADRSTGAMNLWAHDRAASVGKDGLIRGIGVKTALSVEKFNVDVLGRIYLAPPETRSGLA

SEQ ID NO: 45 - protein, 1056 aa, Actinobacillus minor
  Actinobacillus minor NM305
MKALNYILGLDLGIASVGWAVVEIDQNELPIRLIDLGVRTFERAEVPKTGDSLALARRLARSSRRLVRRRAVRLLKAKRLLKQEGILQADDFHSSHLKPLPNNPWELRVKGLNHLLDRKEWAAVLLHLLKHRGYLSQRKNESKTDNKELGALLKGVSENRQLLQAQAFSTPAEIAIKKFQQEEGHIRNQRGAYSHTFDRNDLLAELRLLFQKQREFNNPYTSQSLEQAIAELLMWQKPALSGEAILKMLGKCTFEPSEYKAPKNSYSAEYFVWLTKLNNLRILENGADRGLTAEERQLLINQPFEKAKFTYAQARKLLELSDLAIFKGVRYGKDNAESATLMEMKAWHAIRKALESNGLKTEWNGLKTKPELLDKIGTAFSIYKTDEDISQYLNGELSPAVLNALLENLSFDKFIRLSLQSLAKILPLMEQGLRYDEACKQVYGDHYGKKEQLELRFLPKIPVEDIRNPVVLRTLSQARKVINGVVRLYGSPARIHIETGREVGKSFSERRDISKRQEENRNERQRAVEKFKEFFPHFVGEPKAKDILKMRLYEQQHGKCLYSGKELDLNRLLEKGYVEIDHALPFSRTWDDSFNNKVLVLASENQNKGNQTPYEWLNGKENAERWKLFQALVNGSRFPYSKKQRILTKYLDEDGFRERNLNDTRYVARFLCNFIEDNMQLVGQGKKRVFASNGQITALLRRSWGIQKVREDNDRHHAVDAVVVACSTRALQKKITDYVRYKEMNVFTGEKIDQETGEIIKFHFPEPWKFFRQEVEIRVFSETPAEDVVIALPDRPQANHEFIQPLFVSRAPTRKMTGQGHMETIKSAKRLAEGLSVSRVPLTQLKLKDLENMVNREREKALYEALKVRLEKFNNDPAKAFADPFYKKGGQQVKAVRVEQVQKSGVLVRQENGVADNASMVRVDVFIKGGKYFLVPIYTWQVAKGILPNRAATQGKEEEYWDIMDETAIFQFSLYQNDLIKLVTKKKTIFGYFNGLNRATSNINIKEHDLDKSKGKDGIYLEVGVKLALSLEKYQVDELGKNIQPCRSMKKRPPVR

SEQ ID NO: 46 - protein, 1054 aa, Actinobacillus pleuropneumoniae
  Actinobacillus pleuropneumoniae serovar 10 str. D13039
MKLTPLNYILGLDLGIASVGWAVVEIDEQENPLGLIDVGVRTFDRAEVAKTGESLALARRLARSSRRLVKRRADRIKKVKRLLKSENILLSADEQLPNDVWQLRVKGLDQKLERQEWAAVLLHLLKHRGYLSQRKNESKSENKELGALRSGVAANHQILQSAEYRTPAEIAVKKFHVEEGHIRNQRGAYTHTFSRLDLLAEIELLFTRQTELGNPHTSAKLLENLTALLMWQKPALAGEAILKMLGKCTFEPTEYKAAKNSYSAERFVWLTKLNNLRILEQGAERALTDNERFALLDQPYEKAKFTYAQARTMLALPDEAIFKGVRYQGEDKKAVETKTILMEMKAYHQIRKALENADLKAEWNELKNNSELLDDIGTAFSLHKTDEDICRYLDGKLSESILNALLENLNFDKFIQLSLKALQQILPLMLQGQRYDEAVSAIYGDHYGKKSAEINRLLPTIPADEIRNPVVLRTLTQARKVINAVVRLYGSPARIHIETGREVGKSYQDRKKLEKQQEDNRKHRESAVQKFKEYFPNFVGEPKGKDILKMRLYELQQAKCLYSGKSLELHRLLEKGYVEVDHALPFSRTWDDSFNNKVLVLANENQNKGNLTPYEWLDGKNNSEPWQNFVARVQTSGFSHTKKQRILSHKLDEKGFIERNLNDTRYVVRFLCNFIADNMLLTGKGKRKVFASNGQITALLRGRWGLQKVRDDNDRHHALDAVVVACSTVAMQQKITRFVRYEEGNVFSGERIDRETGEIIPLHFPSPWAFFRENVEIRIFSENPKLELENRLPDYPQYNHEFVQPLFVSRMPTRKMTGQGHMETVKSAKRLDEGLSVLKVPLTQLKLNDLERMVNREREMALYESLKVRLEQFDNDPAKAFAEPFYKKGGALVKAVRVEQTQKSGVLVRDGNGVADNASMVRVDVFTKAGKYFLVPIYTWQVAKGILPNKAVTANVDEIDWLEMDESYQFIFTMYPNDLVKVKLKKEEFFGYYGGLDRATGAIVIKEHDLEKSKGRQGIYRIGVKLALSFEKYQVDELGKNIRPCRPTKRQHVR

SEQ ID NO: 47 - protein, 1062 aa, Actinobacillus succinogenes
MNLNYILGLDLGIASVGWAVVEIDEQENPQRLIDVGVRTFDRAEVLKTGESLALARRLARSSRRLVKRRAERIKKAKRLLKAENLLLSADEILPNEAWQLRVKGLDQKLERQEWAAVLLHLLKHRGYLSQRKNESKSENKELGALLSGVAINHQILQSAEYRTPAEIAVNKFQAEEGHIRNQRGAYTHTFSRLDLLAEMELLFQRQATLGNPHTSTKLLENLTALLMWQKPALAGEAILKMLGKCTFEPTEYKAAKNSYSAERFVWLTKLNNLRILEQGAERALTDNERFALLDQPYEKAKLTYAQVRTLLGLSDEAIFKGLRYQGEDKKAVETKTTLMEVKAYHQIRKALEGLDLKAEWNELKNNPALLDEIGTAFSLYKTDDDIHRYLDGKLSESVLNALLENLNFDKFIQLSLKALQQILPLMLQGQRYDEAVSAIYGDHYGKKSDEIDRLLPNIPTDEIRNPVVLRTLTQARKVINAVVRLYGSPARIHIETGREVGKSYQDRKKLEKQQEENRKQRENAVKKFKEYFPNFVGEPKGKDILKMRLYELQQAKCLYSGKSLELYRLLEKGYVEVDHALPFSRTWDDSFNNKVLVLANENQNKGNATPYEWLDGKNNSEGWQHFVARVQTSGFSYAKKQRVLIQELDEKSFIERNLNDTRYVARFLCNHIADNMLLTGKGKRKVFASNGQITALLRGCWGLQKVRENNDRHHALDAVVVACSTKSMQDKITKFVKYKEGRLFKDKKDGVYKGERINRETGEIISLHFPTPWKFFKENVEIRIFSENPKLELENRLPDYPQYNHEFVQPLFVSRMPTRKMTGQGHMETVKSAKRLDKGLSVLKVPLTQLKLSDLERMVNREREMALYEALKECLEQFGNDPAKAFAEPFYKKGGALVKAVRVEQTQKSGVLVRNGNGVADNATGSIVRVDVFTKGGKYFLVPIYTWQVAKGILPNKAVIQGKDESEWEEMDENAVFQFSMHKNDLIKVKTKKGEIFGYFNGLDRATGSIEIEEHDLEKSKGKNGSHRGLGVKTAFFLEKYQVDELGKNIRPCRPTKRQHVR

SEQ ID NO: 48 - protein, 1054 aa, Actinobacillus suis
MKLTPLNYILGLDLGIASVGWAVVEIDEQENPLGLIDVGVRTFDRAEVPKTGESLALARRLARSARRLVKRRADRIKKAKRLLKAENILLSADEHLPNDVWQLRVKGLDQKLERQEWAAVLLHLLKHRGYLSQRKNESKSENKELGALLSGVETNHQILQSAEYRTPAEIAVKKFHVEDGHIRNQRGAYTHTFSRLDLLAEMELLFQRQTDLGNPHTSAKLLENLTALLMWQKPALAGEAILKMLGKCTFEPTEYKAAKNSYSAERFVWLTKLNNLRILEQGAERALTDNERFALLDQPYEKAKFTYAQARTMLALPDEAIFKGVRYQGEDKKAVETKTILMEMKAYHQIRKALENADLKAEWNELKNNSELLDDIGTAFSLHKTDEDICRYLDGKLSESILNALLENLNFDKFIQLSLKALQQILPLMLQGQRYDEAVSAIYGDHYGKKSAEINRLLPTIPADEIRNPVVLRTLTQARKVINAVVRLYGSPARIHIETGREVGKSYQDRKKLEKQQEDNRKQRESAVKKFKEYFPNFVGEPKGKDILKMRLYELQQAKCLYSGKSLELHRLLEKGYVEVDHALPFSRTWDDSFNNKVLVLANENQNKGNLTPYEWLDGKNNSEHWQNFVARVQTSGFSHTKKQRILSHKLDEKGFIERNLNDTRYVARFLCNFIADNMLLTGKGKRKVFASNGQITALLRGRWGLQKVRDDNDRHHALDAVVVACSTVVMQQKITRFVRYEEGNVFSGERIDRETGEIIPLHFPSPWAFFRENVEIRIFSENPKLELENRLPDYPQYNHEFVQPLFVSRMPTRKMTGQGHMETVKSAKRLDEGLSVLKVPLTQLKLSDLERMVNREREVTLYESLKARLEQFGNDPAKAFAEPFHKKGGAVVKAVRVEQTQKSGVLVRDGNGVADNASMVRVDVFTKGGKYFLVPIYTWQVAKGILPNKAVTANVDEIDWLEMDESYQFIFTMYPNDLVKVKLKKEEFFGYYGGLDRATGAIVIKEHDLEKSKGKQGIYRIGVKLALSFEKYQVDELGKNIRPCRPTKRQHVR

SEQ ID NO: 49 - protein, 1105 aa, Actinomyces coleocanis
  Actinomyces coleocanis DSM 15436
MDNKNYRIGIDVGLNSIGFCAVEVDQHDTPLGFLNLSVYRHDAGIDPNGKKTNTTRLAMSGVARRTRRLFRKRKRRLAALDRFIEAQGWTLPDHADYKDPYTPWLVRAELAQTPIRDENDLHEKLAIAVRHIARHRGWRSPWVPVRSLHVEQPPSDQYLALKERVEAKTLLQMPEGATPAEMVVALDLSVDVNLRPKNREKTDTRPENKKPGFLGGKLMQSDNANELRKIAKIQGLDDALLRELIELVFAADSPKGASGELVGYDVLPGQHGKRRAEKAHPAFQRYRIASIVSNLRIRHLGSGADERLDVETQKRVFEYLLNAKPTADITWSDVAEEIGVERNLLMGTATQTADGERASAKPPVDVTNVAFATCKIKPLKEWWLNADYEARCVMVSALSHAEKLTEGTAAEVEVAEFLQNLSDEDNEKLDSFSLPIGRAAYSVDSLERLTKRMIENGEDLFEARVNEFGVSEDWRPPAEPIGARVGNPAVDRVLKAVNRYLMAAEAEWGAPLSVNIEHVREGFISKRQAVEIDRENQKRYQRNQAVRSQIADHINATSGVRGSDVTRYLAIQRQNGECLYCGTAITFVNSEMDHIVPRAGLGSTNTRDNLVATCERCNKSKSNKPFAVWAAECGIPGVSVAEALKRVDFWIADGFASSKEHRELQKGVKDRLKRKVSDPEIDNRSMESVAWMARELAHRVQYYFDEKHTGTKVRVFRGSLTSAARKASGFESRVNFIGGNGKTRLDRRHHAMDAATVAMLRNSVAKTLVLRGNIRASERAIGAAETWKSFRGENVADRQIFESWSENMRVLVEKFNLALYNDEVSIFSSLRLQLGNGKAHDDTITKLQMHKVGDAWSLTEIDRASTPALWCALTRQPDFTWKDGLPANEDRTIIVNGTHYGPLDKVGIFGKAAASLLVRGGSVDIGSAIHHARIYRIAGKKPTYGMVRVFAPDLLRYRNEDLFNVELPPQSVSMRYAEPKVREAIREGKAEYLGWLVVGDELLLDLSSETSGQIAELQQDFPGTTHWTVAGFFSPSRLRLRPVYLAQEGLGEDVSEGSKSIIAGQGWRPAVNKVFGSAMPEVIRRDGLGRKRRFSYSGLPVSWQG

SEQ ID NO: 50 - protein, 1113 aa, Actinomyces georgiae
  Actinomyces georgiae F0490
MSASSQNVERIRYKVGIDVGLRSIGFCAVQVDADDRPVKLLNTVVHVHDAGVSPADAKKADTRKLVSGVARRTRRLYRTRKRRLVDLDRQLDGLGWPLVDPARFADPREPWFAREKLVSGRVDDADERKELLSVALRHIAHHRGWRNPYSTVESLQADAPPSEFLQGLNQRVSEKLGTELDPGLTQGQLVAKLLHRFPNAKIRGPEGILRGKLHQSDNAGELRLICRTQGLDCHITEELVRLVFQAKSPKANKEMRKRIGRDQLPGQGAHIRAEKAHPVFQRFRIVAVLANLRIREAHVDRRLTAEEMRTLTDFLLGLAGSEQPTWEELADNLNIERHQLRGTAKASVDGAPALRFPPIDATTDRIYASKLKWLAEWWRQADEERRGYMVDALSNSGGSEDEPYLDDEIAEMLEQASEEDQAKLDSLHLPGGRASYCLDTLRRLTDAMLGGGLDLFEARKAVFHVDDDWAPPTDPIGAPVGNPPVDRVLKHVARWLEAATGRWGAPQTINIEHVREGLGSEKAARELTRMNDRRRRNNQKLVEEMGEKLGMSGRIRRSDRMRYEAIRRQNCECLYCGQPITYQTMEMDHIVPRAGAASTNSRSNLAAVCRRCNHQKGKLPFAVWAESQDSPAEVRLQDAVQRVRHWLRDAGMGQKELQALRVQVIARLKSKRPDEEFDGRSMESIAWMANELRARVEAQYRGSGTTVRVYRGALTAEARKASGFEGRVNLIGGRGKDRFDRRHHAMDALVIALMNQSVAQTLALRLNMRDSQWLTQSEQTWRQFHGAPGEAARKWEAWDRDMRDASDLFNLALDGGRIPITENVRLRVGNGRVHEDGVIRFKPEYEVKGKTIKGGEARLLGDSLPSEQIDRAETPALWTALTRLPEYDRKSGLPENPDRVIRVNGAVVQATDRIRFFGTPASVAVRGGYAKLGESIHHARIYRINGKTPKYAMIRVYTIDLMRLNHEDIFTAVLKPSTISMRCAEKKLKYAIAEGNAEQIGWLVEGDQLELDAAAYAKGVGADLMREYPMATCWRVAGFPDEAKLRLRPVLLAAEGMGEDAPKFMREVLENQGWRPAVNALLSPGSVRVVRRNVLGEPRFKSSGHLPTTVDLV

SEQ ID NO: 51 - protein, 1101 aa, Actinomyces naeslundii
  Actinomyces naeslundii str. Howell 279
MWYASLMSAHHLRVGIDVGTHSVGLATLRVDDHGTPIELLSALSHIHDSGVGKEGKKDHDTRKKLSGIARRARRLLHHRRTQLQQLDEVLRDLGFPIPTPGEFLDLNEQTDPYRVWRVRARLVEEKLPEELRGPAISMAVRHIARHRGWRNPYSKVESLLSPAEESPFMKALRERILATTGEVLDDGITPGQAMAQVALTHNISMRGPEGILGKLHQSDNANEIRKICARQGVSPDVCKQLLRAVFKADSPRGSAVSRVAPDPLPGQGSFRRAPKCDPEFQRFRIISIVANLRISETKGENRPLTADERRHVVTFLTEDSQADLTWVDVAEKLGVHRRDLRGTAVHTDDGERSAARPPIDATDRIMRQTKISSLKTWWEEADSEQRGAMIRYLYEDPTDSECAEIIAELPEEDQAKLDSLHLPAGRAAYSRESLTALSDHMLATTDDLHEARKRLFGVDDSWAPPAEAINAPVGNPSVDRTLKIVGRYLSAVESMWGTPEVIHVEHVRDGFTSERMADERDKANRRRYNDNQEAMKKIQRDYGKEGYISRGDIVRLDALELQGCACLYCGTTIGYHTCQLDHIVPQAGPGSNNRRGNLVAVCERCNRSKSNTPFAVWAQKCGIPHVGVKEAIGRVRGWRKQTPNTSSEDLTRLKKEVIARLRRTQEDPEIDERSMESVAWMANELHHRIAAAYPETTVMVYRGSITAAARKAAGIDSRINLIGEKGRKDRIDRRHHAVDASVVALMEASVAKTLAERSSLRGEQRLTGKEQTWKQYTGSTVGAREHFEMWRGHMLHLTELFNERLAEDKVYVTQNIRLRLSDGNAHTVNPSKLVSHRLGDGLTVQQIDRACTPALWCALTREKDFDEKNGLPAREDRAIRVHGHEIKSSDYIQVFSKRKKTDSDRDETPFGAIAVRGGFVEIGPSIHHARIYRVEGKKPVYAMLRVFTHDLLSQRHGDLFSAVIPPQSISMRCAEPKLRKAITTGNATYLGWVVVGDELEINVDSFTKYAIGRFLEDFPNTTRWRICGYDTNSKLTLKPIVLAAEGLENPSSAVNEIVELKGWRVAINVLTKVHPTVVRRDALGRPRYSSRSNLPTSWTIE

SEQ ID NO: 52 - protein, 1144 aa, Actinomyces sp.
  Actinomyces sp. ICM47
MSMIDSSENVPGIRYRVGIDVGLKSIGFCAVEVDRNDQPVRMLNSMVFIHDAGVDPNENKAAKSRKLTAGVARRTRRLYRTRHQRLVNLDRVLSKEFGWPLPDLTSFKDPREPWHVRAGLLEGYIADDEKRKEALSIALRHIARHRGWRNPYAKVETLLQPSEPSDFLKGLNDRISEELGRAFPADATPGQLVDTYLAHPDYVGRAGTPKLRGPQGILAGKLHQSDNAQEIRGICDVQRIEPAERDRLIRVVFEAKSPKGSAKERGLVGYDELPGQGRHVRAEKAHPAFQLFRMVSVLANLRIREGREERPLTPDELEDLVDFINQVSLKQEVTWQDLADKLRIERADLRGTAKASFDGSPVLRNPPTDVTTEKIMACKVKWLKEWWKEADDEQRGYMVDAFSNSGGSEDGTDVNDEVAELLEQATEDDQLEFEKISLPQGRAAYSLDSLRRLTDRMLRDGVDLHTARRLEFNVGDDWKPAVEPIGAPTGNPAVDRVLKQVSRWLHAATERWGEPTVINIEHARDGLGSERVARELMRENEKRRKANASAVAEMAAKLKLSGKVHRSDQIRYFALQRQNCQCLYCGAPITYTTAEMDHIVPRADGSSTNDRSNLAAVCRTCNHMKGKIPFAVWASSDKANQGVSLTGALERVNMWQRDSGMSPRQLKQLQREVCARLKSKKPDQEFDGRSMESVAWMAVELRTRIEGFYRSRDEESVPSVGVYRGQLTAEARRASGFESRVNLIGGRGKTRFDRRHHAMDALVIALMNPSVSRTLALRLNMRDAQRLTGVEETWKHFYGKPGEASKRFESWRESMLRGVELFNIALSDNAIPFVENIRLRVGSSVIHDATVHSFCPPKTPDGKQIITKGYGEQHSLGSAMPVELIDRAETPALWTALTRCPDFDPKKGLPENPQRTISVNGTRVGPTELVNFFEFSKSGPKACLKVRGGYVDLSGAIHHARIYRIAGKKTAYAMIRVFQVDLLRLKDHDVFTTPLKPSTISMRTAEPKIREALANGTATQIGWLVEGDELVIDTSKYSGGFIGEVLARYPEATSWRVAGFMTPAKLRIKPILLSKEGFVDETQAALLGVEVTSEAIQKTVDRPGWLPAVNVLFGAGGVRVIRRNCLGEERYHSSASLPVSMTLE

SEQ ID NO: 53 - protein, 1095 aa, Actinomyces sp.
  Actinomyces sp. oral taxon 175 str. F0384
MPAHHLRVGIDVGTHSVGLATLRVDDQGTPIELLSALSHIHDSGIGKEGQKDHDTRKKLSGVARRTRHLLRNRRERLQQLDKVLVDLGFPIPKPEEYPDLSERTDPYRVWRVRARLVEETLPEELRGPAISMAVRHIARHRGWRNPYSKVESLLSPAEESSFMKALRKRIMTKTGEVLDDDITPGQAMAQVALTHKIYMRGPEGILGKLHQSDNANEIRKICARQGISSDVCKQLLRAVFKAESPRGSAVSRVAPDPLPGQGSFRRAPKCDPEFQRFRIISIVANLRISETKGENRPLTVDERRQVVAFLMEDSQADLTWVDVAEKLRVSRQALRGTAMLTADGERSAAQPPIDVTDQIMRKTKISALKTWWDKADAERRGAMVRYLYEGLEDSECAEVIAKLPEKDHAKLDSLHLPAGRAAYSRESLTALSDHMLETTNDLHEARKRLFGVDDSWAPPAEPVGAPVGNPSVDRTLKIVARYLSAVESIWGTPEVIHVEHVRDGFTSERTAEERDKANRSRHNDNQKAIEKIQHDYGKEGYISRGDIVRFHALKLQGSACLYCGTTIGYHTCQLDHIVPQAGPGSNNRRGNLVAVCERCNHSKSNTPFAVWAQKCGIPHVGVKEAISRVNGWVEHNHSTSSGDLTRLKKEVIARLRRTQKDPEIDERSMESVAWMANELHHRIAAAYPETTVMVYRGSITAAARKAASIESRINLIGEKGRKDRLDRRHHAVDASVVALMEPSVAKTLAERSSLRGEQRLTGQEQTWKQYTGLTVGARERFEAWRGHMHRLTELFNESLAADEVYVTQNIRLRLSDGSAHTVKASKLVSHRLGDGLTVQQIDRACTPALWCALTREIDFDEKNGLPAREDRVIRVHGQEISSADCIQVFSKRKKTKSDRDEAPFGAIAVRGGFVEIGSSIHHARIYRIEGEKPAYAMLRVFTHDLLSQRHGDLFSAVIPPQSISMRCAATELRQAISEGRATYLGWIVSGDELHIPVETFTTHKIGSFLKDYPNTTRWRICGYDSETMLILKPRILSAEGLNNSSDIAEYVIKNKGWRVAINKLAKVHPTVVRRDALGRPRHSSRSNLPVTWSIE

SEQ ID NO: 54 - protein, 1181 aa, Actinomyces sp.
  Actinomyces sp. oral taxon 180 str. F0310
MLHCIAVIRVPPSEEPGFFETHADSCALCHHGCMTYAANDKAIRYRVGIDVGLRSIGFCAVEVDDEDHPIRILNSVVHVHDAGTGGPGETESLRKRSGVAARARRRGRAEKQRLKKLDVLLEELGWGVSSNELLDSHAPWHIRKRLVSEYIEDETERRQCLSVAMAHIARHRGWRNSFSKVDTLLLEQAPSDRMQGLKERVEDRTGLQFSEEVTQGELVATLLEHDGDVTIRGFVRKGGKATKVHGVLEGKYMQSDLVAELRQICRTQRVSETTFEKLVLSIFHSKEPAPSAARQRERVGLDELQLALDPAAKQPRAERAHPAFQKFKVVATLANMRIREQSAGERSLTSEELNRVARYLLNHTESESPTWDDVARKLEVPRHRLRGSSRASLETGGGLTYPPVDDTTVRVMSAEVDWLADWWDCANDESRGHMIDAISNGCGSEPDDVEDEEVNELISSATAEDMLKLELLAKKLPSGRVAYSLKTLREVTAAILETGDDLSQAITRLYGVDPGWVPTPAPIEAPVGNPSVDRVLKQVARWLKFASKRWGVPQTVNIEHTREGLKSASLLEEERERWERFEARREIRQKEMYKRLGISGPFRRSDQVRYEILDLQDCACLYCGNEINFQTFEVDHIIPRVDASSDSRRTNLAAVCHSCNSAKGGLAFGQWVKRGDCPSGVSLENAIKRVRSWSKDRLGLTEKAMGKRKSEVISRLKTEMPYEEFDGRSMESVAWMAIELKKRIEGYFNSDRPEGCAAVQVNAYSGRLTACARRAAHVDKRVRLIRLKGDDGHHKNRFDRRNHAMDALVIALMTPAIARTIAVREDRREAQQLTRAFESWKNFLGSEERMQDRWESWIGDVEYACDRLNELIDADKIPVTENLRLRNSGKLHADQPESLKKARRGSKRPRPQRYVLGDALPADVINRVTDPGLWTALVRAPGFDSQLGLPADLNRGLKLRGKRISADFPIDYFPTDSPALAVQGGYVGLEFHHARLYRIIGPKEKVKYALLRVCAIDLCGIDCDDLFEVELKPSSISMRTADAKLKEAMGNGSAKQIGWLVLGDEIQIDPTKFPKQSIGKFLKECGPVSSWRVSALDTPSKITLKPRLLSNEPLLKTSRVGGHESDLVVAECVEKIMKKTGWVVEINALCQSGLIRVIRRNALGEVRTSPKSGLPISLNLR

SEQ ID NO: 55 - protein, 1103 aa, Actinomyces sp.
  Actinomyces sp. oral taxon 181 str. F0379
MTKINDDLRYRVGIDVGLKSIGFCAVEVDENDQPLRLLNSMVFVHDAGVDPNENKAAKSRKLTAGVARRTQRGTAQNRRRLAELDRALSEELNWPLPNLEDFEDSYEPWHTRAELVEHYIKDDAERAEALAIAIRHIARHRGWRNPYLSVDSLLTPQEPSKFLRGLNERVTQALGREFPADATPGQLICAYIDSPKYAETQGIRGDSGILSGKLHQFDNVGEIRKICEVQRLDHDVFKLLVRKVFFAKSPRGSAAGLVGHDQIPGQGKYIRAEKAHPDFQLFRIVAVLTNLRIREGKAERCLTPDELRGLVDYILEVQLKQQVTWADLADNLGIERTDLRGTARASFDGSPALRFPPTDVTAEKIMASKVKWLKDWWDKADSERRGFMVDALSNSGGSTGDNDIDDEVAALLEAATEDEQAELEKIQLPQGRAAYSLDSLRRLTKRMLEEGVDLHTARKEEFNVDDDWRPEPEPIEAPVGNPAVDRVLKQVARWLNMATDRWGVPDVINIEHTRDGLGSEKVARELLRESQKRQDLNQKDMDKMIRELGISGKARRSSLIKYQAIQRQNSMCLYCGTEIGFETAEMDHIVPRALSGSTNDRSNLAAVCRACNHQKGAVPFAVWATSGEAHAGVSLEDAIKRVRLWQKGPGMSPKQHKAFQNEVISRLKSRKPDEEFDGRSMESVAWMAVELRTRIDGYYRKVNSDSVPKVGIYRGQLTAEARKASGFENRVNLIGGKGKTRFDRRHHAMDALVIAMMNQSVSQTLALRVNMRESQRITGQEETWKNFYGKPGQASERFEKWREGMLRAVELFNIELAKNAIPFHENVRLRVGSSKVHDDTVRKFIHAKLGEALSVAMIDCAETPALWTALTRLPDFDPKDGLPEDLSREIYIHSRKITADEQLNFFNSPSACLKVRGGYVEIGSSIHHARVYRIDGKKTTYSMVRVFATDLVKMTHEDVFTTPLKPSTISMRTADPKIRKALADGTATQIGWLVEGDELQLETDKYSGGLIGEVLAEYPQLTSWRVAGFYGVTQLRLRPYMLAAEGIPSDASESLRKVIEGKGWLPAINALLSSGCVKVVRRNCLGEPRFNAKSSLPVSQLLR

SEQ ID NO: 56 - protein, 1120 aa, Actinomyces sp.
  Actinomyces sp. oral taxon 848 str. F0332
MNAMKQYNAGIDVGINSVGFAAIEVDSKGLPLNILNNMVVLHDSGVDPGTAKTGATRLANSGTARRTRKLIARRRKRLQKLDRYIEVQGWPLVDFSSLPDPYTPWKIRAKLTQDRLEGEEQGRGLSIALRHMARHRGWRNPYEGVESLHSPKEASKQFKDLKDRVTKVSGVIFDEDATPAEVVCDIGLSPKQRLRSAPSAKYKEGATLADEPVGGKSKEGLLGGKLMQSDNANELRKIGIVQGLSNEKVNEIIDQVFASESPKGQAGKRAKKDELPGQEQYVRALRAHLAFQRFRIVAAVANLRILEAEPKHERLLSQSEKDKVIEFLMSADGDDGVTWSDVAEELGIERECLSGTAKRGADGERPSSFPPTNSTNISIVRSKVKPLIEWWRKASDDEQATLVTALSNADELTDDQPSAETVRQFLSSPDEQSQEKIDKISLPKGRAAYSVNSLERLTRRMLKDSVDLFEARKREFGVDNNWTPTPDSIGEPVGNPAVDRVLKIVNRWLLAVTRKWGPPKVVNIEHVRVGFTSAAQTRKYEEENKTNRERNLAILEELRDKFGTSGKIRREDITRFAALRRQNCQCAYCGEAITFFDCEMDHIVPRKGPGSTNTRNNLVAICERCNKSKSNMPFSLWAQNCDIPGVSVEAVIDRVRTWIKDPELNPKQYNNFKKDVIERLRKTVDDDAIDNRSIESVAWMATELADRIGSHFRTAGANTKVRVYRGWLTSEARKASGFEGKINLIGGRGKTRLDRRHHAMDAATIALMRQSVAQTLVERASIRESDRLRRVVSSSWKDYRGADRDKQFSYGSWLNSMNALAELFNRAIDADGIPVTQNLRLRLGNGEAHDATIRSLEKKRVGASWTIGEIDRASTPQLWLALTRQEDFDQNDGLPANASRELRVKNHWFHAEENVTLFPTKSAAIAVRGGYAEIGNTIHHARLYKLPGKKLTYGMIRVFAIDLLCAWHTDLFSSPLLPESISLRTAETKVRRAVEDGAAMYIGWLVDGDEIVLDPETKAFKSNKIGEYLCEFPGTKRWKVDGFPDKEKLRLRPLQLAGEGLPEDVSAGTEEILGPKGNGWRVAINALFKSSQLVVVRRTALGMVRKLSRRHLPLTTRLRG

SEQ ID NO: 57 - protein, 1114 aa, Actinomyces turicensis
  Actinomyces turicensis ACS-279-V-Col4
MQFHFYMVYVTMKGMNDKDASQQLRYRVGIDVGTHSIGFCAVEVDESGMPIQLLNSMVHKHDSGIDPGGNDTATTRLAEAGVARRTRRLIRRRKKRLQELDAFIEECGWPLVDLATITDARSPWRIRAHLATEHIDDEAEQGKLLSIALRHMARHRGWRSPYARISSLHIQADPSEQLKALAQRVSEKTGISLTADQTPAQLISVYLDVFETGKLRGPEGILGGKLMQSDNANELRRIATVQGLDNDLLKKIIGFVFAAESPKGSAAKRVGKDVLPGAHGLRAEKAHPAFQQFRIVSIVQNLRIKEGTGLRALTSEETEIVVDFLNQAGLTEAPTWEEVADNLEIPRSHLKGTATEGFDGIAPSTRPPFDVTSQKILNGKLKKLSAWWKDADYDHRCAMVNALSNVGSDDEGSLADDDVREFLSDFTDEELEALDKVELPGGRAAYSVDSLEKLTNTMLSEGCDLHSARKIAFGVDDSWTPPAEPIGQPVGNPAVDRVLKQVARWISAATNQWGTPESVNIEHVRDALGSEKASREYQRSLQTRRIRNEKLFAEMRERLDIGGKPRRSELTRYLALQRQNCQCLYCGMPITYTDAEMDHIVPRKGAASTNTRENFAAVCRACNHQKSNLPFAVWAEKTERPGVSVKEAYKRVSDMRIEPGMNGRQMNEFRKAIRLRLTTKHADAEIDGRSLESVAWMANELRHRIEGFYRSAENDVTVRVFRGAVTAEGRRASGFESRVNLIGGKGKTRLDRRHHAMDALTIALMEPGIAQTIALRMNMRESQRVLGEQETWKSFTGGSDTARKRWEHWCEEMLRASELFNVFLAEDRIPICQNKRLRLGSSAVHKAIVQPFEASDKRIVSDAMPVELIDRASTPALWTALTRDPDFDPKEGLPANPSRTIRLHDKRLGPNETVEFFPTAAACLAIRGGYCEIGAGIHHARIFRISGKKTTYAMLRVYQCDLVRFQKENLLTVELPANTISVRTAVPKLREALAHGTAEQIGWLVVGDELKIDLSGFTTGQIETFNETYPQATRWEVTGFPTKTQLRLKPLLIASEGLADDVPDDIVKIVKGPGWWPAIDKLLKIGNVVLYRRDTHGKPRVVSHRSLPLSSKLQ

SEQ ID NO: 58 - protein, 1101 aa, Akkermansia muciniphila
MSRSLTFSFDIGYASIGWAVIASASHDDADPSVCGCGTVLFPKDDCQAFKRREYRRLRRNIRSRRVRIERIGRLLVQAQIITPEMKETSGHPAPFYLASEALKGHRTLAPIELWHVLRWYAHNRGYDNNASWSNSLSEDGGNGEDTERVKHAQDLMDKHGTATMAETICRELKLEEGKADAPMEVSTPAYKNLNTAFPRLIVEKEVRRILELSAPLIPGLTAEIIELIAQHHPLTTEQRGVLLQHGIKLARRYRGSLLFGQLIPRFDNRIISRCPVTWAQVYEAELKKGNSEQSARERAEKLSKVPTANCPEFYEYRMARILCNIRADGEPLSAEIRRELMNQARQEGKLTKASLEKAISSRLGKETETNVSNYFTLHPDSEEALYLNPAVEVLQRSGIGQILSPSVYRIAANRLRRGKSVTPNYLLNLLKSRGESGEALEKKIEKESKKKEADYADTPLKPKYATGRAPYARTVLKKVVEEILDGEDPTRPARGEAHPDGELKAHDGCLYCLLDTDSSVNQHQKERRLDTMTNNHLVRHRMLILDRLLKDLIQDFADGQKDRISRVCVEVGKELTTFSAMDSKKIQRELTLRQKSHTDAVNRLKRKLPGKALSANLIRKCRIAMDMNWTCPFTGATYGDHELENLELEHIVPHSFRQSNALSSLVLTWPGVNRMKGQRTGYDFVEQEQENPVPDKPNLHICSLNNYRELVEKLDDKKGHEDDRRRKKKRKALLMVRGLSHKHQSQNHEAMKEIGMTEGMMTQSSHLMKLACKSIKTSLPDAHIDMIPGAVTAEVRKAWDVFGVFKELCPEAADPDSGKILKENLRSLTHLHHALDACVLGLIPYIIPAHHNGLLRRVLAMRRIPEKLIPQVRPVANQRHYVLNDDGRMMLRDLSASLKENIREQLMEQRVIQHVPADMGGALLKETMQRVLSVDGSGEDAMVSLSKKKDGKKEKNQVKASKLVGVFPEGPSKLKALKAAIEIDGNYGVALDPKPVVIRHIKVFKRIMALKEQNGGKPVRILKKGMLIHLTSSKDPKHAGVWRIESIQDSKGGVKLDLQRAHCAVPKNKTHECNWREVDLISLLKKYQMKRYPTSYTGTPR

SEQ ID NO: 59 - protein, 1113 aa, Alcanivorax pacificus
  Alcanivorax pacificus W11-5
MRYRVGLDLGTASVGAAVFSMDEQGNPMELIWHYERLFSEPLVPDMGQLKPKKAARRLARQQRRQIDRRASRLRRIAIVSRRLGIAPGRNDSGVHGNDVPTLRAMAVNERIELGQLRAVLLRMGKKRGYGGTFKAVRKVGEAGEVASGASRLEEEMVALASVQNKDSVTVGEYLAARVEHGLPSKLKVAANNEYYAPEYALFRQYLGLPAIKGRPDCLPNMYALRHQIEHEFERIWATQSQFHDVMKDHGVKEEIRNAIFFQRPLKSPADKVGRCSLQTNLPRAPRAQIAAQNFRIEKQMADLRWGMGRRAEMLNDHQKAVIRELLNQQKELSFRKIYKELERAGCPGPEGKGLNMDRAALGGRDDLSGNTTLAAWRKLGLEDRWQELDEVTQIQVINFLADLGSPEQLDTDDWSCRFMGKNGRPRNFSDEFVAFMNELRMTDGFDRLSKMGFEGGRSSYSIKALKALTEWMIAPHWRETPETHRVDEEAAIRECYPESLATPAQGGRQSKLEPPPLTGNEVVDVALRQVRHTINMMIDDLGSVPAQIVVEMAREMKGGVTRRNDIEKQNKRFASERKKAAQSIEENGKTPTPARILRYQLWIEQGHQCPYCESNISLEQALSGAYTNFEHILPRTLTQIGRKRSELVLAHRECNDEKGNRTPYQAFGHDDRRWRIVEQRANALPKKSSRKTRLLLLKDFEGEALTDESIDEFADRQLHESSWLAKVTTQWLSSLGSDVYVSRGSLTAELRRRWGLDTVIPQVRFESGMPVVDEEGAEITPEEFEKFRLQWEGHRVTREMRTDRRPDKRIDHRHHLVDAIVTALTSRSLYQQYAKAWKVADEKQRHGRVDVKVELPMPILTIRDIALEAVRSVRISHKPDRYPDGRFFEATAYGIAQRLDERSGEKVDWLVSRKSLTDLAPEKKSIDVDKVRANISRIVGEAIRLHISNIFEKRVSKGMTPQQALREPIEFQGNILRKVRCFYSKADDCVRIEHSSRRGHHYKMLLNDGFAYMEVPCKEGILYGVPNLVRPSEAVGIKRAPESGDFIRFYKGDTVKNIKTGRVYTIKQILGDGGGKLILTPVTETKPADLLSAKWGRLKVGGRNIHLLRLCAE

SEQ ID NO: 60 - protein, 1029 aa, Alicycliphilus denitrificans
  Alicycliphilus denitrificans BC
MRSLRYRLALDLGSTSLGWALFRLDACNRPTAVIKAGVRIFSDGRNPKDGSSLAVTRRAARAMRRRRDRLLKRKTRMQAKLVEHGFFPADAGKRKALEQLNPYALRAKGLQEALLPGEFARALFHINQRRGFKSNRKTDKKDNDSGVLKKAIGQLRQQMAEQGSRTVGEYLWTRLQQGQGVRARYREKPYTTEEGKKRIDKSYDLYIDRAMIEQEFDALWAAQAAFNPTLFHEAARADLKDTLLHQRPLRPVKPGRCTLLPEEERAPLALPSTQRFRIHQEVNHLRLLDENLREVALTLAQRDAVVTALETKAKLSFEQIRKLLKLSGSVQFNLEDAKRTELKGNATSAALARKELFGAAWSGFDEALQDEIVWQLVTEEGEGALIAWLQTHTGVDEARAQAIVDVSLPEGYGNLSRKALARIVPALRAAVITYDKAVQAAGFDHHSQLGFEYDASEVEDLVHPETGEIRSVFKQLPYYGKALQRHVAFGSGKPEDPDEKRYGKIANPTVHIGLNQVRMVVNALIRRYGRPTEVVIELARDLKQSREQKVEAQRRQADNQRRNARIRRSIAEVLGIGEERVRGSDIQKWICWEELSFDAADRRCPYSGVQISAAMLLSDEVEVEHILPFSKTLDDSLNNRTVAMRQANRIKRNRTPWDARAEFEAQGWSYEDILQRAERMPLRKRYRFAPDGYERWLGDDKDFLARALNDTRYLSRVAAEYLRLVCPGTRVIPGQLTALLRGKFGLNDVLGLDGEKNRNDHRHHAVDACVIGVTDQGLMQRFATASAQARGDGLTRLVDGMPMPWPTYRDHVERAVRHIWVSHRPDHGFEGAMMEETSYGIRKDGSIKQRRKADGSAGREISNLIRIHEATQPLRHGVSADGQPLAYKGYVGGSNYCIEITVNDKGKWEGEVISTFRAYGVVRAGGMGRLRNPHEGQNGRKLIMRLVIGDSVRLEVDGAERTMRIVKISGSNGQIFMAPIHEANVDARNTDKQDAFTYTSKYAGSLQKAKTRRVTISPIGEVRDPGFKG

SEQ ID NO: 61 - protein, 1029 aa, Alicycliphilus sp.; identical to SEQ ID NO: 60

SEQ ID NO: 62 - protein, 1146 aa, Alicyclobacillus hesperidum
  Alicyclobacillus hesperidum URH17-3-68
MAYRLGLDIGITSVGWAVVALEKDESGLKPVRIQDLGVRIFDKAEDSKTGASLALPRREARSARRRTRRRRHRLWRVKRLLEQHGILSMEQIEALYAQRTSSPDVYALRVAGLDRCLIAEEIARVLIHIAHRRGFQSNRKSEIKDSDAGKLLKAVQENENLMQSKGYRTVAEMLVSEATKTDAEGKLVHGKKHGYVSNVRNKAGEYRHTVSRQAIVDEVRKIFAAQRALGNDVMSEELEDSYLKILCSQRNFDDGPGGDSPYGHGSVSPDGVRQSIYERMVGSCTFETGEKRAPRSSYSFERFQLLTKVVNLRIYRQQEDGGRYPCELTQTERARVIDCAYEQTKITYGKLRKLLDMKDTESFAGLTYGLNRSRNKTEDTVFVEMKFYHEVRKALQRAGVFIQDLSIETLDQIGWILSVWKSDDNRRKKLSTLGLSDNVIEELLPLNGSKFGHLSLKAIRKILPFLEDGYSYDVACELAGYQFQGKTEYVKQRLLPPLGEGEVTNPVVRRALSQAIKVVNAVIRKHGSPESIHIELARELSKNLDERRKIEKAQKENQKNNEQIKDEIREILGSAHVTGRDIVKYKLFKQQQEFCMYSGEKLDVTRLFEPGYAEVDHIIPYGISFDDSYDNKVLVKTEQNRQKGNRTPLEYLRDKPEQKAKFIALVESIPLSQKKKNHLLMDKRAIDLEQEGFRERNLSDTRYITRALMNHIQAWLLFDETASTRSKRVVCVNGAVTAYMRARWGLTKDRDAGDKHHAADAVVVACIGDSLIQRVTKYDKFKRNALADRNRYVQQVSKSEGITQYVDKETGEVFTWESFDERKFLPNEPLEPWPFFRDELLARLSDDPSKNIRAIGLLTYSETEQIDPIFVSRMPTRKVTGAAHKETIRSPRIVKVDDNKGTEIQVVVSKVALTELKLTKDGEIKDYFRPEDDPRLYNTLRERLVQFGGDAKAAFKEPVYKISKDGSVRTPVRKVKIQEKLTLGVPVHGGRGIAENGGMVRIDVFAKGGKYYFVPIYVADVLKRELPNRLATAHKPYSEWRVVDDSYQFKFSLYPNDAVMIKPSREVDITYKDRKEPVGCRIMYFVSANIASASISLRTHDNSGELEGLGIQGLEVFEKYVVGPLGDTHPVYKERRMPFRVERKMN

SEQ ID NO: 63 - protein, 1052 aa, Aminomonas paucivorans
  Aminomonas paucivorans DSM 12260
MIGEHVRGGCLFDDHWTPNWGAFRLPNTVRTFTKAENPKDGSSLAEPRRQARGLRRRLRRKTQRLEDLRRLLAKEGVLSLSDLETLFRETPAKDPYQLRAEGLDRPLSFPEWVRVLYHITKHRGFQSNRRNPVEDGQERSRQEEEGKLLSGVGENERLLREGGYRTAGEMLARDPKFQDHRRNRAGDYSHTLSRSLLLEEARRLFQSQRTLGNPHASSNLEEAFLHLVAFQNPFASGEDIRNKAGHCSLEPDQIRAPRRSASAETFMLLQKTGNLRLIHRRTGEERPLTDKEREQIHLLAWKQEKVTHKTLRRHLEIPEEWLFTGLPYHRSGDKAEEKLFVHLAGIHEIRKALDKGPDPAVWDTLRSRRDLLDSIADTLTFYKNEDEILPRLESLGLSPENARALAPLSFSGTAHLSLSALGKLLPHLEEGKSYTQARADAGYAAPPPDRHPKLPPLEEADWRNPVVFRALTQTRKVVNALVRRYGPPWCIHLETARELSQPAKVRRRIETEQQANEKKKQQAEREFLDIVGTAPGPGDLLKMRLWREQGGFCPYCEEYLNPTRLAEPGYAEMDHILPYSRSLDNGWHNRVLVHGKDNRDKGNRTPFEAFGGDTARWDRLVAWVQASHLSAPKKRNLLREDFGEEAERELKDRNLTDTRFITKTAATLLRDRLTFHPEAPKDPVMTLNGRLTAFLRKQWGLHKNRKNGDLHHALDAAVLAVASRSFVYRLSSHNAAWGELPRGREAENGFSLPYPAFRSEVLARLCPTREEILLRLDQGGVGYDEAFRNGLRPVFVSRAPSRRLRGKAHMETLRSPKWKDHPEGPRTASRIPLKDLNLEKLERMVGKDRDRKLYEALRERLAAFGGNGKKAFVAPFRKPCRSGEGPLVRSLRIFDSGYSGVELRDGGEVYAVADHESMVRVDVYAKKNRFYLVPVYVADVARGIVKNRAIVAHKSEEEWDLVDGSFDFRFSLFPGDLVEIEKKDGAYLGYYKSCHRGDGRLLLDRHDRMPRESDCGTFYVSTRKDVLSMSKYQVDPLGEIRLVGSEKPPFVL

SEQ ID NO: 64 - protein, 1361 aa, Anaerococcus tetradius
  Anaerococcus tetradius ATCC 35098
MGNYYLGLDIGTNSVGWAVTDENYNIERFKKKNMWGIRLFDEAKTAESRRIHRQARRMRQRKIQRLNLLMELFDVEISKVDESFFIRKKESDLHYEDKSQDSRYALFNDKEFNDKDYHNKYPTIFHLIMDLIENDEKKDIRLLYLACHYLIKNRGHFIFEGQKFDVNSSLNNNINKLKSHLDQFYNICLDFDNDKLIEILVNQNLNISEKSKKIKELLRKTNLEVGIANLIAGGSIKLSNMFDDDELKNLDYNSLSFKNSNFDEGRELFEEVLEDRFELVEILKDIHDASVLETMLSSASISPDGGKYISSSMINSYNKHKRDLKLLKKIIKKYKKSEYDNIFRDENIKNNYLSYTRTGINKNKKVQAEDNTDSDGFYKYIVKILKDIKENDSDEDIKYILSEIDKKNFVPKQRTKENSVIPYQLREIELRKIIDNQSKYHKFLNEVDEKGISVKEKIISLLTFRIPYYIGPLNPSYNEEKNFTTSWVKRLAKGKVTPWNFEDMVDIDASREAFIENKLNKCSFLLDETVLPKDSLLYQEYMVLNELNNLKINGQSINTDLKKSIYEELFKKYKKVTRKRLISYIKEKENMSGDIVITGIDGDFKQGLKSYIAFKDIIGEKIDDDIYRKEVEKIIRDISLYGDDKSFIQKKIKNENKLDLSDDQISKIAKLKFKDWGRFSKKLLVGIKASDKNTGEIDNIIGFMRNYNYNIMQLMANVFTFKDEIEKLNSKYYTDEKINIDYLDDLYLSSPAKRMLWQSFQIVDEIKNIKNSDPKKIFIEMARSKEDKPTRKMSRKSRLEKLYTDSKKQFIKLFGPDEYDKLNNEIKNKSESDFRWDNLYLYYTQFGRCMYSLDPIDLEELSNKNLYDQDHIYPKSKIYDDSIENRVLVKKQLNLDKSNEYPIPDRVLNKDKNKLLAFWKMLNEKELIGDKKYARLIRKSPFTDEELGDFIARQLVETRQATKETANMLKRLCPDSKIVYVKAKNVSDFRRKFDILKCRSINDLHHAHDAYLNIVVGNVFDTKFTSNPLNFIKNNSKNRSYNLEKIYDYDVIRNEKIAWLAERKEENQDGSIATVLKNLSKNDIRVTRRTYIKCEDLFDENIVRKGNGKFPIKENNNKSDTNKYGGYSGIKNAYFVLLEDEKHNRILEAIPSFIYKKEKNGEKGSVINYLQNILGIKSAKILRDKIKIGSLLKIDKFPYNLAGKSGNGILISGGVQLILDKNTSKYIKKIENYKYKLDENKDYQINIFDKLSKEENIKLFDLFVDKFENSIYKNRVNIKLKEIKLARPKFEHLSIEEQIKTLTQMLILFGRENNAVNLEYIGLPKNTGKTKINKKINNKDIKIINQSITGLYETEEDLANI

SEQ ID NO: 65 - protein, 1552 aa, Anaerophaga sp.
  Anaerophaga sp. HS1
MFSQRNNPYCELLQNVKQLYKEKFGKTNQVDNSIIYGFMKRILGLDLGTNSIGWALVENDENDRKGKIIGMGSRIIPMDMSELDNFNKGASISKTAERTRLRMTRRLRERHLLRRARLHRILNIMGFLPEHYRNSIDFIDKKGCFFEGQEPKIAYKPDKNSEQFCFLFTSSFHEMLEDFRKFQPELIQNRKKVPYDWTIYYLRKKALTQKISKEELAWIILNFNTKRGYYHLRGEDEDNQDNKKIKEFRALKVVNVTEREGANSSGKKWYDMELENGWVYSRQSNLPPNLEGKTIELIVSYTLDNNGNIKKDKNGKEKYSLSMPGEEDWNLVKIKTENDLKTSKKSVGEYIYDHLLKNPDQKIRGKLISTIERKFYKEELSRILKTQMNFYEELKNRELYQKCVEELYPNNKSHQQTLLQKDFIHLIVEDIIFYQRPLKSKRAFVNNCPLEYRVYVDKKSGELIKSGVKCIPKSHPLFQEFRLWQYVRNLRIYERERMVNGRLMVNVDVTNELLPDEEHIVRLFDLLNDRKSFKQDDVLRFVGIKSPKDRKRYSWNYPEDKELPGNETRHLILAWLKKVDGVPEDWLDPEKLKALWHLLYSVTDREEIIKGLHSFAKKYELPDTFVEHFKKIPRLEREYGSFSEKAIKKLLPLMRMGKYWKAEEIPADLLEKAQKIIDAEADDRISDEVREKLLHLKDISQLKGLPLWQASYLVYGRHSETGEVVKWRTSEDLEKYILQFKQHSLRNPVVEQVILEALRVVKDIWEHYGEGKEGFFNEIHVEIGRELKNPADKRKKITSQIQENENTNLRIKALLEELFNDPSVKNVRPYSPAQQEILRIYEDGVLNGQKEIPDDILKISKMARPSKSQLVKYKLWLEQKYRSPYTGEIIPLSQLFTSAYEIEHIIPQARYFDDSFSNKVICEAEVNREKGHQLAFEFITKRGGDEIELNFGKKVTILNVEEYQKFVKDHYGRSLRSLSKMRKLLMEDIPDDFIDRQLNDSRYISKVVRNLLSNIVRAEDENSLVSKHLITCTGGVTTRLKHEWGLNDVWNELITPRFVRLNKMGKEKFGEWINKKGKQVFQIQMPLELQKGFNKKRIDHRHHALDALVVACASRSHVNYLNNDSARANASETRYDLRNKLCYKDKTDSNGNYRWKFYKPWESFTEEAKNRLAGTVVSFKSNRRIMTRSSNRYFKWVDTSEGKKKKLVRQIKGDNQAIRKPLHKDTVLGKVSLRKEKKVSLSKAIDLWESIVDKPLKKRIQSLREQGYDKKLLLKYFKDRNNQFNGQDISRVNIYFFDNNLAARRVTLDASFNSEKRIDGITDSGIKKILYAHLQNEKYHGKKDEKGNEISPYELAFSPEGLEEMNANIKKLNGGKPHCPIYKVRLAETIGEKFKLGEKGNKNKKYVEAAKGTNLFFAVYVDEKGVRSFETIPFSVALERRKQKLAVVPEENENKEKLLFYLSPNDLVYVPDEDEKLIDYRQLSINPTRIYKMVSSSGTQCFFIPHFVASPIVQTMELGPNNKSERAWDGQMIKNVCYKLSVDRLGNVKIEK

SEQ ID NO: 66 - protein, 1515 aa, Anaerophaga thermohalophila
  Anaerophaga thermohalophila DSM 12881
MKRILGLDLGTNSIGWALVESDEEQKSGKIQGIGSRIIPMDQNELDNFNKGNTVSQTAERTRLRMVRRLRERHLLRRERLHRVLKEIGFLPEHYLEQIDFTEKPGGFLPGKEPKIAYKPDNFKDKYDFLFQDSYHEMLSDFQDKNPEFIQKRKKVPQDWTIYYLRKKALTAKITKEELAWIILNFNQKRGYYQLRGEDEDVAKNTKKEEFHALKVVKVKEREDSEGASGKWYDIELENGWVYPRQSNIRPDWEGKILELIVTYNLDKDGNIKTDKEGNEKRSFRMPNKDDWTLRKKRTENEIEKSGKTVGEYIYDNLLDAPDLKIRGKLVSTIERKYYRSELEQILTAQKKYHPELSNSELFNKCISNLYPNNDIHRKALLSKDFVHLIINDIIFYQRPLKSKRSTVSNCPLEYRVYVDKVTGEKKKVPLKCIPKSHPLYQEFRLWQYVKNLRLFEKERFENGRLLTNVDVTEQFLPDEDKYVELFEFLNGRKTFKQDDILKFAGIKSAKDRVKYYWNYPQEKEYPGNETRYLIESRLKKIENVPDEWLNYEKIEELWHLLYSVTDKVEIEKGLQSFAAKYQLPDLFVEVFKGFPRMEREYGAFSKKAIKKLLPLMRMGKYWKLENINPDLIEKVQKIIDGEADDNINDGIRERFSEINEMSDLRGMPLWKASYLVYGRHSEAAEVIRWRTSADLDQYIKDFKQHALRNPIVEQVVLEALRVVKDVWNYFGEGREKFFDEIHVEIGRDLKNPADKRQKIANQIQENENTNLRIKALLVELFNDPEVQNVRPYSPVQQQLLKIYEDGVLNAERDIPDDIQKISRMANPTRNQLIRYKLWLEQKYRSPYTGEIIPLNKLFTSEYEVEHIIPRARYFDDSFSNKIISEAEVNRKKDRMLAFEFIKKLGGSTIDLNYGKKVSVLTVEEYQQFVKDHYGINPHSRLKMQKLLMDEIPESFIERQLNDSRYISKMVRNLLSNIVREENENSPVAKQLITCSGSITNTLKQEWGLNDVWNTIITPRFERLNKMGEQKYGEWVNKEGKPVFQIQMPLELQKGFNKKRIDHRHHALDALIVASATRSHVNYLSNEAAKTNAKDTRFDLRNRLCYKEKRGQNRNFTWRFYKPWNTFTEDAKNALNDIVVSFKSNHRVINKSTNRYFKWENLPGGMKKKRLVRQEKGDNWAIRQSLHKDTVLGKVSLRKVKPVSLSVALDSWNNIVDKALKKKIRSLKDQGYDKKLMLKYFKDRRNEYNGENISRVNVYYFDEEMAARRVDLDTSFNSEKRIEGITDSGIKKIIYAHLKNEKYHGQKDDKGKDISPYELAFSPEGIAEMNANIKQLNGGKPHCPIYKVRLAEPVGEKFQLGETGNKTEKLVEVAKGTNLFFGVYANDEGVRSFATVPFYLAVEREKQGLPAVPQENENGDQLLFWLSPNDLVYVPSEEDAHFANPKQIELDNSRIYKMVSSTGTQCFFIPHFVATPIVQTIELGPNNKSERAWDGQMIKKVCYKLSVDRLGNVEIE

SEQ ID NO: 67 - protein, 1168 aa, Azospirillum lipoferum
MARPAFRAPRREHVNGWTPDPHRISKPFFILVSWHLLSRVVIDSSSGCFPGTSRDHTDKFAEWECAVQPYRLSFDLGTNSIGWGLLNLDRQGKPREIRALGSRIFSDGRDPQDKASLAVARRLARQMRRRRDRYLTRRTRLMGALVRFGLMPADPAARKRLEVAVDPYLARERATRERLEPFEIGRALFHLNQRRGYKPVRTATKPDEEAGKVKEAVERLEAAIAAAGAPTLGAWFAWRKTRGETLRARLAGKGKEAAYPFYPARRMLEAEFDTLWAEQARHHPDLLTAEAREILRHRIFHQRPLKPPPVGRCTLYPDDGRAPRALPSAQRLRLFQELASLRVIHLDLSERPLTPAERDRIVAFVQGRPPKAGRKPGKVQKSVPFEKLRGLLELPPGTGFSLESDKRPELLGDETGARIAPAFGPGWTALPLEEQDALVELLLTEAEPERAIAALTARWALDEATAAKLAGATLPDFHGRYGRRAVAELLPVLERETRGDPDGRVRPIRLDEAVKLLRGGKDHSDFSREGALLDALPYYGAVLERHVAFGTGNPADPEEKRVGRVANPTVHIALNQLRHLVNAILARHGRPEEIVIELARDLKRSAEDRRREDKRQADNQKRNEERKRLILSLGERPTPRNLLKLRLWEEQGPVENRRCPYSGETISMRMLLSEQVDIDHILPFSVSLDDSAANKVVCLREANRIKRNRSPWEAFGHDSERWAGILARAEALPKNKRWRFAPDALEKLEGEGGLRARHLNDTRHLSRLAVEYLRCVCPKVRVSPGRLTALLRRRWGIDAILAEADGPPPEVPAETLDPSPAEKNRADHRHHALDAVVIGCIDRSMVQRVQLAAASAEREAAAREDNIRRVLEGFKEEPWDGFRAELERRARTIVVSHRPEHGIGGALHKETAYGPVDPPEEGFNLVVRKPIDGLSKDEINSVRDPRLRRALIDRLAIRRRDANDPATALAKAAEDLAAQPASRGIRRVRVLKKESNPIRVEHGGNPSGPRSGGPFHKLLLAGEVHHVDVALRADGRRWVGHWVTLFEAHGGRGADGAAAPPRLGDGERFLMRLHKGDCLKLEHKGRVRVMQVVKLEPSSNSVVVVEPHQVKTDRSKHVKISCDQLRARGARRVTVDPLGRVRVHAPGARVGIGGDAGRTAMEPAEDIS

SEQ ID NO: 68 - protein, 1068 aa, Bacillus cereus
  Bacillus cereus BAG4X12-1
MRYVLGLDIGIASCGWAVINQEKERIEDLGVRIFDKAENPKDGKSLAAPRRDARSTRRTLRRKKHRMQRIKILLVKQGLLFKTELNHLYESATEFDVWNLRLDALERKLHPKEFARVLIHLAKRRGFKSNRKETTLSENGQILESISENQQIMEQQNYRTVGEMILKDKKFENHKRNKDGTYIGTVTRQQLQDEIQMIFHTQRLYKNDYATEEFESSYLEIWASQRPYASKDQIEKMIGYCTLEPKEKRTPKASWSFQYFVALQTINNLRLISKDKIEELSFEEKKQIMNLALEKPIVKYIDIRKLLSIPNDFQFNSLSYSADTVDTTLENKRCIELKEYHSINKVYKQVYGKNTPNLLPIDYDTIAYGLTIFKDDKDILEYLQNKYVNAKGKPIKNLAKKTYDDTFIQALLNLNFTKMGHLSFKALKNIIPFLEEGLSYDKACEKAGYNFKGTSYTERTKYLPVIPQNTNPVVHRALSQTRKVINAIIKKYGSPNAIHIETARELSKTFQERKEIDSRYQDNSKKNEHAIHKLKELGNINPSGINIVKFKLWSEQDGRCMYSGKYIEPHRLFEEGYTEVDHILPYSRSLDDSYNNKILTLGTENQRKGNKTPYEYMGNTSIWDEFETRVQSNKKINFKKQQKLLLQNFSYAREQEFIERNLNDTRYATIYLTSLIQQHLIFSESSSKKKVRTVSGIITSHLRSRWGFNKDRKEGHIHHALDAVIVAVTSNHMIQRVTKYYKLKELNKNLQAKQLPFPEPWEGFRLELEARISPNTQQYLKGIHFKNYADVNLSDIKPIFVSRMPKRSITGELHQETIRKFLGYNEKGKVLTAIKTKLEDIPFDANGDFPMYGKETDLYTYNAIKERYLSHEKDKRKSFQEPLYKPTKSGEIGPLIKSIKIMDTRTIVNPVNQGKGVVYNSKIARTDVFKKEDKYYLIPIYTIDLLKNILPHKAITAGKGYEDWTTIDSSFTFLFSLFPNDLIQIVPSKNKTIKARTTVSKKEILLPSLTGYFKGVHSGTAGITVETHDGSVIANVGSKQLLLFEKYQVDVLGHYTKIKEEKRMGMAI

SEQ ID NO: 69 - protein, 1078 aa, Bacillus cereus
  Bacillus cereus BAG4X2-1
MRYVLGLDIGIASCGWAVINQEKERIEDLGVRIFDKAENPKDGKSLAAPRRDARSTRRTLRRKKHRMQRIKVLLVKHGLLSKTELDHLYESATEVDVWNLRLDALERKLYPKEFARILIHLAKRRGFKSNRKETTLSENGQILESISENQQIMEKQNYRTVGEMILKDKKFENHKRNKNGTYVGTVTRQQLQDEIQMIFHAQRLYKNDYATEEFESSYLEIWASQRPYASKDQIEKMIGYCTLEPKEKRAPKASWSFQYFVALQTINNLRLISKDRIEELSFEEKKQIMNLALEKSIVKYIDIRKLLSVPNEFQFNSLSYSADTVDTAVESRKCIELKEYHSINKVYKQIYGENALNLLPKYYDTIAYGLTIFKDDKDILEYLQNKYVNAKGKPISNFANKTYDDTFIQALLNLNFTKMGHLSFKALKNIIPFLEEGLSYDKACEKAGYNFKGTSYTEQTKYLPVIPQNTNPVVHRALSQTRKVINAIIKKYGSPNAIHIETARELSKTFQERKEIDSMYQDNSKKNEHAIHKLKELGNINPSGINIVKFKLWNEQDGRCMYSGKYIEPHRLFEEGYTEVDHILPYSRSLDDSYNNKTLTLGTENQRKGNKIPYEYMGNTSIWNDFETRVQSNKKINKKKQQKLLLQHFSYAREQEFIERNLNDTRYATIYLSSLIQQHLIFSESSRKKKVHTVSGIITSHLRSRWGFNKDRKEGHIHHALDAVIVAVTSDHMIQRVTKYYKLKELNRNLQAKRMPFPEPWEGFRLELEARISPNTQQYLKGLRFKNYADVNLSEIKSIFVSRMPKHSITGELHQETIRKFIGYNEKGKVLTAIKTKLEDIPFDANGDFPMYGKESDLYTYNAIKERYLSHKKDKRKSFQEPLYKPTKSGGIGPLIKSIKIMDTRTIVNPVNQGKGVVYNSKIARTDVFKKEEKYYLIPIYTIDLMKNILPQKAITAGKGYEDWTTIDPSFTFLFSLFPNDLIQIVPSKNKTIKARTTVSKKEVLLPSLTGYFKGVHSGTAGITVETHDGSVIANVGSKQLLLIEKYQVDVLGNYTKIKEEKRIGLTTYNDNKKIAAC

SEQ ID NO: 70 - protein, 1069 aa, Bacillus cereus
  Bacillus cereus Rock1-15
MNYDIGLRIGITSCGWSIINKDLERIEDLGVRVFEKAENPDGTASAAPRREARKSRRKHRRKKHRIERIKRLIVQHDLLSKKELDSLYLSPFNIDVWNLQVEALERKLDNREFARVLIHLVQRRGFQTIRKSVEIQEEGKLLENVSENERIMKVNGYKTVGEMFSKHEKFTHHKRNKDGSYTSVVTRSLLLKEIKTIFNSQRILGNVFSTQKLESDYLYIWGSQRPTLTYEQLMSMVGNCIYEKKEKRAPKTSWAFQYFSLLQKINKLKVSDDNTLRKLSKEERDIVIELAFKKKNVSFVDIRKALKLNDNTKFNHLTYSHVVETKKVEKATFIELKGYHLIKKQLKDRNVELTQELQPKDYDAIAAASTFFKNDIEFRDYLRNQYLDSNGKRKSNIANKVFEDKVIAAVFELNFSKVCHLSFKSLYKLIPHLEKGLDYKEAILCAGYNFRDENKRDKKLFLPVIQQETNPVVHRALTQARKVINAIIREYGSPNTIRFVVANDLAKTYKQRKELESTLKKNRAENEKIKTKLLSMGIINPTGMDIVKYKLWYEQSGICLYTGRQMELSSLFKPGYSIVNHIIPYNRSFDDTYHNRVLTLTETKYEKGNKIPFEYFGAEETCWNEYEKRVSTSKKIHDKKREKLLIRNFDIEYENEMISNNVFDTHYIGSYFEKYIDEHLQFKKSTKKQKVFSIHGNMVAHLHSRWGFNKNSREIYLNHAVDAAIVAVLTDQLIRNIADYYRRDNILEQKGSLKFPEPWKSFSIELEARISPQVRDLIKKLNLDSYLDVDILHIKPVFISKKPRRKVNGEAHKSTIRSLIGINEIGKTVTCIKTRLEDIPFDENGDFPMYGKDTDKYTYTAIKERYLEFNKDKEKAFSTPLYKLKRNGEPGNQIKSVKIIDTRNIVNKVNQGKGIAYNSNIIRVDVFSRDQKYYVVPIYLRDFIKGSLPNKIITAAKGFMQWPETDNSYTFLFSIFPNDLIKVVPKEGKFIKAKNENKENINLTEILGYFKGLDSSTGAFTLESHDGSLLARGIGTKNLLLIEKYQVDVLGRYNKVGNEERQDIKIQQN

SEQ ID NO: 71 - protein, 1088 aa, Bacillus smithii
  Bacillus smithii 7_3_47FAA
MNYKMGLDIGIASVGWAVINLDLKRIEDLGVRIFDKAEHPQNGESLALPRRIARSARRRLRRRKHRLERIRRLLVSENVLTKEEMNLLFKQKKQIDVWQLRVDALERKLNNDELARVLLHLAKRRGFKSNRKSERNSKESSEFLKNIEENQSILAQYRSVGEMIVKDSKFAYHKRNKLDSYSNMIARDDLEREIKLIFEKQREFNNPVCTERLEEKYLNIWSSQRPFASKEDIEKKVGFCTFEPKEKRAPKATYTFQSFIVWEHINKLRLVSPDETRALTEIERNLLYKQAFSKNKMTYYDIRKLLNLSDDIHFKGLLYDPKSSLKQIENIRFLELDSYHKIRKCIENVYGKDGIRMFNETDIDTFGYALTIFKDDEDIVAYLQNEYITKNGKRVSNLANKVYDKSLIDELLNLSFSKFAHLSMKAIRNILPYMEQGEIYSKACELAGYNFTGPKKKEKALLLPVIPNIANPVVMRALTQSRKVVNAIIKKYGSPVSIHIELARDLSHSFDERKKIQKDQTENRKKNETAIKQLIEYELTKNPTGLDIVKFKLWSEQQGRCMYSLKPIELERLLEPGYVEVDHILPYSRSLDDSYANKVLVLTKENREKGNHTPVEYLGLGSERWKKFEKFVLANKQFSKKKKQNLLRLRYEETEEKEFKERNLNDTRYISKFFANFIKEHLKFADGDGGQKVYTINGKITAHLRSRWDFNKNREESDLHHAVDAVIVACATQGMIKKITEFYKAREQNKESAKKKEPIFPQPWPHFADELKARLSKFPQESIEAFALGNYDRKKLESLRPVFVSRMPKRSVTGAAHQETLRRCVGIDEQSGKIQTAVKTKLSDIKLDKDGHFPMYQKESDPRTYEAIRQRLLEHNNDPKKAFQEPLYKPKKNGEPGPVIRTVKIIDTKNKVVHLDGSKTVAYNSNIVRTDVFEKDGKYYCVPVYTMDIMKGTLPNKAIEANKPYSEWKEMTEEYTFQFSLFPNDLVRIVLPREKTIKTSTNEEIIIKDIFAYYKTIDSATGGLELISHDRNFSLRGVGSKTLKRFEKYQVDVLGNIHKVKGEKRVGLAAPTNQKKGKTVDSLQSVSD

SEQ ID NO: 72 - protein, 1069 aa, Bacillus thuringiensis
MNYDIGLRIGITSCGWSIINKDLERIEDLGVRVFEKAENPDGTASAAPRREARKSRRKHRRKKHRIERIKRLIVQHDLLSKKELDSLYLSPFNIDVWNLRVEALERKLDNREFARVLIHLVQRRGFQTIRKSVEIQEEGKLLENVSENERIMKVNGYKTVGEMFSKHEKFTHHKRNKDGSYTSVVTRSLLLKEIKTIFNSQRILGNVFSTQKLESDYLYIWGSQRPTLTYEQLMSMVGNCIYEKKEKRAPKTSWAFQYFSLLQKINKLKVSDDNTLRKLSKEERDIVIELAFKKKNVSFVDIRKALKLNDNTKFNHLTYSHVVETKKVEKATFIELKGYHLIKKQLKDRNVELTQELQPKDYDAIAAASTFFKNDIEFRDYLRNQYLDSNGKRKSNIANKVFEDKVIAAVFELNFSKVCHLSFKSLYKLIPHLEKGLDYKEAILCAGYNFRDENKRDKKLFLPVIQQETNPVVHRALTQARKVINAIIREYGSPNTIRFVVANDLAKTYKQRKELESTLKKNRAENEKIKTKLLSMGIINPTGMDIVKYKLWYEQSGICLYTGRQMELSSLFKPGYSIVNHIIPYNRSFDDTYHNRVLTLTETKYEKGNKIPFEYFGAEETCWNEYEKRVSTSKKIHDKKREKLLIRNFDIEYENEMISNNVFDTHYIGSYFEKYIDEHLQFKKSTKKQKVFSIHGNMVAHLHSRWGFNKNSREIYLNHAVDAAIVAVLTDQLIRNIADYYRRDNILEQKGSLKFPEPWKSFSIELEARISPQVRDLIKKLNLDSYLDVDILHIKPVFISKKPRRKVNGEAHKSTIRSLIGINEIGKTVTCIKTRLEDIPFDENGDFPMYGKDTDKYTYTAIKERYLEFNKDKEKAFSTPLYKLKRNGEPGNQIKSVKIIDTRNIVNKVNQGKGIAYNSNIIRVDVFSRDQKYYVVPIYLRDFIKGSLPNKIITAAKGFMQWPETDNSYTFLFSIFPNDLIKVVPKEGKFIKAKNENKENINLTEILGYFKGLDSSTGAFTLESHDGSLLARGIGTKNLLLIEKYQVDVLGRYNKVGNEERQDIKIQQN

SEQ ID NO: 73 - protein, 1509 aa, Bacteroides coprophilus
  Bacteroides coprophilus DSM 18228
MKKTLGLDLGTNSIGWAVINSNIDSEGKEKLVGISSCGSRIIPMDATTLGDFGKGNTKSPVAERTRLRGIRRLLERSLLRRERLHRVLSVMGFLPEHYASQLDRYGKFLPETEPKLAWYKDDSGRYQFLFQKSFHEMLEDFRQHQPELVAGEKKIPYDWTIYYLRKKALSQEITKEELAWILLNFNQKRGYYQLRGEEEQEENNKSVEYHALKVVSVEDSGERKGKDIWYNVTLENGWVYRRASNIPLDWTGKVKEFVVTTELDDAGNPKKDKEGNVKRSFRAPKEDDWGLLKTRTQAQIDESGKTVGTYIYESLLCMPNQKIRGKLVRTIERKYYKDELRQILVKQSEFHAALQDHNLLLSCIEELYPNNEAHRRLLSASSFIYFLIEDILFYQRPLKSQKGLIDNCPYESHIYKDKKDGSLHHVPLKCVSKSHPLFQEFRLWQFLSNLRIYQRERMMDGSLKLDVDVTREFLPSEEDYVKLFDWLNERKEISQKFLLAYKPFGLKKNEQANYRWNYVEDKSYPCNETRAEIKSRLSKAGVPEEFLTEEKEEALWHILYSISDKKELTKALGTFAAKNCLNESFVEVFAKIPPFESNYAAYSLKAIRKLLALMRMGKYWNEQAIDRQTRDRIEKILTGEYDETIRSRVREKAMLLTDISSFRGLPLWLACYIVYDRHSESKELVKWETPADIDHFLSKFKQNSLRNPIVEQVITESLRTVRDIWKQEGKIDEIHVELGREMKNPAKERARITAQVQENENTNLRIKALLAEFMNPEFEIENVHPYSPGQQEILRIYEDGVLSGIAEKDLPDDITAILKKFRENDVKKRPTTSEVLRYKLWLEQRYRSPYTGRVIPLGKLFTPAYEIEHVIPQSRYFDDSISNKVICESAVNKLKDNCLGYEFIKKHSGEMVELGNGETVPVFSVEEYERFVKESYFGNSKKMKKLLLEDIPDSFIERQLNDSRYISRVVTSLLSNLVCEEGEQDGLSKNVIVCTGGITDRLKKDWGVQEVWNRIILPRFLRLNEITGRTDFTSTSVNGHLLPALPLYLQKGFNKKRIDHRHHAMDAIVIACANRNIVNYLNNSSARKNSEISRYDLQRLLCEKVKTDANGNYKWILRKPWETFTQDVYAALTNIVVSFKQNLRVINRTTNYYQHYNEAGEKRMIPQTKGDRWAIRKPMHKDTVYGEVNLRKEKTLPLRDVVKNPSIVVDKSLKNKLYELLKSQYDLKAIAKYFETHQDVWADVNLKKIKVYYFTKETNERFFATRKSLDPSFDQKKIEEEVTDTGVQKILLHHLQQNNNDPDMAFSPDGIDRMNQNMTILNDGKWHQPIYKVRTYEKADKFAVGESGNKAKKFVEAAKGTNLFFAVYESVQEDEAIGKQVCKRTFATIPLNEVIKRKKQGLPAAPEDLNGNLPKFVLSPNDLVYLPTEEERNSSRIIQPLDRERIYKMVSSSGSQCFFIKVFVANSIWDKNEYSSLNKMERAITNEMIKEICVPIKIDRLGNVSLIQI

SEQ ID NO: 74 - protein, 1504 aa, Bacteroides coprosuis
  Bacteroides coprosuis DSM 18011
MKKVLGLDIGTNSVGWAVVNQNDKGEFLSIEKIGSRIIPMSQDVMDKFGAGQTESSTAQRTQYRGVRRLRERSLLRRERLHRVLHILHFLPQHYDAAIGWNKKENKTYGKFLPGVEVNIPWVATDQGHQFIFMDSYAEMLKDLKQHQPHLFEKSSTPVPLDWTIYYLRKKALTQAISKEELAWILLNFNQKRGYYQLRGEEVEDNTKREEFYALKVVKVELDKDNTSAKTWYKVHLENGFIYPCPSDTPIDSWVGMVKDFIVTTTLEKDGSEKRTADGEIKRSFRAPKEDDWTLLKKKTESELEKSGKQVGAFIYDTLLSNPDQKIIGGLIKTIERKYYKKELEQILETQQKFIAELSDKKLFQACAEELYPLNDSHRENLLERDFKHLFVQDIIFYHRPLKTKKSLISNCTYEYRTFYKNGEKQISPIKCIAKSNPLFQEFRVWQFVQNLRILQRQRSEGDSIKYNVDVTAEFLKDENDIANLFTWLNERKVIKQDQLLKSYFKLKVNKETKELDYRWNYVDDKNKEYPCNATRTHILSFLEKCKEEKRIEDDRFVYSLWHLLYSVVEPIELRGALAKFAEREHLHPSFVDVFAQFPPLEKEYGSYSEKAIKRLLPLMRMGDYWHEDKIDVKTKQRIQRIIDGEADDDITHRSREKVENLRSITDFKGLPLWKAGYVVYNRHSESGELTKWKTPHELSNYIQNEFKQYSLRNPIVEQIVLETLRVVHDLWVKHGDFSEIHLELGRDIKNSSDKRKRMAERQQENENSRQRVLEMLIDLKKEAAFADLNPYSPSQQEKLRIVEDGVLRSNIEIPKDIEKITKSAKPTSRELTKYRLWLDQKYRSPYTGQPISLAQLFTSKYEIEHVIPQAKYFDDSFTNKVICESEVNKEKGSMLAHEFILKNGGSTVNVGGRQVQVLKNDAYVELINRLYGKNNPVKAKKLLAEDIDEVVGDFSERQLNDTRYISRVVQKLLSNIVREEDEQESTSKHVIGCSGQVTTALKKDWGLNDIWNKIIQPRFERLNEMTATEDYGVWQSPNHFQIRVPEEIQKGFTKKRIDHRHHAMDALVIACATRSHINYISNRSGQDRNAKFETTRTDLRSKLCYKENSSGNNYNYIFNKPWDTFTQDAHRALENIVVSHKQNLRVLTKTNNYTQFINKDGKKDLQKQVKGDHFAVRKPMHQETIYGRVSIRSIKEVALKKALENWKQIVDRTLKDKIRELIGAYGKYDAQTILKYFKDRDYKFNNLKINRVEVYEYDHNCAAVRKSIGDDLTIKQIERITDESIRKILMNHLSNYDDNLKEAFSPEGLMEMNKNIKELNGGKNHQPIYKVRLFEDLGSKFPLGVSHNNPDKYAIAAKGTNLFFGIYEDQEGKRMFDSIPLNIVIDRLKEKKSPVPETYNESKLKFHLSPNDLVYVPTDEEQKQPELVDVDHLSDEQKGRVYKAVSFTGNRAFFVNHRVSKVIHDYVEFGTKNKIENDDDKRSLKHICWKLKVNRLGEITDVKR

SEQ ID NO: 75 - protein, 1504 aa, Bacteroides dorei
  Bacteroides dorei DSM 17855
MKNIVGLDLGTNSIGWAVVNGSVNDDGSEQLVKIQASGSRIIPMDAAMIGDFNKGNSISQTAERTRLRGVRRLSERYLLRRERLHRILDILGFLPFHFAQDLDRHGKIVKGKEPKLAWRKNEAGQFEFIFQDSFKEMLEDFKLNYPNLITDDKKVPYDWTIYYLRKKGLTSKISKEELAWILLNFNQKRGYYQLRGEEEEENKDKLVEFYALKVVAVEDSGEKKGKDIWYNVHLENGWVYRRTSNMSLDWVGKTKEFIVTTDLEKDGTPKKDKEGNVKRSFRAPKEDDWSLVKKKTEADIDQTHKTVGAYIYDTLLGNPSQKIRGRLVRTIERKYYKEELKLILEKQKEFHLELQDRALYAACIEELYPINEAHRNNVGNRDFTYLFLEDILFYQRPLKSKKSLIDNCPYEENQGLDKETGEIKSFPVKCIAKSHPLFQEFRLWQFIINLRIYRKDLAQDVDVTNELLKTEEDYVALFDWLNGKKEIDQKAFLKYPVFGLKKEIENYRWNYVQDKPYPCNETRSLMLARLEKCDISIEFLTKENEEALWHILYSVEDKNEIVKALQKFADKHDLNASFVDVFQKFPPFKKEYGSYSAKAIKKLLPLMRMGKYWSENSIDKGTRERIDKIITGEYDEKIENRVREKAIHLADVSDFKGLPLWLVCYIVYGRHSEAKEIIQWKSPADIDSYLRSFKQHSLRNPIVEQIIIETLRVVRDIWKQVGNIDEIHVELGREMKNPADKRKKMTQQMSENENTNLRIKYLLTEFLNPEYEVENVRPYSPSQQDILRIYEEGVLNSVSDLPEEISDILKKFTETDLKKRPSRSEVLRYKLWLEQKYRSPYTGEVIPLGKLFTPAYEIEHVIPQSYYFDDSFSNKVICEAEVNKLKSNLLGHEFIVKHHGEIVELPFGKKVRIFTVDEYEQFVKDNYSRTRSKMKKLLMDDIPEEFVTRQLNDSRYISKVVKSLLSNIVREKGEEEAISKNVIPCTGGVTDRLKKDWGINEVWNKIILPRFQRLNELTGTNKFTTKNVGIQEIPTMPLELQKGFNKKRIDHRHHAMDAIIIACANRNIINYLNNKSATAKAELSRYDLQKMLCDKAKTDNNGNYKWVIRKPWASFTQDTYLALENIIVSFKQNLRVINKATNRFLHYNEEGKKIFVKQGKGDNWAIRKSMHKDTVFGEVNLRRIKTVALNEAMKNPQSIVVKDFKRKLLELWNLGFDAKRIKKYFEDNRETWSDINLSKIEVYYFSKDTKDRFFATRKPLDTSFDRKKIENNITDTGIQKILLRHLELKDNNPDIAFSPDGIDEMNRNIIQLNNGKYHQPIIKIRWYEQADKFAVGQTGNKSSKFVEAAKGTNLFFAVYESNILDKKTNTIIKKRNYATIPLNVAIERQKQGLPVAPEDENGNDPIFVLSPNDLVYLPTDDELANGIIAQPLDRGRIYKMVSSSGEQCFFIKHIVANVLVDKFEFSPLNKMERALTGEMIKMICIPIKVDRLGNVLESSSSYKK

SEQ ID NO: 76 - protein, 1509 aa, Bacteroides eggerthii
  Bacteroides eggerthii 1_2_48FAA
MKTILGLDLGTNSVGWAVINSVIKEQAERIWIEMAGSRIIPMDAAVLGDFDKGNSISQTSERTRLRGARRLRERQLLRRERLHKVLNILGFLPNHYLEYIDFEKHPGKFLADAEPKLAWVKDEQGKYTFLFQAAFDEMLADFAIHQPSLVSGDKKIPYDWTIYYLRKKALTEMISKEELAWILLNFNQKRGYYQLRGEEEEDNAGKSVEFYALKVLTVEATDEKKGRDVWYNVHLENGWIYRRSSSVPLDWEGQVKEFIVTTDLNPDGTPKLDKYGEVKRSFRAPKEDDWMLIKKRTEADIANTHKTVGAYIYDTLLQKPQQKIIGKLVKTVERKLYRDELSLILQKQCAFHAELQDRALYARCVEALYPSNEVRRKNIANRDFVYLLMDDILFYQRPLKTKKSLIANCPYEENEYVDRETGEIKKTPLKCIAKSHPLFQEFRLWNFLSNIRIYQKEKEINGTLHLDVDVTAEFLKTEDDYVALFDWLNSRKEIEQKTFLKYPKFGLKKEISNYRWNYVEDKQYPCNETRHAILSSLEKANVCIDFLSNEKEVALWHILYSVSDKQEIEKALRTFAAKNGLDESFVEAFKKFPPFKSEYGAYSAKAIKKMLPLMRCGKYWDVSSIDDTTKERIKKIVTGEYDERISVKVRDKVMNLSDISCFRRLPLWLACYIVYNRHSEDKEAVKWESPADIDAYLASFKQHSLRNPIVEQVITETLRVVRDIWKQVGRIDEIHIELGREMKNPADKRKRMTAQILENENANLRIKALLAEFMNPEYEIENVRPYSPSQQEILRIYEDTVLHAEDQLPEEIDAILKKFNSSKVPTKSEFLRYKLWLEQKYRSPYTGELIPLGKLFTAAYEIEHVIPQSRYFDDSFSNKVICESAVNKLKDNQLGYEFIKNHHGQKVEVGFGKSVEIFSVDSYERFVKEQYAKSAVKMKKLLMDDIPEQFIERQLNDSRYISKVIKGLLSNIVREKNDSGEYEPEAVSKNIVVCTGSVTDRLKRDWGMNDVWNSIVYPRFERLNSLTDTQSFGHWENKSGKKVFQTELPLEYQKGFSKKRIDHRHHAMDAIVIACATRNHVNYLSNESASRNAKISRYDLQRLLCDKNRTDDNGNYKWVIKKPWDTFTQDAREVLSKIVVSLKQNLRIINKTTNVYRHLDATGNRVYEKQKTGDSWAIRKPMHKDTVFGAVNLRKVKVVRLSVALDTPAMIVDKRVKNKVFELLSYKYDKKRIEKYFKENAFLWKELDLAKVAVYYFTEATTEPLVAVRKPLDSTFNEKKIKESVTDTGIQKILLNHLCTKEGKPDLAFSAEGIEEMNRNLLQLNNGKSHQPIYKVRVYEPRGNKFSVGVLGNKGTKWVEAAKGTNLFFAIYITEDGKRTYETIPLNVVIEREKQGLVPVPDRNKKGDKLLFWLSPNDLVYLPTEEEREFGRINEPIDRGRIYKMVSCTGNEGHFIPANVANPIVPVIELGSNNKAQRAWTNEMIKDICIPIKVDRLGHIIEVKYRIDE

SEQ ID NO: 77 - protein, 1526 aa, Bacteroides faecis
  Bacteroides faecis MAJ27
MKKILGLDLGTNSIGWAVLNAADDNSLKYIEAAGSRIIPMDAAILGDFDRGNSISQTAERTRIRGMRHLRERYLLRRARLHRILNLLGFLPFHYAQDIDRYGNFSADMEPKIAWCKNLEGELEFIFIESFNEMLEDFRKNQPELVADNKKVPYDWVIYYLRKKALEKKISKEELAWILLNFNQKRGYYQLRGEDDDESMKTAKTRQYFDKQIIKNIIDTNQTYKGQRILIVELQNGDKGKIFKKEIPDWIGQEKNIIVTVDIDKDGNDKYEESGSLSCRFKIPTDAEWESEWKLIKMKTQKDLDESNKTVGTYIYDSILQNPTQKVRGKLVRTIERKYYKAELKQILEKQTEFHSELQDKDLYIECLNELYSNNDTHRNAITDRDFVYLFMNDILFYQRPLKSKKSLIDNCPYERNIYIDKETGEIKYSPIKCIAKSHPLFQEFRLWKFISSIRIYQRESVVEVVDKQLDLFSSQSTSVQKLVTDVDVTDKFLTCENDYVALFEWLNKKKIIDQKEFLKYRPFGLKGDIDNYRWNYVEDKSYPCNETHAMILTYFAKAGISEDILTKEMEEALWHILYSVEDRQEITKALRTFASKYHLSDSFVKVFSNIPPFKKEYGSYSAKAIKKLLSLMRMGKYWSEDAIDVNTRERIDKIVTGEYDEKIRDRVREKTIRLNDIRHFRALPDWLACYVVYDRHSETREITEWKSPEEIDEYIRNFKQHSLRNPIVEQVITETLRTVRDIWKQVGCIDEIHVELGREMKNPADKRKRITSQIIENENANLRVKALLTEFVNSEFEIENVRPYSLSQQDILRIYEDGVLNSVAEVPGDIAGILKKFNENDAKKRPTTSEILRYKLWLEQKYRSPYTGEMIPLSKLFTSAYEIEHVIPQSRYFDDSFSNKVICEAEVNKLKDNALGYEFIKKHHGEKVELGFGKIVEIFSVSVYEQFVKDNYSRNRGKMKKLLMDEIPEQFIERQLNDSRYISKVVKTLLSNVVREKAEQEAVSKNVIVCTGGVTDRLKKDWGINDVWNKIVLPRFLRLNELTNSTNFTAKNAAGNEIPAMPLELQKGFNKKRIDHRHHAMDAIVIACANRNIVNYLNNESASRKAKISRHDLQAILCDKVRTDDKGNYQWRVKKPWDTFTQDVYVALENIIVSFKQNLRVINKTSNYYWHYENGKKVLVKQVKGDSWAIRKPMHKDTVFGEVNLRKVKSVSLNEALKNPQFIVEKDLKRQLLSLLQQNFDIKKIKKYFEEHKDIWSDISLSKMNIYYFTKETKDRYFATRKPLDASFDKKKIESCITDTGIQQILLRHLELKENDPERAFSPDGIDEMNRNIIQLNKGKGHHPIAKVRVYEKADKFEVGQRGNKSSKFVEAAKGTNLFFAVYETEYPDEKTNSIVRKRNYATIPLNIAIERQKRGLSTAPEDEKGNVPSFVLSPNDLVYLPTSEDIVNGHITQPIDKSRIYKMVSSSGSQCFFIKHNIANIIVDKYEFSPLNKMERAISNEMIKEICIPVKVDRLGNIVKLGKSE

SEQ ID NO: 78 - protein, 1509 aa, Bacteroides fluxus
  Bacteroides fluxus YIT 12057
MKTILGLDLGTNSVGWAVINSVIKEQAERIWIEMAGSRIIPMDAAVLGDFDKGNSISQTSERTRLRGVRRLRERQLLRRERLHKVLNILGFLPNHYLEYIDFEKHPGKFLSDAEPKLPWVKDEQGKYTFLFQAAFDEMLADFAIHQPSLVSGDKKIPYDWTIYYLRKKALTEMISKEELAWILLNFNQKRGYYQLRGEEEEDNAGKSVEFYALKVLTVEATDEKKGRDVWYNVHLENGWIYRRSSSVPLDWEGQIKEFIVTTDLNPDSTPKLDKYGEVKRSFRAPKEDDWMLIKKRTEADIANTHKTVGAYIYDTLLQKPQQKIIGKLVKTVERKLYRDELSLILQKQCAFHAELQDRTLYARCVEALYPNNEVQRRNIANRDFVYLLMDDVLFYQRPLKTKKSLIANCPYEENEYVDRETGEIKKAPLKCIAKSHPLFQEFRLWNFLSNIRIYQKEKEINGTLHLDVDVTAEFLKTEDDYVALFDWLNSRKEIEQKTFLKYPKFGLKKEISNYRWNYVEDKQYPCNETRHAILSRLEKANVCIDFLSNEKEVALWHILYSVSDKQEIEKALRTFAAKNGLDESFVEAFKKFPPFKSEYGAYSAKAIKKLLPLMRCGKYWDVSSIDDTTKERIKKIVAGEYDERIAVKVRDKVMNLSDISCFKRLPLWLACYIVYNRHSEDKEAVKWESPADIDAYLASFKQHSLRNPIVEQVITETLRVVRDIWKQVGRIDEIHIELGREMKNPADKRKRMTAQILENENANLRIKALLAEFMNPEYEIENVRPYSPSQQEILRIYEDMVLHAEDQLPEEIDAILKKFNSSKVPTKSEFLRYKLWLEQKYRSPYTGELIPLGKLFTAAYEIEHVIPQSRYFDDSFSNKVICESAVNKLKDNQLGYEFIKNHHGQKVEVGFGKSVEIFSVDSYERFVKEQYAKSAVKMKKMLMDDIPEQFIERQLNDSRYISKVIKGLLSNIVREKNDSGEYEPEAVSKNIVVCTGSVTDRLKRDWGMNDVWNSIVYPRFERLNSLTDTQSFGHWENKSGKKVFQTELPLEYQKGFSKKRIDHRHHAMDAIVIACATRNHVNYLSNESASRNAKISRYDLQRLLCDKSRTDDNGNYKWVIKKPWDTFTQDAREVLSKIVVSLKQNLRIINKTTNVYRHLDATGNRVYEKQKTGDSWAIRKPMHKDTVFGAVNLRKVKVVRLSVALDAPTMIVDKRVKNKVFELLSYKYDKKRIEKYFKENAVLWKELDLARVAVYYFTEATTEPLVAVRKPLDSTFNEKKIKESVTDTGIQKILLNHLCTKEGKPDLAFSAEGIEEMNRNLLQLNNGKRHQPIYKVRVYEPRGNKFSVGVLGNKGTKWVEAAKGTNLFFAIYITEDGKRTYETIPLNMVIEREKQGLAPVPDKNEKGDKLLFWLSPNDLVYLPTEEELEFGRINEPIDRGRIYKMVSSSGNQCFFIPQSISNAIIPTKELGANNKAERSWDGAMIKNICIPVKVDRLGRIIEVKYRINE

SEQ ID NO: 79 - protein, 1436 aa, Bacteroides fragilis
MKRILGLDLGTNSIGWALVNEAENKDERSSIVKLGVRVNPLTVDELTNFEKGKSITTNADRTLKRGMRRNLQRYKLRRETLTEVLKEHKLITEDTILSENGNRTTFETYRLRAKAVTEEISLEEFARVLLMINKKRGYKSSRKAKGVEEGTLIDGMDIARELYNNNLTPGELCLQLLDAGKKFLPDFYRSDLQNELDRIWEKQKEYYPEILTDVLKEELRGKKRDAVWAICAKYFVWKENYTEWNKEKGKTEQQEREHKLEGIYSKRKRDEAKRENLQWRVNGLKEKLSLEQLVIVFQEMNTQINNSSGYLGAISDRSKELYFNKQTVGQYQMEMLDKNPNASLRNMVFYRQDYLDEFNMLWEKQAVYHKELTEELKKEIRDIIIFYQRRLKSQKGLIGFCEFESRQIEVDIDGKKKIKTVGNRVISRSSPLFQEFKIWQILNNIEVTVVGKKRKRRKLKENYSALFEELNDAEQLELNGSRRLCQEEKELLAQELFIRDKMTKSEVLKLLFDNPQELDLNFKTIDGNKTGYALFQAYSKMIEMSGHEPVDFKKPVEKVVEYIKAVFDLLNWNTDILGFNSNEELDNQSYYKLWHLLYSFEGDNTPTGNGRLIQKMTELYGFEKEYATILANVSFQDDYGSLSAKAIHKILPHLKEGNRYDVACVYAGYRHSESSLTREEIANKVLKDRLMLLPKNSLHNPVVEKILNQMVNVINVIIDIYGKPDEIRVELARELKKNAKEREELTKSIAQTTKAHEEYKTLLQTEFGLTNVSRTDILRYKLYKELESCGYKTLYSNTYISREKLFSKEFDIEHIIPQARLFDDSFSNKTLEARSVNIEKGNKTAYDFVKEKFGESGADNSLEHYLNNIEDLFKSGKISKTKYNKLKMAEQDIPDGFIERDLRNTQYIAKKALSMLNEISHRVVATSGSVTDKLREDWQLIDVMKELNWEKYKALGLVEYFEDRDGRQIGRIKDWTKRNDHRHHAMDALTVAFTKDVFIQYFNNKNASLDPNANEHAIKNKYFQNGRAIAPMPLREFRAEAKKHLENTLISIKAKNKVITGNINKTRKKGGVNKNMQQTPRGQLHLETIYGSGKQYLTKEEKVNASFDMRKIGTVSKLAYRDALLKRLYENDNDPKKAFAGKNSLDKQPIWLDKEQMRKVPEKVKIVTLEAIYTIRKEISPDLKVDKVIDVGVRKILIDRLNEYGNDAKKAFSNLDENPIWLNKEKGISIKRVTISGISNAQSLHVKKDKDGKPILDENGRNIPVDFVNTGNNHHVAVYYRPVIDKRGQLVVDEAGNPKYELEEVVVSFFEAVTRANLGQPIIDKDYKTTEGWQFLFSMKQNEYFVFPNEKTGFNPKEIDLLDVENYGLISPNLFRVQKFSLKNYVFRHHLETTIKDTSSILRGITWIDFRSSKGLDTIVKVRVNHIGQIVSVGEY

SEQ ID NO: 80 - protein, 1436 aa, Bacteroides sp.
MKRILGLDLGTNSIGWALVNEAENKDERSSIVKLGVRVNPLTVDELTNFEKGKSITTNADRTLKRGMRRNLQRYKLRRETLTEVLKEHKLITEDTILSENGNRTTFETYRLRAKAVTEEISLEEFARVLLMINKKRGYKSSRKAKGVEEGTLIDGMDIARELYNNNLTPGELCLQLLDAGKKFLPDFYRSDLQNELDRIWEKQKEYYPEILTDVLKEELRGKKRDAVWAICAKYFVWKENYTEWNKEKGKTEQQEREHKLEGIYSKRKRDEAKRENLQWRVNGLKEKLSLEQLVIVFQEMNTQINNSSGYLGAISDRSKELYFNKQTVGQYQMEMLDKNPNASLRNMVFYRQDYLDEFNMLWEKQAVYHKELTEELKKEIRDIIIFYQRRLKSQKGLIGFCEFESRQIEVDIDGKKKIKTVGNRVISRSSPLFQEFKIWQILNNIEVTVVGKKRKRRKLKENYSALFEELNDAEQLELNGSRRLCQEEKELLAQELFIRDKMTKSEVLKLLFDNPQELDLNFKTIDGNKTGYALFQAYSKMIEMSGHEPVDFKKPVEKVVEYIKAVFDLLNWNTDILGFNSNEELDNQPYYKLWHLLYSFEGDNTPTGNGRLIQKMTELYGFEKEYATILANVSFQDDYGSLSAKAIHKILPHLKEGNRYDVACVYAGYRHSESSLTREEIANKVLKDRLMLLPKNSLHNPVVEKILNQMVNVINVIIDIYGKPDEIRVELARELKKNAKEREELTKSIAQTTKAHEEYKTLLQTEFGLTNVSRTDILRYKLYKELESCGYKTLYSNTYISREKLFSKEFDIEHIIPQARLFDDSFSNKTLEARSVNIEKGNKTAYDFVKEKFGESGADNSLEHYLNNIEDLFKSGKISKTKYNKLKMAEQDIPDGFIERDLRNTQYIAKKALSMLNEISHRVVATSGSVTDKLREDWQLIDVMKELNWEKYKALGLVEYFEDRDGRQIGRIKDWTKRNDHRHHAMDALTVAFTKDVFIQYFNNKNASLDPNANEHAIKNKYFQNGRAIAPMPLREFRAEAKKHLENTLISIKAKNKVITGNINKTRKKGGVNKNMQQTPRGQLHLETIYGSGKQYLTKEEKVNASFDMRKIGTVSKSAYRDALLKRLYENDNDPKKAFAGKNSLDKQPIWLDKEQMRKVPEKVKIVTLEAIYTIRKEISPDLKVDKVIDVGVRKILIDRLNEYGNDAKKAFSNLDKNPIWLNKEKGISIKRVTISGISNAQSLHVKKDKDGKPILDENGRNIPVDFVNTGNNHHVAVYYRPVIDKRGQLVVDEAGNPKYELEEVVVSFFEAVTRANLGLPIIDKDYKTTEGWQFLFSMKQNEYFVFPNEKTGFNPKEIDLLDVENYGLISPNLFRVQKFSLKNYVFRHHLETTIKDTSSILRGITWIDFRSSKGLDTIVKVRVNHIGQIVSVGEY

SEQ ID NO: 81 - protein, 1512 aa, Bacteroides nordii
  Bacteroides nordii CL02T12C05
MKNILGLDLGTNSIGWAVINSEEDGPIVKKRIELAGSRIIPMDAAVLGNFDSGVTKSQTAERTSFRSIRRLRERQLLRRERLHKVLQILGFLPEHYVNDIDFENHPGKIKRNTEPKLPWRKNSMGQFEFIFQDSFEAMLTDFATHQPVFVSEGKKVPYDWTLYYLRKKALTEGISKEELAWLILNFNQKRGYYQLRGEEEEEQSNKLVEFYALRVVKVEATDDKKGKDTWYNVHLENGWIYRRTSNIPLDWEGKVKEFIVTTDLNEDGTPKLDKYGEVKRSFRAPKEDDWTLIKKKTESDIANSHKTVGCYIYDALLQNPHQKIKGRLVRTVERKFYKEELRLILEKQLSFHPELQDRDLYRACIDALYVSNEAHKNNISGRDFVYLFIDDIIFYQRPLKTKKSLIDNCPYEENQYMDRETGEVKQAPIKCIAKSHPLFQEFRLWQFISNIRIYQRERVLDDGKLETDVDVTPDFLKTEDDYTTLFEWFNDRKEVDQKAFLKNPQFGLKKTFTEYRWNYVEDKSYPCNETRNAILNGLQKAGVSADFLSREVEEALWHILYSVEDKIEIESALRKFASKHDLDDRFADVFKKLPPFKKEYGAYSAKAIKKLLPLMRIGKYWELSNIDDKTKERIDKIITGEWDENIHDRVREKAIKLSDITDFKGLPLWLSCYVVYNRHSEARAIAKWESPEDIDSYLRLFRQHSLRNPIVEQVITETLRTVRDIWKRVGQIDEIHVELGREIKNPADKRAKMTAQIVENENTNLRIKALLAEFINSEYEIENVRPYSSNQQEKLKIYEDTVLNGVKEIPEDINTILKKFRESDLKKRPTKSDFLHYKLWLEQKYCSPYTGRIIPLGKLFTSAYEIEHIIPQAHYFDDSFSNKVICEAEVNGLKDKKLGYEFIKHNPGKMVEIGFGKPPVRIFSVEEYERFVKENYSGIKNKMNKLLMDDIPETFIERQLNDSRYISKVVKSLLSNIVREKDSNGEYEPEAISKNVIVCTGSVTDRLKRDWGVNDVWNSIIYPRFERLNELTGSQQFGCWENKEGKRVFQTAVPLEMQKGFSKKRIDHRHHAMDAIVIACATRNHINYLSNESASKKAKISRTDLQRLLCTKCRTDDNGNYKWIVKKPWPAFTQDIRKALENITVSFKQNLRVINKTTNYYVHFDESGKKVLEKQINGDSWAIRKPMHKDTVFGKVNLQKVKEVRLSLALDTPKMIVDKKLKEKVLQLYSYKYDKKRIDKYFKENASLWKDLNLSKVAVYYFTNDSTEPLVAVRKPLDTSFNAKKIKESVTDTGIQKILLNHLSNNQDDPNLAFSPDGIDKMNKNLTALNDGKYHQPIYKVRVCEPQGNKFSVGTSGNKTSKYVEAAKGTNLFFAVYQTEDGKRSYETIPLNVVIEREKLGWTPVPENNNNGDKLLFWLSPNDLVYVPTADELNNGMRLDNMDKGRIYKMISCSGPQCFFIPQNVSNAIIPVIELGANNKAEKSWNNEMIKVVCVPIRVDRLGCITQINNQK

SEQ ID NO: 82 - protein, 1436 aa, Bacteroides sp.
  Bacteroides sp. 2_1_16
MKRILGLDLGTNSIGWALVNEAENKDERSSIVKLGVRVNPLTVDELTNFEKGKSITTNADRTLKRGMRRNLQRYKLRRETLTEVLKEHKLITEDTILSENGNRTTFETYRLRAKAVTEEISLEEFARVLLMINKKRGYKSSRKAKGVEEGTLIDGMDIARELYNNNLTPGELCLQLLDAGKKFLPDFYRSDLQNELDRIWEKQKEYYPEILTDVLKEELRGKKRDAVWAICAKYFVWKETYTEWNKEKGKTEQQEREHKLEGIYSKRKRDEAKRENLQWRVNGLKEKLSLEQLVIVFQEMNTQINNSSGYLGAISDRSKELYFNKQTVGQYQMEMLDKNPNASLRNMVFYRQDYLDEFNMLWEKQAVYHKELTEELKKEIRDIIIFYQRRLKSQKGLIGFCEFESRQIEVDIDGKKKIKTVGNRVISRSSPLFQEFKIWQILNNIEVTVVGKKRKRRKLKENYSAIFEELNDAEQLELNGSRRLCQEEKELLAQELFVRDKMTKSEVLKLLFDNPQELDLNFKTIDGNKTGYALFQAYSKMIEMSGHEPVDFKKPVEKVVEYIKAVFDLLNWNTDILGFNSNEELDNQSYYKLWHLLYSFEGDNTPTGNGRLIQKMTELYGFEKEYATILANVSFQDDYGSLSAKAIHKILPHLKEGNRYDVACVYAGYRHSESSLTREEIANKVLKDRLMLLPKNSLHNPVVEKILNQMVNVINVIIDIYGKPDEIRVELARELKKNAKEREELTKSIAQTTKANEEYKTLLQTEFGLTNVSRTDILRYKLYKELESCGYKTLYSNTYISREKLFSKEFDIEHIIPQARLFDDSFSNKTLEARSVNIEKGNKTAYDFVKEKFGESGADNSLEHYLNNIEDLFKSGKISKTKYNKLKMAEQDIPDGFIERDLRNTQYIAKKALSMLNEISHRVVATSGSVTDKLREDWQLIDVMKELNWEKYKALGLVEYFEDRDGRQIGRIKDWTKRNDHRHHAMDALTVAFTKDVFIQYFNNKNASLDPNANEHAIKNKYFQNGRAIAPMPLREFRAEAKKHLENTLISIKAKNKVITGNINKTRKKGGVNKNMQQTPRGQLHLETIYGSGKQYLTKEEKVNASFDMRKIETVSKSAYRDALLKRLYENDNDPKKAFAGKNSLDKQPIWLDKEQMRKVPEKVKIVTLEAIYTIRKEISPDLKVDKVIDVGVRKILIDRLNEYGNDAKKAFSNLDKNPIWLNKEKGISIKRVTISGISNAQSLHVKKDKDGKPILDENGRNIPVDFVNTGNNHHVAVYYRPVIDKRGQLVVDEAGNPKYELEEVVVSFFEAVTRANLGLPIIDKDYKTTEGWQFLFSMKQNEYFVFPNEKIGFNPKEIDLLDVENYGLISPNLFRVQKFSLKNYVFRHHLETTIKDTSSILRGITWIDFRSSKGLDTIVKVRVNHIGQIVSVGEY

SEQ ID NO: 83 - protein, 1517 aa, Bacteroides sp.
  Bacteroides sp. 20_3
MKKIVGLDLGTNSIGWALINAYINKEHLYGIEACGSRIIPMDAAILGNFDKGNSISQTADRTSYRGIRRLRERHLLRRERLHRILDLLGFLPKHYSDSLNRYGKFLNDIECKLPWVKDETGSYKFIFQESFKEMLANFTEHHPILIANNKKVPYDWTIYYLRKKALTQKISKEELAWILLNFNQKRGYYQLRGEEEETPNKLVEYYSLKVEKVEDSGERKGKDTWYNVHLENGMIYRRTSNIPLDWEGKTKEFIVTTDLEADGSPKKDKEGNIKRSFRAPKDDDWTLIKKKTEADIDKIKMTVGAYIYDTLLQKPDQKIRGKLVRTIERKYYKNELYQILKTQSEFHEELRDKQLYIACLNELYPNNEPRRNSISTRDFCHLFIEDIIFYQRPLKSKKSLIDNCPYEENRYIDKESGEIKHASIKCIAKSHPLYQEFRLWQFIVNLRIYRKETDVDVTQELLPTEADYVTLFEWLNEKKEIDQKAFFKYPPFGFKKTTSNYRWNYVEDKPYPCNETHAQIIARLGKAHIPKAFLSKEKEETLWHILYSIEDKQEIEKALHSFANKNNLSEEFIEQFKNFPPFKKEYGSYSAKAIKKLLPLMRMGKYWSIENIDNGTRIRINKIIDGEYDENIRERVRQKAINLTDITHFRALPLWLACYLVYDRHSEVKDIVKWKTPKDIDLYLKSFKQHSLRNPIVEQVITETLRTVRDIWQQVGHIDEIHIELGREMKNPADKRARMSQQMIKNENTNLRIKALLTEFLNPEFGIENVRPYSPSQQDLLRIYEEGVLNSILELPEDIGIILGKFNQTDTLKRPTRSEILRYKLWLEQKYRSPYTGEMIPLSKLFTPAYEIEHIIPQSRYFDDSLSNKVICESEINKLKDRSLGYEFIKNHHGEKVELAFDKPVEVLSVEAYEKLVHESYSHNRSKMKKLLMEDIPDQFIERQLNDSRYISKVVKSLLSNIVREENEQEAISKNVIPCTGGITDRLKKDWGINDVWNKIVLPRFIRLNELTESTRFTSINTNNTMIPSMPLELQKGFNKKRIDHRHHAMDAIIIACANRNIVNYLNNVSASKNTKITRRDLQTLLCHKDKTDNNGNYKWVIDKPWETFTQDTLTALQKITVSFKQNLRVINKTTNHYQHYENGKKIVSNQSKGDSWAIRKSMHKETVHGEVNLRMIKTVSFNEALKKPQAIVEMDLKKKILAMLELGYDTKRIKNYFEENKDTWQDINPSKIKVYYFTKETKDRYFAVRKPIDTSFDKKKIKESITDTGIQQIMLRHLETKDNDPTLAFSPDGIDEMNRNILILNKGKKHQPIYKVRVYEKAEKFTVGQKGNKRTKFVEAAKGTNLFFAIYETEEIDKDTKKVIRKRSYSTIPLNVVIERQKQGLSSAPEDENGNLPKYILSPNDLVYVPTQEEINKGEVVMPIDRDRIYKMVDSSGITANFIPASTANLIFALPKATAEIYCNGENCIQNEYGIGSPQSKNQKAITGEMVKEICFPIKVDRLGNIIQVGSCILTN

SEQ ID NO: 84 - protein, 1424 aa, Bacteroides sp.
  Bacteroides sp. 3_1_19
MKRILGLDLGTNSIGWALVNEAETDEEVSSIIRLGVRVNPLTVDETQNFEKGKSITTNAERTLKRSMRRNLQRYKLRRDALVEFLKELGFITDETILSEQGNRTTFETCRLRAKAAEEEISLEELSRVLLMINKKRGYKSSRKVKKEEDGVLIDGMEIAKKLYEEDLTPGQLCSQLLESGKKVLPDFYHSDLQEELDRIWSVQKQFHPDVFCDAAKEEIKGKNRSQTWAILANYFVWKEEVVGWNDREAKNETIEKECKLVGLKRTTKGYELKKENYRWRAQALTEQLGLEEIAVVLQEINGQINASSGYLGAISDRSKVLYFNHQTVGQYQMAELDKNPHASLRNMVFYRQDYLDEFDRIWEKQAEFHKELTAELKKEIRDMIIFYQRRLKSQKGLISFCEFERLEIVVEKDGKKQTKVIGCKVIPRSHPLFQEFKVWQTLNDIKVLGREKKRNALSASESRALYPEEKEILARELAIKENMKKADVLKLLFENPQELDLNFKQIDGNRTGFSLFSAYSKMIEKYGYEPLDFKKPADEIIGQLRTIFTDLGWNTNLFTIDLTKEGKELEMQPYFRLWHLLYSFEGDNTSTGNGKLIEKIMQLCGVEKEYAVELASLSFQDDYGSLSAKAIKRILPYLKEGNLYDVACEYAGYRHSKSSLTKEEIENKVLKGKLEVLPKNSLRNPVVEKILSQMVNVINTIIDTYGKPDEIRVELARELKKSAKEREELTKAIAKSTREHEEIRKLLQDEFGMMNVSRNDIIRYKLYEELKDNGYKTLYSNQYIPKEKIFSKEIDIEHIIPQSRLFDDSLSNKTLEYKAINIEKGNKTAYDFVKEKYGEEGLQQYINRCESLFNDKKAKLRKLKMEQKDIPDGFIDRDLRNTQYIAKKALAMLNEICRRVVATTGSITDQLREDWQLVDVMKELNLPKYEALGFVETYEDKDGRKIKRIKDWTKRNDHRHHAMDALTVAFTKDAFIQYFNNKNAAQDSGNRNHTNIIGIKTRYFDKGRALPPIPLEQFRIEAKQHLEKLLVSIKAKNKVVTVNVNRTKKRKGENTKIQQTPRGQLHLETVYGSHKQYVTKIEKVNASFDAAKIATVSKRAYRNALLKRLETFGNDPKKAFTGKNALEKNPLYADKYQTIRVPEKVQTVEFETIYTIRKPVDPALNVDKVVDVKVRAILERRLKEYGGDPKKAFVNFWENPIWLNKEKGISIKRVSIRGINNAQSIHVKKDKNGNPIWDENGKQIPVDFVNTGNNHHVAIYRKPVLDKKGQVTFDEDGNLMYELDEVVVPFFEAVTRANLGLPIIDKDYRKSEGWQFLFSMKQNEYFVFPNEKTGFNPKEVDLLNPDNYAMISPNLFRVQTMSKVMYGNNVVRDYKFRHHLETTVKDMKELKDIAYKQYKTLSFGNSVVKIRINHIGQIVSVGEY

SEQ ID NO: 85 - protein, 1510 aa, Bacteroides sp.
  Bacteroides sp. D2
MKRILGLDLGTNSIGWALVDSEEQRILGMGSRIIPMDQGVLDTFSGGNPVETQTAARTAYRGTRRLRERALLRRERLIRVLNMMKFLPEHYASQIDFEKRLGQFFDEKEPKLAWKQNDEGRFEFIFQQSFNEMIEEFKNKGVVREDKKIPYDWTIYYLRKKALSQEIEKEELAWILLNFNQKRGYYQLRGEEEEENPNKLVEYYSLKIVDVIADEKPNSKGDIWYSLHLENGWIYRRSSKIPLFGWKDKTRDFIVTTDLNDDGTVKKDKEGIEKRSFRAPSENDWVLLKKKTESDIEKSHKTVGAYVYETLLQNPMQKVRGKLVRTIERKFYKDELKQILEKQREFHPELRDEDLYNDCVRELYRSNETYQFILSKRDFVHLFLDDILFYQRPLRSQKSAIGDCILEFKTYKDKDGNNIKEYLKVISKSNPLYQEFRIWQWLYNLKIYRKEDDEDVTLQFIANIEDKEQLFDFLSNRKSIEQKPLLEYLIKAKGLKKQVKTEAYRWNYVEDKIYPCSETKTMISTRLAKVENIPDNFFTKEIEQKLWHIIYSVTDKNEFEKALRTFAKKYDLDIASFVDNFKKIPPFKNEYGSFSEKAIKKLLPLMRLGKYWKWNDIDNNTQNRISKIITGEYDEEIKDIVREKSIALTNENDFQGLQLWLAQYLVYGRHSEADIAGKWHSVADLEKYLNEFKQHSLRNPIVEQIITETLRVVRDIWRKYGQGAENFFSEIHVELGRDMKNTADERKKIVNVVTENENTNLRIKALLMELKNNSDGKLEVENVRPYSPTQQDILKIYEEYAISTGLDNEKDEKVKEDIKKISRVAQPTTTELQRYKLWLEQKYCSPYTGKVIPLGKLFTEEYQIEHIIPKSRYYDDSFSNKVICEAAVNKLKDKCLGLEFIKNYHGQIVETGFGQKVTIFDEEAYQNFVKQHYAYNRSKRTKLLLEEIPEKMIERQMNDTRYISKFVLPLLSNLVRAEENDNGVNSKNVLPVNGKITTMLKQDWGLNDVWNDLILPRFVRMNELAKTIAFTSWNEQHQKYLPTVPLELSKGFQKKRIDHRHHAMDALVIACATRDHVNLLNNKHANTDTIRYDLQRKLRLFERVTYIDPQTKNNVTKDIPKEFKKPWDNFTVDARNELEKIIVSFKQNLRIINKATNIYTKYENGKKIKVGQKGLNWAIRKPLHKETVFAKVSLRKRKTVRLSEALKDWKKIVDKKLKQEIKRLTCQYGKFDVDTILRYFKDRKYQFGEVDVSKVKMYYFDEENAAVRKNVDTSFTEKFIQGSVTDTGIQKILLNHLEAKGNKVEIAFSPEGIEEMNKNIIQLNEGKLHLPIFKVRVYETIGNKFSVGVKGNKKDKYVEAAKGTNLFFAIYVDENGIRSYETIPLNIVIERLKQGLSVVPEKNRKEHSLLFYLSPNDLVYVPIEDERENIHAVNLDQLNNEQRKRIYKMVSCTGSECHFVPYYVASPIVNKVEYSSLNKIGRSLTGEMIKDVCIKLKVDRLGNVKGISGL

SEQ ID NO: 86 - protein, 1436 aa, Bacteroides sp.
  Bacteroides sp. D2
MKRILGLDLGTNSIGWALVDEAENKDERSSIVKLGVRVNPLTVDELTNFEKGKSITTNADRTLKRGMRRNLQRYKLRRETLMEVLKEHKLITEDTILSENGNRTTFETYRLRAKAATEKISLEEFARVLLMINKKRGYKSCRKAKGAEEGTLIDGMDIARELYNNNLTPGELCLQLLDAGKKYLPDFYRSDLQNELDRIWEKQKEYYPEILTEVLKEELRGKKRDAVWAICAKSFVWEEYYTEWNKEKGKTEQQEREHKLEGIYSKRKRDEAKRENLQWRVNGLKEKLSLEQLVIVLQEMNIQINNSSGYLGAISDRSKELYFNKQTVGQYQMEMLDKNPNASLRNMVFYRQDYLDEFNTLWEKQAEYHKELTGELKKEIRDIVIFYQRRLKSQKGLVGFCEFESRQIEVEIDGKKKIKTVGNRVIPRSSPLFQEFKIWQILNNIEVTVVGKKGKRRKQKDNSPTLFDGLDDTEQLELNGSRYLYQEEKELLAQELFVRDKMTKSDVLKLLFDNPQELDLNFKTIDGNKTGYTLFQAYSKMIEMSGHEPVDFKKTVEKVVEHVKAVFDLLNWNTDILGFNSNEELDNQSYYKLWHLLYSFEGDNTPTGNARLVQKITELYGFEKEYAIILANVTFQDDYGSLSAKAIHKILPHLKEGNRYDVACAYAGYKHSESSLTKEEIANKALKDRLTLLPKNNLRNPVVEKILNQMVNVINAIIDTYGKPDEIRVELARELKKNAKEREELTKFIAETTRKHEEFKILLQSEFGLTNVSRTDILRYKLYKELESCGYKTLYSNTYIPREKLFSKEFDIEHIIPQARLFDDSFSNKTLEARSINLEKGNKTAYDFVKEKFGESGADNSLDHYLNNIEDLFKSGKISKTKYNKLKMAEQDIPDGFINRDLRNTQYIAKKALSMLNEISRRVVATSGTITDKLRQDWQLVDVMKELNWEKYKALGLVEYFEDKDGRQIGRIKDWTKRNDHRHHAMDALTVAFTKDIFIQYFNNKNASLNSNTNEYAIKNKYFQNGRAIAPIPLREFRVEAKKHLENTLISIKAKNKVVTGNINKTKKRGGVNKYLQQTPRGQLHLETIYGSGKQYLTKEEKVNASFDMKKIATVSKSAYRDVLLKRLHENDNDPKKAFTGKNSLDKQPIWLDKEQTRKVPEKVKTVTLETIYTVRKEISPDLKVDKVIDAGVRKILTGRLNEYGNDAKKAFSNLDENPIWLNKEKGISIKRVTISGISNAQSLHVKKDKDGKPILDEDSRNIPVDFVNTGNNHHVAVYRRPVIDKRGQLVIDEAGNPKYELEEVVVSFFEAVTRANLGQPIIDKDYKTSEGWQFLFSMKQNEYFVFPNEKTGFNPKEIDLLDAENYGVISPNLFRVQKFAHKNYVFRHHLETTIKDTSSILKGITWIDFRSSKGLDAIVKVRVNHIGQIVSVGEY

SEQ ID NO: 87 - protein, 1508 aa, Bacteroides uniformis
  Bacteroides uniformis CL03T00C23
MRTILGLDLGTNSIGWAVINSVIKEQTERIWIEMAGSRIIPMDAAILGDFDKGNSISQTAERTRFRGVRRLRERQLLRRERLHKVLKILGFLPEHYLKGIDFEKHTGKFLSGSEPKLPWVKDRWGKYSFLFQTAFNEMLADFAKHQPSLVFDGKKIPYDWTVYYLRKKALTEMISKEELAWILLNFNQKRGYYQLRGEEEEDNAGKSVEFYALKVLSVEATDEKKGRDIWYNVHLENGWVYRRSSNVPLDWEGRVKEFIVTTDLNPDGTPKLDKYGEVKRSFRAPKEDDWMLIKKRTEADITGTHKTIGSYIYDALLQEPQQKIIGKLVKTVERKFYKEELNFILQKQCAFHAELQDRDLYMRCIEALYPGNEVQRRNIANRDFIYLLIDDVLFYQRPLKTKKSLIANCPYEENEYVNRKTGEIKTAPLKCIAKSHPLFQEFRLWYFLSNIRVYQKEREVNGTLHLDVDVTTEFLKTEDDYVALFDWLNSRKEIDQKAFLRYPAFGLKKEINNYRWNYVEDKFYPCNETRHAILSRLEKAGIGIDFLSDEKETALWHILYSVSDKQEIEKALATFAVKNGLNESFVEVFKKFPPFKSEYGAYSAKAIKKLLPLMRCGKYWDMSLIDGTTKERIERIIAGECDESIGAKVREKAMNLSDISCFKRLPLWLACYVVYNRHSEDKEITKWETPADIDAYLAAFKQHSLRNPIVEQVITETLRVVRDIWKQVGKIDEIRIELGREMKNPADKRKRMTTQILENENANLRIKALLAEFVNPEYGVENVRPYSPSQQEILRIYEDAVLKGEEQIPEDIDVILKKFNTSKLPTKSEFLRYKLWLEQKYRSPYTGELIPLAKLFTAAYEIEHVIPQSRYFDDSFSNKVICESAVNKLKDNQLGYEFIKNHHGQKVEVGFGKTVEIFSVDSYERFVKEQYAKSGIKMKKLLMDDIPEQFIERQLNDSRYISKVVKGLLSNIVREKNDSGEYEPEAVSKNILVCTGSVTDRLKKDWGMNDVWNSIVSPRFERLNALTETQCFGHWENKDGKKVFQTAVPLEYQKGFSKKRIDHRHHAMDAIVIACATRNHVNYLNNESASRNAKISRYDLQRLLCDKSRGDGNGNYRWIIKKPWTTFTQDAREALSGIIVSLKQNLRIINKTTNIYQHFDANGTRVYEKQKIGDSWAIRKPMHKDTVFGAVNLRKVKVVRLSVALDTPSMIVNKRVKNKVLELLSYKYDKKKIEKYFKENAFLWKELDIAKVAVYYFTENTTEPLVAVRKSLDSTFNEKKIASVTDTGIQKILLNHLKSKEGKAELAFSAEGIEEMNRNLLQLNDGKGHQPIYKVRVYEPRGNKFKVGVLGNKGAKWVEAAKGTNLFFAIYITEDGNRTYETIPLNWVIEREKQGLVPVPDRNEKGDKLLFWLSPNDLVYLPTEEERDFGRINEPIDRGRIYKMVSSSGNQCFFIPQSISNAIISTKELGSNNKAEKSWDGEMIKNICIPVKVDRLGRIIEVKYRVNE

SEQ ID NO: 88 - protein, 1504 aa, Bacteroides vulgatus
  Bacteroides vulgatus CL09T03C04
MKNIVGLDLGTNSIGWAVVNGSVNDDGSEQLVKIQASGSRIIPMDAAMIGDFNKGNSISQTAERTRLRGVRRLSERYLLRRERLHRILDILGFLPFHFAQDLDRHGKIVKGKEPKLAWRKNEAGQFEFIFQDSFKEMLEDFKLNHPNLITDDKKVPYDWTIYYLRKKGLTSKISKEELAWILLNFNQKRGYYQLRGEEEEENKNKLVEFYALKVVAVEDSGEKKGKDIWYNVHLENGWVYRRTSNMPLDWVGKTKEFIVTTDLEKDGTPKKDKEGNVKRSFRAPKEDDWSLLKKKTEADIDQTHKTVGVYIYDTLLGNPSQKIRGRLVRTIERKYYKEELKQILEKQKEFHLELQDRALYAACIEELYPINEAHRNNVGNRDFTYLFLEDILFYQRPLKSKKSLIDNCPYEENQGLDKETGEIKSFPVKCIAKSHPLFQEFRLWQFIVNLRIYRKDLAQDVDVTNELLKTEEDYVALFDWLNGKKEIDQKAFLKYPVFGLKKEIENYRWNYVQDKPYPCNETRSLMLARLEKCDISIEFLTKENEEALWHILYSVEDKNEIVKALQKFADKHDLNASFVDVFQKFPPFKKEYGSYSAKAIKKLLPLMRMGKYWSENSIDKGTRERIDKIITGEYDEKIENRVREKAIHLADVSDFKGLPLWLVCYIVYGRHSEAKEITQWKSPADIDSYLRSFKQHSLRNPIVEQIIIETLRVVRDIWKQVGNIDEIHVELGREMKNPADKRKKMTQQMSENENTNLRIKYLLTEFLNPEYEVENVRPYSPSQQDILRIYEEGVLNSVSDLPEEISDILKKFTETDLKKRPSRSEILRYKLWLEQKYRSPYTGEVIPLGKLFTPAYEIEHVIPQSCYFDDSFSNKVICEAEVNKLKSNLLGHEFIVKHHGEIVELPFGKKVRIFTVDEYEQFVKDNYSRTRSKMKKLLMDDIPEEFVTRQLNDSRYISKVVKSLLSNIVREKGEEEAISKNVIPCTGGVTDRLKKDWGINEVWNKIILPRFQRLNELTGTNKFTTKNVGIQEIPTMPLELQKGFNKKRIDHRHHAMDAIIIACANRNIINYLNNESATAKAELSRYDLQKMLCDKAKTDNNGNYKWVIRKPWASFTQDTYLALENIIVSFKQNLRVINKATNRFLHYNEEGKKIFVKQGKGDNWAIRKSMHKDTVFGEVNLRRIKTVALNEAMKNPQSIVVKDFKRKLLELWNLGFDAKRIKKYFEDNRETWSDINLSKIEVYYFSKDTKDRFFATRKPLDTSFDRKKIENNITDTGIQKILLRHLELKDNNPDIAFSPDGIDEMNRNIIQLNNGKYHQPIIKIRWYEQADKFAVGQTGNKFSKFVEAAKGTNLFFAVYESNILDKKTNTIIKKRNYATIPLNVAIERQKQGLPVAPEDENGNDPIFVLSPNDLVYLPTDDELANGIIAQPLDRGRIYKMVSCTGNEGHFIPARIANPILQTIELGSNNKAQKAWTDEMIKEICMPIKVDRLGNVLESSSSYKK

SEQ ID NO: 89 - protein, 1434 aa, Unknown
  Description of Unknown: Bacteroidetes oral taxon 274 str. F0058 polypeptide
MKNILGLDLGTNSIGWAYVKQAQNDSEKSEIAELGVRVNPLTVDEKTNFEKGKPISTNADRTLKRGARRNLQRYKLRRQELIELLKDYQVISDKTILAEDGKETTFETLRLRVKSAKEQVSLEELARILLMINKKRGYKSSRKAKNEDEGQLIDGMEIARRLYDENLTTGQLSLQLLKEGKKSLPDYYRSDLQHELDKVWNFQKQFHPDILTDEFYTSIQGKGQKATRESFSSKYGIDTAENKGSREEKKLQAYQWRADATHKELTKEELAFVITEINNNINNSSGYLGAISDRSKELIFANETVGEYLWKQIQNDPHTSLKNQVFYRQDYFDEFERIWETQSGFYPQILTESLKNELRDILIFYQRKLKSQKALVSICEFESKEIPLKDKQGNPISKNGIPVTKLVGPKVAPKSSPLFQEFKIWQNLNNVLVRPKGSRKRKVTTNQQSTLLEGQEPVFELNLEQKELLFEELNLKGNLKTDYCLELIGYSAKEWEMNYPTLEGNKTNKALYEAYLKIIDSEGYDAKKLLKVKTDKDDINLDDIKVSASEIKTMISDIFNELGINTKILDFDAELERKQFEAQASYRLWHLLYSYEGDDSKSGNELLYRLLEDKFGFKREHSKTLANVSLLSDYGNLSTKAIRTIYPYIKENKFSTACELAGYRHSKLSISKEENENRTLKDTLDVLKKNSLRQPVVEKILNQMINLINELIEKHSEKDEKGNIVKYFKFDEIHIELARELKKNAEERRELDSKVREGKDRNEKIITILKSEFGLPYPTKNDITRYRLYEELKDNGYKDLYTNTYIPREKLFSKEIDIEHIIPKSRLFNDSFSNKTICYRQDNLNKGERTAYDYIEGLGKTQLDEYLNRVENLYTNKFITKAKYRNLLKKESEIGDGFIERDLRETQYIAKKAKEMLLQITRHVVSTTGSITDRLRDDWELVNVMRELNLPKYKVLGLTEIQERKNGQTVEVITDWTKRNDHRHHAMDALTVAFTKHSHIQYLNFLNARKDEKHKEYSNIMGIQQLETEKTTDKDGKDRRVFKTPIPNFRQVAKEHLESILISHKTKNKVVTRATNKIAGSKKQQETLSPRGQLHKETVYGKYRRYVQKEEKIGSKFDLQTIERVANPLYKRLLTKRLEENGGDPKKAFTGKNALAKSPIYLDETQTQQLPEKVKLVWLETDFSIRKDITPDNFKDEKSIDKVLDEGIKRILKDRLKSFDGDAKRAFTDLEQNPIWLNKEKGIAIKRVTISGVSNAEPLHTKKDHLGNEIFDDTGKPIPVDYVSTGNNHHIAIYRDENGNLQEKAVSFFEAVTRANQGLPTVDKTYNQHLGWQFLFTMKQNEMFVFPNKETGFDPQEIDLLDPKNKKLISPNLFRVQKISTKNYFFRHHLETSVETHNALNGVTYKSQLGLNGITDIIKVRINHLGDIVHIGEY

SEQ ID NO: 90 - protein, 1153 aa, Barnesiella intestinihominis
  Barnesiella intestinihominis YIT 11860
MKNILGLDLGLSSIGWSVIRENSEEQELVAMGSRVVSLTAAELSSFTQGNGVSINSQRTQKRTQRKGYDRYQLRRTLLRNKLDTLGMLPDDSLSYLPKLQLWGLRAKAVTQRIELNELGRVLLHLNQKRGYKSIKSDFSGDKKITDYVKTVKTRYDELKEMRLTIGELFFRRLTENAFFRCKEQVYPRQAYVEEFDCIMNCQRKFYPDILTDETIRCIRDEIIYYQRPLKSCKYLVSRCEFEKRFYLNAAGKKTEAGPKVSPRTSPLFQVCRLWESINNIVVKDRRNEIVFISAEQRAALFDFLNTHEKLKGSDLLKLLGLSKTYGYRLGEQFKTGIQGNKTRVEIERALGNYPDKKRLLQFNLQEESSSMVNTETGEIIPMISLSFEQEPLYRLWHVLYSIDDREQLQSVLRQKFGIDDDEVLERLSAIDLVKAGFGNKSSKAIRRILPFLQLGMNYAEACEAAGYNHSNNYTKAENEARALLDRLPAIKKNELRQPVVEKILNQMVNVVNALMEKYGRFDEIRVELARELKQSKEERSNTYKSINKNQRENEQIAKRIVEYGVPTRSRIQKYKMWEESKHCCIYCGQPVDVGDFLRGFDVEVEHIIPKSLYFDDSFANKVCSCRSCNKEKNNRTAYDYMKSKGEKALSDYVERVNTMYTNNQISKTKWQNLLTPVDKISIDFIDRQLRESQYIARKAKEILTSICYNVTATSGSVTSFLRHVWGWDTVLHDLNFDRYKKVGLTEVIEVNHRGSVIRREQIKDWSKRFDHRHHAIDALTIACTKQAYIQRLNNLRAEEGPDFNKMSLERYIQSQPHFSVAQVREAVDRILVSFRAGKRAVTPGKRYIRKNRKRISVQSVLIPRGALSEESVYGVIHVWEKDEQGHVIQKQRAVMKYPITSINREMLDKEKVVDKRIHRILSGRLAQYNDNPKEAFAKPVYIDKECRIPIRTVRCFAKPAINTLVPLKKDDKGNPVAWVNPGNNHHVAIYRDEDGKYKERTVTFWEAVDRCRVGIPAIVTQPDTIWDNILQRNDISENVLESLPDVKWQFVLSLQQNEMFILGMNEEDYRYAMDQQDYALLNKYLYRVQKLSKSDYSFRYHTETSVEDKYDGKPNLKLSMQMGKLKRVSIKSLLGLNPHKVHISVLGEIKEIS

SEQ ID NO: 91 - protein, 1352 aa, Belliella baltica
MKKILGLDLGTTSIGWAFIKEPEKDVVGSEIVDMGVRIVPLSSDEENDFAKGNTISINADRTLKRGARRNLQRFKQRRNALLEIFKEKKLISTNFKYAEDGPSSTFSTLNLRAKAAKEKIELQDLVKVLLQINKKRGYKSSRKAKSEEDDGSAIDSMGIAKELYENDLTPGQWVYEALQKGRKNVPDFYRSDLQEEFKKIVNYQSEFFPDIFNASFVEDWMGKASTPTKQYFNKKGVQLAENKGKREERRLQEYKWRAEAVNFKIDLSEIALILSQINSQISNSSGYLGAISDRSKELYFKNLTVGQYLYQQIKKNPHTRLKGQVFYRQDYLDEFERIWSVQSSFYPQLNDALKREVRDITIFFQRRLKSQKHLISNCEFEDHHKVVPKSHPVFQEFRIWQNLNNLLLIKKDNLNEKFDLELESKIALANELAFKRELNVKDALKILGLKPNEWEFNFTKIEGNRTNQAFFDAFAKIIELEDGEPIDLGDLKADDILDQFSEAFLRIGIDTELLQVNSDIEGAEYEKQSYIQFWHLLYSSEDDQKLKLNLIRKFGFKPEHAKILASISLQDDHASLSSRAIKKILPHLQSGLIYDKACTYAGYNHSSSFTKDENEKRELRAELELLKKNSLRNPVVEKILNQMINVVNAILKDPELGRPDEIRVEMARELKANAEQRKNMTSNIASATRDHDKYREILKSEFGLKRVTKNDLLRYKLWLETDGISLYTGKPIEASKLFSKEYDIEHIIPKARLFDDSFSNKTICERQLNIDKANVTAFSFLQNKLSADEFEQYQSRVKSLYGKLSKAKIQKLLMANDKIPEDFIARQLQETRYISKKAKEILFEISRRVSVTTGTITDKLREDWGLVEIMKELNWEKYDKLGLTYTIEGKHGERLNKIKDWSKRNDHRHHAMDALTVALTKPAYIQYLNNLNAKGLNNKKGTEVFAIEQKYLKRENGKLCFIPPIENIRSEAKKHLSRILVSYKAKNKVVTINKNKTKSKAGLNEQIALTPRGQLHKETVYGKSFHYSTKFEKIGASFNVQKINTVAKKEEREALLKRLAENGNDPKKAFTGKNTLNKMPIYLDLGKNIKLSEKVKTVVLEQNYTIRKNIDPDLKVDKVIDVGIKRILESRLEEFGGNAKLAFSNLEENPIWLNKEKGISIKRVKISGVSNVESLHVKKDHFGEPILDQEGNEIPVDFVSTGNNHHVAIYEDENGNLQEEVVSFFEAVVRQNQGLPIIKKNHTLGWKFLFTLKQNEYFVFPSDDFVPADVDLMDEQNYHLISPNLFRVQKIARKNYVFNNHLETKAVDNDLLKSKKELSKITYHFYQTPEHLRGIIKIRINHLGKIIQIGEY

SEQ ID NO: 92 - protein, 1415 aa, Bergeyella zoohelcum
  Bergeyella zoohelcum ATCC 43767
MKHILGLDLGTNSIGWALIERNIEEKYGKIIGMGSRIVPMGAELSKFEQGQAQTKNADRRTNRGARRLNKRYKQRRNKLIYILQKLDMLPSQIKLKEDFSDPNKIDKITILPISKKQEQLTAFDLVSLRVKALTEKVGLEDLGKIIYKYNQLRGYAGGSLEPEKEDIFDEEQSKDKKNKSFIAFSKIVFLGEPQEEIFKNKKLNRRAIIVETEEGNFEGSTFLENIKVGDSLELLINISASKSGDTITIKLPNKTNWRKKMENIENQLKEKSKEMGREFYISEFLLELLKENRWAKIRNNTILRARYESEFEAIWNEQVKHYPFLENLDKKTLIEIVSFIFPGEKESQKKYRELGLEKGLKYIIKNQVVFYQRELKDQSHLISDCRYEPNEKAIAKSHPVFQEYKVWEQINKLIVNTKIEAGTNRKGEKKYKYIDRPIPTALKEWIFEELQNKKEITFSAIFKKLKAEFDLREGIDFLNGMSPKDKLKGNETKLQLQKSLGELWDVLGLDSINRQIELWNILYNEKGNEYDLTSDRTSKVLEFINKYGNNIVDDNAEETAIRISKIKFARAYSSLSLKAVERILPLVRAGKYFNNDFSQQLQSKILKLLNENVEDPFAKAAQTYLDNNQSVLSEGGVGNSIATILVYDKHTAKEYSHDELYKSYKEINLLKQGDLRNPLVEQIINEALVLIRDIWKNYGIKPNEIRVELARDLKNSAKERATIHKRNKDNQTINNKIKETLVKNKKELSLANIEKVKLWEAQRHLSPYTGQPIPLSDLFDKEKYDVDHIIPISRYFDDSFTNKVISEKSVNQEKANRTAMEYFEVGSLKYSIFTKEQFIAHVNEYFSGVKRKNLLATSIPEDPVQRQIKDTQYIAIRVKEELNKIVGNENVKTTTGSITDYLRNHWGLTDKFKLLLKERYEALLESEKFLEAEYDNYKKDFDSRKKEYEEKEVLFEEQELTREEFIKEYKENYIRYKKNKLIIKGWSKRIDHRHHAIDALIVACTEPAHIKRLNDLNKVLQDWLVEHKSEFMPNFEGSNSELLEEILSLPENERTEIFTQIEKFRAIEMPWKGFPEQVEQKLKEIIISHKPKDKLLLQYNKAGDRQIKLRGQLHEGTLYGISQGKEAYRIPLTKFGGSKFATEKNIQKIVSPFLSGFIANHLKEYNNKKEEAFSAEGIMDLNNKLAQYRNEKGELKPHTPISTVKIYYKDPSKNKKKKDEEDLSLQKLDREKAFNEKLYVKTGDNYLFAVLEGEIKTKKTSQIKRLYDIISFFDATNFLKEEFRNAPDKKTFDKDLLFRQYFEERNKAKLLFTLKQGDFVYLPNENEEVILDKESPLYNQYWGDLKERGKNIYVVQKFSKKQIYFIKHTIADIIKKDVEFGSQNCYETVEGRSIKENCFKLEIDRLGNIVKVIKR

SEQ ID NO: 93 - protein, 1430 aa, Bergeyella zoohelcum
  Bergeyella zoohelcum CCUG 30536
MKHILGLDLGTNSIGWAVVKEAQNDNEQSEIVDVGVRVNPLTTDEKTNFEKGKPISTNADRTLKRSARRNLQRYKLRRKELIELLKEHQLISTDTILTENGKGTTFQTLELRAKSAKEKISLEELARVFLTINKKRGYKSSRKAKNEDEGQLIDGMEIAKRLYEENLTTGQLSLQLLKEGKKSLPDYYRSDLQFELDKVWNFQKQFHSDILTDEFYAQLKGKGQRATSALFLAKYQIYTAENKGSREDKKLQAYQWRVDALSKELTREQLAFVITEINNNLNNSSGYLGAISDRSKELYFNNETVGEYLWKQIAANPHTSLKNQVFYRQDYLDEFEQIWKTQSAFYPEILTDELKKELRDVVIFYQRKLKSQKSLVSFCEFENKEIEIKKEDGTSTKKVIGLKVAPKSSPLFQEFKIWQNLNNVLIRKKGSKTKKVAKNQQAVLFEEEKTISELDLEAKQALFNELNLKGNLKADYCLEILGYSPKEWEMNYSVLEGNRTNKALYEAYLKITDLEGYDAKNHLKVKLNKDEVELDDLKVPASEIKDMVQAIFKEAGINTDILHFNAELDGKDFENQASYQLWHLLYSYEGDDSKSGNELLYKLLETKFGFKKEYAQILANVSLSDDYGSLSTKAMRKIHPYIKENKFSTACELAGYRHSKHSLTKEENDNRVLKDSLEVLKKNSLRQPVVEKILNQMINLVNALLKKYRTENPNFKFDEIRIELARELKKNAEERANMTANINKAKTEHEKIIKILKNEFGLPNPTRNDIIRYRLYEELKANGYKDLYTNIKIPQEKLFTKEIDIEHIIPKSRVFDDSFSNKTLSFRKTNLDKGERTAFDYMESKFGADKLEEYVARVEDLYKNNIISKAKYQKLLKKESEIGDGFVERDLRETQYIAKKAKEILLQITPNVLSTSGGITDRLREDWDLINVMKELNLPKYRALGLTQMEDRKYGQQVEVITDWTKRNDHRHHAMDALTVAFTKHNHIQYLNYLNARKNEKHKEHSNIMGIQQLETIKVTDKNGNEKRVFKAPMPNFRQVTKAFLENILISHKAKNKVVTKNKNKVAGSNKVQEVLTPRGQLHKETVYGKYQYYVQKEEKIGAKFDLETIKKVANPLYQSLLKKRLEENGGDPKKAFTGKNSLAKNPIYLDDTQTEQLPEKVKLVWLENSFSIRKDITPENFKDEKLIDKILDEGVKRILKERLQSFGNDAKKAFSDLDKNPIWLNKEKGITIKRVTISGVANAEPLHTKKDHLGKEILDKEGKPIPVDFISTGSNHHVAVYRDEKGNLQEKVVSVFEAVVRANQGLPIIDKTYNQHLGWEFLFTMKQNEMFVFPNESTGFNPNDIDLLDPKNKRIISPNLFRVQKFSKLQYGNSFVREFVFRHHLETTVEDRKELQGITYKQMKNSTFFNDIIKVRINHLGDIVSIGEY

SEQ ID NO: 94 - protein, 1420 aa, Bifidobacterium bifidum
MSRKNYVDDYAISLDIGNASVGWSAFTPNYRLVRAKGHELIGVRLFDPADTAESRRMARTTRRRYSRRRWRLRLLDALFDQALSEIDPSFLARRKYSWVHPDDENNADCWYGSVLFDSNEQDKRFYEKYPTIYHLRKALMEDDSQHDIREIYLAIHHMVKYRGNFLVEGTLESSNAFKEDELLKLLGRITRYEMSEGEQNSDIEQDDENKLVAPANGQLADALCATRGSRSMRVDNALEALSAVNDLSREQRAIVKAIFAGLEGNKLDLAKIFVSKEFSSENKKILGIYFNKSDYEEKCVQIVDSGLLDDEEREFLDRMQGQYNAIALKQLLGRSTSVSDSKCASYDAHRANWNLIKLQLRTKENEKDINENYGILVGWKIDSGQRKSVRGESAYENMRKKANVFFKKMIETSDLSETDKNRLIHDIEEDKLFPIQRDSDNGVIPHQLHQNELKQIIKKQGKYYPFLLDAFEKDGKQINKIEGLLTFRVPYFVGPLVVPEDLQKSDNSENHWMVRKKKGEITPWNFDEMVDKDASGRKFIERLVGTDSYLLGEPTLPKNSLLYQEYEVLNELNNVRLSVRTGNHWNDKRRMRLGREEKTLLCQRLFMKGQTVTKRTAENLLRKEYGRTYELSGLSDESKFTSSLSTYGKMCRIFGEKYVNEHRDLMEKIVELQTVFEDKETLLHQLRQLEGISEADCALLVNTHYTGWGRLSRKLLTTKAGECKISDDFAPRKHSIIEIMRAEDRNLMEIITDKQLGFSDWIEQENLGAENGSSLMEVVDDLRVSPKVKRGIIQSIRLIDDISKAVGKRPSRIFLELADDIQPSGRTISRKSRLQDLYRNANLGKEFKGIADELNACSDKDLQDDRLFLYYTQLGKDMYTGEELDLDRLSSAYDIDHIIPQAVTQNDSIDNRVLVARAENARKTDSFTYMPQIADRMRNFWQILLDNGLISRVKFERLTRQNEFSEREKERFVQRSLVETRQIMKNVATLMRQRYGNSAAVIGLNAELTKEMHRYLGFSHKNRDINDYHHAQDALCVGIAGQFAANRGFFADGEVSDGAQNSYNQYLRDYLRGYREKLSAEDRKQGRAFGFIVGSMRSQDEQKRVNPRTGEVVWSEEDKDYLRKVMNYRKMLVTQKVGDDFGALYDETRYAATDPKGIKGIPFDGAKQDTSLYGGFSSAKPAYAVLIESKGKTRLVNVTMQEYSLLGDRPSDDELRKVLAKKKSEYAKANILLRHVPKMQLIRYGGGLMVIKSAGELNNAQQLWLPYEEYCYFDDLSQGKGSLEKDDLKKLLDSILGSVQCLYPWHRFTEEELADLHVAFDKLPEDEKKNVITGIVSALHADAKTANLSIVGMTGSWRRMNNKSGYTFSDEDEFIFQSPSGLFEKRVTVGELKRKAKKEVNSKYRTNEKRLPTLSGASQP

SEQ ID NO: 95 - protein, 1138 aa, Bifidobacterium dentium
MLCRCHRRYRIGIDVGLMSVGLAAIEVDETGFPIRILNIQSVIHDGGIDPQLGKKKSISRKAISGVARRTRRMRRRKVVRLRQLDATLESLGFPIVEPDSLDTWEIWLTRAKLASSYIQDDETRKEDVSIALRHIARHRGWRNPYSNVESLFVDVAPSEQYEELRRKAEEKLGTSLSGNPTSAEIVECILKRQVGEVQLRTRSRKGVNGNAVEKEGLLPTKLMQSDNAAEIRRIFKVQRIDDETGRKLLRAVFKACSPKGSVERRVGRDALAPGLPRALKASLAFQEYRIANVLTNLVISEDGTKRKLTIAEKQRVFGFLSSNETDDITWIDVAEKLGLERRQIQGVGCLTADGEERISSTPPRNITALHIHSAKPVIREKLVAWWKAASPTVRETMVELLSNTVDIDRVREDMDYSSAVAFIDSLGDEELTALDSVDLLSGRAAYSRQTLKQLTERMLNTDDDLHEARKAVFGVDDNWKPPVDAISTSVGNPAVDRVLKIVNRYLLACQKRWRNPQSVQIEHVRESFSSVAKAKETERVQGERARYRNDLRRELCEQEGLNKIRESDIRRWESVQRQNGTCLYCGSPITFRTCEMDHIVPRKGVGSTNTRVNLAAACAACNKLKSNTAFSVWARTEGAANRKVSQRDAIERVKTFIFNKSVPPREQRAFKQAVISRLRQAESDPAIDNRSIESVAWMADELHRRIEAYFNQDADVSGNTPATQVWVFQGRVTALARKASGIEGRIHFAGEWKKTRLDRRHHAVDAAVIAMMNHSAAQTLVERDSLRLSQWITRKPETWKNYPFSEGQKKTRFKEWLDCMNALLDLLNDALDSDRVPVTRCQRMSLGNSQAHAATIRKMKRVELFSPMDADLIRRASTPALYCALTRLPEYSPEKGLPENRGREIVLNGRHIRSTETVDFFASGAAQLMVRNGSAEIGDSIHHMRIYRYRKTGAKSQEYVYGMIRVFQIDLLHASSENLFAVQLPSQSVSVRYGDKNVVQAIQEGRAEYLGHIVPNDEILISYEGVRMKDSEKIGAYANDFSGTASELAQRRHWVVVGSDVSKLALRPSYLSEEGLENSGSESERLSKQTRKVIEGKGWVVAVNILAKYHPVVIRRNALGEPRFRTNSGMPVSWRWDR

SEQ ID NO: 96 - protein, 1187 aa, Bifidobacterium longum
MLSRQLLGASHLARPVSYSYNVQDNDVHCSYGERCFMRGKRYRIGIDVGLNSVGLAAVEVSDENSPVRLLNAQSVIHDGGVDPQKNKEAITRKNMSGVARRTRRMRRRKRERLHKLDMLLGKFGYPVIEPESLDKPFEEWHVRAELATRYIEDDELRRESISIALRHMARHRGWRNPYRQVDSLISDNPYSKQYGELKEKAKAYNDDATAAEEESTPAQLVVAMLDAGYAEAPRLRWRTGSKKPDAEGYLPVRLMQEDNANELKQIFRVQRVPADEWKPLFRSVFYAVSPKGSAEQRVGQDPLAPEQARALKASLAFQEYRIANVITNLRIKDASAELRKLTVDEKQSIYDQLVSPSSEDITWSDLCDFLGFKRSQLKGVGSLTEDGEERISSRPPRLTSVQRIYESDNKIRKPLVAWWKSASDNEHEAMIRLLSNTVDIDKVREDVAYASAIEFIDGLDDDALTKLDSVDLPSGRAAYSVETLQKLTRQMLTTDDDLHEARKTLFNVTDSWRPPADPIGEPLGNPSVDRVLKNVNRYLMNCQQRWGNPVSVNIEHVRSSFSSVAFARKDKREYEKNNEKRSIFRSSLSEQLRADEQMEKVRESDLRRLEAIQRQNGQCLYCGRTITFRTCEMDHIVPRKGVGSTNTRTNFAAVCAECNRMKSNTPFAIWARSEDAQTRGVSLAEAKKRVTMFTFNPKSYAPREVKAFKQAVIARLQQTEDDAAIDNRSIESVAWMADELHRRIDWYFNAKQYVNSASIDDAEAETMKTTVSVFQGRVTASARRAAGIEGKIHFIGQQSKTRLDRRHHAVDASVIAMMNTAAAQTLMERESLRESQRLIGLMPGERSWKEYPYEGTSRYESFHLWLDNMDVLLELLNDALDNDRIAVMQSQRYVLGNSIAHDATIHPLEKVPLGSAMSADLIRRASTPALWCALTRLPDYDEKEGLPEDSHREIRVHDTRYSADDEMGFFASQAAQIAVQEGSADIGSAIHHARVYRCWKTNAKGVRKYFYGMIRVFQTDLLRACHDDLFTVPLPPQSISMRYGEPRVVQALQSGNAQYLGSLVVGDEIEMDFSSLDVDGQIGEYLQFFSQFSGGNLAWKHWVVDGFFNQTQLRIRPRYLAAEGLAKAFSDDVVPDGVQKIVTKQGWLPPVNTASKTAVRIVRRNAFGEPRLSSAHHMPCSWQWRHE

SEQ ID NO: 97 - protein, 1124 aa, Bifidobacterium longum
  Bifidobacterium longum subsp. longum 2-2B
LTGHSGHTFWPTSSSPPIQLEQEKRPLPQRNTSQNGHTFWPITRERCFMRGKRYRIGIDVGLNSVGLAAVEVSDENSPVRLLNAQSVIHDGGVDPQKNKEAITRKNMSGVARRTRRMRRRKRERLHKLDMLLGKFGYPVIEPESLDKPFEEWHVRAELATRYIEDDELRRESISIALRHMARHRGWRNPYRQVDSLISDNPYSKQYGELKEKAKAYNDDATAAEEESTPAQLVVAMLDAGYAEAPRLRWRTGSKKPDAEGYLPVRLMQEDNANELKQIFRVQRVPADEWKPLFRSVFYAVSPKGSAEQRVGQDPLAPEQARALKASLAFQEYRIANVITNLRIKDASAELRKLTVDEKQSIYDQLVSPSSEDITWSDLCDFLGFKRSQLKGVGSLTEDGEERISSRPPRLTSVQRIYESDNKIRKPLVAWWKSASDNEHEAMIRLLSNTVDIDKVREDVAYASAIEFIDGLDDDALTKLDSVDLPSGRAAYSVETLQKLTRQMLTTDDDLHEARKTLFNVTDSWRPPADPIGEPLGNPSVDRVLKNVNRYLMNCQQRWGNPVSVNIEHVRSSFSSVAFARKDKREYEKNNEKRSIFRSSLSEQLRADEQMEKVRESDLRRLEAIQRQNGQCLYCGRTITFRTCEMDHIVPRKGVGSTNTRTNFAAVCAECNRMKSNTPFAIWARSEDAQTRGVSLAEAKKRVTMFTFNPKSYAPREVKAFKQAVIARLQQTEDDAAIDNRSIESVAWMADELHRRIDWYFNAKQYVNSASIDDAEAETMKTTVSVFQGRVTASARRAAGIEGKIHFIGQQSKTRLDRRHHAVDASVIAMMNTAAAQTLMERESLRESQRLIGLMPGERSWKEYPYEGTSRYESFHLWLDNMDVLLELLNDALDNDRIAVMQSQRYVLGNSIAHDATIHPLEKVPLGSAMSADLIRRASTPALWCALTRLPDYDEKEGLPEDSHREIRVHDTRYSADDEMGFFASQAAQIAVQEGSADIGSAIHHARVYRCWKTNAKGVRKYFYGMIRVFQTDLLRACHDDLFTVPLPPQSISMRYGEPRVVQALQSGNAQYLGSLVVGDEIEMDFPVSMLMVRLASIYNSSRSLVEGTLHGNIGLLMDSLTRRS

SEQ ID NO: 98 - protein, 1138 aa, Bifidobacterium sp.
MNSVGLAAVEVSDENSPVRLLNAQSVIHDGGVDPQKNKEAITRKNMSGVARRTRRMRRRKRERLHKLDMLLGKFGYPVIEPESLDKPFEEWHVRAELATRYIEDDELRRESISIALRHMARHRGWRNPYRQVDSLISDNPYSKQYGELKEKAKAYNDDATAAEEESTPAQLVVAMLDAGYAEAPRLRWRTGSKKPDAEGYLPVRLMQEDNANELKQIFRVQRVPADEWKPLFRSVFYAVSPKGSAEQRVGQDPLAPEQARALKASLAFQEYRIANVITNLRIKDASAELRKLTVDEKQSIYDQLVSPSSEDITWSDLCDFLGFKRSQLKGVGSLTEDGEERISSRPPRLTSVQRIYESDNKIRKPLVAWWKSASDNEHEAMIRLLSNTVDIDKVREDVAYASAIEFIDGLDDDALTKLDSVDLPSGRAAYSVETLQKLTRQMLTTDDDLHEARKTLFNVTDSWRPPADPIGEPLGNPSVDRVLKNVNRYLMNCQQRWGNPVSVNIEHVRSSFSSVAFARKDKREYEKNNEKRSIFRSSLSEQLRADEQMEKVRESDLRRLEAIQRQNGQCLYCGRTITFRTCEMDHIVPRKGVGSTNTRTNFAAVCAECNRMKSNTPFAIWARSEDAQTRGVSLAEAKKRVTMFTFNPKSYAPREVKAFKQAVIARLQQTEDDAAIDNRSIESVAWMADELHRRIDWYFNAKQYVNSASIDDAEAETMKTTVSVFQGRVTASARRAAGIEGKIHFIGQQSKTRLDRRHHAVDASVIAMMNTAAAQTLMERESLRESQRLIGLMPGERSWKEYPYEGTSRYESFHLWLDNMDVLLELLNDALDNDRIAVMQSQRYVLGNSIAHDATIHPLEKVPLGSAMSADLIRRASTPALWCALTRLPDYDEKEGLPEDSHREIRVHDTRYSADDEMGFFASQAAQIAVQEGSADIGSAIHHARVYRCWKTNAKGVRKYFYGMIRVFQTDLLRACHDDLFTVPLPPQSISMRYGEPRVVQALQSGNAQYLGSLVVGDEIEMDFSSLDVDGQIGEYLQFFSQFSGGNLAWKHWVVDGFFNQTQLRIRPRYLAAEGLAKAFSDDVVPDGVQKIVTKQGWLPPVNTASKTAVRIVRRNAFGEPRLSSAHHMPCSWQWRHE

SEQ ID NO: 99 - protein, 1151 aa, Bifidobacterium sp.
  Bifidobacterium sp. 12_1_47BFAA
MRGKRYRIGIDVGLNSVGLAAVEVSDENSPVRLLNAQSVIHDGGVDPQKNKEAITRKNMSGVARRTRRMRRRKRERLHKLDMLLGKFGYPVIEPESLDKPFEEWHVRAELATRYIEDDELRRESISIALRHMARHRGWRNPYRQVDSLISDNPYSKQYGELKEKAKAYNDDATAAEEESTPAQLVVAMLDAGYAEAPRLRWRTGSKKPDAEGYLPVRLMQEDNANELKQIFRVQRVPADEWKPLFRSVFYAVSPKGSAEQRVGQDPLAPEQARALKASLAFQEYRIANVITNLRIKDASAELRKLTVDEKQSIYDQLVSPSSEDITWSDLCDFLGFKRSQLKGVGSLTEDGEERISSRPPRLTSVQRIYESDNKIRKPLVAWWKSASDNEHEAMIRLLSNTVDIDKVREDVAYASAIEFIDGLDDDALTKLDSVDLPSGRAAYSVETLQKLTRQMLTTDDDLHEARKTLFNVTDSWRPPADPIGEPLGNPSVDRVLKNVNRYLMNCQQRWGNPVSVNIEHVRSSFSSVAFARKDKREYEKNNEKRSIFRSSLSEQLRADEQMEKVRESDLRRLEAIQRQNGQCLYCGRTITFRTCEMDHIVPRKGVGSTNTRTNFAAVCAECNRMKSNTPFAIWARSEDAQTRGVSLAEAKKRVTMFTFNPKSYAPREVKAFKQAVIARLQQTEDDAAIDNRSIESVAWMADELHRRIDWYFNAKQYVNSASIDDAEAETMKTTVSVFQGRVTASARRAAGIEGKIHFIGQQSKTRLDRRHHAVDASVIAMMNTAAAQTLMERESLRESQRLIGLMPGERSWKEYPYEGTSRYESFHLWLDNMDVLLELLNDALDNDRIAVMQSQRYVLGNSIAHDATIHPLEKVPLGSAMSADLIRRASTPALWCALTRLPDYDEKEGLPEDSHREIRVHDTRYSADDEMGFFASQAAQIAVQEGSADIGSAIHHARVYRCWKTNAKGVRKYFYGMIRVFQTDLLRACHDDLFTVPLPPQSISMRYGEPRVVQALQSGNAQYLGSLVVGDEIEMDFSSLDVDGQIGEYLQFFSQFSGGNLAWKHWVVDGFFNQTQLRIRPRYLAAEGLAKAFSDDVVPDGVQKIVTKQGWLPPVNTASKTAVRIVRRNAFGEPRLSSAHHMPCSWQWRHE

SEQ ID NO: 100 - protein, 1092 aa, Brevibacillus laterosporus
  Brevibacillus laterosporus GI-9
MAYTMGIDVGIASCGWAIVDLERQRIIDIGVRTFEKAENPKNGEALAVPRREARSSRRRLRRKKHRIERLKYMFVRNGLAVDIQHLEQTLRSQNEIDVWQLRVDGLDRMLTQKEWLRVLIHLAQRRGFQSNRKTDGSSEDGQVLVNVTENDRLMEEKDYRTVAEMMVKDEKFSDHKRNKNGNYHGVVSRASLLVEIHTLFESQRQHHNFLASKDFELEYINIWSSQRPVATKDQIEKMIGTCTFLPKEKRAPKASWHFQYFMLLQTINHIRITNAQGTRPLNKEEIEQVVNMALTKSKVSYHDIRKVLDLSEEYQFVGLDYGKEDEKKKVESKETIIKLDDYHKLNKIFNEVELAKGETWEAVDYDTVAYALTFFKDDEDIRDYLQNKYKDSKNRLVKNVANKEYTNELIEKVSTLSFRKVGHLSLKALRKIIPFLEQGMTYDKACQAAGFNFQGISKKKRSVVLPVIDQISNPVVNRALTQTRKVINALIKKYGSPETIHIETARELSKRFDERKNITKDYKENRDKNERAKKHLSELGIINPTGLDIVKYKLWCEQQGRCMYSNQPISFERLRESGYTEVDHIIPYSRSMNDSYNNRVLVMTRENREKSNQTPYEYMGNDTQRWDEFEQRVTTNPQIKKEKRQNLLLKGFTNRRELEMLERNLNDTRHITKYLSHFISTNLEFSPSDKKKKVVNTSGRITSHLRSRWGLEKNREQNDLHHAMDAVVIAVTSDSFIQQVTNYYKRKERRELNGDDKFPLPWKFFREEVIARLSPNPKEQIEALPNHFYSEDELADLQPIFVSRMPKRSITGEAHQAQFRRVVGKTKEGKNITAKKTALVDISYDKNGDFNMYGRETDPATYEAIKERYLEFGGNAKKAFSTDLHKPKKDGTKGPLIKSVRIMENKTLVHPVNKGKGVVYNSSIVRTDVFQRKEKYYLLPVYVTDVTKGKLPNKVIAAKKGYDDWIEVDDSFTFLYSLYPNDLIFIRQNPKKKISLKKRIESHSISDSKEVQEILTYYKGVDSSTAAIEFITHDGSYYAKGVGVQNLDCFEKYQVDILGNYSKVKGEKRLELETSDNNHKGKDVNSIKSTSR

SEQ ID NO: 101 - protein, 1428 aa, Burkholderiales bacterium
  Burkholderiales bacterium 1_1_47
MGKTHIIGVGLDLGGTYTGTFITSHPSDEAEHRDHSSAFTVVNSEKLSFSSKSRTAVRHRVRSYKGFDLRRRLLLLVAEYQLLQKKQTLAPEERENLRIALSGYLKRKGYARTEAETDTSVLESLDPSVFSSAPSFTNFFNDSEPLNIQWEAIANSPETTKALNKELSGQKEADFKKYIKTSFPEYSAKEILANYVEGRRAILDASKYIANLQSLGHKHRSKYLSDILQDMKRDSRITRLSEAFGSTDNLWRIIGNISNLQERAVRWYFNDAKFEQGQEQLDAVKLKNVLVRALKYLRSDDKEWSASQKQIIQSLEQSGDVLDVLAGLDPDRTIPPYEDQNNRRPPEDQTLYLNPKALSSEYGEKWKSWANKFAGAYPLLTEDLTEILKNTDRKSRIKIRSDVLPDSDYRLAYILQRAFDRSIALDECSIRRTAEDFENGVVIKNEKLEDVLSGHQLEEFLEFANRYYQETAKAKNGLWFPENALLERADLHPPMKNKILNVIVGQALGVSPAEGTDFIEEIWNSKVKGRSTVHSICNAIENERKTYGPYFSEDYKFVKTALKEGKTEKELSKKFAAVIKVLKMVSEVVPFIGKELRLSDEAQSKFDNPYSLAQLYNLIETERNGFSKVSLAAHLENAWRMTMTDGSAQCCRLPADCVRPFDGFIRKAIDRNSWEVAKRIAEEVKKSVDFTNGTVKIPVAIEANSFNFTASLTDLKYIQLKEQKLKKKLEDIQRNEENQEKRWLSKEERIRADSHGICAYTGRPLDDVGEIDHIIPRSLTLKKSESIYNSEVNLIFVSAQGNQEKKNNIYLLSNLAKNYLAAVFGASDLSQITNEIESTVLQLKAAGRLGYFDLLSEKERACARHALFLNSDSEARRAVIDVLGSRRKASVNGTQAWFVRSIFSKVRQALAAWTQETGNELIFDAISVPAADSSEMRKRFAEYRPEFRKPKVQPVASHSIDAMCIYLAACSDPFKTKRMGSQLAIYEPINFDNLFTGSCQVIQNTPRNFSDKTNIANSPIFKETIYAERFLDIIVSRGEIFIGYPSNMPFEEKPNRISIGGKDPFSILSVLGAYLDKAPSSEKEKLTIYRVVKNKAFELFSKVAGSKFTAEEDKAAKILEALHFVTVKQDVAATVSDLIKSKKELSKDSIENLAKQKGCLKKVEYSSKEFKFKGSLIIPAAVEWGKVLWNVFKENTAEELKDENALRKALEAAWPSSFGTRNLHSKAKRVFSLPVVATQSGAVRIRRKTAFGDFVYQSQDTNNLYSSFPVKNGKLDWSSPIIHPALQNRNLTAYGYRFVDHDRSISMSEFREVYNKDDLMRIELAQGTSSRRYLRVEMPGEKFLAWFGENSISLGSSFKFSVSEVFDNKIYTENAEFTKFLPKPREDNKHNGTIFFELVGPRVIFNYIVGGAASSLKEIFSEAGKERS

SEQ ID NO: 102 - protein, 1442 aa, Caenispirillum salinarum
  Caenispirillum salinarum AK4
MPVLSPLSPNAAQGRRRWSLALDIGEGSIGWAVAEVDAEGRVLQLTGTGVTLFPSAWSNENGTYVAHGAADRAVRGQQQRHDSRRRRLAGLARLCAPVLERSPEDLKDLTRTPPKADPRAIFFLRADAARRPLDGPELFRVLHHMAAHRGIRLAELQEVDPPPESDADDAAPAATEDEDGTRRAAADERAFRRLMAEHMHRHGTQPTCGEIMAGRLRETPAGAQPVTRARDGLRVGGGVAVPTRALIEQEFDAIRAIQAPRHPDLPWDSLRRLVLDQAPIAVPPATPCLFLEELRRRGETFQGRTITREAIDRGLTVDPLIQALRIRETVGNLRLHERITEPDGRQRYVPRAMPELGLSHGELTAPERDTLVRALMHDPDGLAAKDGRIPYTRLRKLIGYDNSPVCFAQERDTSGGGITVNPTDPLMARWIDGWVDLPLKARSLYVRDVVARGADSAALARLLAEGAHGVPPVAAAAVPAATAAILESDIMQPGRYSVCPWAAEAILDAWANAPTEGFYDVTRGLFGFAPGEIVLEDLRRARGALLAHLPRTMAAARTPNRAAQQRGPLPAYESVIPSQLITSLRRAHKGRAADWSAADPEERNPFLRTWTGNAATDHILNQVRKTANEVITKYGNRRGWDPLPSRITVELAREAKHGVIRRNEIAKENRENEGRRKKESAALDTFCQDNTVSWQAGGLPKERAALRLRLAQRQEFFCPYCAERPKLRATDLFSPAETEIDHVIERRMGGDGPDNLVLAHKDCNNAKGKKTPHEHAGDLLDSPALAALWQGWRKENADRLKGKGHKARTPREDKDFMDRVGWRFEEDARAKAEENQERRGRRMLHDTARATRLARLYLAAAVMPEDPAEIGAPPVETPPSPEDPTGYTAIYRTISRVQPVNGSVTHMLRQRLLQRDKNRDYQTHHAEDACLLLLAGPAVVQAFNTEAAQHGADAPDDRPVDLMPTSDAYHQQRRARALGRVPLATVDAALADIVMPESDRQDPETGRVHWRLTRAGRGLKRRIDDLTRNCVILSRPRRPSETGTPGALHNATHYGRREITVDGRTDTVVTQRMNARDLVALLDNAKIVPAARLDAAAPGDTILKEICTEIADRHDRVVDPEGTHARRWISARLAALVPAHAEAVARDIAELADLDALADADRTPEQEARRSALRQSPYLGRAISAKKADGRARAREQEILTRALLDPHWGPRGLRHLIMREARAPSLVRIRANKTDAFGRPVPDAAVWVKTDGNAVSQLWRLTSVVTDDGRRIPLPKPIEKRIEISNLEYARLNGLDEGAGVTGNNAPPRPLRQDIDRLTPLWRDHGTAPGGYLGTAVGELEDKARSALRGKAMRQTLTDAGITAEAGWRLDSEGAVCDLEVAKGDTVKKDGKTYKVGVITQGIFGMPVDAAGSAPRTPEDCEKFEEQYGIKPWKAKGIPLA

SEQ ID NO: 103 - protein, 984 aa, Campylobacter coli
  Campylobacter coli 1098
MARILAFDIGISSIGWAFSENDELKDCGVRIFTKAENPKTGESLALPRRLARSARKRLARRKARLNHLKHLIANEFKLNYEDYQSFDESLAKAYKGSLISPYELRFRALNELLSKQDFARVILHIAKRRGYDDIKNNGDEEKSEILKAIKQNEEKLVNYQSVGEYLYKEYFQKFKENSKEFINVRNKKESYERCIAQSFLKDELKLIFQKQREFGFSFSKKFEEEVLSVAFYKRALKDFSHLVGNCSFFTDEKRAPKNSPLAFMFVALTRIINLLNNLKNTEGILYTKDDLNALLNEVLKNGTLTYKQTKKLLGLSDDYEFKGEKGTYFIEFKKYKEFIKALGEHNLSQDDLNEIAKDITLIKDEIKLKKALAKYDLNQNQIDSLSKLEFKDHLNISFKALKLITPLMLEGKKYDEACNELNLKVAINEDKKDFLPAFNETYYKDEVTNPVVLRAIKEYRKVLNALLKKYGKVHKINIELAREVGKNYSQRAKIEKEQNENYKAKKDAELECEKLGLKINSKNILKLRLFKEQKEFCAYSGEKIKISDLQDEKMLEIDHIYPYSRSFDDSYMNKVLVFTKQNQEKLNQTPFEAFGNDSAKWQKIEVLAKNLPTKKQKRILDKNYKDKEQKNFKDRNLNDTRYIARLVLNYTKDYLDFLPLSDDENTKLNDTQKGSKVHVEAKSGMLTSALRHTWGFSAKDRNNHLHHAIDAVIIAYANNSIVKAFSDFKKEQESNSAELYAKKISELDYKNKRKFFEPFSGFRQKVLDKIDEIFVSKPERKKPSGALHEETFRKEEEFYQSYGGKEGVLKALELGKIRKVNGKIVKNGDMFRVDIFKHKKTNKFYAVPIYTMDFALKVLPNKAVARSKKGEIKDWILMDENYEFCFSLYKDSLILIQTKDMQEPEFVYYNAFTSSTVSLIVSKHDNKFETLSKNQKILFKNANEKEVIAKSIGIQNLKVFEKYIVSALGEVTKAEFRQREDFKK

SEQ ID NO: 104 - protein, 984 aa, Campylobacter coli
  Campylobacter coli 111-3
MARILAFDIGISSIGWAFSENDELKDCGVRIFTKAENPKTGESLALPRRLARSARKRLARRKARLNHLKHLIANEFKLNYEDYQSFDESLAKAYKGSLISPYELRFRALNELLSKQDFARVILHIAKRRGYDDIKNNGDEEKSEILKAIKQNEEKLVNYQSVGEYLYKEYFQKFKENSKEFINVRNKKESYERCIAQSFLKDELKLIFQKQREFGFSFSKKFEEEVLSVAFYKRALKDFSHLVGNCSFFTDEKRAPKNSPLAFMFVALTRIINLLNNLKNTEGILYTKDDLNTLLNEVLKNGTLTYKQTKKLLGLSDDYEFKGEKGTYFIEFKKYKEFIKALGEHNLSQDNLNEIAKDITLIKDEIKLKKALAKYDLNQNQIDSLSKLEFKDHLNISFKALKLITPLMLEGKKYDEAYNELNLKVAINEDKKDFLPAFNETYYKDEVTNPVVLRAIKEYRKVLNALLKKYGKVHKINIELAREVGKNHSQRAKIEKEQNENYKAKKDAELECEKLGLKINSKNILKLRLFKEQKEFCAYSGEKIKISDLQDEKMLEIDHIYPYSRSFDDSYMNKVLVFTKQNQEKLNQTPFEAFGNDSAKWQKIEVLAKNLPTKKQKRILDKNYKDKEQKDFKDRNLNDTRYIARLVLNYTKDYLDFLPLSDDENTKLNDTQKGSKVHVEAKSGMLTSALRHTWGFSAKDRNNHLHHAIDAVIIAYANNSIVKAFSDFKKEQESNSAELYAKKISELDYKNKRKFFEPFSGFRQKVLDKIDEIFVSKPERKKPSGALHEETFRKEEEFYQSYGGKEGVLKALELGKIRKVNGKIVKNGDMFRVDIFKHKKTNKFYAVPIYTMDFALKVLPNKAVARSKKGEIKDWILMDENYEFCFSLYKDSLILIQTKDMQEPELVYFNAFTSSTVSLIVSKHDNKFETLSKNQKILFKNANEKEVIAKSIGIQNLKVFEKYIVSALGEVTKAEFRQREDFKK

SEQ ID NO: 105 - protein, 987 aa, Campylobacter coli
  Campylobacter coli 132-6
MARILAFDIGISSIGWAFSENDELKDCGVRIFTKAENPKTGESLALPRRLARSARKRLARRKARLNHLKHLIANEFKLNYEDYQSFDESLAKAYKGSLISPYELRFRALNELLSKQDFARVILHIAKRRGYDDIKNNGDEEKSEILKAIKQNEEKLVNYQSVGEYLYKEYFQKFKENSKEFINVRNKKESYERCIAQSFLKDELKLIFQKQREFGFSFSKKFEEEVLSVAFYKRALKDFSHLVGNCSFFTDEKRAPKNSPLAFMFVALTRIINLLNNLKNTEGILYTKDDLNTLLNEVLKNGTLTYKQTKKLLGLSDDYEFKGEKGTYFIEFKKYKEFIKALGEHNLSQDNLNEIAKDITLIKDEIKLKKALAKYDLNQNQIDSLSKLEFKDHLNISFKALKLITPLMLEGKKYDEAYNELNLKVAINEDKKDFLPAFNETYYKDEVTNPVVLRAIKEYRKVLNALLKKYGKVHKINIELAREVGKNHSQRAKIEKEQNENYKAKKDAELECEKLGLKINSKNILKLRLFKEQKEFCAYSGEKIKISDLQDEKMLEIDHIYPYSRSFDDSYMNKVLVFTKQNQEKLNQTPFEAFGNDSAKWQKIEVLAKNLPTKKQKRILDKNYKDKEQKDFKDRNLNDTRYIARLVLNYTKDYLDFLPLSDDENTKLNDTQKGSKVHVEAKSGMLTSALRHTWGFSAKDRNNHLHHAIDAVIIAYANNSIVKAFSDFKKEQESNSAELYAKKISELDYKNKRKFFEPFSGFRQKVLDKIDEIFVSKPERKKPSGALHEETFRKEEEFYQSYGGKEGVLKALELGKIRKVNGKIVKNGDMFRVDIFKHKKTNKFYAVPIYTMDFALKVLPNKAVARSKKGEIKDWILMDENYEFCFSLYKDSLILIQTKDMQEPELVYFNAFTSSTVSLIVSKHDNKFETLSKNQKILFKNANEKEVIAKSIGIQNLKVFEKYIVSALGEVTKAEFRQREDFKNELR

SEQ ID NO: 106 - protein, 984 aa, Campylobacter coli
  Campylobacter coli 151-9
MARILAFDIGISSIGWAFSENDELKDCGVRIFTKAENPKTGESLALPRRLARSARKRLARRKARLNHLKHLIANEFKLNYEDYQSFDESLAKAYKGSLISPYELRFRALNELLSKQDFARVILHIAKRRGYDDIKNNGDEEKSEILKAIKQNEEKLVNYQSVGEYLYKEYFQKFKENSKEFINVRNKKESYERCIAQSFLKDELKLIFQKQREFGFSFSKKFEEEVLSVAFYKRALKDFSHLVGNCSFFTDEKRAPKNSPLAFMFVALTRIINLLNNLKNTEGILYTKDDLNTLLNEVLKNGTLTYKQTKKLLGLSDDYEFKGEKGTYFIEFKKYKEFIKALGEHNLSQDNLNEIAKDITLIKDEIKLKKALAKYDLNQNQIDSLSKLEFKDHLNISFKALKLITPLMLEGKKYDEAYNELNLKVAINEDKKDFLPAFNETYYKDEVTNPVVLRAIKEYRKVLNALLKKYGKVHKINIELAREVGKNHSQRAKIEKEQNENYKAKKDAELECEKLGLKINSKNILKLRLFKEQKEFCAYSGEKIKISDLQDEKMLEIDHIYPYSRSFDDSYMNKVLVFTKQNQEKLNQTPFEAFGNDSAKWQKIEVLAKNLPTKKQKRILDKNYKDKEQKDFKDRNLNDTRYIARLVLNYTKDYLDFLPLSNDENTKLNDTQKGSKVHVEAKSGMLTSALRHTWGFSAKDRNNHLHHAIDAVIIAYANNSIVKAFSDFKKEQESNSAELYAKKISELDYKNKRKFFEPFSGFRQKVLDKIDEIFVSKPERKKPSGALHEETFRKEEEFYQSYGGKEGVLKALELGKIRKVNGKIVKNGDMFRVDIFKHKKTNKFYAVPIYTMDFALKVLPNKAVARSKKGEIKDWILMDENYEFCFSLYKDSLILIQTKDMQEPELVYFNAFTSSTVSLIVSKHDNKFETLSKNQKILFKNANEKEVIAKSIGIQNLKVFEKYIVSALGEVTKAEFRQREDFKK

SEQ ID NO: 107 - protein, 984 aa, Campylobacter coli
  Campylobacter coli 1909
MARILAFDIGISSIGWAFSENDELKDCGVRIFTKAENPKTGESLALPRRLARSARKCLARRKARLNHLKHLIANEFKLNYEDYQSFDESLAKAYKGSLISPYELRFRALNELLSKQDFARVILHIAKRRGYDDIKNNGDEEKSEILKAIKQNEEKLVNYQSVGEYLYKEYFQKFKENSKEFINVRNKKESYERCIAQSFLKDELKLIFQKQREFGFSFSKKFEEEVLSVAFYKRALKDFSHLVGNCSFFTDEKRAPKNSPLAFMFVALTRIINLLNNLKNTEGILYTKDDLNALLNEVLKNGTLTYKQTKKLLGLSDDYEFKGEKGTYFIEFKKYKEFIKALGEHNLSQDDLNEIAKDITLIKDEIKLKKALAKYDLNQNQIDSLSKLEFKDHLNISFKALKLITPLMLEGKKYDEACNELNLKVAINEDKKDFLPAFNETYYKDEVTNPVVLRAIKEYRKVLNALLKKYGKVHKINIELAREVGKNHSQRAKIEKEQNENYKAKKDAELECEKLGLKINSKNILKLRLFKEQKEFCAYSGEKIKISDLQDEKMLEIDHIYPYSRSFDDSYMNKVLVFTKQNQEKLNQTPFEAFGNDSAKWQKIEVLAKNLPTKKQKRILDKNYKDKEQKNFKDRNLNDTRYIARLVLNYTKDYLDFLPLSDDENTKLNDTQKGSKVHVEAKSGMLTSALRHTWGFSAKDRNNHLHHAIDAVIIAYANNSIVKAFSDFKKEQESNSAELYAKKISELDYKNKRKFFEPFSGFRQKVLDKIDEIFVSKPERKKPSGALHEETFRKEEEFYQSYGGKEGVLKALELGKIRKVNGKIVKNGDMFRVDIFKHKKTNKFYAVPIYTMDFALKVLPNKAVARSKKGEIKDWILMDENYEFCFSLYKDSLILIQTKDMQEPEFVYYNAFTSSTVSLIVSKHDNKFETLSKNQKILFKNANEKEVIAKSIGIQNLKVFEKYIVSALGEVTKAEFRQREDFKK

SEQ ID NO: 108 - protein, 965 aa, Campylobacter coli
  Campylobacter coli 1957
MKIIGFNLGIANIGWALRENDEIIDCGVRVFDIPENPKNGNSLALERRENKARMKIVKRKKARMLATKTFLKKELNVDLSKLFLIGSTQSIYELRTKALSSLISKEELSAIILHIAKHRGYDDSALKNENGTIIEALNKNKEAMLKFKSVGEYFYKNFVQNKEVKKIRNTTEDYSNSVPRSLLKQELDLILDKQKELGLIKNADFKEKLFEIIFFKRPLKDFSNKIGNCIFFENEKRAAKNTISACEFVALGKVVNLLKSIEKDIGIVYEKDSINEIMSIILDKTSISYKKIRDILNLPQDINFKGLDYSKNNAENSKLVDLKKLNEFKKALGDGFANLDKDILDSIATDITLTKDTATLKEKLKNYNVLNAEQIEKLSELVFNDHINLSLKALKQIIPLMYEGKRYDEACELCNFTIAKNQEKNEYLPLFEKTRFAKDISSPVVIRAICEFRKLLNDIIRRYGSVHKIHLELTRDFGISFNDRKKIIKEIEQNEQSRIKALETIKELKLEETSKNIQIVRLFEDQKGICPYSGLKMDLKCLDELVIDYIRPYNRSLDDSYSNKILTFKKLNDLKQGKTPFEAFGEDEKLWAEINERIKEYNGKKRFKIFDKFFKDKKPFDFTEQTLQDTRWLTKLVASYLNEYLLFLPINEDENTALGYGEKGSKQHVVLSSGMITQMLRNFWYLGFKNHKDYKNNAMDAIIVAFTTNSIIFAFNNFKKELDLAKAEFYANKISESDYLLKRKFLPPFSGFKEQALEKVKNIFVSHSLKIKNKGTLHELTPLKIKELKNTYGDLDLAVKLGKIRKYNDKYYANAKGSLVRTDLFADKENKFHAVSIYKADFSTKKLPNKTPATTSNGETKEGIEMNENYNFCMSLYKNTPISVKIKGMKEPIICYYHGFNTSGSKITYKKHDNNYHNLSEDEMVVFRKNDKESIVVGKILEIKKYSISPSGELSLIENEERKWF

SEQ ID NO: 109 - protein, 984 aa, Campylobacter coli
  Campylobacter coli 2692
MARILAFDIGISSIGWAFSENDELKDCGVRIFTKAENPKTGESLALPRRLARSARKRLARRKARLNHLKHLIANEFKLNYEDYQSFDESLAKAYKGSLISPYELRFRALNELLSKQDFARVILHIAKRRGYDDIKNSDDKEKGAILKAIKQNEEKLTNYQSVGEYLYKEYFQKFKENSKEFTNVRNKKESYERCIAQSFLKDELKLIFKKQREFGFSFSKKFEEEVLSVAFYKRALKDFSHLVGNCSFFTDEKRAPKNSPLAFMFVALTRIINLLNNLKNTEGILYTKDDLNALLNEVLKNGTLTYKQTKKLLGLSDDYEFKGEKGTYFIEFKKYKEFIKALGDHSLSQDDLNEIAKDITLIKDEIKLKKALAKYDLNQNQIDSLSKLEFKDHLNISFKALKLITPLMLEGKKYDEACNELNLKVAINEDKKDFLPAFNETYYKDEVTNPVVLRAIKEYRKVLNALLKKYGKVHKINIELAREVGKNYSQRAKIEKEQNENYKAKKDAELECEKLGLKINSKNILKLRLFKEQKEFCAYSGEKIKISDLQDEKMLEIDHIYPYSRSFDDSYMNKVLVFTKQNQEKLNQTPFEAFGNDSAKWQKIEVLAKNLPTKKQKRILDKNYKDKEQKDFKDRNLNDTRYIARLVLNYTKDYLDFLPLSDDENTKLNDTQKGSKVHVEAKSGMLTSALRHTWGFSAKDRNNHLHHAIDAVIIAYANNSIVKAFSDFKKEQESNSAELYAKKISELDYKNKRKFFEPFSGFRQKVLDKIDEIFVSKPERKKPSGALHEETFRKEEEFYQSYGGKEGVLKALELGKIRKVNGKIVKNGDMFRVDIFKHKKTNKFYAVPIYTMDFALKVLPNKAVARSKKGEIKDWILMDENYEFCFSLYKDSLILIQTKDMQEPEFVYYNAFTSSTVSLIVSKHDNKFETLSKNQKILFKNANEKEVIAKSIGIQNLKVFEKYIVSALGEVTKAEFRQREDFKK

SEQ ID NO: 110 - protein, 984 aa, Campylobacter coli
  Campylobacter coli 59-2
MARILAFDIGISSIGWAFSENDELKDCGVRIFTKAENPKTGESLALPRRLARSARKRLARRKARLNHLKHLIANEFKLNYEDYQSFDESLAKAYKGSLISPYELRFRALNELLSKQDFARVILHIAKRRGYDDIKNNGDEEKGKILKAIKQNEEKLVNYQSVGEYLYKEYFQKFKENSKEFINVRNKKESYERCITQSFLKYELKLIFQKQREFGFSFSKKFEEEVLSVAFYKRALKDFSHLVGNCSFFSDEKRAPKNSPLAFMFVALTRIINLLNNLKNTEGILYTKDDLNALLNEVLKNGTLTYKQTKKLLGLSDDYEFKGEKGTYFIEFKKYKEFIKALGEHNLSQDDLNEIAKDITLIKDEIKLKKALAKYDLNQNQIDSLSKLEFKDHLNISFKALKLITPLMLEGKKYDEACNELNLKVAINEDKKDFLPAFNETYYKDEVTNPVVLRAIKEYRKVLNALLKKYGKVHKINIELAREVGKNYSQRAKIEKEQNENYKAKKDAELECEKLGLKINSKNILKLRLFKEQKEFCAYSGEKIKISDLQDEKMLEIDHIYPYSRSFDDSYMNKVLVFTKQNQEKLNQTPFEAFGNDSAKWQKIEVLAKNLPTKKQKRILDKNYKDKEQKNFKDRNLNDTRYIARLVLNYTKDYLDFLPLSDDENTKLNDTQKGSKVHVEAKSGMLTSALRHTWGFSAKDRNNHLHHAIDAVIIAYANNSIVKAFSDFKKEQESNSAELYAKKISELDYKNKRKFFEPFSGFRQKVLDKIDEIFVSKPERKKPSGALHEETFRKEEEFYQSYGGKEGVLKALELGKIRKVNGKIVKNGDMFRVDIFKHKKTNKFYAVPIYTMDFALKVLPNKAVARSKKGEIKDWILMDENYEFCFSLYKDSLILIQTKDMQEPEFVYYNAFTSSTVSLIVSKHDNKFETLSKNQKILFKNANEKEVIAKSIGIQNLKVFEKYIVSALGEVTKAEFRQREDFKK

SEQ ID NO: 111 - protein, 965 aa, Campylobacter coli
  Campylobacter coli 67-8
MKIIGFNLGIANIGWALRENDEIIDCGVRVFDIPENPKNGNSLALERRENKARMKIVKRKKARMLATKTFLKKELNVDLSKLFLIGSTQSIYELRTKALSSLISKEELSAIILHIAKHRGYDDSALKNENGTIIEALNKNKEAMLKFKSVGEYFYKNFVQNKEVKKIRNTTEDYSNSVPRSLLKQELDLILDKQKELGLIKNADFKAKLFEIIFFKRPLKDFSNKIGNCIFFENEKRAAKNTISACEFVALGKVVNLLKSIEKDIGIVYEKDSINEIMSIILDKTSISYKKIRDILNLPQDINFKGLDYSKNNAENSKLVDLKKLNEFKKALGDGFANLDKDILDSIATDITLTKDTATLKEKLKNYNVLNAEQIEKLSELVFNDHINLSLKALKQIIPLMYEGKRYDEACELCNFTIAKNQEKNEYLPLFEKTRFAKDISSPVVIRAICEFRKLLNDIIRRYGSVHKIHLELTRDFGISFNDRKKIIKEIEQNEQSRIKALETIKELKLEETSKNIQIVRLFEDQKGICPYSGLKMDLKCLDELVIDYIRPYNRSLDDSYSNKVLTFKKLNDLKQGKTPFEAFGEDEKLWAEINERIKEYNGKKRFKIFDKFFKDKKPFDFTEQTLQDTRWLTKLVASYLNEYLSFLPISEDENTALGYGEKGSKQHVVLSSGMITQMLRNFWYLGFKNHKNYKNNAMDAIIVAFTTNSIIFAFNNFKKELDLAKAEFYANKISESDYLLKRKFLPPFSGFKEQALEKVKNIFVSHSLKIKNKGTLHELTPLKIKELKNTYGDLDLAVKLGKIRKYNDKYYANTKGSLVRTDLFVDKENKFHAVSIYKADFSTKKLPNKTPATTSNGETKEGIEMNENYNFCMSLYKNTPVSVKIKGMKEPIICYYHGFNTSGSKITYKKHDNNYHNLSEDEMVVFRKNDKESIVVGKILEIKKYSISPSGELSLIENEKRKWF

SEQ ID NO: 112 - protein, 965 aa, Campylobacter coli
  Campylobacter coli 80352
MKIIGFNLGIANIGWALRENDEIIDCGVRVFDIPENPKNGNSLALERRENKARMKIVKRKKARMLATKTFLKKELNVDLSKLFLIGSTQSIYELRTKALSSLISKEELSAIILHIAKHRGYDDSALKNENGTIIEALNKNKEAMLKFKSVGEYFYKNFVQNKEVKKIRNTTEDYSNSVPRSLLKQELDLILDKQKELGLIKNADFKAKLFEIIFFKRPLKDFSNKIGNCIFFENEKRAAKNTISACEFVALGKVVNLLKSIEKDIGIVYEKDSINEIMSIILDKTSISYKKIRDILNLPQDINFKGLDYSKNNVENSKLVDLKKLNEFKKALGDGFTNLDKDILDSIATDITLTKDTATLKEKLKNYNVLNAEQIEKLSELVFNDHINLSLKALKQIIPLMYEGKRYDEACELCNFTIAKNQEKNEYLPLFEKTRFAKDISSPVVIRAICEFRKLLNDIIRRYGSVHKIHLELTRDFGISFNDRKKIIKEIEQNEQSRIKALETIKELKLEETSKNIQIVRLFEDQKGICPYSGLKMDLKCLDELVIDYIRPYNRSLDDSYSNKVLTFKKLNDLKQGKTPFEAFGEDEKLWAEINERIKEYNGKKRFKIFDKFFKDKKPFDFTEQTLQDTRWLTKLVASYLNEYLSFLPISEDENTALGYGEKGSKQHVILSSGMITQMLRNFWYLGFKNHKDYKNNAMDAIIVAFTTNSIIFTFNNFKKELDLAKAEFYANKISESDYLLKRKFLPPFSGFKEQALEKVKNIFVSHSLKIKNKGTLHELTPLKIKELKNTYGDLDLAVKLGKIRKYNDKYYANAKGSLVRTDLFADKENKFHAVSIYKADFSTKKLPNKTPATTSNGETKEGIEMNENYNFCMSLYKNTPISVKIKGMKEPIICYYHGFNTSGSKITYKKHDNNYHNLSEDEMVVFRKNDKESIVVGKILEIKKYSISPSGELSLIENEERKWF

SEQ ID NO: 113 - protein, 987 aa, Campylobacter coli
  Campylobacter coli 80352
MARILAFDIGISSIGWAFSENDELKDCGVRIFTKAENPKTGESLALPRRLARSARKRLARRKARLNHLKHLIANEFKLNYEDYQSFDESLAKAYKGSLISPYELRFRALNELLSKQDFARVILHIAKRRGYDDIKNSDDKEKGAILKAIKQNEEKLANYQSVGEYLYKEYFQKFKENSKEFTNVRNKKESYERCIAQSFLKDELKLIFKKQREFGFSFSKKFEEEVLSVAFYKRALKDFSHLVGNCSFFTDEKRAPKNSPLAFMFVALTRIINLLNNLKNTEGILYTKDDLNALLNEVLKNGTLTYKQTKKLLGLSDDYEFKGEKGTYFIEFKKYKEFIKALGDHSLSQDDLNEIAKDITLIKDEIKLKKALAKYDLNQNQIDSLSKLEFKDHLNISFKALKLITPLMLEGKKYDEACNELNLKVAINEDKKDFLPAFNETYYKDEVTNPVVLRAIKEYRKVLNALLKKYGKVHKINIELAREVGKNYSQRAKIEKEQNENYKAKKDAELECEKLGLKINSKNILKLRLFKEQKEFCAYSGEKIKISDLQDEKMLEIDHIYPYSRSFDDSYMNKVLVFTKQNQEKLNKTPFEAFGNDSTKWQKIEVLAKNLPEKKQKRILDKNYKDKEQKDFKDRNLNDTRYIARLVLNYTKDYLDFLPLSDDENTKLNDTQKGSKVHVEAKSGMLTSALRHTWGFSTKDRNNHLHHAIDAVIIAYANNSIVKAFSDFKKEQESNSAELYAKKISELDYKNKRKFFEPFSGFRQKVLDKIDEIFVSKPERKKPSGALHEETFRKEEEFYQSYGGKEGVLKALELGKIRKVNGKIVKNGDMFRVDIFKHKKTNKFYAVPIYTMDFALKVLPNKAVARSKKGEIKDWILMDENYEFCFSLYKDSLILIQTKDMQEPEFVYYNAFTSSTVSLIVSKHDNKFETLSKNQKILFKNANEKEVIAKSIGIQNLKVFEKYIVSALGEVTKAEFRQREDFKNELR

SEQ ID NO: 114 - protein, 984 aa, Campylobacter jejuni
MAKILAFDIGISSIGWAFSENDELKDCGVRIFTKAENPKTGESLALPRRIARSARKRLARRKARLNHLKHLIANEFKLNYEDYQSFDEILAKAYKGSLISPYELRFRALNELLSKQDFARVILHIAKRRGYDDIKNNGDEEKGKILKAIKQNEEKLANYQSVGEYLYKEYFQKFKENSKEFINVRNKKESYERCIAQSFLKDELKLIFKKQREFGFSFSKKFEEEVLSVAFYKRALKDFSHLVGNCSFFTDEKRAPKNSPLAFMFVALTRIINLLNNLKNTLYTKDDLNALLNEVLKNGTLTYKQTKKLLGLSDDYEFKGEKGNYFIEFKKYKEFIKALGEHSLSQDDLNEIAKDITLIKDEIKLKKALAKYDLNENQIDNLSKLEFKDHLNISFKALKLITPLMLEGKKYDEACNELTLKVAINEDKKDFLPAFNETYYKDEVTNPVVLRAIKEYRKVLNALLKKYGKVHKINIELAREVGKNHSQRAKIEKEQNENYKAKKDAELECEKLGLKINSKNILKLRLFKEQKEFCVYSGEKIKLSDLQDEKMLEIDHIYPYSRSFDDSYMNKVLVFTKQNQEKLNQTPFEAFGNDSAKWQKIEVLAKNLPTKKQKRILDKNYKDKEQKDFKDRNLNDTRYIARLVLNYTKDYLDFLPLSDDENTKLNDTQKGSKVHVEAKSGMLTSALRHTWGFSTKDRNNHLHHAIDAVIIAYANNSIVKAFSDFKKEQESNTAELYAKKISELDYKNKRKFFEPFSGFRQKVLDKIDEIFVSKPERKKPSGALHEETFRKEEEFYQSYGGKEGVLKALELGKIRKVNGKIVKNGDMFRVDIFKHKKTNKFYAVPIYTMDFALKVLPNKAVARSKKGEIKDWILMDENYEFCFSLYKDSLILIQTKDMQEPEFVYYNAFTSSTVSLIVSKHDNKFETLSKNQKILFKNANEKEVIAKSIGIQNLKVFEKYIVSALGEVTKAEFRQREEFKNELR

SEQ ID NO: 115 - protein, 987 aa, Campylobacter jejuni
  Campylobacter jejuni subsp. jejuni 110-21
MARILAFDIGISSIGWAFSENDELKDCGVRIFTKAENPKTGESLALPRRLARSARKRLARRKARLNHLKHLIANEFKLNYEDYQSFDESLAKAYKGSLISPYELRFRALNELLSKQDFARVILHIAKRRGYDNIKNSDNEEKSEILKAIKQNEEKLVNYQSVGEYLYKEYFQKFKENSKEFINVRNKKESYERCIAQSFLKDELKLIFQKQREFGLSFSKKFEEEVLSVAFYKRALKDFSHLVGNCSFFTDEKRAPKNSPLAFMFVALTRIINLLNNLKNTEGILYTKDDLNTLLNEVLKNGTLTYKQTKKLLGLSDDYEFKGEKGTYFIEFKKYKEFIKALGDHSLSQDDLNEIAKDITLIKDEIKLKKALAKYDLNQNQIDSLSKLEFKDHLNISFKALKLITPLMLEGKKYDEACNELNLKVVINEDKKDFLPAFNETYYKDEVTNPVVLRAIKEYRKVLNALLKKYGKVHKINIELAREVGKNHSQRAKIEKEQNENYKAKKDAELECEKLGLKINNKNILKLRLFKEQKEFCAYSGEKIKLSDLQDEKMLEIDHIYPYSRSFDDSYMNKVLVFTKQNQEKLNKTPFEAFGNDSTKWQKIEVLAKNLPTKKQKRILDKNYKDKEQKDFKDRNLNDTRYIARLVLNYTKDYLDFLPLSDDENTKLNDIQKGSKVHVEAKSGMLTSALRHTWGFSTKDRNNHLHHAIDAVIIAYANNSIVKAFSDFKKEQESNSAELYAKKISELDYKNKRKFFEPFSGFRQKVLDKIDEIFVSKPERKKPSGALHEETFRKEEEFYQSYGGKEGVLKALELGKIRKVNGKIVKNGDMFRVDIFKHKKTNKFYAVPIYTMDFALKVLPNKAVVQGKDKKSGLIKDWILMDENYEFCFSLYKDSLILIQTKDMQEPEFVYYNAFTSSTVSLIVSKHDNKFETLSKNQKILFKNANEKEVIAKSIGIQNLKVFEKYIVSALGEVTKAEFRQREDFKK

SEQ ID NO: 116 - protein, 987 aa, Campylobacter jejuni
  Campylobacter jejuni subsp. jejuni 129-258
MARILAFDIGISSIGWAFSENDELKDCGVRIFTKAENPKTGESLALPRRLARSARKRLARRKARLNHLKHLIANEFKLNYEDYQSFNESLAKAYKGSLISPYELRFRALNELLSKQDFARVILHIAKRRGYDDIKNSDDKEKGAILKVIKQNEEKLANYQSVGEYLYKEYFQKFKENSKEFTNVRNKKESYERCIAQSFLKDELKLIFQKQREFGFSFSKKFEEEVLSVAFYKRALKDFSHLVGNCSFFTDEKRAPKNSPLAFMFVALTRIINLLNNLKNTEGILYTKDDLNALLNEVLKNGTLTYKQTKKLLGLSDDYEFKGEKGTYFIEFKKYKEFIKALGDHSLSQDDLNEIAKDITLIKDEIKLKKALAKYDLNQNQIDSLSKLEFKDHLNISFKALKLITPLMLEGKKYDEACNELNLKVAINEDKKDFLPAFNETYYKDEVTNPVVLRAIKEYRKVLNALLKKYGKVHKINIELAREVGKNYSQRAKIEKEQNENYKAKKDAELECEKLGLKINSKNILKLRLFKEQKEFCAYSGEKIKISDLQDEKMLEIDHIYPYSRSFDDSYMNKVLVFTKQNQEKLNQTPFEAFGNDSAKWQKIEVLAKNLPTKKQKRILDKNYKDKEQKDFKDRNLNDTRYIARLVLNYTKDYLDFLPLSDDENTKLNDTQKGSKVHVEAKSGMLTSALRHTWGFSAKDRNNHLHHAIDAVIIAYANNSIVKAFSDFKKEQESNSAELYAKKISELDYKNKRKFFEPFSGFRQKVLDKIDEIFVSKPERKKPSGALHEETFRKEEEFYQSYGGKEGVLKALELGKIRKVNGKIVKNGDMFRVDIFKHKKTNKFYAVPIYTMDFALKVLPNKAVARSKKGEIKDWILMDENYEFCFSLYKDSLILIQTKDMQEPELVYFNAFTSSTVSLIVSKHDNKFETLSKNQKILFKNANEKEVIAKSIGIQNLKVFEKYIVSALGEVTKAEFRQREDFKNELR

SEQ ID NO: 117 - protein, 987 aa, Campylobacter jejuni
  Campylobacter jejuni subsp. jejuni 1336
MARILAFDIGISSIGWAFSENDELKDCGVRIFTKAENPKTGESLALPRRLARSARKRLARRKARLNHLKHLIANEFKLNYEDYQSFDESLAKAYKGSLISPYELRFRALNELLSKQDFARVILHIAKRRGYDDIKNNGDEEKGKILKAIKQNEEKLVSYQSVGEYLYKEYFQKFKENSKEFINVRNKKESYERCIAQSFLKDELKLIFQKQREFGFSFSKKFEEEVLSVAFYKRALKDFSHLVGNCSFLLMKKERQKNSPLAFMFVALTRIINLLNNLKNTEGILYTKDDLNTLLNEALKNGTLTYKQTKKLLGLSNDYEFKGEKGTYFIEFQKYKEFVKALGEHNLSQDDLNEIAKDITLIKDEIKLKKALAKYDLNQNQIDSLSKLEFKDHLNISFKALKLITPLMLEGKKYDEACNELNLKVAINEDKKDFLPAFNETYYKDEVTNPVVLRAIKEYRKVLNALLKKYGKVHKINIELAREVGKNHSQRAKIEKEQNENYKAKKDAELECEKLGLKINSKNILKLRLFKEQKEFCVYSGEKIKISDLQDEKMLEIDHIYPYSRSFDDSYMNKVLVFTKQNQEKLNKTPFETFGNDRVKWQKIEVLAKNLPTKKQKRILDKNYKDKEQKDFKDRNLNDTRYIARLVLNYTKDYLDFLPLSDDENTKLNDTQKGSKVHVEAKSGMLTSTLRHTWGFSTKDRNNHLHHAIDAAIIAYANNSIVKAFSDFKKEQESNTAELYAKKISELDYKNKRKFFEPFSGFRQKLLDKIDEIFVSKPERKKPSGALHEETFRKEEEFYQSYGGKEGVLKALELGKIRKVNGKMVKNGDMFRVDIFKHKKTNKFYAVPIYTMDFALKVLPNKAVVQGKDKKSGLIKDWILMDENYEFCFSLYKDSLILIQTKDMQEPELVYYERLDSSNASLTVSKHDNKFETLSKNQKILFKNANEKEVIAKSIGIQNLKVFEKYIVSALGEVTKAEFRQREDFKK

SEQ ID NO: 118 - protein, 984 aa, Campylobacter jejuni
  Campylobacter jejuni subsp. jejuni 140-16
MARILAFDIGISSIGWAFSENDELKDCGVRIFTKVENPKTGESLALPRRLARSARKRLARRKARLNHLKHLIANEFKLNYEDYQSFDESLAKAYKGSLISPYELRFRALNELLSKQDFARVILHIAKRRGYDDIKNSDDKEKGAILKAIKQNEEKLANYQSVGEYLYKEYFQKFKENSKEFTNVRNKKESYERCIAQSFLKDELKLIFKKQREFGFSFSKKFEEEVLSVAFYKRALKDFSHLVGNCSFFTDEKRAPKNSPLAFMFVALTRIINLLNNLKNTEGILYTKDDLNALLNEVLKNGTLTYKQTKKLLGLSDDYEFKGEKGTYFIEFKKYKEFIKALGEHNLSQDDLNEIAKDITLIKDEIKLKKALAKYDLNQNQIDSLSKLEFKDHLNISFKALKLITPLMLEGKKYDEACNELNLKVAINEDKKDFLPAFNETYYKDEVTNPVVLRAIKEYRKVLNALLKKYGKVHKINIELAREVGKNHSQRAKIEKEQNENYKAKKDAELECEKLGLKINSKNILKLRLFKEQKEFCAYSGEKIKISDLQDEKMLEIDHIYPYSRSFDDSYMNKVLVFTKQNQEKLNKTPFEAFGNDSAKWQKIEVLAKNLPTKKQKRILDKNYKDKEQKDFKDRNLNDTRYIARLVLNYTKDYLDFLPLSDDENTKLNDTQKGSKVHVEAKSGMLTSALRHTWGFSTKDRNNHLHHAIDAVIIAYANNSIVKAFSDFKKEQESNSAELYAKKISELDYKNKRKFFEPFSGFRQKVLDKIDEIFVSKPERKKPSGALHEETFRKEEEFYQSYGGKEGVLKALELGKIRKVNGKIVKNGDMFRVDIFKHKKTNKFYAVPIYTMDFALKVLPNKAVARSKKGEIKDWILMDENYEFCFSLYKDSLILIQTKDMQEPEFVYYNAFTSSTVSLIVSKHDNKFETLSKNQKILFKNANEKEVIAKSIGIQNLKVFEKYIVSALGEVTKAEFIQREDFKK

SEQ ID NO: 119 - protein, 984 aa, Campylobacter jejuni
  Campylobacter jejuni subsp. jejuni 1577
MARILAFDIGISSIGWAFSENDELKDCGVRIFTKVENPKTGESLALPRRLARSARKRLARRKVRLNHLKHLIANEFKLNYEDYQSFDESLAKAYKGSLISPYELRFRALNELLSKQDFARVILHIAKRRGYDDIKNSDDKEKGAILKAIKQNEEKLANYQSVGEYLYKEYFQKFKENSKEFTNVRNKKESYERCIAQSFLKDELKLIFKKQREFGFSFSKKFEEEVLSVAFYKRALKDFSHLVGNCSFFTDEKRAPKNSPLAFMFVALTRIINLLNNLKNTEGILYTKDDLNALLNEVLKNGTLTYKQTKKLLGLSDDYEFKGEKGTYFIEFKKYKEFIKALGEHNLSQDDLNEIAKDITLIKDEIKLKKALAKYDLNQNQIDSLSKLEFKDHLNISFKALKLITPLMLEGKKYDEACNELNLKVAINEDKKDFLPAFNETYYKDEVTNPVVLRAIKEYRKVLNALLKKYGKVHKINIELAREVGKNHSQRAKIEKEQNENYKAKKDAELECEKLGLKINSKNILKLRLFKEQKEFCAYSGEKIKISDLQDEKMLEIDHIYPYSRSFDDSYMNKVLVFTKQNQEKLNKTPFEAFGNDSAKWQKIEVLAKNLPTKKQKRILDKNYKDKEQKDFKDRNLNDTRYIARLVLNYTKDYLDFLPLSDDENTKLNDTQKGSKVHVEAKSGMLTSALRHTWGFSTKDRNNHLHHAIDAVIIAYANNSIVKAFSDFKKEQESNSAELYAKKISELDYKNKRKFFEPFSGFRQKVLDKIDEIFVSKPERKKPSGALHEETFRKEEEFYQSYGGKEGVLKALELGKIRKVNGKIVKNGDMFRVDIFKHKKTNKFYAVPIYTMDFALKVLPNKAVARSKKGEIKDWILMDENYEFCFSLYKDSLILIQTKDMQEPEFVYYNAFTSSTVSLIVSKHDNKFETLSKNQKILFKNANEKEVIAKSIGIQNLKVFEKYIVSALGEVTKAEFRQREDFKK

SEQ ID NO: 120 - protein, 987 aa, Campylobacter jejuni
  Campylobacter jejuni subsp. jejuni 1854
MARILAFDIGISSIGWAFSENDELKDCGVRIFTKAENPKTGESLALPRRLARSARKRLARRKARLNHLKHLIANEFKLNYEDYQSFDESLAKAYKGSLISPYELRFRALNELLSKQDFARVILHIAKRRGYDDIKNSDDKEKGAILKAIKQNEEKLANYQSVGEYLYKEYFQKFKENSKEFTNVRNKKESYERCIAQSFLKDELKLIFKKQREFGFSFSKKFEEEVLSVAFYKRALKDFSHLVGNCSFFTDEKRAPKNSPLAFMFVALTRIINLLNNLKNTEGILYTKDDLNTLLNEVLKNGTLTYKQTKKLLGLSDDYEFKGEKGTYFIEFKKYKEFIKSLGDHSLSQDDLNEIAKDITLIKDEIKLKKALAKYDLNQNQIDSLSKLEFKDHLNISFKALKLITPLMLEGKKYDEACNELNLKVAINEDKKDFLPAFNETYYKDEVTNPVVLRAIKEYRKVLNALLKKYGKVHKINIELAREVGKNHSQRAKIEKEQNENYKAKKDAELECEKLGLKINSKNILKLRLFKEQKEFCAYSGEKIKISDLQDEKMLEIDHIYPYSRSFDDSYMNKVLVFTKQNQEKLNQTPFEAFGNDSAKWQKIEVLAKNLPTKKQKRILDKNYKDKEQKNFKDRNLNDTRYIARLVLNYTKDYLDFLPLSDDENTKLNDTQKGSKVHVEAKSGMLTSALRHTWGFSAKDRNNHLHHAIDAVIIAYANNSIVKAFSDFKKEQESNSAELYAKKISELDYKNKRKFFEPFSGFRQKVLDKIDEIFVSKPERKKPSGALHEETFRKEEEFYQSYGGKEGVLKALELGKIRKVNGKIVKNGDMFRVDIFKHKKTNKFYAVPIYTMDFALKVLPNKAVARSKKGEIKDWILMDENYEFCFSLYKDSLILIQTKDMQEPEFVYYNAFTSSTVSLIVSKHDNKFETLSKNQKILFKNANEKEVIAKSIGIQNLKVFEKYIVSALGEVTKAEFRQREDFKNELR

SEQ ID NO: 121 - protein, 984 aa, Campylobacter jejuni
  Campylobacter jejuni subsp. jejuni 1997-10
MARILAFDIGISSIGWAFSENDELKDCGVRIFTKAENPKTGESLALPRRLARSARKRLARRKARLNRLKHLIANEFKLNYEDYQSFDESLAKAYKGSLISPYELRFRALNELLSKQDFARVILHIAKRRGYDDIKNSDDKEKGAILKAIKQNEEKLANYQSVGEYLYKEYFQKFKENSKEFTNVRNKKESYERCIAQSFLKDELKLIFKKQREFGFSFSKKFEEEVLSVAFYKRALKDFSHLVGNCSFFTDEKRAPKNSPLAFMFVALTRIINLLNNLKNTEGILYTKDDLNALLNEVLKNGTLTYKQTKKLLGLSDDYEFKGEKGTYFIEFKKYKEFIKALGDHSLNQDDLNEIAKDITLIKDEIKLKKALAKYDLNQNQIDSLSKLEFKDHLNISFKALKLITPLMLEGKKYDEACNELNLKVAINEDKKDFLPAFNETYYKDEVTNPVVLRAIKEYRKVLNALLKKYGKVHKINIELAREVGKNYSQRAKIEKEQNENYKAKKDAELECEKLGLKINSKNILKLRLFKEQKEFCVYSGEKIKISDLQDEKMLEIDHIYPYSRSFDDSYMNKVLVFTKQNQEKLNQTPFEAFGNDSAKWQKIEVLAKNLPTKKQKRILDKNYKDKEQKDFKDRNLNDTRYIARLVLNYTKDYLDFLPLSDDENTKLNDTQKGSKVYVEAKSGMLTSALRHTWGFSTKDRNNHLHHAIDAVIIAYANNSIVKAFSDFKKEQESNSAELYAKKISELDYKNKRKFFEPFSGFRQKVLDKIDEIFVSKPERKKPSGALHEETFRKEEEFYQSYGGKEGVLKALELGKIRKVNGKIVKNGDMFRVDIFKHKKTNKFYAVPIYTMDFALKVLPNKAVARSKKGEIKDWILMDENYEFCFSLYKDSLILIQTKDMQEPEFVYYNAFTSSTVSLIVSKHDNKFETLSKNQKILFKNANEKEVIAKSIGIQNLKVFEKYIVSALGEVTKAEFRQREDFKK

SEQ ID NO: 122 - protein, 987 aa, Campylobacter jejuni
  Campylobacter jejuni subsp. jejuni 2008-1025
MARILAFDIGISSIGWAFSENDELKDCGVRIFTKAENPKTGESLALPRRLARSARKRLARRKARLNHLKHLIANEFKLNYEDYQSFDESLAKAYKGSLISPYELRFRALNELLSKQDFARVILHIAKRRGYDDIKNNGDEEKSEILKAIKQNEEKLVNYQSVGEYLYKEYFQKFKENSKEFINVRNKKESYERCIAQSFLKDELKLIFQKQREFGFSFSKKFEEEVLSVAFYKRALKDFSHLVGNCSFFTDEKRAPKNSPLAFMFVALTRIINLLNNLKNTEGILYTKDDLNTLLNEVLKNGTLTYKQTKKLLGLSDDYEFKGEKGTYFIEFKKYKEFIKALGEHNLSQDNLNEIAKDITLIKDEIKLKKALAKYDLNQNQIDSLSKLEFKDHLNISFKALKLITPLMLEGKKYDEAYNELNLKVAINEDKKDFLPAFNETYYKDEVTNPVVLRAIKEYRKVLNALLKKYGKVHKINIELAREVGKNHSQRAKIEKEQNENYKAKKDAELECEKLGLKINSKNILKLRLFKEQKEFCAYSGEKIKISDLQDEKMLEIDHIYPYSRSFDDSYMNKVLVFTKQNQEKLNQTPFEAFGNDSAKWQKIEVLAKNLPTKKQKRILDKNYKDKEQKDFKDRNLNDTRYIARLVLNYTKDYLDFLPLSDDENTKLNDTQKGSKVHVEAKSGMLTSALRHTWGFSAKDRNNHLHHAIDAVIIAYANNSIVKAFSDFKKEQESNSAELYAKKISELDYKNKRKFFEPFSGFRQKVLDKIDEIFVSKPERKKPSGALHEETFRKEEEFYQSYGGKEGVLKALELGKIRKVNGKIVKNGDMFRVDIFKHKKTNKFYAVPIYTMDFALKVLPNKAVVQGKDKKSGLIKDWILMDENYEFCFSLYKDSLILIQTKDMQEPELVYFNAFTSSTVSLIVSKHDNKFETLSKNQKILFKNANEKEVIAKSIGIQNLKVFEKYIVSALGEVTKAEFRQREDFKK

SEQ ID NO: 123 - protein, 984 aa, Campylobacter jejuni
  Campylobacter jejuni subsp. jejuni 2008-872
MARILAFDIGISSIGWAFSENDELKDCGVRIFTKVENPKTGESLALPRRLARSARKRLARRKARLNHLKHLIANEFKLNYEDYQSFDESLAKAYKGSLISPYELRFRALNELLSKQDFARVILHIAKRRGYDDIKNSDDKEKGAILKAIKQNEEKLANYQSVGEYLYKEYFQKFKENSKEFTNVRNKKESYERCIAQSFLKDELKLIFKKQREFGFSFSKKFEEEVLSVAFYKRALKDFSHLVGNCSFFTDEKRAPKNSPLAFMFVALTRIINLLNNLKNTEGILYTKDDLNALLNEVLKNGTLTYKQTKKLLGLSDDYEFKGEKGTYFIEFKKYKEFIKALGEHNLSQDDLNEIAKDITLIKDEIKLKKALAKYDLNQNQIDSLSKLEFKDHLNISFKALKLITPLMLEGKKYDEACNELNLKVAINEDKKDFLPAFNETYYKDEVTNPVVLRAIKEYRKVLNALLKKYGKVHKINIELAREVGKNHSQRAKIEKEQNENYKAKKDAELECEKLGLKINSKNILKLRLFKEQKEFCAYSGEKIKISDLQDEKMLEIDHIYPYSRSFDDSYMNKVLVFTKQNQEKLNKTPFEAFGNDSAKWQKIEVLAKNLPTKKQKRILDKNYKDKEQKDFKDRNLNDTRYIARLVLNYTKDYLDFLPLSDDENTKLNDTQKGSKVHVEAKSGMLTSALRHTWGFSTKDRNNHLHHAIDAVIIAYANNSIVKAFSDFKKEQESNSAELYAKKISELDYKNKRKFFEPFSGFRQKVLDKIDEIFVSKPERKKPSGALHEETFRKEEEFYQSYGGKEGVLKALELGKIRKVNGKIVKNGDMFRVDIFKHKKTNKFYAVPIYTMDFALKVLPNKAVARSKKGEIKDWILMDENYEFCFSLYKDSLILIQTKDMQEPEFVYYNAFTSSTVSLIVSKHDNKFETLSKNQKILFKNANEKEVIAKSIGIQNLKVFEKYIVSALGEVTKAEFRQREDFKK

SEQ ID NO: 124 - protein, 987 aa, Campylobacter jejuni
  Campylobacter jejuni subsp. jejuni 2008-979
MARILAFDIGISSIGWAFSENDELKDCGVRIFTKAENPKTGESLALPRRLARSARKRLARRKARLNHLKHLIANEFKLNYEDYQSFDESLAKAYKGSLISPYELRFRALNELLSKQDFARVILHIAKRRGYDDIKNSDDKEKGAILKAIKQNEEKLVNYQSVGEYLYKEYFQKFKENSKEFTNVRNKKESYERCIAQSFLKDELKLIFKKQREFGFSFSKKFEEEVLSVAFYKRALKDFSHLVGNCSFFTDEKRAPKNSPLAFMFVALTRIINLLNNLKNTEGILYTKDDLNALLNEVLKNGTLTYKQTKKLLGLSDDYEFKGEKGTYFIEFKKYKEFIKALGDHSLSQDDLNEIAKDITLIKDEIKLKKALAKYDLNQNQIDSLSKLEFKDHLNISFKALKLITPLMLEGKKYDEACNELNLKVAINEDKKDFLPAFNETYYKDEVTNPVVLRAIKEYRKVLNALLKKYGKVHKINIELAREVGKNYSQRAKIEKEQNENYKAKKDAELECEKLGLKINSKNILKLRLFKEQKEFCAYSGEKIKISDLQDEKMLEIDHIYPYSRSFDDSYMNKVLVFTKQNQEKLNQTPFEAFGNDSAKWQKIEVLAKNLPTKKQKRILDKNYKDKEQKDFKDRNLNDTRYIARLVLNYTKDYLDFLPLSDDENTKLNDTQKGSKVHVEAKSGMLTSALRHTWGFSAKDRNNHLHHAIDAVIIAYANNSIVKAFSDFKKEQESNSAELYAKKISELDYKNKRKFFEPFSGFRQKVLDKIDEIFVSKPERKKPSGALHEETFRKEEEFYQSYGGKEGVLKALELGKIRKVNGKIVKNGDMFRVDIFKHKKTNKFYAVPIYTMDFALKVLPNKAVARSEKGEIKDWILMDENYEFCFSLYKDSLILIQTKDMQEPELVYFNAFTSSTVSLIVSKHDNKFETLSKNQKILFKNANEKEVIAKSIGIQNLKVFEKYIVSALGEVTKAEFRQREDFKNELR

SEQ ID NO: 125 - protein, 965 aa, Campylobacter jejuni
  Campylobacter jejuni subsp. jejuni 2008-988
MKIIGFNLGIANIGWALRENDEIIDCGVRVFDIPENPKNGNSLALERRENKARMKIVKRKKARMLATKTFLKKELNVDLSKLFLIGSTQSIYELRAKALSSLISKEELSAIILHIAKHRGYDDSALKNENGTIIEALNKNKETMLKFKSVGEYFYKNFVQNKEVKKIRNTTEDYSNSVPRSLLKQELDLILDKQKELGLIKNADFKEKLFEIIFFKRPLKDFSNKIGNCIFFENEKRAAKNTISACEFVALGKVVNLLKSIEKDIGIVYEKDSINEIMSIILDKTSISYKKIRDILNLPQEINFKGLDYSKNNVENSKLVDLKKLNEFKKALGDGFANLDKDILDSIATDITLTKDTATLKEKLKNYNVLNAEQIEKLSELVFNDHINLSLKALKQIIPLMYEGKRYDEACELCNFTIAKNQEKSEYLPLFEKTRFAKDISSPVVIRAICEFRKLLNDIIRRYGSVHKIHLELTRDFGISFSDRKKIIKEIEQNEQSRIKALETIKELKLEETSKNIQIVRLFEDQKGICPYSGLKMDLNRLDELVIDYIRPYNRSLDDSYSNKVLTFKKLSDLKQGKTPFEAFGEDEKLWAEINERIKEYNGKKRFKIFDKFFKDKKPFDFTEQTLQDTRWLTKLVASYLNEYLSFLPISEDENTALGYGEKGSKQHVILSSGMITQMLRNFWYLGFKNHKDYKNNAMDAIIVAFTTNSIIFAFNNFKKELDLAKAEFYANKISESDYLLKRKFLPPFSGFKEQALEKVKNIFVSHSLKIKNKGTLHDLTPLKIKELKNTYGDLDLAVKLGKIRKYNDKYYANANGSLVRADLFVDKKNKFHAVSIYKADFSTKKLPNKTPATTSNGETKEGIEMNENYNFCMSLYKNTPISVKIKGMKEPIICYYHGFNTSGSKITYKKHDNNYHNLSEDEMVVFRKNDKESIAVGKILEIKKYSISPSGELSLIENEERKWF

SEQ ID NO: 126 - protein, 984 aa, Campylobacter jejuni
  Campylobacter jejuni subsp. jejuni 2008-988
MARILAFDIGISSIGWAFSENDELKDCGVRIFTKVENPKTGESLALPRRLARSARKRLARRKARLNHLKHLIANEFKLNYEDYQSFDESLAKAYKGSLISPYELRFRALNELLSKQDFARVILHIAKRRGYDDIKNSDDKEKGAILKAIKQNEEKLANYQSVGEYLYKEYFQKFKENSKEFTNVRNKKESYERCIAQSFLKDELKLIFKKQREFGFSFSKKFEEEVLSVAFYKRALKDFSHLVGNCSFFTDEKRAPKNSPLAFMFVTLTRIINLLNNLKNTEGILYTKDDLNALLNEVLKNGTLTYKQTKKLLGLSDDYEFKGEKGTYFIEFKKYKEFIKALGEHNLSQDDLNEIAKDITLIKDEIKLKKALAKYDLNQNQIDSLSKLEFKDHLNISFKALKLITPLMLEGKKYDEACNELNLKVAINEDKKDFLPAFNETYYKDEVTNPVVLRAIKEYRKVLNALLKKYGKVHKINIELAREVGKNHSQRAKIEKEQNENYKAKKDAELECEKLGLKINSKNILKLRLFKEQKEFCAYSGEKIKISDLQDEKMLEIDHIYPYSRSFDDSYMNKVLVFTKQNQEKLNKTPFEAFGNDSAKWQKIEVLAKNLPTKKQKRILDKNYKDKEQKDFKDRNLNDTRYIARLVLNYTKDYLDFLPLSDDENTKLNDTQKGSKVHVEAKSGMLTSALRHTWGFSTKDRNNHLHHAIDAVIIAYANNSIVKAFSDFKKEQESNSAELYAKKISELDYKNKRKFFEPFSGFRQKVLDKIDEIFVSKPERKKPSGALHEETFRKEEEFYQSYGGKEGVLKALELGKIRKVNGKIVKNGDMFRVDIFKHKKTNKFYAVPIYTMDFALKVLPNKAVARSKKGEIKDWILMDENYEFCFSLYKDSLILIQTKDMQEPEFVYYNAFTSSTVSLIVSKHDNKFETLSKNQKILFKNANEKEVIAKSIGIQNLKVFEKYIVSALGEVTKAEFRQREDFKK

SEQ ID NO: 127 - protein, 961 aa, Campylobacter jejuni
  Campylobacter jejuni subsp. jejuni 260.94
MARILAFDIGISSIGWAFSENDELKDCGVRIFTKAENPKTGESLALPRRLARSARKRLARRKARLNHLKHLIANEFKLNYEDYQSFDESLAKAYKGSLISPYELRFRALNELLSKQDFARVILHIAKRRGYDDIKNNGDEEKGKILKAIKQNEEKLVNYQSVGEYLYKEYFQKFKENSKEFINVRNKKESYERCITQSFLKYELKLIFQKQREFGFSFSKKFEEEVLSVAFYKRALKDFSHLVGNCSFFSDEKRAPKNSPLAFMFVALTRIINLLNNLKNTEGILYTKDDLNALLNEVLKNGTLTYKQTKKLLGLSDDYEFKGEKGTYFIEFKKYKEFIKALGEHNLSQDDLNEIAKDITLIKDEIKLKKALAKYDLNQNQIDSLSKLEFKDHLNIGFKALKLITPLMLEGKKYDEACNELNLKVAINEDKKDFLPAFNETYYKDEVTNPVVLRAIKEYRKVLNALLKKYGKVHKINIELAREVGKNHSQRAKIEKEQNENYKAKKDAELECEKLGLKINSKNILKLRLFKEQKEFCAYSGEKIKLSDLQDEKMLEIDHIYPYSRSFDDSYMNKVLVFTKQNQEKLNKTPFEAFGNDNVKWQKIEVLAKNLPEKKQKRILDKNYKDKEQKDFKDRNLNDTRYIARLVLNYTKDYLDFLPLSDDENTKLKGSKVHVEAKSGMLTSALRHTWGFSTKDRNNHLHHAIDAAIIAYANNSIVKDFSDFKKEQESNSAELYAKKISELDYKNKRKFFEPFSGFRQKVLDKIDEIFVSKPERKKPSGALHEETFRKEEEFYQSYGGKEGVLKALELGKIRKVNGKIVKNGDMFRVDIFKHKKTNKFYAVPIYTMDFALKVLPNKAVARSKKGEIKDWILMDENYEFCFSLYKDSLILIQTKDMQEPELVYFNAFTSSTVSLIVSKHDNKFETLSKNLKVFEKYIVSALGEVTKAEFRQREDFKNELR

SEQ ID NO: 128 - protein, 985 aa, Campylobacter jejuni
  Campylobacter jejuni subsp. jejuni 414
MAKILAFDIGISSIGWAFVENDELKDCGVRIFTKAENPKTGESLALPRRLARSARKRLARRKARLNHLKHLIANEFKLNYEDYQSFDESLAKAYKGTLISPYELRFKALNELLSKQDLARVILHIAKRRGYDNIKNSDDKEKGAILKAVKENEEKLANYKSVGEYLYKEYFQKFKENSKEFINVRNKKESYERCIAQSFLKDELKLIFQKQREFGFNFSKKFEEEVLSVAFYKRALKDFSHLVGNCSFFVDEKRAPKNSPLAFEFVALTRIVNLLNNLNKNNSYIKDDLNALLSEVLKNGTLTYKQTKKILGLSDDYEFKGQKGNYFIEFKKYKEFIKALCEHNLNQDDLNEIAKDITLVKDETKLKKALAKYDLNQNQIENLSKIEFKDHLNISFKALKLIVPLMREGKKYDEVCNELNLKTAINEDKKEFLPAFNETYYKDEVNNPVVLRAIKEYRKVLNSLLKKYGKVHKINIELAREVGKNHRERSKIEKEQNENFKAKKDAELECEKLGLKINSKNILKLRLFKEQKEFCVYSGEKIKISDLQDEKMLEIDHIYPYSRSFDDSYMNKVLVFTKQNQEKLNKTPFEAFGKDDVKWQKIETLAKNLPAKKQKRILDKNYKDKEQKDFKDRNLNDTRYIARLVLNYTKDYLEFLPLSDDENIKLNDTQKGSKVHVEAKSGMLTSVLRHTWGFSTKDRNNHLHHAIDAVIIAYANASVVKAFSDFKKEQENYTAELYAKKINELDFKNKRKFFEPFSNFRQKVLEKIDEIFVSKPERKKPSGALHEETFYKEEEFYKEYGGKEGVLKALELGKIRKVNGKIVSNANMFRVDIFKYKKTNKFYAVPIYTMDFALGILPNKAVVGGKDKQGIIKDWLLMDENYEFCFSLYKDSLILLQTKDMQEPELVYFKSFKSSTAGLVVSKHDNKFENLNENQKKLFKSANEKKVVAEGIGIQNLKVFEKYIVSALGEITKAEIKERENFKKK

SEQ ID NO: 129 - protein, 984 aa, Campylobacter jejuni
  Campylobacter jejuni subsp. jejuni 51037
MARILAFDIGISSIGWAFSENDELKDCGVRIFTKAENPKTGESLALPRRLARSARKRLARRKARLNHLKHLIANEFKLNYEDYQSFDESLAKAYKGSLISPYELRFRALNELLSKQDFARVILHIVKRRGYDDIKNSDDKEKGTILKAIKQNEEKLANYQSVGEYLYKEYFQKFKENSKEFTNVRNKKESYERCIAQSFLKDELKLIFKKQREFGFSFSKKFEEEVLSVAFYKRALKDFSHLVGNCSFFTDEKRAPKNSPLAFMFVALTRIINLLNNLKNTEGILYTKDDLNTLLNEVLKNGTLTYKQTKKLLGLSDDYEFKGEKGTYFIEFKKYKEFIKALGEHNLSQDDLNEIAKDITLIKDEIKLKKALAKYDLNQNQIDSLSKLEFKDHLNISFKALKLITPLMLEGKKYDEACNELNLKVAINEDKKDFLPAFNETYYKDEVTNPVVLRAIKEYRKVLNALLKKYGKVHKINIELAREVGKNYSQRAKIEKEQNENYKAKKDAELECEKLGLKINSKNILKLRLFKEQKEFCAYSGEKIKISDLQDEKMLEIDHIYPYSRSFDDSYMNKVLVFTKQNQEKLNQTPFEAFGNDSAKWQKIEVLAKNLPTKKQKRILDKNYKDKEQKDFKDRNLNDTRYIARLVLNYTKDYLDFLPLSDDENTKLNDTQKGSKVHVEAKSGMLTSALRHTWGFSAKDRNNHLHHAIDAVIIAYANNSIVKAFSDFKKEQESNSAELYAKKISELDYKNKRKFFEPFSGFRQKVLDKIDEIFVSKPERKKPSGALHEETFRKEEEFYQSYGGKEGVLKALELGKIRKVNGKIVKNGDMFRVDIFKHKKTNKFYAVPIYTMDFALKVLPNKAVARSKKGEIKDWILMDENYEFCFSLYKDSLILIQTKDMQEPEFVYYNAFTSSTVSLIVSKHDNKFETLSKNQKILFKNANEKEVIAKSIGIQNLKVFEKYIVSALGEVTKAEFRQREDFKK

SEQ ID NO: 130 - protein, 984 aa, Campylobacter jejuni
  Campylobacter jejuni subsp. jejuni 51494
MARILAFDIGISSIGWAFSENDELKDCGVRIFTKAENPKTGESLALPRRLARSARKRLARRKARLNHLKHLIANEFKLNYEDYQSFDESLAKAYKGSLISPYELRFRALNELLSKQDFARVILHIAKRRGYDDIKNSDDKEKGAILKAIKQNEEKLANYQSVGEYLYKEYFQKFKENSKEFTNVRNKKESYERCIAQSFLKDELKLIFKKQREFGFSFSKKFEEEVLSVAFYKRALKDFSHLVGNCSFFTDEKRAPKNSPLAFMFVALTRIINLLNNLKNTEGILYTKDDLNTLLNEVLKNGTLTYKQTKKLLGLSDDYEFKGEKGTYFIEFKKYKEFIKALGEHNLSQDDLNEIAKDITLIKDEIKLKKALAKYDLNQNQIDSLSKLEFKDHLNISFKALKLITPLMLEGKKYDEACNELNLKVAINEDKKDFLPAFNETYYKDEVTNPVVLRAIKEYRKVLNALLKKYGKVHKINIELAREVGKNYSQRAKIEKEQNENYKAKKDAELECEKLGLKINSKNILKLRLFKEQKEFCAYSGEKIKISDLQDEKMLEIDHIYPYSRSFDDSYMNKVLVFTKQNQEKLNKTPFEAFGNDSTKWQKIEVLAKNLPEKKQKRILDKNYKDKEQKDFKDRNLNDTRYIARLVLNYTKDYLDFLPLSDDENTKLNDTQKGLKVHVEAKSGMLTSALRHTWGFSAKDRNNHLHHAIDAVIIAYANNSIVKAFSDFKKEQESNSAELYAKKISELDYKNKRKFFEPFSGFRQKVLDKIDEIFVSKPERKKPSGALHEETFRKEEEFYQSYGGKEGVLKALELGKIRKVNGKIVKNGDMFRVDIFKHKKTNKFYAVPIYTMDFALKVLPNKAVARSKKGEIKDWILMDENYEFCFSLYKDSLILIQTKDMQEPEFVYYNAFTSSTVSLIVSKHDNKFETLSKNQKILFKNANEKEVIAKSIGIQNLKVFEKYIVSALGEVTKAEFRQREDFKK

SEQ ID NO: 131 - protein, 987 aa, Campylobacter jejuni
  Campylobacter jejuni subsp. jejuni 53161
MARILAFDIGISSIGWAFSENDELKDCGVRIFTKAENPKTGESLALPRRLARSARKRLARRKARLNHLKHLIANEFKLNYEDYQSFDEGLAKAYKGSLISPYELRFRALNELLSKQDFARVILHIAKRRGYDDIKNNGDEEKSEILKAIKQNEEKLVNYQSVGEYLYKEYFQKFKENSKEFINVRNKKESYERCIAQSFLKDELKLIFQKQREFGFSFSKKFEEEVLSVAFYKRALKDFSHLVGNCSFFTDEKRAPKNSPLAFMFVALTRIINLLNNLKNTEGILYTKDDLNTLLNEVLKNGTLTYKQTKKLLGLSDDYEFKGEKGTYFIEFKKYKEFIKALGEHNLSQDNLNEIAKDITLIKDEIKLKKALAKYDLNQNQIDSLSKLEFKDHLNISFKALKLITPLMLEGKKYDEAYNELNLKVAINEDKKDFLPAFNETYYKDEVTNPVVLRAIKEYRKVLNALLKKYGKVHKINIELAREVGKNHSQRAKIEKEQNENYKAKKDAELECEKLGLKINSKNILKLRLFKEQKEFCAYSGEKIKISDLQDEKMLEIDHIYPYSRSFDDSYMNKVLVFTKQNQEKLNQTPFEAFGNDSAKWQKIEVLAKNLPTKKQKRILDKNYKDKEQKDFKDRNLNDTRYIARLVLNYTKDYLDFLPLSDDENTKLNDTQKGSKVHVEAKSGMLTSALRHTWGFSAKDRNNHLHHAIDAVIIAYANNSIVKAFSDFKKEQESNSAELYAKKISELDYKNKRKFFEPFSGFRQKVLDKIDEIFVSKPERKKPSGALHEETFRKEEEFYQSYGGKEGVLKALELGKIRKVNGKIVKNGDMFRVDIFKHKKTNKFYAVPIYTMDFALKVLPNKAVVQGKDKKSGLIKDWILMDENYEFCFSLYKDSLILIQTKDMQEPELVYFNAFTSSTVSLIVSKHDNKFETLSKNQKILFKNANEKEVIAKSIGIQNLKVFEKYIVSALGEVTKAEFRQREDFKK

SEQ ID NO: 132 - protein, 984 aa, Campylobacter jejuni
  Campylobacter jejuni subsp. jejuni 60004
MARILAFDIGISSIGWAFSENDELKDCGVRIFTKAENPKTGESLALPRRLARSARKRLARRKARLNHLKHLIANEFKLNYEDYQSFDESLAKAYKGSLISPYELRFRALNELLSKQDFARVILHIAKRRGYDDIKNNGDEEKGKILKAIKQNEEKLVNYQSVGEYLYKEYFQKFKENSKEFINVRNKKESYERCITQSFLKYELKLIFQKQREFGFSFSKKFEEEVLSVAFYKRALKDFSHLVGNCSFFTDEKRAPKNSPLAFMFVALTRIINILNNLKNTEGILYTKDDLNALLNEVLKNGTLTYKQTKKLLGLSDDYEFKGEKGTYFIEFKKYKEFIKALGEHNLSQDDLNEIAKDITLIKDEIKLKKALAKYDLNQNQIDSLSKLEFKDHLNISFKALKLITPLMLEGKKYDEACNELNLKVAINEDKKDFLPAFNETYYKDEVTNPVVLRAIKEYRKILNALLKKYGKVHKINIELAREVGKNHSQRAKIEKEQNENYKAKKDAEIECEKLGLKINSKNILKLRLFKEQKEFCAYSGEKIKISDLQDEKMLEIDHIYPYSRSFDDSYMNKVLVFTKQNQEKLNQTPFEAFGNDSAKWQKIEVLAKNLPTKKQKRILDKNYKDKEQKDFKDRNLNDTRYIARLVLNYTKDYLDFLPLSDDENTKLNDTQKGSKVHVEAKSGMLTSALRHTWGFSAKDRNNHLHHAIDAVIIAYANNSIVKAFSDFKKEQESNSAELYAKKISELDYKNKRKFFEPFSGFRQKVLDKIDEIFVSKPERKKPSGALHEETFRKEEEFYQSYGGKEGVLKALELGKIRKVNGKIVKNGDMFRVDIFKHKKTNKFYAVPIYTMDFALKVLPNKAVARSKKGEIKDWILMDENYEFCFSLYKDSLILIQTKDMQEPEFVYYNAFTSSTVSLIVSKHDNKFETLSKNQKILFKNANEKEVIAKSIGIQNLKVFEKYIVSALGEVTKAEFRQREDFKK

SEQ ID NO: 133 - protein, 984 aa, Campylobacter jejuni
MARILAFDIGISSIGWAFSENDELKDCGVRIFTKAENPKTGESLALPRRLARSARKRLARRKARLNHLKHLIANEFKLNYEDYQSFDESLAKAYKGSLISPYELRFRALNELLSKQDFARVILHIAKRRGYDDIKNNGDEEKSEILKAIKQNEEKLVNYQSVGEYLYKEYFQKFKENSKEFINVRNKKESYERCITQSFLKDELKLIFQKQREFGFSFSKKFEEEVLSVAFYKRALKDFSHLVGNCSFFTDEKRAPKNSPLAFMFVALTRIINILNNLKNTEGILYTKDDLNALLNEVLKNGTLTYKQTKKLLGLSDDYEFKGEKGTYFIEFKKYKEFIKALGEHNLSQDDLNEIAKDITLIKDEIKLKKALAKYDLNQNQIDSLSKLEFKDHLNISFKALKLITPLMLEGKKYDEACNELNLKVAINEDKKDFLPAFNETYYKDEVTNPVVLRAIKEYRKILNALLKKYGKVHKINIELAREVGKNHSQRAKIEKEQNENYKAKKDAEIECEKLGLKINSKNILKLRLFKEQKEFCAYSGEKIKLSDLQDEKMLEIDHIYPYSRSFDDSYMNKVLVFTKQNQEKLNKTPFEAFGNDSTKWQKIEVLAKNLPEKKQKRILDKNYKDKEQKDFKDRNLNDTRYIARLVLNYTKDYLDFLPLSDDENTKLNDTQKGSKVHVEAKSGMLTSALRHTWGFSAKDRNNHLHHAIDAAIIAYANNSIVKAFSDFKKEQESNSVELYAKKISELDYKNKRKFFEPFSGFRQKVLDKIDEIFVSKPERKKPSGALHEETFRKEEEFYQSYGGKEGVLKALELGKIRKVNGKIVKNGDMFRVDIFKHKKTNKFYAVPIYTMDFALKVLPNKAVARSKKGEIKDWILMDENYEFCFSLYKDSLILIQTKDMQEPELVYFNAFTSSTVSLIVSKHDNKFETLSKNQKILFKNANEKEVIAKSIGIQNLKVFEKYIVSALGEVTKAEFRQREDFKK

SEQ ID NO: 134 - protein, 984 aa, Campylobacter jejuni
  Campylobacter jejuni subsp. jejuni 84-25
MVRILAFDIGISSIGWAFSENDELKDCGVRIFTKVENPKTGESLALPRRLARSARKRLARRKARLNHLKHLIANEFKLNYEDYQSFDESLAKAYKGSLISPYELRFRALNELLSKQDFARVILHIAKRRGYDDIKNSDDKEKGAILKAIKQNEEKLANYQSVGEYLYKEYFQKFKENSKEFTNVRNKKESYERCIAQSFLKDELKLIFKKQREFGFSFSKKFEEEVLSVAFYKRALKDFSHLVGNCSFFTDEKRAPKNSPLAFMFVALTRIINLLNNLKNTEGILYTKDDLNALLNEVLKNGTLTYKQTKKLLGLSDDYEFKGEKGTYFIEFKKYKEFIKALGEHNLSQDDLNEIAKDITLIKDEIKLKKALAKYDLNQNQIDSLSKLEFKDHLNISFKALKLITPLMLEGKKYDEACNELNLKVAINEDKKDFLPAFNETYYKDEVTNPVVLRAIKEYRKVLNALLKKYGKVHKINIELAREVGKNHSQRAKIEKEQNENYKAKKDAELECEKLGLKINSKNILKLRLFKEQKEFCAYSGEKIKISDLQDEKMLEIDHIYPYSRSFDDSYMNKVLVFTKQNQEKLNKTPFEAFGNDSAKWQKIEVLAKNLPTKKQKRILDKNYKDKEQKDFKDRNLNDTRYIARLVLNYTKDYLDFLPLSDDENTKLNDTQKGSKVHVEAKSGMLTSALRHTWGFSTKDRNNHLHHAIDAVIIAYANNSIVKAFSDFKKEQESNSAELYAKKISELDYKNKRKFFEPFSGFRQKVLDKIDEIFVSKPERKKPSGALHEETFRKEEEFYQSYGGKEGVLKALELGKIRKVNGKIVKNGDMFRVDIFKHKKTNKFYAVPIYTMDFALKVLPNKAVARSKKGEIKDWILMDENYEFCFSLYKDSLILIQTKDMQEPEFVYYNAFTSSTVSLIVSKHDNKFETLSKNQKILFKNANEKEVIAKSIGIQNLKVFEKYIVSALGEVTKAEFRQREDFKK

SEQ ID NO: 135 - protein, 984 aa, Campylobacter jejuni
  Campylobacter jejuni subsp. jejuni 87459
MARILAFDIGISSIGWAFSENDELKDCGVRIFTKAENPKTGESLALPRRLARSARKRLARRKARLNHLKHLIANEFKLNYEDYQSFDESLAKAYKGSLISPYELRFRALNELLSKQDFARVILHIAKRRGYDDIKNSDDKEKGAILKAIKQNEEKLANYQSVGEYLYKEYFQKFKENSKEFTNVRNKKESYERCIAQSFLKDELKLIFKKQREFGFSFSKKFEEEVLSVAFYKRALKDFSHLVGNCSFFTDEKRAPKNSPLAFMFVALTRIINLLNNLKNTEGILYTKDDLNTFLNEVLKNGTLTYKQTKKLLGLSDDYEFKGEKGTYFIEFKKYKEFIKALGDHNLSQDDLNEIAKDITLIKDEIKLKKALAKYDLNQNQIDSLSKLEFKDHLNISFKALKLITPLMLEGKKYDEACNELNLKVAINEDKKDFLPAFNETYYKDEVTNPVVLRAIKEYRKVLNALLKKYGKVHKINIELAREVGKNHSQRAKIEKEQNENYKAKKDAELECEKLGLKINSKNILKLRLFKEQKEFCAYSGEKIKISDLQDEKMLEIDHIYPYSRSFDDSYMNKVLVFTKQNQEKLNKTPFEAFGNDSAKWQKIEVLAKNLPTKKQKRILDKNYKDKEQKDFKDRNLNDTRYIARLVLNYTKDYLDFLPLSDDENTKLNDTQKGSKVHVEAKSGMLTSALRHTWGFSTKDRNNHLHHAIDAVIIAYANNSIVKAFSDFKKEQESNSAELYAKKISELDYKNKRKFFEPFSGFRQKVLDKIDEIFVSKPERKKPSGALHEETFRKEEEFYQSYGGKEGVLKALELGKIRKVNGKIVKNGDMFRVDIFKHKKTNKFYAVPIYTMDFALKVLPNKAVARSKKGEIKDWILMDENYEFCFSLYKDSLILIQTKDMQEPEFVYYNAFTSSTVSLIVSKHDNKFETLSKNQKILFKNANEKEVIAKSIGIQNLKVFEKYIVSALGEVTKAEFRQREDFKK

SEQ ID NO: 136 - protein, 984 aa, Campylobacter jejuni
  Campylobacter jejuni subsp. jejuni ATCC 33560
MARILAFDIGISSIGWAFSENDELKDCGVRIFTKAENPKTGESLALPRRLARSARKRLARRKARLNHLKHLIANEFKLNYEDYQSFDESLAKAYKGSLISPYELRFRALNELLSKQDFARVILHIAKRRGYDDIKNSDDKEKGAILKAIKQNEEKLANYQSVGEYLYKEYFQKFKENSKEFTNVRNKKESYERCIAQSFLKDELKLIFKKQREFGFSFSKKFEEEVLSVAFYKRALKDFSHLVGNCSFFTDEKRAPKNSPLAFMFVALTRIINLLNNLKNTEGILYTKDDLNALLNEVLKNGTLTYKQTKKLLGLSDDYEFKGEKGTYFIEFKKYKEFIKALGDHSLSQDDLNEIAKDITLIKDEIKLKKALAKYDLNQNQIDSLSKLEFKDHLNISFKALKLITPLMLEGKKYDEACNELNLKVAINEDKKDFLPAFNETYYKDEVTNPVVLRAIKEYRKVLNALLKKYGKVHKINIELAREVGKNYSQRAKIEKEQNENYKAKKDAELECEKLGLKINSKNILKLRLFKEQKEFCAYSGEKIKISDLQDEKMLEIDHIYPYSRSFDDSYMNKVLVFTKQNQEKLNQTPFEAFGNDSAKWQKIEVLAKNLPTKKQKRILDKNYKDKEQKNFKDRNLNDTRYIARLVLNYTKDYLDFLPLSDDENTKLNDTQKGSKVHVEAKSGMLTSALRHTWGFSAKDRNNHLHHTIDAVIIAYANNSIVKAFSDFKKEQESNSAELYAKKISELDYKNKRKFFEPFSGFRQKVLDKIDEIFVSKPERKKPSGALHEETFRKEEEFYQSYGGKEGVLKALELGKIRKVNGKIVKNGDMFRVDIFKHKKTNKFYAVPIYTMDFALKVLPNKAVARSKKGEIKDWILMDENYEFCFSLYKDSLILIQTKDMQEPEFVYYNAFTSSTVSLIVSKHDNKFETLSKNQKILFKNANEKEVIAKSIGIQNLKVFEKYIVSALGEVTKAEFRQREDFKK

SEQ ID NO: 137 - protein, 987 aa, Campylobacter jejuni
  Campylobacter jejuni subsp. jejuni CF93-6
MARILAFDIGISSIGWAFSENDELKDCGVRIFTKVENPKTGESLALPRRLARSARKRLARRKARLNHLKHLIANEFKLNYEDYQSFDESLAKAYKGSLISPYELRFRALNELLSKQDFARVILHIAKRRGYDDIKNSDDKEKGAILKAIKQNEEKLANYQSVGEYLYKEYFQKFKENSKEFTNVRNKKESYERCIAQSFLKDELKLIFKKQREFGFSFSKKFEEEVLSVAFYKRALKDFSHLVGNCSFFTDEKRVPKNSPLAFMFVALTRIINLLNNLKNTEGILYTKDDLNALLNEVLKNGTLTYKQTKKLLGLSDDYEFKGEKGTYFIEFKKYKEFIKALGEHNLSQDDLNEIAKDITLIKDEIKLKKALAKYDLNQNQIDSLSKLEFKDHLNISFKALKLITPLMLEGKKYDEACNELNLKVAINEDKKDFLPAFNETYYKDEVTNPVVLRAIKEYRKVLNALLKKYGKVHKINIELAREVGKNHSQRAKIEKEQNENYKAKKDAELECEKLGLKINSKNILKLRLFKEQKEFCAYSGEKIKISDLQDEKMLEIDHIYPYSRSFDDSYMNKVLVFTKQNQEKLNQTPFEAFGNDSAKWQKIEVLAKNLPTKKQKRILDKNYKDKEQKNFKDRNLNDTRYIARLVLNYTKDYLDFLPLSDDENTKLNDTQKGSKVHVEAKSGMLTSALRHTWGFSAKDRNNHLHHAIDAVIIAYANNSIVKAFSDFKKEQESNSAELYAKKISELDYKNKRKFFEPFSGFRQKVLDKIDEIFVSKPERKKPSGALHEETFRKEEEFYQSYGGKEGVLKALELGKIRKVNGKIVKNGDMFRVDIFKHKKTNKFYGVPIYTMDFALKVLPNKAVARSKKGEIKDWILMDENYEFCFSLYKDSLILIQTKDMQEPEFVYYNAFTSSTVSLIVSKHDNKFETLSKNQKILFKNANEKEVIAKSIGIQNLKVFEKYIVSALGEVTKAEFRQREDFKNELR

SEQ ID NO: 138 - protein, 984 aa, Campylobacter jejuni
  Campylobacter jejuni subsp. jejuni CG8486
MARILAFDIGISSIGWAFSENDELKDCGVRIFTKAENPKTGESLALPRRLARSARKRLARRKARLNHLKHLIANEFKLNYEDYQSFDESLAKAYKGSLISPYELRFRALNELLSKQDFARVILHIAKRRGYDDIKNSDDKEKGAILKAIKQNEEKLANYQSVGEYLYKEYFQKFKENSKEFTNVRNKKESYERCIAQSFLKDELKLIFKKQREFGFSFSKKFEEEVLSVAFYKRALKDFSHLVGNCSFFTDEKRAPKNSPLAFMFVALTRIINLLNNLKNTEGILYTKDDLNALLNEVLKNGTLTYKQTKKLLGLSDDYEFKGEKGTYFIEFKKYKEFIKALGDHSLSQDDLNEIAKDITLIKDEIKLKKALAKYDLNQNQIDSLSKLEFKDHLNISFKALKLITPLMLEGKKYDEACNELNLKVAINEDKKDFLPAFNETYYKDEVTNPVVLRAIKEYRKVLNALLKKYGKVHKINIELAREVGKNYSQRAKIEKEQNENYKAKKDAELECEKLGLKINSKNILKLRLFKEQKEFCAYSGEKIKISDLQDEKMLEIDHIYPYSRSFDDSYMNKVLVFTKQNQEKLNQTPFEAFGNDSAKWQKIEVLAKNLPTKKQKRILDKNYKDKEQKDFKDRNLNDTRYIARLVLNYTKDYLDFLPLSDDENTKLNDTQKGSKVHVEAKSGMLTSALRHTWGFSAKDRNNHLHHAIDAVIIAYANNSIVKAFSDFKKEQESNSAELYAKKISELDYKNKRKFFEPFSGFRQKVLDKIDEIFVSKPERKKPSGALHEETFRKEEEFYQSYGGKEGVLKALELGKIRKVNGKIVKNGDMFRVDIFKHKKTNKFYAVPIYTMDFALKVLPNKAVARSKKGEIKDWILMDENYEFCFSLYKDSLILIQTKDMQEPEFVYYNAFTSSTVSLIVSKHDNKFETLSKNQKILFKNANEKEVIAKSIGIQNLKVFEKYIVSALGEVTKAEFRQREDFKK

SEQ ID NO: 139 - protein, 984 aa, Campylobacter jejuni
  Campylobacter jejuni subsp. jejuni HB93-13
MARILAFDIGISSIGWAFSENDELKDCGVRIFTKVENPKTGESLALPRRLARSARKRLARRKARLNHLKHLIANEFKLNYEDYQSFDESLAKAYKGSLISPYELRFRALNELLSKQDFARVILHIAKRRGYDDIKNSDDKEKGAILKAIKQNEEKLANYQSVGEYLYKEYFQKFKENSKEFTNVRNKKESYERCIAQSFLKDELKLIFKKQREFGFSFLKKFEEEVLSVAFYKRALKDFSHLVGNCSFFTDEKRAPKNSPLAFMFVALTRIINLLNNLKNTEGILYTKDDLNALLNEVLKNGTLTYKQTKKLLGLSDDYEFKGEKGTYFIEFKKYKEFIKALGEHNLSQDDLNEIAKDITLIKDEIKLKKALAKYDLNQNQIDSLSKLEFKDHLNISFKALKLITPLMLEGKKYDEAYNELNLKVAINEDKKDFLPAFNETYYKDEVTNPVVLRAIKEYRKVLNALLKKYGKVHKINIELAREVGKNHSQRAKIEKEQNENYKAKKDAELECEKLGLKINSKNILKLRLFKEQKEFCAYSGEKIKISDLQDEKMLEIDHIYPYSRSFDDSYMNKVLVFTKQNQEKLNQTPFEAFGNDSAKWQKIEVLAKNLPTKKQKRILDKNYKDKEQKDFKDRNLNDTRYIARLVLNYTKDYLDFLPLSDDENTKLNDTQKGSKVHVEAKSGMLTSALRHTWGFSAKDRNNHLHHAIDAVIIAYANNSIVKAFSDFKKEQESNSAELYAKKISELDYKNKRKFFEPFSGFRQKVLDKIDEIFVSKPERKKPSGALHEETFRKEEEFYQSYGGKEGVLKALELGKIRKVNGKIVKNGDMFRVDIFKHKKTNKFYAVPIYTMDFALKVLPNKAVARSKKGEIKDWILMDENYEFCFSLYKDSLILIQTKDMQEPELVYFNAFTSSTVSLIVSKHDNKFETLSKNQKILFKNANEKEVIAKSIGIQNLKVFEKYIVSALGEVTKAEFRQREDFKK

SEQ ID NO: 140 - protein, 987 aa, Campylobacter jejuni
  Campylobacter jejuni subsp. jejuni LMG 23210
MARILAFDIGISSIGWAFSENDELKDCGVRIFTKAENPKTGESLALPRRLARSARKRLARRKARLNHLKHLIANEFKLNYEDYQSFDESLAKAYKGSLISPYELRFRALNELLSKQDFARVILHIAKRRGYDDIKNSDDKEKGAILKAIKQNEEKLANYQSVGEYLYKEYFQKFKENSKEFTNVRNKKESYERCIAQSFLKDELKLIFKKQREFGFSFSKKFEEEVLSVAFYKRALKDFSHLVGNCSFFTDEKRAPKNSPLAFMFVALTRIINLLNNLKNTEGILYTKDDLNALLNEVLKNGTLTYKQTKKLLGLSDDYEFKGEKGTYFIEFKKYKEFIKALGDHSLSQDDLNEIAKDITLIKDEIKLKKALVKYDLNQNQIDSLSKLEFKDHLNISFKALKLITPLMLEGKKYDEACNELNLKVAINEDKKDFLPAFNETYYKDEVTNPVVLRAIKEYRKVLNALLKKYGKVHKINIELAREVGKNYSQRAKIEKEQNENYKAKKDAELECEKLGLKINSKNILKLRLFKEQKEFCAYSGEKIKISDLQDEKMLEIDHIYPYSRSFDDSYMNKVLVFTKQNQEKLNQTPFEAFGNDSAKWQKIEVLAKNLPTKKQKRILDKNYKDKEQKDFKDRNLNDTRYIARLVLNYTKDYLDFLPLSDDENTKLNDTQKGSKVHVEAKSGMLTSALRHTWGFSAKDRNNHLHHAIDAVIIAYANNSIVKAFSDFKKEQESNSAELYAKKISELDYKNKRKFFEPFSGFRQKVLDKIDEIFVSKPERKKPSGALHEETFRKEEEFYQSYGGKEGVLKALELGKIRKVNGKIVKNGDMFRVDIFKHKKTNKFYAVPIYTMDFALKVLPNKAVARSKKGEIKDWILMDENYEFCFSLYKDSLILIQTKDMQEPELVYFNAFTSSTVSLIVSKHDNKFETLSKNQKILFKNANEKEVIAKSIGIQNLKVFEKYIVSALGEVTKAEFRQREDFKNELR

SEQ ID NO: 141 - protein, 984 aa, Campylobacter jejuni
  Campylobacter jejuni subsp. jejuni LMG 23211
MARILAFDIGISSIGWAFSENDELKDCGVRIFTKAENPKTGESLALPRRLARSARKRLARRKARLNHLKHLIANEFKLNYEDYQSFDESLAKAYKGSLISPYELRFRALNELLSKQDFARVILHIAKRRGYDDIKNNGDEEKSEILKAIKQNEEKLVNYQSVGEYLYKEYFQKFKENSKEFINVRNKKESYERCITQSFLKDELKLIFQKQREFGFSFSKKFEEEVLSVAFYKRALKDFSHLVGNCSFFTDEKRAPKNSPLAFMFVALTRIINLLNNLKNTEGILYTKDDLNALLNEVLKNGTLTYKQTKKLLGLSDDYEFKGEKGTYFIEFKKYKEFIKALDEHSLSQDDLNEIAKDITLIKDEIKLKKALAKYDLNQNQIDSLSKLEFKDHLNISFKALKLITPLMLEGKKYDEACNELNLKVAINEDKKDFLPAFNETYYKDEVTNPVVLRAIKEYRKILNALLKKYGKVHKINIELAREVGKNHSQRAKIEKEQNENYKAKKDAEIECEKLGLKINSKNILKLRLFKEQKEFCAYSGEKIKISDLQDEKMLEIDHIYPYSRSFDDSYMNKVLVFTKQNQEKLNKTPFEAFGNDGVKWQKIEVLAKNLPEKKQKRILDKNYKDKEQKDFKDRNLNDTRYIARLVLNYTKDYLDFLPLSDDENTKLNDTQKGSKVHVEAKSGMLTSALRHTWGFSTKDRNNHLHHAIDAAIIAYANNSIVKAFSDFKKEQESNSAELYAKKISELDYKNKRKFFEPFSGFRQKVLDKIDEIFVSKPERKKPSGALHEETFRKEEEFYQSYGGKEGVLKALELGKIRKVNGKIVKNGDMFRVDIFKHKKTNKFYAVPIYTMDFALKVLPNKAVARSKKGEIKDWILMDENYEFCFSLYKDSLILIQTKDMQEPELVYFNAFTSSTVSLVVSKHDNKFETLSKNQKILFKNANEKEVIAKSIGIQNLKVFEKYIVSALGEVTKAEFRQREDFKK

SEQ ID NO: 142 - protein, 984 aa, Campylobacter jejuni
  Campylobacter jejuni subsp. jejuni LMG 23263
MARILAFDIGISSIGWAFSENDELKDCGVRIFTKAENPKTGESLALPRRLARSARKRLARRKARLNHLKHLIANEFKLNYEDYQSFDESLAKAYKGSLISPYELRFRALNELLSKQDFARVILHIVKRRGYDDIKNSDDKEKGAILKAIKQNEEKLANYQSVGEYLYKEYFQKFKENSKEFTNVRNKKESYERCIAQSFLKDELKLIFKKQREFGFSFSKKFEEEVLSVAFYKRALKDFSHLVGNCSFFTDEKRAPKNSPLAFMFVALTRIINLLNNLKNTEGILYTKDDLNTLLNEVLKNGTLTYKQTKKLLGLSDDYEFKGEKGTYFIEFKKYKEFIKALGDHSLSQDDLNEIAKDITLIKDEIKLKKALAKYDLNQNQIDSLSKLEFKDHLNISFKALKLITPLMLEGKKYDEACNELNLKVAINEDKKDFLPAFNETYYKDEVTNPVVLRAIKEYRKVLNALLKKYGKVHKINIELAREVGKNHSQRAKIEKEQNENYKAKKDAEFECEKLGLKINSKNILKLRLFKEQKEFCAYSGEKIKISDLQDEKMLEIDHIYPYSRSFDDSYMNKVLVFTKQNQEKLNKTPFEAFGNDSAKWQKIEVLAKNLPTKKQKRILDKNYKDKEQKDFKDRNLNDTRYIARLVLNYTKDYLDFLPLSDDENTKLNDTQKGSKVHVEAKSGMLTSALRHTWGFSTKDRNNHLHHAIDAVIIAYANNSIVKAFSDFKKEQESNSAELYAKKISELDYKNKRKFFEPFSGFRQKVLDKIDEIFVSKPERKKPSGALHEETFRKEEEFYQSYGGKEGVLKALELGKIRKVNGKIVKNGDMFRVDIFKHKKTNKFYAVPIYTMDFALKVLPNKAVARSKKGEIKDWILMDENYEFCFSLYKDSLILIQTKDMQEPEFVYYNAFTSSTVSLIVSKHDNKFETLSKNQKILFKNANEKEVIAKSIGIQNLKVFEKYIVSALGEVTKAEFRQREDFKK

SEQ ID NO: 143 - protein, 984 aa, Campylobacter jejuni
  Campylobacter jejuni subsp. jejuni LMG 23264
MARILAFDIGISSIGWAFSENDELKDCGVRIFTKVENPKTGESLALPRRLARSARKRLARRKARLNHLKHLIANEFKLNYEDYQSFDESLAKAYKGSLISPYELRFRALNELLSKQDFARVILHIAKRRGYDDIKNSDDKEKGAILKAIKQNEEKLANYQSVGEYLYKEYFQKFKENSKEFTNVRNKKESYERCIAQSFLKDELKLIFKKQREFGFSFSKKFEEEVLSVAFYKRALKDFSHLVGNCSFFTDEKRAPKNSPLAFMFVALTRIINLLNNLKNTEGILYTKDDLNALLNEVLKNGTLTYKQTKKLLGLSDDYEFKGEKGTYFIEFKKYKEFIKALGEHNLSQDDLNEIAKDITLIKDEIKLKKALAKYDLNQNQIDSLSKLEFKDHLNISFKALKLITPLMLEGKKYDEACNELNLKVAINEDKKDFLPAFNETYYKDEVTNPVVLRAIKEYRKVLNALLKKYGKVHKINIELAREVGKNHSQRAKIEKEQNENYKAKKDAELECEKLGLKINSKNILKLRLFKEQKEFCAYSGEKIKISDLQDEKMLEIDHIYPYSRSFDDSYMNKVLVFTKQNQEKLNKTPFEAFGNDSAKWQKIEVLAKNLPTKKQKRILDKNYKDKEQKDFKDRNLNDTRYIARLVLNYTKDYLDFLPLSNDENTKLNDTQKGSKVHVEAKSGMLTSALRHTWGFSTKDRNNHLHHAIDAVIIAYANNSIVKAFSDFKKEQESNSAELYAKKISELDYKNKRKFFEPFSGFRQKVLDKIDEIFVSKPERKKPSGALHEETFRKEEEFYQSYGGKEGVLKALELGKIRKVNGKIVKNGDMFRVDIFKHKKTNKFYAVPIYTMDFALKVLPNKAVARSKKGEIKDWILMDENYEFCFSLYKDSLILIQTKDMQEPEFVYYNAFTSSTVSLIVSKHDNKFETLSKNQKILFKNANEKEVIAKSIGIQNLKVFEKYIVSALGEVTKAEFRQREDFKK

SEQ ID NO: 144 - protein, 987 aa, Campylobacter jejuni
  Campylobacter jejuni subsp. jejuni LMG 23269
MARILAFDIGISSIGWAFSENDELKDCGVRIFTKAENPKTGESLALPRRLARSARKRLARRKARLNHLKHLIANEFKLNYEDYQSFDESLAKAYKGSLISPYELRFRALNELLSKQDFARVILHIAKRRGYDDIKNNGDEEKSEILKAIKQNEEKLVNYQSVGEYLYKEYFQKFKENSKEFINVRNKKESYERCIAQSFLKDELKLIFQKQREFGFSFSKKFEEEVLSVAFYKRALKDFSHLVGNCSFFTDEKRAPKNSPLAFMFVALTRIINLLNNLKNTEGILYTKDDLNTLLNEVLKNGTLTYKQTKKLLGLSDDYEFKGEKGTYFIEFKKYKEFIKALGEHNLSQDNLNEIAKDITLIKDEIKLKKALAKYDLNQNQIDSLSKLEFKDHLNISFKALKLITPLMLEGKKYDEAYNELNLKVAINEDKKDFLPAFNETYYKDEVTNPVVLRAIKEYRKVLNALLKKYGKVHKINIELAREVGKNHSQRAKIEKEQNENYKAKKDAELECEKLGLKINSKNILKLRLFKEQKEFCAYSGEKIKISDLQDEKMLEIDHIYPYSRSFDDSYMNKVLVFTKQNQEKLNQTPFEAFGNDSAKWQKIEVLAKNLPTKKQKRILDKNYKDKEQKDFKDRNLNDTRYIARLVLNYTKDYLDFLPLSDDENTKLNDTQKGSKVHVEAKSGMLTSALRHTWGFSAKDRNNHLHHAIDAVIIAYANNSIVKAFSDFKKEQESNSAELYAKKISELDYKNKRKFFEPFSGFRQKVLDKIDEIFVSKPERKKPSGALHEETFRKEEEFHQSYGGKEGVLKALELGKIRKVNGKIVKNGDMFRVDIFKHKKTNKFYAVPIYTMDFALKVLPNKAVVQGKDKKSGLIKDWILMDENYEFCFSLYKDSLILIQTKDMQEPELVYFNAFTSSTVSLIVSKHDNKFETLSKNQKILFKNANEKEVIAKSIGIQNLKVFEKYIVSALGEVTKAEFRQREDFKK

SEQ ID NO: 145 - protein, 987 aa, Campylobacter jejuni
  Campylobacter jejuni subsp. jejuni LMG 23357
MARILAFDIGISSIGWAFSENDELKDCGVRIFTKAENPKTGESLALPRCLARSARKRLARRKARLNHLKHLIANEFKLNYEDYQSFDESLAKAYKGSLISPYELRFRALNELLSKQDFARVILHIAKRRGYDDIKNNGDEEKGEILKAIKQNEEKLVSYQSVGEYLYKEYFQKFKENSKEFINVRNKKESYERCIAQSFLKDELKLIFQKQRKFGFSFSKKFEEEVLSVAFYKRALKDFSHLVGNCSFFTDEKRAPKNSPLAFMFVALTRIINLLNNLKNTEGILYTKDDLNTLLNEVLKNGTLTYKQTKKLLGLSNDYEFKGEKGTYFIEFQKYKEFVKALGEHNLSQDDLNEIAKDITLIKDEIKLKKALAKYDLNQNQIDSLSKLEFKDHLNISFKALKLITPLMLEGKKYDEACNELNLKVAINEDKKDFLPAFNETYYKDEVTNPVVLRAIKEYRKVLNALLKKYGKVHKINIELAREVGKNHSQRAKIEKEQNENYKAKKDAELECEKLGLKINSKNILKLRLFKEQKEFCVYSGEKIKISDLQDEKMLEIDHIYPYSRSFDDSYMNKVLVFTKQNQEKLNKTPFETFGNDRVKWQKIEVLAKNLPTKKQKRILDKNYKDKEQKDFKDRNLNDTRYIARLVLNYTKDYLDFLPLSDDENTKLNDTQKGSKVHVEAKSGMLTSTLRHTWGFSTKDRNNHLHHAIDAAIIAYANNSIVKAFSDFKKEQESNTAELYAKKISELDYKNKRKFFEPFSGFRQKLLDKIDEIFVSKPERKKPSGALHEETFRKEEEFYQSYGGKEGVLKALELGKIRKVNGKIVSNGDMFRVDIFKHKKTNKFYAVPIYTMDFALKVLPNKAVVQGKDKKSGLIKDWILMDENYEFCFSLYKDSLILIQTKDMQEPELVYYERLDSSNASLTVSKHDNKFETLSKNQKILFKNANEKEVIAKSIGIQNLKVFEKYIVSALGEVTKAEFRQREDFKK

SEQ ID NO: 146 - protein, 984 aa, Campylobacter jejuni
  Campylobacter jejuni subsp. jejuni NCTC 11168 = ATCC 700819
MARILAFDIGISSIGWAFSENDELKDCGVRIFTKVENPKTGESLALPRRLARSARKRLARRKARLNHLKHLIANEFKLNYEDYQSFDESLAKAYKGSLISPYELRFRALNELLSKQDFARVILHIAKRRGYDDIKNSDDKEKGAILKAIKQNEEKLANYQSVGEYLYKEYFQKFKENSKEFTNVRNKKESYERCIAQSFLKDELKLIFKKQREFGFSFSKKFEEEVLSVAFYKRALKDFSHLVGNCSFFTDEKRAPKNSPLAFMFVALTRIINLLNNLKNTEGILYTKDDLNALLNEVLKNGTLTYKQTKKLLGLSDDYEFKGEKGTYFIEFKKYKEFIKALGEHNLSQDDLNEIAKDITLIKDEIKLKKALAKYDLNQNQIDSLSKLEFKDHLNISFKALKLVTPLMLEGKKYDEACNELNLKVAINEDKKDFLPAFNETYYKDEVTNPVVLRAIKEYRKVLNALLKKYGKVHKINIELAREVGKNHSQRAKIEKEQNENYKAKKDAELECEKLGLKINSKNILKLRLFKEQKEFCAYSGEKIKISDLQDEKMLEIDHIYPYSRSFDDSYMNKVLVFTKQNQEKLNQTPFEAFGNDSAKWQKIEVLAKNLPTKKQKRILDKNYKDKEQKNFKDRNLNDTRYIARLVLNYTKDYLDFLPLSDDENTKLNDTQKGSKVHVEAKSGMLTSALRHTWGFSAKDRNNHLHHAIDAVIIAYANNSIVKAFSDFKKEQESNSAELYAKKISELDYKNKRKFFEPFSGFRQKVLDKIDEIFVSKPERKKPSGALHEETFRKEEEFYQSYGGKEGVLKALELGKIRKVNGKIVKNGDMFRVDIFKHKKTNKFYAVPIYTMDFALKVLPNKAVARSKKGEIKDWILMDENYEFCFSLYKDSLILIQTKDMQEPEFVYYNAFTSSTVSLIVSKHDNKFETLSKNQKILFKNANEKEVIAKSIGIQNLKVFEKYIVSALGEVTKAEFRQREDFKK

SEQ ID NO: 147 - protein, 983 aa, Campylobacter jejuni
  Campylobacter jejuni subsp. jejuni NW
MARILAFDIGISSIGWAFSENDELKDCGVRIFTKAENPKTGESLALPRRLARSARKRLARRKARLNHLKHLIANEFKLNYEDYQSFDESLAKAYKGSLISPYELRFRALNELLSKQDFARVILHIAKRRGYDDIKNSDDKEKGAILKAIKQNEEKLANYQSVGEYLYKEYFQKFKENSKEFTNVRNKKESYERCIAQSFLKDELKLIFKKQREFGFSFSKKFEEEVLSVAFYKRALKDFSHLVGNCSFFTDEKRAPKNSPLAFMFVALTRIINLLNNLKNTEGILYTKDDLNALLNEVLKNGTLTYKQTKKLLGLSDDYEFKGEKGTYFIEFKKYKEFIKALGEHNLSQDDLNEIAKDITLIKDEIKLKKALAKYDLNQNQIDSLSKLEFKDHLNISFKALKLVTPLMLEGKKYDEACNELNLKVAINEDKKDFLPAFNETYYKDEVTNPVVLRAIKEYRKVLNALLKKYGKVHKINIELAREVGKNHSQRAKIEKEQNENYKAKKDAELECEKLGLKINSKNILKLRLFKEQKEFCAYSGEKIKISDLQDEKMLEIDHIYPYSRSFDDSYMNKVLVFTKQNQEKLNQTPFEAFGNDSAKWQKIEVLAKNLPTKKQKRILDKNYKDKEQKNFKDRNLNDTRYIARLVLNYTKDYLDFLPLSDDENTKLNDTQKGSKVHVEAKSGMLTSALRHTWGFSAKDRNNHLHHAIDAVIIAYANNSIVKAFSDFKKEQESNSAELYAKKISELDYKNKRKFFEPFSGFRQKVLDKIDEIFVSKPERKKPSGALHEETFRKEEFYQSYGGKEGVLKALELGKIRKVNGKIVKNGDMFRVDIFKHKKTNKFYAVPIYTMDFALKVLPNKAVARSKKGEIKDWILMDENYEFCFSLYKDSLILIQTKDMQEPEFVYYNAFTSSTVSLIVSKHDNKFETLSKNQKILFKNANEKEVIAKSIGIQNLKVFEKYIVSALGEVTKAEFRQREDFKK

SEQ ID NO: 148 - protein, 987 aa, Campylobacter jejuni
MARILAFDIGISSIGWAFSENDELKDCGVRIFTKAENPKTGESLALPRRLARSARKRLARRKARLNHLKHLIANEFKLNYEDYQSFDESLAKAYKGSLISPYELRFRALNELLSKQDFARVILHIAKRRGYDDIKNNGDEEKSEILKAIKQNEEKLVNYQSVGEYLYKEYFQKFKENSKEFINVRNKKESYERCIAQSFLKDELKLIFQKQREFGFSFSKKFEEEVLSVAFYKRALKDFSHLVGNCSFFTDEKRAPKNSPLAFMFVALTRIINLLNNLKNTEGILYTKDDLNTLLNEVLKNGTLTYKQTKKLLGLSDDYEFKGEKGTYFIEFKKYKEFIKALGEHNLSQDNLNEIAKDITLIKDEIKLKKALAKYDLNQNQIDSLSKLEFKDHLNISFKALKLITPLMLEGKKYDEAYNELNLKVAINEDKKDFLPAFNETYYKDEVTNPVVLRAIKEYRKVLNALLKKYGKVHKINIELAREVGKNHSQRAKIEKEQNENYKAKKDAELECEKLGLKINSKNILKLRLFKEQKEFCAYSGEKIKISDLQDEKMLEIDHIYPYSRSFDDSYMNKVLVFTKQNQEKLNQTPFEAFGNDSAKWQKIEVLAKNLPTKKQKRILDKNYKDKEQKDFKDRNLNDTRYIARLVLNYTKDYLDFLPLSDDENTKLNDTQKGSKVHVEAKSGMLTSALRHTWGFSAKDRNNHLHHAIDAVIIAYANNSIVKAFSDFKKEQESNSAELYAKKISELDYKNKRKFFEPFSGFRQKVLDKIDEIFVSKPERKKPSGALHEETFRKEEEFYQSYGGKEGVLKALELGKIRKVNGKIVKNGDMFRVDIFKHKKTNKFYPVPIYTMDFALKVLPNKAVVQGKDKKSGLIKDWILMDENYEFCFSLYKDSLILIQTKDMQEPELVYFNAFTSSTVSLIVSKHDNKFETLSKNQKILFKNANEKEVIAKSIGIQNLKVFEKYIVSALGEVTKAEFRQREDFKK

SEQ ID NO: 149 - protein, 1003 aa, Campylobacter lari
MRILGFDIGINSIGWAFVENDELKDCGVRIFTKAENPKNKESLALPRRNARSSRRRLKRRKARLIAIKRILAKELKLNYKDYVAADGELPKAYEGSLASVYELRYKALTQNLETKDLARVILHIAKHRGYMNKNEKKSNDAKKGKILSALKNNALKLENYQSVGEYFYKEFFQKYKKNTKNFIKIRNTKDNYNNCVLSSDLEKELKLILEKQKEFGYNYSEDFINEILKVAFFQRPLKDFSHLVGACTFFEEEKRACKNSYSAWEFVALTKIINEIKSLEKISGEIVPTQTINEVLNLILDKGSITYKKFRSCINLHESISFKSLKYDKENAENAKLIDFRKLVEFKKALGVHSLSRQELDQISTHITLIKDNVKLKTVLEKYNLSNEQINNLLEIEFNDYINLSFKALGMILPLMREGKRYDEACEIANLKPKTVDEKKDFLPAFCDSIFAHELSNPVVNRAISEYRKVLNALLKKYGKVHKIHLELARDVGLSKKAREKIEKEQKENQAVNAWALKECENIGLKASAKNILKLKLWKEQKEICIYSGNKISIEHLKDEKALEVDHIYPYSRSFDDSFINKVLVFTKENQEKLNKTPFEAFGKNIEKWSKIQTLAQNLPYKKKNKILDENFKDKQQEDFISRNLNDTRYIATLIAKYTKEYLNFLLLSENENANLKSGEKGSKIHVQTISGMLTSVLRHTWGFDKKDRNNHLHHALDAIIVAYSTNSIIKAFSDFRKNQELLKARFYAKELTSDNYKHQVKFFEPFKSFREKILSKIDEIFVSKPPRKRARRALHKDTFHSENKIIDKCSYNSKEGLQIALSCGRVRKIGTKYVENDTIVRVDIFKKQNKFYAIPIYAMDFALGILPNKIVITGKDKNNNPKQWQTIDESYEFCFSLYKNDLILLQKKNMQEPEFAYYNDFSISTSSICVEKHDNKFENLTSNQKLLFSNAKEGSVKVESLGIQNLKVFEKYIITPLGDKIKADFQPRENISLKTSKKYGLR

SEQ ID NO: 150 - protein, 1430 aa, Capnocytophaga canimorsus
MKHILGLDLGTNSIGWAVVKEAQNDNEQSEIVDVGVRVNPLTTDEKTNFEKGKPISTNADRTLKRSARRNLQRYKLRRKELIELLKEHQLISTDTILTENGKGTTFQTLELRAKSAKEKISLEELARVFLTINKKRGYKSSRKAKNEDEGQLIDGMEIAKRLYEENLTTGQLSLQLLKEGKKSLPDYYRSDLQFELDKVWNFQKQFHSHILTDEFYAQLKGKGQRATSALFLAKYQIYTAENKGSREDKKLQAYQWRVDALSKELTREQLAFVITEINNNLNNSSGYLGAISDRSKELYFNNETVGEYLWKQIAANPHTSLKNQVFYRQDYLDEFEQIWKTQSAFYPEILTDELKKELRDVVIFYQRKLKSQKSLVSFCEFENKEIEIKKEDGTSTKKVIGLKVAPKSSPLFQEFKIWQNLNNVLIRKKGSKTKKVDKNQQAVLFEEEKTIFELDLEAKQALFNELNLKGNLKAYYCLEILGYSPKEWEMNYSVLEGNRTNKALYEAYLKITDLEGYDAKNHLKVKLNKDEVELDDLKVPASEIKDMVQAIFKEAGINTDILHFNAELDGKDFENQASYQLWHLLYSYEGDDSKSGNELLYKLLETKFGFKKEYAQILANVSLSDDYGSLSTKAMRKIHPYIKENKFSTACELAGYRHSKHSLTKEENDNRVLKDSLEVLKKNSLRQPVVEKILNQMINLVNALLKKYRTENPNFKFDEIRIELARELKKNAEERANMTVNINKAKTEHEKIIKILKNEFGLPNPTRNDIIRYRLYEELKANGYKDLYTNEYIEKQDLFTKNIDIEHIIPKSRVFDDSFSNKTLSFRKTNLDKGERTAFDYIESKFGADKLEEYVARVEDLYKNNIISKAKYQKLLKKESEIGDGFVERDLRETQYIAKKAKEILLQITPNVLSTSGGITDRLREDWDLINVMKELNLPKYRALGLTQMEDRKYGQQVEVIIDWTKRNDHRHHAMDALTVAFTKHNHIQYLNYLNARKNEKHREHSNIMGIQQLETIKVTDKNGNEKRVFKAPMPNFRQVTKAFLENVLISHKAKNKVVTKNKNKVAGSNKVQEVLTPRGQLHKETVYGKYQYYVQKEEKIGGKFDLETIKKVANPLYQSLLKKRLEENGGDPKKAFTGKNSLAKNPIYLDDAQTEQLPEKVKLVWLENSFSIRKDITPENFKDEKLIDKILDEGVKRILKERLQSFGNDAKKAFSDLDKNPIWLNKEKGIAIKRVAISGVANAEPLHTKKDHLGKEILDKEGKSIPVDFISTGNNHHVAVYRDEKGNLQEKVVSVFEAVVRANQGLPIIDKTYNQHLGWEFLFTMKQNEMFVFSNESTGFNPNDIDLLDPKNKKIISPNLFRVQKFSKLQYGNSFVREFVFRHHLETTVEDRKELQGITYKQMKNSAFFNDIIKVRINHLGGIVSVGEY

SEQ ID NO: 151 - protein, 1436 aa, Capnocytophaga gingivalis
  Capnocytophaga gingivalis ATCC 33624
MKYIKYILGLDIGSNSIGWALIQLDLLQKTKRIIAAGSRIIPMDQKVLSDFGKGITISPTAQRTSYRNARHCRERHLLRRERLHRVLHILGFLPTHYDKQIDFSKRYGKFVDNTEPKIAYNEGKFLFMDSFQEMLSDFKSHQPDLFYTKKNGEESKIPYDWTIYYLRKKALSQKISKEELAWIILNFNQKRGYYQLREEEGNKENDFEIISSKIISVIKKDKDKKYNKYWYDIILENGLVYQAAFYNDFVYNWINQDREFIIERTSLKNGAEKVKLSYLPTFDEIDKMDKKEQDKYYKKIKIKTENSIGNKTVGCYIYDHILQNPNEKIKGKLVRTIERKYYKEELKAILEKQIALQPELFTDQLLADCIRELYSKNEAQQRNLAARDFVHLLVEDIIFYQRPLRRQKSTLANCSLESRSYIDKDSHTRKEAPLKVCPKSNPYYQEFRVLQWLQNLKIYEIDSDQEVTHQFIKTLEDKQQLFEFLMAQKEIDCEELLKYFLNQTYPNAKEKALKSELKKWKDTYRWNYVYDIGEKSSKKYPMNETRYELKRHLEKVANLPDDFLSSEVEYLLWHLIYSVKDKVAYEKGLKKFAQKHHLDKDSFVESFKKFNPYPSEYGSFSEKAIRKLLPLMRFGAHWDFNHIDKNTQKRIEDLITGVENEEIRTILREKAEKYQLEKETDFQDLPLWLAQYIVYNRHAEASSLEKWTSVNDLETYLNEFKQHSLRNPIVEQVVMETLRVVRDIWQQYGQGQASFFNEIHIELGRELKKTAKEREKLSKQNQKNEDINLSIKEKLKELEKYNTRAYSITHQEKYKLWLEQKHISPYTGQIISPENLFTDNYEIEHIIPQSRFFDDSLSNKVVCESIVNKAPYKDRQLGLEFIKNQGGRIVKELSKENKTIKIFTEEQYRTFIKEHYSNNPEKTKKLLLEEIPEKMVARQMNDTCYISKFISEILSKIVRSDEQDEGVHSKNVILCTGKITSILRQDWGLNDIWDNLILPRFERMNNLLQKEKFTIYSIEKQKKIPVVPINDQFKSFQKKRIDHRHHAMDAIIIACTTREHINYINNQHALEKEKDKKEKQEERDKLREKLCIKKYNNRSEGNYSWIFKKPWDTFTQEVRVALEDIVVSFKQNLRVINKATNYYERWVEENGKYIKKMVKQEGTNWAIRKPLHEETISGKIYLDREKITKNDILTATRKTVDSSFDDKRIKKITDTGIQKILLNYLKYKGSPEIAFSPEGLEELNKNLSIYNDGKPHKPIYKVRIYEKGSGRFALGEKGRKYKKYVQGASNLYFGIYQGAKRSFATIPLNEVIERQKQGLPSVPEYNEKGDLLLFSLSPNDLVYVPIEGEIIENIDFRNLSKEQKERIYNVNDFSSTCYFTPNRIAKAIFPKEVDLQRKGDKLSGSYDTKTASLEGIQIKEVCIKLKVDRLGNISKA

SEQ ID NO: 152 - protein, 1426 aa, Capnocytophaga ochracea
MKNILGLDLGTTSIGFAHIVEDENKEKSEIKELGVRIVSLTTDEQSDFEKGKSITTNANRTLKHGARLNLDRYQQRRKYLIDLLQKANLITPSSILAENGKNTTHSTWQLRAKAVTERIEKEEFARILLAINKKRGYKSSRKAKTEDEGQAIDGMAIAKRLYDENLTPGQLSLQLLQQNKKLLPDFYRSDLQKEFDLVWNFQKQFYPDILTDIFYKELQGKGKDATSKAFSKRYHFDTTENKGSKESVRLQAYQWRAEAISKQLSKEEVAYVLTEINNNLNNASGYLGAISDRSKELYFNRQTVGQYLYAKLQENRHNSLKNKVFYRQDYLDEFERIWETQASFHKELTDELKKQIRDVVIFYQRKPKSQKGLISFCEFESKEIEIEKDGKTITKNIGARVVPKSSPLFQEFKIWQILNNVICKRKGIRKKKISAKTTQLDLLNESSQTIFSLDMECKQLLFDELNLKGDLKSDKVLKLLGYSPQEWEINYNQLEGNRTQKALYEAYLKIVEMEAHDVKDILQIKSAKDDWSLDESPLSASEIREKVKAIFQTLGICTKILYFDPLLPVKEFEEQDSYQLWHLLYSYESDDSTSGNETLYRILEKKYAFKREHARILANVALQDDYGSLSTKAIRKIYPNIKENQYSTACEKAGYKHSKLSLTTEELEARELKNIIPLLKKNALRNPVVEKILNQMINVVNALIEKNSERDAEGKITKYFHFDEIRIELARELKKNAQKRYEMTQNINKAKLEHQKISEILQKEFGIKNPTKSDIIRYRLYQELEHNGYKELYTNAPIARDMLFSKNIEIEHIVPKARVFDDSFSNKTLTFHRINSDKGEYTAFDYITSLNSEEELNQYLTRVENAYKTKSISPTKYKNLLKKASEIGDDFINRDLRDTQYIAKKAKEILFQVTKNVLSTSGSITDRLREDWGLVDVMKELNMPKYQSLGLTEVEERKDGNKVTVIKNWTKRNDHRHHAMDALTVAFTKPSYIQYLNHLNARKDENNKNYSVILAIEEKETIKVPTNNGKNKRVFIEPIPNFRQVAKKHLEEIFISHKAKNKVVTKNTNKPAGTDKQQITLTPRGQLHKETIYGKYQYYINKEEKIGVKFDERTIAKVSNPVYREALLKRLQANDNDPKKAFAGKNALSKNPIYLDESKTKTLPEKVNLTYLEEDFSIRKDISPDNFKDLKSIEKVIDQGVKRILIKRLQAYDNDPKKAFVDLEKNPIWLNKEKGIAIKRVTISGVNNAQPLHIGKDHLGKTTLNKEGKEIPVDYVSTGNNHHVAIYRDKEGNLQEQIVSFFDAVVRAQQGIPIIDKTYKQAEGWQFLFTMKQNEMFVFPNATTGFNPAEIDLLDPKNKKLISPNLFRVQKIATKDYFFRHHLETNVETDNILKNVTWKREGLSGLKDIVKVRINHLGDIVSIGEY

SEQ ID NO: 153 - protein, 1437 aa, Capnocytophaga sp.
  Capnocytophaga sp. CM59
MKYIKYILGLDIGSNSIGWALIQLDLLQKTKRIIATGSRIIPMDQKVLSDFGKGITISPTAQRTSYRNARHCRERHLLRRERLHRVLHILGFLPTHYDKQIDFSKRYGKFVDNTEPKIAYNERKFLFMDSFQEMLADFKIHQPDLFYTKKNGEESKIPYDWTIYYLRKKALSRKISKEELAWIILNFNQKRGYYQLREEEEENKENDFEIISSKIISVIKKDKDKKYNKYWYDIILENGLVYQAAFYNDFVYNWINQDREFIIERISLKNGTEKVKLSYLPTFDEIDKMDKKEQDKYYKKIKIKTENSIGNKTVGCYIYDHILQNPNEKIKGKLVRTIERKYYKEELKAILEKQVALQPELFTDQLFADCIRELYSKNEAQQRNLAARDFVHLFVEDIIFYQRSLRRQKSTLANCSLESRSYIDKDSHTRKEAPLKVCPKSNPYYQEFRVLQWLQNLKIYEIDTDQEVTHEFIKTLEDKQQFFDFLMNQKEIDCEELLKYFLNQTYPNAREKALKSELKKWKDTYRWNYVYDIGEKSSKKYPMNETRYELKRHLEKVANLPDDFLSSEVEYLLWHLIYSVKDKVAYEKGLKTFAQKHHLDKDSFVESFKKFKPYPSEYGSFSEKAIRKLLPLMRFGSYWDFNHIDKNTQKRIEDLITGVENEEIRTILREKAEKYQLEKETDFQDLPLWLAQYIVYNRHAEASSLEKWTSVNDLETYLNEFKQYSLRNPIVEQVVMETLRVVRDIWQQYGQGQASFFDEIHIELGRELKKTAKEREKLSKQNQKNEDINLSIKEKLKELEKYNTRAYSITHQEKYKLWLEQKHISPYTGQIISPENLFTDNYEIEHIIPQSRFFDDSLSNKVVCESIVNKAPYKDRQLGLEFIKNQGGRIVKELSTENKTIKIFTEEQYRTFIKEHYSNNPEKTKKLLLEEIPEKMVARQMNDTCYISKFISEILSKIVRSDEQDEGVHSKNVILCTGKITSALKQDWGVNDVWNDLILPRFERMNDLTQSTLFTTYNEKYQKYLPTVPMEYSNGFQKKRIDHRHHAMDAIIIACATREHINYINNQHALEKGKDKKEKQKEHDKLREKLCIKKDNKGSEENYSWIFKKPWDTFTQEVQAALEGIVVSFKQNLRVINKATNYYERWVEENGKYIKKMVKQEGTNWAIRKPLHEETISGKIYLDREEITKNDILTATRKTVDSSFDEKRIKKITDTGIQKILLNYLKYKGSPEIAFSPEGLEELNKNLSIYNDGKPHKPIYKVRIYEKGSGRFALGEKGRKYKKYVQGAPNLYFGIYQGANKRSFATIPLNEVIERQKQGRPSIPEYNEKGDPLLFSLSPNDLVYVPVEGEIIEDIDFQNLSKEQKERIYNVNDFSSTCYFTPNRIAKAIFPKEVDLQRKGDKLPGSYDTKTASLEGIQIKEVCIKLKIDRLGNISKA

SEQ ID NO: 154 - protein, 1471 aa, Capnocytophaga sp.
  Capnocytophaga sp. oral taxon 324 str. F0483
MCKYFYIKNFITFVLSKSIIPMKHILGLDLGSNSIGWAFVQQDFENKQGKIIATGSRIIPMDQGILGDFERGNTVSQTAERTTYRSTRRLRERHLLRRERLHRVLHILGFLPPHYDAQIDFTKRYGKFIDNAEPKIAYNNGNFIFMNSFNEMIEDFKKHQPQLFYKKSNGEESKIPYDWTIYYLRKKALSQKITQQELAWLILHFNQKRGYYQLRGEEETENPNKEVAFHSLKVVDVEAEAPNKKGEIWYTIRLENGWIYRRTSKIPLDDWKGKTRDFIVTTDLNDDGTIKVDKEGKEKRSFRAPDENDWNLLKKKTEHDIDFSGKTVGAYIYDHLLQNPNQKIKGKLVRTIERKYYKDELKAILAKQIALQPELFTETLLADCIRELYRKNETQQQNLLSKDFLHLFVEDIIFYQRPLRSKKSTIANCTLEKRSYIDKETNERKDAPIKVCAKSNPYYQEFRVLQWLQNLRIYEIETDREVTAEFIETPQDCEALFNFLMSQKEIDNKGLLKYFLFAKNPQIKDKAAKSELKKWLTTYRWNYVYDAADNSSKKYPMNETGYELQRYLQKVEGLPANFLTFDITYQLWHLLYSVKDKVEFEKALKKFAKKKQLDKTSFVDSFKNFKPYPNEYGSFSEKAIKKLLPLMRFGNHWDFNRIDVSTQKRIDDLINGVANEDIRTIIREKAEKYQLNSETCFQDLPLWLAQYVVYNRHAEATDIEKWTSVSDLEAYLEDFKQHSLRNPIVEQVVTETLRVVRDIWQQYGGGQANFFDEIHIELGRELKKTAEERKQLSDKNQENESTNLRIKKLLAELKEDASIQNVRPYSLVQQELLKIYEEGVFSATDEVEEDIQKIRKKAEPSKADLQRYKLWLEQKYKSPYTGEVISLTKLFTEEYEIEHIIPQSRYYDDSLSNKVICESAVNKLKTNQLGLEFIQNHHGEKVRITANKEVTIFTEEQYKEFVKKHYANNSAKQQKLLLNEIPEKMVARQLNDTRYISKYISEILSKIVRSDEKDEGVNSKNIIPCTGKITTALKQDWGLNDVWNKLILPRFERMNQLTQTQLFTSYNDRLQKNLPTVPIEYSQGFQKKRIDHRHHAMDALVIACATREHINYMNNQHALDKSKDKKEKQQSRIDLRTILCEKKNNNWQFKKPWSTFTQEAKEALEHIVVSFKQNLRVINKATNYYEKWEEKNGVLVKKKVKQEGTNWAIRKPLHKETVSGKIVLDRKIGKDKILTATRKAVDITFTEKIISSITDTGIQKILLNYLKYKGSPEVAFSTEGLEELNKNIAQYNNGKKHQPIYKVRIFEEGSKFPLGETGAKATKYVEAAKGTNLFFGVYQGKGKRTYATIPLNEVIERQKQGLPSVPERNEKGEPLLFSLSPNDLVYVPMEGEIAETIDFNNLSKEQKERIYKTVSFTGNQCFFVQEAVATPIVNKMEYSPLNKMERDILGTMIKEVCIKLKVDRLGNITKA

SEQ ID NO: 155 - protein, 1450 aa, Capnocytophaga sp.
  Capnocytophaga sp. oral taxon 326 str. F0382
MKRILGLDLGSNSIGWAFVEQDFENKQGKIIATGSRIIPMDQGILGDFEKGNTVSQTAERTTYRSMRRLRERHLLRRERLHRVLHILGFLPPHYDAQIDFTKRYGKFIDNAEPKIAYNNGNFIFMNSFNEMIEDFKKYQPQLFYKKSNGEESKIPYDWTIYYLRKKVLSQKITQQELAWLILHFNQKRGYYQLRGEEETENPNKEVAFHSLKVVDVEAEAPNKKGEIWYTIRLENGWIYRRTSKIPLDDWKGKTRDFIVTTDLNDDGTIKVDKEGKEKRSFRAPDENDWNLLKKKTEHDIDFSGKTVGAYIYDHLLQNPNQKIKGKLVRTIERKYYKDELKAILAKQIALQPELFTETLLADCIRELYRKNETQQQNLLSKDFLHLFVEDIIFYQRPLRSKKSTIANCTLEKRSYIDKETNERKDTFIKVCAKSNPYYQEFRVLQWLQNLRIYEIETDREVTAEFIETAEDYEALFNFLMSQKEIDNEGLLKYFLFAKNPQIKDKVAKSELKKWLTTYRWNYVYDAADNSSKKYPMNETGYDLQRYLQKVEGLPANFLTFDITYRLWHLLYSVKDKVEFEKALKKFAQEYQLDEASFVDSFKNFKPYPNEYGSFSEKAIKKLLPLMRFGNHWDFNRIDVSTQKRIDDLINGVANDEIRTIIREKAEKYQLNSESCFQGLPLWLAQYVVYNRHAEATDIEKWTSVSDLETYLEDFKQHSLRNPIVEQVVTETLRVVRDIWQQYGGGQANFFDEIHIELGRELKKTAEERKQLSNRNQENENTNLRIKKLLAELKEDASIQNVRPYSPVQQELLKIYEEGVFSSTDQVEEDIQKIRKKAEPTTPEIQRYKLWLEQKYKSPYTGEVISLTKLFTEEYEIEHIIPQSRYYDDSLSNKVICESAVNKLKTNQLGLEFIQNHHGEKVRITGNKEVTIFTEEQYKEFVKKHYANNSAKQQKLLLNEIPEKMVARQLNDTRYISKYISEILSKIVRSDEKDEGVNSKNVIPCTGKITTALKQDWGLNDVWNELILPRFERMNQLTQTQLFTSYNDRFQKNLPTVPIEYSQGFQKKRIDHRHHAMDALVIACATREHINYMNNQHALDKNKDKKEKQQSRIDLRTILCEKKNNNWQFKKPWSTFTQETKEALEHIVVSFKQNLRVINKATNYYEKWEEKNGVLVKKKVKQEGTNWAIRKPLHKETVSGKIVLDRKIGKDKILTATRKEVDITFTEKIISSITDTGIQKILLNYLNYKGSPEVAFSAEGLEELNKNIAQYNDGKKHQPIYKVRIFEEGSKFPLGETGAKATKFVEAAKGTNLFFGVYQGKEKRSYATIPLNEVIERQKQGLPSVPERNEKGEPLLFSLSPNDLVYVPMEGEIAETIDFNNLSKEQKERIYKTVSFTGNQCFFVQEAVATPIVNKMEYSPLNKMERDILGTMIKEVCIKLKVDRLGNITKA

SEQ ID NO: 156 - protein, 1435 aa, Capnocytophaga sp.
  Capnocytophaga sp. oral taxon 329 str. F0087
MKNILGLDLGTTSIGFAHIVEDENKEKSEIKELGVRIVSLATDEQSDFEKGKSISTNANRTLKHGARLNLDRYQQRRKFLIDLLQKANLITSASILAENGKNTTHSTWQLRAKAVTERIEKEEFARVLLAINKKRGYKNSRKTKTEDEGQAIDGMAIAKCLYDENLTPGQLSLQLLQQNKKLLPDFYRSDLQKEFDLVWNLQKQFYPDILTDSFYKELQGKGKDATSKAFSKRYHFDTAENKGSKESVRLQAYQWRAEAISKQLSKEEVAYVLTEINNNLNNSSGYLGAISDRSKELYFNRQTVGQYLYAQLQENRHNSLKNKVFYRQDYLDEFERIWETQASFHKELTDELKKQIRDVVIFYQRKLKSQKGLVSFCEFESKEIEIEKDGKAITKSIGARVVPKSSPLFQEFKIWQILNNVTCKRKGIRKKKSSAKSTELDLFNEPSQSIFSLDMECKQLLFDELNLKGDLKSDKVLKLLGYSPQEWEINYNQLEGNRTQKSLYEAYLKIIEIEGYEVKDILQIKSTKDDWSLDESPLSASEIRERVKVIFQTLGICTKILYFDPLLPVKEFEQQYSYQLWHLLYSYESDDSTSGNETLYRILEKKYAFKREHATILANVALQDDYGSLSTKAIRKIYPYIKENQYSTACELAGYKHSKLSLTTEELEARELKNIIPLLKKNALRNPVVEKILNQMINVVNALIEKNSERDAEGKITKYFHFDEIRIELARELKKNAQERYEMTQNINKAKLEHQKISEKLQKQFGIKNPTKSDIIRYRLYQELEHNGYKELYTNTYIAPDVLFSKNIDIEHIVPKARVFDDSFSNKTLAFKEFNIKKGESTAFDYITSLNCEGELNQYLTRVENAYKTKSISLTKYKNLLKKASEIGDGFINRDLRDTQYIAKKAKEILFQVTKNVLSTSGSITDRLREDWGLVDVMKELNMPKYQSLGLTEVEERKDGNKVTVIKDWTKRNDHRHHAMDALTVAFTKPSYIQYLNHLNARKDENNKNYSVILAIEKKETIKVPINNGKNKRVFIEPILNFRQVAKKHLEEIFISHKAKNKVVTKNINKPAGTDKQQITLTPRGQLHKETIYGKYQYYVNKEEKVGVKFDERTITKVSNPLYREALLKRLQANDNDPKKAFAGKNALSKNPIYLDEAKTKTLPEKVNLTYLEEDFSIRKDISPDNFKDLKSIEKVIDQGVKRILIKRLQAYDNDPKKAFVDLEKNPIWLNKEKGIAIKRVTISGVSNAQPLHIGKDHLGKTTLNKEGKEVPVDYVSTGNNHHVAIYRDKEGNLQEQIVSFFEAVVRAQQGLPIIDKNYKQAEGWQFMFTMKQNEMFVFPNEATGFNPAEIDLLDPKNKKLISPNLFRVQTISIVKYGNSVVRDFKFRHHLETTLQDDKILQGITFQQIKSLEPLRNIVKVRINHLGDIVNIGEY

SEQ ID NO: 157 - protein, 1426 aa, Capnocytophaga sp.
  Capnocytophaga sp. oral taxon 335 str. F0486
MKNILGLDLGTTSIGFTHIVEDENKEKSEIKELGVRIVSLTTDEQSDFEKGKSISTNANRTLKHGARLNLDRYQQRRKFLIDLLQKANLITSSSILAENGKNTTHSTWQLRAKAVTERIEKEEFARVLLAINKKRGYKSSRKAKTEDEGQAIDGMAIAKRLYDENLTPGQLSLQLLQQNKKLLPDFYRSDLQKEFDLVWNFQKQFYPDILTDSFYKELQGKGKDATSKAFSKRYHFDTAENKGSRESVRLQAYQWRAEAISKQLSKEEVAYVLTEINNNLNNASGYLGAISDRSKELYFNRQTVGQYLYAQLQENKHNSLKNKVFYRQDYLDEFERIWETQASFHKELTEELKKQIRDVVIFYQRKLKSQKGLISFCEFESKEIEIEKDGKTITKSIGARVVPKSSPLFQEFKIWQILNNVTCKRKGIRKKKSSAKSTELDLFNEPSQTIFSLDMECKQLLFEELNLKGDLKSDKVLKLLGYSPQEWEINYNQLEGNRTQKALYEAYLKIVEMEAHDVKDILQIKSTKDDWALEESPLSASEIRERVKAIFQTLGICTKILYFDPLLPVKEFEEQDSYQLWHLLYSYESDDSTSGNETLYRILEKKYAFKREHATILANVTLQDDYGSLSTKAIRKIYPYIKENQYSTACEKAGYKHSKLSLTTEELEARELKNIIPLLKKNALRNPVVEKILNQMINVVNALIEKNSERDAEGKITKYFHFDEIRIELARELKKNAQERYEMTQNINKAKLEHQKISGILQKEFGIKNPTKSDITRYRLYQELAHNGYNDLYTNTYIPKELLFSKNIDIEHIVSKARVFDDSFSNKTLAFREFNIKKGESTAFDYITSLNNEEELNQYLNRVENAYKTKNISPAKYKNLLKKASEIGDGFINRDLRDTQYIAKKAKEILFQVTKNVLSTSGSITDRLREDWGLVDVMKELNMPKYQSLGLTEVEERKEGNKVTVIKNWTKRNDHRHHAMDALTVAFTKPSYIQYLNHLNARKDKNNKNYSVILAIEEKETIKVPTNNGKNKRVFIEPIPNFRQVAKKHLEEIFISHKAKNKVVTKNTNKPAGTDKQQITLTPRGQLHKETVYGKYQYYVNKEEKIGVKFDKETIAKVSNPVYREALLKRLQANDNDPKKAFAGKNALSKNPIYLDEAKTKTLTEKVNLTYLEEDFSIRKDISPDNFKDLKSIEKVIDQGVKRILIKRLQDYDNDPKKAFVDLEKNPIWLNKEKGIAIKRVTISGVNNAQPLHIGKDHLGKTTLNKEGKEIPVDYVSTGNNHHVAIYRDKEGNLQEQIVSFFEAVVGAQQGLPIVDKTYKQAEGWQFLFTMKQNEMFVFPNEATGFNPAEIDLLDPKNKKQISPNLFRVQKIATKDYFFRHHLETNVDTDNVLKNTTWKREGLSGLKDIVKVRINHLGDIVSIGEY

SEQ ID NO: 158 - protein, 1432 aa, Capnocytophaga sp.
  Capnocytophaga sp. oral taxon 380 str. F0488
MKNILGLDLGTTSIGFAHIVEDENKEKSEIKELGVRIVSLTTDEQSDFEKGKSITTNANRTLKHGARLNLDRYQQRRKYLIDLLHKANLITPSSILAENGKNTTHSTWQLRAKAVTERIEKEEFARILLAINKKRGYKSSRKAKTEDEGQAIDGMAIAKRLYDENLTPGQLSLQLLQQNKKLLPDFYRSDLQKEFDLVWNFQKQFYPDILTDIFYKELQGKGKDATSKAFSKRYHFDTAENKGSKESVRLQAYQWRAEAVSKQLSKEEVAYVLTEINNNLNNASGYLGAISDRSKELYFNRQTVGQYLYAQLQENRHNSLKNKVFYRQDYLDEFERIWETQALFHKELTDELKKQIRDVVIFYQRKPKSQKGLISFCEFESKEIEIEKDGKTITKNIGARVVPKSSPLFQEFKIWQILNNVICKRKGIRKKKISAKTTQLDLLNESSQTIFSLDMECKQLLFDELNLKGDLKSDKVLKLLGYSPQEWEINYNQLEGNRTQKALYEAYLKIVEMEAHDVKDILQIKSTKDDWSLDESPLSASEIRESVKAIFQALGICTKILYFDPLLPVKDFEEQDSYQLWHLLYSYESDDSTSGNETLYRILEKKYAFKREHARILANVALQDDYGSLSTKAIRKIYPNIKENQYSTACEMAGYKHSKLSLTTEELEARELKNIIPLLKKNALRNPVVEKILNQMINVVNALIEKNSERDAEGKITKYFHFDEIRIELARELKKNAQKRYEMTQNINKAKSEHQKISEILQKEFGIKNPTKSDIIRYRLYKELEHNGYKELYTNTYIAPDVLFSKNIDIEHIVPKARVFDDSFSNKTLAFKDFNIKKGESTAFDYITSLKNEEKLNQYLARVENAYKTKNISPAKYKNLLKKASEIGDGFINRDLRDTQYIAKKAKEILFQVTKNVLSTSGSITDRLREDWSLVDVMKELNMPKYQSLGLTEVEERKDGNKVTVIKDWTKRNDHRHHAMDALTVAFTKPSYIQYLNHLNARKDENNKNYSVILAIEKKETIKVPTNNGKNKRVFIEPIPNFRQVAKKHLEEIFISHKAKNKVVTKNTNKPAGTNKQQITLTPRGQLHKETIYGKYQYYVNKEEKVGVKFDKETIAKVSNPLYREALLKRLQANDNDPKKAFTGKNALSKNPIYLDEAKTKTLPEKVNLTYLEEDFSVRKKIVPKNPTSKEFVPNLKSIEKVVDEGVRNILIERLRVYNNDPEKAFVDLEKNPIWLNKEKGIAIKRVTISGVNNAQPLHIGKDHLGKTTLNKEGKEIPVDYVSTGNNHHVAIYRDKEGNLQEQIVSFFEAVVRTQQGLPIIDKTYKQEEGWQFLFTMKQNEMFVFPNEATGFNPAEIDLLDPKNKKQISPNLFRVQKIATKDYFFRHHLETNVETDNVLKNTTWKREGLSGLKDIVKVRINHLGDIVSIGEY

SEQ ID NO: 159 - protein, 1450 aa, Capnocytophaga sp.
  Capnocytophaga sp. oral taxon 412 str. F0487
MKHILGLDLGSNSIGWAFVQQDFENKQGKIIATGSRIIPMDQGILGDFERGNTVSQTAERTTYRNTRRLRERHLLRRERLHRVLHILGFLPPHYDSQIDFTKRYGKFIDNAEPKIAYNNGNFIFMNSFNEMIEDFKKYQPQLFYKKSNGEESKIPYDWTIYYLRKKALSQKITQQELAWLILHFNQKRGYYQLRGEEETENPNKEVAFHSLEVVDVEAEAPNKKGEIWYTIRLENGWIYRRTSKIPLDDWKGKTRDFIVTTDLNDDGTIKLDKEGKEKRSFRAPDENDWNLLKKKTEHDIDFSGKTVGAYIYDHLLQNPNQKIKGKLVRTIERKYYKDELKAILAKQIALQPELFTETLLADCIRELYRKNETQQQNLLSKDFLHLFVEDIIFYQRPLRSKKSTIANCTLEKRSYIDKETNERKDTPIKVCAKSNPYYQEFRVLQWLQNLRIYEIETDREVTAEFIETAQDNEALFNFLMSQKEIDNESLLKYFLFAKNPQIKDKVAKSELKKWLTTYRWNYVYDAADNSSKKYPMNETGYELQQYLQKVEGLPANFLTFDITYRLWHLLYSVKDKVEFEKALKKFAQEYQLDEASFVDSFKNFKPYPNEYGSFSEKAIKKLLPLMRFGNHWDFNRIDVSTQKRIDDLINGVANDEIRTIIREKAEKYQLNSETCFQGLPLWLAQYVVYNRHAEAADIEKWTSVNDLEAYLEDFKQHSLRNPIVEQVITETLRVVRDIWQRYGGGQANFFDEIHIELGRELKKTAEERKQLSNRNQENENTNLRIKKLLAELKEDASIQNVRPYSPVQQELLKIYEEGVFSATDEVEEDIQKIRKKAEPTTPEIQRYKLWLEQKYKSPYTGEVISLTKLFTEEYEIEHIIPQSRYYDDSLSNKVICESAVNKLKTNQLGLEFIQNHHGEKVRITANKEVTIFTEEQYKEFVKKHYANNSAKQQKLLLNEIPEKMVARQLNDTRYISKYISEILSKIVRSDEKDEGVNSKNIIPCTGKITTALKQDWGLNDVWNELILPRFERMNQLTQTQLFTSYNDRFQKNLPTVPIEYSQGFQKKRIDHRHHAMDALVIACATREHINYMNNQHALDKSKDKKEKQQSRIDLRTILCEKKNNNWQFKKPWSTFTQEAQEALEHIVVSFKQNLRVINKATNYYEKWEEKNGVLVKKKVKQEGTNWAIRKPLHKETVSGKIVLDRKIGKDKILTATRKSVDITFTEKIISSITDTGIQKILLNYLKYKGSPEVAFSAEGLEELNKNIAQYNDGKKHQPIYKVRIFEEGSKFPLGETGAKATKYVEAAKGTNLFFGVYQGKGKRTYATIPLNEVIERQKQGLPSVPERNEKGEPLLFSLSPNDLVYVPMEGEIAETIDFNNLSKEQKERIYKTVSFTGNQCFFVQEAVATPIVNKIEYSPLNKMERDILGTMIKEVCIKLKVDRLGNITKA

SEQ ID NO: 160 - protein, 1426 aa, Capnocytophaga sputigena
  Capnocytophaga sputigena ATCC 33612
MKNILGLDLGITSISFAHIVEDENKEKSEIKELGVRIVSLTTDEQSDFEKGKSITTNANRTLKHGARLNLDRYQQRRKYLIDLLQKANLITSSSILAENGKNTTHSTWQLRAKAVTERIEKEEFARVLLAINKKRGYKSSRKAKTEDEGQAIDGMAIAKRLYDENLTPGQLSLQLLQQNKKLLPDFYRSDLQREFDLVWNFQKQFYPDILTDSFYKELQGKGKDATSKAFSKRYHFDTAENKGSKESVRLQAYQWRAEAISKQLSKEEVAYVLTEINNNLNNASGYLGAISDRSKELYFNRQTVGQYLYAQLQENRHNSLKNKVFYRQDYLDEFERIWETQASFHKELTDELKKQIRDVVIFYQRKLKSQKGLISFCEFESKEIEIEKDGKTITKTIGARVVPKSSPLFQEFKIWQILNNVTCKRKGIRKKKSSAKSTELDLFNEPSQTIFSLDMECKQLLFDELNLKGDLKSDKVLKLLGYSPQEWEINYNQLEGNRTQKALYEAYLKIVEMEAHDVKDILQIKSAKDDWSLDESPLSASEIKEKVKDIFQALGICTKILYFDPLLPVKEFEKQDSYQLWHLLYSYESDDSTSGNETLYRILEKKYAFKREHARILANVALQDDYGSLSTKAIRKIYPNIKENQYSKACELAGYKHSKLSLTTEELEARELKNIIPLLKKNALRNPVVEKILNQMINVVNALIEKNSERDAEGKITKYFHFDEIRIELARELKKNAQKRYEMTQNINKAKLEHQKISEILQKKFGIKNPTKSDIIRYRLYQELEHNGYKELYTNAPIARDMLFSKNIEIEHIVPKARVFDDSFSNKTLTFHRINSNKGEYTAFDYITSLNSEEELNQYLTRVENAYKTKSISLTKYKNLLKKASEIGDGFINRDLRDTQYIAKKAKEILFQVTKNVLSTSGSITDRLREDWGLVDVMKELNMPKYQSLGLTEVEERKEGNKVTVIKNWTKRNDHRHHAMDALTVAFTKPSYIQYLNHLNARKDENNKNYSVILAIEEKETIKVPTNNGKNKRVFIEPIPNFRQVAKKHLEEIFISHKAKNKVVTKNVNKPAGTDKQQITLTPRGQLHKETIYGKYQYYVNKEEKVGVKFDERTITKVSNPLYREALLKRLQANDNDPKKAFTGKNALSKNPIYLDETKTKTLPEKVNLTYLEEDFSIRKDISPDNFKDLKSIEKVIDQGVKRILIKRLQDYDNDPKKAFVDLEKNPIWLNKEKGIAIKRVTISGVSNAQPLHIGKDHLGKTTLNKEGNEIPVDYVSTGNNHHVAIYRDKEGNLQEQIVSFFEAVVRTQQGLPIIDKTYKQEEGWQFLFTMKQNEMFVFPNATTGFNPAEIDLLDPKNKKLISPNLFRVQKIATKDYFFRHHLETNVETDNVLKNTTWKREGLSGLKDIVKVRINHLGDIVSIGEY

SEQ ID NO: 161 - protein, 1140 aa, Catellicoccus marimammalium
  Catellicoccus marimammalium M35/04/3
MKNMTKVNVGLDVGISSAGWSVINAETNQILESGVRLFSGSDADENVNRRNQRQGRRLFRRRKLRIQEAKKYLENVFQLKDIEPKDEWNPYEIRVRALNEKVSKEELSIALLNIVKHRGISYELEDVTDEEGTNTQSFQSGLDYNRRLLKTKTVGEIQYDRLQKYGQVRGQIQTEDGLLINIFPTKNYVEEVERILETQKKYHPEIDDVFIEKIISFVTRKREYFVGPGNEKSRTDYGIYRENGETLDNLFEILIGKDKFYPEEYRAAGSSYTAQIFNLLNDLNNLRIPTTEDHHLTKAQKEEIITELKNTSRLSGGMLKLISKVTKAPKEEISGYRKDEKDKPDLHSLAYYRKQKNMLEKEGIQIADFSEELLDELATMMTLNTEPGEIRKQLNKITNQYDILTPEVIEVLVKNHTAFVATSNHKWHRFSLKLMKEFIPELLETSKEQSTILCERGFIQNRASYLDENHHFNYAELRENLYNPVVRKSTCEMLKVFTAIQEKYPNIQNVIVELPRETNEDEQKRKIKKINDNNAKRKKEILKEAQAQSGLSEEALEEKLLKTKGLYLKLMLWYEQEGKCVYSGQEIPLSDLLQNKGGYEVDHIIPISISFDDRLCNKVLVRQQLNSQKSNQTPFEYMTTHTDGHLSFHELKELVGKNKRFSKEKRELLLAEIYSNDIETRKRFINRNLVDTSYTARIVLNALQQYKKENQLSMNVSVVRGAMTNILRKKVKLDKTRETFHHHAIDASLMAVIPNIEFFKERKEWLPKSANEEVVEVEVSEEETMPEKEFKVKMRLPESFIQDVQILQRNSFAKEEVSGPQTRERNLKIKFSHQVDQKMNRKVADDTIYGTRQAQLGKDKKEETYVIGKIKDIYNYDEYVRFKKRYDKNKESFLMYHHDPQTFEKLEEILAQYPEYIEDEKGKKKKVSPFALYREENGPVTKYAKKNNGPVIKQLKYYDSKLNRKIDISHKYSTKNRQVVLQSLKPYRTDVYRNQDTGEYTLVGIDQNDGKFVNGHYGIPKSRYEEIKANNKLSEHDEFVFSLYKNSMVKVIDENGESIVVRYLSRSMPNRKNNAEIKPVEKYQFEDGEVVPVYGKCRKQMQTVFVKKGWTLLKGNTDILGNTYFVEKESENPKKMIDDK

SEQ ID NO: 162 - protein, 1329 aa, Catenibacterium mitsuokai
  Catenibacterium mitsuokai DSM 15897
IVDYCIGLDLGTGSVGWAVVDMNHRLMKRNGKHLWGSRLFSNAETAANRRASRSIRRRYNKRRERIRLLRAILQDMVLEKDPTFFIRLEHTSFLDEEDKAKYLGTDYKDNYNLFIDEDFNDYTYYHKYPTIYHLRKALCESTEKADPRLIYLALHHIVKYRGNFLYEGQKFNMDASNIEDKLSDIFTQFTSFNNIPYEDDEKKNLEILEILKKPLSKKAKVDEVMTLIAPEKDYKSAFKELVTGIAGNKMNVTKMILCEPIKQGDSEIKLKFSDSNYDDQFSEVEKDLGEYVEFVDALHNVYSWVELQTIMGATHTDNASISEAMVSRYNKHHDDLKLLKDCIKNNVPNKYFDMFRNDSEKSKGYYNYINRPSKAPVDEFYKYVKKCIEKVDTPEAKQILNDIELENFLLKQNSRTNGSVPYQMQLDEMIKIIDNQAEYYPILKEKREQLLSILTFRIPYYFGPLNETSEHAWIKRLEGKENQRILPWNYQDIVDVDATAEGFIKRMRSYCTYFPDEEVLPKNSLIVSKYEVYNELNKIRVDDKLLEVDVKNDIYNELFMKNKTVTEKKLKNWLVNNQCCSKDAEIKGFQKENQFSTSLTPWIDFTNIFGKIDQSNFDLIENIIYDLTVFEDKKIMKRRLKKKYALPDDKVKQILKLKYKDWSRLSKKLLDGIVADNRFGSSVTVLDVLEMSRLNLMEIINDKDLGYAQMIEEATSCPEDGKFTYEEVERLAGSPALKRGIWQSLQIVEEITKVMKCRPKYIYIEFERSEEAKERTESKIKKLENVYKDLDEQTKKEYKSVLEELKGFDNTKKISSDSLFLYFTQLGKCMYSGKKLDIDSLDKYQIDHIVPQSLVKDDSFDNRVLVVPSENQRKLDDLVVPFDIRDKMYRFWKLLFDHELISPKKFYSLIKTEYTERDEERFINRQLVETRQITKNVTQIIEDHYSTTKVAAIRANLSHEFRVKNHIYKNRDINDYHHAHDAYIVALIGGFMRDRYPNMHDSKAVYSEYMKMFRKNKNDQKRWKDGFVINSMNYPYEVDGKLIWNPDLINEIKKCFYYKDCYCTTKLDQKSGQLFNLTVLSNDAHADKGVTKAVVPVNKNRSDVHKYGGFSGLQYTIVAIEGQKKKGKKTELVKKISGVPLHLKAASINEKINYIEEKEGLSDVRIIKDNIPVNQMIEMDGGEYLLTSPTEYVNARQLVLNEKQCALIADIYNAIYKQDYDNLDDILMIQLYIELTNKMKVLYPAYRGIAEKFESMNENYVVISKEEKANIIKQMLIVMHRGPQNGNIVYDDFKISDRIGRLKTKNHNLNNIVFISQSPTGIYTKKYKL

SEQ ID NO: 163 - protein, 1419 aa, Chryseobacterium sp.
  Chryseobacterium sp. CF314
MMIKNILGLDLGTNSIGWALIKQNFENKYGEILGMGSRIIPMSQDVLGEFGKGNSVSQTAARTGYRGVRRLRERFLLRRERLHRVLNVLNFLPEHYASQIDFEKRFGKFKYETEPKLAYNNDGFFFKNSFDEMLGDFKDHQFHLLENGRKVPYDWTIYYLRKKALSQKIEKEELAWILLNFNQKRGYYQLRGEDFEEEKDRVFVRLKVDRVVDSGENIKGKILYDVYFENGWKYEKQIVKTEDWIGRTKEFIVTESILKNGDTKRTFKAVDSEKDWIAIKTKTEQEIDKSHKTVGAYIYEALLQNPKQKIKGKLVRTIERKFYREELKKILERQKEFHPELQSDDLYNDCIRELYRNNEAHQITLSKKDFVHLLLNDLIFYQRPLRSQKSSVSNCTLEFRKYKDENGVEHAQYLKTIPKSNPYYQEFRVWQWMFNLNIYRKDDDTNVTKEFLSSTEDYETLFEFLNNRKEVDQKALLRHFKLNEKTHRWNYVEDKKYPCNETKTMISTRLEKVENYPSDFLTREMEQNIWHIIYSVNDKIEYEKALKSFAHKNNLDENSFFEAFKKFPPFKSEYGSFSEKAIKKLLPLLRLGKYWNWESIDRKSQGRIEKIITGEFDGNIKDKVREKAIHLTAENDFQGLQLWLAQYIVYGRHSEASMIGKWNSADDLEEFLKGFKQHSLRNPIVEQVITETLRVVKDIWLKYGNGAKDFFSEIHIELGREMKQTKDERVDATKRITENENTNLRIKALLAEMMNDNSVENIRPYSPMQQEILKIYEDGILKSDIEIDDDILKISKTAQPSSSDLKRYKLWLEQRYKSPYTGQIIPLNKLFTSEYEIEHIIPQSRYFDDSFSNKIICESAVNKLKDNYIGLGFIKQFGGMIVECGFGKSVEIFKAEEYEDFVKKHYANNRSKRNKLLLEEIPEKMIDRQLNDTRHISKYISGVLSNIVRQEDGTDEGVNSKNIVPGNGKITTQLKQDWGLNDVWNELILPRFERMNQLTNSTDFTSWNKNHQKFLPTVPIEFSKGFSKKRIDHRHHAMDALVIACATKDHINLLNNQSAKSDTKRYDLKRKLMKFERVVYSHSKTGEKIEKEVPKQFLKPWDNFTVDAKNKMETIIVSFKQNLRVINKATNHYEKWIEKDGIKRKELIKQEGTNWAIRKPMHKETVSGKVDLPGIKIPKGKILTATRKSLDTSFDLKTINSITDTGIQKILKNYLEFKGSSELAFSPEGIEDMNKNIEKFNDGKPHQSINKVRIFELGSKFSVGQTGNKKDKYVEAAKGTNLFFAVYEDKNGKRSYETIPLNEVIERQKQGLDSVSFKNKEDFLLCPNDLVYVPSEDELENIYNIDFKNLTTEKTGNIYKVVSFSGNQIFFIRQDIAISIVNKAEFSTLNKMERAIDGSMIKENCIKLKIDRLGNIAKI

SEQ ID NO: 164 - protein, 1021 aa, Clostridium cellulolyticum
MKYTLGLDVGIASVGWAVIDKDNNKIIDLGVRCFDKAEESKTGESLATARRIARGMRRRISRRSQRLRLVKKLFVQYEIIKDSSEFNRIFDTSRDGWKDPWELRYNALSRILKPYELVQVLTHITKRRGFKSNRKEDLSTTKEGVVITSIKNNSEMLRTKNYRTIGEMIFMETPENSNKRNKVDEYIHTIAREDLLNEIKYIFSIQRKLGSPFVTEKLEHDFLNIWEFQRPFASGDSILSKVGKCTLLKEELRAPTSCYTSEYFGLLQSINNLVLVEDNNTLTLNNDQRAKIIEYAHFKNEIKYSEIRKLLDIEPEILFKAHNLTHKNPSGNNESKKFYEMKSYHKLKSTLPTDIWGKLHSNKESLDNLFYCLTVYKNDNEIKDYLQANNLDYLIEYIAKLPTFNKFKHLSLVAMKRIIPFMEKGYKYSDACNMAELDFTGSSKLEKCNKLTVEPIIENVTNPVVIRALTQARKVINAIIQKYGLPYMVNIELAREAGMTRQDRDNLKKEHENNRKAREKISDLIRQNGRVASGLDILKWRLWEDQGGRCAYSGKPIPVCDLLNDSLTQIDHIYPYSRSMDDSYMNKVLVLTDENQNKRSYTPYEVWGSTEKWEDFEARIYSMHLPQSKEKRLLNRNFITKDLDSFISRNLNDTRYISRFLKNYIESYLQFSNDSPKSCVVCVNGQCTAQLRSRWGLNKNREESDLHHALDAAVIACADRKIIKEITNYYNERENHNYKVKYPLPWHSFRQDLMETLAGVFISRAPRRKITGPAHDETIRSPKHFNKGLTSVKIPLTTVTLEKLETMVKNTKGGISDKAVYNVLKNRLIEHNNKPLKAFAEKIYKPLKNGTNGAIIRSIRVETPSYTGVFRNEGKGISDNSLMVRVDVFKKKDKYYLVPIYVAHMIKKELPSKAIVPLKPESQWELIDSTHEFLFSLYQNDYLVIKTKKGITEGYYRSCHRGTGSLSLMPHFANNKNVKIDIGVRTAISIEKYNVDILGNKSIVKGEPRRGMEKYNSFKSN

SEQ ID NO: 165 - protein, 1065 aa, Clostridium perfringens
  Clostridium perfringens C str. JGS1495
MNKDINYALGLDIGITSVGWAVINLDLNRIEDLGVRIFNAAENPKDGSSLALPRRLARGRRRLLRRKAYRVERVRKLIVKNNILTKEELEGLFKNKEVIDVWEARVKGLDYKLSREEWAKILINFCKRRGFKSNRKNETKDKEAGQILSSISYNIEKMKETNSRTIGEYIYNEVKNSDDSYAPLRNKFGEYKMCVSRDVLREEIHTLFEKQRELGNNFASDEIEDKYFEIFNSQRPFSNFEDLEKLVGFCTFERKKHKRAPKHCISSEEFTLYEGINKLSIIKDGEKRKLSEEERTLVVNEAFNKKEIKYTTLRKLLGLSEDELFSTLTYSIDKDISKTENTKFVSLKGYHEIKRAIEKGVSKKAWQDIENNRNLLNDIAYVLTLGKTDDEIEKQLRLRNVPEELFESLLDMSFSKFNNLSIYALEKILPFMKEGYQYNEACEKAGYNFKAIYEGVRTKKLPVIEIDEIVNPVVNRALAQTRKVINSVIDKYGSPVRINIELARDLAKNFKDRKLIEKEQKENRANLDKIRENLRELMDKEPTAVEVLKYRLWEQQRGECAYTQSQIALERLFSPGYCEIDHIIPFSRSFDDSLSNKILVLGSENQRKGNKIPYEYFGEDSERWNSFEIWVKGSYLNYKKKANLLKKKFTEEEQRDWKARNLQDTKYICRYISNFVNNRLEFKESENKQKVITVNGRATAYLRSRWGLNKVREDGDKHHALDAAVVGVTTQGMVQKISKYSKAHELYTVRKNDEFVDVETGECVDVDEYKEIRKDILPRPWRGFSEELKLRLSDNPLEELKKLPIETYNEEFIKENVKPIFVSRVPFRKISGKLFKETIYSERAFKDGYFVSKKSLVDLKRGDLDNFYNYECDKKLYDAISERMKEFNYNGKKAFESPFRKPTKSGKEGPVVRSVKIKSAAPFKDGIPMNEGLVAKEGMVRIDIYEKEGKYFVVPVYRYQLAKGIVPKRAAIAGKSELKWPIMDQTYNFKFSIFKNDLIEIKYAKKDGYFGYYDGFDRHTASLVIENHDNSDRYRGIGVKTGVVEFNKYEVDVLGNYHKVNLGGN

SEQ ID NO: 166 - protein, 1065 aa, Clostridium perfringens
  Clostridium perfringens D str. JGS1721
MNKDINYALGLDIGITSVGWAVINLDLNRIEDLGVRIFNAAENLKDGSSLALPRRLARGRRRLLRRKAYRVERVRKLILKNNILTKEELEGLFKNKEVIDVWEARVKGLDYKLSREEWAKILINFCKRRGFKSNRKNEAKDKEAGQILSSISYNIEKMKETNSRTIGEYIYNEVKNSEDSYAPLRNKFGEYKMCVSRDVIREEIHTLFEKQRELGNNFASDEIEDKYFEIFNSQRPFSNFEDLEKLVGFCTFERKKHKRAPKHCISSEEFTLYEGINKLSIIKDGEKRKLSEEERTLVVNEAFNKKEIKYTTLRKLLGLSEEELFSTLTYSIDKDISKTENTKFVSLKGYHEIKRAIEKGVSKKAWQDIENNRNLLNDIAYVLTLGKTDDEIEKQLRLRNVPEELFESLLDMSFNKFNNLSIYALEKILPFMKEGYQYNEACEKAGYNFKAIYEGVRTKKLPVIEIDEIVNPVVNRALAQTRKVINSVIDKYGSPVRINIELARDLAKNFKDRKLIEKEQKENRANLDKIRENLRELMDKEPTVVEVLKYRLWEQQRGECAYTQSQIPLERLFSPGYCEIDHIIPFSRSFDDSLSNKILVLGSENQRKGNRTPYEYFGEDSERWNSFEIWVKGSYLNYKKKANLLKKKFSEEEQRDWKARNLQDTKYICRYISNFVNNRLEFKESENKQKVITVNGRATAYLRSRWGLNKVREDGDKHHALDAAVVGVTTQGMVQKISKYSKAHELYTVRKNDEFVDVETGECVDVDEYKEIRKDILPRPWRGFSEELKLRLSDNPLEELKKSPIETYNEEFIKENVKPIFVSRVPFRKISGKLFKETIYSERAFKDGYFVSKKSLVDLKRGDLDNFYNYECDKKLYDAISERMKEFNYNGKKAFESPFRKPTKSGKEGPVVRSVKIKSAVPFKDGIPMNEGLVAKEGMVRIDIYEKEGKYFVVPVYRYQLAKGIVPKRAAIAKKDELKWPIMDQTYNFKFSIYKNDLIEVKYDKKGVYFGYYDGFDRNSASLTIEKHDNSERYRSIGLKVGVLEINKYEVDVLGNYHKVKLGGN

SEQ ID NO: 167 - protein, 1116 aa, Clostridium spiroforme
  Clostridium spiroforme DSM 1552
MVEFLLKEMKIMGRLVLGLDIGITSVGYGVIDIDKNEFVDYGVRLFKEGTAINNEERRSKRGARRLKRRKTNRIADMKKLLERNGLIDEQYTALNNPYEIRKKGLKNKLSNYELATAILHITKNRGTCLESNADETQDEESTKNILSKNALELKDKYICEIQLARLEESGKIRGINNNFKTEDYLKELSKILENQDLEKETIDKIKEIVARRRRYDQGPGSEKSPTPYGSYRMENGELVHVNLIDMMRGKCSVFPDQLRAPQQSYSAELFNLLNDLNNLKINGEKLSSTEKQKIIDFVNEKGGITVKQLLKLIDVGITEISGFRIDKNEKPLITEFKGYKKVLKVFKNYNQESLLNDKSIVDTIMDINTKIKSIDERSDQLKQVLPSLDTSIINDLASIKGVSGYHSLSLKALNLINNEMLKTEMNQMQVLHQLDIFDKNRVSLKGQRQIYADDNAILSPVAKRAHRETFKVINKLRSIYGEFDSIVIETTRDKNTQDQKKRIKNNQKNYEERNTEVNNFLKEAGYNPENINAKTKMKIRLYIEQDAKSAYTLQDINLKELIEDEKAYEIDHIIPISISLDDSFNNKVLTTHDENQEKGNLTPISAFLKGKFHNGNLNTYKVFIQNNKNLNRKKKEYLLCEDDITRYEVVQNFINRNLVDTSYACRTVMNTLVHYFKDNEINTKVHTIKGQATSTFRKRIGLIKDREEDYFHHAIDALIVASLKKMNLINSYLMKVDFNEMYDEETGEIFNVLPDNSYLDEKYISFVSNLKNIYEESNKYIRGVMIKEKMTYPLIKVSHKIDTKPNRKISDDTIYSTRNVDNQDMLVERIKNIYDPKENAANTLINDIINDNTDKYIMYHKDPQTFDKIKAIVLNHFNEFKTDKNCYIVTKEGLYKLKGTSPLALYYEEFGPITKYAKKNNGPTIHSMKFYSEKLGNHLSITHKYSTVNKKVITKQISPYRTDFYQSPEGKYKFVTVRYKDVAYNAKKDKYIIDHSWYREQKKLKKIADEWIFVCSVHRDELIGIMKADGQKRIFDSSTESDGETLYHDAKTYEILKFTATNNDITGRFEVKPIYCYCKKQLMVSIGTCRKIQKFATDVLGNLYIVKDNVLKLEFK

SEQ ID NO: 168 - protein, 1338 aa, Coprococcus catus
  Coprococcus catus GD/7
MKQEYFLGLDMGTGSLGWAVTDSTYQVMRKHGKALWGTRLFESASTAEERRMFRTARRRLDRRNWRIQVLQEIFSEEISKVDPGFFLRMKESKYYPEDKRDAEGNCPELPYALFVDDNYTDKNYHKDYPTIYHLRKMLMETTEIPDIRLVYLVLHHMMKHRGHFLLSGDISQIKEFKSTFEQLIQNIQDEELEWHISLDDAAIQFVEHVLKDRNLTRSTKKSRLIKQLNAKSACEKAILNLLSGGTVKLSDIFNNKELDESERPKVSFADSGYDDYIGIVEAELAEQYYIIASAKAVYDWSVLVEILGNSVSISEAKIKVYQKHQADLKTLKKIVRQYMTKEDYKRVFVDTEEKLNNYSAYIGMTKKNGKKVDLKSKQCTQADFYDFLKKNVIKVIDHKEITQEIESEIEKENFLPKQVTKDNGVIPYQVHDYELKKILDNLGTRMPFIKENAEKIQQLFEFRIPYYVGPLNRVDDGKDGKFTWSVRKSDARIYPWNFTEVIDVEASAEKFIRRMTNKCTYLVGEDVLPKDSLVYSKFMVLNELNNLRLNGEKISVELKQRIYEELFCKYRKVTRKKLERYLVIEGIAKKGVEITGIDGDFKASLTAYHDFKERLTDVQLSQRAKEAIVLNVVLFGDDKKLLKQRLSKMYPNLTTGQLKGICSLSYQGWGRLSKTFLEEITVPAPGTGEVWNIMTALWQTNDNLMQLLSRNYGFTNEVEEFNTLKKETDLSYKTVDELYVSPAVKRQIWQTLKVVKEIQKVMGNAPKRVFVEMAREKQEGKRSDSRKKQLVELYRACKNEERDWITELNAQSDQQLRSDKLFLYYIQKGRCMYSGETIQLDELWDNTKYDIDHIYPQSKTMDDSLNNRVLVKKNYNAIKSDTYPLSLDIQKKMMSFWKMLQQQGFITKEKYVRLVRSDELSADELAGFIERQIVETRQSTKAVATILKEALPDTEIVYVKAGNVSNFRQTYELLKVREMNDLHHAKDAYLNIVVGNAYFVKFTKNAAWFIRNNPGRSYNLKRMFEFDIERSGEIAWKAGNKGSIVTVKKVMQKNNILVTRKAYEVKGGLFDQQIMKKGKGQVPIKGNDERLADIEKYGGYNKAAGTYFMLVKSLDKKGKEIRTIEFVPLYLKNQIEINHESAIQYLAQERGLNSPEILLSKIKIDTLFKVDGFKMWLSGRTGNQLIFKGANQLILSHQEAAILKGVVKYVNRKNENKDAKLSERDGMTEEKLLQLYDTFLDKLSNTVYSIRLSAQIKTLTEKRAKFIGLSNEDQCIVLNEILHMFQCQSGSANLKLIGGPGSAGILVMNNNITACKQISVINQSPTGIYEKEIDLIKL

SEQ ID NO: 169 - protein, 1384 aa, Coriobacterium glomerans
MKLRGIEDDYSIGLDMGTSSVGWAVTDERGTLAHFKRKPTWGSRLFREAQTAAVARMPRGQRRRYVRRRWRLDLLQKLFEQQMEQADPDFFIRLRQSRLLRDDRAEEHADYRWPLFNDCKFTERDYYQRFPTIYHVRSWLMETDEQADIRLIYLALHNIVKHRGNFLREGQSLSAKSARPDEALNHLRETLRVWSSERGFECSIADNGSILAMLTHPDLSPSDRRKKIAPLFDVKSDDAAADKKLGIALAGAVIGLKTEFKNIFGDFPCEDSSIYLSNDEAVDAVRSACPDDCAELFDRLCEVYSAYVLQGLLSYAPGQTISANMVEKYRRYGEDLALLKKLVKIYAPDQYRMFFSGATYPGTGIYDAAQARGYTKYNLGPKKSEYKPSESMQYDDFRKAVEKLFAKTDARADERYRMMMDRFDKQQFLRRLKTSDNGSIYHQLHLEELKAIVENQGRFYPFLKRDADKLVSLVSFRIPYYVGPLSTRNARTDQHGENRFAWSERKPGMQDEPIFPWNWESIIDRSKSAEKFILRMTGMCTYLQQEPVLPKSSLLYEEFCVLNELNGAHWSIDGDDEHRFDAADREGIIEELFRRKRTVSYGDVAGWMERERNQIGAHVCGGQGEKGFESKLGSYIFFCKDVFKVERLEQSDYPMIERIILWNTLFEDRKILSQRLKEEYGSRLSAEQIKTICKKRFTGWGRLSEKFLTGITVQVDEDSVSIMDVLREGCPVSGKRGRAMVMMEILRDEELGFQKKVDDFNRAFFAENAQALGVNELPGSPAVRRSLNQSIRIVDEIASIAGKAPANIFIEVTRDEDPKKKGRRTKRRYNDLKDALEAFKKEDPELWRELCETAPNDMDERLSLYFMQRGKCLYSGRAIDIHQLSNAGIYEVDHIIPRTYVKDDSLENKALVYREENQRKTDMLLIDPEIRRRMSGYWRMLHEAKLIGDKKFRNLLRSRIDDKALKGFIARQLVETGQMVKLVRSLLEARYPETNIISVKASISHDLRTAAELVKCREANDFHHAHDAFLACRVGLFIQKRHPCVYENPIGLSQVVRNYVRQQADIFKRCRTIPGSSGFIVNSFMTSGFDKETGEIFKDDWDAEAEVEGIRRSLNFRQCFISRMPFEDHGVFWDATIYSPRAKKTAALPLKQGLNPSRYGSFSREQFAYFFIYKARNPRKEQTLFEFAQVPVRLSAQIRQDENALERYARELAKDQGLEFIRIERSKILKNQLIEIDGDRLCITGKEEVRNACELAFAQDEMRVIRMLVSEKPVSRECVISLFNRILLHGDQASRRLSKQLKLALLSEAFSEASDNVQRNVVLGLIAIFNGSTNMVNLSDIGGSKFAGNVRIKYKKELASPKVNVHLIDQSVTGMFERRTKIGL

SEQ ID NO: 170 - protein, 1099 aa, Corynebacterium accolens
  Corynebacterium accolens ATCC 49725
MSLSYRVGIDVGTYSLGCTAIEVDDNDQPVNILSSVSLIHDSGLDPDQQKRAVTRLASSGVARRTRRLYRRRRRRMINLEKFLTSQGWETRPFEHYSDPYLPWNARVALVNGYISDDAQRGMYLSIAFRHIANHRGWRNPYWKVSSLYSPDKPSDAFEQIRKELEESTGHKIPETVTVGQLISFAQFGKDRLRGGGKKKDEKKPQEQVNQAVISARLHQIDHAREINEICRVQKIDDALRKQILDLVFAAESPKGAQIGRVGKDPLQPKLPRALKASDAFQQYRIVALAGNLRIYRDGVSTPLDRDEKLIVFNYLINLSHKEEPSWLKVAEVLNIDRGQLHGTATMTDDGERAGAAPPVHDTNRTILGCKIKPLVHWWEGANDDERAAMLKALSNSEVEDFDSPAGAQTQAFFANLDESEQEKLDSLHLPIGRAAYSEDTLMRLTSRMLDENLDLYEARLAEFDIPKDWAPPAPRIGEPVGNPAVDRVLKGVARWLEAAADEWGAPKSVVIEHVRDGFISKSKANEIDRANNARHKRNRELFKQMQENLGIDGKLRSSDLWRYQSVQRQNCQCAYCGSPITYTTCEMDHIVPRAGEGSTNTRDNLVATCHRCNLAKKNIPFAVWAAQTNIPGVSVKEALDRTRHWSEDSGMTSKDFKKFRKNVCDRLKRTVVDEPLDARSMESVAWMANELRGRVAQRFQEENTVVNVYRGELTAEARRAAGISDKLRFIDGTGKSRLDRRHHAVDAAVVAFTQNYVAETLAIRSNKKREAQLLQAAEQWKEFTGSDAEHRAAWNAWLPKMQKLAVLLQKALDEDRIAVTSNLRLRLGNGRAHEDSIGELKTIRVGDAISVTDIDRASSEALWCALTREPDFDENNGLPENPDRRIRIHGTWYDAEDDIEVFPVGAGAIKVRGGYAELSRFHHARIYKIPGKKAPVYCMLRVYNADLIRHRHEDLFSVEIKPQTMSVRQAEPKLRKALAENTAEYLGWLVTDDELVIDTSNFNTGQIAEMQSELGQVRRWRLDGFYSPSTLRLRPLQMSAEGLREDTSIGAKKIIDRPGWLPAINKLFGEGHVTVVRRDALGRARLTSNAHLPISWKAE

SEQ ID NO: 171 - protein, 1099 aa, Corynebacterium accolens
  Corynebacterium accolens ATCC 49726
MSLLYRVGIDVGTYSLGCTAIEVDDNDQPVSILSSVSLIHDSGLDPDQQKRAVTRLASSGVARRTRRLYRRRRRRMVKLENFLTAQGWETLPFERYSDPYLPWHARVALVNGYISDDTQRGQYLSIAFRHIANHRGWRNPYWKVSSLYSPDKPSDAFEQIRKELEASTGRQIPETATVGQLISFAQFGKDRLRGGGKQKDKKKPQEQVNQAVISARLHQIDHAREINEICRVQKIDDTLRKQILDLVFAAESPKGAQKGRVGKDPLQPKLFRALKASDAFQQYRIAALTGNLRIYRNGVTVPLDRDEKLIVFNYLVNLPKKEEPSWLKIAEILNIDRGQLRGTATMTDDGERAGATPPVHDTNRTILDSKVKPLAHWWENASDDERAAMLKSLSNSEVEDFDSPAGAQVQAFFADLDETEQEKLDSLHLPMGRAAYSEDTLMRLTNRMLDENLDLYEARLAEFGIPKDWAPPAPRIGEPVGNPAVDRVLKGVARWLEAAADEWGAPKSVVIEHVRDGFVSKSKAIEIDRANNNRHKRNRELFQKMQENLGIEGKVRSSDLWRYQSVQRQNCQCAYCGSPITYTTCEMDHIVPRAGEGSTNTRDNLVATCHRCNLAKKNIPFAVWAEKSTIPGVSVKEALDRTRHWSEDSGMSKKDFQKFRKNVCERLNRTVVDEPLDARSMESVAWMANELRGRVAQRFQEENTTVNVYRGALTAEARRAAGITDKLRFIDGTGKSRLDRRHHAVDAAVVAFIHNYVAETLAIRSNKKREAQLLQGTSQWKEFTGSDDKHRAVWNAWIPKMQKLAVLLQIALDEDRIVVTSNLRLRLGNGRAHEDTISELKTIRVGDAISVTDIDRASSEALWCALTREPDFDEKDGLPENPNRRIRVHGTWYDAEDEIEVFPVGAGAIKVRGGYAKLSRFHHARVYKIPGKKAPIYCMLRVYNTDLVQHRHEDLFSVELKPQTMSVRQAEPKLRKALAENTAEYLGWLVTDDELIIDTSTFRTGLIEEMQSEFGLVRRWRLDGFDSPSLLTLRPLHMSAEGLPDDCALGSRKIIDTKGWRVSINKVFNAGNTTVVRRDALGRARLTSNAHLPISWKEE

SEQ ID NO: 172 - protein, 1084 aa, Corynebacterium diphtheriae
MKYHVGIDVGTFSVGLAAIEVDDAGMPIKTLSLVSHIHDSGLDPDKIKSAVTRLASSGIARRTRRLYRRKRRRLQQLDKFIQRQGWPVIELEDYSDPLYPWKVRAELAASYIADEKERGEKLSVALRHIARHRGWRNPYAKVSSLYLPDEPSDAFKAIREEIKRASGQPVPETATVGQMVTLCELGTLKLRGEGGVLSARLQQSDHAREIQEICRMQEIGQELYRKIIDVVFAAESPKGSASSRVGKDPLQPGKNRALKASDAFQRYRIAALIGNLRVRVDGEKRILSVEEKNLVFDHLVNLAPKKEPEWVTIAEILGIDRGQLIGTATMTDDGERAGARPPTHDTNRSIVNSRIAPLVDWWKTASALEQHAMVKALSNAEVDDFDSPEGAKVQAFFADLDDDVHAKLDSLHLPVGRAAYSEDTLVRLTRRMLADGVDLYTARLQEFGIEPSWTPPAPRIGEPVGNPAVDRVLKTVSRWLKSATKTWGAPERVIIEHVREGFVTEKRAREMDGDMRRRAARNAKLFQEMQEKLNVQGKPSRADLWRYQSVQRQNCQCAYCGSPITFSNSEMDHIVPRAGQGSTNTRENLVAVCHRCNQSKGNTPFAIWAKNTSIEGVSVKEAVERTRHWVTDTGMRSTDFKKFTKAVVERFQRATMDEEIDARSMESVAWMANELRSRVAQHFASHGTTVRVYRGSLTAEARRASGISGKLEFLDGVGKSRLDRRHHAIDAAVIAFTSDYVAETLAVRSNLKQSQAHRQEAPQWREFTGKDAEHRAAWRVWCQKMEKLSALLTEDLRDDRVVVMSNVRLRLGNGSAHEETIGKLSKVKLGSQLSVSDIDKASSEALWCALTREPDFDPKDGLPANPERHIRVNGTHVYAGDNIGLFPVSAGSIALRGGYAELGSSFHHARVYKITSGKKPAFAMLRVYTIDLLPYRNQDLFSVELKPQTMSMRQAEKKLRDALATGNAEYLGWLVVDDELVVDTSKIATDQVKAVEAELGTIRRWRVDGFFGDTRLRLRPLQMSKEGIKKESAPELSKIIDRPGWLPAVNKLFSEGNVTVVRRDSLGRVRLESTAHLPVTWKVQ

SEQ ID NO: 173 - protein, 1084 aa, Corynebacterium diphtheriae
MKYHVGIDVGTFSVGLAAIEVDDAGMPIKTLSLVSHIHDSGLDPDKMKSAVTRLASSGIARRTRRLYRRKRRRLQQLDKFIQRQGWPVIELEDYSDPLYPWKVRAELAASYIADEKERGEKLSVALRHIARHRGWRNPYAKVSSLYLPDEPSDAFKSIREEIKRASGQPVPETATVGQMVTLCELGTLKLRGEGGVLSARLQQSDHAREIQEICRMQEIGQELYRKIIDVVFAAESPKGSASSRVGKDPLQPGKNRALKASDAFQRYRIAALIGNLRVRVDGEKRILSVEEKNLVFDHLVNLAPKKEPEWVTIAEILGIDRGQLIGTATMTDDGERAGARPPTHDTNRSIVNSRIAPLVDWWKTASALEQHAMVKALSNAEVDDFDSPEGAKVQAFFADLDDDVHAKLDSLHLPVGRAAYSEDTLVRLTRRMLADGVDLYTARLQEFGIEPSWTPPAPRIGEPVGNPAVDRVLKTVSRWLESATKTWGAPERVIIEHVREGFVTEKRAREMDGDMRRRAARNAKLFQEMQEKLNVQGKPSRADLWRYQSVQRQNCQCAYCGSPITFSNSEMDHIVPRAGQGSTNTRENLVAVCHRCNQSKGNTPFAIWAKNTSIEGVSVKEAVERTRHWVTDTGMRSTDFKKFTKAVVERFQRATMDEEIDARSMESVAWMANELRSRVAQHFASHGTTVRVYRGSLTAEARRASGISGKLEFLDGVGKSRLDRRHHAIDAAVIAFTSDYVAETLAVRSNLKQSQAHRQEAPQWREFTGKDAEHRAAWRVWCQKMEKLSALLTEDLRDDRVVVMSNVRLRLGNGSAHEETIGKLSKVKLGSQLSVSDIDKASSEALWCALTREPDFDPKDGLPANPERHIRVNGTHVYAGDNIGLFPVSAGSIALRGGYAELGSSFHHARVYKITSGKKPAFAMLRVYTIDLLPYRNQDLFSVELKPQTMSMRQAEKKLRDALATGNAEYLGWLVVDDELVVDTSKIATDQVKAVEAELGTIRRWRVDGFFGDTRLRLRPLQMSKEGIKKESAPELSKIIDRPGWLPAVNKLFSEGNVTVVRRDSLGRVRLESTAHLPVTWKVQ

SEQ ID NO: 174 - protein, 1084 aa, Corynebacterium diphtheriae
MKYHVGIDVGTFSVGLAAIEVDDAGMPIKTLSLVSHIHDSRLDPDKIKSAVTRLASSGIARRTRRLYRRKRRRLQQLDKFIQRQGWPVIELEDYSDPLYPWKVRAELAASYIADEKERGEKLSVALRHIARHRGWRNPYAKVSSLYLPDEPSDAFKAIREEIKRASGQPVPETATVGQMVTLCELGTLKLRGEGGVLSARLQQSDHAREIQEICRMQEIGQELYRKIIDVVFAAESPKGSASSRVGKDPLQPGKNRALKASDAFQRYRIAALIGNLRVRVDGEKRILSVEEKNLVFDHLVNLAPKKEPEWVTIAEILGIDRGQLIGTATMTDDGERAGARPPTHDTNRSIVNSRIAPLVDWWKTASALEQHAMVKALSNAEVDDFDSPEGAKVQAFFADLDDDVHAKLDSLHLPVGRAAYSEDTLVRLTRRMLADGVDLYTARLQEFGIEPSWTPPAPRIGEPVGNPAVDRVLKTVSRWLESATKTWGAPERVIIEHVREGFVTEKRAREMDGDMRRRAARNAKLFQEMQEKLNIQGKPSRADLWRYQSVQRQNCQCAYCGSPITFSNSEMDHIVPRAGQGSTNTRENLVAVCHRCNQSKGNTPFAIWAKNTSIEGVSVKEAVERTRHWVTDTGMRSTDFKKFTKAVVERFQRVTMDEEIDARSMESVAWMANELRSRVAQHFASRGTTVRVYRGSLTAEARRASGISGKLEFLDGVGKSRLDRRHHAIDAAVIAFTSDYVAETLAVRSNLKQSQAHRQEAPQWREFTGKDAEHRAAWRVWCQKMEKLSALLTEDLRDDRVVVMSNVRLRLGNGSAHEETIGKLSKVKLGSQLSVSDIDKASSEALWCALTREPDFDPKDGLPANPERHIRVNGTHVYAGDNIGLFPVSAGSIALRGGYAELGSSFHHARVYKITSGKKPAFAMLRVYTIDLLPYRNQDLFSVELKPQTMSMRQAEKKLRDALATGNAEYLGWLVVDDELVVDTSKIATDQVKAVEAELGTIRRWRVDGFFGDTRLRLRPLQMSKEGIKKESAPELSKIIDRPGWLPAVNKLFSEGNVTVVRRDSLGRVRLESTAHLPVTWKVQ

SEQ ID NO: 175 - protein, 1084 aa, Corynebacterium diphtheriae
  Corynebacterium diphtheriae bv. intermedius str. NCTC 5011
MKYHVGIDVGTFSVGLAAIEVDDAGMPIKTLSLVSHIHDSGLDPDEIKSAVTRLASSGIARRTRRLYRRKRRRLQQLDKFIQRQGWPVIELEDYSDPLYPWKVRAELAASYIADEKERGEKLSVALRHIARHRGWRNPYAKVSSLYLPDGPSDAFKAIREEIKRASGQPVPETATVGQMVTLCELGTLKLRGEGGVLSARLQQSDHAREIQEICRMQEIGQELYRKIIDVVFAAESPKGSASSRVGKDPLQPGKNRALKASDAFQRYRIAALIGNLRVRVDGEKRILSVEEKNLVFDHLVNLAPKKEPEWVTIAEILGIDRGQLIGTATMTDDGERAGARPPTHDTNRSIVNSRIAPLVDWWKTASALEQHAMVKALSNAEVDDFDSPEGAKVQAFFADLDDDVHAKLDSLHLPVGRAAYSEDTLVRLTRRMLADGVDLYTARLQEFGIEPSWTPPAPRIGEPVGNPAVDRVLKTVSRWLESATKTWGAPERVIIEHVREGFVTEKRAREMDGDMQRRAARNAKLFQEMQEKLNVQGKPSRADLWRYQSVQRQNCQCAYCGSPITFSNSEMDHIVPRAGQGSTNTRENLVAVCHRCNQSKGNTPFAIWAKNTSIEGVSVKEAVERTRHWVTDTGMRSPDFKKFTKAVVERFQRATMDEEIDARSMESVAWMANELRSRVAQHFASHGTTVRVYRGSLTAEARRASGISGKLKFFDGVGKSRLDRRHHAIDAAVIAFTSDYVAETLAVRSNLKQSQAHRQEAPQWREFTGKDAEHRAAWRVWCQKMEKLSALLTEDLRDDRVVVMSNVRLRLGNGSAHKETIGKLSKVKLGSQLSVSDIDKASSEALWCALTREPDFDPKEGLPANPERHIRVNGTHVYAGDNIGLFPVSAGSIALRGGYAELGSSFHHARVYKITSGKKPAFAMLRVYTIDLLPYRNQDLFSVELKPQTMSMRQAEKKLRDALATGNAEYLGWLVVDDELVVDTSKIATDQVKAVEAELGTIRRWRVDGFFSPSKLRLRPLQMSKEGIKKESAPELSKIIDRPGWLPAVNKLFSDGNVTVVRRDSLGRVRLESTAHLPVTWKVQ

SEQ ID NO: 176 - protein, 1084 aa, Corynebacterium diphtheriae
MKYHVGIDVGTFSVGLAAIEVDDAGMPIKTLSLVSHIHDSGLDPDKIKSAVTRLASSGIARRTRRLYRRKRRRLQQLDKFIQRQGWPVIELEDYSDPLYPWKVRAELAASYIADEKERGEKLSVALRHIARHRGWRNPYAKVSSLYLPDEPSDAFKAIREEIKRASGQPVPETATVGQMVTLCELGTLKLRGEGGVLSARLQQSDHAREIQEICRMQEIGQELYRKIIDVVFAAESPKGSASSRVGKDPLQPGKNRALKASDAFQRYRIAALIGNLRVRVDGEKRILSVEEKNLVFDHLVNLAPKKEPEWVTIAEILGIDRGQLIGTATMTDDGERAGARPPTHDTNRSIVNSRIAPLVDWWKTASALEQHAMVKALSNAEVDDFDSPEGAKVQAFFADLDDDVHAKLDSLHLPVGRAAYSEDTLVRLTRRMLADGVDLYTARLQEFGIEPSWTPPAPRIGEPVGNPAVDRVLKTVSRWLESATKTWGAPERVIIEHVREGFVTEKRAREMDGDMRRRAARNAKLFQEMQEKLNVQGKPSRADLWRYQSVQRQNCQCAYCGSPITFSNSEMDHIVPRAGQGSTNTRENLVAVCHRCNQSKGNTPFAIWAKNTSIEGVSVKEAVERTRHWVTDTGMRSTDFKKFTKAVVERFQRATMDEEIDARSMESVAWMANELRSRVAQHFASHGTTVRVYRGSLTAEARRASGISGKLEFLDGVGKSRLDRRHHAIDAAVIAFTSDYVAETLAVRSNLKQSQAHRQEAPQWREFTGKDAEHRAAWRVWCQKMEKLSALLTEDLRDDRVVVMSNVRLRLGNGSAHEETIGKLSKVKLGSQLSVSDIDKASSEALWCALTREPDFDPKDGLPANPERHIRVNGTHVYAGDNIGLFPVSAGSIALRGGYAELGSSFHHARVYKITSGKKPAFAMLRVYTIDLLPYRNQDLFSVELKPQTMSMRQAEKKLRDALATGNAEYLGWLVVDDELVVDTSKIATDQVKAVEAELGTIRRWRVDGFFGDTRLRLRPLQMSKEGIKKESAPELSKIIDRPGWLPAVNKLFSEGNVTVVRRDSLGRVRLESTAHLPVTWKVQ

SEQ ID NO: 177 - protein, 1084 aa, Corynebacterium diphtheriae
MKYHVGIDVGTFSVGLAAIEVDDAGMPIKTLSLVSHIHDSGLDPDEIKSAVTRLASSGIARRTRRLYRRKRRRLQQLDKFIQRQGWPVIELEDYSDPLYPWKVRAELAASYIADEKERGEKLSVALRHIARHRGWRNPYAKVSSLYLPDGPSDAFKAIREEIKRASGQPVPETATVGQMVTLCELGTLKLRGEGGVLSARLQQSDHAREIQEICRMQEIGQELYRKIIDVVFAAESPKGSASSRVGKDPLQPGKNRALKASDAFQRYRIAALIGNLRVWVDGEKRILSVEEKNLVFDHLVNLTPKKEPEWVTIAEILGIDRGQLIGTATMTDDGERAGARPPTHDTNRSIVNSRIAPLVDWWKTASALEQHAMVKALSNAEVDDFDSPERAKVQAFFADLDDDVHAKLDSLHLPVGRAAYSEDTLVRLTRRMLSDGVDLYTARLQEFGIEPSWTPPTPRIGEPVGNPAVDRVLKTVSRWLESATKTWGAPERVIIEHVREGFVTEKRAREMDGDMRRRAARNAKLFQEMQEKLNVQGKPSRADLWRYQSVQRQNCQCAYCGSPITFSNSEMDHIVPRAGQGSTNTRENLVAVCHRCNQSKGNTPFAIWAKNTSIEGVSVKEAVERTRHWVTDTGMRSTDFKKFTKAVVERFQRATMDEEIDARSMESVAWMANELRSRVAQHFASHGTTVRVYRGSLTAEARRASGISGKLEFLDGVGKSRLDRRHHAIDAAVIAFTSDYVAETLAVRSNLKQSQAHRQEAPQWREFTGKDAEHRATWRVWCQKMEKLSALLTEDLRDDRVVVMSNVRLRLGNGSAHEETIGKLSKVKLGSQLSVSDIDKASSEALWCALTREPDFDPKDGLPANPERHIRVNGTHVYAGDNIGLFPVSAGSIALRGGYAELGSSFHHARVYKITSGKKPAFAMLRVYTIDLLPYRNQDLFSVELKPQTMSMRQAEKKLRDALATGNAEYLGWLVVDDELVVDTSKIATDQVKAVEAELGTIRRWRVDGFFGDTRLRLRPLQMSKEGIKKESAPELSKIIDRPGWLPAVNKLFSEGNVTVVRRDSLGRVRLESTAHLPVTWKVQ

SEQ ID NO: 178 - protein, 1084 aa, Corynebacterium diphtheriae
MKYHVGIDVGTFSVGLAAIEVDDAGMPIKTLSLVSHIHDSGLDPDEIKSAVTRLASSGIARRTRRLYRRKRRRLQQLDKFIQRQGWPVIELEDYSDPLYPWKVRAELAASYIADEKERGEKLSVALRHIARHRGWRNPYAKVSSLYLPDGPSDAFKAIREEIKRASGQPVPETATVGQMVTLCELGTLKLRGEGGVLSARLQQSDYAREIQEICRMQEIGQELYRKIIDVVFAAESPKGSASSRVGKDPLQPGKNRALKASDAFQRYRIAALIGNLRVRVDGEKRILSVEEKNLVFDHLVNLTPKKEPEWVTIAEILGIDRGQLIGTATMTDDGERAGARPPTHDTNRSIVNSRIAPLVDWWKTASALEQHAMVKALSNAEVDDFDSPEGAKVQAFFADLDDDVHAKLDSLHLPVGRAAYSEDTLVRLTRRMLSDGVDLYTARLQEFGIEPSWTPPTPRIGEPVGNPAVDRVLKTVSRWLESATKTWGAPERVIIEHVREGFVTEKRAREMDGDMRRRAARNAKLFQEMQEKLNVQGKPSRADLWRYQSVQRQNCQCAYCGSPITFSNSEMDHIVPRAGQGSTNTRENLVAVCHRCNQSKGNTPFAIWAKNTSIEGVSVKEAVERTRHWVTDTGMRSTDFKKFTKAVVERFQRATMDEEIDARSMESVAWMANELRSRVAQHFASHGTTVRVYRGSLTAEARRASGISGKLKFFDGVGKSRLDRRHHAIDAAVIAFTSDYVAETLAVRSNLKQSQAHRQEAPQWREFTGKDAEHRAAWRVWCQKMEKLSALLTEDLRDDRVVVMSNVRLRLGNGSAHKETIGKLSKVKLSSQLSVSDIDKASSEALWCALTREPGFDPKEGLPANPERHIRVNGTHVYAGDNIGLFPVSAGSIALRGGYAELGSSFHHARVYKITSGKKPAFAMLRVYTIDLLPYRNQDLFSVELKPQTMSMRQAEKKLRDALATGNAEYLGWLVVDDELVVDTSKIATDQVKAVEAELGTIRRWRVDGFFSPSKLRLRPLQMSKEGIKKESAPELSKIIDRPGWLPAVNKLFSDGNVTVVRRDSLGRVRLESTAHLPVTWKVQ

SEQ ID NO: 179 - protein, 1084 aa, Corynebacterium diphtheriae
MKYHVGIDVGTFSVGLAAIEVDDAGMPIKTLSLVSHIHDSGLDPDKMKSAVTRLASSGIARRTRRLYRRKRRRLQQLDKFIQRQGWPVIELEDYSDPLYPWKVRAELAASYIADEKERGEKLSVALRHIARHRGWRNPYAKVSSLYLPDEPSDAFKSIREEIKRASGQPVPETATVGQMVTLCELGTLKLRGEGGVLSARLQQSDHAREIQEICRMQEIGQELYRKIIDVVFAAESPKGSASSRVGKDPLQPGKNRALKASDSFQRYRIAALISNLRVRVDGEKRILSVEEKNLVFDHLVNLAPKKEPEWVTIAEILGIDRGQLIGTATMTDDGERAGARPPTHDTNRSIVNSRIAPLVDWWKTASALEQHAMVKALSNAEVDDFDSPEGAKVQAFFADLDDDVHAKLDSLHLPVGRAAYSEDTLVRLTRRMLADGVDLYTARLQEFGIEPSWTPPAPRIGEPVGNPAVDRVLKTVSRWLESATKTWGAPERVIIEHVRDGFVTEKRAREMDGDMRRRAARNAKLFQEMQEKLNVQGKPSRADLWRYQSVQRQNCQCAYCGSPITFSNSEMDHIVPRAGQGSTNTRENLVAVCHRCNQSKGNTPFAIWAKNTSIEGVSVKEAVERTRHWVTDTGMRSTDFKKFTKAVVERFQRATMDEEIDARSMESVAWMANELRSRVAQHFASHGTTVRVYRGSLTAEARRASGISGKLEFLDGVGKSRLDRRHHAIDAAVIAFTSDYVAETLAVRSNLKQSQAHRQEAPQWREFTGKDAEHRAAWRVWCQKMEKLSALLTEDLRDDRVVVMSNVRLRLGNGSAHEETIGKLSKVKLGSQLSVSDIDKASSEALWCALTREPDFDPKDGLPANPERHIRVNGTHVYAGDNIGLFPVSAGSIALRGGYAELGSSFHHARVYKITSGKKPAFAMLRVYTIDLLPYRNQDLFSVELKPQTMSMRQAEKKLRDALATGNAEYLGWLVVDDELVVDTSKIATDQVKAVEAELGTIRRWRVDGFFGDTRLRLRPLQMSKEGIKKELAPELSKIIDRPGWLPAVNKLFSEGNVTVVRRDSLGRVRLESTAHLPVTWKVQ

SEQ ID NO: 180 - protein, 1089 aa, Corynebacterium matruchotii
  Corynebacterium matruchotii ATCC 14266
MNSANVNYRVGIDVGSYSLGMAAIAIDDDGKPTEILSAISLIHDSGVDPDSAKSAATRLATSGIARRTRRLYRRKRKRLAKLDKFISSQGWPLKEFEKYEDPFYPWRVRAELATTAITDQQELGEKLSIALRHIARHRGWRNPYSKVTALYTVTEPSDAFLAMQEECAKQLGRTIPETITVGQLVTGMNLGKTRLRGENSLLAARPRQSDNANEIHTIAKVQGLSNELVRQIIDHVFAAESPKGSAAEQVGKDPLQPTKKRALKASDAFQQYRIAALIGNLRIRGGKGNRRLTTEETRLVFDYLRSLPAKQEPTWQLVAEQLKIDRGNLVGTAIMTDDGERAGAKPPVHDTNRIMENTKIKPLATWWKSADADARAAMVKALSNAEVDDFDSQAGAQVQEFFFGISDEDQEKLDGLHLPIGRAAYSEDTLDRLTKRMIGEGMDLYEARQAEFKISNDWAPPAPEIGERVGNPAVDRVLKATARWLNAAERQWGAPKSVNIEHVRAAFMSESSARELDRDNQQRAKRNVKVVAEMQEKLGIEGRPSRADVWRFQSIQRQNGKCAYCGAEISFKNSEMDHIIPQAGEGSTNTRDNLVAVCRECNSSKSNIAFAVWAENTSRPGVSVQKAIERTHHWVTDSGLRKPEFDKFRKQVCDRLRRKATDEPIDARSLESVAWMANELRSRIAQKFKDGDTKVRVYKGALTAEARRASGISGKLEFVDGKGKSRLDRRHHAVDAAVVAFTSNYVAETLALRSNMKFDQELRRKAPQWREFTGSDHVHQVEWTKWKYRMQALAELLNNALVQDRIVVMHNLRLRLGNGAAHEDTIGKLTRLKVGDAISTTDIDRASSEALWCALTRDPDYDPKTGLPENPNRTIRIHGTHLTASDEITVFPVAAASIPIRDGFAKLGSNYHHVRLFRVPSGKKYKYCLMQVYTVDLLKFRKEDLFTVELKPQTISVRTCEALLRKALANGTAEYLGWLVSDDELLIDTSSFDTPGIVKLREEYGPVNRWRLAGLTSVTRLNLRPLYLSKEGLKPNVNPEIKKIIDNRSWIITVNKLFSSGHVKIIRRDALGRPRLHSAAHLPICWEVK

SEQ ID NO: 181 - protein, 1069 aa, Corynebacterium matruchotii
  Corynebacterium matruchotii ATCC 33806
MAAIAIDDDGKPTEILSAISLIHDSGVDPDSAKSAATRLATSGIARRTRRLYRRKRKRLAKLDKFISSQGWPLKEFEKYEDPFYPWRVRAELATTAITDQQELGEKLSIALRHIARHRGWRNPYSKVTALYTVTEPSDAFLAMQEECAKQLGRTIPETITVGQLVTGMNLGKTRLRGENSLLAARPRQSDNANEIHTIAKVQGLSNELVRQIIDHVFAAESPKGSAAEQVGKDPLQPTKKRALKASDAFQQYRIAALIGNLRIRGGKGNRRLTTEETRLVFDYLRSLPAKQEPTWQLVAEQLKIDRGNLVGTAIMTDDGERAGAKPPVHDTNRIMENTKIKPLATWWKSADADARAAMVKALSNAEVDDFDSQAGAQVQEFFFGISDEDQEKLDGLHLPIGRAAYSEDTLDRLTKRMIGEGMDLYEARQAEFKISNDWAPPAPEIGERVGNPAVDRVLKATARWLNAAERQWGAPKSVNIEHVRAAFMSESSARELDRDNQQRAKRNVKVVAEMQEKLGIEGRPSRADVWRFQSIQRQNGKCAYCGAEISFKNSEMDHIIPQVGEGSTNTRDNLVAVCRECNSSKSNIAFAVWAENTSRPGVSVQKAIERTHHWVTDSGLRKPEFDKFRKQVCDRLRRKATDEPIDARSLESVAWMANELRSRIAQKFKDGDTKVRVYKGALTAEARRASGISGKLEFVDGKGKSRLDRRHHAVDAAVVAFTSNYVAETLALRSNMKFDQELRRKAPQWREFTGSDHVHQVEWTKWKYRMQALAELLNNALVQDRIVVMHNLRLRLGNGAAHEDTIGKLTRLKVGDAISTTDIDRASSEALWCALTRDPDYDPKTGLPENPNRTIRIHGTHLTASDEITVFPVAAASIPIRDGFAKLGSNYHHVRLFRVPSGKKYKYCLMQVYTVDLLKFRKEDLFTVELKPQTISVRTCEALLRKALANGTAEYLGWLVSDDELLIDTSSFDTPGIVKLREEYGPVNRWRLAGLTSVTRLNLRPLYLSKEGLKPNVNPEIKKIIDNRSWIITVNKLFSSGHVKIIRRDALGRPRLHSAAHLPICWEVK

SEQ ID NO: 182 - protein, 1079 aa, Dinoroseobacter shibae
MRLGLDIGTSSIGWWLYETDGAGSDARITGVVDGGVRIFSDGRDPKSGASLAVDRRAARAMRRRRDRYLRRRATLMKVLAETGLMPADPAEAKALEALDPFALRAAGLDEPLPLPHLGRALFHLNQRRGFKSNRKTDRGDNESGKIKDATARLDMEMMANGARTYGEFLHKRRQKATDPRHVPSVRTRLSIANRGGPDGKEEAGYDFYPDRRHLEEEFHKLWAAQGAHHPELTETLRDLLFEKIFFQRPLKEPEVGLCLFSGHHGVPPKDPRLPKAHPLTQRRVLYETVNQLRVTADGREARPLTREERDQVIHALDNKKPTKSLSSMVLKLPALAKVLKLRDGERFTLETGVRDAIACDPLRASPAHPDRFGPRWSILDADAQWEVISRIRRVQSDAEHAALVDWLTEAHGLDRAHAEATAHAPLPDGYGRLGLTATTRILYQLTADVVTYADAVKACGWHHSDGRTGECFDRLPYYGEVLERHVIPGSYHPDDDDITRFGRITNPTVHIGLNQLRRLVNRIIETHGKPHQIVVELARDLKKSEEQKRADIKRIRDTTEAAKKRSEKLEELEIEDNGRNRMLLRLWEDLNPDDAMRRFCPYTGTRISAAMIFDGSCDVDHILPYSRTLDDSFPNRTLCLREANRQKRNQTPWQAWGDTPHWHAIAANLKNLPENKRWRFAPDAMTRFEGENGFLDRALKDTQYLARISRSYLDTLFTKGGHVWVVPGRFTEMLRRHWGLNSLLSDAGRGAVKAKNRTDHRHHAIDAAVIAATDPGLLNRISRAAGQGEAAGQSAELIARDTPPPWEGFRDDLRVRLDRIIVSHRADHGRIDHAARKQGRDSTAGQLHQETAYSIVDDIHVASRTDLLSLKPAQLLDEPGRSGQVRDPQLRKALRVATGGKTGKDFENALRYFASKPGPYQAIRRVRIIKPLQAQARVPVPAQDPIKAYQGGSNHLFEIWRLPDGEIEAQVITSFEAHTLEGEKRPHPAAKRLLRVHKGDMVALERDGRRVVGHVQKMDIANGLFIVPHNEANADTRNNDKSDPFKWIQIGARPAIASGIRRVSVDEIGRLRDGGTRPI

SEQ ID NO: 183 - protein, 1332 aa, Dolosigranulum pigrum
  Dolosigranulum pigrum ATCC 51524
MQKNYTIGLDIGTNSVGWAVMKDDYTLIRKRMKVLGNTDIKKIKKNFWGVRLFDEGETAKETRLKRGTRRRYQRRRNRLIYLQDIFQQPMLAIDENFFHRLDDSFFVPDDKSYDRHPIFGSLEEEVAYHNTYPTIYHLRKHLADNPEKADLRLVYTALAHIVKYRGHFLIEGELNTENTSISETFEQFLDTYSDIFKEQLVGDISKVEEILSSKQSRSRKHEQIMALFPNENKLGNFGRFMMLIVGNTSNFKPVFDLDDEYKLKLSDETYEEDLDTLLGMTDDVFLDVFMAAKNVYDAVEMSAIISTDTGNSKAVLSNQMINFYDEHKVDLAQLKQFFKTHLPDKYYECFSDPSKNGYAGYIDGKTNQEDFYKYIEKVMKTIKSDKKDYFLDKIDREVFLRKQRSFYNSVIPHQIHLQEMQAILDRQSQYYPFLAENRDKIESLVTFRIPYYVGPLTVSDQSEFAWMERQSDEPIRPWNFDEIVNKERSAEKFIERMTNMDTYLLEEKVLPKRSLLYQTFEVYNELTKVRYTNEQGKTEKLNRQQKAEIIETLFKQKNRVREKDIANYLEQYGYVDGTDIKGVEDKFNASLSTYNDLAKIDGAKAYLDDPEYADVWEDIIKILTIFEDKAMRKKQLQTYSDTLSPEILKKLERKHYTGWGRFSKKLINGLRDEGSNKTILDYLKSDEGSSGPTNRNFMQLIRDNTLSFKKKIEDAQTIEDTTHIYDTVAELPGSPAIKKGIRQALKIVEEIIDIIGYEPENIVVEMARESQTTKKGKDLSKERLEKLTEAIKEFDGPSDVKVKDLKNENLRNDRLYLYYLQNGRDMYTNEPLDINNLSKYDIDHIIPQSFTTDNSIDNKVLVSRTKNQGNKSDDVPSINIVHKMKPFWRQLHKAGLISDRKFKNLTKAEHGGLTEADRAHFLNRQLVETRQITKHVANLLDSQYNTAEEQRINIVLLKSSMTSRFRKEFKLYKVREINDYHHGHDAYLNAVVATTIMKVYPNLKPQFVYGQYKKTSMFKEEKATARKHFYSNITKFFKKEKVVNEETGEILWDTERHLSTIKRVLSWKQMNIVKKVEKQKGQLWKETIYPKGDSSKLIPVKEGMDPQKYGGLSQVSEAFAVVITHEKGKKKQLKSDLISIPIVDQKAYEQHPTAYLEEAGYNNPTVLHELFKYQLFELEDGSRRMIASAKEFQKGNQMVLPLELVELLYHANRYDKVKFPDSIEYVHDNLAKFDDLLEYVIDFSNKYINADKNVQKIQKIYKEHGTEDVELTVESFVNLMTFTAMGAPATFKFYGESITRSRYTSITEFRGSTLIFQSITGLYETRYKLEDN

SEQ ID NO: 184 - protein, 1340 aa, Dorea longicatena
  Dorea longicatena DSM 13814
MEQEYYLGLDMGTGSVGWAVTDSEYHVLRKHGKALWGVRLFESASTAEERRMFRTSRRRLDRRNWRIEILQEIFAEEISKKDPGFFLRMKESKYYPEDKRDINGNCPELPYALFVDDDFTDKDYHKKFPTIYHLRKMLMNTEETPDIRLVYLAIHHMMKHRGHFLLSGDINEIKEFGTTFSKLLENIKNEELDWNLELGKEEYAVVESILKDNMLNRSTKKTRLIKALKAKSICEKAVLNLLAGGTVKLSDIFGLEELNETERPKISFADNGYDDYIGEVENELGEQFYIIETAKAVYDWAVLVEILGKYTSISEAKVATYEKHKSDLQFLKKIVRKYLTKEEYKDIFVSTSDKLKNYSAYIGMTKINGKKVDLQSKRCSKEEFYDFIKKNVLKKLEGQPEYEYLKEELERETFLPKQVNRDNGVIPYQIHLYELKKILGNLRDKIDLIKENEDKLVQLFEFRIPYYVGPLNKIDDGKEGKFTWAVRKSNEKIYPWNFENVVDIEASAEKFIRRMTNKCTYLMGEDVLPKDSLLYSKYMVLNELNNVKLDGEKLSVELKQRLYTDVFCKYRKVTVKKIKNYLKCEGIISGNVEITGIDGDFKASLTAYHDFKEILTGTELAKKDKENIITNIVLFGDDKKLLKKRLNRLYPQITPNQLKKICALSYTGWGRFSKKFLEEITAPDPETGEVWNIITALWESNNNLMQLLSNEYRFMEEVETYNMGKQTKTLSYETVENMYVSPSVKRQIWQTLKIVKELEKVMKESPKRVFIEMAREKQESKRTESRKKQLIDLYKACKNEEKDWVKELGDQEEQKLRSDKLYLYYTQKGRCMYSGEVIELKDLWDNTKYDIDHIYPQSKTMDDSLNNRVLVKKKYNATKSDKYPLNENIRHERKGFWKSLLDGGFISKEKYERLIRNTELSPEELAGFIERQIVETRQSTKAVAEILKQVFPESEIVYVKAGTVSRFRKDFELLKVREVNDLHHAKDAYLNIVVGNSYYVKFTKNASWFIKENPGRTYNLKKMFTSGWNIERNGEVAWEVGKKGTIVTVKQIMNKNNILVTRQVHEAKGGLFDQQIMKKGKGQIAIKETDERLASIEKYGGYNKAAGAYFMLVESKDKKGKTIRTIEFIPLYLKNKIESDESIALNFLEKGRGLKEPKILLKKIKIDTLFDVDGFKMWLSGRTGDRLLFKCANQLILDEKIIVTMKKIVKFIQRRQENRELKLSDKDGIDNEVLMEIYNTFVDKLENTVYRIRLSEQAKTLIDKQKEFERLSLEDKSSTLFEILHIFQCQSSAANLKMIGGPGKAGILVMNNNISKCNKISIINQSPTGIFENEIDLLKI

SEQ ID NO: 185 - protein, 1380 aa, Eggerthella sp.
  Eggerthella sp. YY7918
MNLRHVGNYNIGLDMGTASVGWAAIDEQGELLHFKGKPTWGSRLFDSANTAATARMPRGQRRRYIRRRWRLDLLQKFFSEEMAEKDPEFFIRLRQSSLWPEDREGGHTAYHWPLFNDSDFNEKEYYEKFPTIFHLRQWLMETDEKADIRLIYLAFHNIVKHRGNFLQENNDSLSAQNANMRESLESFCIALEEWCDEKELTCSCDPQKLEHLFKEVKYRSDIRDGFAALLGLACSGENEVDVKAMAKEMGKAIVGYKADFSKIFTECDKEGSSFRLSDDEGPEAFLDICPDDGIALFEAIQMVYSSFILTGMLTEKGLSLSKISAYNQYGQDLESLKALVKEYVPNEYSSFFRGPTYSGSTEYDPSKAQGYTRYNLGPSKKGSGAKPMAYEDFKKSVEQLFANTNAINDERYKEMMGRFAEEKFLRRLRTSDNGRIPFQLNLEEMTAIIINQGKYYPFLLEQQEKLESLVRFRIPYYVGPLTRINARLDSKGNACFAWSKRKDGMDSASIKPWNWDEVIDKHASAQAFIERMTGTCTYLRGEPVLPRCSLLYEEYCVLNELNGARWTQDGDKFIRFDYKDRSDIIEELFKKRRGRIQYAAVADWMKQERSHANVHVSGGQGENAFESRLSSYHFFCNDVFGVDELPGSYVDMVEEIILWSTLFEDRSILREEIQRKYGDVLNEEQIKTICKKRFSGWGRLSRKLLCSLKAQTDNGPKSIMDILQEGDQNNGRVGRAMVFQEILHDEQLGFEQKIEEENTQSMLEGENLLIEDLPGSPAIRRSINQAVRIVDEIVGIAGHAPDNIFIEVTREDDTKKKGKRTTTRYSNIQKALEALKEEGAEALRELKTYKHNELDKRLSLYFMQNGKSLYSGIPLDIRRLSEYQIDHIIPQSYIKDDSYENMALVLPGENQSKADNLLISQDIRIKMKATWTALHKAGLMGDKKYNNLMNSSISDAKMKGFINRQLVETSQSVKLTQMMLSQKYPGAKVRPIKASISSQLRDACDLVKCREANDYHHAHDAYLACQVGRFVLKRHSSMFDNPIGMTKVIRDFVKRQGQEFKRNGKLPAYASRSGFIVQSFMRSGFDAETGELLRDDWNAPFEIARIKRCLNYRDCYISRMPMEDSGAFWDATIYSPKAGKKGALPVKQGLPVEKYGSYSREQFAYFFVYKAYNPKKKAYRLEFEAVPVRVASAVETRENALEEYAKSVAKQAGLEFVEVARPKVYKYQLIELGEDRLYITGKREVRNASQLAFSLDEIDLLKRLAEGEETSSEERERLFDVLIEKYARYAPRLARQLSVDSMSATFETLNAEEQLGILLSLVEIANGKRNMIDLSSAGGSKNAGCMNPTFSSELSSPGSNFTFIDQSVTGMFERRQRLEL

SEQ ID NO: 186 - protein, 1195 aa, Elusimicrobium minutum
MQKNINTKQNHIYIKQAQKIKEKLGDKPYRIGLDLGVGSIGFAIVSMEENDGNVLLPKEIIMVGSRIFKASAGAADRKLSRGQRNNHRHTRERMRYLWKVLAEQKLALPVPADLDRKENSSEGETSAKRFLGDVLQKDIYELRVKSLDERLSLQELGYVLYHIAGHRGSSAIRTFENDSEEAQKENTENKKIAGNIKRLMAKKNYRTYGEYLYKEFFENKEKHKREKISNAANNHKFSPTRDLVIKEAEAILKKQAGKDGFHKELTEEYIEKLTKAIGYESEKLIPESGFCPYLKDEKRLPASHKLNEERRLWETLNNARYSDPIVDIVTGEITGYYEKQFTKEQKQKLFDYLLTGSELTPAQTKKLLGLKNTNFEDIILQGRDKKAQKIKGYKLIKLESMPFWARLSEAQQDSFLYDWNSCPDEKLLTEKLSNEYHLTEEEIDNAFNEIVLSSSYAPLGKSAMLIILEKIKNDLSYTEAVEEALKEGKLTKEKQAIKDRLPYYGAVLQESTQKIIAKGFSPQFKDKGYKTPHTNKYELEYGRIANPVVHQTLNELRKLVNEIIDILGKKPCEIGLETARELKKSAEDRSKLSREQNDNESNRNRIYEIYIRPQQQVIITRRENPRNYILKFELLEEQKSQCPFCGGQISPNDIINNQADIEHLFPIAESEDNGRNNLVISHSACNADKAKRSPWAAFASAAKDSKYDYNRILSNVKENIPHKAWRFNQGAFEKFIENKPMAARFKTDNSYISKVAHKYLACLFEKPNIICVKGSLTAQLRMAWGLQGLMIPFAKQLITEKESESFNKDVNSNKKIRLDNRHHALDAIVIAYASRGYGNLLNKMAGKDYKINYSERNWLSKILLPPNNIVWENIDADLESFESSVKTALKNAFISVKHDHSDNGELVKGTMYKIFYSERGYTLTTYKKLSALKLTDPQKKKTPKDFLETALLKFKGRESEMKNEKIKSAIENNKRLFDVIQDNLEKAKKLLEEENEKSKAEGKKEKNINDASIYQKAISLSGDKYVQLSKKEPGKFFAISKPTPTTTGYGYDTGDSLCVDLYYDNKGKLCGEIIRKIDAQQKNPLKYKEQGFTLFERIYGGDILEVDFDIHSDKNSFRNNTGSAPENRVFIKVGTFTEITNNNIQIWFGNIIKSTGGQDDSFTINSMQQYNPRKLILSSCGFIKYRSPILKNKEG

SEQ ID NO: 187 - protein, 1337 aa, Enterococcus faecalis
  Enterococcus faecalis ATCC 29200
MKKDYVIGLDIGTNSVGWAVMTEDYQLVKKKMPIYGNTEKKKIKKNFWGVRLFEEGHTAEDRRLKRTARRRISRRRNRLRYLQAFFEEAMTDLDENFFARLQESFLVPEDKKWHRHPIFAKLEDEVAYHETYPTIYHLRKKLADSSEQADLRLIYLALAHIVKYRGHFLIEGKLSTENISVKEQFQQFMIIYNQTFVNGESRLVSAPLPESVLIEEELTEKASRTKKSEKVLQQFPQEKANGLFGQFLKLMVGNKADFKKVFGLEEEAKITYASESYEEDLEGILAKVGDEYSDVFLAAKNVYDAVELSTILADSDKKSHAKLSSSMIVRFTEHQEDLKKFKRFIRENCPDEYDNLFKNEQKDGYAGYIAHAGKVSQLKFYQYVKKIIQDIAGAEYFLEKIAQENFLRKQRTFDNGVIPHQIHLAELQAIIHRQAAYYPFLKENQEKIEQLVTFRIPYYVGPLSKGDASTFAWLKRQSEEPIRPWNLQETVDLDQSATAFIERMTNFDTYLPSEKVLPKHSLLYEKFMVFNELTKISYTDDRGIKANFSGKEKEKIFDYLFKTRRKVKKKDIIQFYRNEYNTEIVTLSGLEEDQFNASFSTYQDLLKCGLTRAELDHPDNAEKLEDIIKILTIFEDRQRIRTQLSTFKGQFSAEVLKKLERKHYTGWGRLSKKLINGIYDKESGKTILGYLIKDDGVSKHYNRNFMQLINDSQLSFKNAIQKAQSSEHEETLSETVNELAGSPAIKKGIYQSLKIVDELVAIMGYAPKRIVVEMARENQTTSTGKRRSIQRLKIVEKAMAEIGSNLLKEQPTTNEQLRDTRLFLYYMQNGKDMYTGDELSLHRLSHYDIDHIIPQSFMKDDSLDNLVLVGSTENRGKSDDVPSKEVVKDMKAYWEKLYAAGLISQRKFQRLTKGEQGGLTLEDKAHFIQRQLVETRQITKNVAGILDQRYNANSKEKKVQIITLKASLTSQFRSIFGLYKVREVNDYHHGQDAYLNCVVATTLLKVYPNLAPEFVYGEYPKFQTFKENKATAKAIIYTNLLRFFTEDEPRFTKDGEILWSNSYLKTIKKELNYHQMNIVKKVEVQKGGFSKESIKPKGPSNKLIPVKNGLDPQKYGGFDSPIVAYTVLFTHEKGKKPLIKQEILGITIMEKTRFEQNPILFLEEKGFLRPRVLMKLPKYTLYEFPEGRRRLLASAKEAQKGNQMVLPEHLLTLLYHAKQCLLPNQSESLAYVEQHQPEFQEILERVVDFAEVHTLAKSKVQQIVKLFEANQTADVKEIAASFIQLMQFNAMGAPSTFKFFQKDIERARYTSIKEIFDATIIYQSTTGLYETRRKVVD

SEQ ID NO: 188 - protein, 1337 aa, Enterococcus faecalis
  Enterococcus faecalis ATCC 4200
MKKDYVIGLDIGTNSVGWAVMTEDYQLVKKKMPIYGNTEKKKIKKNFWGVRLFEEGHTAEDRRLKRTARRRISRRRNRLRYLQAFFEEAMTALDENFFARLQESFLVPEDKKWHRHPIFAKLEDEVAYHETYPTIYHLRKKLADSSEQADLRLIYLALAHIVKYRGHFLIEGKLSTENISVKEQFQQFMIIYNQTFVNGESRLVSAPLPESVLIEEELTEKASRTKKSEKVLQQFPQEKANGLFGQFLKLMVGNKADFKKVFGLEEEAKITYASESYEEDLEGILAKVGDEYSDVFLAAKNVYDAVELSTILADSDKKSHAKLSSSMIVRFTEHQEDLKKFKRFIRENCPDEYDNLFKNEQKDGYAGYIAHAGKVSQLKFYQYVKKIIQDIAGAEYFLEKIAQENFLRKQRTFDNGVIPHQIHLAELQAIIHRQAAYYPFLKENQEKIEQLVTFRIPYYIGPLSKGDASTFAWLKRQSEEPIRPWNLQETVDLDQSATAFIERMTNFDTYLSSEKVLPKHSLLYEKFMVFNELTKISYTDDRGIKANFSGKEKEKIFDYLFKTRRKVKKKDIIQFYRNEYNTEIVTLSGLEEDQFNASFSTYQDLLKCGLTRAELDHPDNAEKLEDIIKILTIFEDRQRIRTQLSTFKGQFSAEVLKKLERKHYTGWGRLSKKLINGIYDKESGKTILGYLIKDDGVSKHYNRNFMQLINDSQLSFKNAIQKAQSSEHEETLSETVNELAGSPAIKKGIYQSLKIVDELVAIMGYAPKRIVVEMARENQTTSTGKRRSIQRLKIVEKAMAEIGSNLLKEQPTTNEQLRDTRLFLYYMQNGKDMYTGDELSLHRLSHYDIDHIIPQSFMKDDSLDNLVLVGSTENRGKSDDVPSKEVVKDMKAYWEKLYAAGLISQRKFQRLTKGEQGGLTLEDKAHFIQRQLVETRQITKNVAGILDQRYNANSKEKKVQIITLKASLTSQFRSIFGLYKVREVNDYHHGQDAYLNCVVATTLLKVYPNLAPEFVYGEYPKFQAFKENKATAKAIIYTNLLRFFTEDEPRFTKDGEILWSNSYLKTIKKELNYHQMNIVKKVEVQKGGFSKESIKPKGPSNKLIPVKNGLDPQKYGGFDSPVVAYTVLFTHEKGKKPLIKQEILGITIMEKTRFEQNPILFLEEKGFLRPRVLMKLPKYTLYEFPEGRRRLLASAKEAQKGNQMVLPEHLLTLLYHAKQCLLPNQSESLAYVEQHQPEFQEILERVVDFAEVHTLAKSKVQQIVKLFEANQTADVKEIAASFIQLMQFNAMGAPSTFKFFQKDIERARYTSIKEIFDATIIYQSTTGLYETRRKVVD

SEQ ID NO: 189 - protein, 1337 aa, Enterococcus faecalis
  Enterococcus faecalis D6
MKKDYVIGLDIGTNSVGWAVMTEDYQLVKKKMPIYGNTEKKKIKKNFWGVRLFEEGHTAEDRRLKRTARRRISRRRNRLRYLQAFFEEAMTALDENFFARLQESFLVPEDKKWHRHPIFAKLEDEVAYHETYPTIYHLRKKLADSSEQADLRLIYLALAHIVKYRGHFLIEGKLSTENISVKEQFQQFMIIYNQTFVNGESRLVSAPLPESVLIEEELTEKASRTKKSEKVLQQFPQEKANGLFGQFLKLMVGNKADFKKVFGLEEEAKITYASESYEEDLEGILAKVGDEYSDVFLAAKNVYDAVELSTILADSDKKSHAKLSSSMIVRFTEHQEDLKNFKRFIRENCPDEYDNLFKNEQKDGYAGYITHAGKVSQLKFYQYVKKIIQDIAGAEYFLEKIAQENFLRKQRTFDNGVIPHQIHLAELQAIIHRQAAYYPFLKENQEKIEQLVTFRIPYYVGPLSKGDANTFAWLKRQSEEPIRPWNLQETVDLDQSATAFIERMTNFDTYLPSEKVLPKHSLLYEKFMVFNELTKISYTDDRGIKANFSGKEKEKIFDYLFKTRRKVKKKDIIQFYRNEYNTEIVTLSGLEEDQFNASFSTYQDLLKCGLTRAELDHPDNAEKLEDIIKILTIFEDRQRIRTQLSTFKGQFSAEVLKKLERKHYTGWGRLSKKLINGIYDKESGKTILDYLIKDDGVSKHYNRNFMQLINDSQLSFKNAIQKAQSSEHEETLSETVNELAGSPAIKKGIYQSLKIVDELVAIMGYAPKRIVVEMARENQTTSTGKRRSIQRLKIVEKAMAEIGSNLLKEQPTTNEQLRDTRLFLYYMQNGKDMYTGDELSLHRLSHYDIDHIIPQSFMKDDSLDNLVLVGSTENRGKSDDVPSKEVVKDMKAYWEKLYAAGLISQRKFQRLTKGEQGGLTLEDKAHFIQRQLVETRQITKNVAGILDQRYNAKSKEKKVQIITLKASLTSQFRSIFGLYKVREVNDYHHGQDAYLNCVVATTLLKVYPNLAPEFVYGEYPKFQTFKENKATAKAIIYTNLLRFFTEDEPRFTKDGEILWSNSYLKTIKKELNYHQMNIVKKVEVQKGGFSKESIKPKGPSNKLIPVKNGLDPQKYGGFDSPIVAYTVLFTHEKGKKPLIKQEILGITIMEKTRFEQNPILFLEEKGFLRPRVLMKLPKYTLYQFPEGRRRLLASAKEAQKGNQMVLPEHLLTLLYHAKQCLLPNQSESLAYVEQHQPEFQEILERVVDFAEVHTLAKSKVQQIVKLFEANQTADVKEIAASFIQLMQFNAMGAPSTFKFFQKDIERARYTSIKEIFDATIIYQSTTGLYETRRKVVD

SEQ ID NO: 190 - protein, 1337 aa, Enterococcus faecalis
  Enterococcus faecalis E1Sol
MKKDYVIGLDIGTNSVGWAVMTEDYQLVKKKMPIYGNTEKKKIKKNFWGVRLFEEGHTAEDRRLKRTARRRISRRRNRLRYLQAFFEEAMTDLDENFFARLQESFLVPEDKKWHRHPIFAKLEDEVAYHETYPTIYHLRKKLADSSEQADLRLIYLALAHIVKYRGHFLIEGKLSTENTSVKEQFQQFMVIYNQTFVNGESRLVSAPLPESVLIEEELTEKASRTKKSEKVLQQFPQEKANGLFGQFLKLMVGNKADFKKVFGLEEEAKITYASESYEEDLEGILAKVGDEYSDVFLAAKNVYDAVELSTILADSDKKSHAKLSSSMIVRFTEHQEDLKKFKRFIRENCPDEYDNLFKNEQKDGYAGYIAHAGKVSQLKFYQYVKKIIQDIAGAEYFLEKIAQENFLRKQRTFDNGVIPHQIHLAELQAIIHRQAAYYPFLKENQEKIEQLVTFRIPYYVGPLSKGDASTFAWLKRQSEEPIRPWNLQETVDLDQSATAFIERMTNFDTYLPSEKVLPKHSLLYEKFMVFNELTKISYTDDRGIKANFSGKEKEKIFDYLFKTRRKVKKKDIIQFYRNEYNTEIVTLSGLEEDQFNASFSTYQDLLKCGLTRAELDHPDNAEKLEDIIKILTIFEDRQRIRTQLSTFKGQFSAEVLKKLERKHYTGWGRLSKKLINGIYDKESGKTILDYLVKDDGVSKHYNRNFMQLINDSQLSFKNAIQKAQSSEHEETLSETVNELAGSPAIKKGIYQSLKIVDELVAIMGYAPKRIVVEMARENQTTSTGKRRSIQRLKIVEKAMAEIGSNLLKEQPTTNEQLRDTRLFLYYMQNGKDMYTGDELSLHRLSHYDIDHIIPQSFMKDDSLDNLVLVGSTENRGKSDDVPSKKVVKKMKAYWEKLYAAGLISQRKFQRLTKGEQGGLTLEDKAHFIQRQLVETRQITKNVAGILDQRYNAKSKEKKVQIITLKASLTSQFRSIFGLYKVREVNDYHHGQDAYLNCVVATTLLKVYPNLAPEFVYGEYPKFQAFKENKATAKTIIYTNLMRFFTEDEPRFTKDSEILWSNSYLKTIKKELNYHQMNIVKKVEVQKGGFSKESIKPKGPSNKLIPVKNGLDPQKYGGFDSPVVAYTVLFTHEKGKKPLIKQEILGITIMEKTRFEQNPILFLEEKGFLRPRVLMKLPKYTLYEFPEGRRRLLASAKEAQKGNQMVLPEHLLTLLYHAKQCLLPNQSESLAYVEQHQPEFQEILERVVDFAEVHTLAKSKVQQIVKLFEANQTADVKEIAASFIQLMQFNAMGAPSTFKFFQKDIERARYTSIKEIFDATIIYQSTTGLYETRRKVVD

SEQ ID NO: 191 - protein, 1150 aa, Enterococcus faecalis
  Enterococcus faecalis Fly1
MYSIGLDLGISSVGWSVIDERTGNVIDLGVRLFSAKNSEKNLERRTNRGGRRLIRRKTNRLKDAKKILAAVGFYEDKSLKNSCPYQLRVKGLTEPLSKGEIYKVTLHILKKRGISYLDEDDTEAAKESQDYKEQVRKNAQLLTKYTPGQIQLQRLKENNRVKTGINAQGNYQLNVFKVSAYANELATILKTQQAFYPNELTDDWIALFVQPGIAEEAGLIYRKRPYYHGPGNEANNSPYGRWSDFKKTGQPATNIFDRLIGKDFQGELRASGLSLSAQQYNLLNDLTNLKIDGEIPLSPEQKEYILAELMTKEFTRFGVNDVAKLLGVKKERLSGWRLDKKGKPEIHTLKGYRNWRKIFAESGIDLATLPTETIDCLAKVLTLNTEHEGIENTLAFELPELAESVKLLVLDRYKELSQSVSTQAWHRFSLKTLHLLIPELMNATSEQNTLLEQFQLKSDVRKRYSEYKKLPTKDVLTEIYNPTVNKTVSQAFKVIDALLVKYGKEQIRYITIEMPRDDNEEDEKKRIKELHAKNSQRKNDSQSYFMQKSGWSQEKFQTTIQKNRRFLAKLLYYYEQDGICAYTGLSISPELLVSDSTEIDHIIPISISLDDSINNKVLVLSKANQVKGQQTPYDAWMDGSFKKINGKFSNWDDYQKWVESRHFSHKKENNLLETRNIFDSEQVEKFLARNLNDTRYASRLVLNTLQSFFANHETKVRVVNGSFTHTLRKKWGADLDKTRETHHHHAVDATLCAVTPFVKVSRYHYAVKEETGEKVMREIDFETGEIVDEMSYQEFKKSKKYERKTYQVKWPNFREQLKPVNLHPRIKFSHQVDRKANRKLSDATIYSVREKTEVKTLKSGKQKITTDEYTIGKIKDIYTVDGWEAFKKKQDKLLMKDLDEKTYERLLSIAETTPDFQEVEEKNGKVKRVKRSPFAVYCEENDIPAIQKYAKKNNGPLIRSLKYYDGKLNKHINITKDSQGRPVEKTKNGRKVTLQSLKPYRYDIYQDLETKAYYTVQLYYSDLRFVEGKYGITEKEYMKKVAEQTKGQVVRFCFSLQKNDGLEIEWKDSQRYDVRFYNFQSANSINFKGLEQEMMPAENQFKQKPYNNGAINLNIAKYGKEGKKLRKFNTDILGKKHYLYYEKEPKNIIK

SEQ ID NO: 192 - protein, 1337 aa, Enterococcus faecalis
MKKDYVIGLDIGTNSVGWAVMTEDYQLVKKKMPIYGNTEKKKIKKNFWGVRLFEEGHTAEDRRLKRTARRRISRRRNRLRYLQAFFEEAMTDLDENFFARLQESFLVPEDKKWHRHPIFAKLEDEVAYHETYPTIYHLRKKLADSSEQADLRLIYLALAHIVKYRGHFLIEGKLSTENISVKEQFQQFMIIYNQTFVNGESRLVSAPLPESVLIEEELTEKASRTKKSEKVLQQFPQEKANGLFGQFLKLMVGNKADFKKVFGLEEEAKITYASESYEEDLEGILAKVGDEYSDVFLAAKNVYDAVELSTILADSDKKSHAKLSSSMIVRFTEHQEDLKKFKRFIRENCPDEYDNLFKNEQKDGYAGYIAHAGKVSQLKFYQYVKKIIQDIAGAEYFLEKIAQENFLRKQRTFDNGVIPHQIHLAELQAIIHRQAAYYPFLKENQEKIEQLVTFRIPYYVGPLSKGDASTFAWLKRQSEEPIRPWNLQETVDLDQSATAFIERMTNFDTYLPSEKVLPKHSLLYEKFMVFNELTKISYTDDRGIKANFSGKEKEKIFDYLFKTRRKVKKKDIIQFYRNEYNTEIVTLSGLEEDQFNASFSTYQDLLKCGLTRAELDHPDNAEKLEDIIKILTIFEDRQRIRTQLSTFKGQFSAEVLKKLERKHYTGWGRLSKKLINGIYDKESGKTILDYLVKDDGVSKHYNRNFMQLINDSQLSFKNAIQKAQSSEHEETLSETVNELAGSPAIKKGIYQSLKIVDELVAIMGYAPKRIVVEMARENQTTSTGKRRSIQRLKIVEKAMAEIGSNLLKEQPTTNEQLRDTRLFLYYMQNGKDMYTGDELSLHRLSHYDIDHIIPQSFMKDDSLDNLVLVGSTENRGKSDDVPSKEVVKDMKAYWEKLYAAGLISQRKFQRLTKGEQGGLTLEDKAHFIQRQLVETRQITKNVAGILNQRYNANSKEKKVQIITLKASLTSQFRSIFGLYKVREVNDYHHGQDAYLNCVVATTLLKVYPNLAPEFVYGEYPKFQTFKENKATAKAIIYTNLLRFFTEDEPRFTKDGEILWSNSYLKTIKKELNYHQMNIVKKVEVQKGGFSKESIKPKGPSNKLIPVKNGLDPQKYGGFDSPVVAYTVLFTHEKGKKPLIKQEILGITIMEKTRFEQNPILFLEEKGFLRPRVLMKLPKYTLYEFPEGRRRLLASAKEAQKGNQMVLPEHLLTLLYHAKQCLLPNQSESLAYVEQHQPEFQEILERVVDFAEVHTLAKSKVQQIVKLFEANQTADVKEIAASFIQLMQFNAMGAPSTFKFFQKDIERARYTSIKEIFDATIIYQSTTGLYETRRKVVD

SEQ ID NO: 193 - protein, 1150 aa, Enterococcus faecalis
  Enterococcus faecalis R508
MYSIGLDLGISSVGWSVIDERTGNVIDLGVRLFSAKNSEKNLERRTNRGGRRLIRRKTNRLKDAKKILAAVGFYEDKSLKNSCPYQLRVKGLTEPLSKGEIYKVTLHILKKRGISYLDEDDTEAAKESQDYKEQVRKNAQLLTKYTPGQIQLQRLKENNRVKTGINVQGNYQLNVFKVSAYANELATILKTQQAFYPNELTDDWIALFVQPGIAEEAGLIYRKRPYYHGPGNEANNSPYGRWSDFQKTGEPATNIFDKLIGKDFQGELRASGLSLSAQQYNLLNDLTNLKIDGEVPLSSEQKEYILTELMTKEFTRFGVNDVVKLLGVKKERLSGWRLDKKGKPEIHTLKGYRNWRKIFAEAGIDLATLPTETIDCLAKVLTLNTEREGIENTLAFELPELSESVKLLVLDRYKELSQSISTQSWHRFSLKTLHLLIPELMNATSEQNTLLEQFQLKSDVRKRYSEYKKLPTKDVLAEIYNPTVNKTVSQAFKVIDALLVKYGKEQIRYITIEMPRDDNEEDEKKRIKELHAKNSQRKNDSQSYFMQKSGWSQEKFQTTIQKNRRFLAKLLYYYEQDGICAYTGLPISPELLVSDSTEIDHIIPISISLDDSINNKVLVLSKANQVKGQQTPYDAWMDGSFKKINGKFSNWDDYQKWVESRHFSHKKENNLLETRNIFDSEQVEKFLARNLNDTRYASRLVLNTLQSFFTNQETKVRVVNGSFTHTLRKKWGADLDKTRETHHHHAVDATLCAVTPFVKVSRYHYAVKEETGEKVMREIDFETGEIVNEMSYREFKKSKKYERKTYQVKWPNFREQLKPVNLHPRIKFSHQVDRKANRKLSDATIYSVREKTEVKTLKSGKQKITTDEYTIGKIKDIYTLDGWEAFKKKQDKLLMKDLDEKTYERLLSIAETTPDFQEVEEKNGKVKRVKRSPFAVYCEENDIPAIQKYAKKNNGPLIRSLKYYDGKLNKHINITKDSQGRPVEKTKNGRKVTLQSLKPYRYDIYQDLETKAYYTVQLYYSDLRFVEGKYGITEKEYMKKVAEQTKGQVVRFCFSLQKNDGLEIEWKDSQRYDVRFYNFQSANSINFKGLEQEIMPAENQFKQKPYNNGAINLNIAKYGKEGKKLRKFNTDILGKKHYLFYEKEPKNIIK

SEQ ID NO: 194 - protein, 1150 aa, Enterococcus faecalis
  Enterococcus faecalis T11
MYSIGLDLGISSVGWSVIDERTGNVIDLGVRLFSAKNSEKNLERRTNRGGRRLIRRKTNRLKDAKKILAAVGFYEDKSLKNSCPYQLRVKGLTEPLSKGEIYKVTLHILKKRGISYLDEDDTEAAKESQDYKEQVRENAQLLTKYTPGQIQLQRLKENNRVKTGINAQGNYQLNVFKVSAYANELATILKTQQAFYPNELTDDWIALFVQPGIAEEAGLIYRKRPYYHGPGNEANNSPYGRWSDFKKTGQPATNIFDKLIGKDFQGELRASGLSLSAQQYNLLNDLTNLKIDGEIPLSPEQKEYILAELMTKEFTRFGVNDVVKLLGVKKERLSGWRLDKKGKPEIHTLKGYRNWRKIFAESGIDLAMLPTETIDCLAKILTLNTEREGIENTLAFELPELAESVKLLVLDRYKELSQSVSTQAWHRFSLKTLHLLIPELMNATSEQNTLLEQFQLKSDVRKRYSEYKKLPTKDVLTEIYNPTVNKTVSQAFKVIDALLVKYGKEQIRYITIEMPRDDNEEDEKKRIKELHAKNSQRKNDSQSYFMQKSGWSQEKFQTTIQKNRRFLAKLLYYYEQDGICAYTGLSISPELLVSDSTEIDHIIPISISLDDSINNKVLVLSKANQVKGQQTPYDAWMDGSFKKINGKFSNWDDYQKWVESRHFSHKKENNLLETRNIFDSEQVEKFLARNLNDTRYASRLVLNTLQSFFANQETKVRVVNGSFTHTLRKKWGADLDKTRETHHHHAVDATLCAVTPFVKVSRYHYAVKEETGEKVMREIDFETGEIVDEMSYREFKKSKKYERKTYQVKWPNFREQLKPVNLHPRIKFSHQVDRKANRKLSDATIYSVREKTEVKTLKSGKQKITTDEYTIGKIKDIYTVDGWEAFKKKQDKLLMKDLDEKTYERLLSIAETTPDFQEVEEKNGKVKRVKRSPFAVYCEENDIPAIRKYAKKNNGPLIRSLKYYDGKLNKHINITKDSQGRPVEKTKNGRKVTLQSLKPYRYDIYQDLETKAYYTVQLYYSDLRFVEGKYGITEKEYMKKVAEQTKGQVVRFCFSLQKNDGLEIEWKDSQRYDVRFYNFQSANSINFKGLEQEMMPAENQFKQKPYNNGAINLNIAKYGKEGKKLRKFNTDILGKKHYLYYEKEPKNIIK

SEQ ID NO: 195 - protein, 1150 aa, Enterococcus faecalis
  Enterococcus faecalis TX0012
MYSIGLDLGISSVGWSVIDERTGNVIDLGVRLFSAKNSEKNLERRTNRGGRRLIRRKTNRLKDAKKILAAVGFYEDKSLKNSCPYQLRVKGLTEPLSRGEIYKVTLHILKKRGISYLDEVDTEAAKESQDYKEQVRKNAQLLTKYTPGQIQLQRLKENNRVKTGINAQGNYQLNVFKVSAYANELATILKTQQAFYPNELTDDWIALFVQPGIAEEAGLIYRKRPYYHGPGNEANNSPYGRWSDFQKTGEPATNIFDKLIGKDFQGELRASGLSLSAQQYNLLNDLTNLKIDGEVPLSSEQKEYILTELMTKEFTRFGVNDVVKLLGVKKERLSGWRLDKKGKPEIHTLKGYRNWRKIFAEAGIDLATLPTETIDCLAKVLTLNTEREGIENTLAFELPELSESVKLLVLDRYKELSQSISTQSWHRFSLKTLHLLIPELMNATSEQNTLLEQFQLKSDVRKRYSEYKKLPTKDVLAEIYNPTVNKTVSQAFKVIDALLVKYGKEQIRYITIEMPRDDNEEDEKKRIKELHAKNSQRKNDSQSYFMQKSGWSQEKFQTTIQKNRRFLAKLLYYYEQDGICAYTGLPISPELLVSDSTEIDHIIPISISLDDSINNKVLVLSKANQVKGQQTPYDAWMDGSFKKINGKFSNWDDYQKWVESRHFSHKKENNLLETRNIFDSEQVEKFLARNLNDTRYASRLVLNTLQSFFTNQETKVRVVNGSFTHTLRKKWGADLDKTRETHHHHAVDATLCAVTSFVKVSRYHYAVKEETGEKVMREIDFETGEIVNEMSYWEFKKSKKYERKTYQVKWPNFREQLKPVNLHPRIKFSHQVDRKANRKLSDATIYSVREKTEVKTLKSGKQKITTDEYTIGKIKDIYTLDGWEAFKKKQDKLLMKDLDEKTYERLLSIAETTPDFQEVEEKNGKVKRVKRSPFAVYCEENDIPAIQKYAKKNNGPLIRSLKYYDGKLNKHINITKDSQGRPVEKTKNGRKVTLQSLKPYRYDIYQDLETKAYYTVQLYYSDLRFVEGKYGITEKEYMKKVAEQTKGQVVRFCFSLQKNDGLEIEWKDSQRYDVRFYNFQSANSINFKGLEQEMMPAENQFKQKPYNNGAINLNIAKYGKEGKKLRKFNTDILGKKHYLFYEKEPKNIIK

SEQ ID NO: 196 - protein, 1150 aa, Enterococcus faecalis; identical to SEQ ID NO: 195
  Enterococcus faecalis TX0012

SEQ ID NO: 197 - protein, 1337 aa, Enterococcus faecalis
  Enterococcus faecalis TX0470
MKKDYVIGLDIGTNSVGWAVMTEDYQLVKKKMPIYGNTEKKKIKKNFWGVRLFEEGHTAEDRRLKRTARRRISRRRNRLRYLQAFFEEAMTALDENFFARLQESFLVPEDKKWHRHPIFAKLEDEVAYHETYPTIYHLRKKLADSSEQADLRLIYLALAHIVKYRGHFLIEGKLSTENISVKEQFQQFMIIYNQTFVNGESRLVSTPLPESVLIEEELTEKASRTKKSEKVLQQFPQEKANGLFGQFLKLMVGNKADFKKVFGLEEEAKITYASESYEEDLEGILAKVGDEYSDVFLAAKNVYDAVELSTILADSDKKSHAKLSSSMIVRFTEHQEDLKNFKRFIRENCPDEYDNLFKNEQKDGYAGYITHAGKVSQLKFYQYVKKIIQDIAGAEYFLEKIAQENFLRKQRTFDNGVIPHQIHLAELQAIIHRQAAYYPFLKENQEKIEQLVTFRIPYYVGPLSKGDASTFAWLKRQSEEPIRPWNLQETVDLDQSATAFIERMTNFDTYLPSEKVLPKHSLLYEKFMVFNELTKISYTDDRGIKANFSGKEKEKIFDYLFKTRRKVKKKDIIQFYRNEYNTEIVTLSGLEEDQFNASFSTYQDLLKCGLTRAELDHPDNAEKLEDIIKILTIFEDRQRIRTQLSTFKGQFSAEVLKKLERKHYTGWGRLSKKLINGIYDKESGKTILDYLVKDDGVSKHYNRNFMQLINDSQLSFKNAIQKAQSSEHEETLSETVNELAGSPAIKKGIYQSLKIVDELVAIMGYAPKRIVVEMARENQTTSTGKRRSIQRLKIVEKAMAEIGSNLLKEQPTTNEQLRDTRLFLYYMQNGKDMYTGDELSLHRLSHYDIDHIIPQSFMKDDSLDNLVLVGSTENRGKSDDVPSKEVVKDMKAYWEKLYAAGLISQRKFQRLTKGEQGGLTLEDKAHFIQRQLVETRQITKNVAGILDQRYNAKSKEKKVQIITLKASLTSQFRSIFGLYKVREVNDYHHGQDAYLNCVVATTLLKVYPNLAPEFVYGEYPKFQTFKENKATAKAIIYTNLLRFFTEDEPRFTKDGEILWSNSYLKTIKKELNYHQMNIVKKVEVQKGGFSKESIKPKGPSNKLIPVKNGLDPQKYGGFDSPIVAYTVLFTHEKGKKPLIKQEILGITIMEKTRFEQNPILFLEEKGFLRPRVLMKLPKYTLYEFPEGRRRLLASAKEAQKGNQMVLPEHLLTLLYHAKQCLLPNQSESLAYVEQHQPEFQEILERVVDFAEVHTLAKSKVQQIVKLFEANQTADVKEIAASFIQLMQFNAMGAPSTFKFFQKDIERARYTSIKEIFDATIIYQSTTGLYETRRKVVD

SEQ ID NO: 198 - protein, 1150 aa, Enterococcus faecalis
  Enterococcus faecalis TX1342
MYSIGLDLGVSSVGWSVIDERTGNVIDLGVRLFSAKNSEKNLERRTNRGGRRLIRRKTNRLKDAKKILAAVGFYEDKSLKNSCPYQLRVKGLTEPLSKGEIYKVTLHILKKRGISYLDEDDTEAAKESQDYKEQVRENAQLLTKYTPGQIQLQRLKENNRVKTGINAQGNYQLNVFKVSAYANELATILKTQQAFYPNELTDDWIALFVQPGIAEEAGLIYRKRPYYHGPGNEANNSPYGRWSDFKKTGQPATNIFDKLIGKDFQGELRASGLSLSAQQYNLLNDLTNLKIDGEIPLSPEQKEYILAELMTKEFTRFGINDVAKLLGVKKERLSGWRLDKKGKPEIHTLKGYRNWRKIFAESGIDLATLPTETIDCLAKVLTLNTEREGIENTLAFELPELAESVKLLVLDRYKELSQSVSTQAWHRFSLKTLHLLIPELMNATSEQNTLLEQFQLKSDVRKRYSEYKKLPTKDVLTEIYNPTVNKTVSQAFKVIDALLVKYGKEQIRYITIEMPRDDNEEDEKKRIKELHAKNSQRKNDSQSYFMQKSGWSQEKFQTTIQKNRRFLAKLLYYYEQDGICAYTGLSISPELLVSDSTEIDHIIPISISLDDSINNKVLVLSKANQVKGQQTPYDAWMDGSFKKINGKFSNWDDYQKWVESRHFSHKKENNLLETRNIFDSEQVEKFLARNLNDTRYASRLVLNTLQSFFANQETKVRVVNGSFTHTLRKKWGADLDKTRETHHHHAVDATLCAVTPFVKVSRYHYAVKEETGEKVMREIDFETGEIVDEMSYREFKKSKKYERKTYQVKWPNFREQLKPVNLHPRIKFSHQVDRKANRKLSDATIYSVREKTEVKTLKSGKQKITTDEYTIGKIKDIYTVDGWEAFKKKQDKLLMKDLDEKTYERLLSIAETTPDFQEVEEKNGKVKRVKRSPFAVYCEENDIPAIRKYAKNNNGPLIRSLKYYDGKLNKHINITKDSQGRPVEKTKNGRKVTLQSLKPYRYDIYQDLETKAYYTVQLYYSDLRFVEGKYGITEKEYMKKVAEQTKGQVVRFCFSLQKNDGLEIEWKDSQCYDVRFYNFQSANSINFKGLEQEMMPAENQFKQKPYNNGAINLNIAKYGKEGKKLRKFNTDILGKKHYLYYEKEPKNIIK

SEQ ID NO: 199 - protein, 1337 aa, Enterococcus faecalis
  Enterococcus faecalis TX4244
MKKDYVIGLDIGTNSVGWAVMTEDYQLVKKKMPIYGNTEKKKIKKNFWGVRLFEEGHTAEDRRLKRTARRRISRRRNRLRYLQAFFEEAMTDLDENFFARLQESFLVPEDKKWHRHPIFAKLEDEVAYHETYPTIYHLRKKLADSSEQADLRLIYLALAHIVKYRGHFLIEGKLSTENISVKEQFQQFMIIYNQTFVNGESRLVSAPLPESVLIEEELTEKASRTKKSEKVLQQFPQEKANGLFGQFLKLMVGNKADFKKVFGLEEEAKITYASESYEEDLEGILAKVGDEYSDVFLAAKNVYDAVELSTILADSDKKSHAKLSSSMIVRFTEHQEDLKKFKRFIRENCPDEYDNLFKNEQKDGYAGYIAHAGKVSQLKFYQYVKKIIQDIAGAEYFLEKIAQENFLRKQRTFDNGVIPHQIHLAELQAIIHRQAAYYPFLKENQEKIEQLVTFRIPYYVGPLSKGDASTFAWLKRQSEEPIRPWNLQETVDLDQSATAFIERMTNFDTYLPSEKVLPKHSLLYEKFMVFNELTKISYTDDRGIKANFSGKEKEKIFDYLFKTRRKVKKKDIIQFYRNEYNTEIVTLSGLEEDQFNASFSTYQDLLKCGLTRAELDHPDNAEKLEDIIKILTIFEDRQRIRTQLSTFKGQFSAEVLKKLERKHYTGWGRLSKKLINGIYDKESGKTILGYLIKDDGVSKHYNRNFMQLINDSQLSFKNAIQKAQSSEHEETLSETVNELAGSPAIKKGIYQSLKIVDELVAIMGYAPKRIVVEMARENQTTSTGKRRSIQRLKIVEKAMAEIGSNLLKEQPTTNEQLRDTRLFLYYMQNGKDMYTGDELSLHRLSHYDIDHIIPQSFMKDDSLDNLVLVGSTENLGKSDDVPSKEVVKDMKAYWEKLYAAGLISQRKFQRLTKGEQGGLTLEDKAHFIQRQLVETRQITKNVAGILDQRYNANSKEKKVQIITLKASLTSQFRSIFGLYKVREVNDYHHGQDAYLNCVVATTLLKVYPNLAPEFVYGEYPKFQTFKENKATAKAIIYTNLLRFFTEDEPRFTKDGEILWSNSYLKTIKKELNYHQMNIVKKVEVQKGGFSKESIKPKGPSNKLIPVKNGLDPQKYGGFDSPIVAYTVLFTHEKGKKPLIKQEILGITIMEKTRFEQNPILFLEEKGFLRPRVLMKLPKYTLYEFPEGRRRLLASAKEAQKGNQMVLPEHLLTLLYHAKQCLLPNQSESLAYVEQHQPEFQEILERVVDFAEVHTLAKSKVQQIVKLFEANQTADVKEIAASFIQLMQFNAMGAPSTFKFFQKDIERARYTSIKEIFDATIIYQSTTGLYETRRKVVD

SEQ ID NO: 200 - protein, 1339 aa, Enterococcus faecium
  Enterococcus faecium 1,141,733
MKKEYTIGLDIGTNSVGWSVLTDDYRLVSKKMKVAGNTEKSSTKKNFWGVRLFDEGQTAEARRSKRTARRRLARRRQRILELQKIFAPEILKIDEHFFARLNESFLVLDEKKQSRHPVFATIKQEKSYHQTYPTIYHLRQALADSSEKADIRLVYLAMAHLLKYRGHFLIEGELNTENSSVTETFRQFLSTYNQQFSEADDKQTEKLDEAVDCSFVFTEKMSKTKKAETLLKYFPHEKSNGYLSQFIKLMVGNQGNFKNVFGLEEAKLQFSKETYEEDLEELLEKIGDDYIDLFVQAKNVYDAVLLSEILSDSTKNTRAKLSAGMIRRYDAHKEDLVLLKRFVKENLPKKYRAFFGDNSVNGYAGYIEGHATQEDFYKFVKKELTGIRGSEVFLTKIEQENFLRKQRTFDNGVIPHQIHLTELRAIIANQKKHYPFLKEEQEKLESLLTFKIPYYVGPLAKKQENSPFAWLIRKSEEKIKPWNLPEIVDMEGSAVRFIERMINTDMYMPHNKVLPKNSLLYQKFSIYNELTKVRYQDERGQMNYFSSIEKKEIFHELFEKNRKVTKKDLQEFLYLKYDIKHAELSGIEKAFNASYTTYHDFLTMSENKREMKQWLEDPELASMFEEIIKTLTVFEDREMIKTRLSHHEATLGKHIIKKLTKKHYTGWGRLSKELIQGIRDKQSNKTILDYLINDDDFPHHRNRNFMQLINDDSLSFKKEIKKAQMITDTENLEEIVKELTGSPAIKKGILQSLKIVDEIVGIMGYEPANIVVEMARENQTTGRGLKSSRPRLKALEESLKDFGSQLLKEYPTDNSSLQKDRLYLYYLQNGRDMYTGAPLDIHRLSDYDIDHIIPRSFTTDNSIDNKVLVSSKENRLKKDDVPSEKVVKKMRSFWYDLYSSKLISKRKLDNLTKIKLTEEDKAGFIKRQLVETRQITKHVAGILHHRFNKAEDTNEPIRKVRIITLKSALVSQFRNRFGIYKVREINEYHHAHDAYLNGVVALALLKKYPQLAPEFVYGEYLKFNAHKANKATVKKEFYSNIMKFFESDTPVCDENGEIFWDKSKSIAQVKKVINHHHMNIVKKTEIQKGGFSKETVEPKKDSSKLLPRKNNWDPAKYGGLGSPNVAYTVAFTYEKGKARKRTNALEGITIMEREAFEQSPVLFLKNKGYEQAEIEMKLPKYALFELENGRKRMVASNKEAQKANSFLLPEHLVTLLYHAKQYDEISHKESFDYVNEHHKEFSEVFARVLEFAGKYTLAEKNIEKLEKIYKENQTDDLAKLASSFVNLMQFNAMGAPADFKFFDVTIPRKRYTSLTEIWQSTIIHQSITGLYETRIRMGK

SEQ ID NO: 201 - protein, 1340 aa, Enterococcus faecium
  Enterococcus faecium 1,231,408
MKKEYTIGLDIGTNSVGWSVLTDDYRLVSKKMKVAGNTEKSSTKKNFWGVRLFDEGQTAEARRSKRTARRRLARRRQRILELQKIFAPEILKIDEHFFARLNESFLVPDEKKQSRHPVFATIKQEKSYHQTYPTIYHLRQALADSSEKADIRLVYLAMAHLLKYRGHFLIEGELNTENSSVTETFRQFLSTYNQQFSEAGDKQTEKLDEAVDCSFVFTEKMSKTKKAETLLKYFPHEKSNGYLSQFIKLMVGNQGNFKNVFGLEEEAKLQFSKETYEEDLEELLEKIGDDYIDLFVQAKNVYDAVLLSEILSDSTKNTRAKLSAGMIRRYDAHKEDLVLLKRFVKENLPKKYRAFFGDNSVNGYAGYIEGHATQEAFYKFVKKELTGIRGSEVFLTKIEQENFLRKQRTFDNGVIPHQIHLSELRAIIANQKKHYPFLKEEQEKLESLLTFKIPYYVGPLAKKQENSPFAWLIRKSEEKIKPWNLPEIVDMEGSAVRFIERMINTDMYMPHNKVLPKNSLLYQKFSIYNELTKVRYQDERGQMNYFSSIEKKEIFHELFEKNRKVTKKDLQEFLYLKYDIKHAELSGIEKAFNASYTTYHDFLTMSENKREMKQWLEDPELASMFEEIIKTLTVFEDREMIKTRLSHHEATLGKHIIKKLTKKHYTGWGRLSKELIQGIRDKQSNKTILDYLINDDDFPHHRNRNFMQLINDDSLSFKKEIKKAQMITDTENLEEIVKELTGSPAIKKGILQSLKIVDEIVGIMGYEPANIVVEMARENQTTGRGLKSSRPRLKALEESLKDFGSQLLKEYPTDNSSLQKDRLYLYYLQNGRDMYTGAPLDIHRLSDYDIDHIIPRSFTTDNSIDNKVLVSSKENRLKKDDVPSEKVVKKMRSFWYDLYSSKLISKRKLDNLTKIKLTEEDKAGFIKRQLVETRQITKHVAGILHHRFNKAEDTNDPIRKVRIITLKSALVSQFRNRFGIYKVREINEYHHAHDAYLNGVVALALLKKYPQLAPEFVYGEYLKFNAHKANKATVKKEFYSNIMKFFESDTPVCDENGEIFWDKSKSIAQVKKVINHHHMNIVKKTEIQKGGFSKETVEPKKDSSKLLPRKNNWDPAKYGGLGSPNVAYTVAFTYEKGKARKRTNALEGITIMEREAFEQSPVLFLKNKGYEQAEIEMKLPKYALFELENGRKRMVASNKEAQKANSFLLPEHLVTLLYHAKQYDEISHKESFDYVNEHHKEFSEVFARVLEFAGKYTLAEKNIEKLEKIYKENQTDDLAKLASSFVNLMQFNAMGAPADFKFFDVTIPRKRYTSLTEIWQSTIIHQSITGLYETRIRMGK

SEQ ID NO: 202 - protein, 1339 aa, Enterococcus faecium
  Enterococcus faecium E1133
MKKEYTIGLDIGTNSVGWSVLTDDYRLVSKKMKVAGNTEKSSTKKNFWGVRLFDEGQTAEARRSKRTARRRLARRRQRILELQKIFAPEILKIDEHFFARLNESFLVLDEKKQSRHPVFATIKQEKSYHQTYPTIYHLRQALADSSEKADIRLVYLAMAHLLKYRGHFLIEGELNTENSSVTETFRQFLSTYNQQFSEADDKQTEKLDEAVDCSFVFTEKMSKTKKAETLLKYFPHEKSNGYLSQFIKLMVGNQGNFKNVFGLEEAKLQFSKETYEEDLEELLEKIGDDYIDLFVQAKNVYDAVLLSEILSDSTKNTRAKLSAGMIRRYDAHKEDLVLLKRFVKENLPKKYRAFFGDNSVNGYAGYIEGHATQEDFYKFVKKELTGIRGSEVFLTKIEQENFLRKQRTFDNGVIPHQIHLTELRAIIANQKKHYPFLKEEQEKLESLLTFKIPYYVGPLAKKQENSPFAWLIRKSEEKIKPWNLPEIVDMEGSAVRFIERMINTDMYIPHNKVLPKNSLLYQKFSIYNELTKVRYQDERGQMNYFSSIEKKEIFHELFEKNRKVTKKDLQEFLYLKYDIKHAELSGIEKAFNASYTTYHDFLTMSENKREMKQWLEDPELASMFEEIIKTLTVFEDREMIKTRLSHHEATLGKHIIKKLTKKHYTGWGRLSKELIQGIRDKQSNKTILDYLINDDDFPHHRNRNFMQLINDDSLSFKKEIKKAQMITDTENLEEIVKELTGSPAIKKGILQSLKIVDEIVGIMGYEPANIVVEMARENQTTGRGLKSSRPRLKALEESLKDFGSQLLKEYPTDNSSLQKDRLYLYYLQNGRDMYTGAPLDIHRLSDYDIDHIIPRSFTTDNSIDNKVLVSSKENRLKKDDVPSEKVVKKMRSFWYDLYSSKLISKRKLDNLTKIKLTEEDKAGFIKRQLVETRQITKHVAGILHHRFNKAEDTNEPIRKVRIITLKSALVSQFRNRFGIYKVREINEYHHAHDAYLNGVVALALLKKYPQLAPEFVYGEYLKFNAHKANKATVKKEFYSNIMKFFESDTPVCDENGEIFWDKSKSIAQVKKVINHHHMNIVKKTEIQKGGFSEETVEPKKDSSKLLPRKNNWDPAKYGGLGSPNVAYTVAFTYEKGKARKRTNALEGITIMEREAFEQSPVLFLKNKGYEQAEIEMKLPKYALFELENGRKRMVASNKEAQKANSFLLPEHLVTLLYHAKQYDEISHKESFDYVNEHHKEFSEVFARVLEFAGKYTLAEKNIEKLEKIYKENQTDDLAKLASSFVNLMQFNAMGAPADFKFFDVTIPRKRYTSLTEIWQSTIIHQSITGLYETRIRMGK

SEQ ID NO: 203 - protein, 1340 aa, Enterococcus faecium
  Enterococcus faecium E3083
MKKEYTIGLDIGTNSVGWSVLTDDYRLVSKKMKVAGNTEKSSTKKNFWGVRLFDEGQTAEARRSKRTARRRLARRRQRILELQKIFAPEILKIDEHFFARLNESFLVLDEKKQSRHPVFATIKQEKSYHQTYPTIYHLRQALADSSEKADIRLVYLAMAHLLKYRGHFLIEGELNTENSSVTETFRQFLSTYNQQFSEADDKQTEKLDEAVDCSFVFTEKMSKTKKAETLLKYFPHEKSNGYLSQFIKLMVGNQGNFKNVFGLEEEAKLQFSKETYEEDLEELLEKIGDDYIDLFVQAKNVYDAVLLSEILSDSTKNTRAKLSAGMIRRYDAHKEDLVLLKRFVKENLPKKYRAFFGDNSVNGYAGYIEGHATQEDFYKFVKKELTGIRGSEVFLTKIEQENFLRKQRTFDNGVIPHQIHLTELRAIIANQKKHYPFLKEEQEKLESLLTFKIPYYVGPLAKKQENSPFAWLIRKSEEKIKPWNLPEIVDMEGSAVRFIERMINTDMYIPHNKVLPKNSLLYQKFSIYNELTKVRYQDERGQMNYFSSIEKKEIFHELFEKNRKVTKKDLQEFLYLKYDIKHAELSGIEKAFNASYTTYHDFLTMSENKREMKQWLEDPELASMFEEIIKTLTVFEDREMIKTRLSHHEATLGKHIIKKLTKKHYTGWGRLSKELIQGIRDKQSNKTILDYLINDDDFPHHRNRNCMQLINDDSLSFKKEIKKAQMITDTENLEEIVKELTGSPAIKKGILQSLKIVDEIVGIMGYEPANIVVEMARENQTTGRGLKSSRPRLKALEESLKDFGSQLLKEYPTDNSSLQKDRLYLYYLQNGRDMYTGAPLDIHRLSDYDIDHIIPRSFTTDNSIDNKVLVSSKENRLKKDDVPSEKVVKKMRSFWYDLYSSKLISKRKLDNLTKIKLTEEDKAGFIKRQLVETRQITKHVAGILHHRFNKAEDTNEPIRKVRIITLKSALVSQFRNRFGIYKVREINEYHHAHDAYLNGVVALALLKKYPQLAPEFVYGEYLKFNAHKANKATVKKEFYSNIMKFFESDTPVCDENGEIFWDKSKSIAQVKKVINHHHMNIVKKTEIQKGGFSKETVEPKKDSSKLLPRKNNWDPTKYGGLGSPNVAYTVAFTYEKGKARKRTNALEGITIMEREAFEQSPVLFLKNKGYEQAEIEMKLPKYALFELENGRKRMVASNKEAQKANSFLLPEHLVTLLYHAKQYDEISHKESFDYVNEHHKEFSEVFARVLEFAGKYTLAEKNIEKLEKIYKENQTDDLAKLASSFVNLMQFNAMGAPADFKFFDVTIPRKRYTSLTEIWQSTIIHQSITGLYETRIRMGK

SEQ ID NO: 204 - protein, 1340 aa, Enterococcus faecium
  Enterococcus faecium PC4.1
MKKEYTIGLDIGTNSVGWSVLTDDYRLVSKKMKVAGNTEKSSTKKNFWGVRLFDEGQTAEARRSKRTARRRLARRRQRILELQKIFAPEILKIDEHFFARLNESFLVLDEKKQSRHPVFATIKQEKSYHQTYPTIYHLRQALADSSEKADIRLVYLAMAHLLKYRGHFLIEGELNTENSSVTETFRQFLSTYNQQFSEADDKQTEKLDEAVDCSFVFTEKMSKTKKAETLLKYFPHEKSNGYLSQFIKLMVGNQGNFKNVFGLEEEAKLQFSKETYEEDLEELLEKIGDDYIDLFVQAKNVYDAVLLSEILSDSTKNTRAKLSAGMIRRYDAHKEDLVLLKRFVKENLPKKYRAFFGDNSVNGYAGYIEGHATQEDFYKFVKKELTGIRGSEVFLTKIEQENFLRKQRTFDNGVIPHQIHLTELRAIIANQKKHYPFLKEEQEKLESLLTFKIPYYVGPLAKKQENSPFAWLIRKSEEKIKPWNLPEIVDMEGSAVRFIERMINTDMYIPHNKVLPKNSLLYQKFSIYNELTKVRYQDERGQMNYFSSIEKKEIFHELFEKNRKVTKKDLQEFLYLKYDIKHAELSGIEKAFNASYTTYHDFLTMSENKREMKQWLEDPELASMFEEIIKTLTVFEDREMIKTRLSHHEATLGKHIIKKLTKKHYTGWGRLSKELIQGIRDKQSNKTILDYLINDDDFPHHRNRNFMQLINDDSLSFKKEIKKAQMITDTENLEEIVKELTGSPAIKKGILQSLKIVDEIVGIMGYEPANIVVEMARENQTTGRGLKSSRPRLKALEESLKDFGSQLLKEYPTDNSSLQKDRLYLYYLQNGRDMYTGAPLDIHRLSDYDIDHIIPRSFTTDNSIDNKVLVSSKENRLKKDDVPSEKVVKKMRSFWYDLYSSKLISKRKLDNLTKIKLTEEDKAGFIKRQLVETRQITKHVAGILHHRFNKAEDTNEPIRKVRIITLKSALVSQFRNRFGIYKVREINEYHHAHDAYLNGVVALALLKKYPQLAPEFVYGEYLKFNAHKANKATVKKEFYSNIMKFFESDTPVCDENGEIFWDKSKSIAQVKKVINHHHMNIVKKTEIQKGGFSKETVEPKKDSSKLLPRKNNWDPAKYGGLGSPNVAYTVAFTYEKGKARKRTNALEGITIMEREAFEQSPVLFLKNKGYEQAEIEMKLPKYALFELENGRKRMVASNKEAQKANSFLLPEHLVTLLYHAKQYDEISHKESFDYVNEHHKEFSEVFARVLEFAGKYTLAEKNIEKLEKIYKENQTDDLAKLASSFVNLMQFNAMGAPADFKFFDVTIPRKRYTSLTEIWQSTIIHQSITGLYETRIRMGK

SEQ ID NO: 205 - protein, 1340 aa, Enterococcus faecium
  Enterococcus faecium TX1330
MKKEYTIGLDIGTNSVGWSVLTDDYRLVSKKMKVAGNTEKSSTKKNFWGVRLFDEGQTAEARRSKRTARRRLARRRQRILELQKIFAPEILKIDEHFFARLNESFLVLDEKKQSRHPVFATIKQEKSYHQTYPTIYHLRQALADSSEKADIRLVYLAMAHLLKYRGHFLIEGELNTENSSVTETFRQFLSTYNQQFSEADDKQTEKLDEAVDCSFVFTEKMSKTKKAETLLKYFPHEKSNGYLSQFIKLMVGNQGNFKNVFGLEEEAKLQFSKETYEEDLEELLEKIGDDYIDLFVQAKNVYDAVLLSEILSDSTKNTRAKLSAGMIRRYDAHKEDLVLLKRFVKENLPKKYRAFFGDNSVNGYAGYIEGHATQEDFYKFVKKELTGIRGSEVFLTKIEQENFLRKQRTFDNGVIPHQIHLTELRAIIANQKKHYPFLKEEQEKLESLLTFKIPYYVGPLAKKQENSPFAWLIRKSEEKIKPWNLPEIVDMEGSAVRFIERMNNTDMYIPHNKVLPKNSLLYQKFSIYNELTKVRYQDERGQMNYFSSIEKKEIFHELFEKNRKVTKKDLQEFLYLKYDIKHAELSGIEKAFNASYTTYHDFLTMSENKREMKQWLEDPELASMFEEIIKTLTVFEDREMIKTRLSHHEATLGKHIIKKLTKKHYTGWGRLSKELIQGIRDKQSNKTILDYLINDDDFPHHRNRNFMQLINDDSLSFKKEIKKAQMITDTENLEEIVKELTGSPAIKKGILQSLKIVDEIVGIMGYEPANIVVEMARENQTTGRGLKSSRPRLKALEESLKDFGSQLLKEYPTDNSSLQKDRLYLYYLQNGRDMYTGAPLDIHRLSDYDIDHIIPRSFTTDNSIDNKVLVSSKENRLKKDDVPSEKVVKKMRSFWYDLYSSKLISKRKLDNLTKIKLTEEDKAGFIKRQLVETRQITKHVAGILHHRFNKAEDTNEPIRKVRIITLKSALVSQFRNRFGIYKVREINEYHHAHDAYLNGVVALALLKKYPQLAPEFVYGEYLKFNAHKANKATVKKEFYSNIMKFFESDTPVCDENGEIFWDKSKSIAQVKKVINHHHMNIVKKTEIQKGGFSKETVEPKKDSSKLLPRKNNWDPAKYGGLGSPNVAYTVAFTYEKGKARKRTNALEGITIMEREAFEQSPVLFLKNKGYEQAEIEMKLPKYALFELENGRKRMVASNKEAQKANSFLLPEHLVTLLYHAKQYDEISHKESFDYVNEHHKEFSEVFARVLEFAGKYTLAEKNIEKLEKIYKENQTDDLAKLASSFVNLMQFNAMGAPADFKFFDVTIPRKRYTSLTEIWQSTIIHQSITGLYETRIRMGK

SEQ ID NO: 206 - protein, 1340 aa, Enterococcus faecium
  Enterococcus faecium TX1337RF
MKKEYTIGLDIGTNSVGWSVLTDDYRLVSKKMKVAGNTEKSSTKKNFWGVRLFDEGQTAEARRSKRTARRRLARRRQRILELQKIFAPEILKIDEHFFARLNESFLVLDEKKQSRHPVFATIKQEKSYHQTYPTIYHLRQALADSSEKADIRLVYLAMAHLLKYRGHFLIEGELNTENSSVTETFRQFLSTYNQQFSEADDKQTEKLDEAVDCSFVFTEKMSKTKKAETLLKYFPHEKSNGYLSQFIKLMVGNQGNFKNVFGLEEEAKLQFSKETYEEDLEELLEKIGDDYIDLFVQAKNVYDAVLLSEILSDSTKNTRAKLSAGMIRRYDAHKEDLVLLKRFVKENLPKKYRAFFGDNSVNGYAGYIEGHATQEDFYKFVKKELTGIRGSEVFLTKIEQENFLRKQRTFDNGVIPHQIHLTELRAIIANQKKHYPFLKEEQEKLESLLTFKIPYYVGPLAKKQENSPFAWLIRKSEEKIKPWNLPEIVDMEGSAVRFIERMINTDMYMPHNKVLPKNSLLYQKFSIYNELTKVRYQDERGQMNYFSSIEKKEIFHELFEKNRKVTKKDLQEFLYLKYDIKHAELSGIEKAFNASYTTYHDFLTMSENKREMKQWLEDPELASMFEEIIKTLTVFEDREMIKTRLSHHEATLGKHIIKKLTKKHYTGWGRLSKELIQGIRDKQSNKTILDYLINDDDFPHHRNRNFMQLINDDSLSFKKEIKKAQMITDTENLEEIVKELTGSPAIKKGILQSLKIVDEIVGIMGYEPANIVVEMARENQTTGRGLKSSRPRLKALEESLKDFGSQLLKEYPTDNSSLQKDRLYLYYLQNGRDMYTGAPLDIHRLSDYDIDHIIPRSFTTDNSIDNKVLVSSKENRLKKDDVPSEKVVKKMRSFWYDLYSSKLISKRKLDNLTKIKLTEEDKAGFIKRQLVETRQITKHVAGILHHRFNKAEDTNEPIRKVRIITLKSALVSQFRNRFGIYKVREINEYHHAHDAYLNGVVALALLKKYPQLAPEFVYGEYLKFNAHKANKATVKKEFYSNIMKFFESDTPVCDENGEIFWDKSKSIAQVKKVINHHHMNIVKKTEIQKGGFSKETVEPKKDSSKLLPRKNNWDPAKYGGLGSPNVAYTVAFTYEKGKARKRTNALEGITIMEREAFEQSPVLFLKNKGYEQAEIEMKLPKYALFELENGRKRMVASNKEAQKANSFLLPEHLVTLLYHAKQYDEISHKESFDYVNEHHKEFSEVFARVLEFAGKYTLAEKNIEKLEKIYKENQTDDLAKLASSFVNLMQFNAMGAPADFKFFDVTIPRKRYTSLTEIWQSTIIHQSITGLYETRIRMGK

SEQ ID NO: 207 - protein, 1336 aa, Enterococcus hirae
MTKDYTIGLDIGTNSVGWAVLTDDYQLMKRKMSVHGNTEKKKIKKNFWGARLFDEGQTAEFRRTKRTNRRRLARRKYRLSKLQDLFAEELCKQDDCFFVRLEESFLVPEEKQYKPASIFPTLEEEKEYYQKYPTIYHLRQKLVDSTEKEDLRLVYLALAHLLKYRGHFLFEGDLDTENTSIEESFRVFLEQYSKQSDQPLIVHQPVLTILTDKLSKTKKVEEILKYYPTEKINSFFAQCLKLIVGNQANFKRIFDLEAEVKLQFSKETYEEDLESLLEKIGDEYLDIFLQAKKVHDAILLSEIISSTVKHTKAKLSSGMVERYERHKADLAKFKQFVKENVPQKATVFFKDTTKNGYAGYIKGKTTQEEFYKFVKKELSGVVGSEPFLEKIDQETFLLKQRTYTNGVIPHQVHLIELKAIIDQQKQHYPFLEEAGPKIIALFKFRIPYYVGPLAKEQEASSFAWIERKTAEKINPWNFSEVVDIEKSAMRFIQRMTKQDTYLPTEKVLPKNSLLYQKYMIFNELTKVSYKDERGVKQYFSGDEKQQIFKQLFQKERGKITVKKLQNFLYTHYHIENAQIFGIEKAFNASYSTYHDFMKLAKTNQKAMQEWLEQPEMEPIFEDIVKILTIFEDRQMIKHQLSKYQEVFGEKLLKEFARKHYTGWGRFSAKLIHGIRDRKTNKTILDYLINDDDVPANRNRNLMQLINDEHLSFKEEIAKATVFSKHKSLVDVIQDLPGSPAIKKGIWQSLKIVEELIAIIGYKPKNIVIEMARENQKTHRTSPRLKALENGLKQIGSTLLKEQPTDNKALQKERLYLYYLQNGRDMYTGEPLEIENLHQYEVDHIIPRSFIVDNSIDNKVLVASKQNQKKRDDVPKKQIVNEQRIFWNQLKEAKLISPKKYAYLTKIELTPEDKARFIQRQLVETRQITKHVANILHQSFNQEEEGTDCDGVQIITLKATLTSQFRQTFGLYKVREINPHHHAHDAYLNGFIANVLLKRYPKLAPEFVYGKYVKYSLARENKATAKKEFYSNILKFLESDEPFCDENGEIYWEKSHHLPRIKKVLSSHQVNVVKKVEQQKGGFYKETVNSKEKPDKLIERKNNWDVTKYGGFGSPVIAYAIAFVYAKGKTQKKTRAIEGITIMEQAAFEKDPTTFLKEKGFPQVTEFIKLPKYTLFEFDNGRRRFLASHKESQKGNPFILSDQLVTLLYHAQHYDKITYQESFDYVNTHLSDFSAILTEVLAFAEKYTLADKNIERIQELYEENKYGETSMIAQSFLQLLQFNAIGAPADFKFFGVTIPRKRYTSLTEIWDATIIYQSVTGLYETRIRMGDLWAGEQ

SEQ ID NO: 208 - protein, 1330 aa, Enterococcus italicus
  Enterococcus italicus DSM 15952
MKNDYTIGLDIGTNSVGYSVVTDDYKVISKKMNVFGNTEKKSIKKNFWGVRLFESGQTAQEARMKRTSRRRIARRKNRICYLQEIFQPEMNHLDNNFFYRLNESFLVADDAKYDKHPIFGTLDEEIHFHEQFPTIYHLRKYLADGDEKADLRLVYLAIAHIIKFRGNFLIEGELNTENNSVIELSKVFVQLYNQTLSELEGFQFIDESIDFSEVLTQQLSKSERADNVLKLFPDEKGTGIFAQFIKLIVGNQGNFKKVFQLEEDQKLQLSTDDYEENIENLLAIIGDEYGDIFVAAQNLYQAILLAGILTSTEKTRAKLSASMIQRYEEHAKDLKLLKRFVKEHIPDKYAEIFNDATKNGYAGYIDGKTKEEEFYKYLKTTLVQKSGYQYFIEKIEQENFLRKQRIYDNGVIPHQVHAEELRAILRKQEKYYSFLKENHEKIEQIFKVRIPYYVGPLAKHNEQSRFAWNIRKSDEPIRPWNMNDVVDENASAVAFIERMTIKDIYLNENVLPRHSLIYEKFTVFNELTKVLYADDRGVFQRFSAEEKEDIFEKLFKSERKVTKKKLENYLRIELSISSPSVKGIEEQFNANFGTYLDLKKFDELHPYLDDEKYQDTLEEVIKVLTVFEDRSMIQNQLEQLPLNLSTKTIKALSRRKYTGWGRLSARLIDGIHDKNSGKTILDYLIEDESDSYIVNRNFMQLINDDHLSFKKIIEDSQPYKEQQSAEEIVSELSGSPAIKKGILQSLKIVDELVAIMGYKPKNIVVEMARENQTTGRGKQNSKPRLKGIENGLKEFSDSVLKGSSIDNKQLQNDRLYLYYLQNGKDMYTGHELDIDHLSTYDIDHIIPQSFLTDNSIDNRVLTTSKSNRGKSDNVPSEEVVRKMDRFWRKLLNAKLISERKYTNLTKKELTESDKAGFLKRQLVETRQITKHVATILDSKFNEDSNNRDVQIITLKSALVSEFRKTFNLYKVREINDLHHAHDAYLNAVVALSLLRVYPQLKPEFVYGEYGKNSIHDQNKATIKKQFYSNITRYFASKDYIINDDGEILWNKQETIAQVIKTLGMHQVNVVKKVEIQKGGFSKESIQPKGESQKLIRRKQQWNTKKYGGFDSPVVAYAILLSFDKGKRKARSFKIVGITIQDRESFEGNPILYLSKKDYHNPKVEAILPKYSLFEFENGRRRMVASASETQKGNQLIIPGHLMELLYHSKKIINGKNSDSVSYIQNNKEKFREIFEYIVDFSSKYISADANLNKIEKIFENNFHKASEQEIAKSFINLLTFTAMGAPADFEFFGEKIPRKRYVSISEIIDAVFIHQSITGLYETRVRLTEV

SEQ ID NO: 209 - protein, 1096 aa, Eubacterium dolichum
  Eubacterium dolichum DSM 3991
MMEVFMGRLVLGLDIGITSVGFGIIDLDESEIVDYGVRLFKEGTAAENETRRTKRGGRRLKRRRVTRREDMLHLLKQAGIISTSFHPLNNPYDVRVKGLNERLNGEELATALLHLCKHRGSSVETIEDDEAKAKEAGETKKVLSMNDQLLKSGKYVCEIQKERLRTNGHIRGHENNFKTRAYVDEAFQILSHQDLSNELKSAIITIISRKRMYYDGPGGPLSPTPYGRYTYFGQKEPIDLIEKMRGKCSLFPNEPRAPKLAYSAELFNLLNDLNNLSIEGEKLTSEQKAMILKIVHEKGKITPKQLAKEVGVSLEQIRGFRIDTKGSPLLSELTGYKMIREVLEKSNDEHLEDHVFYDEIAEILTKTKDIEGRKKQISELSSDLNEESVHQLAGLTKFTAYHSLSFKALRLINEEMLKTELNQMQSITLFGLKQNNELSVKGMKNIQADDTAILSPVAKRAQRETFKVVNRLREIYGEFDSIVVEMAREKNSEEQRKAIRERQKFFEMRNKQVADIIGDDRKINAKLREKLVLYQEQDGKTAYSLEPIDLKLLIDDPNAYEVDHIIPISISLDDSITNKVLVTHRENQEKGNLTPISAFVKGRFTKGSLAQYKAYCLKLKEKNIKTNKGYRKKVEQYLLNENDIYKYDIQKEFINRNLVDTSYASRVVLNTLTTYFKQNEIPTKVFTVKGSLTNAFRRKINLKKDRDEDYGHHAIDALIIASMPKMRLLSTIFSRYKIEDIYDESTGEVFSSGDDSMYYDDRYFAFIASLKAIKVRKFSHKIDTKPNRSVADETIYSTRVIDGKEKVVKKYKDIYDPKFTALAEDILNNAYQEKYLMALHDPQTFDQIVKVVNYYFEEMSKSEKYFTKDKKGRIKISGMNPLSLYRDEHGMLKKYSKKGDGPAITQMKYFDGVLGNHIDISAHYQVRDKKVVLQQISPYRTDFYYSKENGYKFVTIRYKDVRWSEKKKKYVIDQQDYAMKKAEKKIDDTYEFQFSMHRDELIGITKAEGEALIYPDETWHNFNFFFHAGETPEILKFTATNNDKSNKIEVKPIHCYCKMRLMPTISKKIVRIDKYATDVVGNLYKVKKNTLKFEFD

SEQ ID NO: 210 - protein, 1114 aa, Eubacterium rectale
MNYTEKEKLFMKYILALDIGIASVGWAILDKESETVIEAGSNIFPEASAADNQLRRDMRGAKRNNRRLKTRINDFIKLWENNNLSIPQFKSTEIVGLKVRAITEEITLDELYLILYSYLKHRGISYLEDALDDTVSGSSAYANGLKLNAKELETHYPCEIQQERLNTIGKYRGQSQIINENGEVLDLSNVFTIGAYRKEIQRVFEIQKKYHPELTDEFCDGYMLIFNRKRKYYEGPGNEKSRTDYGRFTTKLDANGNYITEDNIFEKLIGKCSVYPDELRAAAASYTAQEYNVLNDLNNLTINGRKLEENEKHEIVERIKSSNTINMRKIISDCMGENIDDFAGARIDKSGKEIFHKFEVYNKMRKALLEIGIDISNYSREELDEIGYIMTINTDKEAMMEAFQKSWIDLSDDVKQCLINMRKTNGALFNKWQSFSLKIMNELIPEMYAQPKEQMTLLTEMGVTKGTQEEFAGLKYIPVDVVSEDIFNPVVRRSVRISFKILNAVLKKYKALDTIVIEMPRDRNSEEQKKRINDSQKLNEKEMEYIEKKLAVTYGIKLSPSDFSSQKQLSLKLKLWNEQDGICLYSGKTIDPNDIINNPQLFEIDHIIPRSISFDDARSNKVLVYRSENQKKGNQTPYYYLTHSHSEWSFEQYKATVMNLSKKKEYAISRKKIQNLLYSEDITKMDVLKGFINRNINDTSYASRLVLNTIQNFFMANEADTKVKVIKGSYTHQMRCNLKLDKNRDESYSHHAVDAMLIGYSELGYEAYHKLQGEFIDFETGEILRKDMWDENMSDEVYADYLYGKKWANIRNEVVKAEKNVKYWHYVMRKSNRGLCNQTIRGTREYDGKQYKINKLDIRTKEGIKVFAKLAFSKKDSDRERLLVYLNDRRTFDDLCKIYEDYSDAANPFVQYEKETGDIIRKYSKKHNGPRIDKLKYKDGEVGACIDISHKYGFEKGSKKVILESLVPYRMDVYYKEENHSYYLVGVKQSDIKFEKGRNVIDEEAYARILVNEKMIQPGQSRADLENLGFKFKLSFYKNDIIEYEKDGKIYTERLVSRTMPKQRNYIETKPIDKAKFEKQNLVGLGKTKFIKKYRYDILGNKYSCSEEKFTSFC

SEQ ID NO: 211 - protein, 1391 aa, Eubacterium sp.
  Eubacterium sp. AS15
MENKQYYIGLDVGTNSVGWAVTDTSYNLLRAKGKDMWGARLFDEAKTAVERRTKRTSRRRSEREKARKAMLKELFADEINKVDPNFFIRLEESKFFLDDRSENNRQRYTLFNDAKFTDKDYYEKYKTIFHLRSALINSDEKFDVRLVFLAILNLFSHRGHFLNASLKGDGEIQGVDIFYNDLYEVCEEFEIDLPQISNIDNFEKILSQKGKSRTKILEELSEELSISKKEKIKYSLLKLICGMKIKVVDIYADEDIQEDDKKKDLGFRESDYEKSSLEVKEIIGDDHFELIERAKAVHDIGLLANIIGNSKYLCEARVEAYDNHHKDLQKIKELLKKYDIKAYTDMFRKMTDKNYSAYVGSVNSNIAKERRSVDNRKIEDLYEYIKKIALKNISDDNEDKIEILKKIETGEFLKKQLTASNGVIPNQLQSRELRAILKKAENYLPFLKEKGEKNLTVSEMIIQLFEFQIPYYVGPLDKNPKKDKNANSWAVIPSGGRILPWNFEDKVDVKGSRKEFIEKMVRKCTYLSEEHTLPKQSLLYEKFMVLNEINNIKIDGEKISVEAKQKIYNDLFMKGKKVSQKAIKQELISLNIMSKDSVLSGIDTVCNAYLSSIAKFRGVFDENVNNQSTIDMIEDIIFLKTVYSDEKRFVKEEIVEKYGDEIDKDKIKRILGFKFSNWGNISKSFLELEGADVGTGEIRSIIQSLWETNFNLMELLSSRFTYMDELEKRVKKLEKPLSEWTIEDLDDMYLSSPVKRMIWQSMKIVDEIQTVIGYAPKRIFVEMTRSEGEKVRTKSRKDRLKELYSAIKEDSKQWVKELDAKDESYFRSKKMYLYYLQKGRCMYSGEVIELDKLMDDNLYDIDHIYPRSFVKDDSLDNLVLVKKEINNRKQNDPITPQIQASCQGFWKVLHEQGFISNEKYSRLTRKTQEFSDEEKLSFINRQIVETGQATKCMAQILQKSMGEDVDVVFSKARLVSEFRHKFELFKSRLINDFHHANDAYLNIVVGNSYFVKFTRNPANFIKDARKNPDNPAYKYHMDRFFERDVKSKSEVAWIGQSEGNAGTIAIVKKTMSKNSPLITKKVEEGHGSITKETIVGVKEIKFGRNKVEKADKTPKKANLQAYRPIKTSDERLCNILRYGGRTSISISGYCLVEYVKKRKTIRSLEAIPVYLGRKDSLSEEKLLNYFRYNLNDGGKDSVSDIRLCLPFISTNSLVKIDGYLYYLGGKNDDRIQLYNAYQLKMKKEEVEYIRKIEKAVSMSKFDEIDREKNPVLTEEKNIELYNKIQDKFENTVFSKRMSLVKYNKKDLSFGDFLKNKKSKFEEIDLEKQCKVLYNIIFNLSNLKEVDLSDIGGSKSTGKCRCKKNITNYKEFKLIQQSITGLYSCEKDLMTI

SEQ ID NO: 212 - protein, 1107 aa, Eubacterium ventriosum
  Eubacterium ventriosum ATCC 27560
MGYTVGLDIGVASVGVAVLDENDNIVEAVSNIFDEADTSNNKVRRTLREGRRTKRRQKTRIEDFKQLWETSGYIIPHKLHLNIIELRNKGLTELLSLDELYCVLLSMLKHRGISYLEDADDGEKGNAYKKGLAFNEKQLKEKMPCEIQLERMKKYGKYHGEFIIEINDEKEYQSNVFTTKAYKKELEKIFETQRCNGNKINTKFIKKYMEIYERKREYYIGPGNEKSRTDYGIYTTRTDEEGNFIDEKNIFGKLIGKCSVYPEEYRASSASYTAQEFNLLNDLNNLKINNEKLTEFQKKEIVEIIKDASSVNMRKIIKKVIDEDIEQYSGARIDKKGKEIYHTFEIYRKLKKELKTINVDIDSFTREELDKTMDILTLNTERESIVKAFDEQKFVYEENLIKKLIEFRKNNQRLFSGWHSFSYKAMLQLIPVMYKEPKEQMQLLTEMNVFKSKKEKYVNYKYIPENEVVKEIYNPVVVKSIRTTVKILNALIKKYGYPESVVIEMPRDKNSDDEKEKIDMNQKKNQEEYEKILNKIYDEKGIEITNKDYKKQKKLVLKLKLWNEQEGLCLYSGKKIAIEDLLNHPEFFEIDHIIPKSISLDDSRSNKVLVYKTENSIKENDTPYHYLTRINGKWGFDEYKANVLELRRRGKIDDKKVNNLLCMEDITKIDVVKGFINRNLNDTRYASRVVLNEMQSFFESRKYCNTKVKVIRGSLTYQMRQDLHLKKNREESYSHHAVDAMLIAFSQKGYEAYRKIQKDCYDFETGEILDKEKWNKYIDDDEFDDILYKERMNEIRKKIIEAEEKVKYNYKIDKKCNRGLCNQTIYGTREKDGKIHKISSYNIYDDKECNSLKKMINSGKGSDLLMYNNDPKTYRDMLKILETYSSEKNPFVAYNKETGDYFRKYSKNHNGPKVEKVKYYSGQINSCIDISHKYGHAKNSKKVVLVSLNPYRTDVYYDNDTGKYYLVGVKYNHIKCVGNKYVIDSETYNELLRKEGVLNSDENLEDLNSKNITYKFSLYKNDIIQYEKGGEYYTERFLSRIKEQKNLIETKPINKPNFQRKNKKGEWENTRNQIALAKTKYVGKLVTDVLGNCYIVNMEKFSLVVDK

SEQ ID NO: 213 - protein, 1391 aa, Eubacterium yurii
  Eubacterium yurii subsp. margaretiae ATCC 43715
MENKQYYIGLDVGTNSVGWAVTDTSYNLLRAKGKDMWGARLFEKANTAAERRTKRTSRRRSEREKARKAMLKELFADEINRVDPSFFIRLEESKFFLDDRSENNRQRYTLFNDATFTDKDYYEKYKTIFHLRSALINSDEKFDVRLVFLAILNLFSHRGHFLNASLKGDGDIQGMDVFYNDLVESCEYFEIELPRITNIDNFEKILSQKGKSRTKILEELSEELSISKKDKSKYNLIKLISGLEASVVELYNIEDIQDENKKIKIGFRESDYEESSLKVKEIIGDEYFDLVERAKSVHDMGLLSNIIGNSKYLCEARVEAYENHHKDLLKIKELLKKYDKKAYNDMFRKMTDKNYSAYVGSVNSNIAKERRSVDKRKIEDLYKYIEDTALKNIPDDNKDKIEILEKIKLGEFLKKQLTASNGVIPNQLQSRELRAILKKAENYLPFLKEKGEKNLTVSEMIIQLFEFQIPYYVGPLDKNPKKDNKANSWAKIKQGGRILPWNFEDKVDVKGSRKEFIEKMVRKCTYISDEHTLPKQSLLYEKFMVLNEINNIKIDGEKISVEAKQKIYNDLFVKGKKVSQKDIKKELISLNIMDKDSVLSGTDTVCNAYLSSIGKFTGVFKEEINKQSIVDMIEDIIFLKTVYGDEKRFVKEEIVEKYGDEIDKDKIKRILGFKFSNWGNLSKSFLELEGADVGTGEVRSIIQSLWETNFNLMELLSSRFTYMDELEKRVKKLEKPLSEWTIEDLDDMYLSSPVKRMIWQSMKIVDEIQTVIGYAPKRIFVEMTRSEGEKVRTKSRKDRLKELYNGIKEDSKQWVKELDSKDESYFRSKKMYLYYLQKGRCMYSGEVIELDKLMDDNLYDIDHIYPRSFVKDDSLDNLVLVKKEINNRKQNDPITPQIQASCQGFWKILHDQGFMSNEKYSRLTRKTQEFSDEEKLSFINRQIVETGQATKCMAQILQKSMGEDVDVVFSKARLVSEFRHKFELFKSRLINDFHHANDAYLNIVVGNSYFVKFTRNPANFIKDARKNPDNPVYKYHMDRFFERDVKSKSEVAWIGQSEGNSGTIVIVKKTMAKNSPLITKKVEEGHGSITKETIVGVKEIKFGRNKVEKADKTPKKPNLQAYRPIKTSDERLCNILRYGGRTSISISGYCLVEYVKKRKTIRSLEAIPVYLGRKDSLSEEKLLNYFRYNLNDGGKDSVSDIRLCLPFISTNSLVKIDGYLYYLGGKNDDRIQLYNAYQLKMKKEEVEYIRKIEKAVSMSKFDEIDREKNPVLTEEKNIELYNKIQDKFENTVFSKRMSLVKYNKKDLSFGDFLKNKKSKFEEIDLEKQCKVLYNIIFNLSNLKEVDLSDIGGSKSTGKCRCKKNITNYKEFKLIQQSITGLYSCEKDLMTI

SEQ ID NO: 214 - protein, 1142 aa, Facklamia hominis
  Facklamia hominis CCUG 36813
MYSVGLDIGIASCGYSIINDVNGNIVELGTLLFKSRNSDNNEERRTNRGSRRLINRRRTRLDDGKKLLAEKGFKQDSKLKHVCPYELRVKGLHEKLTQGEIYKVVLHILKKRGISYLDESDENSSGIDGASYKDQVNLNLNLQKELTPGQIQLKRLKENGRIKSGVTFENGYQLNVFSVSAYANELNKILTKQSEYYSEIDQIWIDRFTKNGYRKEAGLVYRKRPYYDGPGNEKNNSIYGRWANFKEDGHPKENIFDQLIGLDSVDSTQVRASASTLTAQKYNLLNDLNNLTIIEDDRKFTTDEKVSIINYLMTQDITRFGPKELAKFYQLEVDQIRGWRIDNKGNPEIHSLKVYRDWKKIFNTSSIDLTSIQTWVVDELANVITLNTEIPSTLATLKIKIPDIDQQILNFVENNFYELKKKTSKNSWHSFSLKTLNILIPELLNTSEEQNTILERLNLKFDLKNKYAEKNQIPVKELLEQIYNPTVTKSVHQSIKLFNEIIEKYGKNNISYVTIEMPRDKNDQDQKDTIKRINKLNSERKNDSEKYFLERSGWDTIRFESALKKPRFAEKLLFYYEQKGKCAYSGQDILAESLLNESCEVDHIIPLSISFDDSIHNKVLVTASSNQEKGQRTPYMAFIDGAKLGQSWDDFVAWVNSCGFHRKKVQNLLYEENIFNPDVQRGFVSRNLNDTRYASRIVLNAIQSFFYKQKDLTKVKVVNGSFTHTLRKKWGSSLDKNRDTYHHHAVDATLCAVTPFINIVKYEFFEEDGIKYMVDLTTGEKVAYSDYKKMKFYDKRAYVPIWDGFIKQLTPANLYPKIKFSHQVDSKWNRKISDATIYSTRKIVETKINKKGVAKETVKDIVIDKIKDIYTPEGWRKFKEKQDKLLMKNFDEKTYNKLIKIAKEYPEKKEVQTSNGKVSLVEVSPFKMYCEEQNVPAIRKYSKKGNGPYIRSLKFYDKELGKHINITKDSYGNDIERTIRNKKIILKNQNSWRTDVYYNSVNNCYELLGIKYCHLKFYRGKYGIPKSIYDELKKEDEISSESVFKFSLYRHDRVRFEKDGEYIEALFGSKNESNKNYLELSPIDKNKWLSKENVKFFGEVAASGRFIKGLKPGIKVIKQSTDYMGHVYAIHQEKLKFVLSDA

SEQ ID NO: 215 - protein, 1512 aa, Fibrobacter succinogenes
MKKILGLDLGTNSIGWAVVNADEITRDDGSRYLKPNGISAAGSRIIPMSADILGDFEKGNSISQTAERTRMRMARRLHERALLRRERLLRVLNLLDFLPKHFADKIDRYGKFTDDSEPKLAWRKNTEGKYEFIFQDAFNEMLAEFKDKQPEIVEEGKKIPYDWTIYYLRKKALEKALSKEELSWILLQFNQKRGYYQLRGEEEEIPQDKKIEYLAQKVVKVEATDQKKGDDVWYNVYLENGMIYRRTSKAPLDWEGKVKEFIVTTEVENDGETPKKDKEGNIKRSFRAPKEDDWTLLKKKTEADIENSHKTVGCYIYDSLLNNPKQKIIGKLVRTVERKFYKEELTQILKKQVELIPELRDDNLYKQCIEELYPINEAHRNTIAKTDFANLFINDILFYQRPLKSKKSQIDNCPYEERIFIDSKTGEKKKVPVKCIAKSNPLFQEFRLWQFIQNLRIYQREKEIDGKLLTDIDITSECLKSEEDYVRLFDWLNDRETIEQEDLLKHLFNTKKSKNKENPYRWNYVEDKVYPCNETRATILKGFSKCGINASVLSPELEMALWHILYSVEDKKEIETALTHFAQKQGWNDDFAKVFSKAKPFKKDYGSYSEKAIKKLLSLMRMGKYWNQDNIDKNTLDRIDKIINGEYDEKISNRVRDNAINLKDISDFRGLPVWLACYIVYDRHSEAKDCTKWNSPEEIDSYLKKFKQHSLRNPIVEQVVTETLRTVRDIWIQEEQIDEIHLELGRDLKNPADKRKKMSENILKNENTNLRIKAMLMEFMNPSMGIENVRPYSPSQQDILRIYEENALDNLTKDDKDFDFISKISKQAQPSKTDIIRYKCWLEQKYRSPYTGKTISLSKLFTPAYEIEHVIPQSLYFDDSFSNKVICEAEVNKLKDRQLGYKFIAEHHGEKVQLSQGEVVEILSVDAYEKFVKENYANNRIKMKKLLMESIPDEFIERQLNDSRYISKVVKGLLSNIVREKIDDENYEPEAVSKNLISCNGAITDRLKKDWGMNDVWNSIILPRFIRMNQITGKDCFTTTNAEGHLIPQMPLELQKGFNKKRIDHRHHAMDAIVIACTTRDHVNLLNNEAAHSKFNATRYQLQRKLRRFEKAVIDGKEREVAKEFLKPWDSFSSDSKNILENIIVSFKQNQRVINKTTNAFLHFDENGKKTFIKQGKGDSWAIRKSMHKDTVFGEINLRKVRSVSLNEAIKVPERVLNKKIKEKILELKNNKIDAKNIKKYIEENHTGGYGIDSSKIDVFYFTKETKERFFATRKTLDTSFNQAKIKDSIADSGIQKILLAHLKSKNGDAEQAFSPDGIDEMNKNIVELNNGKFHQPILKVRVYEKADKFAVGQKGNKKVKFVEAAKGTNLFFAIFEKDGKRSYLTIPLNVMIDCQKQYGNQWKNNIEAYLKEKELVEKDVKLQFILSPNDLVYLPTEGSIDKKRIYKVVSFTNNRLYAIPYAIAKSIVDKNEFTQLNKIEFTDNKESIKDACVPVIIDRLGNVIEFNGKRL

SEQ ID NO: 216 - protein, 1365 aa, Filifactor alocis
MTKEYYLGLDVGTNSVGWAVTDSQYNLCKFKKKDMWGIRLFESANTAKDRRLQRGNRRRLERKKQRIDLLQEIFSPEICKIDPTFFIRLNESRLHLEDKSNDFKYPLFIEKDYSDIEYYKEFPTIFHLRKHLIESEEKQDIRLIYLALHNIIKTRGHFLIDGDLQSAKQLRPILDTFLLSLQEEQNLSVSLSENQKDEYEEILKNRSIAKSEKVKKLKNLFEISDELEKEEKKAQSAVIENFCKFIVGNKGDVCKFLRVSKEELEIDSFSFSEGKYEDDIVKNLEEKVPEKVYLFEQMKAMYDWNILVDILETEEYISFAKVKQYEKHKTNLRLLRDIILKYCTKDEYNRMFNDEKEAGSYTAYVGKLKKNNKKYWIEKKRNPEEFYKSLGKLLDKIEPLKEDLEVLTMMIEECKNHTLLPIQKNKDNGVIPHQVHEVELKKILENAKKYYSFLTETDKDGYSVVQKIESIFRFRIPYYVGPLSTRHQEKGSNVWMVRKPGREDRIYPWNMEEIIDFEKSNENFITRMTNKCTYLIGEDVLPKHSLLYSKYMVLNELNNVKVRGKKLPTSLKQKVFEDLFENKSKVTGKNLLEYLQIQDKDIQIDDLSGFDKDFKTSLKSYLDFKKQIFGEEIEKESIQNMIEDIIKWITIYGNDKEMLKRVIRANYSNQLTEEQMKKITGFQYSGWGNFSKMFLKGISGSDVSTGETFDIITAMWETDNNLMQILSKKFTFMDNVEDFNSGKVGKIDKITYDSTVKEMFLSPENKRAVWQTIQVAEEIKKVMGCEPKKIFIEMARGGEKVKKRTKSRKAQLLELYAACEEDCRELIKEIEDRDERDFNSMKLFLYYTQFGKCMYSGDDIDINELIRGNSKWDRDHIYPQSKIKDDSIDNLVLVNKTYNAKKSNELLSEDIQKKMHSFWLSLLNKKLITKSKYDRLTRKGDFTDEELSGFIARQLVETRQSTKAIADIFKQIYSSEVVYVKSSLVSDFRKKPLNYLKSRRVNDYHHAKDAYLNIVVGNVYNKKFTSNPIQWMKKNRDTNYSLNKVFEHDVVINGEVIWEKCTYHEDTNTYDGGTLDRIRKIVERDNILYTEYAYCEKGELFNATIQNKNGNSTVSLKKGLDVKKYGGYFSANTSYFSLIEFEDKKGDRARHIIGVPIYIANMLEHSPSAFLEYCEQKGYQNVRILVEKIKKNSLLIINGYPLRIRGENEVDTSFKRAIQLKLDQKNYELVRNIEKFLEKYVEKKGNYPIDENRDHITHEKMNQLYEVLLSKMKKFNKKGMADPSDRIEKSKPKFIKLEDLIDKINVINKMLNLLRCDNDTKADLSLIELPKNAGSFVVKKNTIGKSKIILVNQSVTGLYENRREL

SEQ ID NO: 217 - protein, 1347 aa, Finegoldia magna
  Finegoldia magna ACS-171-V-Col3
MKSEKKYYIGLDVGTNSVGWAVTDEFYNILRAKGKDLWGVRLFEKAKTAADTRTFRSGRRRNDRKGMRLQILREIFEDEIKKVDKDFYDRLDESKFWAEDKKVSGKYSLFNDKNFSDKQYFEKFPTIFHLRKYLMEEHGKVDIRYYFLAINQMMKRRGHFLIDGQISHVTDDKPLKEQLILLINDLLKIELEEELMDSIFEILADVNEKRTDKKNNLKELIKGQDFNKQEGNILNSIFESIVTGKAKIKNIISDEDILEKIKEDNKEDFVLTGDSYEENLQYFEEVLQENITLFNTLKSTYDFVILQSILKGKSTLSDAQVERYDEHKKDLEILKKVIKKYDEDGKLFKQVFKEDNGNGYVSYIGYYLNKNKKITAKKKISNIEFTKYVKGILEKQCDCEDEAVKYLLGKIEQENFLLKQISSINSVIPHQIHLFELDKILENLAKNYPSFNNKKEEFTKIEKIRKTFTFRIPYYVGPLNDYHKNNGGNAWIFRNKGEKIRPWNFEKIVDLHKSEEEFIKRMLNQCTYLPEETVLPKSSILYSEYMVLNELNNLRIKGKPLDTDVKLKLIEELFKKKTKVTLKSIRDYMIRNNFADKEDFDNSEKNLEIVSNMKSYIDFNNILGDKFELEMVEDLIEKITIHTGNKTLLKKYIEETYPDLSSSQIQKIINLKYKDWGRLSRKLLDGIKGRNKTDDVNTVINFMRNSSDNLMQIIEGKNYSFNEYIDNLRKKYIPQEISYEVVENLYVSPSVKKMIWQVIRVTEEITKVMGYDPDKIFIEMAKSEEEKKTTISRKNKLLDLYKAIKKDERDSQYEKLLTGLNKLDESELRSKKLYLYYTQMGRDMYTGEKIDLDKLFDSTHYDKDHIIPQSMKKDDSIINNLVLVNKNANQTTKGNIYPVPSSIRNNPDIYNYWKYLMEKEFISKEKYNRLIRNTPLTNEELGVFINRQLVETRQSTKAIKELFEKFYQKSKIIPVKASLASDLRKDMNTLKSREVNDLHHAHDAFLNIVAGDVWNREFTSNPINYVNENREGDKVKYSLSKYFTRPRKSKGKVIWTPEKGRKLIVDTLNKPSVLISNESHVKKGELFNATISGKKDYKKGKIYLPLKKDDRLKDVSKYGGYKAINGAFFFLVEHTKSKKRIRSIELFPLHLLSKFYEDKNTVLDYAINVLQLQDPKIIIDKINYRTEIIIDNFSYLISTKSNDGSITVKPNEQMYWRVDEISNLKKIENKYKKDAILTEEDRKIMESYIDKIYQQFKAGKYKNRRTTDTIIEKYEIIDLDTLDNKQLYQLLVAFISLSYKTSNNAVDFTVIGLGTECGKPRITNLPDNTYLVYKSITGIYEKRIRIK

SEQ ID NO: 218 - protein, 1348 aa, Finegoldia magna
MKSEKKYYIGLDVGTNSVGWAVTDEFYNILRAKGKDLWGVRLFEKADTAANTRIFRSGRRRNDRKGMRLQILREIFEDEIKKVDKDFYDRLDESKFWAEDKKVSGKYSLFNDKNFSDKQYFEKFPTIFHLRKYLMEEHGKVDIRYYFLAINQMMKRRGHFLIDGQISHVTDDKPLKEQLILLINDLLKIELEEELMDSIFEILADVNEKRTDKKNNLKELIKGQDFNKQEGNILNSIFESIVTGKAKIKNIISDEDILEKIKEDNKEDFVLTGDSYEENLQYFEEVLQENITLFNTLKSTYDFLILQSILKGKSTLSDAQVERYDEHKKDLEILKKVIKKYDEDGKLFKQVFKEDNGNGYVSYIGYYLNKNKKITAKKKISNIEFTKYVKGILEKQCDCEDEDVKYLLGKIEQENFLLKQISSINSVIPHQIHLFELDKILENLAKNYPSFNNKKEEFTKIEKIRKTFTFRIPYYVGPLNDYHKNNGGNAWIFRNKGEKIRPWNFEKIVDLHKSEEEFIKRMLNQCTYLPEETVLPKSSILYSEYMVLNELNNLRINGKPLDTDVKLKLIEELFKKKTKVTLKSIRDYMVRNNFADKEDFDNSEKNLEIASNMKSYIDFNNILEDKFDVEMVEDLIEKITIHTGNKKLLKKYIEETYPDLSSSQIQKIINLKYKDWGRLSRKLLDGIKGTKKETEKTDTVINFLRNSSDNLMQIIGSQNYSFNEYIDKLRKKYIPQEISYEVVENLYVSPSVKKMIWQVIRVTEEITKVMGYDPDKIFIEMAKSEEEKKTTISRKNKLLDLYKAIKKDERDSQYEKLLTGLNKLDDSDLRSRKLYLYYTQMGRDMYTGEKIDLDKLFDSTHYDKDHIIPQSMKKDDSIINNLVLVNKNANQTTKGNIYPVPSSIRNNPKIYNYWKYLMEKEFISKEKYNRLIRNTPLTNEELGGFINRQLVETRQSTKAIKELFEKFYQKSKIIPVKASLASDLRKDMNTLKSREVNDLHHAHDAFLNIVAGDVWNREFTSNPINYVKENREGDKVKYSLSKDFTRPRKSKGKVIWTPEKGRKLIVDTLNKPSVLISNESHVKKGELFNATIAGKKDYKKGKIYLPLKKDDRLQDVSKYGGYKAINGAFFFLVEHTKSKKRIRSIELFPLHLLSKFYEDKNTVLDYAINVLQLQDPKIIIDKINYRTEIIIDNFSYLISTKSNDGSITVKPNEQMYWRVDEISNLKKIENKYKKDAILTEEDRKIMESYIDKIYQQFKAGKYKNRRTTDTIIEKYEIIDLDTLDNKQLYQLLVAFISLSYKTSNNAVDFTVIGLGTECGKPRITNLPDNTYLVYKSITGIYEKRIRIK

SEQ ID NO: 219 - protein, 1348 aa, Finegoldia magna
  Finegoldia magna SY403409CC001050417
MKSEKKYYIGLDVGTNSVGWAVTDEFYNILRAKGKDLWGVRLFEKAKTAADTRTFRSGRRRNDRKGVRLQILREIFEDEIKKVDKDFYDRLDESKFWAEDKKVSGKYSLFNDKNFSDKQYFEKFPTIFHLRKYLMEEHGKVDIRYYFLAINQMMKRRGHFLIDGQISHVTDDKPLKQQLILLINDLLKIELEEEFMDSIFEILADVNEKKTEKKNILKELINAQDFNKQEGKILYSIFESIVTGKAKIKNIISDEDILEKIKEDNKEDFVLTGDSYEENLQYFEEVLQENITLFNTLKSAYDFVILQSILKGKSTLSDAQVERYDEHKKDLEILKKVIKKYDEDGKLFKQVFKEDNGNGYVSYIGYYLNKNKKITAKKKISNIEFTKYVKGILEKQCDCEDEDVKYLLGKIEQENFLLKQISSINSVIPHQIHLFELDKILENLAKYYPSFNNKKEEFTKIEKIRKTFTFRIPYYVGPLNDYHKNNGGNAWIFRNKGEKIRPWNFEKIVDLHKSEEEFIKRMLNQCTYLPEETVLPKSSILYSEYMVLNELNNLRINGKPIDTDVKLKLIEELFKKKTKVTLKSIRDYMIRNNFADKEDFDNSEKNLEIVSNMKSYIDFNNILGDKFELEMVEDLIEKITIHTGNKKLLKKYIEETYPDLSSSQIQKIINLKYKDWGRLSRKLLDGITGTNIETGEIDTVINFLRNSSDNLMQIIGSQNYSFNNDIDKLRKKYIPQEISYEVVENLYVSPSVKKMIWQVIRITEEITKVMGYDPDKIFIEMAKSEEGKKTTISRKNKLLALYKAIKKDERDSQYEKLLTGLNKLDDSDLRSRKLYLYYTQMGRDMYTGEKIDLDKLFDSTHYDKDHIIPQSMKKDDSIINNLVLVNKNANQTTKGNIYPVPSSIRNNPKIYNYWKYLMEKEFISKEKYNRLIRNTPLTNEELGGFINRQLVETRQSTKAIKELFEKFYKKSKIIPVKAILASDLRKDMNTLKSREVNDLHHAHDAFLNIVAGDVWNREFTSNPINYVKENREGDKVKYSLSKYFTRPRKSKGKVIWTPEKGRKLIVDTLNKPSVLISNESHVKKGELFNATIAGKKDYKKGKIYLPLKKDDRLQDVSKYGGYKAINGAFFFLVEHTKSKKRIRSIELFPLHLLSKFYEDKNTVLDYAINVLQLQDPKIIIDKINYRTEIIIDNFSYLISTKSNDGSITVKPNEQMYWRVDEISNLKKIENKYKKDAILTEEDRKIMESYIDKIYQQFKAGKYKNRRTTDTIIEKYEIIDLDTLDNKQLYQLLVAFISLSYKTSNNAVDFTVIGLGTECGKPRITNLPDNTYLVYKSITGIYEKRIRIK

SEQ ID NO: 220 - protein, 1516 aa, Flavobacteriaceae bacterium
  Flavobacteriaceae bacterium S85
MLKQQKDKIIGMNKKILGLDLGTNSIGWALVKQDLENKYGEIIGCGSRIIPMSQDVLGKFDAGISISQTAERTNYRSVRKLIQRNTLRRERLHRVLHQLDFLPKHYNDSIDFEKKLGQFKTDKETKLNYFVNQHGKHEFLFKDSFNEMVKEFKEEQPELFYIKNNGKETKIPYDWTIYYLRKKALSKKISKEELSWLVLNFNQKRGYYQLRGEIDEEKEKNKRYEKLYVSEVVKTNNTIKKTGEYLYDIYFDNGWKYEKQTTKPQDWLHKHKEFIITTTTLKNGETKRTFKTVDSEKDWIAIKSKTEQDIKESNKTVGAFIYDTLLKNPTQKIRGSLVKTIERKFYREEFEKILKEQIKHRPEINVNTAIGKENYTKCVTELYPRNEAHANNILTNDFNYLFTKDILFYQRPLKSKKSEIANCQYEYRTYIKKKEKTGKEERVKQPLKATPKSHPLFQEFRLWQFIHNLKIYIRETTVGNKPLFDVDITDTFFTSENDWATLFEYLNNKKEIEQKHVLEYLVSKKIISKSEKTDYRWNYVEDKKYPGNETRVDFINRLKKVENLNVDEFLTSELEFKLWHIIYSVTDKNEYEKALENFAIRQNIDKDSFVNSFKKFPPFKSDYGAYSTKAIKKLLPLMRLGKFWDGSEIPKVVVEKITDIKTRLTSVNYDESLFKKDEKKILETIVDDITPKQLLKSFVKLKGKNHLAGLNTYQACYLVYERHSESSDITQWENPDDIDSFLNHFKQHSLRNPIVEQVVTETLRTVRDIWKYYGNGSPNYFNEIHIELGREMKNPADKRKQMSAKINENENTNQRIKGILQELMNDGVQDIKPYSPSQQEILKIYEEGISQNPNVDYSKVSEDEITKIKKSNNPTLKEIQRYKLWLEQKYISPYTGKPIPLSELFTPAYQIEHIIPQSRYFDNSLSNKIICESEVNEDKSNKTAYEYLKTNGGSIVHGHHLLSLKEYEDHCQHYFKKNRTKLKNLLSEEIPEGFINRQLNDSRYISKLIKGLLSNIVREENEQEATSKNIVPVTGSITSKLKQDWGLNDKWNEIIAPRFKRLNKMTNSNDFGYFDEKINTFRIQVPDAISRGFNKKRIDHRHHTLDALVIACCTKKHIQYLNSLNNEIIKHELKPSILIKNAQGDYTKHFMLPWNNFPIDCKNAIENTIVSFKQNLRVINKTSNKYQSYKDENGNLRLGKDGKPKKGLTKQTKGNNWAVRKAMHEDTFYGEIVDGENKGKLKIKTLLDTSFDVKKIEDKVLDKSIRTILINYLKQDKYKNLSKPHEEAFSPNGIIEMNKNIISLNNNIPHKPIKRVTLKHEKGKKFSIKTLLDKKTKFAKSATGTNVFFCIYKNINGKIKYHTPSFEEIIEIQKQEFEIKYKSKLNVPETLFDKKESFELLFYLQPNDLVYLPNDEELKNRQLIDFNNLNKKQIKRIYKFTDGSGTTANFIPYQVAKVIFNLNKKEQAKSSFKYPIQNEFGVGSPQSKNQKSIEGILIKERCIKLKIDRLGNISKA

SEQ ID NO: 221 - protein, 1473 aa, Flavobacterium branchiophilum
MAKILGLDLGTNSIGWAVVERENIDFSLIDKGVRIFSEGVKSEKGIESSRAAERTGYRSARKIKYRRKLRKYETLKVLSLNRMCPLSIEEVEEWKKSGFKDYPLNPEFLKWLSTDEESNVNPYFFRDRASKHKVSLFELGRAFYHIAQRRGFLSNRLDQSAEGILEEHCPKIEAIVEDLISIDEISTNITDYFFETGILDSNEKNGYAKDLDEGDKKLVSLYKSLLAILKKNESDFENCKSEIIERLNKKDVLGKVKGKIKDISQAMLDGNYKTLGQYFYSLYSKEKIRNQYTSREEHYLSEFITICKVQGIDQINEEEKINEKKFDGLAKDLYKAIFFQRPLKSQKGLIGKCSFEKSKSRCAISHPDFEEYRMWTYLNTIKIGTQSDKKLRFLTQDEKLKLVPKFYRKNDFNFDVLAKELIEKGSSFGFYKSSKKNDFFYWFNYKPTDTVAACQVAASLKNAIGEDWKTKSFKYQTINSNKEQVSRTVDYKDLWHLLTVATSDVYLYEFAIDKLGLDEKNAKAFSKTKLKKDFASLSLSAINKILPYLKEGLLYSHAVFVANIENIVDENIWKDEKQRDYIKTQISEIIENYTLEKSRFEIINGLLKEYKSENEDGKRVYYSKEAEQSFENDLKKKLVLFYKSNEIENKEQQETIFNELLPIFIQQLKDYEFIKIQRLDQKVLIFLKGKNETGQIFCTEEKGTAEEKEKKIKNRLKKLYHPSDIEKFKKKIIKDEFGNEKIVLGSPLTPSIKNPMAMRALHQLRKVLNALILEGQIDEKTIIHIEMARELNDANKRKGIQDYQNDNKKFREDAIKEIKKLYFEDCKKEVEPTEDDILRYQLWMEQNRSEIYEEGKNISICDIIGSNPAYDIEHTIPRSRSQDNSQMNKTLCSQRFNREVKKQSMPIELNNHLEILPRIAHWKEEADNLTREIEIISRSIKAAATKEIKDKKIRRRHYLTLKRDYLQGKYDRFIWEEPKVGFKNSQIPDTGIITKYAQAYLKSYFKKVESVKGGMVAEFRKIWGIQESFIDENGMKHYKVKDRSKHTHHTIDAITIACMTKEKYDVLAHAWTLEDQQNKKEARSIIEASKPWKTFKEDLLKIEEEILVSHYTPDNVKKQAKKIVRVRGKKQFVAEVERDVNGKAVPKKAASGKTIYKLDGEGKKLPRLQQGDTIRGSLHQDSIYGAIKNPLNTDEIKYVIRKDLESIKGSDVESIVDEVVKEKIKEAIANKVLLLSSNAQQKNKLVGTVWMNEEKRIAINKVRIYANSVKNPLHIKEHSLLSKSKHVHKQKVYGQNDENYAMAIYELDGKRDFELINIFNLAKLIKQGQGFYPLHKKKEIKGKIVFVPIEKRNKRDVVLKRGQQVVFYDKEVENPKDISEIVDFKGRIYIIEGLSIQRIVRPSGKVDEYGVIMLRYFKEARKADDIKQDNFKPDGVFKLGENKPTRKMNHNQFTAFVEGIDFKVLPSGKFEKI

SEQ ID NO: 222 - protein, 1459 aa, Flavobacterium columnare
MKFNLGLDIGTNSIGWALVNEDYENKKGKIIAAGSRIIPMTQDILDKFGSGAITETQTALRTDYRSKRKLIQRFLLRRERLHRVLNVLDFLPKHYAESIDFEKYFGKFLPNTEPKLAYNQNQFIFQNSFLEMLKEFQEKHPELLTNNKKIPYDWTIYYLRKKALNQRIEKEELAWLLLQFNQKRGYNQLRDEEEESVPNKQVEFYSLKIIDVVADQPKEGRDKRWYSINLENGWTYRRESKTPLFNWEGKTKDFIVTTDLNQDGSIKKDKEGKEKRSFRAPSEGDWTLLKKKTEKEIYESGKTLGTYIYDALLNTPDLKIKGDFIRTIDRSIYKEELQQIINKQKEYHLELNSSKLYKACLEELYPKNEIYKSALKNKDIAYLFINDILYYQRPLKAPKYNIGKCTYESRTFKKEDKKIREYIPAVAKSHPLFQEFRLWQWIKNLKIYEKLSSDNCTDFFLTNEQDFENLFEFLWNKKEIDHKGILEYLVKTKFPDLKPKQVKTKVKEYRWNYVYDHEKDESKTYPCGETYFLLKNKLDKIYNAQDDFLDKERLYNLWHIIYSVTDKKQYEKALAKFALKNHLDTKSFVNTFKRIPPFKNDYAIYSLKAIKKLLPLMRVGKYWNYDDIDPITKQKIQCIITGEENDTISTLVREKTNHFSNENDFKNLPLWLAGYIVYNSHNESSEIEKWKSPQDIDTFLKKFKQHALRNPIVEQVVTETLRVVRDIWSKKGQGKKDFFNEIHIELGKDLKNPVDKRRKLSSTNTKNESTNTRIKALLIELFTQGVENVKPNSPKHQEILKIFEEGALNSGIEIEEDIIKISNTDQPTKKQLELYILWLEHKYKSPYTGQSIPLSKLFTPNYEIEHIIPRSKYYDDNLSNKVICETEINRLKNNQLGYEFINNHEIREVTLEEGKTIRLLSPEQYWNFVTTYYAKNKAKRENLLLKELPVQMVEKQLNDTRYVSKYVMQLLSKIVRKEDGTDNGINSTNILSISGKMTRALKNDWDLNDVWNDLLLYRFERLNTITKTNLFTTYSEQKQKRMPIVPDQYAKGFHKKRLDHRHHALDAIVIACITRNHINYMNNQNIQGEKLKKNAIEKENYREILQKSRLDIRAQLCEKKYNDNDPTKYNWVFIKPWADFTENTKDILESIIPSFKQNLRIINKTVNYYEKYNENGKKVKVRQIKGDNWAIRKPLHKETISGKVHLSYKTPAKGKILTATRKVLDSSMDFKSIEKITDTGIQKILKNYLEYKKSPELAFSPEGIEELNATITKYNNGFHHKPIYKVRIYEEGVKFPLGNKGNKKSKYVEAEKGTNLFFAIYKDQENNRYFETIPFNDVLETLKKGMSAVPEKNQEENTLVFALSPQDLVFVPTLDEIENPDIVDFKNLTKDQTNRIYKMVSSSGKQCFFIKAEVATSIVNKMEFSTSNKMENSIEGIQIKSNCWKLKLDRLGTITRVIK

SEQ ID NO: 223 - protein, 1535 aa, Flavobacterium columnare
MTKILGLDLGTNSIGWAIRDTENEGINQILDKGARIFSEGVKSENGKEISRAAERTAYRSARKIKYRRKLRKYETLKVLSINGMCPLSVEEVEQWKKSGFKEYPLNPEFLDWLRTNEDKNINPYLFRDKASKQKVTLFELGRALYHIAQRRGFLSNRLDQSAEGVFEEHNPQIQNLIEDLDSSNTILNELKEYYINLGIIDETEKSGFKKDLDEGEKKLKSLYNSLVAITKKNANDIETCKQELIARLNKKEDLGKVKGKIKDISQAMLDRNFKTLGQYFFSLYNKERIRNQYTSREEHYLEEFIIICQTQGIEGINTNEKLPEKKFTGLAKDLYRAIFFQRPLKSQKGLIGKCSFEKNKSRCAVSHPDYEEFRMWSYLNTIKIGTQSEKTLRFLTLEEKLKLVPKFYRKSDFNFEVLAKELVEKGASFGYYKSSKKNEFFYWFNYKPTDSVSACVVSASLENAIGKDWKIKTFEYQTRNTEKNEVTKSVDYKDLWHLLSVATSDTYLYDFAIEKLKLEPKNAKAFSKTKLKKDFASLSLAAIAKILPYLKQGLLYSHAVFMANIENIVDADIWKDEEQQKFIQSKIVELVDNYIVEKSKLELINGLLKIYNTEDKEGRKVYYSKEAESLFEADLRKKLVPFYKANIIIEEHEQEIIFQDLFPILMDQLKKQEFIKIGRLDKQIEAFLEGENEEGQIFCNHTDKLKKLYHPSDIEVFKKKTIKDEWGNEKVVLGSPLTTSIKNPMAMRALHQLRKVLNTLIANDQIDEDTRIHIEMARELNDANKRKGIQDFQNENKKFREEAIKEIKKLYLEECHKDVNPTEDDILRYQLWLEQGKCEIYEEGNNISICDIIGSNPSYDIEHTIPRSISQDNSQMNKTLCSLKFNRSIKKQKMPVELSNYNDILPRIAHWKKEAEELTRQIETISRSIKSAATKVAKDKNIRKRHYLTLKRDYILGKYERFTWEEPKVGFKNSQIPDTGIITKYAQAYLKSYFKRVESVKGGAVAEFRKLWGIQESFIDENWWKHYKDKDRDKHTHHTIDAITIACMPKDKYDLLAHAWRLEDEQDKKAAKVLIEQAKPWKTFKEDIEKIETEILVSHFTPDNVKKQSKSIIKNRGKKVYVLKNELPVNFKNKIEGKDYFKLKFDSKILYKIPKKKEKQTDTFYEELPKNYLNGVEGKDYFKINTTGKTFYKIPIFNQGDTIRGSLHQETTYGAIKLPDIDIETKKPLHTDKGGFILKKDIKGNEIVFFVVRKEISKISENDVQNIVDNVVRKKIENAIANSLITFKIVKKKKVAVIKEGVTIWMREPNIEKGIEGIPIKKVRIITNSVKNPIEIKVHSPLSKSRHKHKQKVYGQNDENYAMALYELDGKREFELINNFNLAKLLKQSQSYYPLHKEKEIKGKKILVPIEKRNNKDVILKRGQQVVFYDKTVENPKDISEIIDFRERIYIIEGLTIQRQKDKKTSKVNEYGIIQLRHFKEARKSEEISKDNFKPDGEFKINENKPTRKMNHNQFTAFVEGIDFKVLPSGKFQKI

SEQ ID NO: 224 - protein, 1354 aa, Flavobacterium psychrophilum
  Flavobacterium psychrophilum JIP02/86
MKKILGLDLGTNSIGWAFINEAENEIEVSSIVNTGVRIVPLTTDEESDFKKGNTISINADRTLKRGARRGLQRFKQRREALLETFNRIKFIATDFVYAETGAATTFSSYQLRAKSAVEAVTKEELVKVLLMLNKKRGYKSSRKAKTAEEGDAIDGMKIAKEIFENNLTPGQWVYNSLSKGGKFIPDFYHSDLQKELEKIVRFQNQFHSEQINDKLLADIQGKSRTQTSQHFSKTLNIPLAENKGTREETKLQHYQWRNEALANELDMKILAFIITEINNQINQSSGYLGAISDRSKELYFNQETVGQYQYKQLQENVHAKLKNQVFYRQDYLDEFEKIWETQAKFHSELNEKLKAEIRDITIFYQRKLKSQKHLVSFCEFEKGHKAIPKSSPLFQEFRIWQNLNNVVVKNETTKEVFELSEELKQLIAEELQFKESMTDVQMLTFCELKKGTHTVNFKKIEGNRTNTSIYKAFEKILEVEGYEIDFSKMKPLEIKETVAPIFETLNINTVILDFDPTIQGNDFDKQPYYQLWHLLYSAEDDDKLKETLKTKFGFKENHLPFILNINLQADYGSLSAKAIKKILPHLMDGHIYDKACLMVGYNHSSSLTTAQNNDRVLKDTLELLKKNSLRNPVVEKILNQMINVINAIMKDPAMGKPDEIRVELARELKANNEQRKKATSDINTATTEHERIRKLLHSEFNIPRVTRNDIIRYKLWLETGGISLYTGNPIKASDLFSKNYDIEHIIPKSRLFDDSFSNKTLCERQLNIDKSNKTAYSFLQEKLSENDFAAYENRVKDLFKTGKIKSYTKYKKLLMADNEIPEGFIDRQLRETQYIAKKAKEILLEVSRNVTATIGSVTDKLRQDWELVDVMKELNWEKYDKLGLTHIEEGKNGERLSKIKDWTKRNDHRHHAMDAITVAFTKPAYIQYLNNLNAKTQGENKANSIIGIENKHLYRDKNNKLRFISPMKNFREEAKKQLESILISYKAKNKVVTKNKNTTKKSGGTNQKIQLTPRGRLHKETVYGKLQQYATKEEKVNASFTEDYIQKVAKKEYREALLKRLEENDNDPKKAFTGKNALNKTPIYISLKDNIIVPEKVKTVWLETDYTIRKDITPDLKIDKVIDVGIKRILQNRLNEFNGDPKKAFVNLGESPIWLNKEKGIAIKRVTISGVSNAQALHTKKDHLGNEILDKNGNPIPVDFISTGNNHHVAIYRDEKGNLQEEVVSFYDAVIRRNLGLSVINKNHEKGWEFLFSMKQNEFFIFPSDGFNPHEIDLLNPNNYHLISPNIFRVQKISTKNYMFNHHLETKAVDGEMLKSKKELSKTSYHFIQTPTNLNGIIKVRINHLGKIVHLGEY

SEQ ID NO: 225 - protein, 1458 aa, Fluviicola taffensis
MTKTILGLDLGTNSIGWALINQDFDNKKGEILGMGSRIIPMTQDIKDEFGKGNSISQTAERTRLRGVRRLIHRTLLRRERLHRVLNIIGFLPEHYANQIDFEKRFGKFKPESEPKISFDGNDVFLFEKSYQEMLVDFKIHQPQLVSNGKKIPHDWTIYYLRKKALSKKIEKEELAWILLNFNQKRGYYQLRGEEEEETPNKLVEFHSLKIVEVNADEPQKGKPEIWYSLVLENGWVYRRASKTPLFDWKDKIREFIVTTEINNDGTVKTDKEGTEKRSFRAPKPEDWTLQKKKTEFELSKSGNEVGAFIYESILQKPNQKIRGKLISTIERKFYKEELKTILKTQLFFHKELKDEKLYNACIEELYKNNEAHRSLLSNKGFEHLFINDILFYQRPLRSKKSQISNCPLEKRTYKKEGIEITEGIKVISKSNPIYQEFRLWQWISNLSLYCIEPTETNVTSTFLNSIEDYENLFEFLNNRKEIEQKHLLKYLLENQGFKGKLLTNELEKFRWNFVADKKYPCNETGSLLHTRLSKVKNISPDFLTKEIEHQLWHIIYSVTDKIEYEQALKTFARKNNLDVDSFFEHFKKIPPFESTYGAYSEKAIKKLLPLIRLGKYWNWEAIDSISKDRISKILSGEYDENIKNRVREKAVHLTSENNFQGLQEWLAKYIVYDRHSEGNDLGKWTSVSDLETYLKEFKQHSLRNPIVEQVITETLRVVKDIWIKHGKGTENFFDEIHVELGREMKNNSEDRKRLTNTITENENTNLRIKALLMEMMNDNDVENVRPYSPSQQEILKIYEDGALNSNIELDDEIVKISKKAEPTKSELQRYKLWLEQKYRSPYTGQVIPLNKLFTSEYEIEHVVPQSRFFDDSFSNKVICESAVNKRKDNQLGLQFIKNHSGEKVELGFGKVVQVFTEEQYLDFVKEHYSKNRSKHNKLLLEEIPEKMIERQLNDTRYISKFVSSILSNIVRSEKDDDGLNSKNILPGNGKITTELKRDWGLNDVWNDLILPRFERMNTITNSDLFTTYNDKYQKHLPTVPFEYSKGFQKKRIDHRHHAMDALVIACATRDHLNLMNNQSAKSELKRYDLQNKLRKKEPYFNQKENKQKEAFKDFIKPWGTFTEDSKNALEKIIISFKQNLRVINKATNSYESYKDEDGNLRIGKDGKPEKGLIKQKGLNWAIRKPLHKDTVSGQINLSRIKLPNGKILTATRKNLDTSFDLKTIENSITDTGIQKILKNYLLSKESPELAFSPEGLEEMNNEIEKYNNGKFHHPINKARIYELGSKFNVGQTGNRRDKFVEAAKGTNLFFAIYQDENKNRSYETIPLNEVIEHQKWRASLPKEEQEKIPLVPVNKLKGTFIFSLSPNDLVYVPSNDELERSASIDFSKLKKEQINRLYKMVSSSGSQCFFVKSEVATSVVNKMEYSSLNKMEKSIDNLMVKEICIKLKIDRLGNISKA

SEQ ID NO: 226 - protein, 1646 aa, Francisella tularensis
MNIKILPIAIDLGAKNTGVFSAFYQKGTSLESLDNKNGKVYELSKDSYTLLMNNRTARRHQRRGIDRKQLVKRLFKLIWTKQLNLEWNKDTQQTISFLLNRRGFSFITDGYSPEYLNIAPEAVKAILMSILDDYNGEDDLDSYLQSATENDSKIDELYNKLLQKALEFKLRKLCIDIKEDKVTTKTLKELSNTEFKLLANYLVDYDRILRTQKFSYTDKQGNLRELNYYHHDKYNIQEFLKRNIIINDVILEKLTDDLDIWNLNFDKFDFEKNLEKLENQEDKDYLQTHLHHFVFAVNKIKSEMASGGRHRSQYFQEITNVLVENNHQEGYLKNFCENLHNKKYSNLSVKNLVNLIGNLSNLELKPLRKYFNDKIHAKADYWDEQKFAETYSDWILGEWRVGAKDKDKKDGAKYSYKNLCDELKQKVGINQDGIINQTKSDFVDFLLELDPCRTIPPYLDNNNRKPPKCQSLILNPKFLDNKYPNWQQYLQELKKLQTVQNYLGNFEIDLKDLKSSKEQPYFVKYKSLNQQIASGQRDYKDLDARVLQFIFDRVKASDELLLNEIYSHAKKLKQNTSSELEKLELCKKLDEVIANSQLSQILKSQHVNGIFEQGTFLHLVCKYYKQRQRARDSRLYIMPEYRYDKKLDKYNNTGRFDDDNQLLTYCNHKPRQKRYQLLNDLAGVLQVSPNFLKDKIGSDDDLFISKWLVEHIRGFKKACEDSLKIQKDNRGLLNHKINIARNTKGKCEKEIFNLICKIEGSEDKKGNYKHGLAYELGVLLFGEPNQASKLEFDRKIKKFNSIYSFAQIQQIAFAERKGNANTCAVCSADNAHRMQQIKVAKPVEGNKDNIILSAKAQRLPAIPTRIVDGAVKKIATILARNIVDDNWDNIKQALSNNQQLHVPIITESNAFEFEPALADIKGKSLKDKRKKALERIDPENVFKDKNNRIKEFAKGISAYSDANLANGDFDGAKEELDHIIPRSHKKYGTLNDEANLICVTREDNQNRGNKAVFLYDLKPNYKLKQFNTTDDLEIEKKIADTIWDASKQDFKFGNYRSFINLTPQEQIAFRHALFLADKNPIKKAVIRAIDNRNRTFVNGTQRYFAEVLANNIYLRAKKENLATNRITFDYFGIETTNSNGRGIADVRKLYEKVDSDIQAYAKGDKPQDSYSHLIDAMIAFCVAADEHKNEGSIGLKMGNQYGLFPTPDKYDENTGEIISWHNDDIFRKIKVSDNQFSDKKLVRKKATEGFNTHRQMTRDGIYGESYLPILIHKNLNEVRKGYNWENSEEIKIFKGKKYDIQQLNNLVYCLKFVDKPISIDIQITTLEELRNILETNNISTTAEYYYINLKTQKLHEYYIENYNTALGYKKYTKEMEFLRSLAYRTERVKIKSIDDVSMILAKDSNFKAGKIELPFKTEWQRLYLEWQNTTIKDNHEFLKSYFSVKNATKQHKKVRKDFSLPISTNEGKLLVKRKTWDNNFIYQILNDSDSRADGTKPFIPAFDISKNEIVETIIKSFTSKNIFWLPKNIELQKVDNKSIFAIDTSRWFEVETPKDLIEIGVSTIQYKIDNNSRPKVRVKLDYVMDDDSKINYFMNHSLLKSRYPDKVLEILKQSTIIEFESSGFNKTIKEMLGMTLAGIYNETSNN

SEQ ID NO: 227 - protein, 1629 aa, Francisella tularensis
MNFKILPIAIDLGVKNTGVFSAFYQKGTSLERLDNKNGKVYELSKDSYTLLMNNRTARRHQRRGIDRKQLVKRLFKLIWTEQLNLEWDKDTQQAISFLFNRRGFSFITDGYSPEYLNIVPEQVKAILMDIFDDYNGEDDLDSYLKLATEQESKISEIYNKLMQKILEFKLRKLCTDIKDDKVSTKTLKEITSYEFELLADYLANYSEILKTQKFSYTDKQGNLKELSYYHHDKYNIQEFLKRHATINIQILDTLLTDDLDIWNFNFEKFDFDKNEEKLQNQEDKDHIQAHLHHFVFAVNKIKSEMASGGRHRSQYFQEITNVLDENNHQEGYLKNFCENLHNKKYSNLSVKNLVNLIGNLSNLELKPLRKYFNDKIHAKADHWDEQKFTETYCHWILGEWRVGVKDQDKKDGAKYSYKDLCNELKQKVTKAGLVDFLLELDPCRTIPPYLDNNNRKPPKCQSLILNPKFLDNQYPNWQQYLQELKKLQSIQNYLESFETDLKVLKSSKDQPYFVEYRSSNQQIASGQRDYKDLDARILQFIFDRVKASDELLLNEIYFQAKKLKQKASSELEKLESSKKLDEVIANSQLSQILKSQHTNGIFEQGTFLHLVCKYYKQRQRARDSRLYIMPEYRYDKKLHKYNNTGRFDDDNQLLTYCNHKPRQKRYQLLNDLAGVLQVSPNFLKDKIGSDDDLFISKWLVEHIRGFKKACEDSLKIQKDNRGLLNHKINIARNTKGKCEKEIFNLICKIEGSEDKKGNYKHGLAYELGVLLFGEPNEASKPEFDRKIKKFNSIYSFAQIQQIAFAERKGNANTCAVCSADNAHRMQQIKITEPVEDNKDKIILSAKAQRLPAITTRIVDGAVKKMATILAKNIVDDNWQNIKQVLSAKHQLHIPIITESNAFEFEPALADVKGKSLKDRRKKALERISPENIFKDKNNRIKEFAKGISAYSGANLTDGDFDGAKEELDHIIPRSHKKYGTLNDEANLICVTRGDNKNKGNRIFCLRDLANNYKLKQFETTDDLEIEKKIADTIWDANKKDFKFGNYRSFINLTPQEQKAFRHALFLADENPIKQAVIRAINNRNRTFVNGTQRYFAEVLANNIYLRAKKENLNTDKISFDYFGIPTIGNGRGIAEIRQLYEKVDSDIQAYAKGDKPQASYSHLIDAMLAFCIAADEHRNDGSIGLEIDKNYSLYPLDKNTGEVFTKDIFSQIKITDNEFSDKKLVRKKATEGFNTHRQMTRDGIYAENYLPILIHKELDEVRKGYTWKNSEEIKIFKGKKYDIQQLNNLLYCLKFVDKPISIDIQISTLEELRNILTTNNIAATAEYYYINLKTQKLHEYYIENYNTALGYKKYTKEMEFLRSLAYRSERVKIKSIDDVKQVLDKDSNFIIGKITLPFKKEWQRLYREWQNITIKDDYEFLKSFFNVKSITKLHKKVRKDFSLPISTNEGKFLVKRKTWDNNFIYQILNDSDSRVDGTKPFIPAFDISKNEIVEAIIDSFTSKNIFWLPKNIELQKVDNKNIFAIDTSKWFEVETPSDLRDIGVATIQYKIDNNSRPKVRVKLDYVIDDDSKINYFTNHSLLKSRYPDKVLEILKQSTIIEFESSGFNKTIKEMLGMTLAGIYNETSNN

SEQ ID NO: 228 - protein, 1629 aa, Francisella novicida
  Francisella novicida FTG
MNFKILPIAIDLGVKNTGVFSAFYQKGTSLERLDNKNGKVYELSKDSYTLLMNNRTARRHQRRGIDRKQLVKRLFKLIWTEQLNLEWDKDTQQAISFLFNRRGFSFITDGYSPEYLNIVPEQVKAILMDIFDDYNGEDDLDSYLKLATEQESKISEIYNKLMQKILEFKLMKLCTDIKDDKVSTKTLKEITSYEFELLADYLANYSESLKTQKFSYTDKQGNLKELSYYHHDKYNIQEFLKRHATINDRILDTLLTDDLDIWNFNFEKFDFDKNEEKLQNQEDKDHIQAHLHHFVFAVNKIKSEMASGGRHRSQYFQEITNVLDENNHQEGYLKNFCENLHNKKYSNLSVKNLVNLIGNLSNLELKPLRKYFNDKIHAKADHWDEQKFTETYCHWILGEWRVGVKDQDKKDGAKYSYKDLCNELKQKVTKAGLVDFLLELDPCRTIPPYLDNNNRKPPKCQSLILNPKFLDNQYPNWQQYLQELKKLQSIQNYLDSFETDLKVLKSSKDQPYFVEYKSSNQQIASGQRDYKDLDARILQFIFDRVKASDELLLNEIYFQAKKLKQKASSELEKLESSKKLDEVIANSQLSQILKSQHTNGIFEQGTFLHLVCKYYKQRQRARDSRLYIMPEYRYDKKLHKYNNTGRFDDDNQLLTYCNHKPRQKRYQLLNDLAGVLQVSPNFLKDKIGSDDDLFISKWLVEHIRGFKKACEDSLKIQKDNRGLLNHKINIARNTKGKCEKEIFNLICKIEGSEDKKGNYKHGLAYELGVLLFGEPNEASKPEFDRKIKKFNSIYSFAQIQQIAFAERKGNANTCAVCSADNAHRMQQIKITEPVEDNKDKIILSAKAQRLPAIPTRIVDGAVKKMATILAKNIVDDNWQNIKQVLSAKHQLHIPIITESNAFEFEPALADVKGKSLKDRRKKALERISPENIFKDKNNRIKEFAKGISAYSGANLTDGDFDGAKEELDHIIPRSHKKYGTLNDEANLICVTRGDNKNKGNRIFCLRDLADNYKLKQFETTDDLEIEKKIADTIWDANKKDFKFGNYRSFINLTPQEQKAFRHALFLADENPIKQAVIRAINNRNRTFVNGTQRYFAEVLANNIYLRAKKENLNTDKISFDYFGIPTIGNGRGIAEIRQLYEKVDSDIQAYAKGDKPQASYSHLIDAMLAFCIAADEHRNDGSIGLEIDKNYSLYPLDKNTGEVFTKDIFSQIKITDNEFSDKKLVRKKAIEGFNTHRQMTRDGIYAENYLPILIHKELNEVRKGYTWKNSEEIKIFKGKKYDIQQLNNLVYCLKFVDKPISIDIQISTLEELRNILTTNNIAATAEYYYINLKTQKLHEYYIENYNTALGYKKYSKEMEFLRSLAYRSERVKIKSIDDVKQVLDKDSNFIIGKITLPFKKEWQRLYREWQNTTIKDDYEFLKSFFNVKSITKLHKKVRKDFSLPISTNEGKFLVKRKTWDNNFIYQILNDSDSRVDGTKPFIPAFDISKNEIVEAIIDSFTSKNIFWLPKNIELQKVDNKNIFAIDTSKWFEVETPSDLRDIGVATIQYKIDNNSRPKVRVKLDYVIDDDSKINYFTNHSLLKSRYPDKVLEILKQSTTIEFESSGFNKTIKEMLGMTLAGIYNETSNN

SEQ ID NO: 229 - protein, 1629 aa, Francisella novicida
  Francisella novicida GA99-3548
MNFKILPIAIDLGVKNTGVFSAFYQKGTSLERLDNKNGKVYELSKDSYTLLMNNRTARRHQRRGIDRKQLVKKLFKLIWTEQLNLEWDKDTQQAISFLFNRRGFSFITDGYSPEYLNIVPEQVKAILMDIFDDYNGEDDLDSYLKLATEQESKISEIYNKLMQKILEFKLRKLCTDIKDDKVSTKTLKEITSYEFELLADYLANYSESLKTQKFSYTDKQGNLKELSYYHHDKYNIQEFLKRHATINDEILDTLLTDDLDIWNFNFEKFDFDKNEEKLQNQEDKDHTQAHLHHFVFAVNKIKSEMASGGRHRGQYFQEITNVLDENNHQEGYLKNFCENLHNKKYSNLSVKNLVNLIGNLSNLELKPLRKYFNDKIHAKADHWDEQKFTETYCHWILGEWRVGLKDQDKKEGAKYSYKDLCNELKQKVTNAGLIDFLLELDPCRTIPPYLDNNNRKPPKCQSLILNPKFLDNQYPNWQQYLQELKKLQIIQDYLESFETDLKVLKSSKDQPYFVEYKSSNQQIASGQRDYKDLDARILQFIFDRVKASDELLLNEIYFQAKKLKQKASSELEKLESSKKLDEVIANSQLSKILKSQHTNGIFEQGTFLHLVCKYYKQRQRARDSRLYIMPEYRYDKKLDKYNNTGRFDDDNQLLTYCNHKPRQKRYQLLNDLAGVLQVSPNFLKDKIGSDDDLFISKWLVEHIRGFKKACEDSLKIQKDNRGLLNHKINIARNTKGKCEKEIFNLICKIEGSEDKKGNYKHGLAYELGVLLFGEPNEASKPEFDRKIKKFNSIYSFAQIQQIAFAERKGNANTCAVCSADNAHRMQQIKITEPVEDNKDKIILSAKAQRLPAIPTRIVDGAVKKMATILAKNIVDDNWQNIKQVLSAKHQLHIPIITESNAFEFEPALADVKGKSLKDRRKKALERISPENIFKDKNNRIKEFAKGISAYSGANLTDGDFDGAKEELDHIIPRSHKKYGTLNDEANLICVTRDDNKNKGNRIFCLHDLANNYKLKQFETTDDLEIEKKIADTIWDASKKDFKFGNYRSFINLTPQEQKAFRHALFLADENPIKQAVIRAINNRNRTFVNGTQRYFAEVLANNIYLRAKKENLNTDKISFDYFGIPTIGNGRGIAEIRQLYEKVDSDIQVYAKGDKPQASYSHLIDAMLAFCIAADEHRNDGSIGLEIDKNYSLYPLDKNTGEVFTKDIFSQIKITDNEFSDKKLVRKKATEGFNTHRQMTRDGIYAENYLPILIHKELDEVRKGYTWKNSEEIKIFKGKKYDIQQLNNLLYCLKFVDKPISIDIQISTLEELRNILTTNNIAATAEYYYINLKTQKLHEYYIENYNTALGYKKYTKEMEFLRSLAYRSERVKIKSIDDVKQVLDKDSNFIIGKITLPFKKEWQRLYREWQNTTIKDDYEFLKSFFNVKSITKLHKKVRKDFSLPISTNEGKFLVKRKTWDNNFIYQILNDSDSRVDGTKPFIPAFDISKNEIVEAIIDSFTSKNIFWLPKNIELQKVDNKNIFAIDTSKWFEVETPSDLRDIGVATIQYKIDNNSRPKVRVKLDYVIDDDSKINYFTNHSLLKSRYPDKVLEILKQSTIIEFESSGFNKTIKEMLGMTLAGIYNETSNN

SEQ ID NO: 230 - protein, 1629 aa, Francisella tularensis; identical to SEQ ID NO: 30

SEQ ID NO: 231 - protein, 1629 aa, Francisella novicida
  Francisella novicida GA99-3549
MNVKILPIAIDLGVKNTGVFSAFYQKGTSLERLDNKNGKVYELSKDSYTLLMNNRTARRHQRRGIDRKQLVKRLFKLIWTEQLNLEWDKDTQQAISFLFNRRGFSFITDGYSPEYLNIVPEQVKAILMDIFDDYNGEDDLDSYLKLATEQESKISEIYNKLMQKILEFKLRKLCTDIKDDKVSTKTLKEITSYEFELLADYLANYSEILKTQKFSYTDKQGNLKELSYYHHDKYNIQEFLKRHATINDEILDTLLTDDLDIWNFNFEKFDFDKNEEKLQNQEDKDHTQAHLHHFVFAVNKIKSEMASGGRHRGQYFQEITNVLDENNHQEGYLKNFCENLHNKKYSNLSVKNLVNLIGNLSNLELKPLRKYFNDKIHAKADHWDEQKFTETYCHWILGEWRVGVKDQDKKDGAKYSYKDLCNELKQKVTKAGLVDFLLELDPCRTIPPYLDNNNRKPPKCQSLILNPKFLDNQYPNWQQYLQELKKLQSIQNYLESFETDLKVLKSSKDQPYFVEYKSSNQQIASGQRDYKDLDARILQFIFDRVKASDELLLNEIYFQAKKLKQKASSELEKLESSKKLDEVIANSQLSQILKSQHTNGIFEQGTFLHLVCKYYKQRQRARDSRLYIMPEYRYDKKLDKYNNTGRFDDDNQLLTYCNHKPRQKRYQLLNDLAGVLQVSPNFLKDKIGSDDDLFISKWLVEHIRGFKKACEDSLKIQKDNRGLLNHKINIARNTKGKCEKEIFNLICKIEGSEDKKGNYKHGLAYELGVLLFGEPNEASKPEFDRKIKKFNSIYSFAQIQQIAFAERKGNANTCAVCSADNAHRMQQIKITEPVEDNKDKIILSAKAQRLPAIPTRIVDGAVKKMATILAKNIVDDNWQNIKQVLSAKHQLHIPIITESNAFEFEPALADVKGKSIKDRRKKALERISPENIFKDKNNRIKEFAKGISAYSGDNLASGDFDGAKEELDHIIPRSHKKYGTLNDEANLICVTRDDNKNKGNRIFCLHDLANNYKLKQFETTDDLEIEKKIADTIWDASKKDFKFGNYRSFINLTPQEQKAFRHALFLADENPIKQAVIRAINNRNRTFVNGTQRYFAEVLANNIYLRAKKENLNTDKISFDYFGIPTIGNGRGIVEIRQLYEKVDSDIQAYAKGDKPQASYSHLIDAMLAFCIAADEHRNDGSIGLEIDKNYSLYPLDKNTGEVFTKDIFSQIKITNNEFSDKKLVRKKATEGFNTHRQMTRDGIYAENYLPILIHKELDEVRKGYTWGNSEELKIHKGKKYDIQQLNNLVYCLKFIDKSISIDIQISTLEELRNILTTNNIATTAEYYYINLKTQKLHEYYIENYNTALGYKKYTKEMEFLRSLAYRSERVKIKSIDDVKQVLDKDSNFIIGKITLPFKKEWQRLYREWQNTTIKDDYEFLKSFFNVKSITKLHKKVRKDFSLPISTNEGKFLVKRKTWDNNFIYQILNDSDSRVDGTKPFIPAFDISKNEIVEAIIDSFTSKNIFWLPKNIELQKVDNKNIFAIDTSKWFEVETPSDLRDIGVATIQYKIDNNSRPKVRVKLDYVIDDDSKINYFTNHSLLKSRYPDKVLEILKQSTIIEFESSGFNKTIKEMLGMTLAGIYNETSNN

SEQ ID NO: 232 - protein, 1323 aa, Fructobacillus fructosus
  Fructobacillus fructosus KCTC 3544
MVYDVGLDIGTGSVGWVALDENGKLARAKGKNLVGVRLFDTAQTAADRRGFRTTRRRLSRRKWRLRLLDELFSAEINEIDSSFFQRLKYSYVHPKDEENKAHYYGGYLFPTEEETKKFHRSYPTIYHLRQELMAQPNKRFDIREIYLAIHHLVKYRGHFLSSQEKITIGSTYNPEDLANAIEVYADEKGLSWELNNPEQLTEIISGEAGYGLNKSMKADEALKLFEFDNNQDKVAIKTLLAGLTGNQIDFAKLFGKDISDKDEAKLWKLKLDDEALEEKSQTILSQLTDEEIELFHAVVQAYDGFVLIGLLNGADSVSAAMVQLYDQHREDRKLLKSLAQKAGLKHKRFSEIYEQLALATDEATIKNGISTARELVEESNLSKEVKEDTLRRLDENEFLPKQRTKANSVIPHQLHLAELQKILQNQGQYYPFLLDTFEKEDGQDNKIEELLRFRIPYYVGPLVTKKDVEHAGGDADNHWVERNEGFEKSRVTPWNFDKVFNRDKAARDFIERLTGNDTYLIGEKTLPQNSLRYQLFTVLNELNNVRVNGKKFDSKTKADLINDLFKARKTVSLSALKDYLKAQGKGDVTITGLADESKFNSSLSSYNDLKKTFDAEYLENEDNQETLEKIIEIQTVFEDSKIASRELSKLPLDDDQVKKLSQTHYTGWGRLSEKLLDSKIIDERGQKVSILDKLKSTSQNFMSIINNDKYGVQAWITEQNTGSSKLTFDEKVNELTTSPANKRGIKQSFAVLNDIKKAMKEEPRRVYLEFAREDQTSVRSVPRYNQLKEKYQSKSLSEEAKVLKKTLDGNKNKMSDDRYFLYFQQQGKDMYTGRPINFERLSQDYDIDHIIPQAFTKDDSLDNRVLVSRPENARKSDSFAYTDEVQKQDGSLWTSLLKSGFINRKKYERLTKAGKYLDGQKTGFIARQLVETRQIIKNVASLIEGEYENSKAVAIRSEITADMRLLVGIKKHREINSFHHAFDALLITAAGQYMQNRYPDRDSTNVYNEFDRYTNDYLKNLRQLSSRDEVRRLKSFGFVVGTMRKGNEDWSEENTSYLRKVMMFKNILTTKKTEKDRGPLNKETIFSPKSGKKLIPLNSKRSDTALYGGYSNVYSAYMTLVRANGKNLLIKIPISIANQIEVGNLKINDYIVNNPAIKKFEKILISKLPLGQLVNEDGNLIYLASNEYRHNAKQLWLSTTDADKIASISENSSDEELLEAYDILTSENVKNRFPFFKKDIDKLSQVRDEFLDSDKRIAVIQTILRGLQIDAAYQAPVKIISKKVSDWHKLQQSGGIKLSDNSEMIYQSATGIFETRVKISDLL

SEQ ID NO: 233 - protein, 1374 aa, Fusobacterium nucleatum
  Fusobacterium nucleatum subsp. vincentii ATCC 49256
MKKQKFSDYYLGFDIGTNSVGWCVTDLDYNVLRFNKKDMWGSRLFDEAKTAAERRVQRNSRRRLKRRKWRLNLLEEIFSDEIMKIDSNFFRRLKESSLWLEDKNSKEKFTLFNDDNYKDYDFYKQYPTIFHLRDELIKNPEKKDIRLIYLALHSIFKSRGHFLFEGQNLKEIKNFETLYNNLISFLEDNGINKSIDKDNIEKLEKIICDSGKGLKDKEKEFKGIFNSDKQLVAIFKLSVGSSVSLNDLFDTDEYKKEEVEKEKISFREQIYEDDKPIYYSILGEKIELLDIAKSFYDFMVLNNILSDSNYISEAKVKLYEEHKKDLKNLKYIIRKYNKENYDKLFKDKNENNYPAYIGLNKEKDKKEVVEKSRLKIDDLIKVIKGYLPKPERIEEKDKTIFNEILNKIELKTILPKQRISDNGTLPYQIHEVELEKILENQSKYYDFLNYEENGVSTKDKLLKTFKFRIPYYVGPLNSYHKDKGGNSWIVRKEEGKILPWNFEQKVDIEKSAEEFIKRMTNKCTYLNGEDVIPKDSFLYSEYIILNELNKVQVNDEFLNEENKRKIIDELFKENKKVSEKKFKEYLLVNQIANRTVELKGIKDSFNSNYVSYIKFKDIFGEKLNLDIYKEISEKSILWKCLYGDDKKIFEKKIKNEYGDILNKDEIKKINSFKFNTWGRLSEKLLTGIEFINLETGECYSSVMEALRRTNYNLMELLSSKFTLQESIDNENKEMNEVSYRDLIEESYVSPSLKRAILQTLKIYEEIKKITGRVPKKVFIEMARGGDESMKNKKIPARQEQLKKLYDSCGNDIANFSIDIKEMKNSLSSYDNNSLRQKKLYLYYLQFGKCMYTGREIDLDRLLQNNDTYDIDHIYPRSKVIKDDSFDNLVLVLKNENAEKSNEYPVKKEIQEKMKSFWRFLKEKNFISDEKYKRLTGKDDFELRGFMARQLVNVRQTTKEVGKILQQIEPEIKIVYSKAEIASSFREMFDFIKVRELNDTHHAKDAYLNIVAGNVYNTKFTEKPYRYLQEIKENYDVKKIYNYDIKNAWDKENSLEIVKKNMEKNTVNITRFIKEEKGELFNLNPIKKGETSNEIISIKPKLYDGKDNKLNEKYGYYTSLKAAYFIYVEHEKKNKKVKTFERITRIDSTLIKNEKNLIKYLVSQKKLLNPKIIKKIYKEQTLIIDSYPYTFTGVDSNKKVELKNKKQLYLEKKYEQILKNALKFVEDNQGETEENYKFIYLKKRNNNEKNETIDAVKERYNIEFNEMYDKFLEKLSSKDYKNYINNKLYTNFLNSKEKFKKLKLWEKSLILREFLKIFNKNTYGKYEIKDSQTKEKLFSFPEDTGRIRLGQSSLGNNKELLEESVTGLFVKKIKL

SEQ ID NO: 234 - protein, 1367 aa, Fusobacterium sp.
  Fusobacterium sp. 1_1_41FAA
MKKQQFSDYYLGFDIGTNSVGWCVTDFNYNVLRFNKKDMWGSRLFDEAKTAAERRVQRNSRRRLKRRKWRLNLLEEIFSDEILKIDSNFFRRLKESSLWLEDKSSKEKFTLFNDDNYKDYDFYKQYPTIFHLRNELIKNPEKKDIRLVYLALHSIFKSRGHFLFEGQNLKDIKNFETLYNNLMAFLEDNDIYKNIDSSYIGNLENIICDSKKGLKDKEKEFKEIFNSDKQLVGFFKLSVGSSVSLNDLFDTDEYKKGEVEKEKISFREQIYEDDKPIYYSILGEKIEFLDIAKSFYDFMVLNNILADSQYISEAKVKLYDEHKRDLKNLKYIIRKYNKENYDKLFKDKNESNYSAYIGLNKEKGKKEVIEKSRLKIDDFAKIIKGYLPKAEKIDEKDRSIFNEILDKIELKTILPKQRISDNGTLPYQIHEAELEKILENQAKYYDFLNHEENGISTKDKLLMTFKFRIPYYVGPLNSYHKNKGGNSWIVRKEEGKILPWNFEQKVDIEKSAEEFIKRMTNKCTYLNGEDVIPKDSFLYSEYIILNELNKVQVNDEFLNKEIKKKIIEDLFKKSKKISEKNFREYLLVNQITNKTVELKGVKDAFNSNYVSYIKFKDIFGDKLNLDIYKEISEKSILWKCLYGDDKKIFEKKIKSVYGDILTKDEIKKINSFKFNTWGRLSEKLLTEIEFIDLETGECYSSVMDALRRTNYNLMELLSSKFTLQENIDNENKEVSEFSYRDLVEESYVSPSLKRAILQTLKIYEEIRKITGRIPKKVFIEMARGGDETMKNKKIPARQEQLKKLYDSCGKDISNFSIDIKEMKNSLNSYDNNSLRQKKLYLYYLQFGKCMYTGKEIDLNRLLQNNDTYDIDHIYPRSKVIKDDSFDNLVLVLKNENAEKSNEYPLKKEIQEKMKSFWKFLKEKNFISDEKYKRLTGKDEFELRGFMARQLVNVRQTTKEAGKILQQIEPEIKIVYSKAEIASSFREMFDFIKVRELNDTHHAKDAYLNIVAGNVYNTKFTEKPYRYLQEIKENYDVKKIYNYDIKNAWDKEKSLEIVKKNMEKNTVNITRFIKEEKGQLFDLNPIRKGETSNEIIAIKPKFYEGSTEKLNEKYGYYKSLNPAYFIYVEHKEKNKIIRSFERVNLVDVNKIKDEKSLIKYLIENKGLIEPKVIKKVYKRQVILINNFPYSIVALDSNKLMDFENLKPLFLERKYEKILKNAIKFLEDNQGKTEEYYKFLYLKKKDRNEKNETIDSVKERYNIEFNEMYDKFLEKLDSKDYKNYINNKKYSELVNVKEKFIKLNLFDKAFTLKSFLDLFNRKTMADFSKVGLTKYLGKIQKISSNVLSKNELHLLEESVTGLFVKKIKL

SEQ ID NO: 235 - protein, 1367 aa, Fusobacterium sp.
  Fusobacterium sp. 3_1_27
MKKQKFSDYYLGFDIGTNSVGWCVTDLDYNVLRFNKKDMWGSRLFDEAKTAAERRVQRNSRRRLKRRKWRLNLLEEIFSDEIMKIDSNFFRRLKESSLWLEDKNSKEKFTLFNDDNYKDYDFYKQYPTIFHLRDELIKNPEKKDIRLIYLALHSIFKSRGHFLFEGQNLKEIKNFETLYNNLISFLEDNGINKSIDKDNIKKLEKIICDSGKGLKDKEKEFKEIFNSDKQLVAIFKLSVGSSVSLNDLFDTDEYKKEEVEKEKISFREQIYEDDKPIYYSILGEKIELLDIAKSFYDFMVLNNILSDSNYISEAKVKLYEEHKKDLKNLKYIIRKYNKENYDKLFKDKNENNYPAYIGLNKEKGKKEVVEKSGLKIDDLIKVIKGYLPKPERIEEKDKIIFNEILNKIELKTILPKQRISDNGTLPYQIHEVELEKILENQSKYYDFLNYEENGVSTKDKLLKTFKFRIPYYVGPLNSYHKDKGGNSWIVRKEEGKILPWNFEQKVDIEKSAEEFIKRMTNKCTYLNGEDVIPKDSFLYSEYIILNELNKVQVNDEFLNEENKRKIIDELFKENKKVSEKKFKEYLLVNQIANRTVELKGIKDSFNSNYVSYIKFKDIFGEKLNLDIYKEISEKSILWKCLYGDDKKIFEKKIKNEYGDILNKDEIKKINSFKFNTWGRLSEKLLTGIEFINLETGECYSSVMEALRRTNYNLMELLSSKFTLQESIDNGNKEMNEVSYRDLIEESYVSPSLKRAILQTLKIYEEIKKITGRVPKKVFIEMARGGDETMKNKKIPARQEQLKKLYDSCGNDIANFSIDIKKMKSSLSSYDNNSLRQKKLYLYYLQFGKCMYTGREIDLDRLLQNNDTYDIDHIYPRSKVIKDDSFDNLVLVLKNENAEKSNEYPVKKEIQEKMKSFWRFLKEKNFISDEKYKRLTGKDDFELRGFMARQLVNVRQTTKEVGKILQQIEPEIKIVYSKAEIASSFREMFDFIKVRELNDTHHAKDAYLNIVAGNVYNTKFTEKPYRYLQEIKENYDVKKIYNYDIKNAWDKENSLEIVKKNMKKNTVNITRFIKEEKGQLFDLNPIKKGETSNEIISIKPKLYNGKEEKLNEKYGYYKSLNPAYFLYVEHKEKNKRIKSFERVNLVDVNNIKDEKSLVKYLIENKKLVEPRLIKKVYKRQVILINDYPYSIVALDSNKLMDFENLKPLFLENKYEKILKNVIKFLEDNQGKSEENYKFIYLKKKDRYEKNETLESVKDRYNLEFNEMYDKFLEKLDSKDYKNYINNKKYKNLLDVKEKFIKLNLFDKAFTLKSFLDLFNRKTMADFSKVGLTKYLGKIQKISSNVLSKNELYLLEESVTGLFVKKIKL

SEQ ID NO: 236 - protein, 1367 aa, Fusobacterium sp.
  Fusobacterium sp. 3_1_36A2
MKKQKFSDYYLGFDIGTNSVGWCVTDLDYNVLRFNKKDMWGSRLFDEAKTAAERRVQRNSRRRLKRRKWRLNLLEEIFSDEIMKIDSNFFRRLKESSLWLEDKNSKEKFTLFNDDNYKDYDFYKQYPTIFHLRDELIKNPEKKDIRLIYLALHSIFKSRGHFLFEGQNLKEIKNFETLYNNLISFLEDNGINKSIDKDNIKKLEKIICDSGKGLKDKEKEFKEIFNSDKQLVAIFKLSVGSSVSLNDLFDTDEYKKEEVEKEKISFREQIYEDDKPIYYSILGEKIELLDIAKSFYDFMVLNNILSDSNYISEAKVKLYEEHKKDLKNLKYIIRKYNKENYDKLFKDKNENNYPAYIGLNKEKGKKEVVEKSGLKIDDLIKVIKGYLPKPERIEEKDKTIFNEILNKIELKTILPKQRISDNGTLPYQIHEVELEKILENQSKYYDFLNYEENGVSTKDKLLKTFKFRIPYYVGPLNSYHKDKGGNSWIVRKEEGKILPWNFEQKVDIEKSAEEFIKRMTNKCTYLNGEDVIPKDSFLYSEYIILNELNKVQVNDEFLNEENKRKIIDELFKENKKVSEKKFKEYLLVNQIANRTVELKGIKDSFNSNYVSYIKFKDIFGEKLNLDIYKEISEKSILWKCLYGDDKKIFEKKIKNEYGDILNKDEIKKINSFKFNTWGRLSEKLLTGIEFINLETGECYSSVMEALRRTNYNLMELLSSKFTLQESIDNGNKEMNEVSYRDLIEESYVSPSLKRAILQTLKIYEEIKKITGRVPKKVFIEMARGGDETMKNKKIPARQEQLKKLYDSCGNDIANFSIDIKKMKSSLSSYDNNSLRQKKLYLYYLQFGKCMYTGREIDLDRLLQNNDTYDIDHIYPRSKVIKDDSFDNLVLVLKNENAEKSNEYPVKKEIQEKMKSFWRFLKEKNFISDEKYKRLTGKDDFELRGFMARQLVNVRQTTKEVGKILQQIEPEIKIVYSKAEIASSFREMFDFIKVRELNDTHHAKDAYLNIVAGNVYNTKFTEKPYRYLQEIKENYDVKKIYNYDIKNAWDKENSLEIVKKNMKKNTVNITRFIKEEKGQLFDLNPIKKGETSNEIISIKPKLYNGKEEKLNEKYGYYKSLNPAYFLYVEHKEKNKRIKSFERVNLVDVNNIKDEKSLVKYLIENKKLVEPRLIKKVYKRQVILINDYPYSIVALDSNKLMDFENLKPLFLENKYEKILKNVIKFLEDNQGKSEENYKFIYLKKKDRYEKNETLESVKDRYNLEFNEMYDKFLEKLDSKDYKNYINNKKYKNLLDVKEKFIKLNLFDKAFTLKSFLDLFNRKTMADFSKVGLTKYLGKIQKISSNVLSKNELYLLEESVTGLFVKKIKL

SEQ ID NO: 237 - protein, 1391 aa, Galbibacter sp.
  Galbibacter sp. ck-I2-15
MKTILGLDLGTNSIGWALVKEAENENEVSDIIKLGVRVNPLTVDELTNFEGGKAYSNNAERTLKRGARRNLQRYKLRRENLIEILLKNGLINKDTALTEVGKETTHQTLKLRSKSANEKVSLEDLAKILLSINKKRGYKSSRKVNAEDDGVAIDGMEVAKLLYDENMTPGEYVLRLLESGKKHLPDFYRSDLQEEFNLVWKKQSEFYPLILTKELFFELHGKNKSQTWAICKEPLGIVGVKLKGSAKEQKFARYRLRKEALTQQIELEHLAIVLQDINNDSNKSSGYLGAISDRSKELFFNKETVGQYQYKQLQKDPNTSLKNQVFYRQDYLDEFEVIWRNQAKFYPQLTNELKQEIRDVVIFYQRKLKSQKNLISFCQFESTQQNYVEKETGKTKIRTIGRRVIPRSSPLFQEFKIWQSLNNLKFVNSESNQIIQFIELEDDVKKVVFDELNLRGDLKPNQVLKILSKYMKIGKLTQWKCNLEEIEGNRTNSALYNVFQMIAEEEGYGFNWGKKSALEIKSELKAIFSSIGINDSILDFDFSKKLDQQLSYQLWHLLYSAEEGNSKITEEDKFTYGNTGVALKKKLHLKFGFKPEYSTLISNLRFTSDYGNLSSKAISKILPFLRDGSDYSKACQYAGYNHSNSLSADELDNRELKPKLELLKKNSLRNPVVEKILNQMVNVVNQVIDNYGKPDEVRIELARELKKSAKERSQMTKNISDATRRNAEIKKYLSKEFGIPNPTKGDVIRYRLWEELASNGYKDLFRDKYIPKEKLFSNEIDIEHIIPKALLFDDSFSNKTLAFKVDNLKKADRTAFDFMSTDFSKDVDSYIGRIETLHKDGKISSSKYKKLMIPKSKLVDGFIERDLRNTQYIAKQARKMLLEVFKTVVPTTGKITDKLREDWDLINVMKELNFPKYKALGLTKKIERFDVGSEKIKSINVIEGWSKRNDHRHHAMDALAVAFTTHNHIQYLNYLNARKDIHHEMHGTIKSIENQIIGKDVMGKRRFIPPISDLRMKAKLQIESILISFKNKNKVVTWSVNKTKLKGKDNYNKRRQLTPRGQLHKETVYGKIKLIDPKPLKLNNKFTLVRASMIVDKVHREIVLQHLSKYDNNSEVAFDSKTIKIDPILIEGIGLKEVVCYEDVFKIRKKISGDNFKNEKHLEKVIDEKVKQILKDRVIKFQGNFKEAFSNLEENPIWLNKSKGIAVKSVAIKGVNNAESLHEGKDHFGDQILDKNKKQIPVDFVSTGNNHHVGIYEDKDGNLQERVVSFFEAVTRVNEGLPIIDKTYNSDIGWKFKFTMKQNEMFVFPSDDFDPNEFDLTDGKNAAKISPNLYRVQKIATKNYMFRHHLETVVTNDLEFTYKSIRSTGWLRNLVKVRINHLGEIVYVGEY

SEQ ID NO: 238 - protein, 1025 aa, Unknown
  Description of Unknown: gamma proteobacterium HdN1 polypeptide
MGGYMPQLMRYRLALDIGSTSIGWAMIRLSMQNEPIAIIRMGVRIFSDGRNPKDGSSLAVTRRVARQMRRRRDRLLKRKTRLLNALVQKKFFPEDADARKALVVLNPYELRKEGLYRQLSGPEFGRALFHISQRRGFLSNRKTDKKDNDSSVLKKAIVDLRQQLEVENCQTIGEWLFKQQQSGKSVRARLRGKTQKDKAYDFYIDRAMIAHEFDTLWVSQAKYDPLLFNEDARAILRDILLYQRPLKPVKPGRCTLIPDESRAPLALPLTQQARIYQELNHLRITTPALGAQALTVAQRNTIAALLEKSDVTFVKIAKALGLTSTTEFNLQDIKRDRLKGNATAIILARNQYFGRRWHDFNADLQNLIVDKLVNEGSETALIEWLKANTDVDESAAERVSGVTLPEGYGSLSVAALRRLLPALKEDVVVYSEAVKRAGFDSHSALSLIEQTGELYQELPYYGEVLQRHVGFGSGDPNDSPERRFGKIANPTVHIGLNELRKIINALIKRYGNPAEVVVELARDLKLSREKRKEIQEEQKQRQDRNEKRIKDACEILGIDPLVIDRGKRREISQKMQLWDELNPKDAANRRCPYTGDQISIEKLLSAEVEIEHILPFSKTLDDSLNNKTVAMRRANRDKGNRTPYEAFGESLNPDYDYDAILQRASLMPREKRKRFASDGYQQWLRDDKDFLSRALNDTAYLSRIAKEYLTLICPPNSVRAIPGRMTAQLRAMFGLNRLLSEGGIKNREDHRHHAIDAAVIGVTDQGLLQKFSRASARTRELQLSRLVDDMPLPWDTYREHVTRALEHLVVSHKPDHGYQGKMHEDTAWGLRDNGQVTRRVRSEDGGPRQRLLENKNVVKINSTRDFSRHGIDEQGQVNAYKGYVGGSNYCIEIWIDEKGKWNSDVVSTFQAYQIVRELGEKAAWQKLRNPLLSLSAKPLVMRLIIDDVVKMQIAGQNKIMRVVKIAQNGQIFFAEHNEANVDARDKDKNNPFKYISKTAGSLQKAGGIHMAISPIGDARPVRYGR

SEQ ID NO: 239 - protein, 1397 aa, Unknown
  Description of Unknown: gamma proteobacterium HTCC5015 polypeptide
MTKNYISPIAIDLGAKFTGVALYQYLEGADCTQEVAKGLLVDDRGNVTWSQEGRRGKRHQVRGYKRRKMAKRLLWLILDSEYGIKREEVTEPLLKFINGLLNRRGYTYISEEVDEESMNVSPLPFSEMMPDYFNSSAPLLEQLAKLLSDKNKLVRFRAEGKIPSNKNEFKKLLDTALDGKYKDEKKELSEAWGNILIASENVLKSTVDGHKSRSEYLANIKEDIKSNEELEKQISSKEIDGFYNLVGHLSNFQLRLLRKYFNDPNMSGVSYWDEKRLEKYFYQWVQGWHTKGGTDEAEKKNIILKTKGAPLLKTLKSLSADLTIPPYEDQNNRRPPKCQSVLLSDEKLTMHYPKWKEWVGQLVKQNDNAYLNENVTLANALHRIVERSRSIDPYQLRLLISITDAEKRNDLAGYKRLKLSLGSEVDEFLLLVKNIVDETKEAREGLWFETENKLFFKCGKTPPRKEKLKSTLLSAVLGKNLSDDEQSSFIEEFWKSGTPKIERRNVRGWCRLASQVQKTYGVYLKEYGLQQLHKLEAGKKLDDKPLALLYKNSGLIASKIGEALNIEPDEVSRFASPHSLAQIFNIIEGDVAGFNKTCRACTYENIWRMQEEKVESLLTNQLLSEIHGERKVPLKSAMCTRLSADSTRPFDGQMASIIEHIARKIAQHKIAQINDVPKEFSIDIPIIIESNQFSFTAELEEIKRGRGSAKAKKAKELGEKSKAGWVSKTERIKTSSEGICPYTGAPLGGSGEIDHIIPRSLTGRTKKTVFNSEANLIYCSSKGNHDKGNRVYVIEQLNDKYLKKQFSTSDVNLIKKKIKTTIQRFTEGGEKLRSFSELSREDQKAFRHALFVPELKSEVTSLLAVKNITRVNGTQAWLAKKIASLLAEHLDKQGRDYTLSAHQIDPWSVSKQRKMLASAEPIWAKKDPQPAASHVVDAVCTFLEALEQPHTASRLKTISSTSFEKTGWRSALIPDLIKVDALDRRPKYRRYNIGSTSLFKDGIYAERFLPILIDENGLMAGYDIDNSLKAKGADVVFESLSPFLLFKGEEVGAQSLSDWQERIDGRYLYMSIDKVKAFDYLQEKVGEKDIAAELLNSIHFTQRKTELRAKFSDDSGKKMKTLDAIRKSLKLTVTVNEIGKRKEKCGFSGTIGIPAKSAWENLLDEPLLETYWGTKMPPQEIWEKVYRKHFPRNIPNQAHRKVRKDFSLPVVDSVSGGFRVKRKTPNGYNYQLLAIDGYSAVGFKKEGDNVDFKSPALVPQIAESKSVTPISSELVHLDKNEIVYFDEWRKIDISDSDLKQFVSSLELAPGSQNRFYIRFTVDEDQFERHFKSALRVNGIQDLDTVNKTFDWNREIPSLLIPPRSNLFLLETGQKITFEYIANGANAEVKKAYSLRRA

SEQ ID NO: 240 - protein, 1186 aa, Gardnerella vaginalis
  Gardnerella vaginalis 1500E
MEGNISYAIGIDVGLNSVGLAAIRLDNNGEPIRILKAMSVIHDAGIDPNGAKESDTRKAISGVARRVRRLYRQRRRRLQKLDFLLHSLGFPVVENKDLDFSDSFIPWIFRAKLADEYIADEKQRKQMLSVAIRHIARHRGWRNPYQSIKSMTQETEYSEFYNELLKNIEKFAPGVGCEGSTPAQLVRDYLLLQQGKASRRLRITTDEKRKNHPNSLNPILPRKLMQSDNMLEILNIFNVQHIDDKYVREQIINAVFYAKSPRGSAENRVGKDAITGKGKRALKASLAFQKYRIISTISNLRIRENSKERCLTIEEKQSVYKLLTTSTDESSKEKSAEAPLYTWIDVADCLGIERYKLRGVGSQIGDGESVGNRPPMLNSELAIIYANNKSLGKSLLTWWLDANRTQEDKEALIEILSNTVDIEAIHDNPEYQDKYGSAIAFIDSMDETEIAALENISLPDGRAAYSLETLDKLNKQMLETDDDLFEARKKLFNLPNNWRPSEAPIAEPTGNPSVDRVLKIVHRFLISAKNRWGNPERINIEHVRSGFKSKKMANSYKELLDKRTKGKENLKAMMRNSLHLGMSDSISDADIRRYEAVQRQNGQCLYCGSEITYHTCELDHIVPRKGPGSTNTRENLVATCSLCNAQKCNTPFSTWCEQSTYCKNHDISVDSAINRVRAFIFPPNSYDKRGANQFKKEVIARLKQKVGDEAFDNRSIESVAWMANELHRRIDWYYNSQNYQTNNGISDITNKAQTNVGVYAGSLTAIARRMSGIDGKLEFFDGRRKTRFDRRHHAVDASVIAMMTPGIAQILAIKCNLRETQLLQGNKVVPGGIDWKEYPTANDQGYQQYANWSVRMNALLKLLNEEMRADRIAVVNSIRLRYNNSSVHQYKVNALLKLHVGDEIDSGTIRRSSTPALYCALTRNPDYDVNNGLPENPNRAILLHDKKLNADDSITFFKAQAVQLFVREGSAEIGSSTHHLRIYEYFKKLKSGKIKKSYGMIRVFQNDLHRHIHEDLFSCDLPEQSISMRYADTEVAHAVQTGNSNYLGYLVPGDEIIVDFSHVKLSGNIGTFVEFLNKIGANCAAYNHWVVVGTDTEKVLILKPSMISSEGIDKLYSNCKRNNFDYSSYEKSINEILVGKGWRVSVNVLAKYNAETIRRNALGEVRWTSRSHLPISWSWNTGENRE

SEQ ID NO: 241 - protein, 1186 aa, Gardnerella vaginalis
  Gardnerella vaginalis 284V
MEGNISYAIGIDVGLNSVGLAAIRLDDYGEPIRILKAMSVIHDAGIDPNGAKESDTRKAISGVARRVRRLYRQRRRRLQKLDFLLQSLGWPVVENKDLDFSDSFIPWIFRAKLADEYIADEEQRKQMLSVAIRHIARHRGWRNPYQSIKSMMQETEYSEFYNELLKNIEKLAPGVGCEGSTPAQLVRDYLLSQQGKASRRLRITTGGRRKNHPHSLDPVLPRKLMQSDNMLEILNIFNVQHIDDKYVREQIINAVFYAESPRGSAENRVGKDAITGKGKRALKASLAFQKYRIISTISNLRIRENSKERCLTIEEKQNVYKLLTTSIDKSSKRKSAEAPLYTWIDVADCLGIERYKLRGVGSQIGDGESVGNRPPMLNSELAILYANNKSLGQSLITWWLASNRTQEDKEALIEILSNTVDIEAIHDNPEYQDKYGSAIAFIDSMNETEIAALENISLPDGRAAYSLETLDELNKQMLETDDDLFEARKKLFNLPNNWRPAEAPIAEPTGNPSVDRVLKIVHRFLISAKNRWGNPERINIEHVRSGFQSKKMANSYKELLDKRTEGKENLKAMMRNSLHLGTSDSISDADIRRYEAVQRQNGQCLYCGSEITYHTCELDHIVPRKGPGSTNTRENLVATCSSCNAQKCNTPFATWCEQSTYCKNHDISADSAINRVRAFIFPPNSYDKRGANQFKKEVIARLKQKVGDEAFDNRSIESVAWMANELHRRIDWYYNSQNYQTNNGISDISNKAQTNVGVYAGSLTAIARRMSGIDGKLEFFDGRRKTRFDRRHHAVDASVIAMMTPGIAQILAIKCNLRETQLLQGNKVVPGGIDWKEYPTANDQGYQQYANWSVRMNALLKLLNEEMRADRIAVVNSIRLRYSNSSVHQYEVNALLKLHVGDEIDSETIRRSSTPALYCALTRNPDYDVNNGFPENPGRTILLHNKKLNADDSITFFKAQAVQLFVREGSAKIGNSIHHLRIYEYFEKLKSGKIKKSYGMIRVFQNDLHRHIHEDLFSCDLPEQSISMRYADTKVAHAVQTGNANYLGYLVPGDEIIVDFSHITLSENIGKFVEFLNKIGADCTAYRHWVVVGTDTEKVLILKPSMISSEGIDKLYSNCERNNFDYSSYEKSINEILAGKGWRVSVNVLAQYKAATIRRNALGEVRWASRSHLPISWSWDTGENRE

SEQ ID NO: 242 - protein, 1186 aa, Gardnerella vaginalis
  Gardnerella vaginalis 5-1
MEGNISYAIGIDVGLNSVGLAAIRLDNNGEPIRILKAMSVIHDAGIDPNGAKESDTRKAISGVARRVRRLYRQRRRRLQKLDFLLHSLGFPVVENKDLDFSDSFTPWIFRAKLADEYIADEKQRKQMLSVAIRHIARHRGWRNPYQSIKSMTQETEYSEFYNELLKNIEKFAPGVSCEGSTPAQLVRDYLLSQQGKASRRLRITTDDRRKNHPNSLDPVLPRKLMQSDNMLEILNIFNVQHIDNKYVREQIINAVFYAKSPRGSAENRVGKDAITGKGKRALKASLAFQKYRIISTISNLRIRENSKERCLTIEEKQSVYKLLTTSTDEYSKEKSAEAPLYTWIDVADCLGIERYKLRGVGSQIEDGESVGNRPPMLNSELAILYANAKSLKQSLITWWLAANRTQEDKEAFIEILSNTVDIEAIHDNPEYQDKYGSVIAFIDSMDETEIAALENISLPNGRAAYSLETLDKLNKQMLETDDDLFEARKKLFNLPNNWRPSEAPIAEPTGNPSVDRVLKIVHRFLISAKNRWGNPERINIEHVRSGFQSKKMANSYKKLLDKRTEGKENLKAMMRNSLHLGTSDSISDADIRRYEAVQRQNGQCLYCGSEITYHTCELDHIVPRKGPGSTNTRENLVATCSSCNAQKCNTPFATWCEESTYCKNHDISVDSAINRVRAFIFPPNSYDKRGASQFKKEVIARLKQKVGDEAFDNRSIESVAWMANELHRRIDWYYNSQNYQTNNGISDITNKAQTNVGVYAGSLTAIARRMSGIDGKLEFFDGRRKTRFDRRHHAVDASVIAMMTPGIAQILAIKCNLRETQLLQGNKVVPGGIDWKEYPTANDQGYQQYANWSVRMNALLELLNEEMRADRIAVVNSIRLRYSNSSVHKDDVHALLKLHVGDEIDSETIRRASTPALYCALTRNPDYDVNNGLPENTDRTILLHDKKLNADDSITFFKSKAAQLFVREGSVEIGNSIHHLRIYEYFEKLKSGKVKKSYGMIRVFQDDLHRYIHEDLFSCDLPEQSISMRYADTKVAHAVQTGNANYLGYLVPGDEIIVDFSHVKLSGYIGEFVEFLNKIGANCAAYKHWVVAGTDDKTTLILKPSMISSEGIDKLYSNCERNNFDYASYEKSIDKILVDKGWRVSVNVLDQYKAATIRRNALGEPRWASRSHLPISWSWDTGENRE

SEQ ID NO: 243 - protein, 1392 aa, Gemella haemolysans
  Gemella haemolysans ATCC 10379
MANKTWYLGLDIGSASVGWAATDTGYKIIRKNKKRLWGVRLFEEAKTAEDRRGYRSSRRRLARRKWRLNLLEELFTSEVKKVDENFFLRLKESQYHYEDKTHKVPYAIFNDKDYTDKDYYKDYPTIYHLRSKLMTEENPDIRKVFLAIHHIIKNRGHFLLQGQSFKDGNLNNLIKELLELDILHVGFEVTEEVVDKIADISLEKKTSKDKLNDIKELYPKEKQLLEVFRLIFGGKTSLDKLFAIDEYKELDAAIKSVSFKEKIYEEVRHDYEQVLSNYIELLDLAKLVYDSIILSDIKKEGKTLSESKVELFEKHRDDLLKLKNLVKNDSKLSEDKKVELYALIFKEDKDKGTNYVNYIRKSEEGKGCNYEDFKKFLVKELAKLEESSVKTEIIKDLELEQFLPLQRTKDNSVVPYQIHKEELVKILDNAARYHSFLNEKDESGYNVREKVIQLLEFRIPYYVGPLNSSKKAKEGGFAWSVRNTGYENTPVTPWNYSKVIDESASAEKFITNLTNKCTYLKGEDVLPKSSLLYSEFALLNELNALKYDGNRISLEARNTIIEKLFKQQGKKVTKTSIKNLLKAEGYIDGKGEITGIDITVKNDLKSYRDFKKILGNKFNSEHVENIILWITLYGESRKLIKAKIESVYGEVYSKDEITKMSRLVYKDWGRFSRKLLTELVSKKLYNEETGECLNIIGAMRQNNILFMELLADRFDYSKQIVEFNKELQEDVTEIAPEILDDLYVSPAVKRSIWQTVRIVEELKKIIGCAPAKIFVETTRSNQEKKKPTDSRKKQLELAYKAVKKDVKELEKEIGTINFDVLNDRLSSVEPSKLKAKKLYLYYTQLGRCMYSEEPINISELFDNNKYDIDHIYPQSKIKDDSFTNTVLVKRESNAAKTDRYPLGSDIQTPSNRRFWKFLKEKGLISDEKYNRLVRTEEFSDEELSGFIARQLVETSQSVKAVASILGELNPETSICYSKAENVSSFRQNFGKIKKGDRDSKNNDQLIKVREINDYHHAKDAYLNVVVGNVYDTKFTRNVFNFIKDKKDGRKYSLNKVFYENVSDSKTVAWEMDKTIHQVEKVMNNNNIMVTRRTSEQKGGLFDATVYKAKVAAKAKDGVYYPLKTSNSVVKDVAKYGGYTSIGIAYYSIFEYTIVNKKGEEKITRIIPIPIYISQNIKDSTALIEFGKSQIFCRAYEKIKDFKLLYRKLCIGSKININNYQYYIGGKSDERFYYDSAIQVTLDKKSEKYLKILSKYQNWKKENKDGELWENITKENNIELYNKLVEKMNSEIFTKKKSNKYNELNSEEIRNNFIKISVEEQAKVLLEILNLLTNKKSIFDLKSIDIKAARGKISFNLTSLIQFSIIEQSITGFYEKEITIIGDKGNDMENNNS

SEQ ID NO: 244 - protein, 1385 aa, Gemella morbillorum
  Gemella morbillorum M424
MKNKTWYLGLGVGPTSIGWAATDSNYKLLRKNKKRLWGVRLFEEAKTAVDRRTFRAERRRLARRKWRISLLEELFAKEVSKNDPNFFLRLKESKYHFEDKSLMNEYILFNDKDYTDKDYYKEYPTIYHLRLSLTTEENPDIRKVYLAVHSMLKNRGHFLLQGQSFNDSNIDSVIKELLELETVKINFEVTDEVIHSLKKIALEKKNLSDKNNDVKKLYPKEKQLQEIFKLVFGGKTSLDKLYDIEEYKELDNSVKSISFKEKVYEEVRPDYEQILSNYIELLDLAKLVYDSIVLADIKKEGKTISESKVELYNKHKDDLANLKKLVKIDSKLSEDKKKEVYFTIFKEDKEKGTNYVNYTHRSQEGKSCSYEDFKKFLKKELEKLEDSPTKTTILEELDLETFLPLQRTKDNSVVPYQIHKEELVKILDNAAKYHSFLAEKDDSGYSTREKVVQLFEFRIPYYIGPLNAHHNTENGGYSWAIRKKGMESVPVTPWNFKDVIDESASAEAFVNNLKNKCAYLSGEDVLPKNSLLYSEYALLNELNALRYEGNRISVEARDVIVTKLFKEQGKKVTKKTIKELLKTEGFIDGKGEIVGIDNIVKNDLKSYRDFKKILADKFDKERVENIILWITLYGESRKLIKEKITKVYGDFYTVDEIEKMSRLTYKDWGILSRKLLTELVSEKLYNEETGECLNIIGAMRQGTILFMELLADKFDYMSQIKNHNKENKDDITEITPDILENLHASPAVKRSIWQTVRIVEELKTIIGCVPTKIFIETTKRNNAPYKVPTLNRNDLVTKYKTIREHEIFELEKELKNTLDFTLNKNRLINEEPSKLKATKLYLYYTQLGRCMYTGKKIDLGELFDNNNKYDIDHIYPQSKVKDGSFNNIVLVTKASNDMKADVFPLKSKFQTKENKIFWRFLKEKKLITEEKYNRLVRTEEFSNGELTGFITRQLVETSQAIKVISNVLRELNPETTICYSKAENVSSFRQSFGKIKEANRKAENNEKLIRVQEINDYYNAKDAYLSIVVGNVYDVKFTRNVHNFIKNNKDARRYSLNGLFYTDVKNANTIAWEMDKTVHVVEKTMNNNNILITRRTSEQKGALYDATLYKAKVAEKAKEGTYYPLKTTDSKIKDVGKYGGFTKIKIAYYSIFEYTLDGKKGKQKITRIVPIPIYISQNIKDDKALLEYAQTRLPGKDLKIKYRKLCIGSLVKINNFNYYIGGKTNNNFTFDSAVQVILDKDSESYIKELAKYLNWKKENKDGKLWESITEDKNIQLYDSLVKKMNTGIFIRKTPNKYTELLTLEVKNKFINIDIDEQVKLLLEILNLLTNKKFTSKLNEIGITASRGVCSFNLSNQSQFSIIEQSVTGVYEKEKLIIEKKKEGIL

SEQ ID NO: 245 - protein, 1003 aa, Gluconacetobacter diazotrophicus
MIDESLTFGIDLGIGSCGWAVLRRPSAFGRKGVIEGMGSWCFDVPETSKERTPTNQIRRSNRLLRRVIRRRRNRMAAIRRLLHAAGLLPSTDSDALKRPGHDPWELRARGLDKPLKPVEFAVVLGHIAKRRGFKSAAKRKATNISSDDKKMLTALEATRERLGRYRTVGEMFARDPDFASRRRNREGKYDRTTARDDLEHEVHALFAAQRRLGQGFASPELEEAFTASAFHQRPMQDSERLVGFCPFERTEKRAAKLTPSFERFRLLARLLNLRITTPDGERPLTVDEIALVTRDLGKTAKLSIKRVRTLIGLEDNQRFTTIRPEDEDRDIVARTGGAMTGTATLRKALGEALWTDMQERPEQLDAIVQVLSFFEANETITEKLREIGLTLAVLDVLLTALDAGVFAKFKGAAHISTKAARNLLPHLEQGRRYDEACTMAGYDHAASRLSHHGQIVAKTQFNALVTEIGESIANPIARKALIEGLKQIWAMRNHWGLPGSIHVELARDVGNSIEKRREIEKHIEKNTALRARERREVHDLLDLEDVNGDTLLRYRLWKEQGGKCLYTGKAIHIRQIAATDNSVQVDHILPWSRFGDDSFNNKTLCLASANQQKKRSTPYEWLSGQTGDAWNAFVQRIETNKELRGFKKRNYLLKNAKEAEEKFRSRNLNDTRYAARLFAEAVKLLYAFGERQEKGGNRRVFTRPGALTAALRQAWGVESLKKQDGKRINDDRHHALDALTVAAVDEAEIQRLTKSFHEWEQQGLGRPLRRVEPPWESFRADVEATYPEVFVARPERRRARGEGHAATIRQVKERECTPIVFERKAVSSLKEADLERIKDGERNEAIVEAIRSWIATGRPADAPPRSPRGDIITKIRLATTIKAAVPVRGGTAGRGEMVRADVFSKPNRRGKDEWYLVPVYPHQIMNRKAWPKPPMRSIVANKDEDEWTEVGPEHQFRFSLYPRSNIEIIRPSGEVIEGYFVGLHRNTGALIPTPVGPDSYVIA

SEQ ID NO: 246 - protein, 1050 aa, Gluconacetobacter diazotrophicus
MGENMIDESLTFGIDLGIGSCGWAVLRRPSAFGRKGVIEGMGSWCFDVPETSKERTPTNQIRRSNRLLRRVIRRRRNRMAAIRRLLHAAGLLPSTDSDALKRPGHDPWELRARGLDKPLKPVEFAVVLGHIAKRRGFKSAAKRKATNISSDDKKMLTALEATRERLGRYRTVGEMFARDPDFASRRRNREGKYDRTTARDDLEHEVHALFAAQRRLGQGFASPELEEAFTASAFHQRPMQDSERLVGFCPFERTEKRAAKLTPSFERFRLLARLLNLRITTPDGERPLTVDEIALVTRDLGKTAKLSIKRVRTLIGLEDNQRFTTIRPEDEDRDIVARTGGAMTGTATLRKALGEALWTDMQERPEQLDAIVQVLSFFEANETITEKLREIGLTLAVLDVLLTALDAGVFAKFKGAAHISTKAARNLLPHLEQGRRYDEACTMAGYDHAASRLSHHGQIVAKTQFNALVTEIGESIANPIARKALIEGLKQIWAMRNHWGLPGSIHVELARDVGNSIEKRREIEKHIEKNTALRARERREVHDLLDLEDVNGDTLLRYRLWKEQGGKCLYTGKAIHIRQIAATDNSVQVDHILPWSRFGDDSFNNKTLCLASANQQKKRSTPYEWLSGQTGDAWNAFVQRIETNKELRGFKKRNYLLKNAKEAEEKFRSRNLNDTRYAARLFAEAVKLLYAFGERQEKGGNRRVFTRPGALTAALRQAWGVESLKKQDGKRINDDRHHALDALTVAAVDEAEIQRLTKSFHEWEQQGLGRPLRRVEPPWESFRADVEATYPEVFVARPERRRARGEGHAATIRQVKERECTPIVFERKAVSSLKEADLERIKDGERNEAIVEAIRSWIATGRPADAPPRSPRGDIITKIRLATTIKAAVPVRGGTAGRGEMVRADVFSKPNRRGKDEWYLVPVYPHQIMNRKAWPKPPMRSIVANKDEDEWTEVGPEHQFRFSLYPRSNIEIIRPSGEVIEGYFVGLHRNTGALTISAHNDPKSIHSGIGTKTLLAISKYQVDRFGRKSPVRKEVRTWHGEACISPTPPG

SEQ ID NO: 247 - protein, 1371 aa, Gordonibacter pamelaeae
  Gordonibacter pamelaeae 7-10-1-b
MNLRNVESYQVGLDIGTGSVGWAVLDDNGDLCRFKGKPTWGSRVFPTAETAAEARVHRGQRRRYDRRRQRIDLLQRFFADEVAKVDPEFFIRLNQARLHPENRDPAHADYRWPLFNGSNFTEKDYYRQFPTIYHLRAHLLKSDEPADIRLVYLALHNIVKHRGNFLHQDNPSLSARNANVGDAVEALCLALDEWCGAHDVECACDEAALAEALGDASLRPGEKRERAEAALGVEKAHKKLAKAVSSAVVGYAAEFGHVFFAESEGSKFALSNDEKVEAYVCPDEGRDLFDAMRAVHSSYVLMGILSEAQGELLSVCKVGEYERYKRDLETLKSLVRAYGPERYDEFFCGPFYEGTRDYDPGKAQGYTKYNLGASKLSHEDFLKEVQKLLKDIGAQADERYADIERAIEAGAFLRRLKTSDNGTIPYQLHLEEMDAIIERQAAFYPFLAQEKDKLKSLVSFRIPYYVGPLTQKNAARDGKGEARFAWSSRKPGMEDARVYPWNWEDVIDKDQSAEDFIRRMTGTCTYLKGEPVLARCSLDYELFCVLNELAGARWTQDGDKSYRFDAADRLGIVEDLFKKRKRVTYEAAEKWLARTHGPESGKSAGGAYHVSGGQGEDAFESQLSSHYDFCKILGVDELSDADEAMAEDIILWNTVFEDRSILKRKIKLAYGDRLGDAQVRKLCQKRYTGWGRLSGELLRGLRSATDNGPKTIMDILLEGDPNHARRMGAAMNLMEILHDDLLEFQAKIDEHNRERALAVGGMSVDEVTGSPALRRGINQALRVVDEIAGIAGKPPAHIYVEVTRDEGARNKGRRTTSRYRALEAALSSIKAQCADVYAELKERDPRALDDERLTLYFMQCGKCMYSGDALDINKLQTYQVDHILPQSYVKDDSFENKVLVRPDTNQRKGDTLLLDERLIARMRGFWRTLRDAELIGEKKFNNLTRTSVSDEQMKKFVSRQLVETGQMVKQVQQLLQARYPESEVQPVKAGVSHQLRVGCALAKSREINDFHHAHDAYLACQVGRFVQYRHSAVYSEPVKMAAVVKQFIKKQAEDYRRTRELPGSDGFIVSSFMTPGFDVKTGEVFRDAWDAGAEIDRIRRCFDYKDCFISRMPEETHGAFWDATIYSPRAAGKTLSLPLKRGLDPRKYGSYSREQFAYFFVYEAVKPKKKQRVLEFAPVPVRVASALANDPDALEDYARELAEAEGLVFERIRRRKVYKYQQIIVGDSRLYVTGREEVRNARQLAFSQDETKLICRIEQGEECEEGELLDLFRSMQRKYLACAPRLARLMKVAEMEEGFIAATASGKREVLLSLTSIAAAHRNSIDLKPIGRKGSSGQMKITFSKELSTNGILFVDSSVTGMFERRCRLGL

SEQ ID NO: 248 - protein, 1054 aa, Haemophilus parainfluenzae
  Haemophilus parainfluenzae ATCC 33392
MENKNLNYILGLDLGIASVGWAVVEIDEKENPLRLIDVGVRTFERAEVPKTGESLALSRRLARSARRLTQRRVARLKKAKRLLKSENILLSTDERLPHQVWQLRVEGLDHKLERQEWAAVLLHLIKHRGYLSQRKNESKSENKELGALLSGVDNNHKLLQQATYRSPAELAVKKFEVEEGHIRNQQGAYTHTFSRLDLLAEMELLFSRQQHFGNPFASEKLLENLTALLMWQKPALSGEAILKMLGKCTFEDEYKAAKNTYSAERFVWITKLNNLRIQENGLERALNDNERLALMEQPYDKNRLFYSQVRSILKLSDEAIFKGLRYSGEDKKAIETKAVLMEMKAYHQIRKVLEGNNLKAEWAELKANPTLLDEIGTAFSLYKTDEDISAYLAGKLSQPVLNALLENLSFDKFIQLSLKALYKLLPLMQQGLRYDEACREIYGDHYGKKTEENHHFLPQIPADEIRNPVVLRTLTQARKVINGVVRLYGSPARIHIETGREVGKSYKDRRELEKRQEENRKQRENAIKEFKEYFPHFAGEPKAKDILKMRLYKQQNAKCLYSGKPIELHRLLEKGYVEVDHALPFSRTWDDSFNNKVLVLANENQNKGNLTPFEWLDGKHNSERWRAFKALVETSAFPYAKKQRILSQKLDEKGFIERNLNDTRYVARFLCNFIADNMHLTGEGKRKVFASNGQITALLRSRWGLAKSREDNDRHHALDAVVVACSTVAMQQKITRFVRFEAGDVFTGERIDRETGEIIPLHFPTPWQFFKQEVEIRIFSDNPKLELENRLPDRPQANHEFVQPLFVSRMPTRKMTGQGHMETVKSAKRLNEGISVIKMPLTKLKLKDLELMVNREREKDLYDTLKARLEAFNDDPAKAFAEPFIKKGGAIVKSVRVEQIQKSGVLVREGNGVADNASMVRVDVFTKGGKYFLVPIYTWQVAKGILPNKAATQYKDEEDWEVMDNSATFKFSLHPNDLVKLVTKKKTILGYFNGLNRATGNIDIKEHDLDKSKGKQGIFEGVGIKLALSFEKYQVDELGKNIRLCKPSKRQPVR

SEQ ID NO: 249 - protein, 1052 aa, Haemophilus sputorum
  Haemophilus sputorum CCUG 13788
MKNTSLNYVLGLDLGISSVGWAVVEIDEKENPLSLIDVGVRTFERAETQKGESLALARRLARSARRLTQRRVARLKKAKRLLKSENILLSTDECLPHQVWQLRVEGLERKLERQEWAAVLLHLIKHRGYLSQRKNESKSENKELGALLSGVANNHKLLQQTTYRTPAELAVKKFEVEEGHIRNQQGSYTHTFSRLDLLSEMELLFSRQQHFGNPFTSEKLLENLTALLMWQKPALSGDAILKMLGKCTFENEYKAAKHTYSAERFIWITKLNNLRIQENGLERALNDNERLALMKQPYEKAKLTYAQVRSILNLSDEAIFKGLRYSGEDKKTSETKTVLMEMKAYHQIRLALEKNDLKTEWAELKVNSSLLDEIGTAFSLYKTDEDISTCLAGKLSQPVLNALLENLNFDKFIQLSLKALHKILPLMQQGLRYDEACAEIYGDHYGKKTEENHLLLPQIPADEIRNPVVLRTLTQARKVINGVVRLYSSPARIHIETGREVGKSYQDRRELEKRQEENRKQREKAISEIKTLFPNFSGEPKAKDILKMRLYYQQNAKCLYSGKPLELHRLLEQGYVEIDHALPFSRTWDDSFNNKVLVLANENQNKGNLTPFEWLDGKNNSERWKAFKALVETSAFPYTKKQRILSQKLDEKGFIERNLNDTRYVARFLCNFIADNMHLTGEGKRKVFASNGQITALLRGRWGLAKSREDNDRHHALDAVVVACSTVSMQQKITRFVRFEEGNVFTGERIDRETGEIIPLHFPAPWKFFREEVEIRIFSDNPKLELENRLIARPQANHEFVQPLFVSRMPTRKMIGQGHMETIKSAKRLNEGLSVIKMLLTKLRLKDLESMVNREREKELYEALKARLEAFNDEPAKAFAEPFMKKGGAIVKSVRVEQVQKSGVLVRDGNGVADNASMVRVDVFTKGGKYFLVPIYTWQVAKGILPNKAVIQGKNEEDWEVMDDATFRFSLHQNDLVKLVTKKKTIFGYFNGLNRATGNIDIKEHDLEKSKVKDGIHQSIGIKLALSFEKYQVDELGKNIRLCKSSKRQAVR

SEQ ID NO: 250 - protein, 1052 aa, Haemophilus parainfluenzae
MENKNLHYILGLDLGIASVGWAVVEIDEKENPLRLIDVGVRTFERAETQKGESLALSRRSARSARRLTQRRVARLKKAKRLLKSENILLSTDERLPHQVWQLRVEGLDRKLERQEWAAVLLHLIKHRGYLSQRKNESKSENKELGALLSGVASNHELLQQATYRTPAELAVKKFEVEEGHIRNQQGAYTHTFSRLDLLAEMELLFSRQQHFGNPFASEKLLENLTALLMWQKPALSGEDILKMLGKCTFEDEYKAAKNTYTAERFVWITKLNNLRIQENGLERALSDNERLMLIEQPYEKAKLTYAQVRSILNLSDDAIFKGVRYSGEDKKAIETKTTLMEMKAYHQIRKVLEGNNLKAEWVALKANPTLLDEIGTAFSLYKTDEDISAYLAGKLSQPVLNALLENLSFDKFIQLSLKALYKLLPLMQQGLRYDEACREIYGDHYGKKTEETHHFLPQIPADEIRNPVVLRTLTQARKVINGVVRLYGSPARIHIETGREVGKSYKDRHELKKRQEENRKQREKTISEIKTLFPNFSGEPKGKDILKMRLYYQQNAKCLYSGKPLELHRLFEQKYVEVDHALPLSRTWDDSFNNKVLVLANENQNKGNLTPFEWLDGKNNSERWRTFKALVETSAFPYAKKQRILSQKLDEKGFIERNLNDTRYVARFLCNFIADNMHLTGEGKRKVFASNGQITALLRRRWGLAKSREDNDRHHALDAVLVACSTVAMQQKITRFVRFKAGDVFTGERIDRETGEIIPLHFPTPWQFFKQEVEIRIFSDNPKLELENRLPDRPQANHEFVQPLFVSRMPTRKMTGQGHMETVKSAKRLNEGISMIKMPLTKLKLKDLELMVNREREKDLYDALKTRLEAFNDDPAKAFAEPFMKKGGAIVKSVRVEQVQKSGVLVRQGNGVADNASMVRVDVFTKDGKYFLVPIYTWQVAKGILPNKAVIQGKDEEDWEDIDDATFQFSLHPNDLISVKTKKDEFLGYFNGLNRHTGGINIRTHDLEKSKGKQGIFEGIGVKIALSFEKYQIDELGKNIRLCKPSKRQPVR

SEQ ID NO: 251 - protein, 1052 aa, Haemophilus sputorum
  Haemophilus sputorum HK 2154
MKNTSLNYVLGLDLGISSVGWAVVEIDEKENPLSLIDVGVRTFERAETQKGESLALARRLARSARRLTQRRVARLKKAKRLLKSENILLSTDECLPHQVWQLRVEGLERKLERQEWAAVLLHLIKHRGYLSQRKNESKSENKELGALLSGVANNHKLLQQTTYRTPAELAVKKFEVEEGHIRNQQGSYTHTFSRLDLLSEMELLFSRQQHFGNPFTSEKLLENLTALLMWQKPALSGDAILKMLGKCTFENEYKAAKHTYSAERFIWITKLNNLRIQENGLERALNDNERLALMKQPYEKAKLTYAQVRSILNLSDEAIFKGLRYSGEDKKTSETKTVLMEMKAYHQIRLALEKNDLKTEWAELKVNSSLLDEIGTAFSLYKTDEDISTCLAGKLSQPVLNALLENLNFDKFIQLSLKALHKILPLMQQGLRYDEACAEIYGDHYGKKTEENHLLLPQIPADEIRNPVVLRTLTQARKVINGVVRLYSSPARIHIETGREVGKSYQDRRELEKRQEENRKQREKAISEIKTLFPNFSGEPKAKDILKMRLYYQQNAKCLYSGKPLELHRLLEQGYVEIDHALPFSRTWDDSFNNKVLVLANENQNKGNLTPFEWLDGKNNSERWKAFKALVETSAFPYTKKQRILSQKLDEKGFIERNLNDTRYVARFLCNFIADNMHLTGEGKRKVFASNGQITALLRGRWGLAKSREDNDRHHALDAVVVACSTVSMQQKITRFVRFEEGNVFTGERIDRETGEIIPLHFPAPWKFFREEVEIRIFSDNPKLELENRLIARPQANHEFVQPLFVSRMPTRKMTGQGHMETIKSAKRLNEGLSVIKMLLTKLRLKDLESMVNREREKELYEALKARLEAFNDEPAKAFAEPFMKKGGAIVKSVRVEQVQKSGVLVRDGNGVADNASMVRVDVFTKGGKYFLVPIYTWQVAKGILPNKAVIQGKNEEDWEVMDDATFRFSLHQNDLVKLVTKKKTIFGYFNGLNRATGNIDIKEHDLEKSKVKDGIHQSIGIKLALSFEKYQVDELGKNIRLCKSSKRQAVR

SEQ ID NO: 252 - protein, 1338 aa, Helcococcus kunzii
  Helcococcus kunzii ATCC 51366
MQDYYLGLDIGTNSVGWAVTDENYNLLRKKGKDLWGVRLFKEAQPATERRGHRSSRRRTIRKSLRKQLLRELFEEEINAIDKDFFLRLDESKYWLEDKKIEGKYSLFNDENFTDKDYYEKFPTIFHLRKALIESDDKEDIRLYFLAINQMMKRRGHFLIDGKLSNVEDITPFKECIQNLINEELDTEIETEFYDKAIKIVSDYSLKKTEKKNLIKDLVKETDSIEDSKKIINIFNLLISGKSKVNGIFDDEEILEKIKEDNKEDFYLTSEKYEENLEYFSQLLDYRFELISSLKSIYDYIILQEVLKGKKYLSYAQVERYKNHKEDLRKLKQLIKKYDKNGKIYYQIFRDENFKKGYVAYLGYYKKNKKNVPVKKCDYDTFSKNIKSTLDKICDKEDPLYIELIDKIEKGGFLLKQIVSTNSVIPHQVHELELDKILENLEKNYPSFKEISDGVSKIDKIKMIFNFRIPYYVGPLNDYHKDKVNSNTWIVKNEGFENENIRPWNFSKIVDEHACEEEFIKRMINECSYIPGEKVLPKSSLLYSEYMVLNELNNLRVNGDKLNPKIKKEIVENIYKKERKVTLKKIRNFLIINNYVDSKVEFSGLSDGIKANMSSYIDFAEILDDNFDNNMVEDLIEQITIHVGNVKLLTEKISNKYPNLEKKQINKIVNLKFKDWARFSRKLLVGIEGTEKETGEINTIIGFLRETNENFMELMSNRYTFSEEISEIKKKYIPNKLSKQIVDDLYVSPAVKKMIWQVLNINDELIKVLGKQPKKIFIEMARGKEEKPEVKDSRKNKLIELYKNLGKEGKEWLNRIEDKTEADFRNRALYLYYTQMGRCMYTGEIIDIERLYDKELYDLDHIIPRKMKKDDSIHKNLVLVTRNSNQYEKKDNYPVPEVIKSRENVRHLWYALKKKGLITEEKYNRLTRINPLSDKELSEFIERQLVETRQTTKVVKDLFENYYTDSKIVTVKAGLVSELRRDFEVLKCREINDLNHAHDAFLNIIVGDVWSKKFTSNPYNFVKKNREKYTLNNIFTKNQKDLRGNEIWNCAEGKKRIIKTLNKPSVLFSVENFEQTGQLFDQNIIGKQDYKEKTSYVPIKGDERLQDISKYGGYRGISGAYFFIVEHTEKNKRVKTIESLPIYMKSYVEENGLLDFCTNEMKLVDPKIIVKKLNYKSEIIVDGFKYLISGKTENRLSLETNEYLYWNHTQTTDIKKILNINEKIELEKYNGDIESERENIIKYIQIILEKFKLKPFIKRRNLPNIEINFADYETEKLLQLLVNLIPLTTKYVSPVDLTVISGSKYAGKVLIPKKISNLNEVIFISKSITGIYESRRRII

SEQ ID NO: 253 - protein, 1007 aa, Helicobacter canadensis
  Helicobacter canadensis MIT 98-5491
MKVLGFDIGINSIGWAFVENNELKDCGVRLFTKAENPKTKESLALPRRNARSSRVRLRRRRSRLLSLKHIISKEFGLHYEDYIALDGNLPKAYTGKIESIYKLRYEALSQAISKEDLARVILHIAKHRGYMNKNQKTSQDSEKGAILSAIKENSNKIKHYQTAGEYFYKELFENLRDGTKEFKNIRNKAMKNEKTGNMESTYYNTILASDLEKELKLILEKQQAYHNYSDTFIKEVLEIAFYQRPLKDFSHLVGSCTFYENEKRACKNSYSAWEFIALGKIINTLESIKKDTGEIFSNEIITQILKEVLDKGSLSYTKLRKMINLDEKVKFKGLKYDKEGVEKTNLIEFKKLKEFKKALGEHNLERKTLDEIATHITLTKDENQLKKQLEQYALSQNQIDALAELDFNDHINLSFKALYEILPLMEKGKRYDEACNELGLKAKTSNQKSEFLPAFCDSIFAQELTNPIVNRAISEYRKVLNRLLKKYGKMHKIHIELARDAGLSKEARNKIEKEQKENKDINDKAEKTCKEFGLKPNAKNILKIKLWREQGEICAYSGKKITIDDLKEDKALEVDHIYPYSRSYDDSYNNKVLVFIKENQLKLNQTPYEAFGSNQEKWSKIQVLAQKLPYKKKNRILDENFKNKDQIEFISRNLNDTRYATSLIAKYTKEYLEFLPLSDDEDISLKSGEKGSKTHVQTMNGMLTSVLRHAWGFSQKDRNNHLHHALDAIIIAYSTNSIIKAFSDFKKNQEILKAKLYAKKLTSEEYKNQSKFTGFEKYRSKILEKLDSIFVSKPPNKNTKGALHEQTFYSYQDILEEYKTQEGLKRALECGKVRKIGTKYVVNDRMVRLDIFKKDNKFYGIPIYTMDFALGVLPNKVVTIGTDKDKIKKEWKTIDETYEFCFSLYKGDLVLIQKKEMQESEFAYYNGFDISSASISLEKHDNKFENLTENQKLLFPKAKEGDVEVRGIGIQGLKVFKKYMVTPLGEIQETRTEARQNIQPRKKHGLR

SEQ ID NO: 254 - protein, 1023 aa, Helicobacter cinaedi
  Helicobacter cinaedi CCUG 18818 = ATCC BAA-847
MKIYSFDIGVASIGWAFIENEVLQDCGIRIFTKAENPKNGASLALPRREARGVRKRLARRRGRLNTIKQLLCKEFGLQLEDYLSNDGELPKAYTASKANPLKSPYELRTLALSQKLDSKDLVRVILHIAKHRGYGNKHAKDSKDTESGKVKKAIEFNRKTLAEKGYRSVGEYLYREFFQQSRISQNNGATEFINVRNKAGNYEHCVAQDMLKEELESILNAQRQFGFSLKQDFESKLLTKIFEQRPLKSFADKVGNCCFIAGEKRAPKDSPSAIEFIALSRTINTLINLSKESGEIYNRAIILQIVESTLKKGEISYKELREIIRLDERLRFKDPRLDYSREIKEAEKVKFLEFKQLKGFKKALGESFTTLAISQLDEIAEHIALIKDRVKLNEKLESYALTKEQREALSNLSFSAHINLSLQALKQILPFMRGDNGEQCLDYDESVEKAGLKALSKDTLKGQMLPPLNEFEPYLSNPVVARALAEYRKVLNVLLKQYGSPHKIHIEYAREAKLSSTERQKYEKEQKDNYAANQAAHKKCQELGLEPSSTNLLKLKLWQEQGGLCLYSGAKITISYLQDPTALQVDHIYPYSRSFDDSYMNKCLVLTKANQEKGNRTPFEAFGTDSAKWGVITTLAQKLPHKKRRRILNTAFNDKEAGFKLRNLNDTSYIARLVADYTETYLEFLPLVESENTTLSKGQKGSKKHIAIVNGVLTSTMRYYLGFASKDRDNHLHHALDAVIIGFMNDSVIKAFSDFKKTQETSKAAYYAHTLSKQEYKKQRAFIQLPSGENFRVSVLEKVESVFVSKPPRKRVRGALHEATFYSPNDPKLLKNYGGTKGVERALALGKMRKVGAKIVSNGAMVRVDIFRHKSSGKFYGVPVYTMDFALGILPNKAVVVGKDQNGVIKDWLEMDSSYEFIFSLYKDDVILVQKKEMQRPELCYFVSFDTSGASIKVAKHDNNFSTLTENQKLLFSNATKEEVVGKSIGIQNLKVFEKWQVSVLGEVKRTQSYPRENISLASKAKK

SEQ ID NO: 255 - protein, 1023 aa, Helicobacter cinaedi
  Helicobacter cinaedi CCUG 18818
MKIYSFDIGVASIGWAFIENEVLQDCGIRIFTKAENPKNGASLALPRREARGVRKRLARRRGRLNTIKQLLCKEFGLQLEDYLSNDGELPKAYTASKANPLKSPYELRTLALSQKLDSKDLVRVILHIAKHRGYGNKHAKDSKDTESGKVKKAIEFNRKTLAEKGYRSVGEYLYREFFQQSRISQNNGATEFINVRNKAGNYEHCVAQDMLKEELESILNAQRQFGFSLKQDFENKLLTKIFEQRPLKSFADKVGNCCFIAGEKRAPKDSPSAIEFIALSRTINTLINLSKESGEIYNRAIILQIVESTLKKGEISYKELREIIRLDERLRFKDPRLDYSREIKEAEKVKFLEFKQLKGFKKALGESFTTLAISQLDEIAEHIALIKDRVKLNEKLESYALTKEQREALSNLSFSAHINLSLQALKQILPFMRGDNGEQCLDYDESVEKAGLKALSKDTLKGQMLPPLNEFEPYLSNPVVARALAEYRKVLNVLLKQYGSPHKIHIEYAREAKLSSTERQKYEKEQKDNYAANQAAHKKCQELGLEPSSTNLLKLKLWQEQGGLCLYSGAKITISYLQDPTALQVDHIYPYSRSFDDSYMNKCLVLTKANQEKGNRTPFEAFGTDSAKWGVITTLAQKLPHKKRRRILNTAFNDKEAGFKLRNLNDTSYIARLVADYTETYLEFLPLVESENTTLSKGQKGSKKHIAIVNGVLTSTMRYYLGFASKDRDNHLHHALDAVIIGFMNDSVIKAFSDFKKTQETSKAAYYAHTLSKQEYKKQRAFIQLPSGENFRVSVLEKVESVFVSKPPRKRVRGALHEATFYSPNDPKLLKNYGGTKGVERALALGKMRKVGAKIVSNGAMVRVDIFRHKSSGKFYGVPVYTMDFALGILPNKAVVVGKDQNGVIKDWLEMDSSYEFIFSLYKDDVILVQKKEMQRPELCYFVSFDTSGASIKVAKHDNNFSTLTENQKLLFSNATKEEVVGKSIGIQNLKVFEKWQVSVLGEVKRTQSYPRENISLASKAKK

SEQ ID NO: 256 - protein, 1023 aa, Helicobacter cinaedi
MKIYSFDIGVASIGWAFIENEVLQDCGIRIFTKAENPKNGASLALPRREARGVRKRLARRRGRLNTIKQLLCKEFGLQLEDYLSNDGELPKAYTASKANPLKSPYELRTLALSQKLDSKDLVRVILHIAKHRGYGNKHAKDSKDTESGKVKKAIEFNRKTLAEKGYRSVGEYLYREFFQQSRISQNNGATEFINVRNKAGNYEHCVAQDMLKEELESILNAQRQFGFSLKQDFENKLLTKIFEQRPLKSFADKVGNCCFIAGEKRTPKDSLSAIEFIALSRTINTLINLSKESGEIYNRAIILQIVESTLKKGEISYKELREIIRLDERLRFKDPRLDYSREIKEAEKVKFLEFKQLKGFKKALGESFTTLARSQLDEIAEHIALIKDRVKLNEKLESYALTKEQREALSNLSFSAHINLSLQALKQILPFMRGDNGEQCLDYDESVEKAGLKALSKDTLKGQMLPPLNEFEPYLSNPVVARALAEYRKVLNALLKQYGSPHKIHIEYAREAKLSSTERQKYEKEQKDNYAANQAAHKKCQELGLEPSSTNLLKLKLWQEQGGLCLYSGAKITISYLQDPTALQVDHIYPYSRSFDDSYMNKCLVLTKANQEKGNRTPFEAFGTDSAKWGVITTLAQKLPHKKRRRILNTAFNDKEAGFKLRNLNDTSYIARLVADYTETYLEFLPLVESENTTLGKGQKGSKKHIAIVNGALTSTMRYYLGFASKDRDNHLHHALDAVIIGFMNDSVIKAFSDFKKTQETSKAAYYAHTLSKQEYKKQRAFIQLPSGENFRASVLEKVESVFVSKPPRKRVRGALHEATFYSPNDPKLLKNYGGTKGVERALALGKMRKVGAKIVSNGAMVRVDIFRHKSSGKFYGVPVYTMDFALGILPNKAVVVGKDKNGVIKDWLEMDSSYEFIFSLYKDDLLLVQKKEMAEPELCYFMSFNSSIAQISVAKHDNNFSTLTKNQKLLFSNATQEDVSGKSIGIQNLQVFEKWQVSVLGEVKRTQSYPRENISLASKAKK

SEQ ID NO: 257 - protein, 1024 aa, Helicobacter mustelae
MIRTLGIDIGIASIGWAVIEGEYTDKGLENKEIVASGVRVFTKAENPKNKESLALPRTLARSARRRNARKKGRIQQVKHYLSKALGLDLECFVQGEKLATLFQTSKDFLSPWELRERALYRVLDKEELARVILHIAKRRGYDDITYGVEDNDSGKIKKAIAENSKRIKEEQCKTIGEMMYKLYFQKSLNVRNKKESYNRCVGRSELREELKTIFQIQQELKSPWVNEELIYKLLGNPDAQSKQEREGLIFYQRPLKGFGDKIGKCSHIKKGENSPYRACKHAPSAEEFVALTKSINFLKNLTNRHGLCFSQEDMCVYLGKILQEAQKNEKGLTYSKLKLLLDLPSDFEFLGLDYSGKNPEKAVFLSLPSTFKLNKITQDRKTQDKIANILGANKDWEAILKELESLQLSKEQIQTIKDAKLNFSKHINLSLEALYHLLPLMREGKRYDEGVEILQERGIFSKPQPKNRQLLPPLSELAKEESYFDIPNPVLRRALSEFRKVVNALLEKYGGFHYFHIELTRDVCKAKSARMQLEKINKKNKSENDAASQLLEVLGLPNTYNNRLKCKLWKQQEEYCLYSGEKITIDHLKDQRALQIDHAFPLSRSLDDSQSNKVLCLTSSNQEKSNKTPYEWLGSDEKKWDMYVGRVYSSNFSPSKKRKLTQKNFKERNEEDFLARNLVDTGYIGRVTKEYIKHSLSFLPLPDGKKEHIRIISGSMTSTMRSFWGVQEKNRDHHLHHAQDAIIIACIEPSMIQKYTTYLKDKETHRLKSHQKAQILREGDHKLSLRWPMSNFKDKIQESIQNIIPSHHVSHKVTGELHQETVRTKEFYYQAFGGEEGVKKALKFGKIREINQGIVDNGAMVRVDIFKSKDKGKFYAVPIYTYDFAIGKLPNKAIVQGKKNGIIKDWLEMDENYEFCFSLFKNDCIKIQTKEMQEAVLAIYKSTNSAKATIELEHLSKYALKNEDEEKMFTDTDKEKNKTMTRESCGIQGLKVFQKVKLSVLGEVLEHKPRNRQNIALKTTPKHV

SEQ ID NO: 258 - protein, 1688 aa, Ignavibacterium album
MEFKKVLGLDIGTNSIGCALLSLPKSIQDYGKGGRLEWLTSRVIPLDADYMKAFIDGKNGLPQVITPAGKRRQKRGSRRLKHRYKLRRSRLIRVFKTLNWLPEDFPLDNPKRIKETISTEGKFSFRISDYVPISDESYREFYREFGYPENEIEQVIEEINFRRKTKGKNKNPMIKLLPEDWVVYYLRKKALIKPTTKEELIRIIYLFNQRRGFKSSRKDLTETAILDYDEFAKRLAEKEKYSAENYETKFVSITKVKEVVELKTDGRKGKKRFKVILEDSRIEPYEIERKEKPDWEGKEYTFLVTQKLEKGKFKQNKPDLPKEEDWALCTTALDNRMGSKHPGEFFFDELLKAFKEKRGYKIRQYPVNRWRYKKELEFIWTKQCQLNPELNNLNINKEILRKLATVLYPSQSKFFGPKIKEFENSDVLHIISEDIIYYQRDLKSQKSLISECRYEKRKGIDGEIYGLKCIPKSSPLYQEFRIWQDIHNIKVIRKESEVNGKKKINIDETQLYINENIKEKLFELFNSKDSLSEKDILELISLNIINSGIKISKKEEETTHRINLFANRKELKGNETKSRYRKVFKKLGFDGEYILNHPSKLNRLWHSDYSNDYADKEKTEKSILSSLGWKNRNGKWEKSKNYDVFNLPLEVAKAIANLPPLKKEYGSYSALAIRKMLVVMRDGKYWQHPDQIAKDQENTSLMLFDKNLIQLTNNQRKVLNKYLLTLAEVQKRSTLIKQKLNEIEHNPYKLELVSDQDLEKQVLKSFLEKKNESDYLKGLKTYQAGYLIYGKHSEKDVPIVNSPDELGEYIRKKLPNNSLRNPIVEQVIRETIFIVRDVWKSFGIIDEIHIELGRELKNNSEERKKTSESQEKNFQEKERARKLLKELLNSSNFEHYDENGNKIFSSFTVNPNPDSPLDIEKFRIWKNQSGLTDEELNKKLKDEKIPTEIEVKKYILWLTQKCRSPYTGKIIPLSKLFDSNVYEIEHIIPRSKMKNDSTNNLVICELGVNKAKGDRLAANFISESNGKCKFGEVEYTLLKYGDYLQYCKDTFKYQKAKYKNLLATEPPEDFIERQINDTRYIGRKLAELLTPVVKDSKNIIFTIGSITSELKITWGLNGVWKDILRPRFKRLESIINKKLIFQDEDDPNKYHFDLSINPQLDKEGLKRLDHRHHALDATIIAATTREHVRYLNSLNAADNDEEKREYFLSLCNHKIRDFKLPWENFTSEVKSKLLSCVVSYKESKPILSDPFNKYLKWEYKNGKWQKVFAIQIKNDRWKAVRRSMFKEPIGTVWIKKIKEVSLKEAIKIQAIWEEVKNDPVRKKKEKYIYDDYAQKVIAKIVQELGLSSSMRKQDDEKLNKFINEAKVSAGVNKNLNTTNKTIYNLEGRFYEKIKVAEYVLYKAKRMPLNKKEYIEKLSLQKMFNDLPNFILEKSILDNYPEILKELESDNKYIIEPHKKNNPVNRLLLEHILEYHNNPKEAFSTEGLEKLNKKAINKIGKPIKYITRLDGDINEEEIFRGAVFETDKGSNVYFVMYENNQTKDREFLKPNPSISVLKAIEHKNKIDFFAPNRLGFSRIILSPGDLVYVPTNDQYVLIKDNSSNETIINWDDNEFISNRIYQVKKFTGNSCYFLKNDIASLILSYSASNGVGEFGSQNISEYSVDDPPIRIKDVCIKIRVDRLGNVRPL

SEQ ID NO: 259 - protein, 1092 aa, Ilyobacter polytropus
MKYSIGLDIGIASVGWSVINKDKERIEDMGVRIFQKAENPKDGSSLASSRREKRGSRRRNRRKKHRLDRIKNILCESGLVKKNEIEKIYKNAYLKSPWELRAKSLEAKISNKEIAQILLHIAKRRGFKSFRKTDRNADDTGKLLSGIQENKKIMEEKGYLTIGDMVAKDPKFNTHVRNKAGSYLFSFSRKLLEDEVRKIQAKQKELGNTHFTDDVLEKYIEVFNSQRNFDEGPSKPSPYYSEIGQIAKMIGNCTFESSEKRTAKNTWSGERFVFLQKLNNFRIVGLSGKRPLTEEERDIVEKEVYLKKEVRYEKLRKILYLKEEERFGDLNYSKDEKQDKKTEKTKFISLIGNYTIKKLNLSEKLKSEIEEDKSKLDKIIEILTFNKSDKTIESNLKKLELSREDIEILLSEEFSGTLNLSLKAIKKILPYLEKGLSYNEACEKADYDYKNNGIKFKRGELLPVVDKDLIANPVVLRAISQTRKVVNAIIRKYGTPHTIHVEVARDLAKSYDDRQTIIKENKKRELENEKTKKFISEEFGIKNVKGKLLLKYRLYQEQEGRCAYSRKELSLSEVILDESMTDIDHIIPYSRSMDDSYSNKVLVLSGENRKKSNLLPKEYFDRQGRDWDTFVLNVKAMKIHPRKKSNLLKEKFTREDNKDWKSRALNDTRYISRFVANYLENALEYRDDSPKKRVFMIPGQLTAQLRARWRLNKVRENGDLHHALDAAVVAVTDQKAINNISNISRYKELKNCKDVIPSIEYHADEETGEVYFEEVKDTRFPMPWSGFDLELQKRLESENPREEFYNLLSDKRYLGWFNYEEGFIEKLRPVFVSRMPNRGVKGQAHQETIRSSKKISNQIAVSKKPLNSIKLKDLEKMQGRDTDRKLYEALKNRLEEYDDKPEKAFAEPFYKPTNSGKRGPLVRGIKVEEKQNVGVYVNGGQASNGSMVRIDVFRKNGKFYTVPIYVHQTLLKELPNRAINGKPYKDWDLIDGSFEFLYSFYPNDLIEIEFGKSKSIKNDNKLTKTEIPEVNLSEVLGYYRGMDTSTGAATIDTQDGKIQMRIGIKTVKNIKKYQVDVLGNVYKVKREKRQTF

SEQ ID NO: 260 - protein, 1354 aa, Indibacter alkaliphilus
  Indibacter alkaliphilus LW1
MKKILGLDLGTTSIGWAFIKEPEKDVVGSEIVDMGVRIVPLSSDEENDFAKGNTISINADRTLKRGARRNLQRFKQRRNALLETFKEKNLIPSNFQYAEDGPSSTFSTLKLRDKAAKEKIELDDFVKVLLQINKKRGYKSSRKAMSEEDEGTAIDSMGIAKELYENDLTPGQWVYEALKNGRKNVPDFYRSDLQEEFKKIVNYQSEFYPDILNTSFVEDWMGKASTPTKQYFNKRGVQLAENKGKREERRLQEYKWRAEAVNFKIDLSEIALILSQINSQISNSSGYLGAISDRSKELYFKNLTVGQYLYQQVKKNPHTRLKGQVFYRQDYLDEFEKIWSVQSSFYPQLNDELKQEVRDVTIFFQRRLKSQKHLISNCEFEEHHKVVPKSHPIFQEFRIWQNLNNLTLIKKDNLNEKCELALEDKTALANELAFKKELSVKDALKVLGLKPSDWEFNFTKIEGNRTNHAFFEAFAKIIELEDGEPIDLGNLKADDILDQFSEAFLRIGIDTELLQVNSDIEGAEYEKQSYIQFWHLLYSSEDDQKLKQNLIRKFGFKPEHAKILASISLQDDHASLSSRAIKKILPHLQSGLIYDKACTYAGYNHSSSFTKDENEKRELRAELELLKKNSLRNPVVEKILNQMINVVNAILKDPNLGRPDEIRVEMARELKANAEQRKNMTSNIASATRDHEKYREILKKEFGLKRVTKNDLLRYKLWLETDGISLYTGKPIEASKLFSKEYDIEHIIPKARLFDDSFSNKTICERQLNIDKANVTAFSFLQNKLSADEFEQYQSRVKSLYGKLSKAKIQKLLMANDKIPEDFIARQLQETRYISKKAKEILFEITMRVSVTTGTITDKLREDWGLVEIMKELNWEKYDKLGLTYTIEGKHGERLNKIKDWNKRNDHRHHAMDALTVALTKPAYIQYLNNLNAKAIGNKKGTEIFAIEQKYLKRENGKLCFIPPIENIRAEAKKHLSKILVSYKAKNKVVTINKNKTKKKAGFNEQTALTPRGQLHKETVYGKSFHYSTKFEKIGASFDAQKINTVAKKEEREALLKRLAENGNDPKKAFTGKNSLNKMPIYLDLGKNIKLSEKVKTVVLEQNYTIRKNIDPDLKVDKVIDVGIKRILESRLEEFGGNAKLAFSNLEENPIWLNKEKGIPIKRVKISGVSNVESLHVKKDHFGEKILDEEGNEIPVDFVSTGNNHHVAIYEDEDGNLQDEVVNFYEAVIRRNQGESIIKYRHEEGWNFLYSIKQNEFFVFPSQDFNPNDFDLLDPKNYDLISPNLYRAQKFSKVMYGNSAVRDYVFRHHLETVLNDVKELKDVAYKQLKSLQYLNGIKKVRLNHLGQIIQVGEY

SEQ ID NO: 261 - protein, 1397 aa, Joostella marina
  Joostella marina DSM 19592
MKKVLGLDLGTNSIGWALVNEATKEEKKEGKSSEIIKLGVRVNPLTVDEKTNFEKGRPLSTNADRTLKRSARRNLQRYKLRRRNLIEILIKNGFITKDTPLTETGKDTTHQTLKLRAKSAKEKVDLKDFAKILLTINKKRGYKSSRKVNSDEDGLAIDGMAVAKHLYEQNLTPGQYVLNLLQKNKKYVPDFYRSDLQEEFKNIWNNQKTYYFDILTDTLFEELKDKNKSQTWAICKKPFDIAGIKQIGKASDKRLERYKWRTEGLTQKLNLEYLAIALQEINNDINKSSGYLGAISDRSKELFFNKETVGENLYRQLVKTPHTSLRNQVFYRQDYLDEFETIWETQAKFYPQLTHTLKEEIRDVIIFYQRKLKSQKSLISFCQFESWEQTYIEKETGKSKTRTVGRKVIPKSSPLFQEFKIWQNLNSLEFRNSDEGEIIEFIKLDEDIRQTVFEELNLRGNLKPNDVLKILGNYISLGKVSQWKCNFEEIEGNRTNAALYNVYQIIAENEGYGFDWAKKTASEINKELKNIFPQLGIDASILDFDFTQANFDKQTSYQLWHLLYSAEEDFKISEEDKVLYGNSSVSLKKKLHQKYGFKPEYTKLLTNISLQPDYGNLSAKAICNILPYLKENNVYSEACDLTGYNHSNFLTAEEQAKRPLKPILELLKKNSLRNPVVEKILNQMVNVVNQVIETYGKPDEIRIELTRELKKSAKERANMTKSIADATRRNDDYRKTIIKEFGIPNPTKSDVVRYRLWQELASRGYKDIFTDTEIKPQELFSNKIDIEHIIPKALLFDDSFSNKTLAFKKDNLKKANRTAYDFIANDYAPNLENYIERVESLHKDRKITRAKRNKLLMLQSKLPDGFIERDLRNSQYITKEAKKMLYEVCRTVVSTSGSITDKLREDWDLINVMKELNFPKYKALGLTEKIERYDIGAEKMKEVEIIEDWNKRNDHRHHAIDALTVAFSTHSHIQYLNHLNARRDEGHKKHAAIIAIESTITEKEGNKKRRFIAPLPNFRLQAKEHIESILVSFKNKNKVVTNNINKTKRIKKDKFNTKVQLTPRGQLHKETIYGKIKQPLEKHIKLNKSFTLEQAKLIIDKRQREKVLNHLEKYAHNSDIAFNSKTLKKNPLLISDEPLKEVLCFEEVFTIRKDISYDNFKNEKQLDKVIDEKVKQALKERINQYNGDFREAFSDIERNPIWLNKAKGICVKRATIKGVSNAEPLHTAKNHLGEEVLTENKEQIPVDYVSTGNNHHVAIYEDEDGNLQEKVVSFYEAVIRVNEGLPIIDKEYNKSLGWTFKFTMKQNEMFVFPSEDFNPTEIDLLDQKNASLISPNLFRVQKFTIKDYFFRHHLETTVENNNTLKNTTWRREGLSGIYGIIKIRLNHLGEIVQVGEY

SEQ ID NO: 262 - protein, 1060 aa, Kingella kingae
  Kingella kingae PYKK081
MAAKSLNYILGLDLGIASCGWAVVEMDEQENPLRLIDVGVRTFEEAENPKDGSSLAETRRLARAQRRLISRRANRMNKLCRLLKQENVLQANDYDEKGLIIGLPNQAWELRAQGLDRKLEPKEWAAVLIHLVKHRGYLSQRKNESQTADKELGALLSGMNHNHQLLQSQSNQYRTPAELAIKQFATQDGHIRNQRGAYTHTFNRLDLQNELNQLFDAQTRLGNPHVSGSLKTAINDLLMNQKAALSGDAILEMLGRCTFEPSEYKAAKNTYSAERFVWLGKLTNLRIQDNGLESALSREQRELLLNEPYNKTKLTYQQVRKLLRLPETAFFKGLRYGKDNAESATFMEMKSYHAIRKSLENKSLKSEWEKLKTQPKLLDLIGTAFSIYKTDDEIAGCLKNQLPENVIIALQGQLNFSNFMELSLKALEKLLPLMEQGLRYDEACTQIYGNRHEKIADKTEKFLPNIPADKLRNPVVLRTLTQARKVINAIIRRYGSPARVHIETGREVGKSFSDRDKLKKQQEENQEQRRRAIDEWKQFFPNAAHEPKAVDILKLRLYQLQQGKCLYSGLPIDVRRLPEKGYVEIDHALPFSRTWDDSFNNKILVLASENQNKGNQTPYEYLRGADNSESWRLFVENVQNCQFSPNKKQKIMAKQLDEKGFLERNLNDTRYVSRFLCQFISEHLHLTGKGKKRVFASNGQITALLRGRWGLSKNREENDRHHAVDAVVVACSTVAMQQKITQFVRYQKGNVFTGERIDKETGEVISIHFPTPWEHFREEVMIRVFDDNPLRTLPEKLPNRPEALHEYVMPLFVSRMPTRKMTGQGHKETIKSAKRLDEKISVLRVPLTQLKLNDLENMVNREREPALYEALKARLEQFKNDPAKAFAEPFFKQGGQQVKAVRVEIVQKSGMLLRKINGVADNGSMVRVDVFEKSGKFYLVPIYAWQVAEGILPNYAVVAHKDESDWILMDESYHFKFALYKNDLLEVQTKKGGIMGYFASLDRATGAITIREHDRDKKKCKDGEHRSIGVKMASSFKKLQVDELGKNIHETRSRKRPNIG

SEQ ID NO: 263 - protein, 1391 aa, Kordia algicida
  Kordia algicida OT-1
MKKILGLDLGTNSIGWALVNEAEHEHEQSSIVKLGVRVNPLSVDEKTNFEKGRPLSINADRTSKRSARRNLQRFKLRRKNLINLLLKHHIISNETILTEVGKNTTHQTLKLRSKATQEKISLEEFARILLSINKKRGYKSSRKEKNEDEGFTIDGMAIAKELYDNQLTPGQYVYNILQDGKNYIPDFYRSDLQAEFDDVWQFQKKFYSSILTDEFYLKLKGQGKENTRKLFLAIHQVYTAENKGKRDAVKLQYYKWRSEAVKKQLSIEEVAYVLVEINNNINKSSGYLGAISDRSKALYFNNETVGEYLYGQLVKNRHNSLRNQVFYRQDYLDEFEKIWETQAKFYDELTNELKQEIRDVVIFYQRKLKSQKHLISDCLFEKHHKAIPKSSPLFQEFKIWQNLNYLEFVHTQSKEKIFFSELDDETRQFVFAELNIRGTLKIKEIKKLIGLETPVYWKSNFDEIEGNRTNQVLYNVYQNIADDLGYGFDWSKKHAFEINAELQAIFKDVGIDTAILNFDASIEENDFDKQKSYQLWHLLYSAEDTDKATEEDKLIYGNINTKLKKQLHQKYGFEAKYGNLLANISLQQDYGNLSAKAIKKILPYLESGNSFYEACTIVGYNPSNSLTKEQQQNRKLKDKLELLPKNSLRNPVVEKILNQKVNLINQLIDEYGKPDEVRIELARELKKSAKQRADLSKHINDATLKNQNIRKTLQKDFGIQNPSKNDVIRYKLYDELKDNGYKTLFTNKYIPKEQLFSKDVDIEHIIPKAILFDDSFSNKTLAYRNVNLAKADATAFDFISSKHLDDLDNYKARVETLFQSKRISKGKYKKLLMTRQNLPEDFIERDLRNSQYIAKKATAMLKEVFRSVVPTSGRITDKLREDWDLVNVMKELNLPKYRTLGLTEFIERKNGNKIEQIIDWTKRNDHRHHAMDALTVAFTTHNHIQYLNNLNVTHGLNGVDTDHEKSRLYAIKQAITKVYIVGKTKKRKFIPPMENFRSHAKNHLEGILISFKNKNKVVTKNKNRTKTKTKGVFNEKIQLTPRGQLHKETIYGHAKKVIVTKEKVSSKFTHEKILQVTKPAYREALLKRLASFKNDPKKAFSGKNALSKNPLYFDITSGKKVPDTVKLSYFENSYVIRKEVNSDNFKNEKSLQKVLDVGIRRILEKRLADYNGNAKEAFSNLEKNPIWKDKEKGVCIKKVRIEALKNAEPLHVKKDHLGKIILDDENKSTPVDFISTGNNHHVAIYEDKDGKLHDKVVSFYEVVSRVNLGLPIIDKSFNSHLDWKFLFSMKQNEMFVFPSEDFNPKEIDIGNPKNNELISKYLFRVQKFSKVTYGNSAVRDYVFRHHLETELIDKKELKGITYYQLKSIGMLEKLVKVRINHIGKIVHIGEY

SEQ ID NO: 264 - protein, 1314 aa, Lactobacillus animalis
  Lactobacillus animalis KCTC 3501
MLKKDYSIGLDIGTNSVGHAVVTDDYKVPTKKMKVFGDTSKKTIKKNMLGVLLFNEGQTAADTRLKRGTRRRYTRRKNRLRYLQEIFAPELAKVDPNFLYRLEESSLVAEDKKYDVYPIFGKREEELLYHDTYKTIYHLRSALANNDQPADLRLVYLALAHIIKYRGNFLLEGEIDLRTTDINKVFAEFSETLNENSDENLGKLDVADIFKNNTFSKTKKSEELLKLSGAKKNQLAHQLFKMMVGNMGSFKKVLGTDEEHKLSFGKDTYEDDLNDLLAEAGDQYLDIFVAAKKVYDAAILASILDVKDTQTKTVFSQAMIERYEEHQKDLIELKRVFKKYLPEKCHDFFSEPKISGYAGYIDGKVSEEDFYKYTKKTLKGIPETEEILQKIDANNYLRKQRTFDNGAIPHQVHLKELVAIVENQGKYYPFLRENKDKFEKILNFRIPYYVGPLARGNSKFAWLTRAGEGKITPYNFDEMIDKETSAEDFIKHMTINDLYLPTEPVLPKHSLLYERYTIFNELAGVRYVTENGEAKYFDAQTKRSIFELFKLDRKVSEKMVIKHLKVVMPAIRIQALKGLDNGKFNASYGTYKDLVDMGVAPELLNDEVNSEKWEDIIKTLTIFEGRKLIKRRLENYRDFLGEDILRKLSRKKYTGWGRLSAKLLDGIYDKKTHKTILDCLMTEDYSQNFMQLINDDNYSFKETIKNAQVIEKEETLAKTVQELPGSPAIKKGILQSLEIVDEIIKVMGYKPKSIVVEMARETQKTHGTRKREDRVQQIVENLKDANELPEKLPSNAELSDERKYLYCLQNGRDMYTGAPLDYDHLQFYDVDHIIPQSFLKDDSIENKVLTIKKENVRKTNGLPSEAVIQKMGSFWKKLLDAGAMTNKKYDNLRRNLHGGLNEKLKERFIERQLVETRQITKYVAQLLDQRLNYDGNGVELDEKIAIVTLKAQLASQFRSEFKLRKVRALNNLHHAHDAYLNAIVANLIMAKYPELEPEFVYGKYRKAKFKGLGKATAKNTLYANVLYFLKENEVYPFWDKARDLPTIKRYLYRAQVNKVRKAERQIGGFSDEMLVPKSDSGKLLPRKEGLDPVKYGGYAKAVESYAVLITADEVKKGKTKKVKTLVNIPIIDSKKYEADPTAYLASRGYTNVTNSFILPKYSLLEDPEGRRRYLASFKEFQKANELILPQHLVELLYWVNAKDGEQKLEDHKAEFKELFDKIMEFADKYVVAPKNSEKIRRLYEENQDATPMELGKNFVELLRYTADGAASDFKFFGENIPRKRYNSAGSLLNGTLIYQSKTGLYETRIDLGKL

SEQ ID NO: 265 - protein, 1377 aa, Lactobacillus brevis
  Lactobacillus brevis subsp. gravesensis ATCC 27305
MESNHDGEQVKYTLGLDIGTSSIGYAAIDKHQKPIRAKGKHVIGVRLFQEGQTAADRRAFRTTRRRLKRRKWRLNLLNRLFDPYLSEVDPNFLPRLRQSNLSPKDDNKHFNGSTLFPDKTDAAFYRQYPTMYHLRYALMTEKRKFDIREVYLAIHHIVKYRGNFLNSATVDSFKTSNIDFTSQFDRLNELYRQVILDEPFQINMDQVDEMTNKLLDNDALKLDTQKQVAKLLPVIYNDKPIDKQYTRIATEFSKAILGYKTKLDVILNLDTQNAKDWVIRLDDEDIDDKLPALVENLDESRQEIVTIIRDLYAQITLNAIVPKGKSLSESMVDKYNDHKDHLDLLMGLIHELGDDSAKGIKLREAYTQYVGKSDDKTLNQDDFYAAIKKNLDEDSKRSPKIQRLIEQASFMPKQRTSANGVIPHQLHQLELDRIIENQGRYYPFLKKPNPNTHKPNGGKYKLDELVAFRIPYYVGPLITKRDQEKTSGADFAWMIRKPGQEGEITPWNFDQKVDRMASANRFIRRMTTKDSYLVAEDVLPDASLIYEKFKALNELNMLKVNDSRLSPSQKQDLFNNLFKKQKTIRTKKLQTYIRTNWELPSVMISGLADPDKFNSSLSTYIDFRDIFGEKVDDPNRQADYEEIIEWSTVFEDRKIYQAKLNQLDWLTEPQRKALLTKRYTGWGRLSKKLLTGLKDQNGDSILDQLWKTNDNFMQIQSRDEFAKQIHDENAKQFHEANNVDDILDDAFTSPQNKKAIRQVDKVVQDVVKAVGYAPDKIAIEFTRSLENNPQRTVSRQRQLQAAYKNIPREIMKSGLMAELGSVADSKKVLSDKLYLYFTQMGKDMYEDKTINIDNLPNYDIDHILPQAFIKDDSIDNRVLISKEENARKSNRVPLKFFGAKRMGFWKDLLNNGLISNRKFQNLTTDPEKISKYSAKGFIHRQLVETSQVIRLVANILGNEYSQAGTTIIEVSAKMNRQLREDFHLIKNRNVNDYHHAMDAYLTAYVGDYLYLRYPKLRPYFVYGDFKKAEDQDLNIRNFNFLHDLKDNESLDKIVDSETGEIVWEKHGSVKQLKKVYHYKFMLVSQEVYTRQDALFNQTIYPASDADKRKLIPIKNSKPVDVYGGYSGNIDAYMAIVRVHGKKEDNYKVVGIPMRAVTKLKKAEKEGHDSYLNAVHEVLKPQFTKKKKNRKTGEITETVDEFDVLLGKVYYRQLIVDGNKKFMLGSSSYQYNAKQLVLSDKAMQVLSKNGKVKSQDENQNLIDVYDEILEKVDQYFELYDQRHYRESLHKGRGIFVNLPLSNQYDGSKLTSYGKYETIDAILNGLHANATMSNLRYLGISSPFGKMQASNGLTIDPDSIICYQSPTGLFERQIKLSDL

SEQ ID NO: 266 - protein, 1371 aa, Lactobacillus buchneri
MKVNNYHIGLDIGTSSIGWVAIGKDGKPLRVKGKTAIGARLFQEGNPAADRRMFRTTRRRLSRRKWRLKLLEEIFDPYITPVDSTFFARLKQSNLSPKDSRKEFKGSMLFPDLTDMQYHKNYPTIYHLRHALMTQDKKFDIRMVYLAIHHIVKYRGNFLNSTPVDSFKASKVDFVDQFKKLNELYAAINPEESFKINLANSEDIGHQFLDPSIRKFDKKKQIPKIVPVMMNDKVTDRLNGKIASEIIHAILGYKAKLDVVLQCTPVDSKPWALKFDDEDIDAKLEKILPEMDENQQSIVAILQNLYSQVTLNQIVPNGMSLSESMIEKYNDHHDHLKLYKKLIDQLADPKKKAVLKKAYSQYVGDDGKVIEQAEFWSSVKKNLDDSELSKQIMDLIDAEKFMPKQRTSQNGVIPHQLHQRELDEIIEHQSKYYPWLVEINPNKHDLHLAKYKIEQLVAFRVPYYVGPMITPKDQAESAETVFSWMERKGTETGQITPWNFDEKVDRKASANRFIKRMTTKDTYLIGEDVLPDESLLYEKFKVLNELNMVRVNGKLLKVADKQAIFQDLFENYKHVSVKKLQNYIKAKTGLPSDPEISGLSDPEHFNNSLGTYNDFKKLFGSKVDEPDLQDDFEKIVEWSTVFEDKKILREKLNEITWLSDQQKDVLESSRYQGWGRLSKKLLTGIVNDQGERIIDKLWNTNKNFMQIQSDDDFAKRIHEANADQMQAVDVEDVLADAYTSPQNKKAIRQVVKVVDDIQKAMGGVAPKYISIEFTRSEDRNPRRTISRQRQLENTLKDTAKSLAKSINPELLSELDNAAKSKKGLTDRLYLYFTQLGKDIYTGEPINIDELNKYDIDHILPQAFIKDNSLDNRVLVLTAVNNGKSDNVPLRMFGAKMGHFWKQLAEAGLISKRKLKNLQTDPDTISKYAMHGFIRRQLVETSQVIKLVANILGDKYRNDDTKIIEITARMNHQMRDEFGFIKNREINDYHHAFDAYLTAFLGRYLYHRYIKLRPYFVYGDFKKFREDKVTMRNFNFLHDLTDDTQEKIADAETGEVIWDRENSIQQLKDVYHYKFMLISHEVYTLRGAMFNQTVYPASDAGKRKLIPVKADRPVNVYGGYSGSADAYMAIVRIHNKKGDKYRVVGVPMRALDRLDAAKNVSDADFDRALKDVLAPQLTKTKKSRKTGEITQVIEDFEIVLGKVMYRQLMIDGDKKFMLGSSTYQYNAKQLVLSDQSVKTLASKGRLDPLQESMDYNNVYTEILDKVNQYFSLYDMNKFRHKLNLGFSKFISFPNHNVLDGNTKVSSGKREILQEILNGLHANPTFGNLKDVGITTPFGQLQQPNGILLSDETKIRYQSPTGLFERTVSLKDL

SEQ ID NO: 267 - protein, 1371 aa, Lactobacillus buchneri
MKVNNYHIGLDIGTSSIGWVAIGEDGKPLRIKGKTAIGARLFQEGNPAADRRMFRTTRRRLSRRKWRLKLLEEIFDPYITPVDSTFFARLKQSNLSPKDSRKEFKGSMLFPDLTDMQYHKDYPTIYHLRHALMTQDEKFDIRMVYLAIHHIVKYRGNFLNSTPVDSFKASKVNFVDQFKKLNELYTAINPEESFQINLANSEDIGHQFLDPSIRKFDKKKQIPKIVPVSVDDKATDKINGKIASEIINAILGYKSKLDVVVQCTPVDSKSWALKFDEEDIDAKLQKILPEMDENQQSIIAILQNLYSQVTLNQIVPNGMSLSESMIEKYNDHHDHLKLYKKIIDQLADPKKKAALKKAYSQYVGDDGKVIEQADFWSSVKKNLDDSDLSKQIMDLIDAEKFMPKQRTSQNGVIPHQLHQRELDEIIEHQSKYYPWLAEINPNKHDLHLAKYKIEELVAFRVPYYVGPMITPDDQAKSAETVFSWMERKGKEAGQITPWNFDEKVDRNASANRFIKRMTTKDTYLIGEDVLPDESLLYEKFKVLNELNMVRVNGKLLKVADKQAIFQDLFENYKHISVKKLQNYIKSKTGLPSDPEISGLSDPEYFNNSLGTYNDFKKLFGNKVDEPDLQDDFEKIVEWSTVFEDKRILREKLNEITWLSDQQKDVLESSRYQGWGRLSKKLLTGIVNDQGERIIDELWNTNKNFMQIQSDNDFAKRIHEANADQMKAVDVEDVLADAYTSPQNKKAIRQVVKVVDDIQKAMGGVAPKYISIEFTRSEDRNPRRTISRQRQLENTLKDTAKSLAKSINPELLSELDNAAKSKKGLTDRLYLYFTQLGKDIYTGKPINIDEISTYDIDHILPQAFVKDDSLNNRVLVSKAINNGKSDNVPVQLFGAKMGHFWKQLAEAGLISKRKLKNLQTDPDTISKYAMHGFIRRQLVETSQVIKLVANILGDKYRNDNTKIIEITARMNHQMRDEFGFIKNREINDYHHAFDAYLTAFLGRYLYHRYIKLRPYFVYGDFKKFKEDKVTMRNFNFLHDLTDDTQEKIADAETGEVIWDRENSIQQLKDVYHYKFMLISHEVYTLRGAMFNQTVYPASDAGKRKLIPIKADRPINVYGGYSGSADAYMAIVRIHNKKGDKYRVVGVPMRARDRLDAAKKVSDADCDRALKDVLTPQLTKTKKSRKTGEITQVVEDFEIVLGKVMYRQLMIDGDKKFMLGSSTYQYNAKQLVLSDQSVKTLASKGRLDPLQESMDYNNVYTEILDKVNQYFSLYDMNKFRHKLNLGFSKFISFPNHNVFDGNTKASSGKREILEEVLNGLHANPTFGNLKDIGITTPFGQLQQPNGILLSDEAKIRYQSPTGLFERTVSLKDL

SEQ ID NO: 268 - protein, 1361 aa, Lactobacillus casei
  Lactobacillus casei BL23
MTKLGKPYGIGVDIGSNSIGFAAVDENSHLIRLKGKTVIGARLFEEGKAAADRRASRTTRRRLSRNRWRLSFLRDFFESHITPTGPNFFMRQKYSEISPKDKARYKYEKRLFNDRTDAEFYQQYPTMYHLRNRLLTDPSKADVREIYFAIHHILKSRGHFLTSGYAKDFNTNKVALNEIFPALQDAYAQVYPDLDITFDENKVNEFKTVLLNEKATPSDTQRALVNLLLAEDGDKDILKQQKQVLTEFAKAVVGLKTKLNVALGTEVDSSEATVWNFSLGQLDDKWAGIESAMTDEGTEILDQIRDLYRARLLNGIVPAGKTLSQAKVDDYAQHHEDLELFKDYLKQLEDDGTAKAIRQLYDRYIDGDDAKPFVREDFVKALTKEVTAHPNAKSPELLERLAQPDFMLKQRNKANGAIPVQMQQRELDQIIKNQSVYYDWLAAPNPVEKHRKSMPYQLDELLNFRIPYYVGPLVTAKEQKAAQGGVFAWMVRKDPDGNITPYNFDEKVDREASANTFIQRMKTTDTYLIGEDVLPKQSLLYQRYEVLNELNNVRVNNEKLSIEQKQQVIRELFERHNSVTIKQFAENLRAHGDYAHIPEIRGLADEKRFLSSLSTYRQLKSLLPDAIDDPAKQADIENIIAWSTVFEDAAIFKTKLKEINWLDSQTITKLSNIRYRGWGQFSHKFLNGLTLGNGHTIIQELFLSNNNLMQILTDETLQKKMTELNADKLKAANINDAIDDAYTSPSNKKALRQVLRVIEDIKRAADGQDPSWLYVETADGGGTPGKRTRARQHQLQEIYANAAHELIDSAVRGELEDKIADKADFNDRLVLYFMQGGRDIYTGTPLNIDQLSSYDIDHILPQSLIKDNSLDNRVLVHAIINREKNATFASTIYAQKMNATWRQWHEAGLISGRKLRNLQMRPDQIDKYASGFVARQLVETRQIIKLTEQIVAAQYPETKIIAVKAGLSHQLREELEFPKNRDVNHYHHAFDAFLAARIGTYLLKRFPNLQAFFTYGKFKKADVKKLRGFNFIRDITHAEDKIVVKDTGEVIWDKKRDVDELDRIYNFKRMLITHEVHFEKADLFKQTVYGAKDSKEAGGKKQLISKKKGYPVDIYGGYTQETGSYLSVVRLTKKAMYAVVKVSTRDAAKLAVAKSISEQKENETLNDIIDEKLSKISKNGKITHELFEVVLPRVGQKTLFKNSKYNLFLVNSDTYMHNYQELWMPREYQKMWKDISLSKYGDAQTEDQLDQIFGFIVSQVNSYFNLYDINQFRKKLNDAADKFATLPMRDTDDMQGKIATIGQLLIGLQANAARSDLRNLDIKTPLGLLQIPNGISLDSDTSVVYQSPTGLLEREVHLSDL

SEQ ID NO: 269 - protein, 1361 aa, Lactobacillus casei
  Lactobacillus casei Lc-10
MTKLGKPYGIGVDIGSNSIGFAAVDENSHLIRLKGKTVIGARLFEEGKAAADRRASRTTRRRLSRNRWRLSFLRDFFESHITPTGPNFFMRQKYSEISPKDKARYKYEKRLFNDRTDAEFYQQYPTMYHLRNRLLTDPSKADVREIYFAIHHILKSRGHFLTSGYAKDFNTNKVALNEIFPALQDAYAQVYPDLDITFDENKVNEFKTVLLNEKATPSDTQRALVNLLLAEDGDKDILKQQKQVLTEFAKAVVGLKTKLNVALGTEVDSSEATVWNFSLGQLDDKWAGIESAMTDEGTEILDQIRDLYRARLLNGIVPAGNTLSQAKVDDYAQHHEDLELFKDYLKQLEDDGTAKAIRQLYDRYIDGDDAKPFVREDFVKALTKEVTAHPNAKSPELLERLAQPDFMLKQRNKANGAIPVQMQQRELDQIIKNQSVYYDWLAAPNPVEKHRKSMPYQLDELLNFRIPYYVGPLVTAKEQKAAQGGVFAWMVRKDPDGNITPYNFDEKVDREASANTFIQRMKTTDTYLIGEDVLPKQSLLYQRYEVLNELNNVRVNNEKLSIEQKQQVIRELFERHNSVTIKQFAENLRAHGDYAHIPEIRGLADEKRFLSSLSTYRQLKSLLPDAIDDPAKQADIENIIAWSTVFEDAAIFKTKLKEINWLDSQTITKLSNIRYRGWGQFSHKFLNGLTLGNGHTIIQELFLSNNNLMQILTDETLQKKMTELNADKLKAANINDAIDDAYTSPSNKKALRQVLRVIEDIKRAADGQDPSWLYVETADGGGTPGKRTRARQHQLQEIYANAAHELIDSAVRGELEDKIADKADFNDRLVLYFMQGGRDIYTGTPLNIDQLSSYDIDHILPQSLIKDNSLDNRVLVHAIINREKNATFASTIYAQKMNATWRQWHEAGLISGRKLRNLQMRPDQIDKYASGFVARQLVETRQIIKLTEQIVAAQYPETKIIAVKAGLSHQLREELEFPKNRDVNHYHHAFDAFLAARIGTYLLKRFPNLQAFFTYGKFKKADVKKLRGFNFIRDITHAEDKIVVKDTGEVIWDKKRDVDELDRIYNFKRMLITHEVHFEKADLFKQTVYGAKDSKEAGGKKQLISKKKGYPVDIYGGYTQETGSYLSVVRLTKKAMYAVVKVSTRDAAKLAVAKSISEQKENETLNDIIDEKLSKISKNGKITHELFEVVLPRVGQKTLFKNSKYNLFLVNSDTYMHNYQELWMPREYQKMWKDISLSKYGDAQTEDQLDQIFGFIVSQVNSYFNLYDINQFRKKLNDAADKFATLPMRDTDDMQGKIATIGQLLIGLQANAARSDLRNLDIKTPLGLLQIPNGISLDSDTSVVYQSPTGLLEREVHLSDL

SEQ ID NO: 270 - protein, 1363 aa, Lactobacillus casei
  Lactobacillus casei M36
MTKLGKPYGIGVDIGSNSIGFAAVDENSHLIRLKGKTVIGARLFEEGKAAADRRASRTTRRRLSRNRWRLSFLRDFFESHITPTDPNFFMRQKYSEISPKDKARYKYEKRLFNDRTDAEFYQQYPTMYHLRNRLLTDPSKADVREIYFAIHHILKSRGHFLTSGYAKDFNTNKVALNEIFPALQDAYAQVYPDLDITFDENKVNEFKTVLLDEKATPSDTQRALVNLLLAEDGDKDILKQQKQVLTEFAKAVVGLKMKLNVALGTEVDSSEATAWNFSLGQLDDKWAGIESAMTDEGTEILDQIRDLYRARLLNGIVPAGKTLSQAKVDDYEQHHEDLELFKDYLKQLEDDGMAKVIRQLYDRYIDGDDAKPFVREDFVKALTKEVTAHPNAKSPELLERLVQPDFMLKQRNKANGAIPVQMQQRELDQIIKNQSVYYDWLAAPNPVEKHRQSMPYQLDELLNFRIPYYVGPLVTAKEQKAAQGGVFAWMVRKDPDGNITPYNFDEKVDREASANTFIQRMKTTDTYLIGEDVLPKQSLLYQSYEVLNELNNVRVNDNKLSFDQKQQVLGELFERHNTVTIKQFVDNLLAHGDYDRIPEVRGLADEKRFLSSLSTYNQLKGILHEAIDDSDKQTDIEKIIAWSTIFEDKAIFKTKLNEISWLTAGMINSLANIRYRGWGQFSHKLLNELTLSTGRTVFEELLISSHNLMQILTDEVLKQKIAELNAHELKASGIYAAIDDAYTSPSNKKALRQVLSVIDDITNAAGQAPNWLYIETADGDGVPGKRTNSRQRKIQEIYANAAQELITGSVRGELEDKIASRADFTDRLVLYFMQGGRDIYTGEPLNIDNLSSYDIDHILPQSLIKDNSLDNRVLVHPLVNREKDTIFASTRFAKQMNGMWRQWHAAGLISSRKLRNLQMRPDEIDKYASGFVARQLVETRQIIKLTEQIVADQYPDAKIIAVKAGLSSQLRKELDFPKNREVNHYHHAFDAFLAARIGTYLLKRYPNLEPFFTYGKFKKTEVKKLKSLKSFNFIRDMTHAKDKIVAKETGEIVWDNASDINELDRIYNFKRMLITHEVRFETASLFKQTLYAAKNSKNRGGSRQLIPKKKGYLVDIYGGYTQETGSYLSVVRLTKKAMYAVVKVSTRDAAKLAVAKSISEQKENETLKKIIDGKLSKTSKKGKTTHQLFEIVLPRVGQKTLFKNSKYNQFLVNSDTYMHNYQELWMPREYQRMWKDILLSNHGDAQLEGQLDQIFKFIVSQVNSYFNLYDINQFRKKIADATDKFAKLPTHDTDNARGKIATIGQLLIGLQANAMRSDLRNLDIKTPFGLLQIGTGITLDLDTSIIYQSPTGLFEREVPLTDL

SEQ ID NO: 271 - protein, 1361 aa, Lactobacillus casei; identical to SEQ ID NO: 268
  Lactobacillus casei group

SEQ ID NO: 272 - protein, 1360 aa, Lactobacillus casei
  Lactobacillus casei T71499
MTKLGKPYGIGVDIGSNSIGFAAVDENSHLIRLKGKTVIGARLFEEGKAAADRRASRTTRRRLSRNRWRLSFLRDFFESHITPTDPNFFMRQKYSEISPKDKARYKYEKRLFNDRTDAEFYQQYPTMYHLRTRLLTDPSKADVREIYFAIHHILKSRGHFLTPGYAKDFNTNKVALNEIFPALQDAYAQVYPDLDITFDENKVNEFKTVLLNEKATPSDTQRALVNLLLAEDGDKDILKQQKQVLTEFAKAVVGLKTKLNVALGTEVDSSEATVWNFSLGQLDDKWAGIESAMTDEGTEILDQIRDLYRARLLNGIVPAGKTLSQAKVDDYAQHHEDLELFKDYLKQLEDDGTAKAIRQLYDRYIDGDDAKPFVREDFVKALTKEVTAHPNAKSPELLERLAQPDFMLKQRNKANGAIPVQMQQRELDQIIKNQSVYYDWLAAPNPVEKHRKSMPYQLDELLNFRIPYYVGPLVTAKEQKAAQGGVFAWMVRKDPDGNITPYNFDEKVDREASANTFIQRMKTTDTYLIGEDVLPKQSLLYQSYEVLNELNNVRVNDNKLSFDQKQQVLGELFERHNTVTIKQFVDNLLAHGDYDRIPEVRGLADEKRFLSSLSTYNQLKGILHEAIDDADKQTDIENIIAWSTIFEDKAIFKTKLNEISWLNAGMINSLANIRYRGWGQFSHKLLNELTLSTGRTVFEELLISSRNLMQILTDEVLKQKIAELNAHELKASGIYAAIDDAYTSPSNKKALRQVLSVIDDITNAAGQAPNWLYIETADGDGVPGKRTNSRQRKIQEIYANAAQELITGSVRGELEDKIASRADFTDRLVLYFMQGGRDIYTGEPLNIDNLSSYDIDHILPQSLIKDNSLDNRVLVHPLVNREKDTIFASTRFAKQMNGMWRQWHAAGLISSRKLRNLQMRPDEIDKYASGFVARQLVETRQIIKLTEQIVADQYPDTKIIAVKAGLSSQLRKELDFPKNREVNHYHHAFDAFLAARIGTYLLKRYPNLEPFFTYGKFKKTEVKKLKSFNFIRDMTHAKDKIVAKETGEIVWDNASDINELDRIYNFKRMLITHEVRFETASLFKQTLYAAKNSKNRGGSRQLIPKKKGYLVDIYGGYTQETGSYLSVVRLTKKAMYAVVKVSTRDAAKLAVAKSISEQKENETLKKIIDGKLSKTSKKGKTTHQLFEIVLPRVGQKTLFKNSKYNQFLVNSDTYMHNYQELWMPREYQRMWKDILLSNHGDAQLEGQLDQIFKFIVSQVNSYFNLYDINQFRKKIADATDKFAKLPTHDTDNARGKIATIGQLLIGLQANAMRSDLRNLDIKTPFGLLQIGTGITLDLDTSIIYQSPTGLFEREVPLTDL

SEQ ID NO: 273 - protein, 1366 aa, Lactobacillus casei
  Lactobacillus casei UCD174
MTKLGKPYGIGVDIGSNSIGFAAVDENSHLIRLKGKTVIGARLFEEGKAAAYRRASRTTRRRLSRNRWRLSFLRDFFESHITPTDPNFFMRQKYSEISPKDKARYKYEKRLFNDRTDAEFYQQYPTMYHLRTRLLTDPSKADVREIYFAIHHILKSRGHFLTPGYAKDFNTNKVALNEIFPALQDAYAQVYPDLDITFDENKVNEFKTVLLNEKATPSDTQRALVNLLLAKEGDRDILKQQKQVLTEFAKAVVGLKTKLNVALGTEVDSSEATAWNFSLGQLDDKWAGIESAMTDEGTEILDQIRDLYRARLLNGIVPAGKTLSQAKVDDYAQHHEDLELFKDYLKQLEDDGTAKAIRQLYDRYIDGDDAKPFVREDFVKALTKEVTAHPNAKSPELLERLAQPDFMLKQRNKANGAIPVQMQQRELDQIIKNQAVYYDWLAAPNPVEKHRQSMTYQLDELLNFRIPYYVGPLVTAKEQKAAQGGVFAWMVRKDPDGNITPYNFDEKVDREASANTFIQRMKTTDTYLIGEDVLPKQSLLYQSYEVLNELNNVRVNDNKLSFDQKQQVLGELFERHNTVTIKQFVDNLLAHGDYDRIPEVRGLADEKRFLSSLSTYNQLKGILHEAIDDADKQTDIENIIAWSTIFEDKAIFKTKLNEISWLNAGMINSLANIRYRGWGQFSHKLLNELTLSTGRTVFEELLISSRNLMQILTDEVLKQKIAELNAHELKASGIYAAIDDAYTSPSNKKALRQVLSVIDDITNAAGQAPNWLYIETADGDGVPGKRTNSRQRKIQEIYANAAQELITGSVRGEFEDKIASRADFTDRLVLYFMQGGRDIYTGEPLNIDNLSSYDIDHILPQSLIKDNSLDNRVLVHPLVNREKDTIFASTRFAKQMNGMWRQWHAAGLISSRKLRNLQMRPDEIDKYASGFVARQLVETRQIIKLTEQIVADQYPDTKIIAVKAGLSSQLRKELDFPKNREVNHYHHAFDAFLAARIGTYLLKRYPNLEPFFTYGKFKKTEVKKLKSLKSLKSFNFIRDMTHAKDKIVAKETGEIVWDNASDINELDRIYNFKRMLITHEVRFETASLFKQTLYAAKNSKNRGGSRQLIPKKKGYLVDIYGGYTQETGSYLSVVRLTKKAMYAVVKVSTRDAAKLAVAKSISEQKENETLKKIIDGKLSKTSKKGKTTHQLFEIVLPRVGQKTLFKNSKYNQFLVNSDTYMHNYQELWMPREYQRMWKDILLSNHGDAQIEGQLDQIFKFIVSQVNSYFNLYDINQFRKKIADATDKFAKLPTHDTDNARGKIATIGQLLIGLQANAMRSDLRNLDIKTPFGLLQIGTGITLDLDTSIIYQSPTGLFEREVPLTDL

SEQ ID NO: 274 - protein, 1389 aa, Lactobacillus casei
MIIRTYELKTITTIAILKMFQLLTGGLSMTKLGKPYGIGVDIGSNSIGFAAVDENSHLIRLKGKTVIGARLFEEGKAAADRRASRTTRRRLSRNRWRLSFLRDFFESHITPTGPNFFMRQKYSEISPKDKARYKYEKRLFNDRTDAEFYQQYPTMYHLRNRLLTDPSKADVREIYFAIHHILKSRGHFLTSGYAKDFNTNKVALNEIFPALQDAYAQVYPDLDITFDENKVNEFKTVLLNEKATPSDTQRALVNLLLAEDGDKDILKQQKQVLTEFAKAVVGLKTKLNVALGTEVDSSEATVWNFSLGQLDDKWAGIESAMTDEGTEILDQIRDLYRARLLNGIVPAGKTLSQAKVDDYAQHHEDLELFKDYLKQLEDDGTAKAIRQLYDRYIDGDDAKPFVREDFVKALTKEVTAHPNAKSPELLERLAQPDFMLKQRNKANGAIPVQMQQRELDQIIKNQSVYYDWLAAPNPVEKHRKSMPYQLDELLNFRIPYYVGPLVTAKEQKAAQGGVFAWMVRKDPDGNITPYNFDEKVDREASANTFIQRMKTTDTYLIGEDVLPKQSLLYQRYEVLNELNNVRVNNEKLSIEQKQQVIRELFERHNSVTIKQFAENLRAHGDYAHIPEIRGLADEKRFLSSLSTYRQLKSLLPDAIDDPAKQADIENIIAWSTVFEDAAIFKTKLKEINWLDSQTITKLSNIRYRGWGQFSHKFLNGLTLGNGHTIIQELFLSNNNLMQILTDETLQKKMTELNADKLKAANINDAIDDAYTSPSNKKALRQVLRVIEDIKRAADGQDPSWLYVETADGGGTPGKRTRARQHQLQEIYANAAHELIDSAVRGELEDKIADKADFNDRLVLYFMQGGRDIYTGTPLNIDQLSSYDIDHILPQSLIKDNSLDNRVLVHAIINREKNATFASTIYAQKMNATWRQWHEAGLISGRKLRNLQMRPDQIDKYASGFVARQLVETRQIIKLTEQIVAAQYPETKIIAVKAGLSHQLREELEFPKNRDVNHYHHAFDAFLAARIGTYLLKRFPNLQAFFTYGKFKKADVKKLRGFNFIRDITHAEDKIVVKDTGEVIWDKKRDVDELDRIYNFKRMLITHEVHFEKADLFKQTVYGAKDSKEAGGKKQLISKKKGYPVDIYGGYTQETGSYLSVVRLTKKAMYAVVKVSTRDAAKLAVAKSISEQKENETLNDIIDEKLSKISKNGKITHELFEVVLPRVGQKTLFKNSKYNLFLVNSDTYMHNYQELWMPREYQKMWKDISLSKYGDAQTEDQLDQIFGFIVSQVNSYFNLYDINQFRKKLNDAADKFATLPMRDTDDMQGKIATIGQLLIGLQANAARSDLRNLDIKTPLGLLQIPNGISLDSDTSVVYQSPTGLLEREVHLSDL

SEQ ID NO: 275 - protein, 1354 aa, Lactobacillus coryniformis
  Lactobacillus coryniformis subsp. coryniformis KCTC 3167
MTLHYNVGLDIGTNSVGYTIVDDNGKILQVKGKNGYGVRVFKEGATAAERRIFRTTHRRLKRRKWRLRLLQDFFEPYILPQDDGFFIRRKESNLVLNDRDEDTASLFNDRSDRDFYQAYPTIYHLRQALMTEKRQFDVREIYLAMHHIIKYRGHFLLNGTVNNFTNNKIDLHSDFEELNALLLNVIPELKFQIDLDHSTMFQTTLLNTTISRSGRQRDLVKSFYNGSDDKQLAKQQKSVATELLKAILGLKAKFHKLFNLDLLETTEWEFSFDAEDIDDKLAKLEPLMTENQQQVMDILQRIFAAITLNGIVPEGKTLSASKVDSYQKHKQDLKLLKAIAQHSDKKTATVLQTAYNEYINGIASKPLKQEDFYKRLTNAVKKSSDPQVADMLALIDQEKFLPKQRTKENGAIPHQLHQLELERIIDNQKDYYPWLAELNPNQARQKVAKYKLSELVAFRVPYYVGPLIEPEVQQATSNAHFAWMARKEAGPITPWNFDQKVDRNVSAERFIKRMTTKDTYLLAEDVLPLHSLLYQRFIVLNELNNVRVNGQKLTKKQKQAVYQDLFKRQPHVTKKQFKSYLVQTGEFAESSKIEGLANETSFNSGLTTENELRKIFGAQLDEARYQVDFEQIIEWATLFEDAKILRTKLAEITWLTTEQIEKLAGIRYRGWGRFSRKLLAGLRDQNGQQIIDLLWDTPNNFMVIVSQAAFSEAITKENEKLIDRRGAQDVITDLYTSPQNKKALRQVLAIVADVQKAMGGVPPQRIFIEFAREDEKNPRRSVERSRQLEKLYQTISNEFLINSEVRQELKEAVDQKVNFKDRLFLYFLQGGVDLYSGKRINIDQLSHYDIDHILPQSFIKDDSLDNRVLVSQKLNRSKSDSVPLSEFANYKFGPAMQAKWLQLKEAGLLSKRKYDNLTLDPTKLSKFAPLGFVNRQLVETRQVIKLAANLLASEETKVVTIKANMTHQVRKELDFPKNRNVNNYHHAFDAYLTAFVGIFLSKRYPKLKPYFTYGDFQKGNKLPDLKNFNFLYELKNKDRSIDSNTGEIIWDKQRDLAYMNKIYNFKKVTVVHEVLTKSGALYNQTLYKASEDKASGRGTKQLIRKKDNMPTELYGGYTGSTSAFMSIVRLWKKDKPYYKVVGIPTRMAAKLANQAQLLDYLTKKFTTRKLVKKTGDYKTTVERFELVVPKVGFNQLVIDGGQPFMLGSATYQYNARELFISKEAVKALNKQLSTHVDLVQVFDEILVQVNRWFPLYDTNGFREKLSHGRDRFMKLNDSFEEKSDTQIDVLNRILIGFHANAARTNLKILGLGTDLGFMTQQAGIRLTEKAILVHQSPSGLFERKVALRDLKGLR

SEQ ID NO: 276 - protein, 1119 aa, Lactobacillus coryniformis
  Lactobacillus coryniformis subsp. torquens KCTC 3535
MGYRIGLDVGITSTGYAVLKTDKNGLPYKILTLDSVIYPRAENPQTGASLAEPRRIKRGLRRRTRRTKFRKQRTQQLFIHSGLLSKPEIEQILATPQAKYSVYELRVAGLDRRLTNSELFRVLYFFIGHRGFKSNRKAELNPENEADKKQMGQLLNSIEEIRKAIAEKGYRTVGELYLKDPKYNDHKRNKGYIDGYLSTPNRQMLVDEIKQILDKQRELGNEKLTDEFYATYLLGDENRAGIFQAQRDFDEGPGAGPYAGDQIKKMVGKDIFEPTEDRAAKATYTFQYFNLLQKMTSLNYQNTTGDTWHTLNGLDRQAIIDAVFAKAEKPTKTYKPTDFGELRKLLKLPDDARFNLVNYGSLQTQKEIETVEKKTRFVDFKAYHDLVKVLPEEMWQSRQLLDHIGTALTLYSSDKRRRRYFAEELNLPAELIEKLLPLNFSKFGHLSIKSMQNIIPYLEMGQVYSEATTNTGYDFRKKQISKDTIREEITNPVVRRAVTKTIKIVEQIIRRYGKPDGINIELARELGRNFKERGDIQKRQDKNRQTNDKIAAELTELGIPVNGQNIIRYKLHKEQNGVDPYTGDQIPFERAFSEGYEVDHIIPYSISWDDSYTNKVLTSAKCNREKGNRIPMVYLANNEQRLNALTNIADNIIRNSRKRQKLLKQKLSDEELKDWKQRNINDTRFITRVLYNYFRQAIEFNPELEKKQRVLPLNGEVTSKIRSRWGFLKVREDGDLHHAIDATVIAAITPKFIQQVTKYSQHQEVKNNQALWHDAEIKDAEYAAEAQRMDADLFNKIFNGFPLPWPEFLDELLARISDNPVEMMKSRSWNTYTPIEIAKLKPVFVVRLANHKISGPAHLDTIRSAKLFDEKGIVLSRVSITKLKINKKGQVATGDGIYDPENSNNGDKVVYSAIRQALEAHNGSGELAFPDGYLEYVDHGTKKLVRKVRVAKKVSLPVRLKNKAAADNGSMVRIDVFNTGKKFVFVPIYIKDTVEQVLPNKAIARGKSLWYQITESDQFCFSLYPGDMVHIESKTGIKPKYSNKENNTSVVPIKNFYGYFDGADIATASILVRAHDSSYTARSIGIAGLLKFEKYQVDYFGRYHKVHEKKRQLFVKRDE

SEQ ID NO: 277 - protein, 1368 aa, Lactobacillus curvatus
  Lactobacillus curvatus CRL 705
MSRPYNIGLDIGTSSIGWSVVDDQSKLVSVRGKYGYGVRLYDEGQTAAERRSFRTTRRRLKRRKWRLGLLREIFEPYITPIDDTFFLRQKQSNLSPKDQRKLYTQTSLFNDRTDRAFYDDYPTIYHLRYRLMTEKRQFDIREIYLAMHHIVKYRGHFLNEAPVSSFKSSEINLVAHFDRLNTIFADLFSESGFQLETDKLAEVKALLLDNQQSASNRQRQALSLIYTPSTNKAVEKQNKAIATELLKAILGLKAKFNVLTGIEAEDVKAWTLTFNAENFDEEMVKLESSLDDNAHQIIESLQELYSGVLLAGIVPENQSLSQAMITKYDDHQKHLKMLKAVREALAPGDRQRLKQAYDQYVDGQENTKAYSKEDFYGDITKALKNNPDHPIVSEIKKLIELDQFMPKQRTKDNGAIPHQLHQQELDRIIENQQQYYPWLAELNPNSKRQTVAKYKLDELVAFRVPYYVGPLITAEQQRQSSDAKFAWLIRKAEGRITPWNFDDKVDRQASANEFIKRMTTTDTYLLAEDVLPKQSLIYQRFEVLNELNGLKIDDQPITTELKQAIFTDLFMQKISVTVKNIQDYLVSEKRYASRPAITGLSDENKFNSRLSTYHDLKMIVGDAVDDVDKQADLEKCIEWSTIFEDGKIYSAKLNEIDWLTDQQRVQLAAKRYRGWGRLSAKLLTQIVNANGQRIMDLLWDTTDNFMRIVHSEDFDKLITEANQMMLAENDVQDVINDLYTSPQNKKALRQILLVVNDIQKAMKGQAPERILIEFAREDEVNSRLSVQRKRQVEQVYQNISNELLNNTEIRNELKDLSNSALSNTRLFLYFMQGGRDMYTGDSLNIDRLSTYDIDHILPQSFIKDNSLDNRVLVSQKMNRSKADQVPTDFTSVELGQKMQIQWEQMLRAGLITKKKYDNLTLNPDHISKYAMKGFINRQLVETRQVIKLATNLLMEQYGEDNIELITVKSGLTHQMRTEFDFPKNRNLNNHHHAFDAYLTAFVGLYLLKRYPKLKPYFVYGEYQKASQQDKWRNFNFLNGLKKDELVDENTEAVIWDKESGLAYLNKIYQFKKILVTRGVHENSGALFNQTLYAAKDDKASGQGGKQLIPAKQDRSTALYGGYSGKTVAYMCIVRIKNKKGDLYKVCGVETSWLAQLKQLTDEDSQKAFLEQKISPQFTKVKKQKGNIIEAVEEFEVIAPHILINQRFFDNGQELTLGSATYKHNEQELILDKTAVKLLNGALPLTQSEELAEQVYDEILDQVMHYFPLYDTNQFRAKLSTGKAAFMKLPWKSQWDGNKMVQVGQQVILDRILIGLHANAAMSDLKVLKMTTPFGMIQQSTGITLSADTQIIYQSPTGLFERRVALRDL

SEQ ID NO: 278 - protein, 1126 aa, Lactobacillus farciminis
  Lactobacillus farciminis KCTC 3681
MADRISLGLDIGVASVGFSVLDIDKGKVIELGARLFSATVAAGNQDRRDMRGARRLLNRNKQRRQDTGKLFKKFGLIDDFDKGSFYDNFNQNLNPYELRVKGLTEQLTKEELAESLYQIVKHRGISYALKDADVDEGGTDYSVSLKINSQELAEKTPAQIQLQRLNDYGKVRGQVVIGDDPDNQKVLLNVFPTSAYEKEAKQIIATQQQFYPESLTDKFTEEYCQILTRKRDYFVGPGNEKSRTDYGIYKTDGRTLDNLFEELIGHDKIYPEELRASAASYTAQLFNVLNDLNNLRILNYEDGKLTKEDKEKIIAEIKNNTTTINMLNVIKKVAGCSKDDIKGFRVNEKDKPEISSMPVYRKIHKDLLKAGVDISDWPVEFIDELSFILTLNTENGEIRKQLNNRLAPKFDFLNADLIQLIIDNKDSFEIKTNNKWHRFSVKTMNKLIPEMMERPVEQMTLLNEMGLVKKDKKRFENNKYLPYKEIAKDIFNPVASKSVREALKIVNAVLKKYGHIDYLVVEMPRDKNLKEEQDNIKEFQNKNKKAKDAAFEAFVKSVGSEQRVKEALSKNRKLQMKMRLWYQQQEIDPYNGKTIDATDLINNPDKFEIDHIIPQSISFYDSINNKTLCFASMNQVKGQKTPYEFMLEGHGQSYDKFKATVMANKNFGKAKRANYLFEENVSDIETRKRFLSRNLVDTRYSSRVVLNSLQDFFREKSADTKVTVIRGKFTSNMRKHWHIDKTRETFHHHAIDASIIAATPFLRMWKKGGTIFPVKVGEESIDIETGEILDDKNFDKAMYEEPYSGFVSEIMNADDRIKFSHQVDKKMNRKVSDATIYSTRTGKLAKDKKDAEYIVAKVKDIYSVDGFKKFKKVYDKDKTKFLLYKYDPRTFSKLERIISDCPDKVEKVQTNGKVKAVDISPFEMYRRDHGMIKKYSKKGNGPAIKQLKYLDKKLGSHIDITPANANGKHVILQSLKPWRTDVYLNHETGEYEIMGIKYSDLKFNKNEGYGIKKDKYLEIKKVEEVSEKSEFMFSLYRKDRVKVQDMKTGESVELLFWSRNFSNKKYAELKPISQAENDKKLPVYGKGRLIKRLIPKNCKIWKVNTTILGDPYYLEKESDSPKDILD

SEQ ID NO: 279 - protein, 1356 aa, Lactobacillus farciminis
  Lactobacillus farciminis KCTC 3681
MTKKEQPYNIGLDIGTSSVGWAVTNDNYDLLNIKKKNLWGVRLFEEAQTAKETRLNRSTRRRYRRRKNRINWLNEIFSEELAKTDPSFLIRLQNSWVSKKDPDRKRDKYNLFIDGPYTDKEYYREFPTIFHLRKELILNKDKADIRLIYLALHNILKYRGNFTYEHQKFNISNLNNNLSKELIELNQQLIKYDISFPDDCDWNHISDILIGRGNATQKSSNILKDFTLDKETKKLLKEVINLILGNVAHLNTIFKTSLTKDEEKLNFSGKDIESKLDDLDSILDDDQFTVLDAANRIYSTITLNEILNGESYFSMAKVNQYENHAIDLCKLRDMWHTTKNEEAVEQSRQAYDDYINKPKYGTKELYTSLKKFLKVALPTNLAKEAEEKISKGTYLVKPRNSENGVVPYQLNKIEMEKIIDNQSQYYPFLKENKEKLLSILSFRIPYYVGPLQSAEKNPFAWMERKSNGHARPWNFDEIVDREKSSNKFIRRMTVTDSYLVGEPVLPKNSLIYQRYEVLNELNNIRITENLKTNPIGSRLTVETKQRIYNELFKKYKKVTVKKLTKWLIAQGYYKNPILIGLSQKDEFNSTLTTYLDMKKIFGSSFMEDNKNYDQIEELIEWLTIFEDKQILNEKLHSSKYSYTPDQIKKISNMRYKGWGRLSKKILMDITTETNTPQLLQLSNYSILDLMWATNNNFISIMSNDKYDFKNYIENHNLNKNEDQNISDLVNDIHVSPALKRGITQSIKIVQEIVKFMGHAPKHIFIEVTRETKKSEITTSREKRIKRLQSKLLNKANDFKPQLREYLVPNKKIQEELKKHKNDLSSERIMLYFLQNGKSLYSEESLNINKLSDYQVDHILPRTYIPDDSLENKALVLAKENQRKADDLLLNSNVIDRNLERWTYMLNNNMIGLKKFKNLTRRVITDKDKLGFIHRQLVQTSQMVKGVANILDNMYKNQGTTCIQARANLSTAFRKALSGQDDTYHFKHPELVKNRNVNDFHHAQDAYLASFLGTYRLRRFPTNEMLLMNGEYNKFYGQVKELYSKKKKLPDSRKNGFIISPLVNGTTQYDRNTGEIIWNVGFRDKILKIFNYHQCNVTRKTEIKTGQFYDQTIYSPKNPKYKKLIAQKKDMDPNIYGGFSGDNKSSITIVKIDNNKIKPVAIPIRLINDLKDKKTLQNWLEENVKHKKSIQIIKNNVPIGQIIYSKKVGLLSLNSDREVANRQQLILPPEHSALLRLLQIPDEDLDQILAFYDKNILVEILQELITKMKKFYPFYKGEREFLIANIENFNQATTSEKVNSLEELITLLHANSTSAHLIFNNIEKKAFGRKTHGLTLNNTDFIYQSVTGLYETRIHIE

SEQ ID NO: 280 - protein, 1313 aa, Lactobacillus fermentum
  Lactobacillus fermentum 28-3-CHN
MHYLDEIFAPHLQEVDENFLRRLKQSNIHPEDPAKNQAFIGKLLFPDLLKKNERGYPTLIKMRDELPVEQRAHYPVTNIYKLREAMINEDRQFDLREVYLAVHHIMKYRGHFLNNASVDKFKVGRIDFYKSFNVLNEAYEELQNGEGSFTIEPSKVEKIGQLLLDTKMRKLNRQKAVAKLLEVKVADKEETKRNKQIATAMSKLVLGYKADFATVAMANGNEWKIDLSSETSEDEIEKFREELSDAQNDILTEITSLFSQIMLNEIVPNGMSISESMMDRYWTHERQLAEVKEYLATQPASARKEFDQVYNKYIGQAPKERGFDLEKGLKKILSKKENWKEIDELLKAGDFLPKQRTSANGVIPHQMHQQELDRIIEKQAKYYPWLATENPATGERDRHQAKYELDQLVSFRIPYYVGPLVTPEVQKATSGAKFAWAKRKEDGEITPWNLWDKIDRAESAEAFIKRMTVKDTYLLNEDVLPANSLLYQKYNVLNELNNVRVNGRRLSVGIKQDIYTELFKKKKTVKVSDVASLVMAKTRGVNKPSVEGLSDPKKFNSNLATYLDLKSIVGDKVDDNRYQTDLENIIEWRSVFEDGEIFADKLTEVEWLTDQQRSALVKKRYKGWGRLSKKLLTGIVDENGQRIIDLMWNTDQNFMQIVNQPVFKEQIDQLNQKAITNDGMTLREWVESVLDGAYTSPQNKKAIWQVVRVVEDIVKAVGNAPKSISIEFARNEGNKGEITRSRRTQLQKLFEDQAHELVKDTSLTEELEKAPDLSDRYYLYFTQGGKDMYTGDPINFDEISTKYDIDHILPQSFVKDDSLDNRVLVSRAENNKKSDRVPAKLYAAKMKPYWNQLLKQGLITQRKFENLTMDVDQNIKYRSLGFVKRQLVETRQVIKLTANILGSMYQEAGTDIIETRAGLTKQLREEFDLPKVREVNDYHHAVDAYLTTFAGQYLNRRYPKLRSFFVYGEYMKFKHGSDLKLRNFNFFHELMEGDKSQGKVVDQQTGELITTRDEVAKSFDRLLNMKYMLVSKEVHDRSDQLYGATIVTAKESGKLTSPIEIKKKRPVDLYGAYTNGTSAFMTIIKFTGNKPKYKVIGVPTTSAVGLKRVGKPGSESYNQELHRIIKSNPKVKKDFEIVVPHVSYSQLIVDDDCKFTLASDTYQHPATQLVLSKESMEIIADDFKFVKENTATADEQLVRVFDEIVNQMNHYFTIFDQRSNRQKVTKARDKFVSLPTESEYEGAKKTQVGKTEVITNLLMGLHANSAQGDLKVLGLSTFGFFQSSGGLNLSEDAMIVYQSPTGLFERRICLKDI

SEQ ID NO: 281 - protein, 1381 aa, Lactobacillus fermentum
  Lactobacillus fermentum ATCC 14931
MDYVKEYHIGLDIGTSSIGWAVTDSQFKLMRIKGKTAIGVRLFEEGKTAAERRTFRTTRRRLKRRKWRLHYLDKIFAPHLQEVDENFLRRLKQSNIHPEDPAKNQAFIGKLLFPDLLKKNERGYPTLIKMRDELPVEQRAHYPVTNIYKLREAMINEDRQFDLREVYLAVHHIVKYRGHFLNNASVDKFKVGRIDFDKSFNVLNEAYEELQNGEGSFTIEPSKVEKIGQLLLDTKMRKLDRQKAVAKLLEVKVADKEETKRNKQIATAMSKLVLGYKADFATVAMANGNEWKIDLSSETSEDEIEKFREELSDAQNDILTEITSLFSQIMLNAIVPNGMSISESMMDRYWTHERQLAEVKEYLATQPASARKEFDQVYNKYIGQVPKEKGFDLEKGLKKILSKKENWKEIDELLKAGDFLPKQRTSANGVIPHQMHQQELDRIIEKQAKYYPWLATENPATGERDRHQAKYELDQLVSFRIPYYVGPLVTPEVQKATSGAKFAWAKRKEDGEITPWNLWDKIDRAESAEAFIKRMTVKDTYLLNEDVLPANSLLYQKYNVLNELNNVRVNGRRLSVGIKQDIYTELFKKKKTVKAGDVASLVMAKTRGVNKPSVEGLSDPKKFNSNLATYLDLKSIMGDKVDDNRYQMDLENIIEWRSVFEDGEIFADKLTEVEWLTDEQRSALVKKRYKGWGRLSKKLLTGIVDENGQRIIDLMWNTDQNFMQIVNQPVFKEQIDQLNQKAITNDGMTLRERVESVLDDAYTSPQNKKAIWQVVRVVEDIVKAVGNAPKSISIEFARNEGNKGEITRSRRTQLQKLFEDQAHELVKDTSLTEELEKAPDLSDRYYFYFTQGGKDMYTGDPINFDEISTKYDIDHILPQSFVKDDSLDNRVLVSRAENNKKSDRVPAKLYAAKMKPYWNQLLKQGLITQRKFENLTMDVDQNIKYRSLGFVKRQLVETRQVIKLTANILGSMYQEAGTDIIETRAGLTKQLREEFDLPKVREVNDYHHAVDAYLTTFAGQYLNRRYPKLRSFFVYGEYMKFKHGSDLKLRNFNFFHELMEGDKSQGKVVDQQTGELITTRDEVAKSFDRLLNMKYMLVSKEVHDRSDQLYGATIVTAKESGKLTSPIEIKKNRPVDLYGAYTNGTSAFMTIIKFTGNKPKYKVIGVPTTSAVGLKRVGKPGSESYNQELHRIIKSNPKVKKDFEIVVPHVSYSQLIVDGDCKFTLASDTYQHPATQLVLSKESMEIIADDFKFVKENPATADEQLVRVFDEIVNQMNHYFTIFDQRSNRQKVTKARDKFVSLPTESEYEGAKKTQVGKTEVITNLLMGLHANAAQGDLKVLGLSTFGFFQSSGGLNLSEDAMIVYQSPTGLFERRICLKDI

SEQ ID NO: 282 - protein, 1327 aa, Lactobacillus florum
  Lactobacillus florum 2F
MTEQQQPYNIGLDIGTSSIGWAVTDQNDKLLHIRGHNGIGVRLFKEGESAAERRGFRTTRRRLSRRRWRLRFLDRIFDAELAKVDPNFLARLKQSNISPLDPNKQMFGNILFDDPQFDDQKFHQQYPTIYHLRSALAQPDAPQADVRLIYLALHHMIKFRGHFLNGAAVEKFHGGQLHLESEFQELNQIFSNQQRDHVQLQTSSLDEVATILKDNQRTPSDRQRELSARLFVPVDKTIDKENKKLATELLKAVLGLKAKFDVILGVEATDPQAFKLQFSSDDFDDKIAELASELTDEANEILTVLQRLYFSLNLADILTNRQTKQVADSISTAMINRYDDHKHHLKMLKELEAQVTQEQRDGLKKAYDEYIDGDKPTIDTFYTNIKKNLDDSELANQIKSLIDLQAFMPKQRSKENGSIPHQLHQRELDQLIEVQGKYYPWLLAAKDKLDALIAFRVPYYVGPMIDPNQSDDPQNTKFAWMVRKEAGEITPWNFEEKVDKTSSATNFIKRMTTTDTYLLGEPVLPKNSLLYQQFTVLNELNKLKVNGKALTVDQKKYLYEHVCKKQRRVTLKKLSDCLMARGDFPMGAIFTGTTDQKNMNNTLKTYQDFQEIFGDEIDNPDRQVDFEKMIEWSAIFEDREIFKLKLAELNWLTSEQLERVSKKRYQGWGRLSQKLLTHIVNENGERIIDQLWNTNQNFMEIMGQDSVKQAIQEHNGANVAQTGINETIDELYTSPQNKKAIRQILLVVDDIKKAVGYAPANIMMEFAREDRDDHRLIASRARQLEKTYQEISKNWFDNESVTQELKDQIKNKTKFTDRLYLYFIQGGIDLYTGHPLNIDQLSSYDIDHILPQSFLLDNSLNNRVLTSQAENRVHKEDRLPGETVANKMRPTWKMMREQGLMTQRKYNNLTLKPDQISKFNNRGQFINRQLVETRQVIKLAADIMSQKYQADQTKVVTVKANLTHHMREKFNFYKSRNVNDYHHAFDAYLTLFVGNWLLKEYPKLQPYFVYGDFAKTGTNNLKSFNFLYRFERDHKLNDKGAIDTDKDQQLGYMKRIYRFKKMLVTKQLETNEGALYGQTLYPAPKNDKKTRNLINSKKNRPSDIYGGYSNENGSFLTLVKLKKGSKYDYRLVAVPVSKISEIKESELATIEKAIAPQFLKSSGKYRDFQVVLSKILINQKVIDDGMIFTIGSKSYKHNAKQVVLSDNSIQIVSTLSRISDKEKLITVFDEIVDITSKYLPWYKVNDVEKTKMLFRQMQDIDEMKKIIDNSLIGLHCNASITDLGKVGLSKYWGRFVLTAGISLTVDAQLIYQSPTGLFEHRVKVSDL

SEQ ID NO: 283 - protein, 1391 aa, Lactobacillus gasseri
  Lactobacillus gasseri JV-V03
MTKIKNEYIVGLDVGTNSCGWVAMDFQNTILRMHGKTAIGSHLFDAGNSAADRRAFRTTRRRIKRRKWRLKLLEEIFDPYMTEVDPYFFARLKESGLSPLDKRKNVSSIVFPTALEDKKFYCNYPTIYHLRYDLMSEDKKFDLREIYLAIHHIVKYRGNFLYNTPVKDFEASKIDVKDSLEKLNELYERLDSEFTVELDSSNALEIEKIIRDKKVFKINKVKSIHQLLSLKTENKERTKLIKDVSKQIINAILGYKTKFETILLKNISKDEADDWEFKLTDVDADNKFENLIGDLNENEQEILLEIRNLANAITLSNIVEEGKTLSESMIDKYNKHSDDLELLKQVISDHPDRDKAKKLALAYDLYVNNRHGKLLQAKDVLGSKKTLSKEDFYKEVKKNLDDSKASQEILDTIALDSFMPKQRTNENGVIPYQLHQLELDRIIKNQGKYYPFLKEVNPVSSHLKEAPYKLDELIRFRVPYYVGPLISPNESTKNKQTKKNQNFAWMIRKEQGQITPWNFDQKVDRMASANKFIKRMTTKDTYLLGEDVLPANSLLYQKFTVLNELNNIKINGKRISVPLKEELYNNLFKKNSTVTTNKLKSYLKENYNLINVEIKGLADEKKFNSGLTTYNKLRNLKIFDQQLDDLNYDKDFERIIEWSTIFEDKAIYKDKLKTIKWLSDRQIDKLSKIRMQGWGQLSKKLLSQLTDNNGQTIIEQLWDSQNNFMQIVNQSDFKDAIAVANQNLLVNTSVEDILNEAYTSPANKKAIRQVVKVVDDIVKAASGKVPKQIAIEFTRDADDKAKISQTRANKLRKVYKELSNELASETIRNELERVAKDQKLLKDKYYLYFMQLGRDAYTGEPINIDDLGQYDIDHILPQSFIKDDSLENRVLVKKAVNNGKSDNVPVKLYGNRMAADLGMTIRHMWEKWKDQGLITKTKYNNLIIDPDKINKYESSGFIHRQLVETSQIIKLVSTILQSKYPDTEIIVVKARYNHYLRKHLNLYKSREVNDYHHAIDAYLSAICGNLLYQVYPYLRPFFVYGQYKKFSSDPKKEKIIYDKTRKYNFISQIFENKSNDIISLETKKKVFDKKDIIEKLKHAYNYKYMLVSRETETHDQEMFKMTVYPRLSRDTKKSRNLISKKKDMPTEIYGGYTNNSDAYMVIARINKKKGTEYRVFGVPMRELVNLRKAEKNGRYNAYLKQVLEPEIMYSKNGKKNKTISSFEIVKAKVPYKQVILDGDKKFMLASSTYVQNAKQLTLSQNSMQAITDNCENDTEEEKALEEKALIEAYDEILTNIDKYLPLFDINKFREKLHAGREKFINLSLDVKKDTILQVLNGLHDNAVMPKIKSLGLSTPLGFMQFSSGVPLSENAKLIYQSPTGLFEKRVKISDL

SEQ ID NO: 284 - protein, 1386 aa, Lactobacillus hominis
  Lactobacillus hominis CRBIP 24.179
MTKITEDYIVGLDIGTNSCGWVAMDSKNTILRMHGKTAIGSHLFDAGNSAADRRAFRTTRRRIKRRKWRLKLLEEIFDSHLAKVDPYFFARLKESGLSPLDTRKNVSSIIYPTSLEDKKFYVDNPTIYHLRYKLMTEDRKFDLREVYLAIHHIVKYRGNFLYNTPVKAFEASKIDVKGSLKKLNELYEGLDSEFNVELDSNNALEIENIIRDKKIFKINKVKEINQLLSLKTEDKERTKLMKDVSKQIVNAILGYKTKFETILLKDVSKDEADDWEFKLTDVDADNKFENLIGDLNENEQEILLVIRKLANAITLSNIVEEGKTLSESMKDKYKKHSDDLKLLKQVISDHPDRDKAKKLALAYDLYVNNRHGKILQAKDILEKKKTLSKEDFYKEIKKNLDDSKESQEILDAISLDSFMPKQRTNENGVIPYQLHQLELDKIIENQGKYYPFLKEVNPVSSHLKQAPYKLDELIRFRVPYYVGPLISPNESTKNKQTKKNQNFAWMIRKEQGQITPWNFDQKVDRMASANKFIKRMTTIDTYLLGEDVLPANSLLYQKFTVLNELNNVKINGKRISVPLKQELYNNLFKKNSTVTTNKLKSYLKENYKLIKVEIKGLSDEKKFNSGLTTYNKLKNLKIFDQQIDDPNYNKDFERIIEWSTIFEDKAIYKEKLKTIDWLSDRQIDKLSKIRMQGWGQLSKKLLSQLTDNNGQTIIEQLWDSQNNFMQIVNQADFKDAIAVANQNLLVDTSVEDILNEAYTSPANKKAIRQVVKVVDDIVKATSGKVPKQIAIEFTRDADDNAKISQSRANKLRKVYKEMSNELASETIRNELERVAKDQKLLKDKHYLYFMQLGRDAYTGELIDIDNLEQYDIDHVLPQSFIKDDSLENRVLVKKAVNNGKSDNVPVKLYGNRMATDLGMTIRHMWEKWKEQGLITKTKYNNLIIDPDKINKYESSGFIHRQLVETSQIIKLVSTILQSKYPDTEIIVVKARYNHYLRKRLNLYKSREVNDYHHAIDAYLSAICGNLLYQVYPYLRPFFVYGQYKKFSSEPEKEKIIYDKTRRYNFISQIFENKDNDIISRETKKKVFDKKDIIEKLKRAYNYKYMLVSRETETHDQEMFKMTVYPRLSRDTKKSRNLIPKKKDMPTEIYGGYTNNSDAYMIIARINKKKGPEYRVFGVPMRELVNLRKAEKNGHYKAYLKQVLEPEIMYSKNGKKNKTISSFEIVKAKVPYKQVILDGDKKFMLASSTYVQNAKQLTLSQYSMQAITDNCENDTEEEKALVEAYDEILTNIDKYLPLFDINKFREKLHAGREKFVDLPLAEKKETILQVLNGLHDNAVMPKIKSLGLSTPLGFMQFHTGVSLSENAKLIYQSPTGLFEKRLKISDL

SEQ ID NO: 285 - protein, 1369 aa, Lactobacillus iners
  Lactobacillus iners LactinV 11V1-d
MNNNYYLGLDLGTNSVGWAVTDDHYNIIKFHGKHMWGMRLFEEAETAKDRRLHRQARRRRQRLVERINLLEELFDKEISKVDQGFFARKKESDLHFEDKTTKSEYALFNDKSYTDRDYYKQYPTIFHLIMDLIENDKKRDIRLVYLACHYLIKHRGHFIFDGKNFTVDNSFENLLDKLITYLKDNDDITLSFPKDQLINIFKNSNLNSTEKSDQLKPFFGRTNLEKGIIKLLSGGKQDLSNMFRDETLKNSNYKNLKFSDNRFDDERDGYAADLGDRIDLLILLKQIYDASILESMMSQARVSIDGHKYISSAKVCAYEKHKSDLKRLKSLIKKYLPSEYNNIFRKITEKDNYVAYSKSNITNNKREKALKYVKYVDFTKYLTKKLKTIKTQDAEDDQEIFEIKGELEKQSFLPKQRTLDNSIIPYQLHLMELKKILDNQSKYYDFLLAKDDQEGITVKDKIISLLTFRLPYYIGPVNPAVHGKFAWVKRLANGKVTPWNYKEKIDIDASHEEFIKTKLSKCSFLIGCDVLPKNSLLYQKYMVLSELNTIKFNGVNISEKLKDDIYQNLFKNIQKVTKKRLQNYIKEHENIIGDVIVTGIDNAFKQGLVSYLKFKKIIGDKVDDDRYQKVLEKIIRDITLYDECAGKKIKKEYKDSDLFTEDELNKIVKLTFNDWGRLSAELLDQLEGEDTVSGETGKIIEFMQKHNYNLMQLMSKKFTFKSKIDEINKSYYQHDKFNYKSMIDSLYVSPATKRILWQSLKVVHEISKIMKHDPEKIFIEMARSKEDHPKRKLSRKADLKQVYKDSKKQIISIIGKDKYQDLSNELDNKDDRDLRWDNLYLYYTQLGRSMYSLKPIDISELMNKNLYDQDHIFPKSKKYDDSIENRVLVEKELNVKKSDIYPISDANIIPQKIKGQVESFWKMLYDHKLIGDKKYARLIRSKAFTDDELAGFIARQLVETRQATKETADLLKRLCPKSRIVYAKAQNASIFRQKFDIPKSRTINDLHHAQDAYLNIVVGNIFDTKFTQDPRNFIKNTKDSRNYNLEKIYDYNVERNNYVAWIAPDGETNGTIANVKCNLSTKDFRVTRPSFYKKGALFNQNLSRKGSNLAPIKEHSPKSNPLKYGGYSGKNNSFFVVVAGKDNKGKDIVKLIPVNTLIYNKMLHCDYKAKQELLTSYVANNFAINNFRIVKDDIKMYSLVKIDGAYYYLVGGTDERIEVKNAMQLLLSKDSIKAVKILEKESKDQFANIKNYKDIDIKLGRTFNEVVSKYTNSVFGKSMLISDKYRKDIFKSVEKSILEFNHLDTIGKADNLLKFVTLMRPSGSAHSLKMVGLIERIRKSNVISNFNEFKLINQSVTGLFENEEDLLKL

SEQ ID NO: 286 - protein, 1391 aa, Lactobacillus jensenii
  Lactobacillus jensenii 269-3
MKEIKDYIIGLDIGTNSCGYVVTDKQNNILKLKGKTAIGARLFKEGEAAADRRAFRTTRRRLARRRWRLSLLEEIFDEEMNKVDPSFFRRLKESDYSPKDRRKQFNSIVFESSEADKAFYEKYPTIYHLRNALMHDNQKHDLREIFLAVHHIVKYRGNFLREDSVKAFKAAKFTLQGEDGIGPVDKLNDLLKEIYIEAAPELATDNLSKIEDIIKDKKLYKQDKLKQIANLLPKAVDSKDKAKLNKDIAKQVANALMGYMFRLDTLFSFTDVDVKDYKLKFSDANIDESLDALTSLLTDAQIEFVLELQSIYNTIVLNEIVPDGMSLSESMVKKYDDHKKDLKLYKEYIDSLSDQKKAKQLEAAYALYVNYRKADLLAAKKLFEKKKIGDKKFVDVISNFEVFGKFVSDNLDDSELANKIKARLDLGEFLPKQRTNQNGVIPYQLHQVELTQILEKQGKYYPFLITPNPVESHRNNAPYEISELVSFRVPYYVGPLIDNQSIKDKQNKNKFAWMVRQKQGQITPWNFEEMVDTTESANQFIKRMTRKDTYLLAEDVLPKSSLIYQKFMILDELNRIKIDGKKLTSKLKHDIFEKLFKKQKSINLDNLKNYLLAEGNIPGLIEGLSDGINFNNSFSTYIDYRNIFGDEIDNPNKQADFEKMIEWSTVFEDRKIFKRKLKEITWLTPEQIKQVSSKRYSGWGRLSKKLLTQITDENGVNILQRLWNEPETLTEVLANPVIKRKISEANSLFVQINKVENILDDAYTSPQNKKAIRQVIRVVDDIIAAAHGKKPSQIAIEFARSSQNKAKVPDTRKKQLDKIYNKISSEILDSSIKNELKNLKSNKYLSKDKLFLYFKQMGRDAYTGDKLSLDQLQNYDIDHIFPRSFIKDDSLDNRVLTQKPINAKKSDYGIPALEFGNKYVPDLGITVKEMWKLWQENGLISKSKLINLCTNPKKIGSKRASGFINRQLVETSQVIKLVAIILQAEFPDTEIIEVKALQNTTLRESFHLYKNRSVNDYHHAIDAYLTTIVGNYLYQVYPKLRPYFVYGQFKKFNQEKNIDILKRLKNFNFLRQLIFNTDDNIYISGTKEIVFNKKDIIHKLETAYGYKYMNISRECYQETSSLFNQTLYAHNSSVKNSLIPKKKGLPTEIYGGYSGNKDSFFVLVKIVKKRTNLYRIVGIPTRELAKLNSSNNYNQALNKIVESKLCLKETESFKILIKRLLYGTLIVDNGQKFRIGSFKEKHNVQQLVLQLKSMKYIKFYIDGGQNYFTDVERKKLEKQDRDKCLLYVFDDIMNVVNKRFTLFDMSKYEKDGDSLREKFNCLDFNDKVSILSDLLKAFHANSDRTSITKLKITNLGRHQAGKNGITLTTNAQIIYQSPTGLFERRIKIKDL

SEQ ID NO: 287 - protein, 1395 aa, Lactobacillus jensenii
  Lactobacillus jensenii 27-2-CHN
MKEIKDYIIGLDIGTNSCGYVVTDKQNNILKLKGKTAIGARLFKEGQAAADRRSFRTTRRRLARRHWRLGLLEEIFDPEMEKIDPNFFRRLKESDYSPKDSRKQFNAIVFKSIKADKRFYKKYPTIYHLRNALMHDNQKHDLREIFMAVHHIVKYRGNFLREDSVNAFKAAKFSLRGEDGIGPVDKLNDLLKEIYSEYSPELATNNLSKIEDIIKDKNLYKQDKLKQVATLLIKEADSKDKAKLNKDIAKQVANSFMGYMFRLDTLFSLTDVDVKDYKLKFSDANIDESLDDLTSLLTDAQIEFVLELQSIYNTIVLNEIVPDGMSLSESMIKKYDDHKEDLKIFKEYIDSLSDQKKAKKLLSAYNLYVNYRKSDLVEAKNLFKNKKVGDKNFADVISNFEVFGKFVSDNLDDSELANKIKARLDLGEFLPKQRTNQNGVIPYQLHQVELTQILEKQGKYYPFLITPNPVESHRNNAPYEISELVSFRVPYYVGPLIDNQSIKDKQNKNKFAWMVRQKQGQITPWNLEEMVDTTESANQFIKRMTRKDTYLLAEDVLPKSSLVYQKFMILDELNRIKIDGKKLTSELKHDIFEKLFKKQKSINLDNLKNYLLVEGNIPGLIEGLSDGINFNNSFSTYIDYRNIFGDEIDNPNKQADFEKMIEWSTVFEDRKIFKRKLKEITWLTSEQIKQVSSKRYSGWGRLSKKLLTQITDENGVNILQRLWNEPETLTEVLANPVIKRKIVEANSSFTKAKDMKDILVEAYTSPQNKKAIRQVMRVVDDIIAAAHGKKPSQIAIEFAREDQDNPQMTKSRKAQLDQIYAKISDEFLDDAVKNELKNMKDNKPLAKDKVFLYFKQMGRDAYSGEKLSLDNLQDYDIDHIYPQSFIKDDSFDNRVLVQRAYNNGKSDNVPVLLFGNKIAAGLGITIRQMWKKWLELGLISKRKFNNLITDPEKISRNMASGFVNRQLVETSQVIKLVANILQAKLPDTEIIEVKASYNSILRKEFNLYKSREVNDYHHAIDAYLTTIVGNYLYQVYPKLRPYFVYGQFKKFGKAENQEDDPVKKIKKFNFIYQLIWGKDDAICISHTNQQVFSKKDIIDKLTTAYNFKYMNISHAVYTRNNNMFKQTLFPIIERTTAKTKSLIPKKLDRPTDIYGGYSNNNDAYLALVKVDKKRGSEYRVVGIPMRAAAMLKASKNYDEDLRKVIEPMVMFDKNGKAKRGIEGFRVLVGKMPFKQAVLDGNKKFMLTGTVDTPNLKQLVLSQQNMKYILDYIEDVDCRKHKFGDKVQNPDKCLLEVFDEIIEIVDKYFELFDSRDFREKLRNSRNKFIKLEASKKADTILAILKGLQAKSTRATIKELNISDFGRIITSSISPEAQLIYQSPTGLFERRVKVKDL

SEQ ID NO: 288 - protein, 1375 aa, Lactobacillus johnsonii
MTKIKDDYIVGLDIGTDSCGWVAMNSNNDILKLQGKTAIGSRLFEGGKSAAERRLFRTTHRRIKRRRWRLKLLEEFFDPYMAEVDPYFFARLKESGLSPLDKRKTVSSIVFPTSAEDKKFYDDYPTIYHLRYKLMTEDEKFDLREVYLAIHHIIKYRGNFLYNTSVKDFKASKIDVKSSIEKLNELYENLGLDLNVEFNISNTAEIEKVLKDKQIFKRDKVKKIAELFAIKTDNKEQSKRIKDISKQVANAVLGYKTRFDTIALKEISKDELSDWNFKLSDIDADSKFEALMGNLDENEQAILLTIKELFNEVTLNGIVEDGNTLSESMINKYNDHRDDLKLLKEVIENHIDRKKAKELALAYDLYVNNRHGQLLQAKKKLGKIKPRSKEDFYKVVNKNLDDSRASKEIKKKIELDSFMPKQRTNANGVIPYQLQQLELDKIIENQSKYYPFLKEINPVSSHLKEAPYKLDELIRFRVPYYVGPLISPNESTKDIQTKKNQNFAWMIRKEEGRITPWNFDQKVDRIESANKFIKRMTTKDTYLFGEDVLPANSLLYQKFTVLNELNNIRINGKRISVDLKQEIYENLFKKHTTVTVKKLENYLKENHNLVKVEIKGLADEKKFNSGLTTYNRFKNLNIFDNQIDDLKYRNDFEKIIEWSTIFEDKSIYKEKLRSIDWLNEKQINALSNIRLQGWGRLSKKLLAQLHDHNGQTIIEQLWDSQNNFMQIVTQADFKDAIAKANQNLLVATSVEDILNNAYTSPANKKAIRQVIKVVDDIVKAASGKVPKQIAIEFTRDADENPKRSQTRGSKLQKVYKDLSTELASKTIAEELNEAIKDKKLVQDKYYLYFMQLGRDAYTGEPINIDEIQKYDIDHILPQSFIKDDALDNRVLVSRAVNNGKSDNVPVKLFGNEMAANLGMTIRKMWEEWKNIGLISKTKYNNLLTDPDHINKYKSAGFIRRQLVETSQIIKLVSTILQSRYPNTEIITVKAKYNHYLREKFDLYKSREVNDYHHAIDAYLSAICGNLLYQNYPNLRPFFVYGQYKKFSSDPDKEKAIFNKTRKFSFISQLLKNKSENSKEIAKKLKRAYQFKYMLVSRETETRDQEMFKMTVYPRFSHDTVKAPRNLIPKKMGMSPDIYGGYTNNSDAYMVIVRIDKKKGTEYKILGIPTRELVNLKKAEKEDHYKSYLKEILTPRILYNKNGKRDKKITSFEIVKSKIPYKQVIQDGDKKFMLGSSTYVYNAKQLTLSTESMKAITNNFDKDSDENDALIKAYDEILDKVDKYLPLFDINKFREKLHSGREKFIKLSLEDKKDTILKVLEGLHDNAVMTKIPTIGLSTPLGFMQFPNGVILSENAKLIYQSPTGLFKKSVKISDL

SEQ ID NO: 289 - protein, 1382 aa, Lactobacillus mucosae
  Lactobacillus mucosae LM1
MDIGTNSIGWTAIDDHFSLLRVKGKNAIGVRTFKEGETAADRRGFRTARRRLSRRRWRLQFLDEFFAPYLAEVDPNFLARLKQSDISAKDPAKNQEYMGKLLFPDQEAASDGNGYPTLIQMRKAMPAEKAADFPVFNIYQLRYALMNEKRKFDLREIYLAVHHIVKYRGNFLNNTSVDKFKADQIDFNKSFETLNDLFRQVQPIAPFQIDLTKVDELGKLLLDTKQKKLDRQKAVAKLLPLIEDGTDKEIVKAHQQTAREISKLILGYKAKVGLILQNNLDQTLDMSTENSDDQLMQIAEELDDYQMELINQLSLLYSQIMLNEIVPNGETVSASMLNRYYKHRCQLKELKDYGAAQDKKTREQLDHLYAEYIGQIPKDSKFDFTKDLKKLMDKSDLGQKIKDEIEAGDYLPKQRTSANGVIPHQMHQQELDQIIENQKEYYPWLAEPNPVEKNIKNAKYKLDQLVSFRVPYYVGPMITLADQQKTSKASFAWAVRKKAGKITPWNFYDMIDREKSANNFIKRMTNKDTYLLSEDVLPASSLLYQKFTVLNELNNIRVNGRKLQPALKQAIYTDLFQKRKTVNLKTLTNFLAIHEPTLTKPKIEGLSNGRSFNSSLGTYIDMSKILGDSLDDLNYRDDIEKIIEWSTVFEDSEIYGVKLQEIQWLTNEQREKLVRKRYQGWGRLSKKLLTGITDENGQRIIDLMWDTSKNFMQIVHQPVFEEQIAELNQQLLQDADKAPLEVVDDILADAYTSPQNKKAIRQVVKVVADVVKAVGNAPASISIEFARNEDRNKELKNSRRHSIEKLYHETAEKLVKQTNLLEELGNVKDLNDRYYLYFTQAGRDMYDGTPINIDEISTHYEIDHILPQSFLKDNSLDNRVLVKKSENAAKSDRVPAKLYGAKMRAFWKQLKESQLISNRKYLNLTTDPEQVDKYQMQGFVHRQLVETRQIIKLAANIFGSLYPDSAVIETRAELTKQLREKFSLYKVRDVNDYHHAVDAYLTAFAGHYLYQRYPKLRPMFVYGDYAKIYADDLKRLRSVNLFHDLEKDQYNSGTAVNPETKEKIVDVDWLSDYVSKIQHFKYMLISKAVYTQHGQLYGATILPVAQVDKISAPIGIKDDKPVDIYGAYTNEVAAYMAIVRVNGKKPKYKVVSVPVRMLQRLKMAEQKGHDQYMQTLHDVLLRNFTSLKKNRKTGLKEAVVKDFDVLVPCVRYNQLVIDGDTKFTLGSATYQHNAKQLVLCNHSLETLANNFEYVRKHPDEADERMIMLYDDILDQVNHYFTLYDKNKFREKLNAGRDKYLKLPTFSQFENNKKTAIGKSEAIINILRGLHANAAITNLKCLGVSTPFGQLQSPSGIELSENAKLVYQSPTGLFSREVLLKDL

SEQ ID NO: 290 - protein, 1362 aa, Lactobacillus paracasei
  Lactobacillus paracasei subsp. paracasei 8700:2
MTKLGKPYGIGVDIGSNSIGFAAVDENSHLIRLKGKTVIGARLFEEGKAAAKRRAGRTTRRRLSRNRWRLSFLRDFFESHITPTDPNFFMRQKYSEISPKDKARYKYEKRLFNDRTDAEFYQQYSTMYHLRNRLMTDPSRADVREIYFAIHHILKSRGHFLTPGDAKDFNTNDVALDEIFPALQDAYAQVYPDLGITFDEDKANEFKTILLNEIATSIDTQRALVKLLLAEEDDKDILKQQKQVLTEFAKAVVGLKTKLNLALGTEVDSSEATAWNFSLGQLDDKWAGIESAMTDEGTEILDQIRDLYRARLLNGIVPTGKTLSQAKVDDYTQHHEDLQLFKAYLKQLEDDGTAKAIRQLYDRYIDGDDAAPFLRENFVKALTKDVTAHPNTKSPELLERLAQPDFMLKQRNKANGAIPVQMQQRELDQIIKNQAVYYDWLAAPNPVEKHRKSMPYQLDELLNFRIPYYVGPLVTAKEQKAAQGGVFAWMVRKDPEGNITPYNFDEKVDREASANTFIQRMKTTDTYLIGEDVLPKQSLLYQRYEVLNELNNVRVNNEKLSIEQKQQVIRELFERHNSVTIKQFAENLRAHGDYAHIPEIRGLADEKRFLSSLSTYRQLKSLLPEAIDDPAKQADIENIIAWSTVFEDAAIFKTKLKEISWLGSEAITKLSNIRYRGWGQFSRKFLNGLTLGNGHTIIQELLLSTNNLMQILTDETLQKKMTELNADKLKTANINDAIDNAYTSPSNKKALRQVLRVVDDIKRAADGQDPSWLYVETADGGGTPGKRTRARQHQLQEIYANAAHELIDTAVRGELEDKISDKADFNDRLVLYFMQGGRDIYTGAPLNIDQLSSYDIDHILPQSLIKDNSLDNRVLVHAIINREKNATFASTIYAQKMNATWRQWHEAGLISGRKLRNLQMRPDQIDKYASGFVARQLVETRQIIKLTEQIVAAQYPDTKIIAVKAGLSHQLREELEFPKNRDVNHYHHAFDAFLAARIGTYLLKRFPNLQAFFTYGKFTKADVKKLRGFNFIRDITHAEDKIVAKDTGEVVWDKQRDVDELDRIYNFKRMLITHEVRFETADLFKQTVYGARDSKEAGGSKQLIPKKKGYPVDIYGGYFRENTAYLAVVKVTKKTETIFKVVKIATSQVAALNKARSRSTAEELSVLTELLKPKFSKVGKNGKITDTPFEVVLPRVPREQLFYNAKYGFFMVNSDTMFHNFQEIWVSRSDQKILQQIRKAKIDYPNVDQDLDNLFHNLADQIVKYFDLYSIAGFKEKISQSQNTFNDLAVDDTDQSVGKITVINELLKGAQANGMTGSLKVLKISTPFGFTQDKSGVLTKDSSIIYQSPTGLFERSVRLTDL

SEQ ID NO: 291 - protein, 1382 aa, Lactobacillus pentosus
  Lactobacillus pentosus IG1
MKKIVNYNLGLDIGTSSIGYAAIDDQGRPVRHQNKTVMGVRLFKEGKTAESTRIFRGTRRRLSHRHWRLGYLDRIFDNEIAKVDENFLPRLKASKRARSDEKRSFRGSLLFPETGDDAYYQKYPTIYHLRYALITQKKQFDIRLIYLALHHMIKYRGNFLDTTPVSAFNIHDIDLTDQFASLNDCYQLLDMDFEFQFDLNNIEQVQKLLLDETLSKTKRQAAVSKVLVMSTGNKAFDDQQNGIASEFIKALLGGPFDLSKILNLSVADVKSWKLHMTDKDVDDTLNSLVEELDENHKQIVNLLQMIYSQVMMLGLLNGQQSISASMIERYDDHAKHWAALKKLLPALGEQEQSTIIHAYTAYTGHSRTKQLSRAEFYTKVNSILKKHENIAEATGLIELIDRNEFMPKQRDAVNGVIPHQLHQRELQLIIQNQQKYYPFLAAKAYPDADETMIEQLLSFRVPYYAGPLVDRDFINESSDQEQAMQNTKFSWLKRREAGEITPWNFEQKVDVQETANRFIKRLTTKDTYLMTEDVLPKESLIYQRFEVLNELNAIRINDRRLTAENKQLAFQQLFMAGNTKNVSIKKFRNFVFDSLKFPEKVKITGFAGQHNFLAKLSTYHDFKKIFGERVDHTDLQPDFERIVEWCTIFEDRHIYREKLKEIQWLSQSEIDQLVLIRNHGWGRLSKRLLTGIRDSDGRTVMDQLWFGTDNFMRIISQSDFAAAIANENRTQLNQHGLEDVLDSAFMSPQNKKAIRQVLKVVDDIEQTLGCPPKKVMIEFTRSPDKKKQRTVTRLEKVQQAYKAVADQLAGQSIVSELDQYANTHSKLSDTYYLYFMQLGRDLYSGKPIDIDSPMLDDDHILPRAFMKDNSLDNRALTEKPINNTKAAKFPSKVFGQQKEVTDFWKLLRRCGLMSNIKEKHLYLDPDNVDKWTRRGFIHRQLVETSQVIKIVANILNDRYQQSQTEVLEVPARLGTELRECFGWYKVREVNDYHHVFDAYLAAFIGNYLYRRYPKLQPYFVYGNFAELNKAQLKNIKSFNFLYNITDNKRVVKDIETGQTLWDDQIRQQIQHIYEYKYMLTSHEAFTQHKELYGQTIYPRREFKPGTLKAIKQDQPQELYGGYKNLTAAYMCIVKIQARKRRAAEYRVVRVATESLSALQQAKRLGVQAYERCLRQELVRNNEILRTNADPNSAPREFEVLLDRVLCHQMIISDGQKYLLGSHAYKINCMQLVLSNNSMKILSTSIVKLKQMTNEPLVQVYREILDVVNKYFTLYDVNSFRENLNQFFDKFRTLPITNEYESSKSGKKLIHRGQLETLTLILRGLHANSDKVQYGDQSTLLGGFQTKDGIKLSKDSVIQYTSPAGLNVRTVKLRDLEQKEAQK

SEQ ID NO: 292 - protein, 1361 aa, Lactobacillus pentosus
  Lactobacillus pentosus KCA1
MNEPYGVGLDIGTNSVGWTVVDMNGRVRKVKGKTALGARLFKEGATAEDRRGFRTTRRRLKRVKWRLRLLREFFDQPISKIDPNFFARRKYSDISPRDPNYNGLAKTLFNDRTDKEFYDDYATIYHLRDKLMTSNRKFDIREIYLAIHHIVKYRGNFLRTGPASQYGSASLHLATSFQKLNDLFAQSEETLNLKLVTDEALLQQIQQILVRTDLSRSEQQRQIWPLMAVLTGASAAEKKRQKNVVVELSKALVGLKAKMNVVTLTEVDAAVVKDWTFTMEESQDKLPEIEEQLSEVGQQIMDEVIQLYASVNLAQLIPAGKRFSQHMVEKYKHHEKNLELLKAYIHSQSDSKRGREIRATYDRYIDGVDSKPVTQEMFYKDLMKYVEADATSNHLAAEIKDEIDSEQFMPKLRTKQNGSIPYQVQQYELDQIISHQKKYYPWLGEENPVAERRGKFPYKLDELVGFRVPYYVGPLITKEDQQATSGAGFAWMVRKADGPITPWNFDQKVDRIASATAFIQRMQTTDTYLIGEDVLPARSLIYQRFMVLNELNNMRVEDRKLAPQQKQRLYNQVFKQHQHVSVKNIQQNLMDAGEYRKTPQITGLADPKGFNSSLSTYHDFKKILLEAIADEHKRADIEKIILWSTTFEDSAIFKQKLEEVAWLTDAQRKQLSGLRYRGWGQLSHKLLTAFKDDKGRSIMDGLWETSDNFMQLRKQPAIETQIKEANQANLTDADIQDTINELYTSPQNKKAIREVMLVLDDIKNAMHGQTPSWIFVEAARGGGVAGRRTQSRSSQIVEAYKGTAKEIVSEKVQHELNEKIKAKADFNTRLVLYFLQNGRDLYTNEAINIDRLSEYDIDHILPQSLVKDDSLDNRVLTSARINREKNDTFASEKFGRKMGAQWRELHRNGLMTQRKLKHLLMRPDEISKHATDFINRQLVETRQVIKLVEELISSEYPAASIVAVKANLTHQFRQTFNFPKLREVNDYHHAFDASLTAFIGMYLLKQYPKLERFFVYGKFAKQPINLTRFNIIRKLAVAEKPIANIETGEILWDKTADIKYFEKLYNYKRLLVTHEVRENYGAMFKQTLFKASYNKSKTLVPKKNHMETSVYGGYSNQETAYLAIVRIPFKSGFKFIVVGIPTRMVAKIKHYQSLGATLNQATHKVIEPKFTKISRKTKQTVISDYEVVLPKVYLDQVVRDQVKGQMYRFSLGSDKEYHNVQELYLPLSIQQAFVGHYDESDDQRSNDLVKVYDAALKQLQRYFPLHLSRNFDQVASQAHQSFEGLKNNVQTSDKQLGKKEVLNSLFVGLHANATRSNLSVLGMSKDFGRIKSNGITLTDQAEIIYQSPTGLFERKVALKDL

SEQ ID NO: 293 - protein, 1358 aa, Lactobacillus pentosus
  Lactobacillus pentosus MP-10
MNEPYGVGLDIGTNSVGWTVVDMNGRVRKVKGKTALGARLFKEGATAEDRRGFRTTRRRLKRVKWRLRLLREFFDQPISKIDPNFFARRKYSDISPRDPNYNGLAKTLFNDRTDQEFYHDYPTIYHLRDKLMTSDRKFDIREIYLAIHHIVKYRGNFLRTGPASQYGSASLHLATSFQKLNDLFAQSEESLNFKLVTDEAQLQQIQQILVRTDLSRSEQQRQIWPLMVVLMGATAAEKKRQKDFAKELANALVGLKAKLNVVTLTNVDTTVVKDWTFTLEESQDKLPEIEEQLSEVGQQIMDEVIQLYASVNLAQLIPAGKRFSQHMVEKYNHHEKNLELLKAYIHSQSDSKRGREIRATYDRYIDGVKSKPVTQEMFYKDLMKYVEADATSNHLAAEIKDEIDSEQFMPKLRTKQNGSIPYQVQQYELDQIISHQKKYYPWLGEENPVAERRGKFPYKLDELVGFRVPYYVGPLITKEDQQATSGAGFAWMVRKADGPITPWNFDQKVDRIASATAFIQRMQTTDTYLIGEDVLPARSLIYQRFMVLNELNNMRVEDQKLAPRQKQRLYNQVFKQHQHVSVKNIQQNLMDAGEYRETPKITGLADPKGFNSSLSTYHDFKKILPEAIADEHKRADIEKIILWSTTFEDSAIFKQKLEEVAWLTDAQRKQLSGLRYRGWGQLSHKLLTAFKDDNGRSVMDGLWETSDNFMQLRKQPAIETQIKEANQANLTDADIQDTINELYTSPQNKKAIREVMLVLDDIKNAMHGQTPSWIFIEAARGGGVAGRRTQSRSKQIVEAYKSTAKEIVSEKVQHELNEKIKAKADFNTRLVLYFLQNGRDLYTNEAINIDRLSEYDIDHILPQSLVKDDSLDNRVLTSARINREKNDTFASEKFGRKMGAQWRELHRNGLMTQRKLKHLLMRPDEISKHATDFINRQLVETRQVIKLVEELISSEYPSASIVAVKANLTHQFRQTFNFPKLREVNDYHHAFDASLTAFIGMYLLKQYPKLERFFVYGKFAKQPINLTRFNVIRKLAVAEEPIANIETGEILWDKTADIKCFEKLYNYKRLLVTHEVRENYGAMFDQTIFKATDSRKRLIQKKKGFATETYGGYTGRTLAYLAIVKVVTNKDTQYQVVGIPTTMVTQIQQLEASGLTSKQAVTKAIGAMINENNKKLQSYEVLLPKVRFEQVVRDEVKGHIHRFALGTDTYYHNIQELYLPLTIQRAFLGKRNDTDAQTEQNLLTVFETTLAQVNRYFPLYEMNKFKQILNSAQEKFAALPTKNKTVKNKLVTGKDGVLNNLFIGLHANASLGDLKILGMKIGFGKLQVPGGLKLTDQAEIIYQSPTGLFERKVALKDL

SEQ ID NO: 294 - protein, 1358 aa, Lactobacillus plantarum
MKEPYGVGLDIGTNSVGWTVVDASGHVRKIKGQTGIGVRLFKEGAAAADRRGFRTTRRRLKRVKWRLRLLREFFDQPISKVDINFFARRKYSDVSPRDPNYNGLEKTLFNDRSDQDFYHDYPTIYHLREALMTQHRKFDVREIYLAIHHIVKYRGNFLRNDAATAYRSGTLDLQQHFETLNHLFSQADLELNLNLTTDVALLDSIKQTLVRTDISRSDRQKLIMPLLAVLTGATTAEKKRQKAVVTEFAKALVGNKTKIDVLTLTDIDATEAKDWAFSLEENQDKLPGIEDRFSEVGQQIIDEVIRLYASVNLAQLIPEGKRFSQSMVEKYKRHGEDLKLLKAYIRSQSDAKRGRAIRATYDQYIDGVKSKQVTQEAFQKALGKFVDADVDLNSWAAQIKQAIDSEQFMPKLRTKQNGAIPYQVQQNELDQIISNQKEYYPWLGEENPVIKRRGKFPYKLDELFGFRVPYYVGPLITKEMQAATANAGFAWMVRKADGPITPWNFDDKVDRVASATAFIQRMQTTDTYLIGEEVLPARSLIYQRFMVLNELNNIRVDDGQLTPRQKQRLYNQVFKKHKRVTAKNIQDNLVAAREFPTAPRITGLADPKVFNSSLSTYHDLKQVLPEAMSDVRKQADIEKIILWSTIFEDSTIFKQKLTEISWLTAAQLKQLGQLRYRGWGQLLRKLLTGLKDDNNRSIMDGLWETNANFMQLRSQPAIENQIKSANQANLTTADLQDTINELYTSPQNKKAIREVMVVLADIKDAMHGQTPNWIFVEAARGGGVAGRRTQSRSKQIVAAYQGTAQAIVRDQVQRELKEKIKNKANFNTRLVLYFLQNGRDLYTGDAINIDRLSEYDIDHILPQSLVKDDSLDNRVLTNARINREKNDTFASEKFGKKMGAKWKEMHRMGLMTKRKLDHLLMRPDEISKYATGFINRQLVETRQVIKLVEELINAEYPSTAIVSVKANLTHQFRQTFDFPKIREVNDYHHAFDAALTAFIGTYLLKRYPKLERFFVYGKFAKQPVNLTRFNVIRKLAKTDTPITDIDTGEVLWDKLTDIKYFETLYDYKRLLVTREVSENYGAMFDQTLLKASDNGKRLIRKKQSFDTAIYGGYTGKTLAYMAIVKVSTKKDVQYQVVGVPTTMVTQIEQLEQQGMTNKQAVTKVIEPLIAANNKKMLTYEVLLPKVRFEQVVRDRIKGQTHRFALGTDTYYHNIQELYLPLTLQRAFLGKQNESEVQLNQNLLTVFDATLAQVNRYFPLYEMNKFKKILNSARDQIELLEAKNQFVKNKLVLGKQGILTNMFIGLHANASYGDLKVLGVKIDFGKLQVPGGIKLTGDAEIIYQSPTGLFERKIALKDL

SEQ ID NO: 295 - protein, 1363 aa, Lactobacillus rhamnosus
MTKLNQPYGIGLDIGSNSIGFAVVDANSHLLRLKGETAIGARLFREGQSAADRRGSRTTRRRLSRTRWRLSFLRDFFAPHITKIDPDFFLRQKYSEISPKDKDRFKYEKRLFNDRTDAEFYEDYPSMYHLRLHLMTHTHKADPREIFLAIHHILKSRGHFLTPGAAKDFNTDKVDLEDIFPALTEAYAQVYPDLELTFDLAKADDFKAKLLDEQATPSDTQKALVNLLLSSDGEKEIVKKRKQVLTEFAKAITGLKTKFNLALGTEVDEADASNWQFSMGQLDDKWSNIETSMTDQGTEIFEQIQELYRARLLNGIVPAGMSLSQAKVADYGQHKEDLELFKTYLKKLNDHELAKTIRGLYDRYINGDDAKPFLREDFVKALTKEVTAHPNEVSEQLLNRMGQANFMLKQRTKANGAIPIQLQQRELDQIIANQSKYYDWLAAPNPVEAHRWKMPYQLDELLNFHIPYYVGPLITPKQQAESGENVFAWMVRKDPSGNITPYNFDEKVDREASANTFIQRMKTTDTYLIGEDVLPKQSLLYQKYEVLNELNNVRINNECLGTDQKQRLIREVFERHSSVTIKQVADNLVAHGDFARRPEIRGLADEKRFLSSLSTYHQLKEILHEAIDDPTKLLDIENIITWSTVFEDHTIFETKLAEIEWLDPKKINELSGIRYRGWGQFSRKLLDGLKLGNGHTVIQELMLSNHNLMQILADETLKETMTELNQDKLKTDDIEDVINDAYTSPSNKKALRQVLRVVEDIKHAANGQDPSWLFIETADGTGTAGKRTQSRQKQIQTVYANAAQELIDSAVRGELEDKIADKASFTDRLVLYFMQGGRDIYTGAPLNIDQLSHYDIDHILPQSLIKDDSLDNRVLVNATINREKNNVFASTLFAGKMKATWRKWHEAGLISGRKLRNLMLRPDEIDKFAKGFVARQLVETRQIIKLTEQIAAAQYPNTKIIAVKAGLSHQLREELDFPKNRDVNHYHHAFDAFLAARIGTYLLKRYPKLAPFFTYGEFAKVDVKKFREFNFIGALTHAKKNIIAKDTGEIVWDKERDIRELDRIYNFKRMLITHEVYFETADLFKQTIYAAKDSKERGGSKQLIPKKQGYPTQVYGGYTQESGSYNALVRVAEADTTAYQVIKISAQNASKIASANLKSREKGKQLLNEIVVKQLAKRRKNWKPSANSFKIVIPRFGMGTLFQNAKYGLFMVNSDTYYRNYQELWLSRENQKLLKKLFSIKYEKTQMNHDALQVYKAIIDQVEKFFKLYDINQFRAKLSDAIERFEKLPINTDGNKIGKTETLRQILIGLQANGTRSNVKNLGIKTDLGLLQVGSGIKLDKDTQIVYQSPSGLFKRRIPLADL

SEQ ID NO: 296 - protein, 1361 aa, Lactobacillus rhamnosus
  Lactobacillus rhamnosus HN001
MTKLNQPYGIGLDIGSNSIGFAVVDANSHLLRLKGETAIGARLFREGQSAAERRESRTTRRRLSRTRWRLSFLRDFFAPHITKIDPDFFLRQKYSEISPKDKDRFKYEKRLFNDRTDAEFYEDYPSMYHLRLHLMTHTHKADPREIFLAIHHILKSRGHFLTPGAAKDFNTDKVDLEDIFPALTEAYAQVYPDLELTFDLAKADDFKAKLLDEQATPSDTQKALVNLLLSSDGEKEIVKKRKQVLTEFAKAITGLKTKFNLALGTEVDEADASNWQFSMGQLDDKWSNIETSMTDQGTEIFEQIQEHYRARLLNGIVPAGMSLSQAKVADYGQHKEDLELFKTYLKKLNDHELAKTIRGLYDRYINGDDAKPFLREDFVKALTKEVTAHPNEVSEQLLNRMGQANFMLKQRTKANGAIPVQLQQRELDQIIANQSKYYDWLAKPNPVEKHRASKPYQLDELLTFRIPYYVGPLITPKEQAESRENVFAWMIRKDPSGNITPYNFDEKVDCPASANMFIQRMKNTDTYLIGEDVLPKRSLLYQKYEVLNELNNVSIDGRRLGADQKQRLIREVFERHSSVTIKQVAENLVAHGDFAKRPEIRGLADEKRFLSSLSTYHQLKKILHEAIDDPTKEHDIENIITWSTVFEDAAIFKTELAKISWLDSDTIKALSNIRYRGWGQFSRKLLDGLKLGNGHTVIQELMLSNHNLMQILTDETLKTTMAELNQDKLKADDIEDVINDAYTSPSNKKALRQVLRVVEDIKHAANGQDPSWLYIETADGPGTAGKRTQSRQKQIQTVYANAAQELIDSAVRGELEDKIADKASFTDRLVLYFMQGGRDIYTGAPLNIDQLSHYDIDHILPQSLIKDDSLDNRVLVNATINREKNNVFASTLFASKMAATWRKWHEAGLISGRKLRNLMLRPDEIDKFAHGFVARQLVETRQIIKLTEQIAAAQYPNTKIIAVKAGLSHQLREELDFPKNRDVNHYHHAFDAFLAARIGTYLLKRYPKLAPFFTYGEFAKVDVKKFREFNFIGALTHAKKNIVAKDTGEIVWDKERDIQELDRIYNFKRMLITHEVYFETADLFKQTIYAAKDSKERGGSKQLIPKKQGYPTQVYGGYTRENTAYLAVVKTVEKKADVYRVVRIATSQVAALKEARAQSTVKERELLKKFLTTKFTKIGKNGKKAITPFDIVIPRVPREQLFHNKRYGFFMVNSDTLMHNYQELWMSRSDQQILSKLVKSAKTVENGQVGRLFENIVEQINKYFPLYDINQFRKKLDQSKDIFSKLPLEGNGTTSGKRETIQNILTGAGTGAKNGDLKNLGIKTPFGFLQVPSGIVLDDDTTLIYQSPTGMLNRIVRLSEL

SEQ ID NO: 297 - protein, 1361 aa, Lactobacillus rhamnosus
  Lactobacillus rhamnosus R0011
MTKLNQPYGIGLDIGSNSIGFAVVDANSHLLRLKGETAIGARLFREGQSAAERRESRTTRRRLSRTRWRLSFLRDFFAPHITKIDPDFFLRQKYSEISPKDKDRFKYEKRLFNDRTDAEFYEDYPSMYHLRLHLMTHTHKADPREIFLAIHHILKSRGHFLTPGAAKDFNTDKVDLEDIFPALTEAYAQVYPDLELTFDLAKADDFKAKLLDEQATPSDTQKALVNLLLSSDGEKEIVKKRKQVLTEFAKAITGLKTKFNLALGTEVDEADASNWQFSMGQLDDKWSNIETSMTDQGTEIFEQIQELYRARLLNGIVPAGMSLSQAKVADYGQHKEDLELFKTYLKKLNDHELAKTIRGLYDRYINGDDAKPFLREDFVKALTKEVTAHPNEVSEQLLNRMGQANFMLKQRTKANGAIPVQLQQRELDQIIANQSKYYDWLAKPNPVEKHRASKPYQLDELLTFRIPYYVGPLITPKEQAESRENVFAWMIRKDPSGNITPYNFDEKVDCPASANMFIQRMKNTDTYLIGEDVLPKRSLLYQKYEVLNELNNVSIDGRRLGADQKQRLIREVFERHSSVTIKQVAENLVAHGDFAKRPEIRGLADEKRFLSSLSTYHQLKKILHEAIDDPTKEHDIENIITWSTVFEDAAIFKTELAKISWLDSDTIKALSNIRYRGWGQFSRKLLDGLKLGNGHTVIQELMLSNHNLMQILTDETLKTTMAELNQDKLKADDIEDVINDAYTSPSNKKALRQVLRVVEDIKHAANGQDPSWLYIETADGPGTAGKRTQSRQKQIQTVYANAAQELIDSAVRGELEDKIADKASFTDRLVLYFMQGGRDIYTGAPLNIDQLSHYDIDHILPQSLIKDDSLDNRVLVNATINREKNNVFASTLFASKMAATWRKWHEAGLISGRKLRNLMLRPDEIDKFAHGFVARQLVETRQIIKLTEQIAAAQYPNTKIIAVKAGLSHQLREELDFPKNRDVNHYHHAFDAFLAARIGTYLLKRYPKLAPFFTYGEFAKVDVKKFREFNFIGALTHAKKNIVAKDTGEIVWDKERDIQELDRIYNFKRMLITHEVYFETADLFKQTIYAAKDSKERGGSKQLIPKKQGYPTQVYGGYTRENTAYLAVVKTVEKKADVYRVVRIATSQVAALKEARAQSTVKERELLKKFLTTKFTKIGKNGKKAITPFDIVIPRVPREQLFHNKRYGFFMVNSDTLMHNYQELWMSRSDQQILSKLVKSAKTVENGQVGRLFENIVEQINKYFPLYDINQFRKKLDQSKDIFSKLPLEGNGTTSGKRETIQNILTGAGTGAKNGDLKNLGIKTPFGFLQVPSGIVLDDDTTLIYQSPTGMLNRIVRLSEL

SEQ ID NO: 298 - protein, 1375 aa, Lactobacillus ruminis
  Lactobacillus ruminis ATCC 25644
MRKNQEPYNIGLDIGTSSIGWSIMNDNFDLMRVKGKKGIGVRLYNEGQSAAERRMHRTARRRYGRRKWRLRLLEDFFDEHMAEVDDTFFARLKDSNISPKDDKKYRKSLLFPKSKGVTYQDDGEFYKKYPTMYHLRYALMTEHRKFDLREIYLAFHHMVKYRGNFLYDTSVDSFEAKNLDIKGKFDEINDLLSSYTDFYVDNSNAALVESILLEKNTTRKDKSKKIAKLLHVEDKEKGKNKKAKDLATQISNAVLGLKCNFHLIFELQQKYSFDLCSEKTEENIAKLSEVLDENQKMLLMILKEVQDQVMLNAFVPSGMSLSEAMMQKYDDYGEQLKIYHELEHSVSDDSAAKLRGAYRDYNDNIIKRIDGDNKKDTFYKRVKNILTKISKEYVDQDVLESCGKLKKLIDENKLFIRQRTAANGVLPHQLHQIEMRKIIDNQKEYYPWLAEPNPNEKRRVYSKYKVEELIAFRIPYYVGPLVDPNNADKNKEARFSWMVRKKDGEITPWNFYDKVDWAESANNFIERMKSKDTYLLGEDVVPKESMLYQKYEVLNELNNLRINDSGLSDSFEDVKLKQAIYNDLFKKQKIVKITDLQNYLVQNHKYLVKPKISGLADENRFLSSLSTYSDLKTIFGDKVDDRTYFNDFEKMVEYSTVFEDGHDYNQKLDEYTWLTKEEKYKIGKKRYRGWGKLSKKLLTGLRDKNNHTIMDNLWETNRNFMQIQTADEFSKQIAEENERHLKGSVSDAINDMYTSPANKKAIRQVLRVVDDIQKAMGYAPSSISLEFAREDGPSVRTVSRANRMKSIYEKYASEVSEEVMKDLDGVIKDKKGLNDRLYLYFEQQGKDMYSGHPLDFDKVISGQEYDIDHILPQAVIKDDSLDNRVLTTKALNNDVKSKGVPCRMFNGMHSFWKNLYDKGFISRRKFNNLTTNPENIDKYKMKGFVNRQLVETRQIIKLVANVLNDKYQNDDVDIIEVRAELTHDVRKHFKFYKNRNVNDYHHAFDAYLTSFIGHYLFKKYPNLRPLFDYNDFMKVSDNVFKQLRGNNFLGEFLNKTGDIISTDGNFVLNKEEMINKLNKAYAFKKILVTKEVGQRTGAMFNETRYPAPNSRKAALKYRRMPKPDSLISVKDYKNTDIYGGYSGKNDAYMVIVDMGKQYMVVGVPVRYTEKLDKLRIKHSELYRDELRKVLSRDKTLLDSKGNVKRFDIVLDRVLYGQLIEDGNELFTLGSSKYKRNFRQLFLDKQCIEILDSSATPQPTDEELIWVYDQILDKVDKYFELYDINRQRETLRKGRAAFCSLPNISMKKDDVTKKKILNEILVALHANESESNCEKIGKKVFGRLQVPGGIKLSKEAKLIYQSPTGLFERVVYLKDL

SEQ ID NO: 299 - protein, 1339 aa, Lactobacillus salivarius
  Lactobacillus salivarius SMXD51
MERYHIGLDIGTSSIGWAVIGDDFKIKKKKGKNLIGTRLFNEGATAAERRGFRTQRRRLNRRKWRLKLLEEIFDPYMAEVDEYFFARLKSSNLSPKDSNKKYLGSLLFPDKSDSNFYDKYPTIYHLRRDLMEKDEKFDLREIYLAIHHIVKYRGNFLEKVPAKNYKNSGASIGFLLEEVNSLYKDIIGDESIAILNSEKFEDVEKIILDEETRNLDKQKSVGKLLVEDKKKKNIVTAFSKAIFGYKFNIEDLLLIENDEKNKLTFNDENIDDIFNELSHSLDDKQMDLLTKTREIYFKFKLNMIVPTGYTLSESMIEKYEMHKAHLKMYKEFINTLNTKDRKILKNAYSDYINTEKAKAANAQENFYKTVKKIIKDNNSDTAKKIIVLIDEGNFMPKQRTGENGVIPHQLHQIELDRIIENQAKYYPWLAEANPVEKNRKFAKYKLDELVTFRVPYYVGPLIDKTESNKNEKETKFAWMVRKAKGTITPWNFENLVDRTESANRFIKRMTSKDTYIIGEDVLPASSLLYEKFKVLNELNNIKVNEKKLDIEQKQDIYLNLFTTAKNVTKKSLATYLNCSADSISGLSDGEKFNSSLSSYIDLKAILGNIVDDCNKNEDLEKIIEYSTVFEDGNIYKEKLSEISWLTDEQIEKLSNIHFKGWGRLSKKLLTQITNENGERIIDALWNTSNNFMQIINDESIQAKLAEINGKYAGKSDLEDILSEAYTSPQNKKAIRQVMKVVEDIEKAMQCEPTSISIEFTRKKQKSRLTNTRYKKISDVYEKIADEVISEYELRKLQSELDSNANNMRDRYYLYFMQLGRDMYTGEKINIDELHQRYDIDHILPQSFIKDDSINNRVLTRKDVNNKEKSDKTAADLYAVEMSDFWRKLRKQGLITEQKYKNLLTKSDSIDKYAKKGFIKRQLVETSQVVKLVANILQDKYSDTKIIEVRAKLNSNLREEYKLIKNRAVNDYHHAIDGYLTTFIGQYLYKTYPKLRSYFVYNDFKKLDSNYLKHMKKFNFLWQLQDDKTIDIYDNVNNKFVLNVPEMKKYIQKIYNYKYMLVSKEVTTKNGAFYDQTKYNAKTVNLIPIKKNKPTNIYGGYKGKVSSYMMLVKIRKKKEVIYKFVGVPRLWTDELDRLKDTTERKILLNEIAKNSLSKTEQDFEVILDKVYYGQLIIDGNQKYTLGSSEYKYNAMQLHLSKHALEVLAKENVKDAEITDKDLVSVYEEILSVVNKYFELYDINKFRQKLNEGLEIFRKLPVYNVYESNKIKQVGKFEVLNRILMGLHANAMITDLKVLGIKTKLGQMQVNGGIKLSPDAKLIYQSPTGIFSRAVRVKDLG

SEQ ID NO: 300 - protein, 1331 aa, Lactobacillus sanfranciscensis
MNKQPYNIGLDIGTSSVGWSATELDNRLLHIKGHNGIGVRLFKEGESAADRRGFRTTRRRLARRKWRLRLLNEIFATEIAKVDPSFFARLKQSNVSPKDPNKTMFENILFDDENLDDQKFHHDYKTIYHLRQAIINHPEQKFDIRLIYLAMHHIIKYRGHFLNQANVQDFKGGKIDLEKSFKALNDIFENQGRDLRLVTDKANQYVKVLSDNAKTRSDRKKELSKLLYVPIDKDTDKNSKKVTGEILKAILGNKAKFDVIFGIEVENPKEWVLTFNSDDFDDKIEGLSSQMTDEDSEILLILKELYFALNLSDILNNSVTDKNAKTLSEAMINRYDDHKNQLAMLKKVIDSSDKKHAKELKEAYSAYIDGENNKKISFEDLKKRIQKNLVDSELSQKINDLLDHDYFLPKQRSKENGAIPHQLQQQELDQIIESQKQYYPFLAELNPNEKRSRQAKYKLDELVAFRVPYYVGPMVEVTDSNQENNGKFAWMIRKEQGEITPWNFDEKVDRTETATKFITRMTTTDTYLIGEPVLPKNSLLYQKFVVLNELNNLKINQEIITPGQKQYLYEHVMKKNKRVTLKKIADALVIKGDYPYAPEVKGTTDQKNLNNGLTTYIDLAKIFGNELDDVDREADFEKIIEWSTIFEDQHIFALKLQELKWLTEKQRNQVVKLRYQGWGKLSKELLAGLVDDNGQRIIDLLWSDNQNFMQIVNQKSFKESIADHNGAHLEEKNLKDVINDLYTSPQNKKAIRQVILVVDDIINAVGYEPANIMMEFAREDSNDHRLTNSRSRQLENVYKDITNSWFDNDSVKDELEDKIKNKDKFTDRLYLYFTQGGKDLYTGEPLNIDDLSSYDIDHILPQSFILDNSLDNRVLTSQRNNRVSKEDQLPGELFGTKMHAFWKRLKAAHLISNKKYYNLTLTPNSISKFNNQGRFINRQLVETRQVIKLAAEILHNRYSEEKGTNIVTIKANLTHHMREKFNFYKNRNVNDYHHAFDAYLTAFVGNWLLQQYPKLKPYFVYGDFAKTEINNLKSFNMLYKFEQAHQLNEKDGKIAKDADALLGYMKNVYHFKKMLVTKKLETNHGALFKQTLYPSPAHDIKKRQLIKPKDNRPTDIYGGYTHEERKYMSLVKVIGKKDNEYRMANVPLLKINKNNDIKEILKSQFSNKKFEIVLPKVLKNQLFSENGALFVIGSKGYKYNANQLVLSDLDMKLLNDLSNNKSIDEVTINQLFKNIVDSTNKYMPLYEIKNLNEVVEKFNNLEFNDKKKTITDFLLATHANPTMSNLKNIGLPSYFGRFTSGNAGIKLSENANVIYQSPTGLFSRKVKISDF

SEQ ID NO: 301 - protein, 1419 aa, Lactobacillus sp.
  Lactobacillus sp. 66c
MAKPQNYTIGLDIGTNSVGWTVTDDQNNILRIKSKKAIGARLFEEGKVAAERRSFRTTRRRLSRRKWRIKLLEELFDEEISKVDPNFFARSHESWISPKDKRERYSAIVFPTPEEDKKFHNEYPTIYHLRDRLMKDDQKHDIREIYVAIHHIMKYRGNFLHDESIETYRSGMSSLGGGDERTILNTKILDDLNDAFADNLATQGISVNSASADQINEIVTSGHLNVDSQKAIAKLLLPTTLSSDDKKQDKKIKKLATDAAKNVASAWLGYKANFAAILNIQEVDKDKKKIYSFALQGADEEDKVETLESVLSQDQIEIVDRIIRIRHAIVLGEIIPVGMTLSEAMIEKYDQHAKDLKNLKTVIRNLKDRKNAVKLQAIYDLYVNNRHADTAKAMKLAGVKKRTELLEPEEFNKSIEKLLDDSPVSAEIKKRIAEKDFLPLQRSNSNGVIPNQLHQIELDEIIKKQSKYYPFLGETNEHASADVARKAPTKLDQLLTFRVPYYVGPLITKEEQEEQDGHSFAWMIRKNPKDHEKITPWNFDEKVDRMASATQFIKRMTTKDTYLLGEDVLPSSSLKYQLFTVLNELNNLRINHKKLTREEKEQVIEDLFKKYKTVKADKFKNYWQKGHAGLDVKIQGMADPEKFNSTMSTYIDLQKIFGDQLDDAQRQNDFEKIIEYSTIFEDRKILGEKLRADFVWLSEDQIKRLCRLRLQGWGRLSLKLLTRLTDADGQNVLERLLNSNDNFMQIVKDPVIKAKIEQKNQKLLRADWSENATESILDEAYTSPQNKKAIRQVMRVVHDIVKACDGNLPAKFAIEFARSQDDDPKRTVARADRLQKIYAQISDEVVSQGVKDQLSGMKSLKDRYYLYFMQGGRDAYTGKPLNIDRLSDYDIDHIMPQSFIKDDSLDNRVLVTRAVNNQKSDNVPVLLYGNHLVADLGITIREMWDRWQKSGMISKRKLANLLTDPATLSEYRAEGFINRQLVETSQVIKLTATILQSEFPDSKIIEVPAKYNSILRKQFDLYKSREVNDYHHAIDAYLSTIVGNYLYQVYPNLRRLFVYGEFKKFSHGEEESSHQAVRRVKSMNFLDDLLRGKHGDDIYCRVTGEVIFSRKDIISKLKQAYSFKQMLVTQEVFTKKSALFDQTVYPSPARDSKTRSGLIPRKQGMDTEIYGGYSGNKDAYFVLAQVVKSKGHTLQVVGVPIRALRALANCSNYSEQLLKIVKAQVLFNKKTGKAKKGISDVRILLDKIPYRQPVLDGSAFYMLGSSTYKYNLKQISLSQQSMKYILDYIDDPNFNKHEMTKIDQQNEKECLLSVYDEILDKMDKYLSLYDINGFRKKLHVGRDKFIKLEVEKQAEAIKNVLRGFHANSDMTKLSDLGLSTSLGFMQASDGIKLSDNAVFIYQSPTGLFERRVKVSDLLK

SEQ ID NO: 302 - protein, 1289 aa, Lactobacillus versmoldensis
  Lactobacillus versmoldensis KCTC 3814
MRRRYRRRRNRLNWLDELFADELAKIDPSFLLRMKNSWVSKKESTRKRDPYNLFIDEKYNDVDYFNQYPTIFHLRKELITEDKKVDIRLIYLAIHNIIKYRGNFTLENQNFDISQLSSNFSQQISDFFALFSDFGVIMPEDFDPDKISDILLNPNLSPSGKVSEAIATISPKTNVKAKIKIILLLLVGNNGDLKKLFDLETTEKIAVKLSSRHIDSELPIILSELNEQQENIITIANSIFGSIILKDFLGDETSISAAKVISFEDHKQDLQKLKTMWRETSNKEAVKAGKKAYEDYIGHEDSETFYKKIKKFLEKAQPVDLANKALAEIELENYLPKQRNRNNTVIPYQLNENELIAILDHQEKYYPFLKENRDKILSLLTFRIPYYVGPLQDSNNNRFSWMTRKASGAIRPWNFSEKVNVEQSSNDFIKRMRSTDTYLIGEPVLPKKSLIYQCYEVLSELNNTRVKDGSSNPKRLDVTIKQRIYNEIFKNQKSVSVKVLQNWLIKESYFKSPEISGLADKKKYLSSLSTYIDFKKIFGQRFVDDPVNSPQLEELAEWLTLFEDKKILLIKLQNSKYSYDQATINKLSTMRYQGTGKLSKKLLVDLKTTKKSIGKSGAESLSILDLMWSTKDNFMQIIHDADYTFEQQIKEFNYDTEDELTPLEKVANLHGSPALKRGLNQSIKVVADIVKFMGHDPEKIFIEFTRSDDFSKLTISRYRRIKKQYLEIAKAIKKIPAEFKDIKEYQTQLEENKGKLASERLMLYFLQCGHSLYSNKPIDLNMINSSKYHVDHILPQSYIKDDSLENKALVLASENENKIDNMLISHDIIATNLPRWQALKDQNLMGSKKFADLTRTTVTENQKKGFIQRQLVQTSQIVKNITLILNDLYKNTSCIETRATLSSEFRKAFSNFDETTYHYQFPEFVKNRDVNDFHHAQDAFLACVIGEYQLKKYPKDNLRLVYDQYSKFLDSLKKDTRKKNGRMPRYTQNGFIIGSMFNGKTYVDDNGEIIWDQKIKESIRKTFNYHQFNVVRQTIEQHGKLFNDTIQPHSDRYKLIPLKTNRDPAIYGGYNNDNNAYSVVLDVDGKKKINGIPIRIANQLKSDELDLSSWLENNIKHKKPMTILIDKVPKYQRIINEETGDLLITSANEVINNVQLFLPSMYTALISLLDSTKTEMYSKLLSNYEANILIDIYDYLLTKLKNNYPLYRKEWAKLAEHRDDFIESDLVTQASTLQQLIKFMHADPSNVNLKFGNFKGNRFGRKNGNIKLSKTDFIYESPTGLFKSIKHID

SEQ ID NO: 303 - protein, 1372 aa, Legionella pneumophila
  Legionella pneumophila 130b
MESSQILSPIGIDLGGKFTGVCLSHLEAFAELPNHANTKYSVILIDHNNFQLSQAQRRATRHRVRNKKRNQFVKRVALQLFQHILSRDLNAKEETALCHYLNNRGYTYVDTDLDEYIKDETTINLLKELLPSESEHNFIDWFLQKMQSSEFRKILVSKVEEKKDDKELKNAVKNIKNFITGFEKNSVEGHRHRKVYFENIKSDITKDNQLDSIKKKIPSVCLSNLLGHLSNLQWKNLHRYLAKNPKQFDEQTFGNEFLRMLKNFRHLKGSQESLAVRNLIQQLEQSQDYISILEKTPPEITIPPYEARTNTGMEKDQSLLLNPEKLNNLYPNWRNLIPGIIDAHPFLEKDLEHTKLRDRKRIISPSKQDEKRDSYILQRYLDLNKKIDKFKIKKQLSFLGQGKQLPANLIETQKEMETHFNSSLVSVLIQIASAYNKEREDAAQGIWFDNAFSLCELSNINPPRKQKILPLLVGAILSEDFINNKDKWAKFKNFWNTHKIGRTSLKSKCKEIEEARKNSGNAFKIDYEEALNHPEHSNNKALIKIIQTIPDIIQAIQSHLGHNDSQALIYHNPFSLSQLYTILETKRDGFHKNCVAVTCENYWRSQKTEIDPEISYASRLPADSVRPFDGVLARMMQRLAYEIAMAKWEQIKHIPDNSSLLIPIYLEQNRFEFEESFKKIKGGSSDKTLEQAIEKQNIQWEEKFQRIINASMNICPYKGASIGGQGEIDHIYPRSLSKKHFGVIFNSEANLIYCSSQGNREKKEEHYLLEHLSPLYLKHQFGTDNVSDIKNFISQNVANIKKYISFHLLTPEQQKAARHALFLDYDDEAFKTITKFLMSQQKARVNGTQKFLGKQIMEFLSTLADSKQLQLEFSIKQITAEEVHDHRELLSKQEPKLVKSRQQSFPSHAIDATLTMSIGLKEFPQFSQELDNSWFINHLMPDEVHLNPVRSKEKYNKPNISSTPLFKDSLYAERFIPVWVKGETFAIGFSEKDLFEIKPSNKEKLFTLLKTYSTKNPGESLQELQAKSKAKWLYFPINKTLALEFLHHYFHKEIVTPDDTTVCHFINSLRYYTKKESITVKILKEPMPVLSVKFESSKKNVLGSFKHTIALPATKDWERLFNHPNFLALKANPAPNPKEFNEFIRKYFLSDNNPNSDIPNNGHNIKPQKHKAVRKVFSLPVIPGNAGTMMRIRRKDNKGQPLYQLQTIDDTPSMGIQINEDRLVKQEVLMDAYKTRNLSTIDGINNSEGQAYATFDNWLTLPVSTFKPEIIKLEMKPHSKTRRYIRITQSLADFIKTIDEALMIKPSDSIDDPLNMPNEIVCKNKLFGNELKPRDGKMKIVSTGKIVTYEFESDSTPQWIQTLYVTQLKKQP

SEQ ID NO: 304 - protein, 1372 aa, Legionella pneumophila
MESSQILSPIGIDLGGKFTGVCLSHLEAFAELPNHANTKYSVILIDHNNFQLSQAQRRATRHRVRNKKRNQFVKRVALQLFQHILSRDLNAKEETALCHYLNNRGYTYVDTDLDEYIKDETTINLLKELLPSESEHNFIDWFLQKMQSSEFRKILVSKVEEKKDDKELKNAVKNIKNFITGFEKNSVEGHRHRKVYFENIKSDITKDNQLDSIKKKIPSVCLSNLLGHLSNLQWKNLHRYLAKNPKQFDEQTFGNEFLRMLKNFRHLKGSQESLAVRNLIQQLEQSQDYISILEKTPPEITIPPYEARTNTGMEKDQSLLLNPEKLNNLYPNWRNLIPGIIDAHPFLEKDLEHTKLRDRKRIISPSKQDEKRDSYILQRYLDLNKKIDKFKIKKQLSFLGQGKQLPANLIETQKEMETHFNSSLVSVLIQIASAYNKEREDAAQGIWFDNAFSLCELSNINPPRKQKILPLLVGAILSEDFINNKDKWAKFKIFWNTHKIGRTSLKSKCKEIEEARKNSGNAFKIDYEEALNHPEHSNNKALIKIIQTIPDIIQAIQSHLGHNDSQALIYHNPFSLSQLYTILETKRDGFHKNCVAVTCENYWRSQKTEIDPEISYASRLPADSVRPFDGVLARMMQRLAYEIAMAKWEQIKHIPDNSSLLIPIYLEQNRFEFEESFKKIKGSSSDKTLEQAIEKQNIQWEEKFQRIINASMNICPYKGASIGGQGEIDHIYPRSLSKKHFGVIFNSEVNLIYCSSQGNREKKEEHYLLEHLSPLYLKHQFGTDNVSDIKNFISQNVANIKKYISFHLLTPEQQKAARHALFLDYDDEAFKTITKFLMSQQKARVNGTQKFLGKQIMEFLSTLADSKQLQLEFSIKQITAEEVHDHRELLSKQEPKLVKSRQQSFPSHAIDATLTMSIGLKEFPQFSQELDNSWFINHLMPDEVHLNPVRSKEKYNKPNISSTPLFKDSLYAERFIPVWVKGETFAIGFSEKDLFEIKPSNKEKLFTLLKTYSTKNPGESLQELQAKSKAKWLYFPINKTLALEFLHHYFHKEIVTPDDTTVCHFINSLRYYTKKESITVKILKEPMPVLSVKFESSKKNVLGSFKHTIALPATKDWERLFNHPNFLALKANPAPNPKEFNEFIRKYFLSDNNPNSDIPNNGHNIKPQKHKAVRKVFSLPVIPGNAGTMMRIRRKDNKGQPLYQLQTIDDTPSMGIQINEDRLVKQEVLMDAYKTRNLSTIDGINNSEGQAYATFDNWLTLPVSTFKPEIIKLEMKPHSKTRRYIRITQSLADFIKTIDEALMIKPSDSIDDPLNMPNEIVCKNKLFGNELKPRDGKMKIVSTGKIVTYEFESDSTPQWIQTLYVTQLKKQP

SEQ ID NO: 305 - protein, 1355 aa, Leuconostoc gelidum
  Leuconostoc gelidum KCTC 3527
MTYSIGLDIGTGSVGWAVIGDDYRLKRAKGKNLIGVRLFDSATTAAERRGYRTTRRRLSRRHWRLRLLNDIFASDLAEQDENFLPRLKYSWVNPDDEQNPQLNSDVANGALFGSSETDKAFHKNYPTIYHLRHELMTDTAKHDLREVYLAIHHIVKYRGNFLNTADKINAENSFNVDLFIAALDEYNEFLETPITSIKDAQLFSDKLTDINARNKSVRVENAMSETYDDKSKIFKAILTALVGNTANFQTIFDLSDLEKDEAKNFKFKLDLEDVETKLDVVRAKLSDEQNAFLEAVLIAYDGITLKMILGDYKSISQSMIESYKSHQRDWKYIKNNVRLNEQKIEPDKNSVKFFKLDPKKLIYPSNLAYLQVISSNEDEHRKGLDYFKTAIQDADILQRIENDTFLPRQRTKRNGVLPYQLHLAELEQIIKKQSKYYPFLANIYTQDNKTENKLIGLLKFRVPYYVGPLVEAEKVTGDGKNHWLIKKELQENTPITPFNFDDVVDKDKSGEQFIKRITGTDSYLIGEPTLPENSLLYQKYNVLQELNNVRNERHQRLPIKVKQDIFEHVFKIDKNVNAKKVMAYLKLNGYGDFQIAGLSDTRTGKFNSNLSSYNYFVDLLGREKTEKIREDRLEEIIEIQTVFEDKILVAKRLSNLDFLTPQEKSKLSAKHYTGWGRLSQKLLTTQFIKTALSEAGDIIPQSHSIIDLLYYTDKNLMEILNDKTFNVRNWLTEQNKGTESGNSLYDQIDALAGPKDIKRGITQVFSIIDDIKKAMGSNPETVYLEFARETQTSRLTNSRLNRVQEIYNSPELKTEFAYLAKKLEAETKESIHDDRLYLYYLQEGRDMYTGKEIPFDQISSNYDIDHIIPQAFTKDDSLDNRVLVNRATNARKSNSPTFTNDIIDNRKSWWQSLVKRGLMSKEKFERLTDKRKTFSENQTNHFIARQLVETRQIIKNVADLIKNNYDGTQAVAIRASLTGEMRRYLDWPKNRDMNDYHHAHDALMMATVGKYVDRRGFFDNGSVSDGAGNAYNLYTKDWLVAARVGTRNDSQRVNPYGFIVGSMNSKAVRQQVNKETGEIVWGNENLDYLRHVLSYKKILVTRRLSGSSGRLYAETLFSPNPKAKLIAQKANRSVALYGGFTKAESAYTALVEFNKKGDRSYKLIKVPMAIANRVNDKQITVTAYIASLNLRDFSRVVLEHLPLGTLIRESDGSEFYAASSEYKHNAKELWAPKEILRSSKKLDKATADNLIDIFDFLTNDKTISNFKFYEKDLLHLKNVRDKFVEASDEIKIKVLSDVIYELHNDAGWRDPFKHIQEKPAWTMLQVKGGIKLSEKAAIVYQSPTGLFETITIVGE

SEQ ID NO: 306 - protein, 1337 aa, Listeria innocua
  Listeria innocua ATCC 33091
MKNMKKPYTIGLDIGTNSVGWAVLTDQYDLVKRKMKIAGDSEKKQIKKNFWGVRLFDEGQTAADRRMARTARRRIERRRNRISYLQGIFAEEMSKTDANFFCRLSDSFYVDNEKRNSRHPFFATIEEEVEYHKNYPTIYHLREELVNSSEKADLRLVYLALAHIIKYRGNFLIEGALDTQNTSVDGIYKQFIQTYNQVFASGIEDGSLKKLEDNKDVAKILVEKVTRKEKLERILKLYPGEKSAGMFAQFISLIVGSKGNFQKPFDLIEKSDIECAKDSYEEDLESLLALIGDEYAELFVAAKNAYSAVVLSSIITVAETETNAKLSASMIERFDTHEEDLGELKAFIKLHLPKHYEEIFSNTEKHGYAGYIDGKTKQADFYKYMKMTLENIEGADYFIAKIEKENFLRKQRTFDNGAIPHQLHLEELEAILHQQAKYYPFLKENYDKIKSLVTFRIPYFVGPLANGQSEFAWLTRKADGEIRPWNIEEKVDFGKSAVDFIEKMTNKDTYLPKENVLPKHSLCYQKYLVYNELTKVRYINDQGKTSYFSGQEKEQIFNDLFKQKRKVKKKDLELFLRNMSHVESPTIEGLEDSFNSSYSTYHDLLKVGIKQEILDNPVNTEMLENIVKILTVFEDKRMIKEQLQQFSDVLDGVVLKKLERRHYTGWGRLSAKLLMGIRDKQSHLTILDYLMNDDGLNRNLMQLINDSNLSFKSIIEKEQVTTADKDIQSIVADLAGSPAIKKGILQSLKIVDELVSVMGYPPQTIVVEMARENQTTGKGKNNSRPRYKSLEKAIKEFGSQILKEHPTDNQELRNNRLYLYYLQNGKDMYTGQDLDIHNLSNYDIDHIVPQSFITDNSIDNLVLTSSAGNREKGDDVPPLEIVRKRKVFWEKLYQGNLMSKRKFDYLTKAERGGLTEADKARFIHRQLVETRQITKNVANILHQRFNYEKDDHGNTMKQVRIVTLKSALVSQFRKQFQLYKVRDVNDYHHAHDAYLNGVVANTLLKVYPQLEPEFVYGDYHQFDWFKANKATAKKQFYTNIMLFFAQKDRIIDENGEILWDKKYLDTVKKVMSYRQMNIVKKTEIQKGEFSKATIKPKGNSSKLISRKTNWDPMKYGGLDSPNMAYAVVIEYAKGKNKLVFEKKIIRVTIMERKAFEKDEKAFLEEQGYRQPKVLAKLPKYTLYECEEGRRRMLASANEAQKGNQQVLPNHLVTLLHHVANCEVSDGKSLDYIESNREMFAELLAHVSEFAKRYTLAEANLNKINQLFEQNKEGDIKAIAQSFVDLMAFNAMGAPASFKFFETTIERKRYNNLKELLNSTIIYQSITGLYESRKRLDD

SEQ ID NO: 307 - protein, 1334 aa, Listeria innocua
MKKPYTIGLDIGTNSVGWAVLTDQYDLVKRKMKIAGDSEKKQIKKNFWGVRLFDEGQTAADRRMARTARRRIERRRNRISYLQGIFAEEMSKTDANFFCRLSDSFYVDNEKRNSRHPFFATIEEEVEYHKNYPTIYHLREELVNSSEKADLRLVYLALAHIIKYRGNFLIEGALDTQNTSVDGIYKQFIQTYNQVFASGIEDGSLKKLEDNKDVAKILVEKVTRKEKLERILKLYPGEKSAGMFAQFISLIVGSKGNFQKPFDLIEKSDIECAKDSYEEDLESLLALIGDEYAELFVAAKNAYSAVVLSSIITVAETETNAKLSASMIERFDTHEEDLGELKAFIKLHLPKHYEEIFSNTEKHGYAGYIDGKTKQADFYKYMKMTLENIEGADYFIAKIEKENFLRKQRTFDNGAIPHQLHLEELEAILHQQAKYYPFLKENYDKIKSLVTFRIPYFVGPLANGQSEFAWLTRKADGEIRPWNIEEKVDFGKSAVDFIEKMTNKDTYLPKENVLPKHSLCYQKYLVYNELTKVRYINDQGKTSYFSGQEKEQIFNDLFKQKRKVKKKDLELFLRNMSHVESPTIEGLEDSFNSSYSTYHDLLKVGIKQEILDNPVNTEMLENIVKILTVFEDKRMIKEQLQQFSDVLDGVVLKKLERRHYTGWGRLSAKLLMGIRDKQSHLTILDYLMNDDGLNRNLMQLINDSNLSFKSIIEKEQVTTADKDIQSIVADLAGSPAIKKGILQSLKIVDELVSVMGYPPQTIVVEMARENQTTGKGKNNSRPRYKSLEKAIKEFGSQILKEHPTDNQELRNNRLYLYYLQNGKDMYTGQDLDIHNLSNYDIDHIVPQSFITDNSIDNLVLTSSAGNREKGDDVPPLEIVRKRKVFWEKLYQGNLMSKRKFDYLTKAERGGLTEADKARFIHRQLVETRQITKNVANILHQRFNYEKDDHGNTMKQVRIVTLKSALVSQFRKQFQLYKVRDVNDYHHAHDAYLNGVVANTLLKVYPQLEPEFVYGDYHQFDWFKANKATAKKQFYTNIMLFFAQKDRIIDENGEILWDKKYLDTVKKVMSYRQMNIVKKTEIQKGEFSKATIKPKGNSSKLIPRKTNWDPMKYGGLDSPNMAYAVVIEYAKGKNKLVFEKKIIRVTIMERKAFEKDEKAFLEEQGYRQPKVLAKLPKYTLYECEEGRRRMLASANEAQKGNQQVLPNHLVTLLHHAANCEVSDGKSLDYIESNREMFAELLAHVSEFAKRYTLAEANLNKINQLFEQNKEGDIKAIAQSFVDLMAFNAMGAPASFKFFETTIERKRYNNLKELLNSTIIYQSITGLYESRKRLDD

SEQ ID NO: 308 - protein, 1334 aa, Listeria monocytogenes
MKNPYTIGLDIGTNSVGWAVLTNQYDLVKRKMKVAGNSDKKQIKKNFWGVRLFDDGQTAVDRRMNRTARRRIERRRNRISYLQEIFAVEMANIDANFFCRLNDSFYVDSEKRNSRHPFFATIEEEVAYHKNYRTIYHLREELVNSSEKADLRLVYLALAHIIKYRGNFLIEGALDTKNTSVDGVYEQFIQTYNQVFMSNIEEGTLAKVEENIEVANILAGKFTRREKFERILQLYPGEKSTGMFAQFISLIVGSKGNFQKVFDLIEKTDIECAKDSYEEDLEALLAIIGDEYAELFVAAKNTYNAVVLSSIITVTATETNAKLSASMIERFDAHEKDLGELKAFIKLHLPKQYQEIFNNAAIDGYAGYIDGKTKQVDFYKYLKTILENIEGADYFIAKIEEENFLRKQRTFDNGAIPHQLHLEELEAIIHQQAKYYPFLREDYEKIKSLVTFRIPYFVGPLAKGQSEFAWLTRKADGEIRPWNIEEKVDFGKSAVDFIEKMTNKDTYLPKENVLPKHSLCYQKYMVYNELTKVRYIDDQGKTNYFSGQEKQQIFNDLFKQKRKVKKKDLELFLRNINHIESPTIEGLEDSFNASYATYHDLLKVGMKQEILDNPLNTEMLEDIVKILTVFEDKPMIKEQLQQFSDVLDGGVLKKLERRHYTGWGRLSAKLLVGIREKQSHLTILDYLMNDDGLNRNLMQLINDSNLSFKSIIEKEQVSTTDKDLQSIVADLAGSPAIKKGILQSLKIVDELVSIMGYPPQTIVVEMARENQTTGKGKNNSKPRYKSLEKAIKEFGSKILKEHPTDNQELKNNRLYLYYLQNGKDMYTGQELDIHNLSNYDIDHIVPQSFITDNSIDNLVLTSSAGNREKGGDVPPLEIVRKRKVFWEKLYQGNLMSKRKFDYLTKAERGGLTDADKARFIHRQLVETRQITKNVANILHQRFNNETDNHGNTMEQVRIVTLKSALVSQFRKQFQLYKVREVNDYHHAHDAYLNGVVANTLLKVYPQLEPEFVYGEYHQFDWFKANKATAKKQFYTNIMLFFGQKERIIDENGEILWDKKYLETIKKVLDYRQMNIVKKTEIQKGEFSKATIKPKGNSSKLIPRKENWDPMKYGGLDSPNMAYAVIIEHAKGKKKLIFEKKIIRITIMERKMFEKDEEAFLEEKGYRHPKVLTKLPKYTLYECEKGRRRMLASANEAQKGNQLVLSNHLVSLLYHAKNCEASDGKSLKYIEAHRETFSELLAQVSEFATRYTLADANLSKINNLFEQNKEGDIQAIAQSFVDLMAFNAMGAPASFKFFEATIDRKRYTNLKELLSSTIIYQSITGLYESRKRLDD

SEQ ID NO: 309 - protein, 1334 aa, Listeria monocytogenes
  Listeria monocytogenes FSL J1-194
MKNPYTIGLDIGTNSVGWAVLTDQYDLVKRKMKVAGNSDKKQIKKNFWGVRLFDDGQTAVDRRMNRTARRRIERRRNRISYLQEIFAVEMANIDANFFCRLNDSFYVDSEKRNSRHPFFATIEEEVAYHKNYRTIYHLREELVNSSEKADLRLVYLALAHIIKYRGNFLIEGALDTKNTSVDEVYKQFIQTYNQVFMSNIEEGALAKVEENTEVASILAGKFTRREKFERILRLYPGEKSTGMFAQFISLIVGNKGNFQKVFNLVEKTDIECAKDSYEEDLEALLAIIGDEYAELFVAAKNTYNAVVLSSIITVTATETNAKLSASMIERFDAHEKELGELKAFIKLHLPKQYQEIFNNAEIDGYAGYIDGKTKQVDFYKYLKTTLENVEGADYFITKIEEENFLRKQRTFDNGVIPHQLHLEELEAILHQQAKYYPFLREGYDKIKSLVTFRIPYFVGPLANGQSEFAWLTRKDDGEIRPWNIEEKVDFGKSAVDFIEKMTNKDTYLPKENVLPKHSLCYQKYMVYNELTKIRYIDDQGKTNYFSGREKQQIFNDLFKQKRKVKKKDLELFLRNINHIESPTIEGLEDSFNASYATYHDLLKVGLKQEILDNPLNTEILEDIVKILTVFEDKRMIKEQLEQFSDVLDGVVLKKLERRHYTGWGRLSAKLLVGIRDKQSHLTILDYLMNDDGLNRNLMQLINDSNLSFKSIIEKEQVSTTDKDLQSIVADLAGSPAIKKGILQSLKIVDELVSIMGYPPQTIVVEMARENQTTGKGKNNSKPRYKSLEKAIKDFGSQILKEHPTDNQELKNNRLYLYYLQNGKDIYTGQELDIHNLSNYDIDHIVPQSFITDNSIDNLVLTSSAGNREKGGDVPPLEIVRKRKVFWEKLYQGNLMSKRKFDYLTKAERGGLTEADKARFIHRQLVETRQITKNVANILHQRFNKETDNHGNTMEQVRIVTLKSALVSQFRKQFQLYKVREVNDYHHAHDAYLNGVVANTLLKVYPQLEPEFVYGEYHQFDWFKANKATAKKQFYTNIMLFFAQKERIIDENGEILWDKKYLETIKKVLDYRQINIVKKTEIQKGEFSKATIKPKGNSSKLIPRKENWDPMKYGGLDSPNMAYAVIIEHAKGKKKIVIEKKLIQINIMERKMFEKDEEAFLEEKGYHQPKVLTKLPKYTLYECEKGRRRMLSSANEAQKGNQLVLSNHLVSLLYHAKNCEASDGKSLKYIEAHRETFSELLAQVSEFATKYTLADANLSKINNLFEQNKEGDIKAIAQSFVDLMAFNAMGAPASFKFFEATIDRKRYTNLKELLSSTIIYQSITGLYESRKRLDD

SEQ ID NO: 310 - protein, 1334 aa, Listeria monocytogenes
  Listeria monocytogenes FSL J1-208
MKNPYTIGLDIGTNSVGWAVLTDQYDLVKRKMKVAGNSDKKQIKKNFWGVRLFDEGETAADRRMNRTARRRIERRRNRISYLQEIFALEMANIDANFFCRLNDSFYVDSEKRNSRHPFFATIEEEVAYHKNYRTIYHLREELVNSSEKADLRLVYLALAHIIKYRGNFLIEGALDTKNTSVDGVYKQFIQTYNQVFISNIEEGTLAKMEENTTVADILAGKFTRKEKLERILQLYPGEKSTGMFAQFISLIVGSKGNFQKVFDLVEKTDIECAKDSYEEDLEALLAIIGDEYAELFVAAKNTYNAVVLSSIITVTDTETNAKLSASMIERFDAHEKDLSELKAFIKLHLPKQYEEIFSNVAIDGYAGYIDGKTKQVDFYKYLKTLLENIEGADYFIAKIEEENFLRKQRTFDNGAIPHQLHLEELEAILHQQAKYYPFLKEAYDKIKSLVTFRIPYFVGPLANGQSDFAWLTRKADGEIRPWNIEEKVDFGKSAVDFIEKMTNKDTYLPKENVLPKHSLYYQKYMVYNELTKVRYIDDQGKTNYFSGQEKQQIFNDYFKQKRKVSKKDLEQFLRNMSHIESPTIEGLEDSFNSSYATYHDLLKVGIKQEVLENPLNTEMLEDIVKILTVFEDKRMIKEQLQQFSDVLDGAVLKKLERRHYTGWGRLSAKLLVGIRDKQSHLTILDYLMNDDGLNRNLMQLINDSNLSFKSIIEKEQVSTTDKDLQSIVADLAGSPAIKKGILQSLKIVDELVSIMGYPPQTIVVEMARENQTTVKGKNNSRPRYKSLEKAIKEFGSQILKEHPTDNQELRNNRLYLYYLQNGKDMYTGQELDIHNLSNYDIDHIVPQSFITDNSIDNLVLTSSAGNREKGDDVPPLEIVRKRKVFWEKLFQGNLMSKRKFDYLTKAERGGLTEADKATFIHRQLVETRQITKNVANILHQRFNNETDNHGNNMEQVRIVMLKSALVSQFRKQFQLYKVREVNDYHHAHDAYLNGVVANTLLKVYPQLEPEFVYGEYHQFDWFKANKATAKKQFYTNIMLFFAQKERIIDENGEILWDKKYLETIKKVLDYRQMNIVKKTEIQKGEFSKATIKPKGNSSKLIPRKENWDPMKYGGLDSPNMAYAVIIEHAKGKKKVVFEKKIIRITIMERKAFEKDEKSFLEKQGYRQPKVLTKLPKYTLYECENGRRRMLASANEAQKGNQQVLKGQLITLLHHAKNCEASDGKSLDYIESNREMFGELLAHVSEFAKRYTLADANLSKINQLFEQNKDNDIKVIAQSFVNLMAFNAMGAPASFKFFEATIERKRYTNLKELLSATIIYQSITGLYEARKRLDG

SEQ ID NO: 311 - protein, 1334 aa, Listeria monocytogenes
  Listeria monocytogenes FSL N3-165
MKKPYTIGLDIGTNSVGWAVLTDQYDLVKRKMKISGDSEKKQIKKNFWGVRLFEKGETAAKRRMSRTARRRIERRRNRISYLQEIFAIQMNEVDDNFFNRLKESFYAESDKKYNRHPFFGTVEEEVAYYKDFPTIYHLRKELIDSQKKADLRLVYLALAHIIKYRGHFLIEGALDTKNTSIDEMFKQFLQIYNQVFANDIEEASLKKTEKNQEVAQILAEKFTRKDKLDKILSLYPGEKTTGVFAQFVNIIVGSTGKFKKHFNLHEKKDINCAEDTYDTDLESLLAIIGDEFAEVFVAAKNAYNAVVLSNIITVTDSTTRAKLSASLIERFENHKEDLKKMKRFVRTYLPEKYDEIFDDTEKHGYAGYISGKTKQADFYKYMKATLEKIEGADYFIAKIEEENFLRKQRTFDNGVIPHQLHLEELEAILHQQAKYYPFLREDYEKIKSLVTFRIPYFVGPLAKGQSEFAWLTRKADGEIRPWNIEEKVDFGKSAVDFIEKMTNKDTYLPKENVLPKHSLCYQKYMVYNELTKVRYIDDQGKTNYFSGQEKQQIFNDLFKQKRKVKKKDLELFLRNINQIESPTIEGLEDSFNASYATYHDLLKVGMKQEILDNPLNTEMLEDIVKILTVFEDKRMIKEQLQQFSDVLDGTVLKKLERRHYTGWGRLSAKLLVGIRDKQSHLTILDYLMNDDGLNRNLMQLINDSNLSFKSIIEKEQVSTTDKDLQSIVAELAGSPAIKKGILQSLKIVDELVSVMGYPPQTIVVEMARENQTTNKGKNNSKPRYKSLEKAIKEFGSQILKEHPTDNQELKNNRLYLYYLQNGKDMYTGQELDIHNLSNYDIDHIVPQSFITDNSVDNLVLTSSAGNREKGDNVPPLEIVQKRKIFWEKLYQGNLMSKRKFDYLTKAERGGLTEADKARFIHRQLVETRQITKNVANILHQRFNYKTDGNKDTMETVRIVTLKSALVSQFRKQFQFYKVREVNDYHHAHDAYLNGVVANTLLKVYPQLEPEFVYGEYHQFGWFKANKATAKKQFYTNIMLFFAQKDRIIDENGEILWDKRYLETVKKVLGYRQMNIVKKTEIQKGEFSNVTPNPKGKSNKLIPRKKDWDPIKYGGFDGSKMAYAIIIEYEKQKRKVRIEKKLIQINIMEREAFEKDEKTFLEEKGYHQPKVLIKVPKYTLYECKNGRRRMLGSANEAHKGNQMLLPNHLMALLYHAEKYEAIDGESLAYIEVHRALFDELLAYISEFARKYTLSNDRLDEINMLYERNKDGDVKSIAESFVSLKKFNAFGVHQDFSFFGTKIERKRDRKLNELLNSTIIYQSITGLYESRKRLDN

SEQ ID NO: 312 - protein, 1334 aa, Listeria monocytogenes
  Listeria monocytogenes FSL R2-503
MKNPYTIGLDIGTNSVGWAVLTDQYDLVKRKMKVAGNSDKKQIKKNFWGVRLFDDGQTAVDRRMNRTARRRIERRRNRISYLQEIFAVEMANIDANFFCRLNDSFYVDSEKRNSRHPFFATIEEEVAYHKNYRTIYHLREELVNSSEKADLRLVYLALAHIIKYRGNFLIEGALDTKNTSVDEVYKQFIQTYNQVFMSNIEEGALAKVEENTEVASILAGKFTRREKFERILRLYPGEKSTGMFAQFISLIVGNKGNFQKVFNLVEKTDIECAKDSYEEDLEALLAIIGDEYAELFVAAKNTYNAVVLSSIITVTATETNAKLSASMIERFDAHEKELGELKAFIKLHLPKQYQEIFNNAEIDGYAGYIDGKTKQVDFYKYLKTTLENVEGADYFITKIEEENFLRKQRTFDNGVIPHQLHLEELEAILHQQAKYYPFLREGYDKIKSLVTFRIPYFVGPLANGQSEFAWLTRKDDGEIRPWNIEEKVDFGKSAVDFIEKMTNKDTYLPKENVLPKHSLCYQKYMVYNELTKIRYIDDQGKTNYFSGREKQQIFNDLFKQKRKVKKKDLELFLRNINHIESPTIEGLEDSFNASYATYHDLLKVGLKQEILDNPLNTEILEDIVKILTVFEDKRMIKEQLEQFSDVLDGVVLKKLERRHYTGWGRLSAKLLVGIRDKQSHLTILDYLMNDDGLNRNLMQLINDSNLSFKSIIEKEQVSTTDKDLQSIVADLAGSPAIKKGILQSLKIVDELVSIMGYPPQTIVVEMARENQTTGKGKNNSKPRYKSLEKAIKDFGSQILKEHPTDNQELKNNRLYLYYLQNGKDIYTGQELDIHNLSNYDIDHIVPQSFITDNSIDNLVLTSSAGNREKGGDVPPLEIVRKRKVFWEKLYQGNLMSKRKFDYLTKAERGGLTEADKARFIHRQLVETRQITKNVANILHQRFNKETDNHGNTMEQVRIVTLKSALVSQFRKQFQLYKVREVNDYHHAHDAYLNGVVANTLLKVYPQLEPEFVYGEYHQFDWFKANKATAKKQFYTNIMLFFAQKERIIDENGEILWDKKYLETIKKVLDYRQINIVKKTEIQKGEFSKATIKPKGNSSKLIPRKENWDPVKYGGLDSPNMAYAVIIEHAKGKKKIVIEKKLIQINIMERKMFEKDEEAFLEEKGYHQPKVLTKLPKYTLYECEKGRRRMLSSANEAQKGNQLVLSNHLVSLLYHAKNCEASDGKSLKYIEAHRETFSELLAQVSEFATKYTLADANLSKINNLFEQNKEGDIKAIAQSFVDLMAFNAMGAPASFKFFEATIDRKRYTNLKELLSSTIIYQSITGLYESRKRLDD

SEQ ID NO: 313 - protein, 1334 aa, Listeria monocytogenes
  Listeria monocytogenes serotype 1/2a str. F6854
MKNPYTIGLDIGTNSVGWAVLTNQYDLVKRKMKVAGNSDKKQIKKNFWGVRLFDDGQTAVDRRMNRTARRRIERRRNRISYLQEIFAVEMANIDANFFCRLNDSFYVDSEKRNSRHPFFATIEEEVAYHDNYRTIYHLREKLVNSSEKADLRLVYLALAHIIKYRGNFLIEGALDTKNTSVDEVYKQFIETYNQVFMSNIEEGALAKVEENIEVANILAGKFTRREKFERILQLYPGEKSTGMFAQFISLIVGSKGNFQKVFDLIEKTDIECAKDSYEEDLETLLAIIGDEYAELFVAAKNTYNAVVLSSIITVTDTETNAKLSASMIERFDAHEKDLVELKAFIKLNLPKQYEEIFSNAAIDGYAGYIDGKTKQVDFYKYLKTILENIEGSDYFIAKIEEENFLRKQRTFDNGAIPHQLHLEELEAIIHQQAKYYPFLKEDYDKIKSLVTFRIPYFVGPLANGQSEFAWLTRKADGEIRPWNIEEKVDFGKSAVDFIEKMTNKDTYLPKENVLPKHSLCYQKYMVYNELTKIRYIDDQGKTNYFSGREKQQVFNDLFKQKRKVKKKDLELFLRNINHIESPTIEGLEDSFNASYATYHDLLKVGMKQEILDNPLNTEMLEDIVKILTVFEDKPMIKEQLQQFSDVLDGGVLKKLERRHYTGWGRLSAKLLVGIREKQSHLTILDYLMNDDGLNRNLMQLINDSNLSFKSIIEKEQVSTTDKDLQSIVAELAGSPAIKKGILQSLKIVDELVSIMGYPPQTIVVEMARENQTTGKGKNNSKPRYKSLEKAIKEFGSQILKEHPTDNQELKNNRLYLYYLQNGKDMYTGQELDIHNLSNYDIDHIVPQSFITDNSIDNLVLTSSAGNREKGGDVPPLEIVRKRKVFWEKLYQGNLMSKRKFDYLTKAERGGLTEADKARFIHRQLVETRQITKNVANILYQRFNKETDNHGNTMEQVRIVTLKSALVSQFRKQFQLYKVREVNGYHHAHDAYLNGVVANTLLKVYPQLEPEFVYGEYHQFDWFKANKATAKKQFYTNIMLFFAQKERIIDENGEILWDKKYLETIKKVLDYRQMNIVKKTEIQKGEFSKATIKPKGNSSKLIPRKENWDPMKYGGLDSPNMAYAVIIEHAKGKKKIVIEKKLIQINIMERKMFEKDEEAFLEEKGYRHPKVLTKLPKYTLYECEKGRRRMLASANEAQKGNQLVLSNHLVSLLYHAKNCEASDGKSLKYIEAHRETFSELLAQVSEFATRYTLADANLSKINNLFEQNKEGDIKAIAQSFVDLMAFNAMGAPASFKFFEATIDRKRYTNLKELLSSTIIYQSITGLYESRKRLDD

SEQ ID NO: 314 - protein, 1087 aa, Listeriaceae bacterium
  Listeriaceae bacterium TTU M1-001
MKKLVLGLDIGVASVGWGIIDAENGDVVDTGVRLFSSRDASENESRRTSRQSRRLSRRKKHRRERIKQLLLAHDMDICDIVNENPYELRVKGLNEKLEVSEIYVALTHLAKRRGVSYLDDVVEEGGTIKSEHLNKNMEEIKSGKMPCEIQLERFEKYGQVRGMIEINQDTEESSFLVNIFRTSDYIKEAKTILATQQKFHKQITNEFIDEYIHIMASKRDYFIGPGNEKSRTDYGVYRTNGDTWDNLFEILIGKCSVFPEETRAARSSYVAQEFNLLNDLNNLKISNLESGKLSASQKHDIVEKVKNSKKFGTKDLLKYIASVCECKIEDIGGCRVDKNRKPIMHTFENYRKVHNALNEAGVDLRLSETDYDELMKIMTLNSETLEIKKQCKEKLPQLTEDYLNVCLVLNKKGAFSGWHALSLKAMKLMMPELYGTSKNQMQIIHTMQLGKAYLKPLNQQKYLNSEAILEEIYNPIAARSIRQTIKVTNAILKKYGHLDSVIIEMPRDYQTSEDERKMIEKMQKENEKEKKAALKRAREEYPFPDEAFRNHKELATKLRLWYQQDQFCVYSGRKISVVDLVRNPNQFEIDHIIPQSVSLDDSLNNKVLCFSEENQKKGQQTPFYYHKGKSGNWTYEQYKLFVEKLFDKKKISNKKRELLLFEEDINKWDVRRGFIARNLVDTRYASRVILNSYQQYFGNHEMGTKVKVVRGKFTSQLRKKWRIFKDRNESHSHHAIDALIVAATANLRLWKKNTLGVSDEGKVYDKETGEILPFEKLTESEYNEMMNKEPYLNFKTKLQNIETKVKYSYRVSKKVNRKISDATIYSTRERDGIDYIVGKIKNIYDVKTYKDQFLKRYKKNKEQFLMYQHDPQTFAILENIMATYQDAENPFLAYKKEYGVIRKYSKKGGGSPVTSLKFIDKVLGQKIDLTAKNQAALPKNKKVVLQSITPYRADVYYDEIDKRYHLIGVKYSLFSFSKQGYVINPIAYQKLLEKEQIHSEMKFCFSLYREDIIEFGEDPDSLTRYRFWSKNESGKNKIEVKPIEKPNFEKQTVLTITKKIKILNKYQTDVLGNSFKAQEEKDPRNIE

SEQ ID NO: 315 - protein, 1345 aa, Marinilabilia sp.
  Marinilabilia sp. AK2
MKKILGLDLGTTSIGWAFIKEPEKDVVGSEIVDMGVRIVALSSDEENDFAKGNTISINADRTLKRGARRNLQRFKLRRDALLEIFKEMKLIPSNFKYAEDGPSSTFSTLKLRDKAAKEKIELDDLVKVLLQINKKRGYRSSRKAKSEEDDGSAIDSMGIAKELYENDLTPGQWVFEALQKGRKNVPDFYRSDLQEEFKKIVNYQSEFYPDVLNSSFVEDWMGKASTPTKQYFNKKGVHLAENKGKREERRLQEYNWRAVAVNSKIDLSEIALILSQINSQISNSSGYLGAISDRSKELYFKNQTVGQYLYQQIKINPHTRLKGQVFYRQDYLDEFEKIWSVQSGFHPQLNDALKKEIRDITIFFQRRLKSQKHLISNCEFEDYHKVVPKSHPIFQEFRIWQNLNNLTLIKKDNLNEKSELALEDKIALANELAFKREQSVKDALNILGLKSSEWEFNFTKIEGNRTNHAFFEAFAKIIEIEDGEPLDLGNLKADDILDQFSEAFLRIGIDPGLLQVNNDIEGPNYEKQPYIQFWHLLYSSEDDQKLKQNLIKKFGFKPDHAKILASISLQDDHASLSSRAIKKILPHLQSGLIYDKACTYAGYNHSSSFTKEENEKRELSSELDLLKKNSLRNPVVEKILNQMINVVNAILKDPNLGKPDEIRVEMARELKANAEQRKNMTSNIASATRDHEKYREILKKEFGLKRVTKNDLLRYKLWLETDGISLYTGKPIEASKLFSKEYDIEHIIPKTRLFDDSFSNKTICERQLNIDKANVTAFSFLQNKLSGDEFEQYQSRVKSLFGKLSKAKIQKLLMANDKIPEDFIARQLQETRYISKKAKEILFEITRRVSVTTGTITDKLREDWGLVEIMKELNWEKYDKLGLTYTIEGKHGERLNKIKDWSKRNDHRHHAMDALTVALTKPAYIQYLNNLNAKELNGKKSTEIFAIEQKYLKRENGKLCFIPPVENIRTEAKKHLSKVLISYKAKNKVVTINKNRTNKKAGFNEQIALTPRGQLHKETVYGKAFHYSTKFEKIGASFDVQKINAVAKKEEREALLKRLAENGDDPKKAFTGKNSLSKMPIYLDLKRNIKLPEKVKTVVLEQNYTIRKNIDPDLKLDKVIDVGVKRILENRLKEFGGNAKLALSNLDENPIWLNKEKGITIKRVKISGVSNVESLHVKKDHFGEPILDQVGNEIPVDFVSTGNNHHVAIYEDEKGNLQEEVVSFFEAVVRQNQGLPIINKNHSLGWKFLFTLKQNEYFVFPSDDFDPTDVDLMDEENYHLISPNLFRVQKFTTKDYFFRHHLETTVEDKSELKGVSFKRLGLPGLNCIKKIRINHLGKIIQVGEY

SEQ ID NO: 316 - protein, 1352 aa, Megasphaera sp.
  Megasphaera sp. UPII 135-E
MKKRNREEYYVGLDIGTSSVGWAVATPDYRIPKFRGHKMWGSRLFAEGKRAAERRQFRTNRRRLARRRDRLQILEELFAEEMAKVDNTFFMRLKESKFFLEDKTVKEKHILFSTDKFDADRFYKDNPTIYHVRKRLMEEEPQDIRELFLAVHHILKYRGHFLFAGSLEQNGASIEELVRTLLGKQGLAILDDTIDSNEMVNILKNTGETKSDRKKDVQELWNPLKDKVKKAQAAEMAGLVLGLKSDISKLFANSDYKDLDSSIKNINFSSGDYEEKRDDYANSIGDDIVLLDTMKALYDTLILSQILQGKRSISAAKVEDYNTHKEQLRALKAILKPHKRLYNEMFRENNKKDLSNYVAYISSYSEGKRVNREGFYKYVQAVLKQVDDSDSKQAILEAIRLETFLPLLRVKDNAVIPHQIHQAELEAILETARKKYNFLNDVSDGVSVKDKIIQLFTFRIPYYVGPLNPHSGETVADRKQGTGWVVRKQRGKVYPWNFADMVDVKASAEAFITNLTNKCTYLIGEDVLPKRSLLYSEFMLLNELNMIKYDGHELPVAIKQLYIEQVFKQEHKKQTKGRVLDFLKRNGLITGSATAVITGMDDAIKGDLQSYRDMVRIFGAGFDHSMAERIIRWVTLFGEAKDILENKIREVYGNSISDSQMRAIKKLKYADWGRLSQAFLIAVKGCDKSGVERNIITCLRASSQNLMEILSDQGTYIKQIKAWNHQHTTNMMDTLDYQLVDDLYVAPSVKRSIWQSLCIVEELVKIMGQAPKKIFVEVTRTKQAEKTKKDSRKKRLVELYTAIGKEGAAWKKEIEAHQAGDFRRKKLYLYYTQMGRCMYSNEPIAMDALFTSAYDIDHIYPQSLTKDGSWDNLVLVKSQLNKEKSDQYPLRPAIREKNKAHWQYLCRAGFISEKKYERLMRTTELTAEELSGFIARQLVETSQATKAVTGLLERIYTNTEICFVKAETVSQFRHQHNFIKIRELNNYHHAKDAYLNIVVGNVYHEKFTKNPWEFIARSTERRPYNLNRMYDFDLLKQGRVIWQVPKSLETVQAMMKSNDVRITKKLLVQKGELYDATITKAHKAKEGTYFPLKGADARLRDVHRYGGYEKIKIAYYSVFSCREKASNTIHTLIIPIPVYKAGLLQTEADLTAYAWQTKQKTKPIKDIYSAITPIYKKLCINTVVKIDGFKYFLGGKTGDYMWLDPAIPVVLDEQAAAYLKAISKVGRADDVENTAQAIDLITAEANEAFYDVLLKKMEAKIFAKAYQTIVEKLASETARERFRELSIGAQCSCLLEILNLLANNKTTFTFFKDKMGVTMSRRKQPMDLTKLEECIVYETSITGLYEKAVSLL

SEQ ID NO: 317 - protein, 1080 aa, Methylocystis sp.
  Methylocystis sp. ATCC 49242
MRVLGLDGGIASIGWALIEIFEDHEPSDGRIIDTGAWMFDAPEEKSQTGTKLKSELRRIFRGQRRVIRRRRQRMNEVRRILHRHGLLSSDNRDALKQPGLDPWKIRAEGIDRLLSPIEFAVALGHIARHRGFKSNSKGAKTSDLDAESSRMKKAVGETREKLARFGSPAKLLVEDEGFVLRQTKLKSGALETVRRFRNRDGDYSRSLLRDDLAAEVRALFRAQARLQSTFAKVELEAEFTQAAFFQRPLQDSERLVGPCPFEPAEKRSPKRGYSFELFRFLSRLNHLTLREGSEERTLTVEELRTAAADFGGVAKFTFSTLRKRLALPDIAIFVGIKADDEKKLDVVARSGEAATGTARLRRVVIDALGELAWGALISAPERLDKITEIITFRSDLDRIRAGLIEAGFDTPLIEAIVRAAADGKLDAFTGVGHISAKAARNIIPGLMRGMTYDKACAAAGYDHTASRERDAFDVGMHGKEALKKILQEERISRELVGSPSARKALIEAVKQVKAIIEKYGVPDRIHVELARDVGKSIEERRDIHFGIEKRSRQKDKLRELFGKEVGHLPQDGERGKEELLRFELWNEQMGRCLYTDEYINPKQLVASDNSVQVDHILPWSRFGDDSYLNKTLCTAKANQDKKGRTPYEWFRADKPEAEWDAFVARVESIQFMKGLKKRNYKLKNAEEAAEKFRSRNLNDTRWTCRLLAEALKQLYPKGEKDKDGKERRRVFTRPGALTNRLRRAWSLQRRKKSEKGERIADDRHHALDAIIVAATTESLLIRATREVQDIERKGLHYDLTKNITQPWPGFADEALDAVEKVFVARAERRRARGKAHDATIRHIAVRDDEAKVYERKKVGDIKLGDLIRVKDAERNAPLIENLRKWIEAGSPRDNPPLSPKGDPVSKVRLVTKNKVNITLDTGNPERLATVDRGEMARVDVFRKANRKGKYEYYLVPIYPHEIATMETPPMRAVQGGGDDDKWPEIDSTFEFLWSINQLSLLELTKPDGEVIRSYFRSLDRNTGALTVSGIANSTATRKGIGTRTLIDFKKLHVDRLGQIFEVERELRTWRGETWRGKDCI

SEQ ID NO: 318 - protein, 1082 aa, Methylosinus trichosporium
  Methylosinus trichosporium OB3b
MRVLGLDAGIASLGWALIEIEESNRGELSQGTIIGAGTWMFDAPEEKTQAGAKLKSEQRRTFRGQRRVVRRRRQRMNEVRRILHSHGLLPSSDRDALKQPGLDPWRIRAEALDRLLGPVELAVALGHIARHRGFKSNSKGAKTNDPADDTSKMKRAVNETREKLARFGSAAKMLVEDESFVLRQTPTKNGASEIVRRFRNREGDYSRSLLRDDLAAEMRALFTAQARFQSAIATADLQTAFTKAAFFQRPLQDSEKLVGPCPFEVDEKRAPKRGYSFELFRFLSRLNHVTLRDGKQERTLTRDELALAAADFGAAAKVSFTALRKKLKLPETTVFVGVKADEESKLDVVARSGKAAEGTARLRSVIVDALGELAWGALLCSPEKLDKIAEVISFRSDIGRISEGLAQAGCNAPLVDALTAAASDGRFDPFTGAGHISSKAARNILSGLRQGMTYDKACCAADYDHTASRERGAFDVGGHGREALKRILQEERISRELVGSPTARKALIESIKQVKAIVERYGVPDRIHVELARDVGKSIEEREEITRGIEKRNRQKDKLRGLFEKEVGRPPQDGARGKEELLRFELWSEQMGRCLYTDDYISPSQLVATDDAVQVDHILPWSRFADDSYANKTLCMAKANQDKKGRTPYEWFKAEKTDTEWDAFIVRVEALADMKGFKKRNYKLRNAEEAAAKFRNRNLNDTRWACRLLAEALKQLYPKGEKDKDGKERRRVFSRPGALTDRLRRAWGLQWMKKSTKGDRIPDDRHHALDAIVIAATTESLLQRATREVQEIEDKGLHYDLVKNVTPPWPGFREQAVEAVEKVFVARAERRRARGKAHDATIRHIAVREGEQRVYERRKVAELKLADLDRVKDAERNARLIEKLRNWIEAGSPKDDPPLSPKGDPIFKVRLVTKSKVNIALDTGNPKRPGTVDRGEMARVDVFRKASKKGKYEYYLVPIYPHDIATMKTPPIRAVQAYKPEDEWPEMDSSYEFCWSLVPMTYLQVISSKGEIFEGYYRGMNRSVGAIQLSAHSNSSDVVQGIGARTLTEFKKFNVDRFGRKHEVERELRTWRGETWRGKAYI

SEQ ID NO: 319 - protein, 1123 aa, Mobiluncus curtisii
  Mobiluncus curtisii subsp. holmesii ATCC 35242
MFVYLNSPRGFGPATFLTDLPHFCIIFGNNDFMDNRKYHVGIDVGTNSVGFAAVEVGDSGSPIRFLNTMVVIHDSGVDPEQKKYAITRLASAGTARRTRRLYRTRRQRLRELDDFISNELGYPLVNLENFADPYEPWKVRADLATIKLPADELPEAMSIALRHMARHRGWRSPYQRVEALHLHAEISEEFSALKKRVMEKTGDVFSDDATPAEVLVDLMGRQKIRGADGMLSGKLRQSDNANELRKIASVQGIDDETLNRIIDRVFFSRSPKGKASERVGMDALPGQGSKPRALKAMPSFQKFRIVSVICNLRIKDSGDDNRPLSMEEKEQLIGYLMSSTTDDHVTWTDVAELLHVKRSNLQGTAKEGPDGERPYTRPPVNSAWSKIKDSKIKSLVALWKTGDVDVQSAIVEALSNASVLEDARPGADIVVAYLESLDDKELESLDKVGLPAGRASYSEDSLERLTERMLQDDCDLFEARKREFGVSDDWKPPADPIYAPVGNPGVDRVLKIVNRLLMAAEREWGAPTQINIEHVRSGFSSELMQREFERENERRRAQNEEAVKAILTEKGGNSHVSKYDIIRYYAVKRQNCQCLYCGTPITFSDCELDHIVPRKGVGSTNSRVNLAAACRSCNRDKSNLPFAVWAGKTSNFDVSIDGAVSRVKQWQRSQNEGAREFRAFQNEVISRLLKTTEDPEIDSRSLESVAWMARELHHRVEYYFQSKGAQTQVSVYRGAVTAQARKSSGLEDKVKMIGGGGKTRLDRRHHAMDAATIALMTPGISTTLSEKNNLRDAQKFTGQSETWKDYCGRTETAREHFAVWKSNMERLTDLFNDKLENDAIPVVQPLRLRLSDSKAHDDGIGKLDSKKLGSVWSLADIDRAATPQIWTALTRCDDFDPTKGLPENANRVIRAQGVKYESEDNIPVFPSNVAAIAVRDGYAEIGSTIHHARIYRIDDGKKIFYSMIRVFAVDLLKHQAEDLFTVKLPPSAISIRTCEDSLRRALSNGTAEYLGWLVPGDEIIVDTSDKAFHTGQIGDLLRNFPVNSFRLTGFPSNSRLRLKPVLLAGEGLRDDAEDSIKKILSGQGWRPAINVLFSKGKPRIVRRNSLGIERPSSNNGLPFSWEA

SEQ ID NO: 320 - protein, 1091 aa, Mobiluncus mulieris
  Mobiluncus mulieris 28-1
MDSRKYRVGIDVGTNSVGFAAVEEDDSGSPTRFLNTMVVIHDSGVDPEQKKYAITRLASAGTARRTRRLYRTRRQRLRELDDFISNELGYPLVNLENFADPYEPWKVRADLATTKLPNDELPEAMSIALRHMARHRGWRSPYQRVEALHLHAEISKEFAALKERVVEKTGDVFSDDATPAEVLVDLMGRQKVRGADGVLSGKLRQSDNANELRKIASVQGIDDETLNRIIDRVFSSKSPKGKASERVGMDALPGQGSKPRALKAMPSFQKFRVVSVICNLRIKDSGGDARPLSMEEKEKLIDYLMSSTTDDHVTWTDVADLLHVKRSQLQGTAKEGFDGERPYTRPPVNSTWSKIKDSKIKSLVALWKTGDVDVQSAIVEALSNASVLEDSRPGADIVVAYLESLDDKELESLDKVGLPAGRASYSEDSLERLTERMLRDDCDLFEARKREFNVADDWKPPADPIYAPVGNPGVDRVLKIVNRLLMAAEREWGAPTQINIEHVRSGFSSELMQREFERENERRRAQNEEAVKAILTEKGGNSRVSKYDITRYYAVKRQHCQCLYCGTPITFSDCELDHIVPRKGVGSTNTRVNLAAACRSCNRDKSNLPFAVWAGKASNFDVSIDDAVSRVKQWQRSQNEGVREFRAFQNEVISRLLKTTEDPEIDSRSLESVAWMARELHHRVEYYFQSKGAQTQVSVYRGAVTAQARKSSGLEDKVKMIGGGGKTRLDRRHHAMDAATIALMTPGISTTLSEKNNLRDAQKFTGQSETWKDYCGRTETARKHFAVWKSNMERLTDLFNDKLENDAIPVVQPLRLRLSNSKAHDDGIGKLDSKKLGSVWSLADIDRAATPQIWTALTRCDDFDPTKGLPENANRVIRAQGVKYESEDNIPVFPSNVAAIAVRDGYAEIGSTIHHARIYRIDDGKKTFYSMIRVFAVDLLKHQAEDLFTVKLPPSAISIRTCEDSLRRALSNGTAEYLGWLVPGDEIIVDTSDKAFHTGQIGDLLRNFPVNSFRLTGFPSNSRLRLKPVLLAGEGLRDDAEDSIKKILLGQGWRPAINVLFSKGKPRIVRRNSLGIERPSSNNGLPFSWEA

SEQ ID NO: 321 - protein, 1091 aa, Mobiluncus mulieris
  Mobiluncus mulieris FB024-16
MDSRKYRVGIDVGTNSVGFAAVEEDDSGSPTRFLNTMVVIHDSGVDSEQKKYAITRLASAGTARRTRRLYRTRRQRLRELDDFISNELGYPLVNLENFADPYEPWKVRADLATTKLPNDELPEAMSIALRHMARHRGWRSPYQRVEALHLHAEISKEFAALKERVVEKTGDVFSDDATPAEVLVDLMGRQKVRGADGVLSGKLRQSDNANELRKIASVQGIDDETLNRIIDRVFSSKSPKGKASERVGMDALPGQGSKPRALKAMPSFQKFRVVSVICNLRIKDSGGDARPLSMEEKEKLIDYLMSSTTDDHVTWTDVADLLHVKRSQLQGTAKEGFDGERPYTRPPVNSTWSKIKDSKIKSLVALWKTGDVDVQSAIVEALSNASVLEDSRPGADIVVAYLESLDDKELESLDKVGLPAGRASYSEDSLERLTERMLRDDCDLFEARKREFNVADDWKPPADPIYAPVGNPGVDRVLKIVNRLLMAAEREWGAPTQINIEHVRSGFSSELMQREFERENERRRAQNEEAVKAILTEKGGNSRVSKYDITRYYAVKRQHCQCLYCGTPITFSDCELDHIVPRKGVGSTNTRVNLAAACRSCNRDKSNLPFAVWAGKASNFDVSIDDAVSRVKQWQRSQNEGVREFRAFQNEVISRLLKTTEDPEIDSRSLESVAWMARELHHRVEYYFQSKGAQTQVSVYRGAVTAQARKSSGLEDKVKMIGGGGKTRLDRRHHAMDAATIALMTPGISTTLSEKNNLRDAQKFTGQSETWKDYCGRTETARKHFAVWKSNMERLTDLFNDKLENDAIPVVQPLRLRLSNSKAHDDGIGKLDSKKLGSVWSLADIDRAATPQIWTALTRCDDFDPTKGLPENANRVIRAQGVKYESEDNIPVFPSNVAAIAVRDGYAEIGSTIHHARIYRIDDGKKTFYSMIRVFAVDLLKHQAEDLFTVKLPPSAISIRTCEDSLRRALSNGTAEYLGWLVPGDEIIVDTSDKAFHTGQIGDLLRNFPVNSFRLTGFPSNSRLRLKPVLLAGEGLRDDAEDSIKKILLGQGWRPAINVLFSKGKPRIVRRNSLGIERPSSNNGLPFSWEA

SEQ ID NO: 322 - protein, 1473 aa, Mucilaginibacter paludis
  Mucilaginibacter paludis DSM 18603
MKNILGLDLGTNSIGWALIEKDTDQKNGNILGTGSRIIPMSQDIKDEFGKGNSISQTADRTKFRSVRRLRERHLLRRERLHRVLNVLGFLPKHYADQIDFKKRLGKLVNETEPKLVYDNKNFIFKKSFEAMLSDFNQHQPLLLADGKKVPFDWTIYYLRKKALTEKIEKEELAWLILNFNQKRGYYQLRGEEEEENPNKMVAFHSLKIVEVIADESQKGKAETWYSLILENGWIYRRSSKTPLYDWKGKQRDFIVTTDLNDDGSIKTDKEGLEKRSFRAPVEDDWTLVKKKTEQEINRSHKTVGTYIYENLLQDPKQKIKGKLVRTIEREFYKDELKMILKNQQKFHPELNDEHLYINCVRELYRNNQAHQTILSKKDFVHLFIDDIIFYQRPLRSQKSSISNCTLEFRKYKNENGTDQTDYLKAIPKSHPLFQEFRLWQWIYNLGIYQKEDDTNVTDELIKNIDGYQDLFDFLNNKKEIRQDILIKFLVEQTGLKGKPLSSVVAKYRWNFVEDKIYPCNETGTQIRTRLAKVENTPEDFLTAETEIKLWHIIYSVNDKADYEKALKTFAEKHNLDTHSFVENFKKFPPFKSEYGSFSEKAIKKLLPLIRLGKYWSWENIDKKTQERIEKILTGEFDEAIKSRVRDKAIHLTEEDHFQGLQLWLASYVVYGRHSEADNLDKWHTVADLEDYLAEFRQHSLRNPIVEQVITETLRVVKDIWLQYGQGAKDFFSEIHIELAREMKNTGDERKRLTSLVTDNENTNLRIKVLLSELLNDGNVENVRPYSPMQQEALKIFEDGVLNSDIEIEDDILKISKMAQPTNTELKRYKLWLEQKYRSPYTGQIIPLNRLFTADYEIEHIIPQSRFFDDSFSNKIICESAVNQLKDKQLGLEFIKNHSGTIVKLGMGKTAKILDVESYNEFVKGNYTKNISKRNKLMLEEIPDKMIERQLNDTRYISKFIISALSNIVRSESNDDGFNSKNVLPGNGKITSRLKQDWGMNDIWNELILPRFERMNKITDSAVFTAWNENNQKFLPIVPLEFSKGFQKKRIDHRHHALDALVIAASTREHINLLNNEHAKSDKRFDLNRKLRKFEKVAYNDPKTGKRIEKEVPTIFLKPWETFTVDAKNSLESIIVSFKQNLRVINRATNYSESYNDENGALRLGKDGNPLKEKIKQSKGDSWAIRKPMHKDFVYGKVHLQNVKLPKDKFITAIRKSLDVTFDLKRIETITDTGIQKILKNYLHSKENKVELAFSPEGIEDMNQHIERYNDGKKHQPIHKVRVFEIGSRFSLGESGNKKTKFVEAAKGTNLFFAVYQDDNKGKRNYETIPLNIVIERQKLGLHSVPTEDAKGGKLLFHLSPNDMVYVPTSEELEDNLASVNIKRLNTAQRKRIYKVEKASGVECYFIRQDIAYLIKNYDAKTKIGELESQNKLQTTMTDDRLKITDVCVKLNIDRLGSIAETFLGNQYGASKKT

SEQ ID NO: 323 - protein, 1233 aa, Mycoplasma canis
  Mycoplasma canis PG 14
MEKKRKVTLGFDLGIASVGWAIVDSETNQVYKLGSRLFDAPDTNLERRTQRGTRRLLRRRKYRNQKFYNLVKRTEVFGLSSREAIENRFRELSIKYPNIIELKTKALSQEVCPDEIAWILHDYLKNRGYFYDEKETKEDFDQQTVESMPSYKLNEFYKKYGYFKGALSQPTESEMKDNKDLKEAFFFDFSNKEWLKEINYFFNVQKNILSETFIEEFKKIFSFTRDISKGPGSDNMPSPYGIFGEFGDNGQGGRYEHIWDKNIGKCSIFTNEQRAPKYLPSALIFNFLNELANIRLYSTDKKNIQPLWKLSSVDKLNILLNLFNLPISEKKKKLTSTNINDIVKKESIKSIMISVEDIDMIKDEWAGKEPNVYGVGLSGLNIEESAKENKFKFQDLKILNVLINLLDNVGIKFEFKDRNDIIKNLELLDNLYLFLIYQKESNNKDSSIDLFIAKNESLNIENLKLKLKEFLLGAGNEFENHNSKTHSLSKKAIDEILPKLLDNNEGWNLEAIKNYDEEIKSQIEDNSSLMAKQDKKYLNDNFLKDAILPPNVKVTFQQAILIFNKIIQKFSKDFEIDKVVIELAREMTQDQENDALKGIAKAQKSKKSLVEERLEANNIDKSVFNDKYEKLIYKIFLWISQDFKDPYTGAQISVNEIVNNKVEIDHIIPYSLCFDDSSANKVLVHKQSNQEKSNSLPYEYIKQGHSGWNWDEFTKYVKRVFVNNVDSILSKKERLKKSENLLTASYDGYDKLGFLARNLNDTRYATILFRDQLNNYAEHHLIDNKKMFKVIAMNGAVTSFIRKNMSYDNKLRLKDRSDFSHHAYDAAIIALFSNKTKTLYNLIDPSLNGIISKRSEGYWVIEDRYTGEIKELKKEDWTSIKNNVQARKIAKEIEEYLIDLDDEVFFSRKTKRKTNRQLYNETIYGIATKTDEDGITNYYKKEKFSILDDKDIYLRLLREREKFVINQSNPEVIDQIIEIIESYGKENNIPSRDEAINIKYTKNKINYNLYLKQYMRSLTKSLDQFSEEFINQMIANKTFVLYNPTKNTTRKIKFLRLVNDVKINDIRKNQVINKFNGKNNEPKAFYENINSLGAIVFKNSANNFKTLSINTQIAIFGDKNWDIEDFKTYNMEKIEKYKEIYGIDKTYNFHSFIFPGTILLDKQNKEFYYISSIQTVRDIIEIKFLNKIEFKDENKNQDTSKTPKRLMFGIKSIMNNYEQVDISPFGINKKIFE

SEQ ID NO: 324 - protein, 1233 aa, Mycoplasma canis; identical to SEQ ID NO: 323
  Mycoplasma canis PG 14

SEQ ID NO: 325 - protein, 1233 aa, Mycoplasma canis
  Mycoplasma canis UF31
MEKKRKVTLGFDLGIASIGWAIVDSETNQVYKLGSRLFDAPDTNLERRTQRGTRRLLRRRKYRNQKFYNLVKRTEVFGLSSREAIENRFRELSIKYPNIIELKTKALSQEVCPDEIAWILHDYLKNRGYFYDEKETKEDFDQQTVESMPSYKLNEFYKKYGYFKGALSQPTESEMKDNKDLKEAFFFDFSNKEWLKEINYFFNVQKNILSETFIEEFKKIFSFTRDISKGPGSDNMPSPYGIFGEFGDNGQGGRYEHIWDKNIGKCSIFTNEQRAPKYLPSALIFNFLNELANIRLYSTDKKNIQPLWKLSSIDKLNILLNLFNLPISEKKKKLTNANINDIVKKESTKSIMLSVEDIDMIKDEWAGKEPNVYGVGLSGLNIEESAKENKFKFQDLKILNVLINLLDNVGIKFEFKDRNDIIKNLELLDNLYLFLIYQKESNNKDSSIDLFIAKNELLNIENLKLKLKEFLLGAGNEFENHNSKTHSLSKKAIDAILPKLLDNNEGWNLEAIKNYDEEIKSQIEDNSSLMAKQDKKYLNDNFLKDAILPPNVKVTFQQAILIFNKIIQKFSKDFEIDKVVIELAREMTQDQENDALKGIAKAQKSKKSLVEERLEANNIDKSVFNDKYEKLIYKIFLWISQDFKDPYTGAQISTNEIVNNKVEIDHIIPYSLCFDDSSANKVLVHKQSNQEKSNSLPYEYIKQGHSGWNWDEFTKYVKRVFVNNVDSILSKKERLKKSENLLTTSYDGYDKLGFLARNLNDTRYATILFRDQLNNYAEHHLIDNKKMFKVIAMNGAVTSFIRKNMSYDNKLRLKDRSDFSHHAYDAAIIALFSNKTKTLYNLIDPSLNGIISKRSEGYWVIEDRYTGEIKELKKEDWTSIKNNVQARKIAKEIEEYLIDLDDEVFFSRKTKRKTNRQLYNETIYGIAAKTDEDGITNYYKKEKFSILDDKDIYLRLLREREKFVINQSNPEVIDQIIEIIESYGKENNIPSRDEAINIKYTKNKINYNLYLKQYMRSLTKSLDQFSEEFINQMIANKTFVLYNPTKNTTRKIKFLRLVNDVKINDIRKNQVINKFNGKNNEPKAFYENINSLGAIVFKNSANNFKTLSINTQIAIFGDKNWDIEDFKTYNMEKIEKYKEIYGIDKTYNFHSFIFPGTILLDKQNKEFYYISSIQTVRDIIEIKFLNKIEFKDENKNPDTSKTPKRLMFGIKSIMNNYEQVDISPFGINKKIFE

SEQ ID NO: 326 - protein, 1233 aa, Mycoplasma canis
  Mycoplasma canis UF33
MEKKRKVTLGFDLGIASVGWAIVDSETNQVYKLGSRLFDAPDTNLERRTQRGTRRLLRRRKYRNQKFYNLVKRTEVFGLSSREAIENRFRELSIKYPNIIELKTKALSQEVCPDEIAWILHDYLKNRGYFYDEKETKEDFDQQTVESMPSYKLNEFYKKYGYFKGALSQPTESEMKDNKDLKEAFFFDFSNKEWLKEINYFFNVQKNILSETFIEEFKKIFSFTRDISKGPGSDNMPSPYGIFGEFGDNGQGGRYEHIWDKNIGKCSIFTNEQRAPKYLPSALIFNFLNELANIRLYSTDKKNIQPLWKLSSVDKLNILLNLFNLPISEKKKKLTSTNINDIVKKESIKSIMISVEDIDMIKDEWAGKEPNVYGVGLSGLNIEENAKENKFKFQDLKILNVLINLLDNVGIKFEFKDRNDIIKNLELLDNLYLFLIYQKESNNKDSSIDLFIAKNKSLNIENLKLKLKEFLLGAGNEFENHNSKSHSLSKKAIDAILPKLLDNNEGWNLEAIKNYDEEIKSQIEDNSSLMAKQDKKYLNDNFLKDAILPPNVKVTFQQAILIFNKIIQKFSKDFEIDKVVIELAREMTQDQENDALKGMAKAQKSKKSLVEERLEANNIDKSVFNDKYEKLIYKIFLWISQDFKDPYTGAQISVNEIVNNKVEIDHIIPYSLCFDDSSANKVLVHKQSNQEKSNSLPYEYIKQGHSGWNWDEFTKYVKRVFVNNVDSILSKKERLKKSENLLTTSYDGYDKLGFLARNLNDTRYATILFRDQLNNYAEHHLIDNKKMFKVIAMNGAVTSFIRKNMSYDNKLRLKDRSDFSHHAYDAAIIALFSNKTKTLYNLIDPSLNGIISKRSEGYWVIEDRYTGEIKELKKEDWTSIKNNVQARKIAKEIEEYLIDLDDEVFFSRKTKRKTNRQLYNETIYGIAAKTDEDGITNYYKKEKFSILDDKDIYLRLLREREKFVINQSNPEVIDQIIEIIESYGKENNIPSRDEAINIKYTKNKINYNLYLKQYMRSLTKSLDKFSEEFINQMIANKTFVLYNPTKNTTRKIKFLRLVNDVKINDIRKNQVINKFNGKNNEPKAFYENINSLGAIVFKNSANNFKTLSINTQIAIFGDKNWDIEDFKTYNMEKIEKYKEIYGIDKTYNFHSFIFPGTILLDKQNKEFYYISSIQTVRDIIEIKFLNKIEFKDENKNQDTSKTPKRLMFGIKSIMNNYEQVDISPFGINKKIFE

SEQ ID NO: 327 - protein, 1233 aa, Mycoplasma canis
  Mycoplasma canis UFG1
MEKKRKVTLGFDLGIASVGWAIVDSETNQVYKLGSRLFDAPDTNLERRTQRGTRRLLRRRKYRNQKFYNLVKRTEVFGLSSREAIENRFRELSIKYPNIIELKTKALSQEVCPDEIAWILHDYLKNRGYFYDEKETKEDFDQQTVESMPSYKLNEFYKKYGYFKGALSQPTESEMKDNKDLKEAFFFDFSNKEWLKEINYFFNVQKNILSETFIEEFKKIFSFTRDISKGPGSDNMPSPYGIFGEFGDNGQGGRYEHIWDKNIGKCSIFTNEQRAPKYLPSALIFNFLNELANIRLYSTDKKNIQPLWKLSSVDKLNILLNLFNLPISEKKKKLTSTNINDIVKKESIKSIMLSVEDIDMIKYEWAGKEPNVYGVGLSGLNIEESAKENKFKFQDLKILNVLINLLDNVGIKFEFKDRNDIIKNLELLDNLYLFLIYQKESNNKDSSIDLFIAKNKSLNIENLKLKLKEFLLGAGNEFENHNSKTHSLSKKAIDAILPKLLDNNEGWNLEAIKNYDEEIKSQIEDNSSLMAKQDKKYLNDNFLKDAILPPNVKVTFQQAILIFNKIIQKFSKDFEIDKVVIELAREMTQDQENDALKGIAKAQKSKKSLVEERLEANNIDKSVFDDKYEKLIYKIFLWISQDFKDPYTGAKISANEIVNNKVEIDHIIPYSLCFDDSSANKVLVHKQSNQEKSNSLPYEYIKQGHSGWNWDEFTKYVKRVFVNNVDSILSKKERLKKSENLLTTSYDGYDKLGFLARNLNDTRYATILFRDQLNNYAEHHLIDNKKMFKVIAMNGAVTSFIRKNMSYDNKLRLKDRSDFSHHAYDAAIIALFSNKTKTLYNLIDPSLNGIISKRSEGYWVIEDRYTGEIKELKKEDWTSIKNNVQARKIAKEIEEYLIDLDDEVFFSRKTKRKTNRQLYNETIYGIAAKTDEDGITNYYKKEKFSILDDKDIYLRLLREREKFVINQSNPEVIDQIIEIIESYGKENNIPSRDEAINIKYTKNKINYNLYLKQYMRSLTKSLDQFSEEFINQMIANKTFVLYNPTKNTTRKIKFLRLVNDVKINDIRKNQVINKFNGKNNEPKAFYENINSLGAIVFKNSANNFKTLSINTQIAIFGDKNWDIEDFKTYNMEKIEKYKEIYGIDKTYNFHSFIFPGTILLDKQNKEFYYISSIQTVRDIIEIKFLNKIEFKDENKNQDTSKTPKRLMFGIKSIMNNYEQVDISPFGINKKIFE

SEQ ID NO: 328 - protein, 1233 aa, Mycoplasma canis
  Mycoplasma canis UFG4
MEKKRKVTLGFDLGIASVGWAIVDSETNQVYKLGSRLFDAPDTNLERRTQRGTRRLLRRRKYRNQKFYNLVKRTEVFGLSSREAIENRFRELSIKYPNIIELKTKALSQEVCPDEIAWILHDYLKNRGYFYDEKETKEDFDQQTIESMPSYKLNEFYKKYGYFKGALSQPTESEMKDNKDLKEAFFFDFSNKEWLKEINYFFNVQKNILSETFIEEFKKIFSFTRDISKGPGSDNMPSPYGIFGEFGDNGQGGRYEHIWDKNIGKCSIFTNEQRAPKYLPSALIFNFLNELANIRLYSTDKKNIQPLWKLSSIDKLNILLNLFNLPISEKKKKLTSANINDIVKKESTKSIMLSVEDIDMIKDEWAGKEPNVYGVGLSGLNIEESAKENKFKFQDLKILNVLINLLDNVGIKFEFKDRNDIIKNLELLDNLYLFLIYQKESNNKDSSIDLFIAKNESLNIENLKLKLKEFLLGAGNEFENHNSKTHSLSKKAIDAILPKLLDNNEGWNLEAIKNYDEEIKSQIEDNSFLMAKQDKKYLNDNFLKDAILPPNVKVTFQQAILIFNKIIQKFSKDFEIDKVVIELAREMTQDQENDALKGIAKAQKSKKSLVEERLEANNIDKSVFNEKYEKLIYKIFLWISQDFKDPYTGAKISANEIVDNKVEIDHIIPYSLCFDDSSANKVLVHKQSNQEKSNSLPYEYIKQGHSGWNWDEFTKYVKRVFVNNVDSILSKKERLKKSENLLTTSYDGYDKLGFLARNLNDTRYATILFRDQLNNYAEHHLIDDKKMFKVIAMNGAVTSFIRKNMSYDNKLRLKNRNDFSHHAYDAAIIALFSNKTKTLYNLIDPSLNGIISKRSEGYWVIEDRYTGEIKELKKEDWTSIKNNVQARKIAKEIEEYLIDLDDEVFFSRKTKRKTNRQLYNETIYGIAAKTDEDGITNYYKKEKLSILDDKDIYLRLLREREKFVINQSNPEVIDQIIEIIESYGKENNIPSRDEAINIKYTKNKINYNLYLKQYMRSLTKSLDQFSEEFINQMIANKTFVLYNPTKNTTRKIKFLRLVNDVKINDIRKNQVINKFNGKNNEPKAFYENINSLGAIVFKNSANNFKTLSINTQIAIFGDKNWDIEDFKTYNMEKIEKYKEIYGIDKTYNFHSFIFPGTILLDKQNKEFYYISSIQTVRDIIEIKFLNKIEFKDENKNQDTSKTPKRLMFGIKSIMNNYEQVDISPFGINKKIFE

SEQ ID NO: 329 - protein, 1239 aa, Mycoplasma cynos
MEEKRKVTLGFDLGVASVGWAIVDSETNEVYKLGSRLFDIPDTNIDRRAKRGSRRLVRRRSYRNQKFYNLIKRTKTFGFLDKEAIEKEFVLLSIKYPNIIELKVKGLQEEVSKSEAVWILHDYLKNRGYFYDDKEEKDDLENPSIESMPSYKLYEFYKEYGYFKGALSSPTESEKNKDSDLEKAIFFNFSNKEWTKEINHFFKIQKNIFSEDFKAKFMEFFSFIRDISKGPGSENMPSQYSIFGKYGDDGMGGKYQHIWDKNIGKCSIFKDKVRAPKYLPSALFFNLLNELSNIRLYSVDKREKSVLWRLSSKDKINIILNILQIILFKNDGKISNLDINKIVKNESIKSIILNEIDLDLIKDMWFEKEPNVYGIGLSGLNIEENKKENRFKFQDLKIFSVFIDLLKKSNINIEFNNEKDIIHNLKLLDELYFFLITQKYSRDKYGSIKKFILNNKSFNIDNLDEKLNIFLSISDDEFDNHNSKTHSLSKEAIYFIFPKLLHNNEGWNLEAIKNYDIDVREEISKHSFGIKKQDKKYLDDAFLDDAILPPSVKVTIKQSILIFNKIIKKFSNKFQIDNVVIELAREMTQEKEMDAQKSLNRLKKSRKKIIEERLNANNIDSKMFRDKTGEISPNYIYKIYLWISQNFKDPYTGENISANDILKNNVEIDHIIPYSLCFDDSSSNKVLVFKHSNQSKGNFLPFDMISTFSENSVWNWKEYTQYVEKTFKTNLESILDKKERVKKADNLLTSSYDGYDKLGFLARNLNDTRYATILFRDQLINYSENHLIDSKKMFKVIAMNGGVTSFIRKNMSFDSGLKVKDRSIFSHHAYDAAIIALFSNKTKILYNLINPSLDGIISKRSEGYWVLEDRLTGEIRKLNYNDWQSIKNNVEVKKIAREIESHLSNLDNVVMFSRKSKRKTNKELYNETLYGIATRIDENGIKNYYKKEKFNILEDENIYLRLLNERENFIINRSNPEVIDAIIEIFETIDKNKIPARDVAKNIKYTDNKIKYNLYLKDYMRKLVDEFPDKFRKDFIEQMIAKKIFILFNPIKNTTRKIKSLRSINNNKIEDIRKKQVLEKFNTAKNEPRSFYESLNSLGAIIFKNNLNIYKKMSISSQIATFGDKNWKIDDINTYNKEKLNKYKEIYGIDETYDFYSFIFPGTILLDEKNKEFLYISSIQTLKDKIELKFLDRIEFEKKNVNSNLKPKIKREIISTKKLMSDYKIIKISPLGINKKIFE

SEQ ID NO: 330 - protein, 1269 aa, Mycoplasma gallisepticum
MNNSIKSKPEVTIGLDLGVGSVGWAIVDNETNIIHHLGSRLFSQAKTAEDRRSFRGARRLIRRRKYKLKRFINLIWKYNSYFGFKNKEDILNNYQEQQKLHNTVLNLKLEALNAKIDPKALSWILHDYLKNRGHFYEDNRDFNVYPTEELANYFGEYGYYKGIIDSKEDNDDKLEEGLTKYKFSNQHWLEEIKKVLSNQTGLPEKFKEEYESLFSYVRNYSEGPGSINSVSPYGIYHLDEKEGKVVQKYNNIWDKTIGKCSIFPDEYRAPKNSPIAMIFNEINELSTIRSYSIYLTGWFINQEFKKAYLNKLLDLLIKTNSEKPIDARQFKKLREETIAESIGKETLKDVEREEKLEKEDHKWKLKGLKLNTNGKIQYNDLSSLAKFVHKLKQHLKLDFLLEDQYTTLDKINFLQSLFVYLGKHLRYSNRVDSANLKEFSDSNKLFERVLQEQKDDLFKLFEQTDKDDEKILAQTHSLSTKAMLLAITRMTNLDNDEDNQKNNDKGWNFEAIKNFDQKFIDITKKNNNLSLKQDKRYLDDRFINDAILSPGVKRILREATKVFNAILKQFSEEYDVTKVVIELARELSEEKELENTKNYEKLIKKNSDKISERLEALDIAEDKIEDILKSPTKSYKVLLWLQQDHIDPYSQKEIAFEDILTKTEKTEIDHIIPYSISFDDSSSNKLLVLAESNQAKSNQTPYEFITSGNAGIKWEDYEAYCRKFKDGDTSLLDSTQRSKKFAKMMKTDTSSKYDIGFLARNLNDTRYATIVFRDALKDYANNHLVEDKPMFKVVCINGGVTSFLRKNFDKSWYAKKDRDKNIHHAVDASIISIFSNETKTLFNQLTQFADYKLFKNTDGSWKKIDPKTGVVTEVTDENWKQIRVRNQVSEIAKVINKCIQDSNIERKARYSRKIENKTNISLFNDTVYSAKKVGYEDQIKRKNLKTLDIHESAEENKNSKVKKQFVYRKLVNVSLLNNDKLADLFAEKEDILMYRANPWVINLAEQIFNEYTENKKIKSQNVFEKYMLDLTKEFPEKFSEAFVKSMLRNKTAIIYNVEKKVVHRIKRLKILSSELKENKLSNVIIRSKNESGTKLSYQDTINSIALMIMRSIDPTAKKQYIRVPLNTLNLHLGDQDFDLHNIDAYLKKPKFVKYLKANEIGDEYKPWRVLTSGTLLIHKKDKKLMYISSFQNLKDVIEIKNLIETEYKENDDSDPKKKKKANRFLMTLSTILNDYILLDAKDNFDILGLSKNRIDEILNSKLGLDKITK

SEQ ID NO: 331 - protein, 1224 aa, Mycoplasma gallisepticum
MNNSIKSKPEVTIGLDLGVGSVGWAIVDNETNIIHHLGSRLFSQAKTAEDRRSFRGARRLIRRRKYKLKRFINLIWKYNSYFGFKNKEDILNNYQEQQKLHNTVLNLKLEALNAKIDPKALSWILHDYLKNRGHFYEDNRDFNVYPTEELANYFGEYGYYKGIIDSKEDNDDKLEEGLTKYKFSNQHWLEEIKKVLSNQTGLPEKFKEEYESLFSYVRNYSEGPGSINSVSPYGIYHLDEKEGKVVQKYNNIWDKTIGKCSIFPDEYRAPKNSPIAMIFNEINELSTIRSYSIYLTGWFINQEFKKAYLNKLLDLLIKTNSEKPIDARQFKKLREETIAESIGKETLKDVEREEKLEKEDHKWKLKGLKLNTNGKIQYNDLSSLAKFVHKLKQHLKLDFLLEDQYTTLDKINFLQSLFVYLGKHLRYSNRVDSANLKEFSDSNKLFERVLQEQKDDLFKLFEQTDKDDEKILAQTHSLSTKAMLLAITRMTNLDNDEDNQKNNDKGWNFEAIKNFDQKFIDITKKNNNLSLKQDKRYLDDRFINDAILSPGVKRILREATKVFNAILKQFSEEYDVTKVVIELARELSEEKELENTKNYEKLIKKNSDKISERLEALDIAEDKIEDILKSPTKSYKVLLWLQQDHIDPYSQKEIAFEDILTKTEKTEIDHIIPYSISFDDSSSNKLLVLAESNQAKSNQTPYEFITSGNAGIKWEDYEAYCRKFKDGDTSLLDSTQRSKKFAKMMKTDTSSKYDIGFLARNLNDTRYATIVFRDALKDYANNHLVEDKPMFKVVCINGGVTSFLRKNFDKSWYAKKDRDKNIHHAVDASIISIFSNETKTLFNQLTQFADYKLFKNTDGSWKKIDPKTGVVTEVTDENWKQIRVRNQVSEIAKVINKCIQDSNIERKARYSRKIENKTNISLFNDTVYSAKKVGYEDQIKRKNLKTLDIHESAEENKNSKVKKQFVYRKLVNVSLLNNDKLADLFAEKEDILMYRANPWVINLAEQIFNEYTENKKIKSQNVFEKYMLDLTKEFPEKFSEAFVKSMLRNKTAIIYNVEKKVVHRIKRLKILSSELKENKLSNVIIRSKNESGTKLSYQDTINSIALMIMRSIDPTAKKQYIRVPLNTLNLHLGDQDFDLHNIDAYLKKPKFVKYLKANEIGDEYKPWRVLTSGTLLIHKKDKKLMYISSFQNLKDVIEIKNLIETEYKENDDSDPKKRRKQIGS

SEQ ID NO: 332 - protein, 1269 aa, Mycoplasma gallisepticum
MNNSIKSKPEVTIGLDLGVGSVGWAIVDNETNIIHHLGSRLFSQAKTAEDRRSFRGVRRLIRRRKYKLKRFVNLIWKYNSYFGFKNKEDILNNYQEQQKLHNTVLNLKSEALNAKIDPKALSWILHDYLKNRGHFYEDNRDFNVYPTKELAKYFDKYGYYKGIIDSKEDNDNKLEEELTKYKFSNKHWLEEVKKVLSNQTGLPEKFKEEYESLFSYVRNYSEGPGSINSVSPYGIYHLDEKEGKVVQKYNNIWDKTIGKCNIFPDEYRAPKNSPIAMIFNEINELSTIRSYSIYLTGWFINQEFKKAYLNKLLDLLIKTNGEKPIDARQFKKLREETIAESIGKETLKDVENEEKLEKEDHKWKLKGLKLNTNGKIQYNDLSSLAKFVHKLKQHLKLDFLLEDQYATLDKINFLQSLFVYLGKHLRYSNRVDSANLKEFSDSNKLFERILQKQKDGLFKLFEQTDKDDEKILAQTHSLSTKAMLLAITRMTNLDNDEDNQKNNDKGWNFEAIKNFDQKFIDITKKNNNLSLKQNKRYLDDRFINDAILSPGVKRILREATKVFNAILKQFSEEYDVTKVVIELARELSEEKELENTKNYKKLIKKNGDKISEGLKALGISEDEIKDILKSPTKSYKFLLWLQQDHIDPYSLKEIAFDDIFTKTEKFEIDHIIPYSISFDDSSSNKLLVLAESNQAKSNQTPYEFISSGNAGIKWEDYEAYCRKFKDGDSSLLDSTQRSKKFAKMMKTDTSSKYDIGFLARNLNDTRYATIVFRDALEDYANNHLVEDKPMFKVVCINGSVTSFLRKNFDDSSYAKKDRDKNIHHAVDASIISIFSNETKTLFNQLTQFADYKLFKNTDGSWKKIDPKTGVVTEVTDENWKQIRVRNQVSEIAKVIEKYIQDSNIERKARYSRKIENKTNISLFNDTVYSAKKVGYEDQIKRKNLKTLDIHESAKENKNSKVKRQFVYRKLVNVSLLNNDKLADLFAEKEDILMYRANPWVINLAEQIFNEYTENKKIKSQNVFEKYMLDLTKEFPEKFSEFLVKSMLRNKTAIIYDDKKNIVHRIKRLKMLSSELKENKLSNVIIRSKNQSGTKLSYQDTINSLALMIMRSIDPTAKKQYIRVPLNTLNLHLGDHDFDLHNMDAYLKKPKFVKYLKANEIGDEYKPWRVLTSGTLLIHKKDKKLMYISSFQNLNDVIEIKNLIETEYKENDDSDSKKKKKANRFLMTLSTILNDYILLDAKDNFDILGLSKNRIDEILNSKLGLDKIVK

SEQ ID NO: 333 - protein, 1269 aa, Mycoplasma gallisepticum; identical to SEQ ID NO: 332
  Mycoplasma gallisepticum str. F

SEQ ID NO: 334 - protein, 1270 aa, Mycoplasma gallisepticum
MNNSIKSKPEVTIGLDLGVGSVGWAIVDNETNIIHHLGSRLFSQAKTAEDRRSFRGVRRLIRRRKYKLKRFVNLIWKYNSYFGFKNKEDILNNYQEQQKLHNTVLNLKLEALNAKIDPKALSWILHDYLKNRGHFYEDNRDFNVYPTEELANYFDEFGYYKGIIDSKNDDDDKLEEGLTKYKFSNQHWLEEVKKVLSNQTGLPEKFKEEYESLFSYVRNYSEGPGSINSVSPYGIYHLDEKEGKVVQKYNNIWDKTIGKCSIFPDEYRAPKNSPIAMIFNEINELSTIRSYSIYLTGWFINQEFKKAYLNKLLDLLIKTNSEKPIDARQFKKLREETIAESIGKETLKDVESEEKLEKDDHKWKLKGLKLNTNGKIQYNDLSSLAKFVHKLKQHLKLDFLLEDQYTPLDKINFLQSLYVYLGKHLRYSNRVDSANLKEFSDSSRLFERVLQEQKDGLFKLFEQTDKDDEKILTQTHSLSTKAMLLAITRMTNLDNDEDNQKNNDKGWNFEAIKNFDQKFIDITKTNNNLSLKQDKRYLDDQFINDAILSPGVKRILREATKVFNAILKQFSEEYDVTKVVIELARELSEEKELENTKNYKKLIKKNGDKISEGLKALGIAEDKIEEILKSPTKSYKVLLWLQQDHIDPYSQKEIAFDDILTKTEKTEIDHIIPYSISFDDSSSNKLLVLAESNQAKSNQTPYEFINSGKAEITWEVYEAYCHKFKNGDSSLLDSTQRSKKFAKMMKTDTSSKYDIGFLARNLNDTRYATIVFRDALKDYANNHLVEDKPMFKVVCINGGVTSFLRKNFDPKSWYAKKDRDKNIHHAVDASIISIFSNETKTLFNQLTKFADYKLFKNTDGSWKKIDPKTGVVSEVTDENWKQIRVRNQVSEIAKVIDKYIQDSNIERKARYSRKIENKTNISLFNDTVYSAKKVGYEDQIKRKNLKTLDIHESAEENKNSKVKKQFVYRKLVNVSLLNNDKLADLFAEKEDILMYRANPWVINLAEQIFNEYTENKKIKSQNVFEKYMLDLTKEFPEKFSEAFVKSMIRNKTAIIYNVEKDVVHRIKRLKILSSELKENKWSNVIIRSKNESGTKLSYQDTINSIALMIMRSIDPTAKKQYIRVPLNTLNLHLGDQDFDLHNIDAYLKKPKFVKYLKANEIGDEYKPWRVLTSGTLLIHKKDKKLMYISSFQNLNDLIEIKNLIETEYKENVDSDPKKKKKASQILRSLSVILNDYILLDAKYNFDILGLSKNKIDEILNSKLDLDKIAK

SEQ ID NO: 335 - protein, 1236 aa, Mycoplasma mobile
MYFYKNKENKLNKKVVLGLDLGIASVGWCLTDISQKEDNKFPIILHGVRLFETVDDSDDKLLNETRRKKRGQRRRNRRLFTRKRDFIKYLIDNNIIELEFDKNPKILVRNFIEKYINPFSKNLELKYKSVTNLPIGFHNLRKAAINEKYKLDKSELIVLLYFYLSLRGAFFDNPEDTKSKEMNKNEIEIFDKNESIKNAEFPIDKIIEFYKISGKIRSTINLKFGHQDYLKEIKQVFEKQNIDFMNYEKFAMEEKSFFSRIRNYSEGPGNEKSFSKYGLYANENGNPELIINEKGQKIYTKIFKTLWESKIGKCSYDKKLYRAPKNSFSAKVFDITNKLTDWKHKNEYISERLKRKILLSRFLNKDSKSAVEKILKEENIKFENLSEIAYNKDDNKINLPIINAYHSLTTIFKKHLINFENYLISNENDLSKLMSFYKQQSEKLFVPNEKGSYEINQNNNVLHIFDAISNILNKFSTIQDRIRILEGYFEFSNLKKDVKSSEIYSEIAKLREFSGTSSLSFGAYYKFIPNLISEGSKNYSTISYEEKALQNQKNNFSHSNLFEKTWVEDLIASPTVKRSLRQTMNLLKEIFKYSEKNNLEIEKIVVEVTRSSNNKHERKKIEGINKYRKEKYEELKKVYDLPNENTTLLKKLWLLRQQQGYDAYSLRKIEANDVINKPWNYDIDHIVPRSISFDDSFSNLVIVNKLDNAKKSNDLSAKQFIEKIYGIEKLKEAKENWGNWYLRNANGKAFNDKGKFIKLYTIDNLDEFDNSDFINRNLSDTSYITNALVNHLTFSNSKYKYSVVSVNGKQTSNLRNQIAFVGIKNNKETEREWKRPEGFKSINSNDFLIREEGKNDVKDDVLIKDRSFNGHHAEDAYFITIISQYFRSFKRIERLNVNYRKETRELDDLEKNNIKFKEKASFDNFLLINALDELNEKLNQMRFSRMVITKKNTQLFNETLYSGKYDKGKNTIKKVEKLNLLDNRTDKIKKIEEFFDEDKLKENELTKLHIFNHDKNLYETLKIIWNEVKIEIKNKNLNEKNYFKYFVNKKLQEGKISFNEWVPILDNDFKIIRKIRYIKFSSEEKETDEIIFSQSNFLKIDQRQNFSFHNTLYWVQIWVYKNQKDQYCFISIDARNSKFEKDEIKINYEKLKTQKEKLQIINEEPILKINKGDLFENEEKELFYIVGRDEKPQKLEIKYILGKKIKDQKQIQKPVKKYFPNWKKVNLTYMGEIFKK

SEQ ID NO: 336 - protein, 1265 aa, Mycoplasma ovipneumoniae
  Mycoplasma ovipneumoniae SC01
MHNKKNITIGFDLGIASIGWAIIDSTTSKILDWGTRTFEERKTANERRAFRSTRRNIRRKAYRNQRFINLILKYKDLFELKNISDIQRANKKDTENYEKIISFFTEIYKKCAAKHSNILEVKVKALDSKIEKLDLIWILHDYLENRGFFYDLEEENVADKYEGIEHPSILLYDFFKKNGFFKSNSSIPKDLGGYSFSNLQWVNEIKKLFEVQEINPEFSEKFLNLFTSVRDYAKGPGSEHSASEYGIFQKDEKGKVFKKYDNIWDKTIGKCSFFVEENRSPVNYPSYEIFNLLNQLINLSTDLKTTNKKIWQLSSNDRNELLDELLKVKEKAKIISISLKKNEIKKIILKDFGFEKSDIDDQDTIEGRKIIKEEPTTKLEVTKHLLATIYSHSSDSNWININNILEFLPYLDAICIILDREKSRGQDEVLKKLTEKNIFEVLKIDREKQLDFVKSIFSNTKFNFKKIGNFSLKAIREFLPKMFEQNKNSEYLKWKDEEIRRKWEEQKSKLGKTDKKTKYLNPRIFQDEIISPGTKNTFEQAVLVLNQIIKKYSKENIIDAIIIESPREKNDKKTIEEIKKRNKKGKGKTLEKLFQILNLENKGYKLSDLETKPAKLLDRLRFYHQQDGIDLYTLDKINIDQLINGSQKYEIEHIIPYSMSYDNSQANKILTEKAENLKKGKLIASEYIKRNGDEFYNKYYEKAKELFINKYKKNKKLDSYVDLDEDSAKNRFRFLTLQDYDEFQVEFLARNLNDTRYSTKLFYHALVEHFENNEFFTYIDENSSKHKVKISTIKGHVTKYFRAKPVQKNNGPNENLNNNKPEKIEKNRENNEHHAVDAAIVAIIGNKNPQIANLLTLADNKTDKKFLLHDENYKENIETGELVKIPKFEVDKLAKVEDLKKIIQEKYEEAKKHTAIKFSRKTRTILNGGLSDETLYGFKYDEKEDKYFKIIKKKLVTSKNEELKKYFENPFGKKADGKSEYTVLMAQSHLSEFNKLKEIFEKYNGFSNKTGNAFVEYMNDLALKEPTLKAEIESAKSVEKLLYYNFKPSDQFTYHDNINNKSFKRFYKNIRIIEYKSIPIKFKILSKHDGGKSFKDTLFSLYSLVYKVYENGKESYKSIPVTSQMRNFGIDEFDFLDENLYNKEKLDIYKSDFAKPIPVNCKPVFVLKKGSILKKKSLDIDDFKETKETEEGNYYFISTISKRFNRDTAYGLKPLKLSVVKPVAEPSTNPIFKEYIPIHLDELGNEYPVKIKEHTDDEKLMCTIK

SEQ ID NO: 337 - protein, 1314 aa, Mycoplasma synoviae
MLRLYCANNLVLNNVQNLWKYLLLLIFDKKIIFLFKIKVILIRRYMENNNKEKIVIGFDLGVASVGWSIVNAETKEVIDLGVRLFSEPEKADYRRAKRTTRRLLRRKKFKREKFHKLILKNAEIFGLQSRNEILNVYKDQSSKYRNILKLKINALKEEIKPSELVWILRDYLQNRGYFYKNEKLTDEFVSNSFPSKKLHEHYEKYGFFRGSVKLDNKLDNKKDKAKEKDEEEESDAKKESEELIFSNKQWINEIVKVFENQSYLTESFKEEYLKLFNYVRPFNKGPGSKNSRTAYGVFSTDIDPETNKFKDYSNIWDKTIGKCSLFEEEIRAPKNLPSALIFNLQNEICTIKNEFTEFKNWWLNAEQKSEILKFVFTELFNWKDKKYSDKKFNKNLQDKIKKYLLNFALENFNLNEEILKNRDLENDTVLGLKGVKYYEKSNATADAALEFSSLKPLYVFIKFLKEKKLDLNYLLGLENTEILYFLDSIYLAISYSSDLKERNEWFKKLLKELYPKIKNNNLEIIENVEDIFEITDQEKFESFSKTHSLSREAFNHIIPLLLSNNEGKNYESLKHSNEELKKRTEKAELKAQQNQKYLKDNFLKEALVPLSVKTSVLQAIKIFNQIIKNFGKKYEISQVVIEMARELTKPNLEKLLNNATNSNIKILKEKLDQTEKFDDFTKKKFIDKIENSVVFRNKLFLWFEQDRKDPYTQLDIKINEIEDETEIDHVIPYSKSADDSWFNKLLVKKSTNQLKKNKTVWEYYQNESDPEAKWNKFVAWAKRIYLVQKSDKESKDNSEKNSIFKNKKPNLKFKNITKKLFDPYKDLGFLARNLNDTRYATKVFRDQLNNYSKHHSKDDENKLFKVVCMNGSITSFLRKSMWRKNEEQVYRFNFWKKDRDQFFHHAVDASIIAIFSLLTKTLYNKLRVYESYDVQRREDGVYLINKETGEVKKADKDYWKDQHNFLKIRENAIEIKNVLNNVDFQNQVRYSRKANTKLNTQLFNETLYGVKEFENNFYKLEKVNLFSRKDLRKFILEDLNEESEKNKKNENGSRKRILTEKYIVDEILQILENEEFKDSKSDINALNKYMDSLPSKFSEFFSQDFINKCKKENSLILTFDAIKHNDPKKVIKIKNLKFFREDATLKNKQAVHKDSKNQIKSFYESYKCVGFIWLKNKNDLEESIFVPINSRVIHFGDKDKDIFDFDSYNKEKLLNEINLKRPENKKFNSINEIEFVKFVKPGALLLNFENQQIYYISTLESSSLRAKIKLLNKMDKGKAVSMKKITNPDEYKIIEHVNPLGINLNWTKKLENNN

SEQ ID NO: 338 - protein, 1304 aa, Mycoplasma synoviae
  Mycoplasma synoviae 53
MLNNVQNLWKYLLLLIFDKKIIFLFKIKVILIRRYMENNNKEKIVIGFDLGVASVGWSIVNAETKEVIDLGVRLFSEPEKADYRRAKRTTRRLLRRKKFKREKFHKLILKNAEIFGLQSRNEILNVYKDQSSKYRNILKLKINALKEEIKPSELVWILRDYLQNRGYFYKNEKLTDEFVSNSFPSKKLHEHYEKYGFFRGSVKLDNKLDNKKDKAKEKDEEEESDAKKESEELIFSNKQWINEIVKVFENQSYLTESFKEEYLKLFNYVRPFNKGPGSKNSRTAYGVFSTDIDPETNKFKDYSNIWDKTIGKCSLFEEEIRAPKNLPSALIFNLQNEICTIKNEFTEFKNWWLNAEQKSEILKFVFTELFNWKDKKYSDKKFNKNLQDKIKKYLLNFALENFNLNEEILKNRDLENDTVLGLKGVKYYEKSNATADAALEFSSLKPLYVFIKFLKEKKLDLNYLLGLENTEILYFLDSIYLAISYSSDLKERNEWFKKLLKELYPKIKNNNLEIIENVEDIFEITDQEKFESFSKTHSLSREAFNHIIPLLLSNNEGKNYESLKHSNEELKKRTEKAELKAQQNQKYLKDNFLKEALVPLSVKTSVLQAIKIFNQIIKNFGKKYEISQVVIEMARELTKPNLEKLLNNATNSNIKILKEKLDQTEKFDDFTKKKFIDKIENSVVFRNKLFLWFEQDRKDPYTQLDIKINEIEDETEIDHVIPYSKSADDSWFNKLLVKKSTNQLKKNKTVWEYYQNESDPEAKWNKFVAWAKRIYLVQKSDKESKDNSEKNSIFKNKKPNLKFKNITKKLFDPYKDLGFLARNLNDTRYATKVFRDQLNNYSKHHSKDDENKLFKVVCMNGSITSFLRKSMWRKNEEQVYRFNFWKKDRDQFFHHAVDASIIAIFSLLTKTLYNKLRVYESYDVQRREDGVYLINKETGEVKKADKDYWKDQHNFLKIRENAIEIKNVLNNVDFQNQVRYSRKANTKLNTQLFNETLYGVKEFENNFYKLEKVNLFSRKDLRKFILEDLNEESEKNKKNENGSRKRILTEKYIVDEILQILENEEFKDSKSDINALNKYMDSLPSKFSEFFSQDFINKCKKENSLILTFDAIKHNDPKKVIKIKNLKFFREDATLKNKQAVHKDSKNQIKSFYESYKCVGFIWLKNKNDLEESIFVPINSRVIHFGDKDKDIFDFDSYNKEKLLNEINLKRPENKKFNSINEIEFVKFVKPGALLLNFENQQIYYISTLESSSLRAKIKLLNKMDKGKAVSMKKITNPDEYKIIEHVNPLGINLNWTKKLENNN

SEQ ID NO: 339 - protein, 1401 aa, Myroides injenensis
  Myroides injenensis M09-0166
MKRILGLDLGTTSIGWAYVHEAENVNETSSIQKVGVRVNPLTTEEQTNFEKGKPITTNASRTLARSARRNLQRYKLRRDNLIQILKENNWINNTTSLTETGNHSTFETYELRNKAASEKLTLDQLSRVLLMLNKKRGYKSSRKVNSKEEGQLIDGMEVAKKLYHEQLTPGQLSLQLMNQGVKKLPDYYRSDLNQELESIWNFQQQFYPNILTDKFKEEINGKGLTSTSSAFWNIYNFNTAENKGSRDEKKKQALQWRSEALSKQLSKEIVAYIIADLNGQIYNSSGYLGAISDRSKELYFNNLTVGQYLFKQLKSNPHTSLKNQVFYRQDYLNEFEKIWETQSKFYPKELTAALKREIRDVIIFYQRKLKSQKGLISFCEFEQKQKTINGKTKTIGHRVIPKSSPLFQEFKIWQQLHNVVLRNKKTNEIVSLADEQKVHLFEELNLKGKLKSNQVLKLIENKPKDWELNYTELEGNNTNKALYNAYLDILDIEGYDVRNELKVKLNKDDIELSDLDVNASEIKEMIFSVFKHLGINTEILEFDATLEDKVFEKQASYQLWHLLYSYEEDNSPTGLDRLYNLLHKKFGFKLNHAKLIGNVLFQDDYGSLSSKAIKNIFPYITENNYYTACELAGYKHSKHSLTKEENETRELKNRLTILPKNSLRNPVVEKIINQMINVVNTLIDEENNILIAQGKEPNFQFDEIRIELARELKKNAKEREELTKSINKSKTDHEKIIKILQKEDGIKNPTRNDIVRFKLYSELKNNGYKDLYTNEYIERKDIFTKEYDIEHIIPQSKLFDDSFSNKTLVRRNVNLKKGNQTAYDFILCEYGQEKANEFETRITNLYNLGKDEGISKSKFKKLLMQESEIGNGFIERDLRETQYIAKKAKSLLLEITRNVISTSGSITDRLREDWGLINVMKELNLQKYRDAGLTEFVKMKDGNKKEVIIDWTKRNDHRHHAMDALTIAFTKHNHIQYLNHLNARKNVNNELHNNIIAIEKLETTLVSDERGNKKRIFKEPIANFRTIAKSHLEAILVSHKAKNKVVTKNINKISGKKISQQTLTPRGQLHKETIYGKIRQYVSKQEKVGPKFTIEVIEQVSNPTYRNLLLKRLEENNNDPKKAFGGKNSLNKNPIYINLEKNIKVPEVLKLVWLEDNYTIRKEISPDLKIDKVIDQGVKQILQNRLAQYKGDSKLAFSNLDANPIWLNEDKGIAIKRVTISGIATAQPLHRKKDHLGQPILDHNGQEIPVDFISTGNNHHVAIYEDENGKLQESVVSHFEAVERVNQKLPIIDKTFNQHLGWKFLFTMKQNELFLFPSDDFNPNEIDLFDKQNYTVISKHLFRIQKLSTKDYSFRHHLETNVEEIKDLKTITWRREGLNGIQNIIKVRTNHLGEIIHIGEY

SEQ ID NO: 340 - protein, 1466 aa, Myroides odoratus
  Myroides odoratus DSM 2801
MKNILGLDLGTNSIGWALVKEDFENKQGEILGLGSRIIPMSQDILGEFGRGNSISQTADRTGYRGVRRLRERHLLRRERLHRVLNILGFLPNHYAKEIDFTKRLGKFINHAEPKLSFDKEFIFKDSFNEMLKDFQQNQPGFIINKHGEEALVPYDWTIYYLRKKALTQKIDKEELAWILLNFNQKRGYYQLRGEEEEENTNKLVEFYSLKIIDVIADNEVNKKGEVWYSLHLENGWIYRRSSKISLVDWKDKVRDFIVTTDVNDDGSEKLDKDGVVKRSFRAPSADDWTLLKKKTEQDIDNSNKTVGAYIYENLLLNPKQKIKGKLVRTIERKFYKDELKQILEKQKEFHQELQNEQLLQDCVRELYKYNEQHQQMLESKDFVHLFLNDIIFYQRPLRSQKSLISNCTLEKRVSRDGVVFPIKVISKSNPYYQEFRLLQWLQNLAIYRKDDDVNVTQEFLNSIESWENLLQFLNAKKEIKQEQLIKFLLEQKGLKGNSLKTAILTYRWNYVTDKVYPMNETRSLIQDKLKKVENVATDFLSFDNEMALWHIIYSVNDKIEYEKALAKFASKHNLDEISFVESFKKFPPFKSDYGSFSEKAIKKLLPLMRFGSVWNKNNIVPSVLDRIDKILTGEYDEKIKIRVREKAEQFQLNQIEDFQNLPLWLAQYVVYDRHSEAEIAGKWNSVKDLENYLKEFKQHSLRNPIVEQIITETLRVVKDIWQQYGNGVQNFFDEIHIELGREMKNTADERKRITNSVTENENTNLRIKALLVELKEDTNIENVRPHSPMQQEILKIYEEGVLNAVENIDEDILKISKTAQPSKSELIRYKLWLEQKYQSPYTGEMIPLSRLFTSDYEIEHVIPQSRYFDDSLSNKVICEAAVNKRKDNQLGLEFIKNHHSEKIELGNGRTAQVLEVEAYESFVKKNYDKNRGKRNKLLLEDVPEKMIERQLNDTRYISKFVTHLLSNIVRKDEVNSKDDGINSKNIIPGNGKITSQLKQDWGLNDVWNELILPRFERMNNLTNSTDFTSTNTNGKIIPTVPLEYSKGFSKKRIDHRHHALDALVIALATRDHVNLLNNESALPKKDRTKEEQKSFRFDLQVNLRNKEKYFNVKEGREKEKFTTFKKPWNTLTQDTRDALENMVVSFKQNLRVINKATNYYESYTDENGNLRLDKYGNPKKELISQKGTNWAIRKSLHKETVSGQIHLDRVKVTKGKIVTATRKSLDSSFNEKSIESITDTGIQKILRNYLKAKDNKPDVAFSPEGIEELNKSISVYNEGKNHQPIIKVRIFEQGSKFPVGETGNKIAKFVEAAKGTNLFFGIYQDKTGKRSYDTIPLNLVIERLKQGLSPVPETNEKGHQLLFHLSPNDLVYVPTIDDNEQLDSNRVYKFTDSSDTTCNFIPSNISAIIFNINSKEQEKRGINYPIQNELGVGSPQSKNQKSFDGFMIKEVCIKLKVDRLGNISKT

SEQ ID NO: 341 - protein, 1077 aa, Neisseria bacilliformis
  Neisseria bacilliformis ATCC BAA-1200
MQQKPQRYILGLDLGIASVGWACVWADENEHPTGLLDCGVRTFERAEVPKTGDSLALARRQARSVRRLIRRRAHRLLRLRRLLKREGVLLSADFNENGLVRGLPIDAWALRVAGLDRKLSNKEWAAVLLHLVKHRGYLSQRKNETQSKDKELGRLLAGVNGNREALQNRSDEYRTAAELAVKKFAAENNGSLRNKGGDYSHTFDRKDLQRELHLLFERQRALDNPFTSSEMEAAVDELLMKQRSALQGEAVLKMLGRCTFEPSEYKAAKNTYSAERFVWLTKLNNLRIQYNGEERALSEAERRLLLDEPYQKAKLTYKQVRTILELPESAVFKGLRYGHGEDGLKAESGTLMEMKAYHAVRKALKDAGLEGEWENRIRNPELLDAIGTAFSLYKTDEDIRANLAAFRLSENVLEALLAGLNFDKFVHLSLKALAKILPLMEQGMRYDEACKEAYGDHYGAKEQEDHRLLPPFVADDIRNPVVFRTLTQARKIVNEIVRRYGSPLRVHIETGREVGKSFSDRKEIEKRQEENRKERERAAAHFKELFPNFAGEPKAQDILKLRLYEQQHGKCLYSGKEIDLRRLPEKGYVEIDHALPFSRTWDDSFNNKVLVLGKENQDKRNRTPYEYLDGKGNSGAWRAFAERVSGCRFPYAKKQRLLTQKLDEKTEQGFLERNLNDTRYVARFLCQFIEEKMHLEGAGKKRVFASNGQITALLRGFWGLKKVREENDRHHALDAVVVACSSVSMQQKITRHFRYREELEHIDRETGEVIHGFPQPWEFFRQEVMTRVFSDDPVSELAEKLDSRPEAVHEFVTPLFVSRAPHRKVTGQGHLETIRSAKRLDEKISVVKLPLTQLKTKDIERIVGYPNREPALYDALAARLAAFKDDPAKAFSEPFYKTGKDGKCGVLVKAVRVENVQKSGLLVRKDESGKMQGVADNATMVRVDVFGKNGKNYLVPVYAWQVEKGELPNRAVVAYADEEDWDEMDDSFEFKFSLYPNDLVEVVTKKDKFFGYYSGFNRATGAINIKEHDLSKSKVKNGVYEGIGVKTAQSFQKYQVDTLGKTIRLCKPEKRMGFKKK

SEQ ID NO: 342 - protein, 1082 aa, Neisseria cinerea
  Neisseria cinerea ATCC 14685
MAAFKPNPMNYILGLDIGIASVGWAIVEIDEEENPIRLIDLGVRVFERAEVPKTGDSLAAARRLARSVRRLTRRRAHRLLRARRLLKREGVLQAADFDENGLIKSLPNTPWQLRAAALDRKLTPLEWSAVLLHLIKHRGYLSQRKNEGETADKELGALLKGVADNTHALQTGDFRTPAELALNKFEKESGHIRNQRGDYSHTFNRKDLQAELNLLFEKQKEFGNPHVSDGLKEGIETLLMTQRPALSGDAVQKMLGHCTFEPTEPKAAKNTYTAERFVWLTKLNNLRILEQGSERPLTDTERATLMDEPYRKSKLTYAQARKLLDLDDTAFFKGLRYGKDNAEASTLMEMKAYHAISRALEKEGLKDKKSPLNLSPELQDEIGTAFSLFKTDEDITGRLKDRVQPEILEALLKHISFDKFVQISLKALRRIVPLMEQGNRYDEACTEIYGDHYGKKNTEEKIYLPPIPADEIRNPVVLRALSQARKVINGVVRRYGSPARIHIETAREVGKSFKDRKEIEKRQEENRKDREKSAAKFREYFPNFVGEPKSKDILKLRLYEQQHGKCLYSGKEINLGRLNEKGYVEIDHALPFSRTWDDSFNNKVLALGSENQNKGNQTPYEYFNGKDNSREWQEFKARVETSRFPRSKKQRILLQKFDEDGFKERNLNDTRYINRFLCQFVADHMLLTGKGKRRVFASNGQITNLLRGFWGLRKVRAENDRHHALDAVVVACSTIAMQQKITRFVRYKEMNAFDGKTIDKETGEVLHQKAHFPQPWEFFAQEVMIRVFGKPDGKPEFEEADTPEKLRTLLAEKLSSRPEAVHKYVTPLFISRAPNRKMSGQGHMETVKSAKRLDEGISVLRVPLTQLKLKDLEKMVNREREPKLYEALKARLEAHKDDPAKAFAEPFYKYDKAGNRTQQVKAVRVEQVQKTGVWVHNHNGIADNATIVRVDVFEKGGKYYLVPIYSWQVAKGILPDRAVVQGKDEEDWTVMDDSFEFKFVLYANDLIKLTAKKNEFLGYFVSLNRATGAIDIRTHDTDSTKGKNGIFQSVGVKTALSFQKYQIDELGKEIRPCRLKKRPPVR

SEQ ID NO: 343 - protein, 1081 aa, Neisseria flavescens
  Neisseria flavescens SK114
MTAFKPNPINYILGLDIGIASVGWAMVEIDEEENPIRLIDLGVRVFERAEVPKTGDSLAAARRLARSVRRLTRRRAHRLLRARRLLKREGVLQAADFDENGLIKSLPNTPWQLRAAALDRKLTPLEWSAVLLHLIKHRGYLSQRKNEGETADKELGALLKGVADNAHALQTGDFRTPAELAVNKFEKESGHIRNQRGDYSHTFSRKDLQAELVLLFEKQKEFGNPHISDGLKEGIETLLMAQRPALSGDAVQKMLGYCTFEPTEPKAAKNTYTAERFIWLTKLNNLRILEQGSERPLTDTERATLIDMPYKNKLTYAKARELLGLDDTAFFKGLRYGKDNAESATLMEMKAYHAIRRALEKEGLKDKKSPLSLSPELQDEIGTAFSLFKTDEDITGRLKGCLQPEILDALLKHINFDKFVQISLKALRRIVPLMEQGKRYDEACAETYGDHYGEKNSEEMLYLPPIPADEIRNPVVLRALSQARKVINGVVRRYGSPARIHIETAREVGKSFKDRKEIEKRQEENRKDREKAAAKFREYFPNFVGEPKSKDILKLRLYEQQHGKCLYSGKAIDIRRLNGKGYVEIDHALPFSRTWDDSFNNKVLVLGSENQNKGNRTPYEYLNGKDNSREWLEFKARVETSRFPHSKKQRVLLQKFDEKGFKERNLNDTRYVNRFLCQFVADHMQLTGKGKRRVFASNGQITNLLRGFWGLHKVRAENDRHHALDAVVVACSTVAMQQKITCFVRYKEMNAFDGKTVDKETGEVLHQKTHFPQPWEFFAQEVMIRVFGKPDGKPEFEEADTPEKLRALLAEKLSSRPEAVHEYVTPLFVSRAPNRKMSGAHKDTLRSAKRFVKHNEKISVKRVWLTEIKLADLENMVNYKNGREIELYEALKARLGAYGGNAKQAFDPKDNPFYKKGGQLVKAVRVEKTQESGVLLNKKNAYTIADNGDMVRVDVFCKVDKKGKNQYFIVPIYAWQVAENILPDIDCKGYRIDDSYTFCFSLHKYDLIAFQKDEKSKVEFAYYINCDSSNGRFYLAWHDKGSKEQQFRISTQNLVLMQKYQIDELGKEIRPCRLKKRPPVR

SEQ ID NO: 344 - protein, 1082 aa, Neisseria lactamica
MAAFKPNPMNYILGLDIGIASVGWAMVEIDKEENPIRLIDLGVRVFERAEVPKTGDSLAMARRLARSVRRLTRRRAHRLLRARRLLKREGVLQDADFDENGLVKSLPNTPWQLRAAALDRKLTCLEWSAVLLHLIKHRGYLSQRKNEGETADKELGALLKGVADNAHALQTGDFRTPAELALNKFEKESGHIRNQRGDYSHTFSRKDLQAELNLLFEKQKEFSNPHVSDSLKEGIETLLMAQRPALSGDAVQKMLGHCTFEPAEPKAAKNTYTAERFIWLTKLNNLRILEQGSERPLTDTERATLMDEPYRKSKLTYAQARKLLGLEDTAFFKGLRYGKDNAEAPTLMEMKAYHAISRALEKEGLKDKKSPLNLSTELQDEIGTAFSLFKTDKDITGRLKDRVQPEILEALLKHISFDKFVQISLKALRRIVPLMEQGKRYDEACAEIYGDHYCKKNAEEKIYLPPIPADEIRNPVVLRALSQARKVINCVVRRYGSPARIHIETAREVGKSFKDRKEIEKRQEENRKDREKAAAKFREYFPNFVGEPKSKDILKLRLYEQQHGKCLYSGKEINLVRLNEKGYVEIDHALPFSRTWDDSFNNKVLVLGSENQNKGNQTPYEYFNGKDNSREWQEFKARVETSRFPRSKKQRILLQKFDEEGFKERNLNDTRYVNRFLCQFVADHILLTGKGKRRVFASNGQITNLLRGFWGLRKVRAENDRHHALDAVVVACSTVAMQQKITRFVRYKEMNAFDGKTIDKETGEVLHQKAHFPQPWEFFAQEVMIRVFGKPDGKPEFEEADTPEKLRTLLAEKLSSRPEAVHEYVTPLFVSRAPNRKMSGQGHMETVKSAKRLDEGISVLRVPLTQLKLKGLEKMVNREREPKLYDALKAQLETHKDNPAKAFAEPFYKYDKAGNRTQQVKAVRIEQVQKTGVWVRNHNGIADNATMVRVDVFEKGGKYYLVPIYSWQVAKGILPDRAVVAFKDEEDWTVMDDSFEFRFVLYANDLIKLTAKKNEFLGYFVSLNRATGAIDIRTHDTDSTKGKNGIFQSVGVKTALSFQKNQIDELGKEIRPCRLKKRPPVR

SEQ ID NO: 345 - protein, 1082 aa, Neisseria meningitidis
MAAFKPNPINYILGLDIGIASVGWAMVEIDEDENPICLIDLGVRVFERAEVPKTGDSLAMARRLARSVRRLTRRRAHRLLRARRLLKREGVLQAADFDENGLIKSLPNTPWQLRAAALDRKLTPLEWSAVLLHLIKHRGYLSQRKNEGETADKELGALLKGVADNAHALQTGDFRTPAELALNKFEKESGHIRNQRGDYSHTFSRKDLQAELNLLFEKQKEFGNPHISDGLKEGIETLLMTQRPALSGDAVQKMLGHCTFEPAEPKAAKNTYTAERFIWLTKLNNLRILEQGSERPLTDTERTTLIDEPYRKSKLTYAQARKLLELDNTAFFKGLRYGKDNAEASTLMEMKAYHAISRALEKEGLKDKKSPLNLSPELQDEIGTAFSLFKTDEDITGRLKDRVQPEILEALLKHISFDKFVQISLKALRRIVPLMEQGKRYDEACAEIYGDHYGKKNTEEKIDLPPIPADEIRNPVVLRALSQARKVINGVVRRYGSPARIHIETAREVGKSFKDRKEIEKRQEENRKDREKAATKFREYFPNFVGEPKSKDILKLRLYEQQHGKCLYSGKEINLGRLNEKGYVEIDHALPFSRTWDDSFNNKVLVLGSENQNKGNQTPYEYFNGKDNSREWQEFKARVETSRFPRSKKQRILLQKFDEEGFKERNLNDTRYVNRFLCQFVADHMLLTGKGKRRVFASNGQITNLLRGFWGLRKVRAENDRHHALDAVVVACSTVAMQQKITRFVRYKEMNAFDGKTIDKETGEVLHQKTHFPQPWEFFAQEVMIRVFGKPDGKPEFEEADTPEKLRTLLAEKLSSRPEAVHEYVTPLFVSRAPNRKMSGQGHMETVKSAKRLDEGVSVLRVPLTQLKLKDLEKMVNREREPKLYEALKARLEAHKDDPAKAFAEPFYKYDKAGNRTQQVKAVRVEQVQKTGVWVRNHNGIADNATMVRVDVFEKGDKYYLVPIYSWQVAKGILPDRAVVQGKDEEDWQLIDDSFNFKFSLHPNDLVEVITKKARMFGYFASCHRGTGNINIRIHDLDHKIGKNGILEGIGVKTALSFQKYQIDELGKEIRPCRLKKRPPVR

SEQ ID NO: 346 - protein, 1082 aa, Neisseria meningitidis
  Neisseria meningitidis 2007056
MAAFKPNPINYILGLDIGIASVGWAMVEIDEDENPICLIDLGVRVFERAEVPKTGDSLAMARRLARSVRRLTRRRAHRLLRARRLLKREGVLQAADFDENGLIKSLPNTPWQLRAAALDRKLTPLEWSAVLLHLIKHRGYLSQRKNEGETADKELGALLKGVADNAHALQTGDFRTPAELALNKFEKESGHIRNQRGDYSHTFSRKDLQAELILLFEKQKEFGNPHVSGGLKEGIETLLMTQRPALSGDAVQKMLGHCTFEPAEPKAAKNTYTAERFIWLTKLNNLRILEQGSERPLTDTERATLMDEPYRKSKLTYAQARKLLGLEDTAFFKGLRYGKDNAEASTLMEMKAYHAISRALEKEGLKDKKSPLNLSPELQDEIGTAFSLFKTDEDITGRLKDRIQPEILEALLKHISFDKFVQISLKALRRIVPLMEQGKRYDEACAEIYGDHYGKKNTEEKIYLPPIPADEIRNPVVLRALSQARKVINGVVRRYGSPARIHIETAREVGKSFKDRKEIEKRQEENRKDREKAAAKFREYFPNFVGEPKSKDILKLRLYEQQHGKCLYSGKEINLGRLNEKGYVEIDHALPFSRTWDDSFNNKVLVLGSENQNKGNQTPYEYFNGKDNSREWQEFKARVETSRFPRSKKQRILLQKFDEDGFKERNLNDTRYVNRFLCQFVADRMRLTGKGKKRVFASNGQITNLLRGFWGLRKVRAENDRHHALDAVVVACSTVAMQQKITRFVRYKEMNAFDGKTIDKETGEVLHQKTHFPQPWEFFAQEVMIRVFGKPDGKPEFEEADTPEKLRTLLAEKLSSRPEAVHEYVTPLFVSRAPNRKMSGQGHMETVKSAKRLDEGVSVLRVPLTQLKLKDLEKMVNREREPKLYEALKARLEAHKDDPAKAFAEPFYKYDKAGNRTQQVKAVRVEQVQKTGVWVRNHNGIADNATMVRVDVFEKGDKYYLVPIYSWQVAKGILPDRAVVQGKDEEDWQLIDDSFNFKFSLHPNDLVEVITKKARMFGYFASCHRGTGNINIRIHDLDHKIGKNGILEGIGVKTALSFQKYQIDELGEEIRPCRLKKRPPVR

SEQ ID NO: 347 - protein, 1082 aa, Neisseria meningitidis
  Neisseria meningitidis 63049
MAAFKPNPINYILGLDIGIASVGWAMVEIDEEENPIRLIDLSVRVFERAEVPKTGDSLAMARRLARSVRRLTRRRAHRLLRARRLLKREGVLQAADFDENGLIKSLPNTPWQLRAAALDRKLTPLEWSAVLLHLIKHRGYLSQRKNEGETADKELGALLKGVADNAHALQTGDFRTPAELALNKFEKESGHIRNQRGDYSHTFSRKDLQAELILLFEKQKEFGNPHVSGGLKEGIETLLMTQRPALSGDAVQKMLGHCTFEPAEPKAAKNTYTAERFVWLTKLNNLRILEQGSERPLTDTERATLMDEPYRKSKLTYAQARKLLGLEDTAFFKGLRYGKDNAEASTLMEMKAYHAISRALEKEGLKDKKSPLRLSPELQDEIGTAFSLFKTDEDITGRLKDRVQPEILEALLKHISFDKFVQISLKALRRIVPLMEQGKRYDEACAEIYGDHYGKKNAEEKIYLPPIPADEIRNPVVLRALSQARKVINGVVRRYGSPARIHIETAREVGKSFKDRKEIEKRQEENRKDREKAAAKFREYFPNFVGEPKSKDILKLRLYEQQHGKCLYSGKEINLGRLNEKGYVEIDHALPFSRTWDDSFNNKVLVLGSENQNKGNQTPYEYFNGKDNSREWQEFKARVETSRFPRSKKQRILLQKFDEDGFKERNLNDTRYVNRFLCQFVADRMRLTGKGKKRVFASNGQITNLLRGFWGLRKVRAENDRHHALDAVVVACSTVAMQQKITRFVRYKEMNAFDGKTIDKETGEVLHQKTHFPQPWEFFAQEVMIRVFGKPDGKPEFEEADTPEKLRTLLAEKLSSRPEAVHEYVTPLFVSRAPNRKMSGQGHMETVKSAKRLDEGVSVLRVPLTQLKLKDLEKMVNREREPKLYEALKARLEAHKDDPAKAFAEPFYKYDKAGNRTQQVKAVRVEQVQKTGVWVRNHNGIADNATMVRVDVFEKGDKYYLVPIYSWQVAKGILPDRAVVQGKDEEDWQLIDDSFNFKFSLHPNDLVEVITKKARMFGYFASCHRGTGNINIRIHDLDHKIGKNGILEGIGVKTALSFQKYQIDELGKEIRPCRLKKRPPVR

SEQ ID NO: 348 - protein, 1082 aa, Neisseria meningitidis
MAAFKPNSINYILGLDIGIASVGWAMVEIDEEENPIRLIDLGVRVFERAEVPKTGDSLAMARRLARSVRRLTRRRAHRLLRTRRLLKREGVLQAANFDENGLIKSLPNTPWQLRAAALDRKLTPLEWSAVLLHLIKHRGYLSQRKNEGETADKELGALLKGVAGNAHALQTGDFRTPAELALNKFEKESGHIRNQRSDYSHTFSRKDLQAELILLFEKQKEFGNPHVSGGLKEGIETLLMTQRPALSGDAVQKMLGHCTFEPAEPKAAKNTYTAERFIWLTKLNNLRILEQGSERPLTDTERATLMDEPYRKSKLTYAQARKLLGLEDTAFFKGLRYGKDNAEASTLMEMKAYHAISRALEKEGLKDKKSPLNLSPELQDEIGTAFSLFKTDEDITGRLKDRIQPEILEALLKHISFDKFVQISLKALRRIVPLMEQGKRYDEACAEIYGDHYGKKNTEEKIYLPPIPADEIRNPVVLRALSQARKVINGVVRRYGSPARIHIETAREVGKSFKDRKEIEKRQEENRKDREKAAAKFREYFPNFVGEPKSKDILKLRLYEQQHGKCLYSGKEINLGRLNEKGYVEIDHALPFSRTWDDSFNNKVLVLGSENQNKGNQTPYEYFNGKDNSREWQEFKARVETSRFPRSKKQRILLQKFDEDGFKERNLNDTRYVNRFLCQFVADRMRLTGKGKKRVFASNGQITNLLRGFWGLRKVRAENDRHHALDAVVVACSTVAMQQKITRFVRYKEMNAFDGKTIDKETGEVLHQKTHFPQPWEFFAQEVMIRVFGKPDGKPEFEEADTLEKLRTLLAEKLSSRPEAVHEYVTPLFVSRAPNRKMSGQGHMETVKSAKRLDEGVSVLRVPLTQLKLKDLEKMVNREREPKLYEALKARLEAHKDDPAKAFAEPFYKYDKAGNRTQQVKAVRVEQVQKTGVWVRNHNGIADNATMVRVDVFEKGDKYYLVPIYSWQVAKGILPDRAVVQGKDEEDWQLIDDSFNFKFSLHPNDLVEVITKKARMFGYFASCHRGTGNINIRIHDLDHKIGKNGILEGIGVKTALSFQKYQIDELGKEIRPCRLKKRPPVR

SEQ ID NO: 349 - protein, 1082 aa, Neisseria meningitidis
  Neisseria meningitidis 92045
MAAFKPNPINYILGLDIGIASVGWAMVEIDEEENPIRLIDLGVRVFERAEVPKTGDSLAMARRLARSVRRLTRRRAHRLLRARRLLKREGVLQAADFDENGLIKSLPNTPWQLRAAALDRKLTPLEWSAVLLHLIKHRGYLSQRKNEGETADKELGALLKGVADNAHALQTGDFRTPAELALNKFEKECGHIRNQRGDYSHTFSRKDLQAELNLLFEKQKEFGNPHVSGGLKEGIETLLMTQRPALSGDAVQKMLGHCTFEPAEPKAAKNTYTAERFIWLTKLNNLRILEQGSERPLTDTERATLMDEPYRKSKLTYAQARKLLGLEDTAFFKGLRYGKDNAEASTLMEMKAYHAISRALEKEGLKDKKSPLNLSPELQDEIGTAFSLFKTDEDITGRLKDRIQPEILEALLKHISFDKFVQISLKALRRIVPLMEQGKRYDEACAEIYGDHYGKKNTEEKIYLPPIPADEIRNPVVLRALSQARKVINGVVRRYGSPARIHIETAREVGKSFKDRKEIEKRQEENRKDREKAAAKFREYFPNFVGEPKSKDILKLRLYEQQHGKCLYSGKEINLVRLNEKGYVEIDHALPFSRTWDDSFNNKVLVLGSENQNKGNQTPYEYFNGKDNSREWQEFKARVETSRFPRSKKQRILLQKFDEEGFKERNLNDTRYVNRFLCQFVADHILLTGKGKRRVFASNGQITNLLRGFWGLRKVRAENDRHHALDAVVVACSTVAMQQKITRFVRYKEMNAFDGKTIDKETGEVLHQKTHFPQPWEFFAQEVMIRVFGKPDGKPEFEEADTPEKLRTLLAEKLSSRPEAVHEYVTPLFVSRAPNRKMSGQGHMETVKSAKRLDEGVSVLRVPLTQLKLKDLEKMVNREREPKLYEALKARLEAHKDDPAKAFAEPFYKYDKAGNRTQQVKAVRVEQVQKTGVWVRNHNGIADNATMVRVDVFEKGGKYYLVPIYSWQVAKGILPDRAVVQGKDEEDWQLIDDSFNFKFSLHPNDLVEVITKKARMFGYFASCHRGTGNINIRIHDLDHKIGKNGILEGIGVKTALSFQKYQIDELGKEIRPCRLKKRPPVR

SEQ ID NO: 350 - protein, 1081 aa, Neisseria meningitidis
  Neisseria meningitidis 93003
MAAFKPNPINYILGLDIGIASVGWAMVEIDEEENPIRLIDLGVRVFERAEVPKTGDSLAMARRLARSVRRLTRRRAHRLLRARRLLKREGVLQAADFDENGLIKSLPNTPWQLRAAALDRKLTPLEWSAVLLHLIKHRGYLSQRKNEGETADKELGALLKGVADNAHALQTGDFRTPAELALNKFEKESGHIRNQRGDYSHTFSRKDLQAELILLFEKQKEFGNPHVSGGLKEGIETLLMTQRPALSGDAVQKMLGHCTFEPAEPKAAKNTYTAERFIWLTKLNNLRILEQGSERPLTDTERATLMDEPYRKSKLTYAQARKLLGLEDTAFFKGLRYGKDNAEASTLMEMKAYHAISRALEKEGLKDKKSPLNLSPELQDEIGTAFSLFKTDEDITGRLKDRVQPEILEALLKHISFDKFVQISLKALRRIVPLMEQGKRYDEACAEIYGDHYGKKNTEEEIYLPPITADEIRNPVVLRALSQARKVINAVVRRYGSPARIHIETAREVGKSFKDRKEIEKRQEENRKDREKAAAKFREYFPNFVGEPKSKDILKLRLYEQQHGKCLYSGKEINLVRLNEKGYVEIDHALPFSRTWDDSFNNKVLVLGSENQNKGNQTPYEYFNGKENSREWQEFKARVETSRFPRSKKQRILLQKFDEDGFKERNLNDTRYVNRFLCQFVADRMRLTGKGKKRVFASNGQITNLLRGFWGLHKVRAENDRHHALDAVVVACSTIAMQQKITRFVRYKEMNAFDGKTIDKETGEVLHQKAHFPQPWEFFAQEVMIRVFGKPDGKPEFEEADTPEKLRTLLAEKLSSRPEAVHEYVTPLFVSRAPNRKMSGQGHMETVKSAKRLDEGISVLRVPLTQLKLKDLEKMVNRAREPKLYEALKARLEAHKDDPAKAFAEPFYKYDKAGNRTQQVKAVRVEQVQKTGVWVRNHNGIADNATMVRVDVFEKAGKYYLVPIYSWQVAKGILPDRAVVAYADEEDWTVIDESFRFKFVLYSNDLIKVQLKKDSFLGYFSGLDRATGAISLREHDLEKSKGKDGMHRIGVKTALSFQKYQIDEMGKEIRPCRLKKRPPVR

SEQ ID NO: 351 - protein, 1081 aa, Neisseria meningitidis
  Neisseria meningitidis 93004
MAAFKPNPINYILGLDIGIASVGWAMVEIDEDENPICLIDLGVRVFERAEVPKTGDSLAMARRLARSVRRLTRRRAHRLLRARRLLKREGVLQAADFDENGLIKSLPNTPWQLRAAALDRKLTPLEWSAVLLHLIKHRGYLSQRKNEGETADKELGALLKGVADNAHALQTGDFRTPAKLALNKFEKESGHIRNQRGDYSHTFSRKDLQAELNLLFEKQKEFGNPHISDGLKEGIETLLMTQRPALSGDAVQKMLGHCTFEPTEPKAAKNTYTAERFVWLTKLNNLRILEQGSEQPLTDTQRAKLMDEPYRKSKLTYAQARKLLGLEDTAFFKGLRYGKDNAEASTLMEMKAYHAISRALEKEGLKDKKSPLNLSPELQDEIGTAFSLFKTDEDITGRLKDRVQPEILEALLKHISFDKFVQISLKALRRIVPLMEQGKRYNEACAEIYGDHYGKKNTEEKIYLPPIPADEIRNPVVLRALSQARKVINGVVRRYGSPARIHIETAREVGKSFKDRKEIEKRQEENRKDREKAAAKFQEYFPNFVGEPKSKDILKLRLYEQQHGKCLYSGKEINLGRLNEKGYVEIDHALPFSRTWDDSFNNKVLVLGSENQNKGNQTPYEYFNGKDNSREWQEFKARVETSRFPRSKKQRILLQKFDEDGFKERNLNDTRYVNRFLCQFVADRMRLTGKGKKRVFASNGQITNLLRGFWGLRKVRAENDRHHALDAVVVACSTVAMQQKITRFVRYKEMNAFDGKTIDKETGEVLHQKTHFPQPWEFFAQEVMIRVFGKPDGKPEFEEADTPEKLRTLLAEKLSSRPEAVHEYVTPLFVSRAPNRKMSGQGHMETVKSAKRLDEGVSVLRVPLTQLKLKDLEKMVNREREPKLYEALKARLEAHKDDPAKAFAEPFYKYDKAGNRTQQVKAVRVEQVQKTGVWVRNHNGIADNATMVRVDVFEKGDKYYLVPIYSWQVAKGILPDRAVVAYADEEDWTVIDESFRFKFVLYSNDLIKVQLKKDSFLGYFSGLDRATGAISLREHDLEKSKGKDGMHRIGVKTALSFQKYQIDEMGKEIRPCRLKKRPPVR

SEQ ID NO: 352 - protein, 1082 aa, Neisseria meningitidis
  Neisseria meningitidis 96023
MAAFKPNPINYILGLDIGIASVGWAMVEIDEDENPICLIDLGVRVFERAEVPKTGDSLAMARRLARSVRRLTRRRAHRLLRARRLLKREGVLQAADFDENGLIKSLPNTPWQLRAAALDRKLTPLEWSAVLLHLIKHRGYLSQRKNEGETADKELGALLKGVADNAHALQTGDFRTPAELALNKFEKESGHIRNQRGDYSHTFSRKDLQAELILLFEKQKEFGNPHVSGGLKEGIETLLMTQRPALSSDAVQKMLGHCTFEPAEPKAAKNTYTAERFIWLTKLNNLRILEQGSERPLTDTERATLMDEPYRKSKLTYAQARKLLGLEDTAFFKGLRYGKDNAEASTLMEMKAYHAISRALEKEGLKDKKSPLNLSPELQDEIGTAFSLFKTDEDITGRLKDRIQPEILEALLKHISFDKFVQISLKALRRIVPLMEQGKRYDEACAEIYGDHYGKKNTEEKIYLPPIPADEIRNPVVLRALSQARKVINGVVRRYGSPARIHIETAREVGKSFKDRKEIEKRQEENRKDREKAAAKFREYFPNFVGEPKSKDILKLRLYEQQHGKCLYSGKEINLGRLNEKGYVEIDHALPFSRTWDDSFNNKVLVLGSENQNKGNQTPYEYFNGKDNSREWQEFKARVETSRFPRSKKQRILLQKFDEDGFKERNLNDTRYVNRFLYQFVADRMRLTGKGKKRVFASNGQITNLLRGFWGLRKVRAENDRHHALDAVVVACSTVAMQQKITRFVRYKEMNAFDGKTIDKETGEVLHQKTHFPQPWEFFAQEVMIRVFGKPDGKPEFEEADTPEKLRTLLAEKLSSRPEAVHEYVTPLFVSRAPNRKMSGQGHMETVKSAKRLDEGVSVLRVPLTQLKLKDLEKMVNREREPKLYEALKARLEAHKDDPAKAFAEPFYKYDKAGNRTQQVKAVRVEQVQKTGVWVRNHNGIADNATMVRVDVFEKGDKYYLVPIYSWQVAKGILPDRAVVQGKDEEDWQLIDDSFNFKFSLHPNDLVEVITKKARMFGYFASCHRGTGNINIRIHDLDHKIGKNGILEGIGVKTALSFQKYQIDELGKEIRPCRLKKRPPVR

SEQ ID NO: 353 - protein, 1081 aa, Neisseria meningitidis
  Neisseria meningitidis 98008
MAAFKPNPINYILGLDIGIASVGWAMVEIDEDENPICLIDLGVRVFERAEVPKTGDSLAAARRLARSVRRLTRRRAHRLLRARRLLKREGVLQAADFDENGLIKSLPNTPWQLRSAALDRKLTPLEWSAVLLHLIKHRGYLSQRKNEGETADKELGALLKGVANNAHALQTGDFRTPAELALNKFEKESGHIRNQRGDYSHTFSRKDLQAELILLFEKQKEFGNPHVSGGLKEGIETLLMTQRPALSGDAVQKMLGHCTFEPAEPKAAKNTYTAERFIWLTKLNNLRILEQGSERPLTDTERATLMDEPYRKSKLTYAQARKLLGLEDTAFFKGLRYGKDNAEASTLMEMKAYHAISRALEKEGLKDKKSPLNLSPELQDEIGTAFSLFKTDEDITGRLKDRIQPEILEALLKHISFDKFVQISLKALRRIVPLMEQGKRYDEACAEIYGDHYGKKNTEEKIYLPPIPADEIRNPVVLRALSQARKVINGVVRRYGSPARIHIETAREVGKSFKDRKEIEKRQEENRKDREKAAAKFREYFPNFVGEPKSKDILKLRLYEQQHGKCLYSGKEINLGRLNEKGYVEIDHALPFSRTWDDSFNNKVLVLGSENQNKGNQTPYEYFNGKDNSREWQEFKARVETSRFPRSKKQRILLQKFDEDGFKERNLNDTRYVNRFLCQFVADRMRLTGKGKKRVFASNGQITNLLRGFWGLRKVRAENDRHHALDAVVVACSTVAMQQKITRFVRYKEMNAFDGKTIDKETGEVLHQKTHFPQPWEFFAQEVMIRVFGKPDGKPEFEEADTPEKLRTLLAEKLSSRPEAVHEYVTPLFVSRAPNRKMSGQGHMETVKSAKRLDEGVSVLRVPLTQLKLKDLEKMVNREREPKLYEALKARLEAHKDDPAKAFAEPFYKYDKAGNRTQQVKAVRVEQVQKTGVWVRNHNGIADNATMVRVDVFEKAGKYYLVPIYSWQVAKGILPDRAVVAYADEEGWTVIDESFRFKFVLYSNDLIKVQLKKDSFLGYFSGLDRATGAISLREHDLEKSKGKDGMHRIGVKTALSFQKYQIDEMGKEIRLCRLKKRPPVR

SEQ ID NO: 354 - protein, 1082 aa, Neisseria meningitidis
MAAFKPNPINYILGLDIGIASVGWAMVEIDEEENPIRLIDLGVRVFERAEVPKTGDSLAMVRRLARSVRRLTRRRAHRLLRARRLLKREGVLQAADFDENGLIKSLPNTPWQLRAAALDRKLTPLEWSAVLLHLIKHRGYLSQRKNEGETADKELGALLKGVADNAHALQTGDFRTPAELALNKFEKESGHIRNQRGDYSHTFSRKDLQAELILLFEKQKEFGNPHISGGLKEGIETLLMTQRPALSGDAVQKMLGHCTFEPAEPKAAKNTYTAERFIWLTKLNNLRILEQGSERPLTDTERATLMDEPYRKSKLTYAQARKLLGLEDTAFFKGLRYGKDNAEASTLMEMKAYHAISRALEKEGLKDKKSPLNLSPELQDEIGTAFSLFKTDEDITGRLKDRIQPEILEALLKHISFDKFVQISLKALRRIVPLMEQGKRYDEACAEIYGDHYGKKNTEEKIYLPPIPADEIRNPVVLRALSQARKVINGVVRRYGSPARIHIETAREVGKSFKDRKEIEKRQEENRKDREKAAAKFREYFPNFVGEPKSKDILKLRLYEQQHGKCLYSGKEINLGRLNEKGYVEIDHALPFSRTWDDSFNNKVLVLGSENQNKGNQTPYEYFNGKDNSREWQEFKARVETSRFPRSKKQRILLQKFDEDGFKERNLNDTRYVNRFLCQFVADRMRLTGKGKKRVFASNGQITNLLRGFWGLRKVRAENDRHHALDAVVVACSTVAMQQKITRFVRYKEMNAFDGKTIDKETGEVLHQKTHFPQPWEFFAQEVMIRVFGKPDGKPEFEEADTPEKLRTLLAEKLSSRPEAVHEYVTPLFVSRAPNRKMSGQGHMETVKSAKRLDEGVSVLRVPLTQLKLKDLEKMVNREREPKLYEALKARLEAHKDDPAKAFAEPFYKYDKAGNRTQQVKAVRVEQVQKTGVWVRNHNGIADNATMVRVDVFEKGDKYYLVPIYSWQVAKGILPDRAVVQGKDEEDWQLIDDSFNFKFSLHPNDLVEVITKKARMFGYFASCHRGTGNINIRIHDLDHKIGKNGILEGIGVKTALSFQKYQIDELGKEIRPCRLKKRPPVR

SEQ ID NO: 355 - protein, 1082 aa, Neisseria meningitidis
  Neisseria meningitidis alpha275
MAAFKPNPINYILGLDIGIASVGWAMVEIDEDENPICLIDLGVRVFERAEVPKTGDSLAAARRLARSVRRLTRRRAHRLLRARRLLKREGVLQAADFDENGLIKSLPNTPWQLRAAALDRKLTPLEWSAVLLHLIKHRGYLSQRKNEGETADKELGALLKGVADNAHALQTGDFRTPAELALNKFEKESGHIRNQRGDYSHTFSRKDLQAELILLFEKQKEFGNPHVSGGLKEGIETLLMTQRPALSGDAVQKMLGHCTFEPAEPKAAKNTYTAERFIWLTKLNNLRILEQGSERPLTDTERATLMDEPYRKSKLTYAQARKLLGLEDTAFFKGLRYGKDNAEASTLMEMKAYHAISRALEKEGLKDKKSPLNLSPELQDEIGTAFSLFKTDEDITGRLKDRVQPEILEALLKHISFDKFVQISLKALRRIVPLMEQGKRYDEACAEIYGDHYGKKNTEEKIYLPPIPADEIRNPVVLRALSQARKVINGVVRRYGSPARIHIETAREVGKSFKDRKEIEKRQEENRKDREKAAAKFREYFPNFVGEPKSKDILKLRLYEQQHGKCLYSGKEINLGRLNEKGYVEIDHALPFSRTWDDSFNNKVLVLGSENQNKGNQTPYEYFNGKDNSREWQEFKARVETSRFPRSKKQRILLQKFDEDGFKERNLNDTRYVNRFLCQFVADRMRLTGKGKKRVFASNGQITNLLRGFWGLRKVRAENDRHHALDAVVVACSTVAMQQKITRFVRYKEMNAFDGKTIDKETGEVLHQKTHFPQPWEFFAQEVMIRVFGKPDGKPEFEEADTPEKLRTLLAEKLSSRPEAVHEYVTPLFVSRAPNRKMSGQGHMETVKSAKRLDEGVSVLRVPLTQLKLKDLEKMVNREREPKLYEALKARLEAHKDDPAKAFAEPFYKYDKAGNRTQQVKAVRVEQVQKTGVWVRNHNGIADNATMVRVDVFEKGDKYYLVPIYSWQVAKGILPDRAVVQGKDEEDWQLIDDSFNFKFSLHPNDLVEVITKKARMFGYFASCHRGTGNINIRIHDLDHKIGKNGILEGIGVKTALSFQKYQIDELGKEIRPCRLKKRPPVR

SEQ ID NO: 356 - protein, 1082 aa, Neisseria meningitidis
  Neisseria meningitidis ATCC 13091
MAAFKPNPINYILGLDIGIASVGWAMVEIDEEENPIRLIDLGVRVFERAEVPKTGDSLAMARRLARSVRRLTRRRAHRLLRTRRLLKREGVLQAANFDENGLIKSLPNTLWQLRAAALDRKLTPLEWSAVLLHLIKHRGYLSQRKNEGETADKELGALLKGVAGNAHALQTGDFRTPAELALNKFEKESGHIRNQRGDYSHTFSRKDLQAELNLLFEKQKEFGNPHISDGLKEGIETLLMTQRPALSGDAVQKMLGHCTFEPTEPKAAKNTYTTERFIWLTKLNNLRILEQGSERPLTDTERATLMDEPYRKSKLTYAQARKLLELDDIAFFKGLRYGKDNAEASTLMEMKAYHAISRALEKEGLKDKKSPLNLSPELQDEIGTAFSLFKTDEDITGRLKDRIQPEILEALLKHINFDKFVQISLKALRRIVPLMEQGKRYDEACAEIYGDHYGKKNTEEKIDLPPIPADEIHNPVVLRALSQARKVINGVVRRYGSPARIHIETAREVGKSFKDRKEIEKRQEENRKDREKAAAKFREYFPNFVGEPKSKDILKLRLYEQQHGKCLYSGKEINLGRLNEKGYVEIDHALPFSRTWDDSFNNKVLVLGSENQNKGNQTPYEYFNGKDNSREWQEFKARVETSRFPRSKKQRILLQKFDEDGFKERNLNDTRYVNRFLCQFVADRMRLTGKGKKRVFASNGQITNLLRGFWGLRKVRAENDRHHALDAVVVACSTVAMQQKITRFVRYKEMNAFDGKTIDKETGEVLHQKTHFPQPWEFFAQEVMIRVFGKPDGKPEFEEADTPEKLRTLLTEKLSSRPEAVHEYVTPLFVSRAPNRKMSGQGHMETVKSAKRLDEGISVLRVPLTQLKLKDLEKMVNREREPKLYEALKARLEAHKDDPAKAFAEPFYKYDKAGNRTQQVKAMRVEQVQKTGVWVRNHNGIADNATMVRVDVFEKGDKYYLVPIYSWQVAKGILPDRAVVQGKDEEDWQLIDDSFNFKFSLHPNDLVEVITKKARMFGYFASCHRGTGNINIRIHDLDHKIGKNGILEGIGVKTALSFQKYQIDELGKEIRPCRLKKRPPVR

SEQ ID NO: 357 - protein, 1081 aa, Neisseria meningitidis
  Neisseria meningitidis N1568
MAAFKPNPINYILGLDIGIASVGWAMVEIDEEENPIRLIDLGVRVFERAEVPKTGDSLAMARRLARSVRRLTRRRAHRLLRARRLLKREGVLQAADFDENGLIKSLPNTPWQLRAAALDRKLTPLEWSAVLLHLIKHRGYLSQRKNEGETADKELGALLKGVADNAHALQTGDFRTPAELALNKFEKECGHIRNQRGDYSHTFSRKDLQAELNLLFEKQKEFGNPHVSGGLKEGIETLLMTQRPALSGDAVQKMLGHCTFEPAEPKAAKNTYTAERFIWLTKLNNLRILEQGSERPLTDTERATLMDEPYRKSKLTYAQARKLLSLEDTAFFKGLRYGKDNAEASTLMEMKAYHTISRALEKEGLKDKKSPLNLSPELQDEIGTAFSLFKTDEDITGRLKDRIQPEILEALLKHISFDKFVQISLKALRRIVPLMEQGKRYDEACAEIYGDHYGKKNTEEKIYLPPIPADEIRNPVVLRALSQARKVINGVVRRYGSPARIHIETAREVGKSFKDRKEIEKRQEENRKDREKAAAKFREYFPNFVGEPKSKDILKLRLYEQQHGKCLYSGKEINLGRLNEKGYVEIDHALPFSRTWDDSFNNKVLVLGSENQNKGNQTPYEYFNGKDNSREWQEFKARVETSRFPRSKKQRILLQKFDEDGFKERNLNDTRYVNRFLCQFVADRMRLTGKGKKRVFASNGQITNLLRGFWGLRKVRAENDRHHALDAVVVACSTVAMQQKITRFVRYKEMNAFDGKTIDKETGEVLHQKTHFPQPWEFFAQEVMIRVFGKPDGKPEFEEADTPEKLRTLLAEKLSSRPEAVHEYVTPLFVSRAPNRKMSGQGHMETVKSAKRLDEGVSVLRVPLTQLKLKDLEKMVNREREPKLYEALKARLEAHKDDPAKAFAEPFYKYDKAGNRTQQVKAVRVEQVQKTGVWVRNHNGIADNATMVRVDVFEKGDKYYLVPIYSWQVAKGILPDRAVVAYADEEDWTVIDESFRFKFVLYSNDLIKVQLKKDSFLGYFSGLDRATGAISLREHDLEKSKGKDGMHRIGVKTALSFQKYQIDEMGKEIRPCRLKKRPPVR

SEQ ID NO: 358 - protein, 1081 aa, Neisseria meningitidis
  Neisseria meningitidis NM140
MAAFKPNPINYILGLDIGIASVGWAMVEIDEDENPICLIDLGVRVFERAEVPKTGDSLAAARRLARSVRRLTRRRAHRLLRARRLLKREGVLQAADFDENGLIKSLPNTPWQLRSAALDRKLTPLEWSAVLLHLIKHRGYLSQRKNEGETADKELGALLKGVADNAHALQTGDFRTPAELALNKFEKESGHIRNRRGDYSHTFSRKDLQAELDLLFEKQKEFGNPHISDDLKEGIETLLMTQRPALSGDAVQKMLGHCTFEPTEPKAAKNTYTAERFVWLTKLNNLRILEQGSERPLTDTERATLMDEPYRKSKLTYAQARKLLELDDTAFFKGLRYGKDNAEASTLMEMKAYHAISRALEKEGLKDKKSPLNLSPELQDEIGTAFSLFKTDEDITGRLKDRVQPEILEVLLKHISFDKFVQISLKALRRIVPLMEQGKRYDEACAEIYGDHDGKKNTEEKIYLPPIPADEIRNPVVLRALSQARKVINAVVRRYGSPARIHIETAREVGKSFKDRKEIEKRQEENRKDREKAAAKFREYFPNFVGEPKSKDILKLRLYEQQHGKCLYSGKEINLGRLNEKGYVEIDHALPFSRTWDDSFNNKVLVLGSENQNKGNQTPYEYFNGKDNSREWQEFKARVETSRFPRSKKQRILLQKFDEEGFKERNLNDTRYVNRFLCQFVADHMLLTGKGKRRVFASNGQITNLLRGFWGLRKVRAENNRHHALDAVVVACSTVAMQQKITRFVRYKEMNAFDGKTIDKETGEVLHQKTHFPQPWEFFAQEVMIRVFGKPDGKPEFEEADTPEKLRTLLAEKLSSRPEAVHEYVTPLFVSRAPNRKMSGQGHMETVKSAKRLDEGVSVLRVPLTQLKLKDLEKMVNREREPKLYEALKARLEAHKDDPAKAFAEPFYKYDKAGNRTQQVKAVRVEQVQKTGVWVRNHNGIADNATMVRVDVFEKAGKYYLVPIYSWQVAKGILPDRAVVAYADEEGWTVIDESFRFKFVLYSNDLIKVQLKKDSFLGYFSGLDRATGAISLREHDLEKSKGKDGMHRIGVKTALSFQKYQIDEMGKEIRLCRLKKRPPVR

SEQ ID NO: 359 - protein, 1082 aa, Neisseria meningitidis
  Neisseria meningitidis NM220
MAAFKPNPINYILGLDIGIASVGWAMVEIDEEENPIRLIDLGVRVFERAEVPKTGDSLAMARRLARSVRRLTRRRAHRLLRARRLLKREGVLQAADFDENGLIKSLPNTPWQLRAAALDRKLTPLEWSAVLLHLIKHRGYLSQRKNEGETADKELGALLKGVANNAHALQTGDFRTPAELALNKFEKESGHIRNQRGDYSHTFSRKDLQAELILLFEKQKEFGNPHVSGGLKEGIETLLMTQRPALSGDAVQKMLGHCTFEPAEPKAAKNTYTAERFIWLTKLNNLRILEQGSERPLTDTERATLMDEPYRKSKLTYAQARKLLGLEDTAFFKGLRYGKDNAEASTLMEMKAYHAISRALEKEGLKDKKSPLNLSSELQDEIGTAFSLFKTDEDITGRLKDRVQPEILEALLKHISFDKFVQISLKALRRIVPLMEQGKRYDEACAEIYGDHYGKKNTEEKIYLPPIPADEIRNPVVLRALSQARKVINGVVRRYGSPARIHIETAREVGKSFKDRKEIEKRQEENRKDREKAAAKFREYFPNFVGEPKSKDILKLRLYEQQHGKCLYSGKEINLVRLNEKGYVEIDHALPFSRTWDDSFNNKVLVLGSENQNKGNQTPYEYFNGKDNSREWQEFKARVETSRFPRSKKQRILLQKFDEDGFKECNLNDTRYVNRFLCQFVADHILLTGKGKRRVFASNGQITNLLRGFWGLRKVRAENDRHHALDAVVVACSTVAMQQKITRFVRYKEMNAFDGKTIDKETGKVLHQKTHFPQPWEFFAQEVMIRVFGKPDGKPEFEEADTPEKLRTLLAEKLSSRPEAVHEYVTPLFVSRAPNRKMSGAHKDTLRSAKRFVKHNEKISVKRVWLTEIKLADLENMVNYKNGREIELYEALKARLEAYGGNAKQAFDPKDNPFYKKGGQLVKAVRVEKTQESGVLLNKKNAYTIADNGDMVRVDVFCKVDKKGKNQYFIVPIYAWQVAENILPDIDCKGYRIDDSYTFCFSLHKYDLIAFQKDEKSKVEFAYYINCDSSNGRFYLAWHDKGSKEQQFRISTQNLVLIQKYQVNELGKEIRPCRLKKRPPVR

SEQ ID NO: 360 - protein, 1082 aa, Neisseria meningitidis
  Neisseria meningitidis NM233
MAAFKPNPINYILGLDIGIASVGWAMVEIDEEENPIRLIDLGVRVFERAEVPKTGDSLAMARRLARSVRRLTRRRAHRLLRARRLLKREGVLQAADFDENGLIKSLPNTPWQLRAAALDRKLTPLEWSAVLLHLIKHRGYLSQRKNEGETADKELGALLKGVANNAHALQTGDFRTPAELALNKFEKESGHIRNQRGDYSHTFSRKDLQAELILLFEKQKEFGNPHVSGGLKEGIETLLMTQRPALSGDAVQKMLGHCTFEPAEPKAAKNTYTAERFIWLTKLNNLRILEQGSERPLTDTERATLMDEPYRKSKLTYAQARKLLGLEDTAFFKGLRYGKDNAEASTLMEMKAYHAISRALEKEGLKDKKSPLNLSSELQDEIGTAFSLFKTDEDITGRLKDRVQPEILEALLKHISFDKFVQISLKALRRIVPLMEQGKRYDEACAEIYGDHYGKKNTEEKIYLPPIPADKIRNPVVLRALSQARKVINGVVRRYGSPARIHIETAREVGKSFKDRKEIEKRQEENRKDREKAAAKFREYFPNFVGEPKSKDILKLRLYEQQHGKCLYSGKEINLVRLNEKGYVEIDHALPFSRTWDDSFNNKVLVLGSENQNKGNQTPYEYFNGKDNSREWQEFKARVETSRFPRSKKQRILLQKFDEDGFKECNLNDTRYVNRFLCQFVADHILLTGKGKRRVFASNGQITNLLRGFWGLRKVRAENDRHHALDAVVVACSTVAMQQKITRFVRYKEMNAFDGKTIDKETGKVLHQKTHFPQPWEFFAQEVMIRVFGKPDGKPEFEEADTPEKLRTLLAEKLSSRPEAVHEYVTPLFVSRAPNRKMSGAHKDTLRSAKRFVKHNEKISVKRVWLTEIKLADLENMVNYKNGREIELYEALKARLEAYGGNAKQAFDPKDNPFYKKGGQLVKAVRVEKTQESGVLLNKKNAYTIADNGDMVRVDVFCKVDKKGKNQYFIVPIYAWQVAENILPDIDCKGYRIDDSYTFCFSLHKYDLIAFQKDEKSKVEFAYYINCDSSNGRFYLAWHDKGSKEQQFRISTQNLVLIQKYQVNELGKEIRPCRLKKRPPVR

SEQ ID NO: 361 - protein, 1082 aa, Neisseria meningitidis
MAAFKPNPINYILGLDIGIASVGWAMVEIDEDENPICLIDLGVRVFERAEVPKTGDSLAMARRLARSVRRLTRRRAHRLLRARRLLKREGVLQAADFDENGLIKSLPNTPWQLRAAALDRKLTPLEWSAVLLHLIKHRGYLSQRKNEGETADKELGALLKGVADNAHALQTGDFRTPAELALNKFEKESGHIRNQRGDYSHTFSRKDLQAELILLFEKQKEFGNPHVSGGLKEGIETLLMTQRPALSSDAVQKMLGHCTFEPAEPKAAKNTYTAERFIWLTKLNNLRILEQGSERPLTDTERATLMDEPYRKSKLTYAQARKLLGLEDTAFFKGLRYGKDNAEASTLMEMKAYHAISRALEKEGLKDKKSPLNLSPELQDEIGTAFSLFKTDEDITGRLKDRIQPEILEALLKHISFDKFVQISLKALRRIVPLMEQGKRYDEACAEIYGDHYGKKNTEEKIYLPPIPADEIRNPVVLRALSQARKVINGVVRRYGSPARIHIETAREVGKSFKDRKEIEKRQEENRKDREKAAAKFREYFPNFVGEPKSKDILKLRLYEQQHGKCLYSGKEINLGRLNEKGYVEIDHALPFSRTWDDSFNNKVLVLGSENQNKGNQTPYEYFNGKDNSREWQEFKARVETSRFPRSKKQRILLQKFDEDGFKERNLNDTRYVNRFLCQFVADRMRLTGKGKKRVFASNGQITNLLRGFWGLRKVRAENDRHHALDAVVVACSTVAMQQKITRFVRYKEMNAFDGKTIDKETGEVLHQKTHFPQPWEFFAQEVMIRVFGKPDGKPEFEEADTPEKLRTLLAEKLSSRPEAVHEYVTPLFVSRAPNRKMSGQGHMETVKSAKRLDEGVSVLRVPLTQLKLKDLEKMVNREREPKLYEALKARLEAHKDDPAKAFAEPFYKYDKAGNRTQQVKAVRVEQVQKTGVWVRNHNGIADNATMVRVDVFEKGDKYYLVPIYSWQVAKGILPDRAVVQGKDEEDWQLIDDSFNFKFSLHPNDLVEVITKKARMFGYFASCHRGTGNINIRIHDLDHKIGKNGILEGIGVKTALSFQKYQIDELGKEIRPCRLKKRPPVR

SEQ ID NO: 362 - protein, 1082 aa, Neisseria meningitidis
MAAFKPNPINYILGLDIGIASVGWAMVEIDEDENPICLIDLGVRVFERAEVPKTGDSLAMARRLARSVRRLTRRRAHRLLRARRLLKREGVLQAADFDENGLIKSLPNTPWQLRAAALDRKLTPLEWSAVLLHLIKHRGYLSQRKNEGETADKELGALLKGVADNAHALQTGDFRTPAELALNKFEKESGHIRNQRGDYSHTFSRKDLQAELILLFEKQKEFGNPHVSGGLKEGIETLLMTQRPALSGDAVQKMLGHCTFEPAEPKAAKNTYTAERFIWLTKLNNLRILEQGSERPLTDTERATLMDEPYRKSKLTYAQARKLLGLEDTAFFKGLRYGKDNAEASTLMEMKAYHAISRALEKEGLKDKKSPLNLSPELQDEIGTAFSLFKTDEDITGRLKDRIQPEILEALLKHISFDKFVQISLKALRRIVPLMEQGKRYDEACAEIYGDHYGKKNTEEKIYLPPIPADEIRNPVVLRALSQARKVINGVVRRYGSPARIHIETAREVGKSFKDRKEIEKRQEENRKDREKAAAKFREYFPNFVGEPKSKDILKLRLYEQQHGKCLYSGKEINLGRLNEKGYVEIDHALPFSRTWDDSFNNKVLVLGSENQNKGNQTPYEYFNGKDNSREWQEFKARVETSRFPRSKKQRILLQKFDEDGFKERNLNDTRYVNRFLCQFVADRMRLTGKGKKRVFASNGQITNLLRGFWGLRKVRAENDRHHALDAVVVACSTVAMQQKITRFVRYKEMNAFDGKTIDKETGEVLHQKTHFPQPWEFFAQEVMIRVFGKPDGKPEFEEADTPEKLRTLLAEKLSSRPEAVHEYVTPLFVSRAPNRKMSGQGHMETVKSAKRLDEGVSVLRVPLTQLKLKDLEKMVNREREPKLYEALKARLEAHKDDPAKAFAEPFYKYDKAGNRTQQVKAVRVEQVQKTGVWVRNHNGIADNATMVRVDVFEKGDKYYLVPIYSWQVAKGILPDRAVVQGKDEEDWQLIDDSFNFKFSLHPNDLVEVITKKARMFGYFASCHRGTGNINIRIHDLDHKIGKNGILEGIGVKTALSFQKYQIDELGKEIRPCRLKKRPPVR

SEQ ID NO: 363 - protein, 1089 aa, Neisseria sp.
  Neisseria sp. oral taxon 014 str. F0314
MTAFKPNPLNYILGLDIGIASVGWAMVEIDDKENPVRLIDLGVRVFERAEMPKTGDSLAAARRLARSVRRLTRRRAHRLLRARRLLKHEGVLKPEDFDENGLVKPLPYIPKQPRNTPWQLRAAALDRKLTPLEWAAVLLHLVKHRGYLSQRKNEGETDDKELGALLKGVADNTHALQAGNFRTPAELALNKFEKESGHIRNQRGDYSHTFSRKDLQAELVLLFEKQKEFGNPYVSDDLKNGIENLLMTQRPALSGDAIQKMLGHCTFEPAEPKAAKNTYTAERFIWLTKLNNLRILNQGNERPLTDAERTTLMDEPYKKSKLTYAQARKLLDLDDTAFFKGLRYGKDNAESATLMEMKAYHAISRALEKEGLKDKKSPLSLSPELQDEIGTAFSLFKTDEEITGRLKGCLQPEILDALLKHISFDKFVQISLKALRRIVPLMEQGKRYDEACAEIYGDHHGRRNSEETLYLPPIPADEIRNPVVLRALSQARKVINGVGRRYGSPARIHIETAREVGKSFKDRKEIEKRQEENRKDREKAAAEFQEYFPNFVGEPKSKDILKLRLYRQQNCKCLYSGKEINLGRLNEKGYVEIDHALPFSRTWDDSFNNKVLVLGSENQNKGNRTPYEYLNGKDNSREWQEFKARVETSRFPHSKKQRILLQKFDEEGFKERNLNDTRYVNRFLCKFVADHMQLTGKGKRRVFASNGQITNLLRGFWGLRKVRAENDRHHALDAVVVACSTVAMQQRITRFVRYKEMNAFDGKTVDKETGEVLHQKTHFPQPWEFFAQEVMIRVFGKPDGKPELEEADTPEKLRALLAEKLSSRPEAVHEYVAPLFVSRAPNRKMSGQGHMETIKSPKRLDEGISVVRVPLTQLKLKDLEKMVNREREPKLYEALKARLEAHKDDPAKAFAEPFYKQDKAGNRTQQVKAVRIEQVQKTGVWVRNQNGIADNATMVRVDVFEKGGKYYLVPIYSWQVAKGILPDKAIIAFKDEEEWQLIDDSFNFKFPLHPNDLVEVITKKARIFGYFASCHRGTGNINIRIHDLDNKVGKNGILEGIGVKTALSFQKYQIDELGKEIRPCRLKKRPPVR

SEQ ID NO: 364 - protein, 1097 aa, Neisseria wadsworthii
  Neisseria wadsworthii 9715
MKKQPQRYILGLDLGIASVGWALILVDGAENPVGLLDCGVRTFERAEVPKTGDSLALARRQARSVRRLIRRRAHRLLRLRRLLKREGILSAADFNSDGLPNLPIDAWQLRVAGLERKLTNQEWAAVLLHLVKHRGYLSQRKSETQTENKELGRLLAGVAENSKLLSESSEQYRTPAELAVKLFAEQSGHLRNKGGEYTHTFNRLDLQKELHLLFERQYALGNPFASAELQSKVDELLMTQRSALQGEAVLKMLGKCTFEPSEYKAAKNTYSAERFIWLTKLNNLRILYNGEERALDEGDRKKLLDEPYKKAKLTYKQVRSILNLPESAVFKGLRYGKDSDGLKAENGTLMEMKAYHKIRTILDKAGLKGEWENRIRNPEILDKIGTAFSLYKTDEDIQAALADLRLPENVLDALLAGLNFDKFIQLSLKALRNILPLMERGIRYDEACKEVYGDHRALAESKNQVLLPPIPADEIRNPVVLRTLTQARKVINAIIRRYGSPQRVHIETARELGKSKQERDKIDRKNKENQNDRNRLASDIRKHFNFEPTPKDILKLRLYEQQHGKCLYSDLREEKGECLYTGNVIELHRLFEDGYVEIDHALPLSRTWDNSLNNKVLVLKSSNQNKGNKTPYEWLDGANNSRRWREFQARVQGCHFPYVKKQRIQTAKLDSKAEQGFLERNLNDTRYISKFMCQFITANLRLAETSNALMEEVAGENPYWKERKRQRVFAPSGSIIALLRGLWGLKKVREDNDRHHALDAIVVACSTVSMQQKITKAMQRRETLETVDSETGEVKTRIPQPWDFFRQEVMIRVFSDSPREELAEKLNSRPEALHDFVSPLFVSRAPNRKMTGQGHLETVKSAKRLSENISVVRKPLTALKLKDIENIVGYPDREPALYQALRERLLAHKDDPVKAFADKPFYKPAKDGGQGSLVKAVRIIENTKHGLKIRNGITDTNGDMVRTDVYQKTDKKGKRQYFIVPVYAWQVEKNELPTVDCKGYEIDDNYEFCFSLYKYDLIEIQNPNDINQELRAYYINCDSSDGRFWLAYHDKSAKEQQFRISTQNQPIIKKYQVDTLGKEIRLCKAEKRTALNGKKKK

SEQ ID NO: 365 - protein, 1426 aa, Niabella soli
  Niabella soli DSM 19437
MPRKNILGLDLGTTSIGFAKIIEDDDYQCSSVELIGVRVNPLTTDEQTNFEKGKPVSVNADRTLKRGMRRNLDRYQLRRDYLIEILRTHHIITADTKLAEDGKNTTHTTYALRALAATAEIPLEAFVRVLLAINKKRGYKSSRKAKNEDEGQLIDGMAIARRLYEESLTPGQFSYQLLKEGKKYLPDFYRSDLNTELNKVWNFQKQFYPEILTDEFKRHLEGKGQRATAVAFWGQHGFSMAENKGSREEKKLHAYKWRSEAAHKQLTKEEVAFVITEINNDLNKSSGYLGAISDRSKELFFNKQTVGQYLHQQLKENPHTRLKGQVFYRQDYLDEFETIWEMQAKFYSALTLELKEEVRDVVIFYQRKLKSQMGLISLCEFESKEIEIEKNGEKAKKRIGLRVAPKSSPLFQEFKIWQVLNNLEFRNKKTKEVFVPEMAAKQQLFDELNIKGNLLASEAIKILGYKTKDWEANYHTLEGNRTNKSLYDAWLKILELEGYDENLLKLSGSDDIDVSKIEKPALEIRQMVLAVFEVLGISGAILDFDAEADGKAFEQQPAYQLWHLLYSAEDDGKKYSQEDIFTYGHDNIGLKKKLCEKFGFRPEHTKILVNVVFSDDYGNLSSKAMRRIYPFIKELTYDKACAEAGYRHSAASLTKEEIAARPLQNRLDLLKKNELRSPVVEKILNQMVNVVNTLVDDENQNRKARGLSEDFHFDEIRIELARELKKNAKERAEMTTNINTAKQSHEKIIRILQTEFGVPNPSRNDIVRYKLYEELKNNGYKDLYTNTYISRDILFSKQIDVDHIIPQMSLFDDSFSNKTVVFRKDNQDKGNKTAYDYILGKYGEQALEEYISRITSLFELGKKNKEEGIGKAKFQKLQKRLVDIGDGFIERDLRESQYIAKKANNMLYAICRSVVSTSGEITARLREDWDLVNVMQEINLPKFRALGLTEMVEKKDGAQKERITDWTKRNDHRHHAMDALAIAFTRHSHIQYLNHLNARKDEANKWHPVVSKIEEKETVLIYDDLGNRKRKFKAPMPNFREVVKEHLENVLISHKAKNKVVTKNKNKIKTVRGEKVKTELTPRGQLHKETIYGRYRYYESKEEKIGPKFDAEMIGMVTNPQYKKLLLERLAANGNDPKKAFWGKNALNKNPLYVDEARQELLPEKILLRWLNDDYSIRKDVTPENLKDIKTIEKILDKGVKKILLKRLADFGNDPKKAFSDLDKNPIWQNEAKRIAIKRVTISGIKNAAPLHHKKDHLGNDILDEKGKQIPSSFVSTGNNHHVAIYRDAEGNLQERVVSLFDAVQLVNGGEPVIDKEYNKGIGWQFLFTMKQNEMFVFPDEKTGFNPREVDLLSSGNRKLISPNLFRVQKLASKNYFFRHHLETSVEEKKELKNIAYKPQLGLNALSNIVKVRINHIGEIVSVGEY

SEQ ID NO: 366 - protein, 1132 aa, Nitratifractor salsuginis
MKKILGVDLGITSFGYAILQETGKDLYRCLDNSVVMRNNPYDEKSGESSQSIRSTQKSMRRLIEKRKKRIRCVAQTMERYGILDYSETMKINDPKNNPIKNRWQLRAVDAWKRPLSPQELFAIFAHMAKHRGYKSIATEDLIYELELELGLNDPEKESEKKADERRQVYNALRHLEELRKKYGGETIAQTIHRAVEAGDLRSYRNHDDYEKMIRREDIEEEIEKVLLRQAELGALGLPEEQVSELIDELKACITDQEMPTIDESLFGKCTFYKDELAAPAYSYLYDLYRLYKKLADLNIDGYEVTQEDREKVIEWVEKKIAQGKNLKKITHKDLRKILGLAPEQKIFGVEDERIVKGKKEPRTFVPFFFLADIAKFKELFASIQKHPDALQIFRELAEILQRSKTPQEALDRLRALMAGKGIDTDDRELLELFKNKRSGTRELSHRYILEALPLFLEGYDEKEVQRILGFDDREDYSRYPKSLRHLHLREGNLFEKEENPINNHAVKSLASWALGLIADLSWRYGPFDEIILETTRDALPEKIRKEIDKAMREREKALDKIIGKYKKEFPSIDKRLARKIQLWERQKGLDLYSGKVINLSQLLDGSADIEHIVPQSLGGLSTDYNTIVTLKSVNAAKGNRLPGDWLAGNPDYRERIGMLSEKGLIDWKKRKNLLAQSLDEIYTENTHSKGIRATSYLEALVAQVLKRYYPFPDPELRKNGIGVRMIPGKVTSKTRSLLGIKSKSRETNFHHAEDALILSTLTRGWQNRLHRMLRDNYGKSEAELKELWKKYMPHIEGLTLADYIDEAFRRFMSKGEESLFYRDMFDTIRSISYWVDKKPLSASSHKETVYSSRHEVPTLRKNILEAFDSLNVIKDRHKLTTEEFMKRYDKEIRQKLWLHRIGNTNDESYRAVEERATQIAQILTRYQLMDAQNDKEIDEKFQQALKELITSPIEVTGKLLRKMRFVYDKLNAMQIDRGLVETDKNMLGIHISKGPNEKLIFRRMDVNNAHELQKERSGILCYLNEMLFIFNKKGLIHYGCLRSYLEKGQGSKYIALFNPRFPANPKAQPSKFTSDSKIKQVGIGSATGIIKAHLDLDGHVRSYEVFGTLPEGSIEWFKEESGYGRVEDDPHH

SEQ ID NO: 367 - protein, 1166 aa, Nitrobacter hamburgensis
MHVEIDFPHFSRGDSHLAMNKNEILRGSSVLYRLGLDLGSNSLGWFVTHLEKRGDRHEPVALGPGGVRIFPDGRDPQSGTSNAVDRRMARGARKRRDRFVERRKELIAALIKYNLLPDDARERRALEVLDPYALRKTALTDTLPAHHVGRALFHLNQRRGFQSNRKTDSKQSEDGAIKQAASRLATDKGNETLGVFFADMHLRKSYEDRQTAIRAELVRLGKDHLTGNARKKIWAKVRKRLFGDEVLPRADAPHGVRARATITGTKASYDYYPTRDMLRDEFNAIWAGQSAHHATITDEARTEIEHIIFYQRPLKPAIVGKCTLDPATRPFKEDPEGYRAPWSHPLAQRFRILSEARNLEIRDTGKGSRRLTKEQSDLVVAALLANREVKFDKLRTLLKLPAEARFNLESDRRAALDGDQTAARLSDKKGFNKAWRGFPPERQIAIVARLEETEDENELIAWLEKECALDGAAAARVANTTLPDGHCRLGLRAIKKIVPIMQDGLDEDGVAGAGYHIAAKRAGYDHAKLPTGEQLGRLPYYGQWLQDAVVGSGDARDQKEKQYGQFPNPTVHIGLGQLRRVVNDLIDKYGPPTEISIEFTRALKLSEQQKAERQREQRRNQDKNKARAEELAKFGRPANPRNLLKMRLWEELAHDPLDRKCVYTGEQISIERLLSDEVDIDHILPVAMTLDDSPANKIICMRYANRHKRKQTPSEAFGSSPTLQGHRYNWDDIAARATGLPRNKRWRFDANAREEFDKRGGFLARQLNETGWLARLAKQYLGAVTDPNQIWVVPGRLTSMLRGKWGLNGLLPSDNYAGVQDKAEEFLASTDDMEFSGVKNRADHRHHAIDGLVTALTDRSLLWKMANAYDEEHEKFVIEPPWPTMRDDLKAALEKMVVSHKPDHGIEGKLHEDSAYGFVKPLDATGLKEEEAGNLVYRKAIESLNENEVDRIRDIQLRTIVRDHVNVEKTKGVALADALRQLQAPSDDYPQFKHGLRHVRILKKEKGDYLVPIANRASGVAYKAYSAGENFCVEVFETAGGKWDGEAVRRFDANKKNAGPKIAHAPQWRDANEGAKLVMRIHKGDLIRLDHEGRARIMVVHRLDAAAGRFKLADHNETGNLDKRHATNNDIDPFRWLMASYNTLKKLAAVPVRVDELGRVWRVMPN

SEQ ID NO: 368 - protein, 1044 aa, Nitrosomonas sp.
  Nitrosomonas sp. AL212
MLHKMRYRLALDLGSTSLGWAMVRLNANQQPCAVIKAGVRIFSNGRNPKDGSSLAVTRREARSMRRRRDRLLKRKARMMRTLIEYGFFPANETQRKALENLNPYALRAKGLDEALTPSEFARALFHINQRRGFKSNRKTDKKDSDSGALKTAIKQLHSVLDPQGNDGKPRTVGELLYKRFTDLSKLPKDRTVRARYRQDKIVKDDGKTKIDKYYDLYIDRAMIEQEFDALWKKQSELNPILFTENARADLKDVLLYQRSLKPVKPGRCTFMSEEERAPLALPSTQRFRMYQEVNNLRILREGLKEESLTLQQRDDLINALEKNNRRTFTQIKKLLGVGGSVQFNFEDPKREELKGNTTSAILGKSEHFGEAWFAFNEAKQDAIVLQLIKEENEAKLVRWLQDETGIDEKRAEVIANAGLPEGYGSLCIEALARILPELRRDVVTYDKAVQAAGFEHHSKLNRNEEIPDITFKIESIDRNSGEIKQFHLHKELPYYGEYLQRHVGFGSGKPEDSIEKRYGKIANPTVHIGLNQVRVVVNALIKRYGHPSEIIVEVARDLKQSKDRRDEENKRQAENQKRNERLRKDIADILGISEERVRRDDIEKMILWEELSFDPADRRCPYSGVQVSTVMLLSDEVEVEHILPFSQTLDDSLNNKTVALRQANRIKGNRTPWEAFGTSNISGFDYSGILTRAELMPKAKRYRFAEDGYQRWLKDDAGFLARALNDTRHLSKIAREYMSLICPNTRVIPGQMTAMLRRNFGLNDVLGLNGEKNRNDHRHHAVDACVIAVTDQGLLQRFAAASASARERQLNRLVENMPLPWESYREHVRRAIDGIWVSHRPDHSHEGAMHNDTAYGLRGNGRVSFHKMVEGKREYIEDNLKVIEITDTKAIDRHGLLPTGKPRPYKGYKGDSNYCIEIVRNEKGRWEGEIISTFDAYQLVRKYGIVQLRYPVLSVSGKPLVMRLIRNDFVRLEHEGITRTLRVCKMREDGQVALADVTEANVDARTRTKEICYVFKTGGSLQKAKARRITISPIGELRDPGFKE

SEQ ID NO: 369 - protein, 1498 aa, Odoribacter laneus
  Odoribacter laneus YIT 12061
METTLGIDLGTNSIGLALVDQEEHQILYSGVRIFPEGINKDTIGLGEKEESRNATRRAKRQMRRQYFRKKLRKAKLLELLIAYDMCPLKPEDVRRWKNWDKQQKSTVRQFPDTPAFREWLKQNPYELRKQAVTEDVTRPELGRILYQMIQRRGFLSSRKGKEEGKIFTGKDRMVGIDETRKNLQKQTLGAYLYDIAPKNGEKYRFRTERVRARYTLRDMYIREFEIIWQRQAGHLGLAHEQATRKKNIFLEGSATNVRNSKLITHLQAKYGRGHVLIEDTRITVTFQLPLKEVLGGKIEIEEEQLKFKSNESVLFWQRPLRSQKSLLSKCVFEGRNFYDPVHQKWIIAGPTPAPLSHPEFEEFRAYQFINNIIYGKNEHLTAIQREAVFELMCTESKDFNFEKIPKHLKLFEKFNFDDTTKVPACTTISQLRKLFPHPVWEEKREEIWHCFYFYDDNTLLFEKLQKDYALQTNDLEKIKKIRLSESYGNVSLKAIRRINPYLKKGYAYSTAVLLGGIRNSFGKRFEYFKEYEPEIEKAVCRILKEKNAEGEVIRKIKDYLVHNRFGFAKNDRAFQKLYHHSQAITTQAQKERLPETGNLRNPIVQQGLNELRRTVNKLLATCREKYGPSFKFDHIHVEMGRELRSSKTEREKQSRQIRENEKKNEAAKVKLAEYGLKAYRDNIQKYLLYKEIEEKGGTVCCPYTGKTLNISHTLGSDNSVQIEHIIPYSISLDDSLANKTLCDATFNREKGELTPYDFYQKDPSPEKWGASSWEEIEDRAFRLLPYAKAQRFIRRKPQESNEFISRQLNDTRYISKKAVEYLSAICSDVKAFPGQLTAELRHLWGLNNILQSAPDITFPLPVSATENHREYYVITNEQNEVIRLFPKQGETPRTEKGELLLTGEVERKVFRCKGMQEFQTDVSDGKYWRRIKLSSSVTWSPLFAPKPISADGQIVLKGRIEKGVFVCNQLKQKLKTGLPDGSYWISLPVISQTFKEGESVNNSKLTSQQVQLFGRVREGIFRCHNYQCPASGADGNFWCTLDTDTAQPAFTPIKNAPPGVGGGQIILTGDVDDKGIFHADDDLHYELPASLPKGKYYGIFTVESCDPTLIPIELSAPKTSKGENLIEGNIWVDEHTGEVRFDPKKNREDQRHHAIDAIVIALSSQSLFQRLSTYNARRENKKRGLDSTEHFPSPWPGFAQDVRQSVVPLLVSYKQNPKTLCKISKTLYKDGKKIHSCGNAVRGQLHKETVYGQRTAPGATEKSYHIRKDIRELKTSKHIGKVVDITIRQMLLKHLQENYHIDITQEFNIPSNAFFKEGVYRIFLPNKHGEPVPIKKIRMKEELGNAERLKDNINQYVNPRNNHHVMIYQDADGNLKEEIVSFWSVIERQNQGQPIYQLPREGRNIVSILQINDTFLIGLKEEEPEVYRNDLSTLSKHLYRVQKLSGMYYTFRHHLASTLNNEREEFRIQSLEAWKRANPVKVQIDEIGRITFLNGPLC

SEQ ID NO: 370 - protein, 1389 aa, Oenococcus kitaharae
  Oenococcus kitaharae DSM 17330
MARDYSVGLDIGTSSVGWAAIDNKYHLIRAKSKNLIGVRLFDSAVTAEKRRGYRTTRRRLSRRHWRLRLLNDIFAGPLTDFGDENFLARLKYSWVHPQDQSNQAHFAAGLLFDSKEQDKDFYRKYPTIYHLRLALMNDDQKHDLREVYLAIHHLVKYRGHFLIEGDVKADSAFDVHTFADAIQRYAESNNSDENLLGKIDEKKLSAALTDKHGSKSQRAETAETAFDILDLQSKKQIQAILKSVVGNQANLMAIFGLDSSAISKDEQKNYKFSFDDADIDEKIADSEALLSDTEFEFLCDLKAAFDGLTLKMLLGDDKTVSAAMVRRFNEHQKDWEYIKSHIRNAKNAGNGLYEKSKKFDGINAAYLALQSDNEDDRKKAKKIFQDEISSADIPDDVKADFLKKIDDDQFLPIQRTKNNGTIPHQLHRNELEQIIEKQGIYYPFLKDTYQENSHELNKITALINFRVPYYVGPLVEEEQKIADDGKNIPDPTNHWMVRKSNDTITPWNLSQVVDLDKSGRRFIERLTGTDTYLIGEPTLPKNSLLYQKFDVLQELNNIRVSGRRLDIRAKQDAFEHLFKVQKTVSATNLKDFLVQAGYISEDTQIEGLADVNGKNFNNALTTYNYLVSVLGREFVENPSNEELLEEITELQTVFEDKKVLRRQLDQLDGLSDHNREKLSRKHYTGWGRISKKLLTTKIVQNADKIDNQTFDVPRMNQSIIDTLYNTKMNLMEIINNAEDDFGVRAWIDKQNTTDGDEQDVYSLIDELAGPKEIKRGIVQSFRILDDITKAVGYAPKRVYLEFARKTQESHLTNSRKNQLSTLLKNAGLSELVTQVSQYDAAALQNDRLYLYFLQQGKDMYSGEKLNLDNLSNYDIDHIIPQAYTKDNSLDNRVLVSNITNRRKSDSSNYLPALIDKMRPFWSVLSKQGLLSKHKFANLTRTRDFDDMEKERFIARSLVETRQIIKNVASLIDSHFGGETKAVAIRSSLTADMRRYVDIPKNRDINDYHHAFDALLFSTVGQYTENSGLMKKGQLSDSAGNQYNRYIKEWIHAARLNAQSQRVNPFGFVVGSMRNAAPGKLNPETGEITPEENADWSIADLDYLHKVMNFRKITVTRRLKDQKGQLYDESRYPSVLHDAKSKASINFDKHKPVDLYGGFSSAKPAYAALIKFKNKFRLVNVLRQWTYSDKNSEDYILEQIRGKYPKAEMVLSHIPYGQLVKKDGALVTISSATELHNFEQLWLPLADYKLINTLLKTKEDNLVDILHNRLDLPEMTIESAFYKAFDSILSFAFNRYALHQNALVKLQAHRDDFNALNYEDKQQTLERILDALHASPASSDLKKINLSSGFGRLFSPSHFTLADTDEFIFQSVTGLFSTQKTVAQLYQETK

SEQ ID NO: 371 - protein, 1389 aa, Oenococcus kitaharae; identical to SEQ ID NO: 370
  Oenococcus kitaharae DSM 17330

SEQ ID NO: 372 - protein, 1399 aa, Olsenella uli
MNLRNTTDEYNIGLDMGTNSVGWAVTDKAGAIAHFKGKPTLGSRLFDAAQTAAGARIHRSQRRRYVRRRWRLDLLQSLFQDEVSKVDSEFFCRLRQSRLYVGDREKGHADYTWPIFNDSDFNEVDYYKRFPTIYHLRKWLMETDEKADIRLIYLATHNIVKHRGNFLRENNKSLSSRDANPAQAVKSLRLALNDWCSERDYECAWKGEEDDGAIDEAILNVLADGEKGRSDQAKEIAKLTGVDCGDAKQSKQCNEAIAKAIVGLKVEMKNIFGEFPAEKTSYIYLSSDEDVEAVRESCPDDSGELFQALCKLYSAYILQELLSYADPSGQTISANMVAKYKQYGRDLRLLKELTRTYAPQKYDLFFRGETYAGSSDYVVDEARGYTRYNLGTTKANYDDFQKSVKELFKGTDALQDERYQEMMVAFGEQKFLRRLKTSDNGSIYYQLHLEELHTILENQGKHYPFLLSEEDKIESLVSFRIPYYVGPLTRKNAAIGHDGKERFAWSSRKDGMEHAVITPWNWEEIIDRDKSAEDFIMRMTGDCTYLQGEPVLPKCSLLYEEFCALNEFNGAHWTVDGDDERRFDAAQRERIMCDLFRRTRSVTYNKVSDWLERKYNFTGARVRGGQGEHGFESKLGSYIFFCKDVFKTDGLDEADYTMIEQIILWSTLFEDRDILKRKIEEAYGGDRLTSEQIKVICKKRFTGWGRLSKRLLTDIKVNTDTGRKSIMDVLREGNPNNGQRSRTMVFMEVLRDEDLGFQKAIDGLNRDYFREHNNGLMDVNDLPGSPAIRRSINQAVRIVDEIASIARKEPTNIFIEVTREEDDPRKKGKRTKRRYDAIKSALEKFKKDDPSLWKELCEKAPGDMDERLSLYFMQRGKCMYSGRPIKIEELHTGKYEVDHIIPRSYIKDDSFENKVLVYREENQHKTDALLIDSSIRQKMGGYWRMLHDAKLVGDKKFRNLFRNHIDDKAMKGFVARQIVETSQMVKLVQTLFEARYPNTRIVPVKAGISHDLREAAGLVKCREANDFHHAHDAFLACRIGLFIQKRHPSVYDNPIGLARIMRDYARMQAREYKKSHCLAHTQGFIVNSFLSSGFDEETGEIFKDDWDAKAEVEGIRRVLNCRQCFISRMPVEGDTRYGGRYWGETIYSPKGKHKHEIPLKQGLDPNLYGGYSDLLYSYFLIYEASDVSSGERVLRFIGIPTSIAARMANQKRLEEYVSRLALQENLEHVRMVRKIMKKQLIEVDNCRLLVTAADAVTNATELAFSLDEMKIISTCAKCINGADPSAIDKIGNAQDSFFDNLKRRGSDRCALLFSQLKLDKLSQNFYMISSDDKSKILISILDRIRAKSNSVDLSLVGGAKHAAQMKFDFNAKLNNPASSFVLIDQSVTGMFERRTRIGL

SEQ ID NO: 373 - protein, 1535 aa, Ornithobacterium rhinotracheale
MNTILGLDLGTNSIGWALIKVLNDKTRLPLEIIDLGVVVIPTDQRTLDKFSKGESISKTAERTKQKGVRKLYERKKLRRERLHRVLNILGFLPEHYSKKIDFKKHLGQFFGNSQPKISYVENDHGKHEFIFMDSYREMLKEFSKHNIKNVPYDWTIYYLRKKALSQKISKEELAWVILNFNKKRGYYQFRDDNADENKENKIEKYYALKVTNVKKEDAQNYTITLENGWIYKNKSKISLLDWVGSTKEFISTEKFDNKGNIIKKKNGEDDRTLKLVDSEKDWIAIKKSTEDRIENYGKTVGTYLYEHLLKDPNQKLNGELINIIDRKFYKNELKQILEKQKEFHPELLNEDLFQKSIIELYPKNSTRQKELKNKDLCYLLIDDVIYYQRDLKKKNSTINKCSFESREYYLNGEKQIQKINCIAKSKPLYQEFRTLQFIKNLKVYEIIDGLEKDITSKLLPDFETKEHFFEWLNDKEKIDQLQLLSYKCFDLHDNVKNDLIAKGIKRPTEKAIRTELLEKYRWNYSKDNDRNFLLNETRFKILKYLKKVDKKLTLTNEQIESLWLLLYSAKDERELKNGLQKFSEKNKLPKKFSDIFISFPPFKKEYGAYSEKALKKLLSLVRFGKYWSFNKIDNNIQNKIMNILNGEVDDSISDRVREKTILLQDKNDFQDLPLWLASYVAYNRFSEVSEIKYWDSPDKIEFLKQHSIGNPIVEKIINETLKLIKDIWVIHGKSCKNFFSEIHIELSREIKSSSKKRAQITNNNTKNQKLNNLIKSLLIEMASDTKYENVTPYSPSQQEILKIYDEGIYSKEENSEKIKEINKIRNNNKISKSDITKYKLWLEQGYISPYTGKIIPLTKLFTAKYQKEHIIPQTKFFDDSFNNKVICEAEVNKLKDNSLAMNFIKAKGGKAVKLSDGETVTILNQEEYKQLVRTSFKKNSIKLRNLLLEEIPDTFTKRQLNDTKYISKLVLSLLSNIVREKGELESTAKRIVSTNGQITSILRNDWGLNNIWNKLITPRFERLNNINKNKIYGNWENKKGKNVFQINYLNDNLSTLNTKRIDHRHHALDALIVACTTRNHINFLNNQYAKSRNQRHDLRAKLKRRETITTEGSKKQVFKDFIKPWESFTQDALKKLETTIVNFKVNKRIINKTINWYKKWEKQKDGTYKKIQKKQTKGDAWAIRKPLHIDTIYGIVCKKLPLKSALENYKNIIDENLKHKIKELKEVNKFDNNQIINFFKECNFIFEDNNIQKVEVYDFKDNRDKTILSSSRQLIDESFTPKKIGKVLDPTIRNILLKHLNSTKYNNKFDSDGNPIKPEKLAFSPEGLKDLNKNIKHLNNNKEHQPIKRVKLFETLGNKIKVGYTQQKNKKFAETATGTNLFLGIYSDNNKRDFKTIPLILAIQREKEGLNPCPDTDEKGNQLLFSLSPNELVFVPNNEERKNPNLVDFENLSKDQIDRIYKFVSCTGSEAYFVPSRTAKPIIENENGTNNKSQRIIEFNEKTSIKNEKNEPVLIKTICWKIEVNRLGKIIKVIK

SEQ ID NO: 374 - protein, 1443 aa, Parabacteroides johnsonii
  Parabacteroides johnsonii DSM 18315
MIKLLYLEKLKQYTMKKILGLDLGTSSIGWALVNEAENSDEVSSIIKLGVRVNPLTVDEMQNFEKGKSITTNADRTLKRSMRRNLQRYKLRRDALIELLKKVGFITDKTILSEQGNRTTFETYRLRAKAAEEEISLKELARVLLMINKKRGYKSSRKAKGEEEGALIDGMEIAKKLYDEDLTPGQLCLQLLESGKKFFPDFYRSDLQEEFNKIWDFQKQFNLFSFCDVAKEEVKGKNKSQTWAILAKYFVETKKVNVWNEHEAQTENREEVYKLVGLKRTVKGEELKKENYRWRVQALTEQLDLEKIAVVLQEINGQISASSGYLGAISDRSKVLYFNRQTVGQYQMAELNKNPNMSLRNMVFYRQDYLDEFNVIWEKQAEFHKELTPELKKEIRDIIIFYQRRLKSQKGLISFCEFENREVVVEKEGKKQTKIIGCKVIPRSHPLFQEFKIWQTLNNIEVFVGEKKGKRKKSNVSSDLFGDTEDALITEGRRFLYQEEKKILAKELSIKKGLTKAEILRLLFENPQELDINFKQIDGNQTGFALFSAYSNMIEKYGYEPLDFKKPAEDLISQLKTVFTDLGWNTDLLFIDLDKENKEWEKQPYFRLWHLLYSFEGDNTPTGNGKLIEKIMQLCGIEKEYAIELANVSLQDDYGSLSAKAIKKILLYLKEGNQYDMACEYAGYRHSKSSLTKEEIENKVLKDKLEILPKNSLRNPVVEKILNQMVNVINTVMEVYGRPDEIRVELARELKKSAKEREELTKAVAKNTREHEEIRKVLQSEFGMINVSRNDIIRYKLYEELKDNGYKTLYSNQYIPREKLFSKEIDIEHIIPQSRLFDDSLSNKTLEYKSINIEKGNKTAYDFVKEKYGEEGLQQYLNRCENLCKDKKAKLRKLKMELNEIPDGFIDRDLRNTQYIAKKALSMLTEICRRVVATTGSITDKLREDWQLVDVMKELNLPKYEALGLVEVYEDKDGRKIKRIKDWTKRNDHRHHAMDALTVAFTKDVFIQYFNNKNAAWESDSKEHTNIVGIKTRYFESGKAVPPIPLGQFRVEAKCHLENLLVSIKAKNKVVTTNVNCIKKKGGTYKNTQQTPRGQLHLETIYGSHNQYVTKIEKVNASFDAVKIATVSKQDYRNALLKRLEVFGNDPKKAFTGKNSLEKNPIYLDRAQTIQVPDKVQTVELETAYTIRKPVDPTLNVDKVVDKKIRLILEQRLKEYGGDAKKAFVNLDENPIWLNEEKGISIKRVTIRGISKAQALHDKKDKDGNFILDETGKRIPVDFVNTGNNHHVAIYRKPVLDKKGQVIFDDEGNPMYELDEDVVPFFEAVTRANLGIPIIDKDYKKSEGWQFLFSMKQNEYFVFPNEKTGFNPKEVDLLDPDNYAMISPNLFRVQKIGLNDYTFRHHLETTIQNDLKFITWIRCGKSGIKDIVKVRINHIGQIVSVGEY

SEQ ID NO: 375 - protein, 1424 aa, Parabacteroides sp.
  Parabacteroides sp. D13
MKRILGLDLGTNSIGWALVNEAETDEEVSSIIRLGVRVNPLTVDETQNFEKGKSITTNAERTLKRSMRRNLQRYKLRRDALVEFLKELGFITDETILSEQGNRTTFETCRLRAKAAEEEISLEELSRVLLMINKKRGYKSSRKVKKEEDGVLIDGMEIAKKLYEEDLTPGQLCSQLLESGKKVLPDFYRSDLQEELDRIWSVQKQFHPDVFCDAAKEEIKGKNRSQTWAILANYFVWKEEVVGWNDREAKNETIEKECKLVGLKRTTKGYELKKENYRWRAQALTEQLGLEEIAVVLQEINGQINASSGYLGAISDRSKVLYFNHQTVGQYQMAELDKNPHASLRNMVFYRQDYLDEFDRIWEKQAEFHKELTAELKKEIRDMIIFYQRRLKSQKGLISFCEFERLEIVVEKDGKKQTKVIGCKVIPRSHPLFQEFKVWQTLNDIKVLGREKKRNALSASESRALYPEEKEILARELAIKENMKKADVLKLLFENPQELDLNFKQIDGNRTGFSLFSAYSKMIEKYGYEPLDFKKPADEIIGQLRTIFTDLGWNTNLFTIDLTKEGKELEMQPYFRLWHLLYSFEGDNTSTGNGKLIEKIMQLCGVEKEYAVELASLSFQDDYGSLSAKAIKRILPYLKEGNLYDVACEYAGYRHSKSSLTKEEIENKVLKGKLEVLPKNSLRNPVVEKILSQMVNVINTIIDTYGKPDEIRVELARELKKSAKEREELTKAIAKSTREHEEIRKLLQDEFGMMNVSRNDIIRYKLYEELKDNGYKTLYSNQYIPKEKIFSKEIDIEHIIPQSRLFDDSLSNKTLEYKAINIEKGNKTAYDFVKEKYGEEGLQQYINRCESLFNDKKAKLRKLKMEQKDIPDGFIDRDLRNTQYIAKKALAMLNEICRRVVATTGSITDQLREDWQLVDVMKELNLPKYEALGFVETYEDKDGRKIKRIKDWTKRNDHRHHAMDALTVAFTKDAFIQYFNNKNAAQDSGNRNHTNIIGIKTRYFDKGRALPPIPLEQFRIEAKQHLEKLLVSIKAKNKVVTVNVNRTKKRKGENTKIQQTPRGQLHLETVYGSHKQYVTKIEKVNASFDAAKIATVSKRAYRNALLKRLETFGNDPKKAFTGKNALEKNPLYADKYQTIRVPEKVQTVEFETIYTIRKPVDPALNVDKVVDVKVRAILERRLKEYGGDPKKAFVNFWENPIWLNKEKGISIKRVSIRGINNAQSIHVKKDKNGNPIWDENGKQIPVDFVNTGNNHHVAIYRKPVLDKKGQVTFDEDGNLMYELDEVVVPFFEAVTRANLGLPIIDKDYRKSEGWQFLFSMKQNEYFVFPNEKTGFNPKEVDLLNPDNYAMISPNLFRVQTMSKVMYGNNVVRDYKFRHHLETTVKDMKELKDIAYKQYKTLSFGNSVVKIRINHIGQIVSVGEY

SEQ ID NO: 376 - protein, 1428 aa, Parasutterella excrementihominis
  Parasutterella excrementihominis YIT 11859
MGKTHIIGVGLDLGGTYTGTFITSHPSDEAEHRDHSSAFTVVNSEKLSFSSKSRTAVRHRVRSYKGFDLRRRLLLLVAEYQLLQKKQTLAPEERENLRIALSGYLKRRGYARTEAETDTSVLESLDPSVFSSAPSFTNFFNDSEPLNIQWEAIANSPETTKALNKELSGQKEADFKKYIKTSFPEYSAKEILANYVEGRRAILDASKYIANLQSLGHKHRSKYLSDILQDMKRDSRITRLSEAFGSTDNLWRIIGNISNLQERAVRWYFNDAKFEQGQEQLDAVKLKNVLVRALKYLRSDDKEWSASQKQIIQSLEQSGDVLDVLAGLDPDRTIPPYEDQNNRRPPEDQTLYLNPKALSSEYGEKWKSWANKFAGAYPLLTEDLTEILKNTDRKSRIKIRSDVLPDSDYRLAYILQRAFDRSIALDECSIRRTAEDFENGVVIKNEKLEDVLSGHQLEEFLEFANRYYQETAKAKNGLWFPENALLERADLHPPMKNKILNVIVGQALGVSPAEGTDFIEEIWNSKVKGRSTVRSICNAIENERKTYGPYFSEDYKFVKTALKEGKTEKELSKKFAAVIKVLKMVSEVVPFIGKELRLSDEAQSKFDNLYSLAQLYNLIETERNGFSKVSLAAHLENAWRMTMTDGSAQCCRLPADCVRPFDGFIRKAIDRNSWEVAKRIAEEVKKSVDFTNGTVKIPVAIEANSFNFTASLTDLKYIQLKEQKLKKKLEDIQRNEENQEKRWLSKEERIRADSHGICAYTGRPLDDVGEIDHIIPRSLTLKKSESIYNSEVNLIFVSAQGNQEKKNNIYLLSNLAKNYLAAVFGTSDLSQITNEIESTVLQLKAAGRLGYFDLLSEKERACARHALFLNSDSEARRAVIDVLGSRRKASVNGTQAWFVRSIFSKVRQALAAWTQETGNELIFDAISVPAADSSEMRKRFAEYRPEFRKPKVQPVASHSIDAMCIYLAACSDPFKTKRMGSQLAIYEPINFDNLFTGSCQVIQNTPRNFSDKTNIANSPIFKETIYAERFLDIIVSRGEIFIGYPSNMPFEEKPNRISIGGKDPFSILSVLGAYLDKAPSSEKEKLTIYRVVKNKAFELFSKVAGSKFTAEEDKAAKILEALHFVTVKQDVAATVSDLIKSKKELSKDSIENLAKQKGCLKKVEYSSKEFKFKGSLIIPAAVEWGKVLWNVFKENTAEELKDENALRKALEAAWPSSFGTRNLHSKAKRVFSLPVVATQSGAVRIRRKTAFGDFVYQSQDTNNLYSSFPVKNGKLDWSSPIIHPALQNRNLTAYGYRFVDHDRSISMSEFREVYNKDDLMRIELAQGTSSRRYLRVEMPGEKFLAWFGENSISLGSSFKFSVSEVFDNKIYTENAEFTKFLPKPREDNKHNGTIFFELVGPRVIFNYIVGGAASSLKEIFSEAGKERS

SEQ ID NO: 377 - protein, 1037 aa, Parvibaculum lavamentivorans
MERIFGFDIGTTSIGFSVIDYSSTQSAGNIQRLGVRIFPEARDPDGTPLNQQRRQKRMMRRQLRRRRIRRKALNETLHEAGFLPAYGSADWPVVMADEPYELRRRGLEEGLSAYEFGRAIYHLAQHRHFKGRELEESDTPDPDVDDEKEAANERAATLKALKNEQTTLGAWLARRPPSDRKRGIHAHRNVVAEEFERLWEVQSKFHPALKSEEMRARISDTIFAQRPVFWRKNTLGECRFMPGEPLCPKGSWLSQQRRMLEKLNNLAIAGGNARPLDAEERDAILSKLQQQASMSWPGVRSALKALYKQRGEPGAEKSLKFNLELGGESKLLGNALEAKLADMFGPDWPAHPRKQEIRHAVHERLWAADYGETPDKKRVIILSEKDRKAHREAAANSFVADFGITGEQAAQLQALKLPTGWEPYSIPALNLFLAELEKGERFGALVNGPDWEGWRRTNFPHRNQPTGEILDKLPSPASKEERERISQLRNPTVVRTQNELRKVVNNLIGLYGKPDRIRIEVGRDVGKSKREREEIQSGIRRNEKQRKKATEDLIKNGIANPSRDDVEKWILWKEGQERCPYTGDQIGFNALFREGRYEVEHIWPRSRSFDNSPRNKTLCRKDVNIEKGNRMPFEAFGHDEDRWSAIQIRLQGMVSAKGGTGMSPGKVKRFLAKTMPEDFAARQLNDTRYAAKQILAQLKRLWPDMGPEAPVKVEAVTGQVTAQLRKLWTLNNILADDGEKTRADHRHHAIDALTVACTHPGMTNKLSRYWQLRDDPRAEKPALTPPWDTIRADAEKAVSEIVVSHRVRKKVSGPLHKETTYGDTGTDIKTKSGTYRQFVTRKKIESLSKGELDEIRDPRIKEIVAAHVAGRGGDPKKAFPPYPCVSPGGPEIRKVRLTSKQQLNLMAQTGNGYADLGSNHHIAIYRLPDGKADFEIVSLFDASRRLAQRNPIVQRTRADGASFVMSLAAGEAIMIPEGSKKGIWIVQGVWASGQVVLERDTDADHSTTTRPMPNPILKDDAKKVSIDPIGRVRPSND

SEQ ID NO: 378 - protein, 1058 aa, Pasteurella multocida
  Pasteurella multocida subsp. gallicida X73
MQTTNLSYILGLDLGIASVGWAVVEINENEDPIGLIDVGVRIFERAEVPKTGESLALSRRLARSTRRLIRRRAHRLLLAKRFLKREGILSTTDLEKGLPNQAWELRVAGLERRLSAIEWGAVLLHLIKHRGYLSKRKNESQTNNKELGALLSGVAQNHQLLQSDDYRTPAELALKKFAKEEGHIRNQRGAYTHTFNRLDLLAELNLLFAQQHQFGNPHCKEHIQQYMTELLMWQKPALSGEAILKMLGKCTHEKNEFKAAKHTYSAERFVWLTKLNNLRILEDGAERALNEEERQLLINHPYEKSKLTYAQVRKLLGLSEQAIFKHLRYSKESAESATFMELKAWHAIRKALENQGLKDTWQDLAKKPDLLDEIGTAFSLYKTDEDIQQYLEGKLPDSVINALLVSLNFDKFIELSLKSLRKILPLMEQGKRYDQACHEIYGHHYGEKNQQISQLLPVIPTQEIRNPVVLRTLSQARKVINAIIRQYGSPARVHIETGRELGKSFKERREIQKQQEDNRTKRESAVQKFKELFSDFSSEPKSKDILKFRLYEQQHGKCLYSGKEINIHRLNEKGYVEIDHALPFSRTWDDSFNNKVLVLASENQNKGNQTPYEWLQGKINSERWKNFVALVLGSQCSAAKKQRLLTQVIDDNKFIDRNLNDTRYIARFLSNYIQENLLLVGKNKKNVFTPNGQITALLRSRWGLIKVRENNDRHHALDAIVVACATPSMQQKITRFIRFKEVHPYKIENRYEMVDQESGEIISPHFPEPWAYFRQEVNIRVFDNHPDTVLKEMLPDRPQANHQFVQPLFVSRAPTRKMSGQGHMETIKSAKRLAEGISVLRIPLTQLKPNLLENMVNKEREPALYVGLKARLAEFNQDPAKAFATPFYKQGGQQVKAIRVELVQKSGVLVRQGNGVADNAPGSIVRTDVFIKNNKFFLVPIYTWQVAKGILPNKAIVAHKNEDEWEEMDEGAKFKFSIFPNDLIELRTKTECFLGYYIGPDRHNGSISLREHDSEISKGNAGVYRVGVKLALSLEKYHIDELGKNRRICRPHQRRPVR

SEQ ID NO: 379 - protein, 1056 aa, Pasteurella multocida
  Pasteurella multocida subsp. multocida str. P52VAC
MQTTNLSYILGLDLGIASVGWAVVEINENEDPIGLIDVGVRIFERAEVPKTGESLALSRRLARSTRRLIRRRARRLLLAKRFLKREGILSTTDLEKGLPNQAWELRVAGLERRLSAIEWGAVLLHLIKHRGYLSKRKNESQTNNKELGALLSGVAQNHQLLQSDDYRTPAELALKKFAKEEGHIRNQRGAYTHTFNRLDLLAELNLLFAQQHQFGNPHCKEHIQQYMTELLMWQKPALSGEAILKMLGKCTHEKNEFKAAKHTYSAERFVWLTKLNNLRILEDGAERALNEEERQLLINHPYEKSKLTYAQVRKLLGLSEQAIFKHLRYSKENAESATFMELKAWHAIRKALENQGLKDTWQDLAKKPDLLDEIGTAFSLYKTDEDIQQYLTNKVPNSVINALLVFLNFDKFIELALKSLRKILPLMEQGKRYDQACREIYGHHYGEANQKTSQLLPAIPAQEIRNPVVLRTLSQARKVINAIIRQYGSPARVHIETGRELGKSFKERREIQKQQEDNRTKRESAVQKFKELFSDFSSEPKSKDILKFRLYEQQHGKCLYSGKEINIHRLNEKGYVEIDHALPFSRTWDDSFNNKVLVLASENQNKGNQTPYEWLQGKINSERWKNFVALVLGSQCSAAKKQRLLTQVIDDNKFIDRNLNDTRYIARFLSNYIQENLLLVGKNKKNVFTPNGQITALLRSRWGLIKIRENNDRHHALDAIVVACATPSMQQKITRFIRFKEVHPYKIENRYEMVDQESGEIISPHFPEPWAYFRQEVNIRVFDNHPDTVLKEMLPDRPQANHQFVQPLFVSRAPTRKMSGQGHMETIKSAKRLAEGISVLRIPLTQLKPNLLENMVNKEREPALYAGLKARLAEFNQDPAKAFTTPFYKQGGQQVKAIRVEQVQKSGVLVRENNGVADNASIVRTDVFIKNNKFFLVPIYTWQVAKGILPNKAIVAHKNEDEWEEMDEGAKFKFSLFPNDLVELKTKKEYFFGYYIGLDRATGNISLKEHDGEISKGKDGVYRVGVKLALSFEKYQVDELGKNRQICRPQQRQPVR

SEQ ID NO: 380 - protein, 1056 aa, Pasteurella multocida
MQTTNLSYILGLDLGIASVGWAVVEINENEDPIGLIDVGVRIFERAEVPKTGESLALSRRLARSTRRLIRRRAHRLLLAKRFLKREGILSTIDLEKGLPNQAWELRVAGLERRLSAIEWGAVLLHLIKHRGYLSKRKNESQTNNKELGALLSGVAQNHQLLQSDDYRTPAELALKKFAKEEGHIRNQRGAYTHTFNRLDLLAELNLLFAQQHQFGNPHCKEHIQQYMTELLMWQKPALSGEAILKMLGKCTHEKNEFKAAKHTYSAERFVWLTKLNNLRILEDGAERALNEEERQLLINHPYEKSKLTYAQVRKLLGLSEQAIFKHLRYSKENAESATFMELKAWHAIRKALENQGLKDTWQDLAKKPDLLDEIGTAFSLYKTDEDIQQYLTNKVPNSVINALLVSLNFDKFIELSLKSLRKILPLMEQGKRYDQACREIYGHHYGEANQKTSQLLPAIPAQEIRNPVVLRTLSQARKVINAIIRQYGSPARVHIETGRELGKSFKERREIQKQQEDNRTKRESAVQKFKELFSDFSSEPKSKDILKFRLYEQQHGKCLYSGKEINIHRLNEKGYVEIDHALPFSRTWDDSFNNKVLVLASENQNKGNQTPYEWLQGKINSERWKNFVALVLGSQCSAAKKQRLLTQVIDDNKFIDRNLNDTRYIARFLSNYIQENLLLVGKNKKNVFTPNGQITALLRSRWGLIKARENNNRHHALDAIVVACATPSMQQKITRFIRFKEVHPYKIENRYEMVDQESGEIISPHFPEPWAYFRQEVNIRVFDNHPDTVLKEMLPDRPQANHQFVQPLFVSRAPTRKMSGQGHMETIKSAKRLAEGISVLRIPLTQLKPNLLENMVNKEREPALYAGLKARLAEFNQDPAKAFATPFYKQGGQQVKAIRVEQVQKSGVLVRENNGVADNASIVRTDVFIKNNKFFLVPIYTWQVAKGILPNKAIVAHKNEDEWEEMDEGAKFKFSLFPNDLVELKTKKEYFFGYYIGLDRATGNISLKEHDGEISKGKDGVYRVGVKLALSFEKYQVDELGKNRQICRPQQRQPVR

SEQ ID NO: 381 - protein, 1364 aa, Pediococcus acidilactici
  Pediococcus acidilactici DSM 20284
MGDRKYNLGLDIGTSSIGFAAVDENNQPIRVKGKTAIGVRLFEEGKTAADRRGFRTTRRRLSRRRWRINLLNEIFDAHLAEVDPTFLARLKESNRSNLDPKKSFQGSLLFPERKDYQFYEEYPTIYHLRKALMEKDRKFDFREIYLAVHHIIKYRGNFLNGTPMRSFKVENIELDTLFDQLNQLYAEIVPDNELAFDLAQVADVKDVLSSTTIYKMDKKKQLVKMMLLPASNKALQSENKKIVTQFVNAILNYKFKLDVLLQVETDADWSLKLNDEGADDKLEEFTGDLDENRLEIIDLLQRLHNWFSLNEITKDGNSLSAAMVEKYENHHHHLGLLKKVIENHPDAKKAKALKETYTAYVGKTDDKTQNQDDFYKAVEKNLDDSPDAKEIKRLIQLDQFMPKQRTGQNGAIPHQLHQQELDQIIEKQSKYYPFLAEPNPNVKRRKDAPYKLDELIAFKIPYYVGPLVTPEEQAQNGENVFAWMKRKAAGPITPWNFDEKVDRMESANRFIRRMTTKDTYLFGEDVLPAESMIYQKFVVLNELNNLKINGRHLSLKDKQDVYNDLFKQQKTVSIKALQNYYVTKKKAATAPTVGGLADPKKFLSSLSTYIDFKNMFGERVNDPQFQEDLEQIVEWSTIFEDRGIFKAKLQALGWLSEKQIQQLVAKRYKGWGRLSKKLLTGLKNAEGYSILDEMWRSTGNFMQIQSRPEFAALIQQANEKQFEGNDPDNVWENIENILGDAYTSPQNKKAIRQVVKVVQDIEKAVGNPPEKIAIEFTREAAANPQRTQSRLRTLEKLYESAEEVVDAGLTAELAEFKENKHVLSDKYYLYFTQLGRDVYTGDTISLDKLNDYDVDHILPQSFIKDDSLDNRVLTIRAVNNGKSDNVPAKMFGKKMGSFWRYLLDNGMISKRKYNNLITDPDNISKYAQKGFINRQLVETSQVIKLTANILNGIYDKDTEIIEVPAKMNSQMRKMFDLVKVREVNDYHHAFDAYLTIFIGNYLYKCYPKLQPYFVYDNFKKFGNKEDIGHKRFNFLGKIEREKKVVAPETGEILWSNVAPNETIKQIKKVYDYKFMIVSREITTRRAELFNQTVYPKNYHGKLIPIKEDRPTDLYGGYSGNTDAYLAIVALEDKKKGKYFKVVGIPTRVAAKLEKLKQQDSQQYLQALHKVIAPQFTKSTKKGIKKTEFEIVLDKVHYRQLVQDGPVKMMLGSSTYKYNAKQLVLSEKALQVIADDRKFDETQKDDNLIAVYDEILSIVNQSFDLYDINGFRKKLNDNRDQFIDLPAETKYEGRKVVAHGKREMILEILKGLHANAAFGNLKPIGFSTAFGQLQVPNGIILSKNAILIHQSPSGLFERKIKLSDL

SEQ ID NO: 382 - protein, 1366 aa, Pediococcus acidilactici
  Pediococcus acidilactici MA18/5M
MGDRKYNLGLDIGTSSIGFAAVDENNQPIRVKGKTAIGVRLFEEGKTAADRRGFRTTRRRLSRRRWRINLLNEIFDAHLAEVDPTFLARLKESNRSNLDPKKSFQGSLLFPERKDYQFYEEYPTIYHLRKALMEEDRKFDIREIYLAVHHIIKYRGNFLNGTPMRSFKVENIELDTLFDQLNQLYAEIVPDNELAFDLAQVADVKDVLSSTTIYKMDKKKQLVKMMLLPASNKALQSENKKIVTQFVNAILNYKFKLDVLLQVETDADWSLKLNDEGADDKLEEFTGDLDENRLEIIDLLQRLHNWFSLNEITKDGNSLSAAMVEKYENHHHHLGLLKKVIENHPDAKKAKALKETYTAYVGKTDDKTQNQDDFYKAVEKNLDDSPDAKEIKRLIQLDQFMPKQRTGQNGAIPHQLHQQELDQIIEKQSKYYPFLAEPNPNVKRRKDAPYKLDELIAFKIPYYVGPLVTPEEQAQNKENVFAWMKRKAAGPITPWNFDEKVDRMESANRFIRRMTTKDTYLFGEDVLPAESMIYQKFVVLNELNNLKINGRHLSLKDKQDVYNDLFKQQKTVSIKALQNYYVTKKKAATAPTVGGLADPKKFLSSLSTYIDFKNMFGERVNDPQFQEDLEQIVEWSTIFEDRGIFKAKLQALGWLSEKQIQQLVAKRYKGWGRLSKKLLTGLKNAEGYSILDEMWRSTENFMQIQTRPEFAALIQQANEKQFEGNDPNNVWENIESILGDAYTSPQNKKAIRQVVKVVQDIEKAVGNPPEKIAIEFTREAAANPQRTQSRLRTLEKLYESAEEVVDAGLTAELAEFKENKHVLSDKYYLYFTQLGRDVYTGDTISLDKLNDYDVDHILPQSFIKDDSLDNRVLTIRAVNNGKSDNVPAKMFGKKMGSFWRYLLDNGMISKRKYNNLITDPDNISKYAQKGFINRQLVETSQVIKLTANILNGIYDKDTEIIEVPAKMNSQMRKMFDLVKVREVNDYHHAFDAYLTIFIGKYLYKCYPKLRPYFVYGKFKKFGDNEDIEVGDGRFNFLNRIERLKNVTDPETGEILWSNVAPNETIKQIKKVYNYKFMLVSRETTTRRAELFNQTVYPKNYRGKLIPIKEDRPTDLYGGYSGNTDAYLAIVALEDKKKGKYFKVVGIPTRAAAKLEKLKQQDSQQYLQALHKVIAPQFTKSTKKGIKKTEFEIVLDKVHYRQLVQDGPVKMMLGSSTYKYNAKQLVLSEKALQVIADDRKFDETQKDDNLIAVYDEILSIVNQSFDLYDINGFRKKLNDNRDQFIDLPAETKYEGRKVVAHGKREMILEILKGLHANAAFGNLKPIGFSTAFGQLQVPNGIILSKNAILIHQSPSGLFERKIKLSDL

SEQ ID NO: 383 - protein, 1364 aa, Peptoniphilus duerdenii
  Peptoniphilus duerdenii ATCC BAA-1640
MKNLKEYYIGLDIGTASVGWAVTDESYNIPKFNGKKMWGVRLFDDAKTAEERRTQRGSRRRLNRRKERINLLQDLFATEISKVDPNFFLRLDNSDLYREDKDEKLKSKYTLFNDKDFKDRDYHKKYPTIHHLIMDLIEDEGKKDIRLLYLACHYLLKNRGHFIFEGQKFDTKNSFDKSINDLKIHLRDEYNIDLEFNNEDLIEIITDTTLNKTNKKKELKNIVGDTKFLKAISAIMIGSSQKLVDLFEDGEFEETTVKSVDFSTTAFDDKYSEYEEALGDTISLLNILKSIYDSSILENLLKDADKSKDGNKYISKAFVKKFNKHGKDLKTLKRIIKKYLPSEYANIFRNKSINDNYVAYTKSNITSNKRTKASKFTKQEDFYKFIKKHLDTIKETKLNSSENEDLKLIDEMLTDIEFKTFIPKLKSSDNGVIPYQLKLMELKKILDNQSKYYDFLNESDEYGTVKDKVESIMEFRIPYYVGPLNPDSKYAWIKRENTKITPWNFKDIVDLDSSREEFIDRLIGRCTYLKEEKVLPKASLIYNEFMVLNELNNLKLNEFLITEEMKKAIFEELFKTKKKVTLKAVSNLLKKEFNLTGDILLSGTDGDFKQGLNSYIDFKNIIGDKVDRDDYRIKIEEIIKLIVLYEDDKTYLKKKIKSAYKNDFTDDEIKKIAALNYKDWGRLSKRFLTGIEGVDKTTGEKGSIIYFMREYNLNLMELMSGHYTFTEEVEKLNPVENRELCYEMVDELYLSPSVKRMLWQSLRVVDEIKRIIGKDPKKIFIEMARAKEAKNSRKESRKNKLLEFYKFGKKAFINEIGEERYNYLLNEINSEEESKFRWDNLYLYYTQLGRCMYSLEPIDLADLKSNNIYDQDHIYPKSKIYDDSLENRVLVKKNLNHEKGNQYPIPEKVLNKNAYGFWKILFDKGLIGQKKYTRLTRRTPFEERELAEFIERQIVETRQATKETANLLKNICQDSEIVYSKAENASRFRQEFDIIKCRTVNDLHHMHDAYLNIVVGNVYNTKFTKNPLNFIKDKDNVRSYNLENMFKYDVVRGSYTAWIADDSEGNVKAATIKKVKRELEGKNYRFTRMSYIGTGGLYDQNLMRKGKGQIPQKENTNKSNIEKYGGYNKASSAYFALIESDGKAGRERTLETIPIMVYNQEKYGNTEAVDKYLKDNLELQDPKILKDKIKINSLIKLDGFLYNIKGKTGDSLSIAGSVQLIVNKEEQKLIKKMDKFLVKKKDNKDIKVTSFDNIKEEELIKLYKTLSDKLNNGIYSNKRNNQAKNISEALDKFKEISIEEKIDVLNQIILLFQSYNNGCNLKSIGLSAKTGVVFIPKKLNYKECKLINQSITGLFENEVDLLNL

SEQ ID NO: 384 - protein, 1087 aa, Phascolarctobacterium succinatutens
  Phascolarctobacterium succinatutens YIT 12067
MLRMKYAIGLDIGIASVGYAVLALDHEENPWGIIRLGSRIFDVAENPKDGASLALPRREARSVRRRLRRHHHRLERIKNLLINTEFITKDELLHLYDGNLSDVYELRVKALDYSVTNAELTRILLHLAQRRGFKSNRKSDANDKEAGQLLEAVSANAKRMQENHYRTVGEMFYKDDLFSKYKRNKGGTYLTTVHRDMIAAEARTILEKQFALGNNICTQDFIDKYLSILLSQRQFDEGPGEPSPYAGNQIANMIGKCTFEPNEYRAAKASYSFERFNLLQKVNHLRLLLEGKSIALDNEQRKKIIALAHDKADLRYSHIRKALGLDEKVLFNTITYNDDVSVIEKKTKFNFLQAYHQIKKVLAEDMQKLTTEQLDNIGQILSTYKSDNKRTEELSALGLEKKIIDALLGINGLSKFAHLSLKALRKINPYLEEGKIYNEACTAAGYDFKAHANTQKTELLPAYKEEMDDITSPVARRAIAQSIKVINAIIREQKGSPLYINIELAREMAKGFDERTQIDKANKENQAKNERIMERIRTEFHKANPTGMDLIKLKLWEEQDGRSPYSQKAISINRLFEPGYVDIDHIVPYSISFDDSFKNKVLVFSDENRDKGNRLPIAYLQSKFGAKAAENFMIWVQSNIKDYKKRQKLLKREITEEDINKFKERNLQDTKTISRFLYNYINDYLLFAPSDTGKKKRVTAVNGTITAYLRKRWGINKIRANGDKHHAVDAVVIACTTDKMIKDLSSFSRYHELEYTHTDTESFLVNSLTGEILKRFPYPWEDFRPELMARLSDNPADALRKLNLIFYHGIDLSTIKPIFVSRMPRHKVTGAAHKATIKSARCLDNGIVICKTSLQNLKLDKEGEIANYYAPESDTILYNALKERLRSYDNKPAKAFAEPFYKPKADGTPGPLVKKVKVYEKSTLNVAVQQNTAVADNDSMVRVDVFHVKGNGYYLVPIYIADTLKKELPNKAIVAYKPYADWPVMDDSNFIFSLYPNDLIKFEHKNSVKFAKVNKESTLNDFYSTKSEIVYFKGCNINTGAITIINHENTYVVSSLGVKTLPSLEKYQADVLGNYTKVKKEVRKPFR

SEQ ID NO: 385 - protein, 1333 aa, Planococcus antarcticus
  Planococcus antarcticus DSM 14505
MKNYTIGLDIGVASVGWVCIDENYKILNYNNRHAFGVHEFESAESAAGRRLKRGMRRRYNRRKKRLQLLQSLFDSYITDSGFFSKTDSQHFWKNNNEFENRSLTEVLSSLRISSRKYPTIYHLRSDLIESNKKMDLRLVYLALHNLVKYRGHFLQEGNWSEAASAEGMDDQLLELVTRYAELENLSPLDLSESQWKAAETLLLNRNLTKTDQSKELTAMFGKEYEPFCKLVAGLGVSLHQLFPSSEQALAYKETKTKVQLSNENVEEVMELLLEEESALLEAVQPFYQQVVLYELLKGETYVAKAKVSAFKQYQKDMASLKNLLDKTFGEKVYRSYFISDKNSQREYQKSHKVEVLCKLDQFNKEAKFAETFYKDLKKLLEDKSKTSIGTTEKDEMLRIIKAIDSNQFLQKQKGIQNAAIPHQNSLYEAEKILRNQQAHYPFITTEWIEKVKQILAFRIPYYIGPLVKDTTQSPFSWVERKGDAPITPWNFDEQIDKAASAEAFISRMRKTCTYLKGQEVLPKSSLTYERFEVLNELNGIQLRTTGAESDFRHRLSYEMKCWIIDNVFKQYKTVSTKRLLQELKKSPYADELYDEHTGEIKEVFGTQKENAFATSLSGYISMKSILGAVVDDNPAMTEELIYWIAVFEDREILHLKIQEKYPSITDVQRQKLALVKLPGWGRFSRLLIDGLPLDEQGQSVLDHMEQYSSVFMEVLKNKGFGLEKKIQKMNQHQVDGTKKIRYEDIEELAGSPALKRGIWRSVKIVEELVSIFGEPANIVLEVAREDGEKKRTKSRKDQWEELTKTTLKNDPDLKSFIGEIKSQGDQRFNEQRFWLYVTQQGKCLYTGKALDIQNLSMYEVDHILPQNFVKDDSLDNLALVMPEANQRKNQVGQNKMPLEIIEANQQYAMRTLWERLHELKLISSGKLGRLKKPSFDEVDKDKFIARQLVETRQIIKHVRDLLDERFSKSDIHLVKAGIVSKFRRFSEIPKIRDYNNKHHAMDALFAAALIQSILGKYGKNFLAFDLSKKDRQKQWRSVKGSNKEFFLFKNFGNLRLQSPVTGEEVSGVEYMKHVYFELPWQTTKMTQTGDGMFYKESIFSPKVKQAKYVSPKTEKFVHDEVKNHSICLVEFTFMKKEKEVQETKFIDLKVIEHHQFLKEPESQLAKFLAEKETNSPIIHARIIRTIPKYQKIWIEHFPYYFISTRELHNARQFEISYELMEKVKQLSERSSVEELKIVFGLLIDQMNDNYPIYTKSSIQDRVQKFVDTQLYDFKSFEIGFEELKKAVAANAQRSDTFGSRISKKPKPEEVAIGYESITGLKYRKPRSVVGTKR

SEQ ID NO: 386 - protein, 1197 aa, Porphyromonas sp.
  Porphyromonas sp. oral taxon 279 str. F0450
MLMSKHVLGLDLGVGSIGWCLIALDAQGDPAEILGMGSRVVPLNNATKAIEAFNAGAAFTASQERTARRTMRRGFARYQLRRYRLRRELEKVGMLPDAALIQLPLLELWELRERAATAGRRLTLPELGRVLCHINQKRGYRHVKSDAAAIVGDEGEKKKDSNSAYLAGIRANDEKLQAEHKTVGQYFAEQLRQNQSESPTGGISYRIKDQIFSRQCYIDEYDQIMAVQRVHYPDILTDEFIRMLRDEVIFMQRPLKSCKHLVSLCEFEKQERVMRVQQDDGKGGWQLVERRVKFGPKVAPKSSPLFQLCCIYEAVNNIRLTRPNGSPCDITPEERAKIVAHLQSSASLSFAALKKLLKEKALIADQLTSKSGLKGNSTRVALASALQPYPQYHHLLDMELETRMMTVQLTDEETGEVTEREVAVVTDSYVRKPLYRLWHILYSIEEREAMRRALITQLGMKEEDLDGGLLDQLYRLDFVKPGYGNKSAKFICKLLPQLQQGLGYSEACAAVGYRHSNSPTSEEITERTLLEKIPLLQRNELRQPLVEKILNQMINLVNALKAEYGIDEVRVELARELKMSREERERMARNNKDREERNKGVAAKIRECGLYPTKPRIQKYMLWKEAGRQCLYCGRSIEEEQCLREGGMEVEHIIPKSVLYDDSYGNKTCACRRCNKEKGNRTALEYIRAKGREAEYMKRINDLLKEKKISYSKHQRLRWLKEDIPSDFLERQLRLTQYISRQAMAILQQGIRRVSASEGGVTARLRSLWGYGKILHTLNLDRYDSMGETERVSREGEATEELHITNWSKRMDHRHHAIDALVVACTRQSYIQRLNRLSSEFGREDKKKEDQEAQEQQATETGRLSNLERWLTQRPHFSVRTVSDKVAEILISYRPGQRVVTRGRNIYRKKMADGREVSCVQRGVLVPRGELMEASFYGKILSQGRVRIVKRYPLHDLKGEVVDPHLRELITTYNQELKSREKGAPIPPLCLDKDKKQEVRSVRCYAKTLSLDKAIPMCFDEKGEPTAFVKSASNHHLALYRTPKGKLVESIVTFWDAVDRARYGIPLVITHPREVMEQVLQRGDIPEQVLSLLPPSDWVFVDSLQQDEMVVIGLSDEELQRALEAQNYRKISEHLYRVQKMSSSYYVFRYHLETSVADDKNTSGRIPKFHRVQSLKAYEERNIRKVRVDLLGRISLL

SEQ ID NO: 387 - protein, 1485 aa, Prevotella bivia
  Prevotella bivia JCVIHMP010
MKNILGLDLGTNSIGWAKISIDDNGKYIKDSIKLGSRIIPMSQDVLSNFSKGVTLSQTSERTSFRGARRLRERTLLRRERLHRILHLLGFLPKHYEKAIGWDRNDNKTYGKFINHAEPKLAWCKDNNGKMRFLFMDSFHDMLSEFSEKHPELLANGKKIPLDWTIYYLRKKALYKAITKEELAWILLNFNQKRGYYQLRGEEDRDSEANKKEYLELKVIGVEATGEKKGNDIWYNIHLENGWIYRRSSKNPLNDWLGKVKSFIVTTDLDADGNPKKDKDGNIKRSFRAPSEGDWTLIKKRTESLLENSGQTVGQFIYNHILEEPSAKIRGNFIRTIERKYYKDELKAILEKQKEFHHELSSESLLTECAKELYKRNIAHQEVLLKKGIIHLLLNDILFYQRPLKIKKSLIDNCPYENYKYVDKKSGDIKVKSIKCIAKSNPFFQEFRLWQFVSNLRLYRKSDDKDVTSEHLVTTDDYANLFTYLNNRKDIKQSVLLKEYFKIKKVKTINGAEYPVRWNYIDDDNKTYPCNETRYDILHALSKTELKSEWLTPERTYRLWHLLYSIESKEETKKALNKLNLSDDFTEAFLTIKPFKKEYGSYSEKAIKKLLSLMRMGYLWSEDEAIKQVGAEIEKTIEGELPDYVLQRLEKSQHNYNKISDFSGLPLWLASYIIYGRHSEAKEIIHWDNPESMMAYIKDFRQHSMRNPIVEQCVLETLRTVHDIWKEIGHIDEIHIELGREMKSTSEQRKAITQNVLHNQNTNIRIKLLLQELKNDNNITGVRPYSPMQQEILRIYEEGALQGLTKEDKDYNDILKISQTAQPTSNELTRYKLWLEQKYRSPYTGKAISLSKLFTSAYQIEHVIPQSRYFDDSLSNKVICESEVNTLKKAMLGMEFIKTCGGQKVHCTLLGDVEIYNEEDYKAFVNEHYSNNRTKRNKLLMEDIPQEFINRQLNDSRYISKMVKQLLSAIVRGQEEVEATSKFVIPCTGGITDRLKKDWGLNDIWNNLVSPRFQRMNALTGSEYFGHWENKEGKRVFQTTMPIQLQQGFSKKRIDHRHHAMDALVIACASRNIISYLNNETAQDTERRRDLRQKLCDKGGSVRKPWDSFTQDTQYALKDIIVTFKNYVRIINKATNYYEHYKTDGKKGMISQKGDELWAIRKPMHKETVFGKVNLRRPKRVSLSKAIDSVDIICNRKLKKYIKARLNEGLQKKQILNIFKELNNVWEGIDVNKIDIWEMSNDKEPMVATRKQLDTSFDEKKIRSISDTGIQKILLNYLITKNNNPELAFTPEGIQEMNSNISEYNDHKKHQPIYKVRVTEPLGAKYPIGTMGNNPKKFVEAQAGTNLYFAIYEDKEGKRNYDTIPLNIAAERLNQQLSPVPETNENNTPLKFYLSPNDLVYVPSEEERHSGNNIQLDKNRIYKMVSSTSKRCFFIHHRVAISLVDKKEFSAQNKMERSIDNEQVMIKSVCWKLITDRLGNIIKVIK

SEQ ID NO: 388 - protein, 1457 aa, Prevotella buccae
  Prevotella buccae ATCC 33574
MKTILGLDLGTNSIGWAKVSVDDYGNYLHDIKLGSRIIPMSQDVLGNFDSGVTVSQTAQRTEFRSKRRLVQRNLQRRERLHRVLHVLDFLPAHYDAAIGWDRTEAVTYGKFLNHAEPKLAWEELGNGKRRFLFMDSFHEMVADFARCQPALVADGKKIPLDWTIYYLRKKALTQAITKEELAWILLNFNQKRGYYQLRGEEEEENPTKQEEYYELKVVSVEATDSRKGNDTWYNVHLENGWIYRRSSKISLDDWVGKVKQFIVTTEYEKDGATLKTDKEGYVKRSFRAPNENDWGLRKKRTETLLEMSGKTVGAFIYDHLLQEPADKIRGNFIRTIERHYYKAELEAILAEQCKYHIELRDKEMLEACARELYLNNLPHQRSLMKKDMTYLLLYDLIFYQRPLKSKKALIANCPYEYYEYVDKETGEIKRQNIKCIAKSNPYFQEFRLWQFVLNLRLFDRVEDKEVTANYLPTADDHARLFTYLNDRKEINQETLLKDYFKLKKVKIGNEKEYPIRWNYIEDKEKKYPCNETRYELLMALDRAGIEHKWLDDNNLEYRLWHLLYSVEVKSESETALRKLKNDDAFVNSFLKVKPFKKEYGAYSEKAIKRLLAVMRKGFLWNEQDICDETRKRIEIIIKGDVDEKVKERMGHAAYSFDRVSDFQGLPEWLACYVVYGRHSEAMDIQHWDSPERLMAYINNFKQYSLRNPIVEQCILETLRTVHDIWKETGQIDEIHVELGREMKSTSEERARRTQNVLRNENTNLRIKSLLIELKNDTDICNVHPYSPMQQEILRIYEEGALQELNREDEDFEEISKISQMSQPSGKELNRYKLWLEQKYRSPYTGKAISLAKLFTPAYQIEHVIPQSRYFDDSFTNKVICEAEVNTLKSNLLGYEFIKKHGGEIIHCTTLGDVRIFSESEYKAFVMDHYANNKSKKDKLLMEDIPQEFLSRQMNDSRYISKVVKTLLSNIVRMADESEATSKSVIVCTGGVTDRLKKDWGLNDVWNSIVYSRFERLNRLTGTEAFGHWENKDGKRVFQTSMPLELQRGFRKKRIDHRHHAMDALVIACASRNIVNYLNNESANNPKKREDLRRQLCDKNRVIRKPWETFTQDAYNALENVVVSFKNYVRVINKATNRYEHYDENGKKRFVQQKGSELWAIRKPMHKETYYGHVNLRRKELVTLQKALDDIPSICDKKLRDYISALVEKHFNKRQLLAHFKSTDYYWQKQYVNKVYVWTFSDDIKPLVATRKLLDTSFDAKRIGTITDTGIQKILRNYLEAKGGNATLAFTPEGIAEMNQNISKYNDGKPHQPILKVRITEPMGAKYRVGQTGNKMAKYVEAQSGTNLYFAIYEDSEGKRSYTTVPLDEVAERLKQRLSPVPEKDENDVPLKFYLSPNDLVYVPTEEELQLRECKLNKDRIYKMVSSTGNECHFIPYYVANVIYNKGGFNMQMHRPQS

SEQ ID NO: 389 - protein, 1218 aa, Prevotella buccalis
  Prevotella buccalis ATCC 35310
MNKRILGLDTGTNSLGWAVVDWDEHAQSYELIKYGDVIFQEGVKIEKGIESSKAAERSGYKAIRKQYFRRRLRKIQVLKVLVKYHLCPYLSDDDLRQWHLQKQYPKSDELMLWQRTSDEEGKNPYYDRHRCLHEKLDLTVEADRYTLGRALYHLTQRRGFLSNRLDTSADNKEDGVVKSGISQLSTEMEEAGCEYLGDYFYKLYHEQGNKVRIRQRYTDRKKHYQHEFDAICEKQELSSELIEDLQRAIFFQLPLKSQRHGVGRCTFERGKPRCADSHPDYEEFRMLCFVNNIQVKGPHDLELRPLTYEEREKIEHLFFRKSKPNFDFEDIAKELAGKKNYAWIHDKEERAYKFNYRMTQGVPGCPTTAQLKSIFGDDWKTGIAETYTLIQKKNGSKSLQEMVDDVWNVLYSFSSVEKLKEFAHHKLQLDEENAEKFAKIKLSHSFAALSLKAIRKFLPFLRKGMYYTHASFFANIPTIVGKEIWNNEQSRKYIMENVGELVFNYQPKHRDVQGTIEMLIKDFLANNFELPAGATDKLYHPSMIETYPHALRNEFGILQLGSPRTNAIRNPMAMRSLHVLRRVVNQLLKESIIDENTEVHVEYARELNDANKRRAIADRQKEQDKQHKKYGDEIRKLYKEETGKDIEPTQTDVLKFQLWEEQNHYCLYTGEQIGITDFIGSNPKFDIEHTIPQSVGGDSTQMNLTLCDNRFNREVKKAKLPTELANHEEILTRIEPWKNKYEQLVKERDKQRTFAGMDKAVKDIRIQKRHKLQMEIDYWRGKYERFTMTEVPEGFSRRQGTGIGLISRYAGLYLKSLFHQADSRNKSNVYVVKGVATAEFRKMWGLQSEYEKKCRDNHSHHCMDAITIACIGKREYDLMAEYYHMEETFRQGRGSKPKFSKPWATFTEDVLNIYKNLLVVHDTPNNMPKHTKKYVQTSKGKVLAQGDTARGSLHLDTYYGAIERDGEIRYVVRRPLSSFTNPKELENIVDETVKRTIKEAIADKNFKQAIAEPIYMNEDKGILIKKVRCFANSVKQPINIRQHRDLSKKEYKQQYHVMNENNYLLAIYEGLVKNKVVREFEIVSYIEAAKYYKRSQDRNIFSSIVPTHSTKYGLPLKTKLLMGQQVLMFEENPDEIQVDNTKDLVKRLYKVVGIEKDGRIKFKHHQEARKEGLTIYSTPYKNNDDYVPIFRQSIKNINILVDGIDFNIDILGKVTLKE

SEQ ID NO: 390 - protein, 1422 aa, Prevotella denticola
  Prevotella denticola CRIS 18C-A
MTQKVLGLDLGTNSIGSSVRNLDLSDDLKGQLEFFSSDIFRSSVNKESNGREYSLAAQRSAHSRSRGLNEARRRKLWATLDLLIKYGFCPMSPESLMRWRTYDKQRGLFREYPIDDKNFNAWILLDFDGDGKPDYSSPYQLRRELVIRQFDFDQPIERYKLGRALYHIAQHRGFKSSKGETLSQQETNSKQSLTDDTADVAGEMKASEEKLSKGLSTYMKENNLLTVGAAFAQLEDEGVRVRNNNDYRAIRSQFQREIETIFKFQQGLSVENELYERLVSEKKNIGTIFYKRPLRSQRGNVGKCTLERTKPRCAIGHPLFEKFRAWTLINNIKVRMSEEEQAEQLPMKLRFELYNDCFLAFVRAEFKFEDIRKYLEKRLGVHFSYNDKTINYKDSTSVAGCPITARFRKLLGEDWESFHVDGQKQRQAHGKNNASFHTVSYSTNDIWHFCYDAEEPEAVLSFAQDNLKWEKKKAEELVRIWSAIPQGYAMLSQKAIRNINKMLILGLKYSDAVLLAKVPEIVEITDGEILSVTEDYHRVEAQVGYEKQINNIVNALIAKYKSASEEYRFADHNYEYQLDKSDEKDIIKQIESNIGTRKWSLLDADEQTDILQKVRDKYQNFFRSHERKFVESPKLGECFEEYLMKKFPMVEGERWKKLYHPSQIAIYRPVPANKDRSALRLGNPDIGAIKNPTVLRVLNTLRKRVNQLLDDGIISPDETRVVVETARELNDANRKWALDTYNRIRHDENEKIKKILAEFYPKRDNISTVDIDKARYVIDQREMDYFTEAKTYHKDIKKYKLWLEQGGQCMYTGRTINLSNLFDPNSFDVEHTIPESISFDSSDMNLTLCDAHYNRFIKKNHIPADLPNYDKSVVIDGKEYSPIKPRLQRWADRVERLNRNVEYWRGQARRAQNKDRKDQCMREMHLWKMELEYWTKKLERFTITEVTDEFKNSQLVDTRVITRHAVLYLKSIFPHVDVQRGDVTAKFRKILGIQSVDEKKDRSLHSHHAIDATTLTIIPGAAKRERMLELFAKIEEVNKMLSFSGNEDRTGLKQELDGLKNQLNKEVKACRIGHNVSEIGTFINDNIIINHHVKNQALTPVRRRLRKRGHIVGGMDNPRWQTGDALRGEIHKASYYGAITQYAKDKEGKVLMKEGRPQINPTIKFVIRRELKYKKSSTDSGFASWDDLGKAIVDKELFALMKGQFPEGTSFKDACEQGIYMIKKGKNGEVDTKLYRIRHIRCKTKQKNALKIKEQAYKSEKEYKRYFYAAVGDLYAMCCYTNGKTREFKIYSLYDISCHRKVGVEDIPEFITDKKGNRLMLDYKLHTGDMILLYKENPEELYDLDNVSLSKLLYKINGFENDGLRIRMVNHLVAKEAMGESVKDYAKLPDIIRCGVKTIKFLVMGENRDFVIKNGKISFNHR

SEQ ID NO: 391 - protein, 1375 aa, Prevotella histicola
  Prevotella histicola F0411
MKKILGLDLGTTSIGWALVYESENTDEKSSIVRLGVRVNPLSVDEKGNFEKGKAITTNADRQQTHGARINLQRYKLRRENLKDCLQKQGWIGTEALCEEGKTSTFETYMLRAKAAEEEISLHELCRVLFMMNKKRGYKSNRKANNKEDGKLFDGMTVAKKLYEEHLTPAEYSFQLLSSGKKFKQEYYRSDLKEEFDRIWNEQQKYYPEILTDDFKQQLQGKSKGNTSKIFLGKYGIYSADLKGLDRKLQPLKWRVEALKQQVDKEVLAFVISDLNGQIASTSGLLGAISDRSKELYFNKQTVGQYLWTSLKETPHVSIKNKPFYRQDYLDEFEKIWETQATYHKELTPELKQEIRDIIIFYQRPLKSKKGLISVCELEQRKVKVTIDGKEKEISIGPKVAPKSSPMFQEFRIWQNLNNILLIDKGNNSIHPLYEEEKNLLYEELSVKEKLSKAEALKVLNKNSKQWDLNYKEIEGNRTQAVLYDCYNRIIVMTGHEEYNFKKLKASEIRSYVKTTFTGLGFNTDILEFDSSLTGHELEKQPMYQLWHLLYSYESDNSRTGNDALLRKLETAFGFPKEYAAVLSDVVFEDSYGNLSVKAMRKILPHLQAGLNYSQACEEAGYKHSRRSLTKNELDQKEYKEKLELLPKNSLHNPVVEKILNQMINVINAVIDEYGKPDEIRIELARELKIGAAERENMTRSINQGNAENKRIREILEKEFALSYISRNDIIKYKLYEELKSNGFKTLYSDTYISKDKLFSKDFDIEHIIPKARLFDDSLSNKTIEARDVNIAKSNKTAFDFISEKYDQQGIEAYKKKLDILLQDGSISKAKYNRLLMKEADIPSGFIDRDLRDTQYIAKKAYEILSDLVRNVTPTTGAVTSRLREDWQLVDVMKELNFEKYQKLGLVEVIEDRDGRKIKRIKDWTKRNDHRHHAMDALTIAFTKPSYIQYLNNLNARSDKNSSIYGIENKELHREDNKLRFNAPLPINEFRAEARRHLKSILVSVKAKNKVMTQNVNVIKTKHGVIKKVQLTPRGELHNATFYGTKKRPIIKMVKVGAALDEVTIKKVSSSFIREALLDRLHEYNGDAKKAFTGRNSIDKNPIYIDEEHKKTVPALVKTIEWEMYHPTRKLISPDLKIDKVIDKGIREILKTRLAKFNGDAQKAFSNLDENPIYKDEAKKITLKRVSLEGVSSVIPLHTLKDREGKLVVGKDGKPVLGDYVQTSNNHHIAFYMDENGNLQDNVVSFFEAAERKSQGVPVIDKNYNHDKGWNFLFTMKQNEYFVFPNEVTGFNPSEVDLMDEANYSIISPNLYRVQKMSKASGRDYWFRHHLEAMLNDDPKLRNSMFKRITSLKALEGIVKVRINCIGKIVAVGEYD

SEQ ID NO: 392 - protein, 1380 aa, Prevotella intermedia
MKRILGLDLGTTSIGWALVNEAENNNEASSIVRLGVRVNPLTVDEKSNFEKGKAITTNADRQLRHGARINLQRYKLRRQNLHDCLQKQGWLGTEAMYEEGKASTFETYKLRAKAAEEEISLHEFARVLFMLNKKRGYKSNRKANNKEDGQLFDGMTIAKKLYEEHLTPAEYSLQLLNKGKKFTQGYYRSDLNAELERIWDEQKKYYPEILTDEFKQQLEGKTKTNTSKIFLAKYGIYSADLKGLDRKFQPLKWRVEALQQQVDKEVLAFVISDLKGQIANTSGLLGAISDRSKELYFNKQTVGQYLWASLEENPHISIKNKPFYRQDYLDEFEKIWETQAAFHKQLTPELKQEIRDIIIFYQRPLKSKKSLISVCELEQRKVKATIDGKEKEITIGPKVAPKSSPVFQEFRIWQNLNNVLLIDNDTNEKRPLDEVERNLLYKELSIKAKLSKTEALKILNKKGKQWDLNYRELEGNRTQAILFDCYNRIITLTGHEECDFKKIKASEIRHYVSTIFKNLGFSTEILDFDPSLKKHELEKQPMYQLWHLLYSYESDNSRTGNESLLRKLETTFGFPEEYATVLCDVVFEEDYGNLSVKAMREILPYLQAGNDYSQACAYAGYNHSRHSLTKEELDQKVYKERLELLPKNSLRNPVVEKILNQMINVINAIIDEYGKPDEIRIEMARELKSSAADRKKTTHAISQGNAENQRIREILEKEFSLSYISRNDIIKYKLYEELEPNYYKTLYSDTYITKDKLFSKDFDIEHIIPKARLFDDSFSNKTLEARNINLEKSNKTAFDFIKEKYGEDGAEAYKKKLDMLLENDAISRPKYNNLLRAEADIPSDFINRDLRNTQYIAKKACEILGELVKTVTPTTGKITNRLREDWQLVDVMKELNFEKYEKLGLTEIVEDRDGRKIKRIKDWTKRNDHRHHAMDALAIAFTKPSFIQYLNNLNARSNKGDSIYAIENKELHYEEGKLRFNAPIPVNEFRAEAKRHLSAILVSIKAKNKVMTQNVNKIKTKHGIIKKIQLTPRGPLHNETIYGTKMRPIIKMVKVGAALDEATINKVSSPAIREALLKRLNEYSGNAKKAFTGKNTLEKNPIYLNAGRTKTVPSLVKTVEWESFHPTRKLIDKDLNVDKVVDKGIREILKARLEEFNGDAKKAFSNLEENPIYLDEAKKIALKRVSIEGVLSAIPLHTLKNQAGKPITGKDGKPVLGNYVQTSNNHHIAFYYDEDGNLQDNAVSFFEAAERKSQGIPVIDKDYNRDKGWRFLFTMKQNEYFVFPNEATGFIPSEVDLTDEANYGIISPNLYRVQKVSRIDKGTSASRDYWFRHHLETILNDDAKLKNLAFKRIRGLLELKDIIKVRINSTGKIVAVGEYD

SEQ ID NO: 393 - protein, 1425 aa, Prevotella micans
  Prevotella micans F0438
MIQKIFGLDLGTNSIGSSVRNLELGENLTEQLEFFSSDIFGSSVSKNSNGREYSLAGNRSAHRRSRGLNEARRRKLWATLDLLIEHGLCPMSPDSLMQWRTYDKQKGLYRQYPIEDKDFNAWIMLDFNGDGKPDYSSPYQLRRELVVRQFDFDQPIERYKLGRALYHIAQHRGFKSSKGETIADQEKNEKKPIAEEGADIANEMKASETKLSKGLVAYMQENHLKTVGEAFAKLEDERVRIRNNESYRAIRSQYQDEIKEIFTYQKKLSVESELYERLTSEKKGVGTIFYKRPLRSQRGNVGKCTLERNKPRCPIGRPEFEEFRAWTLINNIKIRETAGEPYKQLPIKLRQELLKDCFLSKVKADFKFEDIRKYIEKRLGLSFSNDDKTINYKDSVSIAACPVTVRMKKLLGENWANCRIDGEKRRQAHGKNNNNEHIVSYTEEDIWHVCYNAEDPEEVSNFARKALHWDENKIKELVRLWTSIPQGYAMLSLKAIRNINRMLLLGLKYSDAVLLAKLPDIVPVSDEDILAITKEFLQLEDKLNQEKQINNIVNSLIANYKSKLEENRFADHNYQYQLGEGDDEDINTQIKSHIGAKLWVQIGADEQTKIFQAVRSKYQDFFKSYKRKFVESPKLGELLVAFLTEKFPNVKSKQWERLYHPSQIAIYRPIPVDNDRSKLRLGNPNIGAIKNPTVMRVLNTLRRRVNQLLDDGVISPDETRVVVETARELNDANTKWALDRYNRIRRDENEKIRKILKELNPTTNSISEQDIDKARYIFEQCETDFYTDGKVPYYNKDIKKYKLWLEQGGQCLYTGQTINLTNLFNPNAFDMEHTIPKSISFDNSDQNLTLCESYYNRFIKKNNIPTDMPNYDKDVTINGKEYTAIKPRLQRWKERVDRLSRNVDFWKGQARRAQDKDRKDECIREKHLWDMELAYWKGKLERFTMTDVTDGFKNSQLVDTRVITRHAVLYLKSIFNHVEVQRGETTAEFRKILGLQSIDEKKDRSLHSHHAIDATMLTVIPSAAKRDRMLELFYKIEETKKALKNYNDNNKTGLNLELKGLEEKLDKEKKDCRVGRRVNDLDRFINENIIVSHHTKDQALTPAHRRLRKRGKIVGGKEHPRWQTGDSLRGEIHKASYYGAITQFAKDANGKVLMKDGQAQIDPTIYYVIRRELKYKRSTQDSGFTNWEDLEKVIVDTDLFGLMKGQFPEGTSFKDACEQGFYMIKKGKNGEGDVKTHRIRHVRCKAVKTALRIKEQTYKSSKDYKQFFYAAVGDLYVMCYYTDGKKRDFKIYSLYDISNHRKSGTEDIPKFITDKKGNHLPLDYKLRTGDMVLLYKDNPEELKDLDQVNLKRRLYKVNRFESEGLIILLTHHLSTTTERGCSIGKIENYQNLPTAIRCGIKTIKFLIMGKHRDFVIRNGNIEFKH

SEQ ID NO: 394 - protein, 1506 aa, Prevotella nigrescens
  Prevotella nigrescens ATCC 33563
MKTILGLDLGPNSIGWAKVEVDDEGNYLRNIKLGSRIIPMTQDMLGDFDKGVKVSQTAIRTDFRGNRRLIERHLLRRERLHRVLHALKFLPKHYEDAIGWDRNEPATYGKFVNNSEPKLAWERQEDGSMRFLFMESFNEMVADFAQNQPSLVSDGKKIPLDWTIYYLRKKALTRPIKKEELAWILLNFNQKRGYYQLRGEEEEDNLTKRKEYYKLKVVGVEADGAPKGGKTWYNIHLENGWTARCQSKIPLDDWVGKVKEYIVTTEYEDDGKTPKCDKEGKVKRSFKSPEKDDWQLIKTRTEKFIDDSNKTVGAFIYDYLLEKPFDKIRGKYIRTIERKYYKNELREILREQTKYHEGLHSLEALKICAEELYKNNQQHQEYLLKKDMTFLLLNDLIFYQRPLKSKKSLIADCPYEVYKYDDKLTGKKGQKKIKCIAKSNPYYQEFRLWQFIANLRLFSVTDGKEVTAEYLKTEEDYVRLFSFLNDRKDIKQETFLRSFLKLKKESIGSEKIYPIRWNYIEDANKSYPCNATRHELLLAFDRADIPRELLDVEEREYRLWHLLYSIEAKEETESALRKLKANKAFGDLNIDDAFVNSFLKIKPFEKEYGAYSEKAIKKLLAVMRRGSLWKEADICEATKQNIAKILQNDIDEKLKKKIEAAVSSFNKLSDFQGLPTWLACYVVYGRHSEAAQIQCWQSPEDLKTYINKFKQHSLRNPIVEQCLLETLRTVYDIWKDAGQIDEIHIELGRNMKSTAEQRARKTKDILRNENTNLRIKNLLVELKNDDKIENVRPYSPSQQEILRIYEEGALQELSKEDEMFEDISKISKMAQPSPTELSRYKLWLEQKYRSPYTGRVIPLSKLFTTAYQIEHIIPQSRYFDDSFNNKVICESEVNSLKDNMLGYEFIKECGGRIVHCTLLGDVKIFTKEEYKDFVTKHYIDNTYKRDKLLLEDIPQEFSARQLNDSRYISKMVQTVLSNIVRAENEQEATSKFVVSCNGAITNRLKKDWGLNDVWSSIVCPRFKRLNEITKTNAFGHWEDKAGKHVFQTTVPLELQRGFSKKRIDHRHHAMDALVIACASRNIVNYLNNESANSPEKREDLRKKLCDEKRKIRKPWKTFTQDAREALSDVVVSFKNYVRVINKATNYYEHYSSSGNKVMISQKGNDMWAIRKPLHKESVFGRVNLCRKVIVSLKKALENIPAICDKTLRDYINALVEKHFNTRQLLAHFKSINYRLNRQCVEKVEVWQFSDEKIEMVARRKSLDTSFDDKQISSITDTGIQKILLNYLQTKDGNAEIAFTPEGIEEMNKNISLYNDGKAHQPILKVRVATPKGMKYPVGQTGNKATKFVVAEKGTNLYFAIYENELGVRSYDTIPLNIVVERLKEGLSPVPQANEADIPLKFYLSPNDLVYVPTKENEDELCRDRIYKFVDSSGTTANFVPHTSANTIYNVDKEYAEKCCNGAVFLNEYGLGSPQSKNQRALTGEMIKEICWKLKVDRLGNIIKVIK

SEQ ID NO: 395 - protein, 1380 aa, Prevotella nigrescens
  Prevotella nigrescens F0103
MKRILGLDLGTTSIGWALVNEAESNNEASSIVRLGVRVNPLTVDEKSNFEKGKAITTNADRQLRHGARINLQRYKLRRQNLHDCLQKQGWLGTEAMYEEGKASTFETYKLRAKAAEEEISLHEFARVLFMLNKKRGYKSNRKANNKEDGQLFDGMTIAKKLYEEHLTPAEYSLQLLNKGKKFTQGYYRSDLNAELERIWDEQKKYYPEILTDEFKQQLEGKTKTNTSKIFLAKYGIYSADLKGLDRKLQPLKWRVEALKQQVDKEVLAFVISDLKGQIANTSGLLGAISDRSKELYFNKQTVGQYLWASLEENPHISIKNKPFYRQDYLDEFEKIWETQATFHKQLTPELKQEIRDIIIFYQRPLKSKKSLISVCELEQRKVKATIDGKEKEITIGPKVAPKSSPVFQEFRIWQNLNNVLLIDNDTNEKRPLDEDERYLLYKELSIKAKLSKTEALKILNKKGKQWDLNYKELEGNRTQAILFDCYNRIITLTGHEECDFKKIKASEIRHYVSTIFKNLGFSTEILDFDPSLEKHELEKQPMYQLWHLLYSYESDNSRTGNESLLRKLETTFGFPEEYATVLCDVVFEEDYGNLSVKAMRKILPYLQAGNDYSQACAYAGYNHSRHSLTKEELDQKVYKERLELLPKNSLRNPVVEKILNQMINVINAIIDEYGKPDEIRIEMARELKSSAADRKKTTHAINQGNDENQCIREILEKEFALSYISRNDIIKYKLYEELKPNGFKTLYSDTYIPKDKLFSKDFDIEHIIPKARLFDDSYSNKTLEARDINLAKSNKTAFDFVKEKYGEQGAEAYKKKLDMLLGNNVISKPKYNKLLMTEADIPSDFINRDLRNTQYIARKACEILGELVRTVTPTTGKITNRLREDWQLVDVMKELNFEKYEKLGLTEIVEDRDGRKIKRIKDWTKRNDHRHHAMDALAIAFTKPSYIQYLNNLNARSNKGDSIYAIENKELHYEEGKLRFNAPIPVNVFRAEAKRHLSAILVSIKAKNKVMTQNVNKIKTKHGIIKKIQLTPRGPLHNETIYGTKMRPIIKKVKVGAALDEATINKVSSPAIREVLLKRLNEYSGNAKKAFTGKNTLDKNPIYLNAERTKTVPASVKTVEWENYHPIRKPITPDLKVDKVIDKGIGEILKARLEEFNGDAKKAFSNLEENPIYLDQTKKIALKRVSIEGVLSTIPLHTLKNQAGKPIMGKDGKPVLGNYVQTSNNHHIAFYYDEDGNLQDNAVSFFEAAERKSQGISVIDKDYNRDKGWRFLFTMKQNEYFVFPNEATGFIPSEVDLTDEANYGIISPNLYRVQKMSRIEKGTSVSRDYWFRHHLETILNDDSRLKNSAFKRINSLKPLEGIIKVRINSIGKIVAVGEYD

SEQ ID NO: 396 - protein, 1391 aa, Prevotella oralis
  Prevotella oralis ATCC 33269
MKKILGLDLGTTSIGWALVNEKENNEELSSIIRLGVRVNPLTVDEKSNFEKGKDITTNADRTKCRSARRNLQRFKLRREALADCLKRHGLMTDETPLCETNNSIIFKTYSNRAKAVCEKIALDDFVRVLFMINKKRGYKSSRKLNTDDEGTLVDGMDVAKLLYNEQITPGEYLLRLFKKGKKTRPDFYLSDLKAELERIWDFQRTFYPEILCNALKEDLKGKSRTQSSAIFYAKYKVSTAKIAGKDKRLQELTWRTDALRKQLTIDEVAYVICSINGEVNGSSQRLSMISDRSKLLYFNHQTIGQYLMQRLEENPNAGLKNIIFYRQDYEDEFNDIWNSQATYHKELTPELKKEVKDIIFYQRGLKSCKWLINYCELEHEEIEVKTPEGKLRKITIGSKTCPKSSPLFQEFKIWQVLNNLQVSPLNSRRKAKRKKDEEPSLFSDEDMNTACRYLNEEEKLTLFKELSIKKELKKKDALKLLFENYKELDLNYKVISGNVTMANLYRAFQDIISLTGNGEFDFQAMPAEEAEKTVEEIFGGLGYKTAFLHFDASLHDKEFERQPAYRLWHLLYSYAGDQSKTGIEALVKRIQELCGFEPEYARILANISFIPDYGNLSSKAMRKILPYMQDGYEYSEACSKAGYRHSASSLTKEEINKKNYKTHLDEIKRNSLRNPIVEKILNQMVNVVNSVIDTYSNIDEIRIEMARELKKSKPEREDMSFAISKATKETERIKGILEQEFKIQHVTRNDIIRYRLYEELKPNGYKTLYSNTYIPREDLFSKKFDIEHIIPKARLFDDSYSNKTLELRDINIEKGNQTAYDFVLSKYGEEGLYKYEQRVEEFKKNNEQAGTKCRKLLMREADIPSDFLNRDLNDSQYIAKKAHELLREIVPTVTATTGSITNRLREDWKLVNVMKELNWEKYDKLGLTEEYKDKDGNTVRHIKDWTKRNDHRHHAMDALTIAFTKPSFIQYLNNLNARSNRGGSIYGIEQKELERENNKLVFIPPIDPKIFRKQAKEHLSNILISIKAKNKVVTKNVNKTKSKSGTNRKVQLTPRGQLHLETVYGKIRTYKTEEIKVGTKLTEELIAKVADKKIREALMQRLSEYGGNIKKAFQNISKHPIWLNGSHTKHVPEKVKIVFFEDVFTIRKAITPDIKIDKVIDSKIRRILQERLNEFGGEASKAFSNLDENPIWFNRDKGIAIKSVKIRGIAKGTAIRVKKDIHGKTIIGNNGYPVANDYVNTGNNHHVAIFRDKDGNLQEHIVSFYEATARAIQNLPIVDRNYNSEKDWKFLFSMKQNEYFVFPNPNTGFNPSEISLKDEKNYALISPNLFRVQKLSHYYYVFRHHLETNVDTNLQLKDITWKRITAVNNLTGAVKVRIDHLGRIVDVGEYK

SEQ ID NO: 397 - protein, 1204 aa, Prevotella ruminicola
MERILGIDTGTNSLGWAIVDKDENQYHLVAKGTNIFSEGVKIEKGIESSKAAERTEHRSVRKHYWRRKIRKIRLLTILSDNDLCPRLKHEQLRQWRLKKVYPTDDTFMEWQRTEDKAQVNPYKFRYICLTQKLDLSDITQRFILGRALYHLNQRRGFLSNRKEATKESEGTVKEGISSLSKDMKDSGCEYLGEYFYQLYQQGKKIRNHYTARKEHYLKEFKAICSKQELDDALIEKLEKAIFDQRPLKSQKGQVGTCTFEKGKSRCPSSHPLYEDFRMYSFINNIKVQVDTLYDKGERSLTDEEKQLIIPLFKRKSKRTFPFEDIAKKIAGKNNYCYIKSNEEKAYKFNYQMDTQVSGSPVNAQLEEIFGEDWLSSVCEVYTLANNKSRFQIMNDVWHVLFFYDDEDKLKEFAKDRLQLDDELAEKFSKISIPNDYAALSLKAIRKIMPYLRDYGLIYSEAVFLANLVDVLPQHVWGIKEMREAAIENVIDVMHSYDKNNIDGITLEGCVKTFLKERYQVSDDNLKKLYHPSMLDPYPRQRPNDEGVFQLGSPRISSVKNPMAMHSLFRLRKVVNLMLKKGYITPDTKVHIEFSRDLNDANKRWAIQTWQRENEKERERCRKEIEKYIASPSDTDILKYQLWEEQNHKCLYTGDEIRITDFLGDNPKYDIEHTIPRSAGGDSTKMNLTLCSSRFNRDEKKTKLPAELVNHDEILERISNWKEKYEDIDKQIRKISTKGATSKEDKDSKIRRRHYLILQRDYWRGKYQRFTMTEVPEGFSRRQGTDISVISRYARMYLKSVFKQVYIVKGIATSDFRKMWGIQDEYAKKERVNHVHHCIDAITIACIGKAEYDKLADYRHQYDDYLFQGKTKPTFDKPWPSFVIDIKHIQDELLIAHYAKDNLEKFTKKNLRGKDGRIIRDKFGNKLQMKGDTSRNSLHNDKFYGAINHEGEIKYVYRTNIEALDAKSIGNIVDPTVRSIIESAIAIHGSLKAAINKGIWMNEEKHIPIKKVRVFRNDVKKPIELKDQRDLSDKDYKQHYYVTNDGNYMMLIFSKLNNKGREIRQHVVINSLEATEVIKSHKRSQVGKVVWESYYSKEGFDLIYKLKSGTMILLYENNRDEVWDLDIRNLQKRLYIITKMKYDGRIYMMHHQEAREKKDLEEKSGSFKINEDYRPLIVNSYNQFNALVQDLDFEINDLGEIRRLI

SEQ ID NO: 398 - protein, 1424 aa, Prevotella sp.
  Prevotella sp. C561
MTQKVLGLDLGTNSIGSAVRNLDLSDDLQWQLEFFSSDIFRSSVNKESNGREYSLAAQRSAHRRSRGLNEVRRRRLWATLNLLIKHGFCPMSSESLMRWCTYDKRKGLFREYPIDDKDFNAWILLDFNGDGRPDYSSPYQLRRELVTRQFDFEQPIERYKLGRALYHIAQHRGFKSSKGETLSQQETNSKPSSTDEIPDVAGAMKASEEKLSKGLSTYMKEHNLLTVGAAFAQLEDEGVRVRNNNDYRAIRSQFQHEIETIFKFQQGLSVESELYERLISEKKNVGTIFYKRPLRSQRGNVGKCTLERSKPRCAIGHPLFEKFRAWTLINNIKVRMSVDTLDEQLPMKLRLDLYNECFLAFVRTEFKFEDIRKYLEKRLGIHFSYNDKTINYKDSTSVAGCPITARFRKMLGEEWESFRVEGQKERQAHSKNNISFHRVSYSIEDIWHFCYDAEEPEAVLAFAQETLRLERKKAEELVRIWSAMPQGYAMLSQKAIRNINKILMLGLKYSDAVILAKVPELVDVSDEELLSIAKDYYLVEAQVNYDKRINSIVNGLIAKYKSVSEEYRFADHNYEYLLDESDEKDIIRQIENSLGARRWSLMDANEQTDILQKVRDRYQDFFRSHERKFVESPKLGESFENYLTKKFPMVEREQWKKLYHPSQITIYRPVSVGKDRSVLRLGNPDIGAIKNPTVLRVLNTLRRRVNQLLDDGVISPDETRVVVETARELNDANRKWALDTYNRIRHDENEKIKKILEEFYPKRDGISTDDIDKARYVIDQREVDYFTGSKTYNKDIKKYKFWLEQGGQCMYTGRTINLSNLFDPNAFDIEHTIPESLSFDSSDMNLTLCDAHYNRFIKKNHIPTDMPNYDKAITIDGKEYPAITSQLQRWVERVERLNRNVEYWKGQARRAQNKDRKDQCMREMHLWKMELEYWKKKLERFTVTEVTDGFKNSQLVDTRVITRHAVLYLKSIFPHVDVQRGDVTAKFRKILGIQSVDEKKDRSLHSHHAIDATTLTIIPVSAKRDRMLELFAKIEEINKMLSFSGSEDRTGLIQELEGLKNKLQMEVKVCRIGHNVSEIGTFINDNIIVNHHIKNQALTPVRRRLRKKGYIVGGVDNPRWQTGDALRGEIHKASYYGAITQFAKDDEGKVLMKEGRPQVNPTIKFVIRRELKYKKSAADSGFASWDDLGKAIVDKELFALMKGQFPAETSFKDACEQGIYMIKKGKNGMPDIKLHHIRHVRCEAPQSGLKIKEQTYKSEKEYKRYFYAAVGDLYAMCCYTNGKIREFRIYSLYDVSCHRKSDIEDIPEFITDKKGNRLMLDYKLRTGDMILLYKDNPAELYDLDNVNLSRRLYKINRFESQSNLVLMTHHLSTSKERGRSLGKTVDYQNLPESIRSSVKSLNFLIMGENRDFVIKNGKIIFNHR

SEQ ID NO: 399 - protein, 1483 aa, Prevotella sp.
  Prevotella sp. MSX73
MKTILGLDLGTNSIGWAKVSVDDYGNYLHDIKLGSRIIPMSQDVLGNFDSGVTVSQTAQRTEFRSKRRLVQRNLQRRERLHRVLHVLDFLPAHYDAAIGWDRTEAVTYGKFLNHAEPKLAWEELGNGKRRFLFMDSFHEMVADFARCQPALVADGKKIPLDWTIYYLRKKALTQAITKEELAWILLNFNQKRGYYQLRGEEEEENPTKQEEYYELKVVSVEATDSRKGNDTWYNVHLENGWIYRRSSKISLDDWVGKVKQFIVTTEYEKDGTTLKTDKEGNVKRSFRAPNENDWGLRKKRTETLLEMSGKTVGAFIYDHLLQEPADKIRGNFIRTIERHYYKAELEAILAEQCKYHIELRDKEMLEACARELYLNNLPHQRSLMKKDMTYLLLYDLIFYQRPLKSKKALIANCPYEYYEYVDKETGEIKRQNIKCIAKSNPYFQEFRLWQFVLNLRLFDRVEDKEVTANYLPTADDHARLFTYLNDRKEINQETLLKDYFKLKKVKIGNEKEYPIRWNYIEDKEKKYPCNETRYELLMALDRAGIEHKWLDDNNLEYRLWHLLYSVEVKSESETALRKLKNDDAFVNSFLKVKPFKKEYGAYSEKAIKRLLAVMRKGFLWNEQDICDETRKRIEIIIKGDVDEKVKERMGHAAYSFDRVSDFQGLPEWLACYVVYGRHSEAMDIQRWDSPERLMAYINNFKQYSLRNPIVEQCILETLRTVHDIWKETGQIDEIHVELGREMKSTSEERARRTQNVLRNENTNLRIKSLLIELKNDTDICNVHPYSPMQQEILRIYEEGALQELNREDEDFEEISKISQMSQPSGKELNRYKLWLEQKYRSPYTGKAISLAKLFTPAYQIEHVIPQSRYFDDSFTNKVICEAEVNTLKSNLLGYEFIKKHGGEIIHCTTLGDVRIFSESEYKAFVMDHYANNKSKKDKLLMEDIPQEFLSRQMNDSRYISKVVKTLLSNIVRMADESEATSKSVIVCTGGVTDRLKKDWGLNDVWNSIVYSRFERLNRLTGTEAFGHWENKDGKRVFQTSMPLELQRGFRKKRIDHRHHAMDALVIACASRNIVNYLNNESANNPKKREDLRRQLCDKNRVIRKPWETFTQDAYNALENVVVSFKNYVRVINKATNRYEHYDENGKKRFVQQKGSELWAIRKPMHKETYYGHVNLRRKELVTLQKALDDIPSICDKKLRDYISALVEKHFNKRQLLAHFKSTDYYWQKQYVNKVYVWTFSDDIKPLVATRKLLDTSFDAKRIGTITDTGIQKILRNYLEAKGGNATLAFTPEGIVEMNQNISKYNDGKPHQPILKVRITEPMGAKYRVGQTENKMAKYVEAQSGTNLYFAIYEDSEGKRSYTTVPLDEVAERLKQRLSPVPEKDENDVPLKFYLSPNDLVYVPTEEELQLRECKLNKDRIYKMVSSTGSECHFIPYYVANVIYNKVEFEAKNKIGRALTGEMIKAVCWKLEIDRLGNILKVIK

SEQ ID NO: 400 - protein, 1375 aa, Prevotella sp.
  Prevotella sp. oral taxon 306 str. F0472
MKKILGLDLGTTSIGWALVNESENKDEQSSIVRLGVRVIPLTVDEKGNFEKGKAITTNADRQQVHAARINLQRYKLRRENLRDCLQKQGWIGSEPMCEDGKSSTFETYKLRAKAAVEEVSLHEFARVLFMLNKKRGYKSNRKANDKEEGKLFDGMTIAKKLYEEHLTPAEYSLQLLNTGRKFTPEYYRSDLIEEFEKIWNEQQKYYPEILTDEFKQQLEGKAKSNTSKLFLGKYGIYSADTKGLDRRLQPLKWRVEAMKQQVDKDVLAFVISDLKGQIANTSGLLGAISDRSKELYFSKQTIGQYLWASLQENPHISIKNQPFYRQDYLDEFEKIWETQATYHKELTSELKQEIRDIIIFYQRPLKSKKNLIAVCELEQRKVKVTVDGKEKEITIGPKIAPKSSPMFQEFRIWQNLNNILLLDHETNSKRPLYEEERNLLYEELSVKEKLSKTEALKVLGKKSKQWDLNYKELEGNRTQAVLYDCYNRIIVMSGHEECNFKKLKASDIRHYVKMIFKNLAFNTDILCFDSSLKGHELERQPMCQLWHLLYSYEGDNSRTGNDALLRKLETSFGFPKEYAAVLADVIFEDSYGNLSVKAMRNILPHLQAGKDYSQACEEAGYKHSRRSLTKEELNQKVYKEKLELLPKNSLHNPVVEKILNQMVNVINAVIEEYGKPDEIRIELARDLKIGAAERENMTRSINQGNAENKRIREILEKEFALSYLSRNDIIKYKLYEELKSNGFKTLYSDTYISKDKLFSKDFDIEHIIPKARLFDDSLSNKTIEARDVNIAKSNKTAFDFILERYGEQGVKTYKTKLLRLLEDGAISNKKYNNLLKTEADIPSGFIDRDLRNTQYIAKKAYEILSELVKIVTPTTGSVTNRLREDWQLVDVMKELNFEKYQKLGLADVIEDRDGRKVKRIKDWTKRNDHRHHAMDALTIAFTKPSYIQYLNNLNARSDKSSSIYGIEVKELHREEGKFRFNAPLPINEFRAEAKRHLKSVLVSIKAKKKVMTQNVNKIKTKHGIIKKVQLTPRGELHNATYYGTKKRPLVRMVKVGAALDEATIKRVCSPAIRAALLKRLNAYNGDAKEAFTGRNSIDKNPIYLDIEQTKLVPVLVKTIEWGMYHPIRKRITPDLKIDKVIDKGIREKLKARLAEFNGDAQKAFSNLDENPIYMDEAKRITLKRVSIEGVLSAIPLHTLKDKAGKPVIGSDGKPVFGDYVQTSNNHHIAFYIDDKGNLQDNPVSFFEAAERKSQGVPVIDRRYNCDKGWHFVFTMKQNEYFVFPNEATGFIPSEVDLLDEANYCIISPNLYRVQKLSKASGRDYWFRHHLETMLNDDLRLKNSTFKRIQSLKGLEDIVKVRINSIGKIVAVGKYD

SEQ ID NO: 401 - protein, 1216 aa, Prevotella stercorea
  Prevotella stercorea DSM 18206
MTKILGIDTGTNSLGWAIVDKTADNYNLLDKGVNIFQEGVKIEKGIESSKAAERTEHRATRVRYYRIKLRKIRLLRILSDNHLCPPLSQEELSTWRLKKVYPKNELFMQWQRTDDDTEKTPYAYRHKCIHEKLDLSDVTDRYILGRAFYHIIQRRGFLSNRKEQGGEDSGKVKEGISTLTHEMNEAGYEYLGDYFYALYNKGEKIRKHYTARNEHFLSEFKAICEKQDLEKELGSEVVRNIEKAIFDQRPLKSQKGQVGKCVFEKNKTKCPSSHPMYEEFRMLTFINNIKIKTPNDDVLRPLNTGEREKIMPLFFRKSKKQFDFEDITKKLAPKKMYGFYKKEEDAEMPFLFNYPMDTSVSGCPVTAALKDVFGDDWITAICETYTLGEGKSRFDIVNDIWHALYFYSDKDKLAEFAINRLQLSEDEAKIFSEISLPADYASLSLKAICKILPYLRRGLIYSHAVFLGNLCEVMPKYEWSIKEMRETIIDNIIMEMDKCDTKDKRTFEVCIKDYLKGQYNVSDNSLKKLYHPSMIETYPRVQYTNEHGVYQLGSPRIDSVRNPMAMRSMFRLRKLVNRLLVEGKIDQNTEVHIEFARELNDANKRNAIALFVKENQSANDEARKQIITLFKKETGTDIEPTDKDILKYVLWEEQNHICLYTGKQIRISDFIGANPKFDIEHTIPRSVGGDSTKMNLTLCDSRFNREVKKTKLPVELPNHDEIMERIKEWKKNYELLDIQIRKNKKLSKGATTKEQKDTIIRKRHLLELRRDYWRGKYERFTMESVPEGFSRRQGTDISVISKYARLYLKSLFNRVYTVKGIATSDFRKIWGIQDIYSKKERINHVHHCIDAIVIACIGLDEYNKLGAYYHDEENNKWYGMSKASFKKPWATFVEDIKKIQDEILVYHYTPDNMPKQGRRRIKIDGKKILCKGDAARGSLHNDTYYGAIENDGAVKYVKRIDLASLEEKDVKNIVDDTVRSIIEAAIKEKGFKDAMASTIWMNEEKRVPIKKVRCFTPSITKPLNIRKQRDVSIKEYKQQYHVANDSNYLLALYIGTDNKGKEKREFEIVNILQAAQYYRTSNDKEVVDRHIVPIKSEHDYPFAYTLKIGTMVLLYEKSPNEVWDATIKERNRRLYKVTGLSTMRMKGRNGEYAYATVKLIHNEEARPSKDIKAKNGEYEQGEEFRPAIIMLHTQLNALVQGYDFEINELGEIRRLR

SEQ ID NO: 402 - protein, 1234 aa, Prevotella tannerae
  Prevotella tannerae ATCC 51259
MPNFWSIFTENLQTYLMKTRILGLDTGTNSLGWAVVDRDENNQYTPICRGDLIFTEGVKQEKGIEFSLAAERTSYRASRRHYFRRRLRKVEVLKVLVKHKLCPPLSDEALNRWHTKKEYPLDEDFILWQRTNEADNKNPYHDRHICLHRKLNLKDSQTDRYTLGRALYHLTQRRGFLSNRLDQNEEAEETGKVKSAISELSKEMKEAGCEFLGDYFYLLYRTEGNRVRIRSRYTDREKHYLQEFKEICRVQELDEDLAKALEKTIFFQRPLKSQRQGVGKCTMEKGHSRCAVSHPLYEEYRLLCYLNNIRIKTPSDDRLRPLNAEEREKITPLFYKEKNFDFEKIAKKLAGKTPFGWIRDAEDWPYQFNYRMTQEAPACPTTAQLIKVFGEDWKAALAETYTMSAKQDGTLKTEDEICTDIWNVLYSFSSKEKLKEFGLKKLQLDEVQAKAFSEIRLTRDFASLSLKAIRKILFFLRTGEDYSKAIFLANIPTIVGEEIWNDIERRSRLLYKVDLALRPQEERDAEEHRTIAERIKAAVAAEVPDAPIDLLYHPSMIEAYPDAKRNERFDCYQLGSPKTNAVRNPMAMRSLHMVRKVINHLLRKHIIDEKTEIHIEYARELNDANKRQAIADWQRELSKRHTAYAQNIRQLYKAETGLVIEPTKADILKYQLWEEQQHVCLYTGKKIGIADFLGANPKFDIEHTIPRSRGGDSTQENLTLCESKFNRDIKRDKLPTELANYEEILARIEHWKKQCYALKLKRDGIRTHSGLEKSIKDSRIRRRHLVGLEYGYLKGKYDRFTMKEVPEGFSRRQGAGIGLISKYAGLFLKSLFKDPKNPNRSNVYVVKGAITAEFRKLWGLQQADEAKSRENHTHHCIDAYTIACIGPCEYAALAAYYRSDEEFKYGRRREKPQFEKPWPTFTEDLLKLQEELLIVHQTTDKLGKRDRRKVKTPRGKFLTGGDSARGRLHQETYYGAINYDGNIKYVVRKPLDSLTEKDLDKIVDETVMGIVKGAVEAKGSLKEALADGIYMNKEKGILIKRVRIFSDVSEPINLKQLRDVSTKEYKRHIHLRKDENYLFAIYEGIDKKKNKKQTETATVDYLDAAKFYKDSKRRDKANSLVGDYSKKNKLPLKCILKKRQMVLFYEHSPEEIRFKDKKDLSRRLYIVTSIAKDGRVKFLHHQAATATGIQSSPSPFTNDGEHQPYYRLSASNIKVLVAGIDFDINILGEITPKL

SEQ ID NO: 403 - protein, 1487 aa, Prevotella timonensis
  Prevotella timonensis CRIS 5C-B1
MKNILGLDLGSNSVGWALVKVEENGNPIGSIKMGSRIIPMSQDILGSFEKGDTVSQTAQRTLYRGKRRLIERHVLRRERLCRVLHIMNFLPAHFDRLLGWDKTDNKTYGKFIDDSEPKLAWRQNKNEMGKMEFVFMDSFHEMLSDFAKHQPQLIANGKKVPLDWTIYYLRKKALTQLISKEELAWILLNFNKKRGYYQLRGEEEEEQPTKKEEYKVLKVISVDADEGQKGNGIWYNIHLEDGGIYKKKSDIPLYDWVGKTLQLIVVTTYEKDGKTPKIFDSGKQNPSYRLPKEDDWGLVKKRTESQLQSSGKTVGAFIYDNILSKPDDKIRGNLVRTIERKYYKKELIEILQQQAKYHDELHNQNLLESCAKELYAHNDVHYNEVIKSNMINLLVNDIIFYQRPLKSKKSLIANCKYESYEYVDKETGEIKEMPIKCIAKSNPYYQEFRLWQFIHNLRLSDVVTREDVTAQYLSTPQDYCNLFTYLNDRKEIKQDILLKDFFKIKKVQIDKEKVFPIEWNYIKDATKSYPCNETRYELLSALKRAGMDKQWLDDTPNMQYRLWHLLYSVEEKEESAKALRKLYDDDKFVTSFLKIKPFNKCYGAYSEKAIKRLLTLMRMGKAWNEQAIDAKTLKCIQQIITDNVDSKLKEKIDDSRYVLHHVSDFQGLPTYLASYVIYGRHSEVTDIQCWDSPEDLLKFIRDFKQHSLRNPIVEQVILETLRVVYDIWKAEKHIDEIHVEVAREMKLTAQQRNEANLRNLNNEATNLRIKYLLEELKNDTFIKDVRPLSPIHQEKMRIYEQAVLGNLNKQDKDYDDIIKISKKEHPTNAELIRYKLWLEQRYCSPYTGKAISLSKLFTTAYEIEHIIPQSRYFDNSFNNKVICEAEVNKAKGNMLGYEFIKKQGGQKIYCTQLGKAVTILKEEAYKQFVNEHYAHNKRKRDNLLAENIPESFSSRQLNDTRYITKTIMSLLSNVVRQQSEEEATAKNLLPSSGSVTDRLKNDWGLKDVWNTIVTPRFERLNKLSGTNDFGEMKEENGNRYFQTNVPLEYEKGFKKKRIDHRHHAMDALVIACTTRNMVNYISNANANSPKQREDLRQLLCDKNRIINKPWDTFTQDALKALNDIVVSFKNNVRIINRATNRYQRYDKNGKKIIFSQKGDDMWAIRKSMHKETVFGRVNLIRKEVLPIAKALDNISAICNAQLRAYVNDLVDKHFNKKQLVAHFKSLNYKWNRQDVSKVEVWISSDNKTPMVAVRKPLDTSFDKKKIASITDTGIQTILLNYLESKGGDASVAFAPEGIQEMNSNIELYNNGKAHKPIKNVRLSEPLGAKYQVGERGAKTKKYVEADKGTNLFFAIYEDEEGKRYYYSVPLREAIERQKQKLSPVPEYNEKGVALKFYLSPNDLVYVPTEEERTMGTCHIDKARIYKMVSSTGCSCYFVPSTFAKVIVDKVELQSLNKMEKAITDECIKEVCWKLKVDRLGNIINVIK

SEQ ID NO: 404 - protein, 1218 aa, Prevotella timonensis
  Prevotella timonensis CRIS 5C-B1
MNKRILGLDTGTNSLGWAVVDWDEHAQSYELIKYGDVIFQEGVKIEKGIESSKAAERSGYKAIRKQYFRRRLRKIQVLKVLVKYHLCPYLSDDDLRQWHLQKQYPKSDELMLWQRTSDEEGKNPYYDRHRCLHEKLDLTVEADRYTLGRALYHLTQRRGFLSNRLDTSADNKEDGVVKSGISQLSTEMEEAGCEYLGDYFYKLYDAQGNKVRIRQRYTDRNKHYQHEFDAICEKQELSSELIEDLQRAIFFQLPLKSQRHGVGRCTFERGKPRCADSHPDYEEFRMLCFVNNIQVKGPHDLELRPLTYEEREKIEPLFFRKSKPNFDFEDIAKALAGKKNYAWIHDKEERAYKFNYRMTQGVPGCPTIAQLKSIFGDDWKTGIAETYTLIQKKNGSKSLQEMVDDVWNVLYSFSSVEKLKEFAHHKLQLDEESAEKFAKIKLSHSFAALSLKAIRKFLPFLRKGMYYTHASFFANIPTIVGKEIWNKEQNRKYIMENVGELVFNYQPKHREVQGTIEMLIKDFLANNFELPAGATDKLYHPSMIETYPNAQRNEFGILQLGSPRTNAIRNPMAMRSLHILRRVVNQLLKESIIDENTEVHVEYARELNDANKRRAIADRQKEQDKQHKKYGDEIRKLYKEETGKDIEPTQTDVLKFQLWEEQNHHCLYTGEQIGITDFIGSNPKFDIEHTIPQSVGGDSTQMNLTLCDNRFNREVKKAKLPTELANHEEILTRIEPWKNKYEQLVKERDKQRTFAGMDKAVKDIRIQKRHKLQMEIDYWRGKYERFTMTEVPEGFSRRQGTGIGLISRYAGLYLKSLFHQADSRNKSNVYVVKGVATAEFRKMWGLQSEYEKKCRDNHSHHCMDAITIACIGKREYDLMAEYYRMEETFKQGRGSKPKFSKPWATFTEDVLNIYKNLLVVHDTPNNMPKHTKKYVQTSIGKVLAQGDTARGSLHLDTYYGAIERDGEIRYVVRRPLSSFTKPEELENIVDETVKRTIKEAIADKNFKQAIAEPIYMNEEKGILIKKVRCFAKSVKQPINIRQHRDLSKKEYKQQYHVMNENNYLLAIYEGLVKNKVVREFEIVSYIEAAKYYKRSQDRNIFSSIVPTHSTKYGLPLKTKLLMGQLVLMFEENPDEIQVDNTKDLVKRLYKVVGIEKDGRIKFKYHQEARKEGLPIFSTPYKNNDDYAPIFRQSINNINILVDGIDFTIDILGKVTLKE

SEQ ID NO: 405 - protein, 1496 aa, Prevotella veroralis
  Prevotella veroralis F0319
MKTILGLDLGTNSIGWAKVCVDDNGNYLRDIKLGSRIIPMSQDVLGNFDKGVTESQTSVRTGFRGVRRIRERSLLRRERLHRVLHVLGYLPPHYDSAIGWNKNEPSTYGKFLNHGEPKLAWEHKEDGSMRFLFMESFHEMMADFAKSQPSLVSDGKKIPLDWTIYYLRKKALSQPIRKEELAWLLLNFNQKRGYYQLRGEEDDDNPTKCEEYYELKVVGIEADEEGKNGNTWYNVKLENGWIYRRQSKIPLDDWIGKVREFIVTTEYEKDGITLKKDKNGDVKRSFRSPSEDDWGLRKKRTEKLLDSSKMTVGAFVYDHLLAEPSDKIRGKFIRTIERKYYKKELYAILCEQSKYHEELRSGDYLNKCAEELYKNNQPHRNSLLTKDLAYLLLEDLIFYQRPLKTKKSLIAECPYEAYKYVDKETGEIKRQGIKCIAKSNPYYQEFRLWQFISNLRLFNKADDKEVTADYLPTQDDYVRLFAYLNDRKEINQETLLKEFFKLKKITVNSEKVFPIRWNYIEDKEKKYPCNETRHELLLALDRARIDHSWLEKPGQEYRLWHLLYSVESKEETKEALRKLKDDDAFVESFLKVKPFKREYGAYSEKAIKKLLAVMRMGSLWRETDICDTTKGNITKILQGEIDEKLKEKISASVSSYNQLSDFQGLPVWLACYVVYGRHSEAAEIQHWKTPESLLAYINGFKQHSLRNPIVEQCILETLRTVHDIWKEVGHIDEIHVELGRNMKSTADQRARISENVLRNENTNLRIKSLLLELKNDPNIKDVRPYSPMQQEKLRIYEEGVLQELTKDDKDFTEITKISTMAQPSAKELQRYKLWLEQKYRSPYTGKSISLTKLFTSAYQIEHVIPQSRYFDDSFSNKVICESEVNSLKDNMLGYEFIKNHGGEIIHCTMLGDVKVLSESEYKAFVNDHYAHNKRKRENLLLEDIPQEFLNRQMNDSRYISKVVKALLSNIVRAEGEEEATSKFVVSCSGGITDRLKKDWGLNDVWNKIVYPRFERLNRLTGTEAFGQWENKDGKRVFQTAVPLELQRGFNKKRIDHRHHAMDALVIACTSRNIINYLNNESANNPKKREDLRQKLCDKNRTIRKPWETFTQDATAALEDVIVSFKNYVRIINKATNYYERYDVEGKKVIAEQRGDDMWAIRKPMHEATYYGRVNLRRKKKVNLRVALENISSICDNKLRIYINGLVEKGFNTKQILDKFKNTNDHFSMQKIDKVEIWQFTNEEEKLVATRKPLDTSFDTKKIASITDTGIQTILLNYLETKGGDSTIAFTPEGIVEMNQNISKYNNGKEHMPILKVRLYTKLGKKIPVGQTGCKAKQFVIAEAGTNLYFAIYEDEEGKRSYRTIPLNEVVERLKQGLSPVPEKNDKDVHLKFYLSPNDLVYVPIEDEHESLAKDHIYKFVDSSGTTANFIPHRSANVIFELNKKDAEKFCSGSIIQNEYGVGSSQSKNQKAITGEMIKAVCRKLEVDRLGNVIKVI

SEQ ID NO: 406 - protein, 1062 aa, Ralstonia syzygii
  Ralstonia syzygii R24
MAEKQHRWGLDIGTNSIGWAVIALIEGRPAGLVATGSRIFSDGRNPKDGSSLAVERRGPRQMRRRRDRYLRRRDRFMQALINVGLMPGDAAARKALVTENPYVLRQRGLDQALTLPEFGRALFHLNQRRGFQSNRKTDRATAKESGKVKNAIAAFRAGMGNARTVGEALARRLEDGRPVRARMVGQGKDEHYELYIAREWIAQEFDALWASQQRFHAEVLADAARDRLRAILLFQRKLLPVPVGKCFLEPNQPRVAAALPSAQRFRLMQELNHLRVMTLADKRERPLSFQERNDLLAQLVARPKCGFDMLRKIVFGANKEAYRFTIESERRKELKGCDTAAKLAKVNALGTRWQALSLDEQDRLVCLLLDGENDAVLADALREHYGLTDAQIDTLLGLSFEDGHMRLGRSALLRVLDALESGRDEQGLPLSYDKAVVAAGYPAHTADLENGERDALPYYGELLWRYTQDAPTAKNDAERKFGKIANPTVHIGLNQLRKLVNALIQRYGKPAQIVVELARNLKAGLEEKERIKKQQTANLERNERIRQKLQDAGVPDNRENRLRMRLFEELGQGNGLGTPCIYSGRQISLQRLFSNDVQVDHILPFSKTLDDSFANKVLAQHDANRYKGNRGPFEAFGANRDGYAWDDIRARAAVLPRNKRNRFAETAMQDWLHNETDFLARQLTDTAYLSRVARQYLTAICSKDDVYVSPGRLTAMLRAKWGLNRVLDGVMEEQGRPAVKNRDDHRHHAIDAVVIGATDRAMLQQVATLAARAREQDAERLIGDMPTPWPNFLEDVRAAVARCVVSHKPDHGPEGGLHNDTAYGIVAGPFEDGRYRVRHRVSLFDLKPGDLSNVRCDAPLQAELEPIFEQDDARAREVALTALAERYRQRKVWLEELMSVLPIRPRGEDGKTLPDSAPYKAYKGDSNYCYELFINERGRWDGELISTFRANQAAYRRFRNDPARFRRYTAGGRPLLMRLCINDYIAVGTAAERTIFRVVKMSENKITLAEHFEGGTLKQRDADKDDPFKYLTKSPGALRDLGARRIFVDLIGRVLDPGIKGD

SEQ ID NO: 407 - protein, 1066 aa, Rhodopseudomonas palustris
MSERVVRRILGIDLGIASCGWGVVDISGAGGGIIATGVRCFDAPLIDKTGEPKSATRRTARGQRRIVRRRRQRMNGVRRLLCEFGLLPDPRPDALNQAMRRISTASAAAQVTPWTLRAAAHQRLLSNEELAVVLGHIARHRGFRSNAKNEAGANAADETSKMKKAMEATREGLAKYHAFGDMIANDPKFANRKRNRDKDYSHTAKRSDLEDEVRAILRAQLRFGSAAATETLAQTFADVAFFQRPLQDSEDRVGDCPFEPGQKRAARRAPSFELFRFLSRLANLKLAVGRSPERRLTAEEIALAAKGFGETKKTITFKSLREALDLDPNARFSGIGKDKEASLDVVARTGGAAYGTKTLKDALGDAPWRSLSRTPETLDRIAEILSFREDITSIRNGLEDLGLDSLVVEALMQAAANGDFKEFTRAGHISARAARNIIPGLREGLVYSEACARVGYDHAARLSVPLDQVGSPVTRKALSEALKQVRAVAREYGPIDYFHIELARSVGKSAEERKQLTDGIEARNVEKAKRRKQAEEHLGRAPSDDELLRYELAKEQNFKCIYSGDAIDPAGVAANDTRYQVDHILPWSRFGDDSYLNKTLCTARSNQNKRGRTPFEWFEADKTDVEWMEYVARVENLQEVKGRKKRNYSIKDAAAIEDKFKARNLTDTQWATRLLADELSRMFPPRECERAICGRADGGNDGLTIVEERRVFTRPGAITSKLRRAWGLEGLKKQDGKRVEDDRHHAVDALVLAATTESLLQRLTVEVQRREREGRPDDIFHCAEPWRGFRADVRRTVYGSETMPGIFVSRAERRRARGKAHDATIKQIREIEGERLVFERKPVEKLTDKDLEKIPIPKPYGQVSDPKRLRDELVESLRAWIAAGKPKDRPPLSPKGDVIRKVRIQTNDKVSVEINGGTVDRGDMARVDVFRKKNKKAVWEYYVVPIYPHQIVALNDPPDRAVIAYAEDKDWKEIDSSYEFLWSLFGLSYVEISKANGECIDGYFRGLHRGTGAASVCKHISLGKDATVSGIGLKTLASFKKFTIDRLGRKFEIPREVRTWRGEACT

SEQ ID NO: 408 - protein, 1064 aa, Rhodopseudomonas palustris
MSECVTRRILGIDLGIASCGWGVIEVGEASGSIIASGVRCFDAPLIDKTGEPKSATRRTARGQRRIIRRRRQRMNAVRRLLAEFGVLTGRSPDALHQALLRLSQSVAGSQVTPWTLRAAAHERKLTNDELAVVLGHIARHRGFRSNSKNDGGANAADETSKMKKAMETTREGLARYHSFGAMIASDPKFADRKRNRDKDYSHTAKRSDLEDEVRTIFRSQTRFGSLVASEKLSQAFADAAFFQRPLQDSEDMVGSCPFEPGQKRTARRAPSFELFRFLSRLANLKLTVGRAPERRLTPDEIALAAKGFGETKKSITFKSLREALDLDPNARFSGVAKEKESTLDVAARTGGAAYGTKTLKDALGDAPWRSLSRMPEKLDRIAEILSFREDMKAIRNGLEEVGLDGLVVDALMQATANGDFKDFTRAAHISALAARNIIPGLREGLVYSDACTRVGYDHAARPAVPLSQIGSPVTRKALSEALKQVRAVAREYGPIDYFHIELARSIGKSAEERKKLTDGIEARNVEKEKRRKEAAEHLGRAPSDDELLRYELAKEQNFKCIYSGDPIDPAGISANDTRYQVDHILPWSRFGDDSYVNKTLCTARSNQNKRGRTPFEWFDADKTEAEWMEYSARVEDLKEVKGRKKRNYSIKDAASVEDKFKARNLTDTQWATRLLADELKRMFPPRECERVVTVRADGGNDGLSIVEERRVFTRPGAITSKLRRAWGLEGLKKQDGKRVEDDRHHAVDALVLAATTESLLNRLTVEVQQREREGRQDDIFHCSQPWPGFRVDVQRTVYGSETMPGIFVSRAERRRARGKAHDATVKQIRDIDGERIVFERKPIEKLTDKDLERIPVPEPYGKAADPKKLRDELVENLRAWIAAGKPKDKPPRSPKGDIIRKVRIETKDKVAVEINGGTVDRGDMARVDVFRKKNKKGVWEFYVIPIYPHQIVASALPPNRAVIAYKAESEWTAIDGCFEFAWSLNPMSYLELVKSNGELIEGYFRSMDRTTGAINLSPMSTNSETIRSIGVKTLSSFRKFTVDRLGRKFEIPREVRTWRGEACT

SEQ ID NO: 409 - protein, 1173 aa, Rhodospirillum rubrum
  Rhodospirillum rubrum ATCC 11170
MRPIEPWILGLDIGTDSLGWAVFSCEEKGPPTAKELLGGGVRLFDSGRDAKDHTSRQAERGAFRRARRQTRTWPWRRDRLIALFQAAGLTPPAAETRQIALALRREAVSRPLAPDALWAALLHLAHHRGFRSNRIDKRERAAAKALAKAKPAKATAKATAPAKEADDEAGFWEGAEAALRQRMAASGAPTVGALLADDLDRGQPVRMRYNQSDRDGVVAPTRALIAEELAEIVARQSSAYPGLDWPAVTRLVLDQRPLRSKGAGPCAFLPGEDRALRALPTVQDFIIRQTLANLRLPSTSADEPRPLTDEEHAKALALLSTARFVEWPALRRALGLKRGVKFTAETERNGAKQAARGTAGNLTEAILAPLIPGWSGWDLDRKDRVFSDLWAARQDRSALLALIGDPRGPTRVTEDETAEAVADAIQIVLPTGRASLSAKAARAIAQAMAPGIGYDEAVTLALGLHHSHRPRQERLARLPYYAAALPDVGLDGDPVGPPPAEDDGAAAEAYYGRIGNISVHIALNETRKIVNALLHRHGPILRLVMVETTRELKAGADERKRMIAEQAERERENAEIDVELRKSDRWMANARERRQRVRLARRQNNLCPYTSTPIGHADLLGDAYDIDHVIPLARGGRDSLDNMVLCQSDANKTKGDKTPWEAFHDKPGWIAQRDDFLARLDPQTAKALAWRFADDAGERVARKSAEDEDQGFLPRQLTDTGYIARVALRYLSLVTNEPNAVVATNGRLTGLLRLAWDITPGPAPRDLLPTPRDALRDDTAARRFLDGLTPPPLAKAVEGAVQARLAALGRSRVADAGLADALGLTLASLGGGGKNRADHRHHFIDAAMIAVTTRGLINQINQASGAGRILDLRKWPRTNFEPPYPTFRAEVMKQWDHIHPSIRPAHRDGGSLHAATVFGVRNRPDARVLVQRKPVEKLFLDANAKPLPADKIAEIIDGFASPRMAKRFKALLARYQAAHPEVPPALAALAVARDPAFGPRGMTANTVIAGRSDGDGEDAGLITPFRANPKAAVRTMGNAVYEVWEIQVKGRPRWTHRVLTRFDRTQPAPPPPPENARLVMRLRRGDLVYWPLESGDRLFLVKKMAVDGRLALWPARLATGKATALYAQLSCPNINLNGDQGYCVQSAEGIRKEKIRTTSCTALGRLRLSKKAT

SEQ ID NO: 410 - protein, 1059 aa, Rhodovulum sp.
  Rhodovulum sp. PH10
MGIRFAFDLGTNSIGWAVWRTGPGVFGEDTAASLDGSGVLIFKDGRNPKDGQSLATMRRVPRQSRKRRDRFVLRRRDLLAALRKAGLFPVDVEEGRRLAATDPYHLRAKALDESLTPHEMGRVIFHLNQRRGFRSNRKADRQDREKGKIAEGSKRLAETLAATNCRTLGEFLWSRHRGTPRTRSPTRIRMEGEGAKALYAFYPTREMVRAEFERLWTAQSRFAPDLLTPERHEEIAGILFRQRDLAPPKIGCCTFEPSERRLPRALPSVEARGIYERLAHLRITTGPVSDRGLTRPERDVLASALLAGKSLTFKAVRKTLKILPHALVNFEEAGEKGLDGALTAKLLSKPDHYGAAWHGLSFAEKDTFVGKLLDEADEERLIRRLVTENRLSEDAARRCASIPLADGYGRLGRTANTEILAALVEETDETGTVVTYAEAVRRAGERTGRNWHHSDERDGVILDRLPYYGEILQRHVVPGSGEPEEKNEAARWGRLANPTVHIGLNQLRKVVNRLIAAHGRPDQIVVELARELKLNREQKERLDRENRKNREENERRTAILAEHGQRDTAENKIRLRLFEEQARANAGIALCPYTGRAIGIAELFTSEVEIDHILPVSLTLDDSLANRVLCRREANREKRRQTPFQAFGATPAWNDIVARAAKLPPNKRWRFDPAALERFEREGGFLGRQLNETKYLSRLAKIYLGKICDPDRVYVTPGTLTGLLRARWGLNSILSDSNFKNRSDHRHHAVDAVVIGVLTRGMIQRIAHDAARAEDQDLDRVFRDVPVPFEDFRDHVRERVSTITVAVKPEHGKGGALHEDTSYGLVPDTDPNAALGNLVVRKPIRSLTAGEVDRVRDRALRARLGALAAPFRDESGRVRDAKGLAQALEAFGAENGIRRVRILKPDASVVTIADRRTGVPYRAVAPGENHHVDIVQMRDGSWRGFAASVFEVNRPGWRPEWEVKKLGGKLVMRLHKGDMVELSDKDGQRRVKVVQQIEISANRVRLSPHNDGGKLQDRHADADDPFRWDLATIPLLKDRGCVAVRVDPIGVVTLRRSNV

SEQ ID NO: 411 - protein, 1405 aa, Riemerella anatipestifer
MKTILGLDLGTNSIGWALVKEAENSNEKSEIIKLGVRVNPLTVDEKTNFEAGRPLSTNADRTAKRSARRNLQRYKLRRKNLIDLLIKNQLIDKDTPLTEIGKNTTHQTLELRAKAARERIELEDLARVFLAINKKRGYRSSRKVNNEEEGQAVDGMAVAKKLYDENLTPGQYAYELLSKGKKYVPDFYRSDLQAEFNAIWEYQKQFYADILDDELYNALKGQGQQNSRKRFLAIKGVYTAENKGKRDDVKLRHYKWRSEAISKKINIEEVAYVLVEINNDLNKSSGYLGAISDRSKELYFNKETVGENLWKQIQKNPHTSLKNQVFYRQDYLDEFEQIWETQAQFHPQLTLALKEQIRDVIIFYQRKLKSQKGLLSFCQFESWEIERKDENGNVILNKTTQLPKRQTVGRRVAPKSSPLFQEFKIWQNINNLEVTKISEGASKNKKETETLSDDERKLLFEELNLRGNLSQKEVLQILGLKDKEYKTNFSEGLEGNRTNAALFNIYQQIAENEGYGFDWSKKSAQEIKEELKAVFPQIGIQADILDFNANLDGKEFENQASYQLWHLLYSAEEDDKINEEDQIIYGNSAVSLKKKLCEKFGFTPEYAKWIANVSLQDDYGNLSTKAMRKIIPYLIDGNDYSEACALAGYNHSNSLTKEENDNRELLDKLELLPKNSLRNPVVEKILNQMVNVVNQVIETYGKPDEVRIELARELKKSAEKRAEMTKSINEATRRNEDIKKLITKDFGIPNPTKSDVVRYRLWEELAPLAYKDVFTGKQIKKEDLFSSKIDIEHIIPKALLFDDSFSNKTLVFRETNLKKADRTAYDFIESDYNATLDDYIQRVETLYNNTKGTISKGKRNKLLMAQKNLPDGFIERDLRNSQYIAKKAKAMLYQVFKDVNVTSGSITDRLREDWDLINVMKELNFPKYKALGLTEIEERYDIGQEKTKRVEVITDWTKRNDHRHHAMNALTVAFTTSSHIQYLNYLNARKNESHKEHKNIKGIENKITHKQKDKRKFIPPMPNFREEAKKHIETILVSIKNKNKVYTKNINKTKKKSGHNTKEQLTPRGQLHKETVYGKSKRPMSKPTKINKNFSLEQAQLIINVQEKELVLRHLAQFDNNPAVAFDTKTLKKMPLLKNGEPLKEVLCFEEIFTIRKDITPDLKIEKVVDEKIKAILEQRKKDFGGNAKEAFSDLDKNPIWLNKKKGICIKRVTITGVSNAEALHHQKDHLGREILDDNGNPIPADFVSTGNNHHLAVYLDSEGKLQDNIVSFYEAVVRTSQGLPVVDKGLNKDLGWKFLFSLKQNEMFVFPNDDFDINDFDLLDDKKAELISKHLYRVQKISKVSAGNSFVRDIVFRHHLETTVKEVKELKDISYIQLKSLEGLRNIKKVRINHIGKIVQVGEY

SEQ ID NO: 412 - protein, 1400 aa, Riemerella anatipestifer
MKTILGLDLGTNSIGWALVKETENSNEKSEIIKLGVRVNPLTVDEKTNFEAGRPLSTNADRTAKRSARRNLQRYKLRRKNLIDLLIKHRLIDKDTPLTEIGKNTTHQTLELRAKAARERIELEDLARVFLAINKKRGYRSSRKVNNEEEGQVVDGMAVAKKLYDENLTPGQYAYELLSKGKKYVPDFYRSDLQAEFDSIWEYQKQFYADILDDELYNALKGQGQQNSRKRFLAIKGVYTAENKGKRDEVKLQHYKWRSEAITQKLSIEEVAYVLVEINNDLNKSSGYLGAISDRSKELYFNKETVGENLWKQIQKNPHTSLKNQVFYRQDYLDEFEQIWETQAQFHPQLTLALKEQIRDVVIFYQRKLKSQKGLLSFCQFESWEIERKDENGNVILNKTTQLPKRQTVGRRVAPKSSPLFQEFKIWQNINNLEIAKISDGNSKNKKETEALSDDERKLLFEELNLRGNLSQKEVLQILGLKDKEYKTNFPEGLEGNRTNAALFNIYQQIAENEGYGDWTKKSAQEIKEELKAVFPQIGIQADILDFNAELDGKEFENQASYQLWHLLYSAEEDDKINEEDQIIYGNSAVSLKKKLCEKFGFTPEYAKWIANVSLQDDYGNLSTKAMRKIIPYLIDGNDYSEACALAGYNHSNSLTKEENDNRERLNKLELLPKNSLRNPVVEKILNQMVNVVNQVIETYGKPDEVRIELARELKKSAEERAEMTKGINEATRRNEDIKKLITKNFGIPNPTKNDVVRYRLWEELAPLAYKDVFTGRQIKKEDLFSSKIDIEHIIPKALLFDDSFSNKTLAFRETNLKKADRTAYGFIESDYNATLDDYIQRVETLYNNAKGTISKGKRNKLLMAQKNLPDGFIERDLRNSQYIAKKAKSMIEKVFNDVNVTSGSITDRLREDWDLINVMKELNFPKYKALGLTEIEERYDIGQEKTKKVEVITDWTKRNDHRHHAMDALTVAFTTKSHVQYLNNLNTIHSLKGDEVDLELSKLYGLKNTITEVVNKKRKFIPPMPNFREEAKKHIETILVSIKNKNKVYTKNINKTKKESGYHTKEQLTPRGQLHKETVYGKSKRPMNKPTKINKNFSLEQAQLIINVQEKELVLRHLAQFDNNPAVAFDTKTLKKMPLLKNGEPLKEVLCFEEIFTIRKDITPDLKIEKVVDEKIKAILEQRKKDFGGNAKEAFSDLDKNPIWLNKEKGICIKRVTITGVSNAEALHHQKDHLGREILDDNGNPIPADFVSTGNNHHVAIYEDEKGKLQEKVVSLYEAVARANQGLPVVDKGLNEDLGWKFLFTMKQNEMFVFPNDDFDVNDIDLLDENNAKIISQHLFRVQKLATKNYMFRHHLETNVQEVKELNDIAYKSIRSTEPLKNIKKVRINHIGKIVQVGEY

SEQ ID NO: 413 - protein, 1140 aa, Roseburia intestinalis
  Roseburia intestinalis L1-82
MRENGSDERRRNMDEKMDYRIGLDIGIASVGWAVLQNNSDDEPVRIVDLGVRIFDTAEIPKTGESLAGPRRAARTTRRRLRRRKHRLDRIKWLFENQGLINIDDFLKRYNMAGLPDVYQLRYEALDRKLTDEELAQVLLHIAKHRGFRSTRKAETAAKENGAVLKATDENQKRMQEKGYRTVGEMIYLDEAFRTGCSWSEKGYILTPRNKAENYQHTMLRAMLVEEVKEIFSSQRRLGNEKATEELEEKYLEIMTSQRSFDLGPGMQPDGKPSPYAMEGFSDRVGKCTFLGDQGELRGAKGTYTAEYFVALQKINHTKLVNQDGETRNFTEEERRALTLLLFTQKEVKYAAVRKKLGLPEDILFYNLNYKKAATKEEQQKENQNTEKAKFIGMPYYHDYKKCLEERVKYLTENEVRDLFDEIGMILTCYKNDDSRTERLAKLGLVPIEMEGLLAYTPTKFQHLSMKAMRNIIPFLEKGMTYDKACEEAGYDFKADSKGTKQKLLTGENVNQTINEITNPVVKRSVSQTVKVINAIIRTYGSPQAINIELAREMSKTFEERRKIKGDMEKRQKNNEDVKKQIQELGKLSPTGQDILKYRLWQEQQGICMYSGKTIPLEELFKPGYDIDHILPYSITFDDSFRNKVLVTSQENRQKGNRTPYEYMGNDEQRWNEFETRVKTTIRDYKKQQKLLKKHFSEEERSEFKERNLTDTKYITTVIYNMIRQNLEMAPLNRPEKKKQVRAVNGAITAYLRKRWGLPQKNRETDTHHAMDAVVIACCTDGMIQKISRYTKVRERCYSKGTEFVDAETGEIFRPEDYSRAEWDEIFGVHIPKPWETFRAELDVRMGDDPKGFLDTHSDVALELDYPEYIYENLRPIFVSRMPNHKVTGAAHADTIRSPRHFKDEGIVLTKTALTDLKLDKDGEIDGYYNPQSDLLLYEALKKQLLLYGNDAKKAFAQDFHKPKADGTEGPVVRKVKIQKKQTMGVFVDSGNGIAENGGMVRIDVFRVNGKYYFVPVYTADVVKKVLPNRASTAHKPYGEWKVMEDKDFLFSLYSRDLIHIKSKKDIPIKMVNGGMEGIKETYAYYIGADISAANIQGIAHDSRYKFRGLGIQSLDVLEKCQIDVLGHVSVVRSEKRMGFS

SEQ ID NO: 414 - protein, 1128 aa, Roseburia intestinalis
  Roseburia intestinalis M50/1
MDEKMDYRIGLDIGIASVGWAVLQNNSDDEPVRIVDLGVRIFDTAEIPKTGESLAGPRRAARTTRRRLRRRKHRLDRIKWLFENQGLINIDDFLKRYNMAGLPDVYQLRYEALDRKLTDEELAQVLLHIAKHRGFRSTRKAETAAKENGAVLKATDENQKRMQEKGYRTVGEMIYLDEAFRIGCSWSEKGYILTPRNKAENYQHTMLRAMLVEEVKEIFSSQRRLGNKKATEELEEKYLEIMTSQRSFDLGPGMQPDGKPSPYAMEGFSDRVGKCTFLGDQGELRGAKGTYTAEYFVALQKINHTKLVNQDGETRNFTEEERRALTLLLFTQKEVKYAAVRKKLGLPEDILFYNLNYKKAATKEEQQKENQNTEKAKFIGMPYYHDYKKCLEERVKYLTENEVRDLFDEIGMILTCYKNDDSRTERLAKLGLVPIEMEGLLAYTPTKFQHLSMKAMRNIIPFLEKGMTYDKACEEAGYDFKADSKGTKQKLLTGENVNQTINEITNPVVKRSVSQTVKVINAIIRTYGSPQAINIELAREMSKTFEERRKIKGDMEKRQKNNEDVKKQIQELGKLSPTGQDILKYRLWQEQQGICMYSGKTIPLEELFKPGYDIDHILPYSITFDDSFRNKVLVTSQENRQKGNRTPYEYMGNDEQRWNEFETRVKTTIRDYKKQQKLLKKHFSEEERSEFKERNLTDTKYITTVIYNMIRQNLEMAPLNRPEKKKQVRAVNGAITAYLRKRWGLPQKNRETDTHHAMDAVVIACCTDGMIQKISRYTKVRERCYSKGTEFVDAETGEIFRPEDYSRAEWDEIFGVHIPKPWETFRAELDVRMGDDPKGFLDTHSDVALELDYPEYIYENLRPIFVSRMPNHKVTGAAHADTIRSPRHFKDEGIVLTKTALTDLKLDKDGEIDGYYNPQSDLLLYEALKKQLLLYGNDAKKAFAQDFHKPKADGTEGPVVRKVKIQKKQTMGVFVDSGNGIAENGGMVRIDVFRVNGKYYFVPVYTADVVKKVLPNRASTANKPYSEWRTMEDKDFLFSLYSRDLVHIKSKKGIPIKNVDGSLGESKEVYAYYIGADISGAKIEGKAHDSRYTFRGIGVQKLELIEKCQVDILGHISTVKNEKRMGFS

SEQ ID NO: 415 - protein, 1152 aa, Roseburia inulinivorans
  Roseburia inulinivorans DSM 16841
MNAEHGKEGLLIMEENFQYRIGLDIGITSVGWAVLQNNSQDEPVRITDLGVRIFDVAENPKNGDALAAPRRDARTTRRRLRRRRHRLERIKFLLQENGLIEMDSFMERYYKGNLPDVYQLRYEGLDRKLKDEELAQVLIHIAKHRGFRSTRKAETKEKEGGAVLKATTENQKIMQEKGYRTVGEMLYLDEAFHTECLWNEKGYVLTPRNRPDDYKHTILRSMLVEEVHAIFAAQRAHGNQKATEGLEEAYVEIMTSQRSFDMGPGLQPDGKPSPYAMEGFGDRVGKCTFEKDEYRAPKATYTAELFVALQKINHTKLIDEFGTGRFFSEEERKTIIGLLLSSKELKYGTIRKKLNIDPSLKFNSLNYSAKKEGETEEERVLDTEKAKFASMFWTYEYSKCLKDRTEEMPVGEKADLFDRIGEILTAYKNDDSRSSRLKELGLSGEEIDGLLDLSPAKYQRVSLKAMRKMQPYLEDGLIYDKACEAAGYDFRALNDGNKKHLLKGEEINAIVNDITNPVVKRSVSQTIKVINAIIQKYGSPQAVNIELAREMSKNFQDRTNLEKEMKKRQQENERAKQQIIELGKQNPTGQDILKYRLWNDQGGYCLYSGKKIPLEELFDGGYDIDHILPYSITFDDSYRNKVLVTAQENRQKGNRTPYEYFGADEKRWEDYEASVRLLVRDYKKQQKLLKKNFTEEERKEFKERNLNDTKYITRVVYNMIRQNLELEPFNHPEKKKQVWAVNGAVTSYLRKRWGLMQKDRSTDRHHAMDAVVIACCTDGMIHKISRYMQGRELAYSRNFKFPDEETGEILNRDNFTREQWDEKFGVKVPLPWNSFRDELDIRLLNEDPKNFLLTHADVQRELDYPGWMYGEEESPIEEGRYINYIRPLFVSRMPNHKVTGSAHDATIRSARDYETRGVVITKVPLTDLKLNKDNEIEGYYDKDSDRLLYQALVRQLLLHGNDGKKAFAEDFHKPKADGTEGPVVRKVKIEKKQTSGVMVRGGTGIAANGEMVRIDVFRENGKYYFVPVYTADVVRKVLPNRAATHTKPYSEWRVMDDANFVFSLYSRDLIHVKSKKDIKTNLVNGGLLLQKEIFAYYTGADIATASIAGFANDSNFKFRGLGIQSLEIFEKCQVDILGNISVVRHENRQEFH

SEQ ID NO: 416 - protein, 1156 aa, Ruminococcus albus
  Ruminococcus albus 8
MGNYYLGLDVGIGSIGWAVINIEKKRIEDFNVRIFKSGEIQEKNRNSRASQQCRRSRGLRRLYRRKSHRKLRLKNYLSIIGLTTSEKIDYYYETADNNVIQLRNKGLSEKLTPEEIAACLIHICNNRGYKDFYEVNVEDIEDPDERNEYKEEHDSIVLISNLMNEGGYCTPAEMICNCREFDEPNSVYRKFHNSAASKNHYLITRHMLVKEVDLILENQSKYYGILDDKTIAKIKDIIFAQRDFEIGPGKNERFRRFTGYLDSIGKCQFFKDQERGSRFTVIADIYAFVNVLSQYTYTNNRGESVFDTSFANDLINSALKNGSMDKRELKAIAKSYHIDISDKNSDTSLTKCFKYIKVVKPLFEKYGYDWDKLIENYTDTDNNVLNRIGIVLSQAQTPKRRREKLKALNIGLDDGLINELTKLKLSGTANVSYKYMQGSIEAFCEGDLYGKYQAKFNKEIPDIDENAKPQKLPPFKNEDDCEFFKNPVVFRSINETRKLINAIIDKYGYPAAVNIETADELNKTFEDRAIDTKRNNDNQKENDRIVKEIIECIKCDEVHARHLIEKYKLWEAQEGKCLYSGETITKEDMLRDKDKLFEVDHIVPYSLILDNTINNKALVYAEENQKKGQRTPLMYMNEAQAADYRVRVNTMFKSKKCSKKKYQYLMLPDLNDQELLGGWRSRNLNDTRYICKYLVNYLRKNLRFDRSYESSDEDDLKIRDHYRVFPVKSRFTSMFRRWWLNEKTWGRYDKAELKKLTYLDHAADAIIIANCRPEYVVLAGEKLKLNKMYHQAGKRITPEYEQSKKACIDNLYKLFRMDRRTAEKLLSGHGRLTPIIPNLSEEVDKRLWDKNIYEQFWKDDKDKKSCEELYRENVASLYKGDPKFASSLSMPVISLKPDHKYRGTITGEEAIRVKEIDGKLIKLKRKSISEITAESINSIYTDDKILIDSLKTIFEQADYKDVGDYLKKTNQHFFTTSSGKRVNKVTVIEKVPSRWLRKEIDDNNFSLLNDSSYYCIELYKDSKGDNNLQGIAMSDIVHDRKTKKLYLKPDFNYPDDYYTHVMYIFPGDYLRIKSTSKKSGEQLKFEGYFISVKNVNENSFRFISDNKPCAKDKRVSITKKDIVIKLAVDLMGKVQGENNGKGISCGEPLSLLKEKN

SEQ ID NO: 417 - protein, 1341 aa, Ruminococcus lactaris
  Ruminococcus lactaris ATCC 29176
MGKGYYVGLDMGTGSVGWAVTDESYQILRRHGKAMWGVRLFESAKTAEERRMFRTGRRRLDRRGWRIEILQEIFAEEISRVDPGFFLRMKESKYYPEDKRDIQGNCPELPYTLFVDKTFTDKDFHKKYPTIYHLRKMLMETEDTPDMRLVYLALHHMMKHRGHFLLSGDISQVTEFKNTFNQFIENIRNEEMDFEIELDESAVQMIEETLKDKNLTRSAKKSKLVKGLNAKNVRDKAFLTLLSGGTVKLSDLFGMEELNEGERPKISFADNGYEEYAAVVEMELGELYYIVESAKAVYDWAILSDILGGSTSVSDAKVRAYEKHKADLKYLKAVVKEYFPKEVYNAVFVESSDKLNNYPAYIGMTKKNGKKVSLEGKRCSREEFMDFLKKNIVVKLPDEEAKMYLQSELEKDSFLPKQVNKDNGVIPYQVHKYELKKILDNLGDKIPFLKENAEKIEKLFSFRIPYYVGPLRTGNGENSKFAWAERKSTEKIYPWNFENVIDVEQSAENFIRRMTNKCTYLIGEDVLPKDSLLYSKFMVLNELNNLRLDGQKISVELKQKIYRDVFCRSRKVTQKKLKSYLIREGIAGKNVELTGIDGDFKGSLTAYHDFKEKLIDVELTQKEKEEIILNIVLFGDDKKLLKQRLKKKFPQLTEKQINTVTALSYKGWGRLSKKLLEEVTVPAPETGEVWNIITALWETNDNFMQLLSKEYQFSDRIEEFNEEKADPEVSYQTIEDLYVSPAVKRQIWQTLQIIQEIEKVMGEKPKRVFVEMAREKQENKRTESRKKTLSDLYTKCKKEEPEWIEALCTSLEKHEEHQLRSDKLYLYYTQKGRCMYSGEPIDLEDLWDNTKYDIDHIYPQSKTMDDSLKNRVLVKKEYNAKKSDTYPIAADIQKKMMPFWKSLLTGGFIPKEKYDRLVRNNPLDANELAGFIERQIVETRQSTKAVAEILKKILPDTEIVYVKAKTVSKFRQDFDFIKVRDMNDLHHAKDAYLNIVVGNVYFVKFTKNAAWFVKENPGRTYNLEKMFIWDVARDGEIAWKAGKSGSIVQVRAMMEKNHILVTRRSYEVKGGLFDQQILKKGKGQVPVKESDERLRDIGKYGGYNKAAGVYFMLVSSKDKKGKEQRTIEFVPIYLKDRVEKDMESARNYLMEERGLREPKILIKKIKIDTLFKVDGFYMWLSGRTSNQLIFKGANQLILSKEDMKTLKKVVKYIQRQKEDKNVKISMRDGITEEELLKLYETFLDKIRHSIYGARLSSQEKTLVNGKEKFIDLSVEAKCQVLYEILHLFQCQSGAANLKMIGGPASAGILVMNNNISKCKNISIVNQSPTGIYEKEIDLLRV

SEQ ID NO: 418 - protein, 1471 aa, Scardovia wiggsiae
  Scardovia wiggsiae F0424
MGYKAPRNDKGEIDYGVGLDLGNGSVGWVAMDKDYHLIRARGHELIGARLFDPANSAENRRESRTTRRRLSRRRWRLRMLDSLFASELAKIDPNFLARRKYSWVHPKDEQNHENWYGSIIFGSKEQDKQFYKDYPTIYHLRKKLTEDTERHDIREIYVAIHHIVKYRGHFLREGEINSENLFDPEGFVELIKDVIKLNNSYDESTPIFEASPADVSEALLNEHTSRSGRIEDTLDKLDFSVSRVDKHELKGMRDAAKAVIGAIVGNTADFSKIFNLDNLDKDSKDNLKLKFADSNFDEKYGGVVGSGLLDETQIELVDRIHAVYDAVALKGILGDAHTISEAKVESYEKHRKNWKLIKEELRTKENKDEVDLWYGDLSGRQYKNPPDPEKGPDEGSKKDSPIRDSDQKQNLIKKANDYFTELIDDSQLSEEQKNCLKNDINNGQLFPVQRSSDNGVIPYQIHLNELRRIIENQKQYYPFLAETFIRKTAEGKSYEENKIVALLKFRVPYYVGPLVSKEDMEEHSSGNSAYHWMARNPGRGEAITPWNFDEVVDKDESGARFISRLTGTDTYLLGEPTLPQHSLLYEEYMVLSELNNVRLNVRQGNHWSDKNRQRLSYKQKEFLIENLFKEHKTVTRKRAEDCLSSMGCGEVQLFGLSDEKKFASSLSSYITLKKILGKAFVDDSGNSAILERIIEVQTVFEDREPLTHQLSLIDSLTVEQRKQLAKIHYTGWGKLSRKLLTSKKGSYKIHSQNEIMRTQHSIIDIMRGDSLNLIEIIRDKKIGIGEWIDNENLDRETGESDVSRLESVFEGIVMSPRVKRGVVQAVRVIDDLAKAIGNPPQRIFIEMADEVQASQRTVSRLSRLKALYGSPSLQKEFNDLKDLRKSLNETKDADLQEDRLYLYYIQLGKDLYTGKEISIDSLSSAYDIDHIVPQALTQDDSIDNRVLVSRKENARKTDSYLYTPDLIKNMRPLWGKLLAAGLMSQKKYDALTRVDDFKDREKQRFVQRSLVETRQIMKNVSTILRTYYGEDTNVVTLKSSITHDMRKYLGFPYKNRDINDYHHAQDALCISAAGQFMLNRHFVSGGEVTDGASNAYNMYLAEYLQEFRDAKARGERKRSTAFGFVVGSMSSKDDEKRTDHRTGEIVWSETNAEYLRKVMNYKKMLITQKVGDVKTRALYDETRYGHKESSAKSIKFDNLRRDTSLYGGFSGASTAYMMLVEYKKKNKLVSITAQEASLLAVADQKNDTVSVMDGILASHGLSGAKILLPKIVTGQLLDYSDALVTLQSASELNTARQMWLPRNDYNDIDIILKSKDIEDAAHKLGYDSDTVHVLRRIQKLFEAVFRVAESQFPLHQLSKDQQEEILRDPQNYGFGSAVKLLGGLLKALHANAENTNLAGLVKVLHGDKEYSDDGKAKEFKKFGFSPRWRRISNPTGFTLSDSDTFIYQSPSGIFEQRVTVKELKEKADKQK

SEQ ID NO: 419 - protein, 1178 aa, Scardovia inopinata
  Scardovia inopinata F0304
MGKRHNSNMAKKKISYRIGIDVGLNSTGLAAIEVDDDGAPIRILNTMSVIHDGGVDPDAAKVRGTRLAISGIARRTRRMRRRRAKRLDRLEQILEKYGYTDTEPVLEEPYGPWICRAELADGFINDDEQRRMMIGIAIRHIARHRGWRNPYQNVRALLNIDDSDLSEEYKNLKEKVQDQINDGKDLPNFTPSQLVRDYLDNFSGQPAARIRTGKAGPRGNRRDAVGILPQRMRQSDYAYELQRIFDMQKIGRDEAQELLMAVFEAKSPKGSAEKRIGKDPLTGKKRALKASLAFQKYRIVATITNLRIKTGTGSERMLSPTELNDIYTYLLRVQDDNHLPTWEDICEEVLHIGRYQLAGIGKTFEGGERISNMPPVIQTSLAIHGLSEGTLAEKLTKWWDKADDDSRESMIKLLSNTVDIDRVNEVDENFASALDFIDSLDDEELTKLDKIALPRGRAAYSEEALNKLTADMLNTGDDLFSARQRIYHVNNSWRPPQPPIGEPLGNPAVDRVLKITNRYLMNCLNRWGQPRRVTIEHTRSGFTSVKQATEHQKISDKRAEYRRDIVKQLEEAGVESVHEYDIRRWEAVQRQNGQCLYCGRDITFKTCEMDHIVPRKGPGSTNTRTNFAAVCPECNRMKSNIPFASWAETKEAKDRGVSLDKAIKQVRFFNFTKNEYSPQAQRNFKKSMIERLKQKTSDEPLDNRSIESVSWMADELYKRIDWYFNHEQYETSKKAINDDKDNLSGTQVVVYPGSITAEARNAAGLGGNIHFIGGRYKTRLDRRHHAVDACVIAMMEPGIARILTERNQLRQAQRLTARIEDDEVNWKDYPTENTAGYNKYQAWSDRMHALLEYMNNALDYDKIPVVRWERLQLGNRSAHEDTIHPLKKLPLSHEISAIDINHASTPALYEALVSLPDFSEQDGLPADPSRQINVNGERYSGDDLVSFFNSNAAQIAIQGGSAELGTAFHHARIYRCWTVGKNGKKKIFFGMIRVYQHDLLHAKNEDLFTYPLKRSSVSMRYAKKEVVHAILSGNAEYVGYLCVGDELVLDLKGDKSNDEGGSRLSGQVGEFVQKFEEDSKVNSQIVNRWTVDGFPDEAKLRLRPSMFAGEGLKNMKSELVENAAIKNILSKTGWRVSVDVISKKSPVVLRRNAFGEPRWKTNAGLPVSYRWQDTETKE

SEQ ID NO: 420 - protein, 1063 aa, Simonsiella muelleri
  Simonsiella muelleri ATCC 29453
MEKFHYVLGLDLGIASVGWAAIEIDKETETSIGLLDCGVRTFERAEVPKTGDSLAKARREARSTRRLIRRRSHRLLRLKRLLKREIFRQPETFKDLPINAWQLRVKGLDSRLNEYEWAAVLLHLVKHRGYLSQRKSEMSETDSKSEMGRLLAGVAENHQLLQQEQYRTPAELALKKFVKHFRNKGGDYAHTFNRLDLQAELHLLFQKQRELGNPFTSPELERQVDDLLMTQRSALQGDAILKMLGHCGFEPEQFKAAKNTFSAERFIWLTKLNNLRIQDQGKERALTADERTKLLDEPYKKSKLTYAQVRKLLSLPQTAIFKGLRYDLEHDKKAENSTLMEMKSYHNIRQTLEKSGLKTEWQSIATQPEILDAIGTAFSIYKTDEDISHELKTCRLPENVLNELLKNINFDGFIQLSLTALRKILPLMEQGYRYDEACTQIYGNHHSGSLQQESKQFLPHIPIDDVRNPVVFRTLTQARKVVNAIIRRYGSPARVHIEMARELGKSKSDRDRIEKQQQKNKKERENAVAKFKEDFPDFVGEPRGKDILKMRLYEQQHGKCLYSGHDIDINRLNEKGYVEIDHALPFSRTWDDSQNNKVLVLGSENQNKRNQTPDEYLDGANNSQRWLEFQARVQTCHFSYGKKQRIQLAKLDDETEKGFLERNLNDTRYIARFMCQFVQENLYLTGKGKRLVFASNGGMTATLRNLWGLRKVREDNDRHHALDAIVVACSTASMQQKITKAFQRHESIEYVDTETGEVKFRIPQPWDFFRQEVMIRVFSDQPCEDLVEKLSARPEALHDNVTPLFVSRAPNRKMSGQGHLETIKSAKRLSEENSMVKKPLTTLKLKDIPEIVGYPSREPQLYAALKTRLETHDDDPIKAFAKPFYKPNKNGELGALVRSVRVKGVQNTGVMVHDGKGIADNATMVRVDVYTKAGKNYLVPVYVWQVAQGILPNRAVTSGKSEADWDLIDESFEFKFSLSRGDLVEMISNKGRIFGYYNGLDRANGSIGIREHDLEKSKGKDGVHRVGVKTATAFNKYHVDPLGKEIHRCSSEPRPTLKIKSKK

SEQ ID NO: 421 - protein, 1327 aa, Solobacterium moorei
  Solobacterium moorei F0204
MEGQMKNNGNNLQQGNYYLGLDVGTSSVGWAVTDTDYNVLKFRGKSMWGARLFDEASTAEERRTHRGNRRRLARRKYRLLLLEQLFEKEIRKIDDNFFVRLHESNLWADDKSKPSKFLLFNDTNFTDKDYLKKYPTIYHLRSDLIHNSTEHDIRLVFLALHHLIKYRGHFIYDNSANGDVKTLDEAVSDFEEYLNENDIEFNIENKKEFINVLSDKHLTKKEKKISLKKLYGDITDSENINISVLIEMLSGSSISLSNLFKDIEFDGKQNLSLDSDIEETLNDVVDILGDNIDLLIHAKEVYDIAVLTSSLGKHKYLCDAKVELFEKNKKDLMILKKYIKKNHPEDYKKIFSSPTEKKNYAAYSQTNSKNVCSQEEFCLFIKPYIRDMVKSENEDEVRIAKEVEDKSFLTKLKGTNNSVVPYQIHERELNQILKNIVAYLPFMNDEQEDISVVDKIKLIFKFKIPYYVGPLNTKSTRSWVYRSDEKIYPWNFSNVIDLDKTAHEFMNRLIGRCTYTNDPVLPMDSLLYSKYNVLNEINPIKVNGKAIPVEVKQAIYTDLFENSKKKVTRKSIYIYLLKNGYIEKEDIVSGIDIEIKSKLKSHHDFTQIVQENKCTPEEIERIIKGILVYSDDKSMLRRWLKNNIKGLSENDVKYLAKLNYKEWGRLSKTLLTDIYTINPEDGEACSILDIMWNTNATLMEILSNEKYQFKQNIENYKAENYDEKQNLHEELDDMYISPAARRSIWQALRIVDEIVDIKKSAPKKIFIEMAREKKSAMKKKRTESRKDTLLELYKSCKSQADGFYDEELFEKLSNESNSRLRRDQLYLYYTQMGRSMYTGKRIDFDKLINDKNTYDIDHIYPRSKIKDDSITNRVLVEKDINGEKTDIYPISEDIRQKMQPFWKILKEKGLINEEKYKRLTRNYELTDEELSSFVARQLVETQQSTKALATLLKKEYPSAKIVYSKAGNVSEFRNRKDKELPKFREINDLHHAKDAYLNIVVGNVYDTKFTEKFFNNIRNENYSLKRVFDFSVPGAWDAKGSTFNTIKKYMAKNNPIIAFAPYEVKGELFDQQIVPKGKGQFPIKQGKDIEKYGGYNKLSSAFLFAVEYKGKKARERSLETVYIKDVELYLQDPIKYCESVLGLKEPQIIKPKILMGSLFSINNKKLVVTGRSGKQYVCHHIYQLSINDEDSQYLKNIAKYLQEEPDGNIERQNILNITSVNNIKLFDVLCTKFNSNTYEIILNSLKNDVNEGREKFSELDILEQCNILLQLLKAFKCNRESSNLEKLNNKKQAGVIVIPHLFTKCSVFKVIHQSITGLFEKEMDLLK

SEQ ID NO: 422 - protein, 1179 aa, Sphaerochaeta globosa
MSKKVSRRYEEQAQEICQRLGSRPYSIGLDLGVGSIGVAVAAYDPIKKQPSDLVFVSSRIFIPSTGAAERRQKRGQRNSLRHRANRLKFLWKLLAERNLMLSYSEQDVPDPARLRFEDAVVRANPYELRLKGLNEQLTLSELGYALYHIANHRGSSSVRTFLDEEKSSDDKKLEEQQAMTEQLAKEKGISTFIEVLTAFNTNGLIGYRNSESVKSKGVPVPTRDIISNEIDVLLQTQKQFYQEILSDEYCDRIVSAILFENEKIVPEAGCCPYFPDEKKLPRCHFLNEERRLWEAINNARIKMPMQEGAAKRYQSASFSDEQRHILFHIARSGTDITPKLVQKEFPALKTSIIVLQGKEKAIQKIAGFRFRRLEEKSFWKRLSEEQKDDFFSAWTNTPDDKRLSKYLMKHLLLTENEVVDALKTVSLIGDYGPIGKTATQLLMKHLEDGLTYTEALERGMETGEFQELSVWEQQSLLPYYGQILTGSTQALMGKYWHSAFKEKRDSEGFFKPNTNSDEEKYGRIANPVVHQTLNELRKLMNELITILGAKPQEITVELARELKVGAEKREDIIKQQTKQEKEAVLAYSKYCEPNNLDKRYIERFRLLEDQAFVCPYCLEHISVADIAAGRADVDHIFPRDDTADNSYGNKVVAHRQCNDIKGKRTPYAAFSNTSAWGPIMHYLDETPGMWRKRRKFETNEEEYAKYLQSKGFVSRFESDNSYIAKAAKEYLRCLFNPNNVTAVGSLKGMETSILRKAWNLQGIDDLLGSRHWSKDADTSPTMRKNRDDNRHHGLDAIVALYCSRSLVQMINTMSEQGKRAVEIEAMIPIPGYASEPNLSFEAQRELFRKKILEFMDLHAFVSMKTDNDANGALLKDTVYSILGADTQGEDLVFVVKKKIKDIGVKIGDYEEVASAIRGRITDKQPKWYPMEMKDKIEQLQSKNEAALQKYKESLVQAAAVLEESNRKLIESGKKPIQLSEKTISKKALELVGGYYYLISNNKRTKTFVVKEPSNEVKGFAFDTGSNLCLDFYHDAQGKLCGEIIRKIQAMNPSYKPAYMKQGYSLYVRLYQGDVCELRASDLTEAESNLAKTTHVRLPNAKPGRTFVIIITFTEMGSGYQIYFSNLAKSKKGQDTSFTLTTIKNYDVRKVQLSSAGLVRYVSPLLVDKIEKDEVALCGE

SEQ ID NO: 423 - protein, 1426 aa, Sphingobacterium spiritivorum
  Sphingobacterium spiritivorum ATCC 33861
MKHILGLDLGTNSIGWALIKQDFENKQGEILGMGSRIIPMSQDILGDFGKGNSVSQTAERTKYRSVRRLRERFLLRRERLHRILNVLGFLPEHYASQIDFTKRFGKFKEETEPKLVYSNEGFIFKKSFEEMLSDFKTHQPQLLEDNKKIPYDWTIYYLRKKALSRKIEKEELAWILLNFNQKRGYYQLRGEEEEENPNKLIEFYSLKIVDVLADEPQKGKSDIWYSLILENGWIYRRSSKTPLFDWKEKTRDFIVTIDLNDDGSVKTDKEGNEKRSFRAPGENDWTLVKKKTEQEIDSSRKTVGTYIYETLLKNPKQKIKGKLVRTIERKFYKTELKQILEKQKEFHPELRQDDLYSDCVRELYKNNEAHQLTLSKKDFVHLFMEDIIFYQRPLGSQKSSISNCTLEFRKYKDENGTEHTQYLKAIPKSNPYYQEFRIWQWMYNLNIYKKEDDTNVTKDFLNTKADFESLFEFLNNRKEVDQKALLKHFKLNDKTHRWNYVEDKKYPCNETKTMILSRLDKVENISDDFLTREMEQKIWHIIYSVNDKVEYEKALKSFAGKNNLEDNSFFEAFKKFPPFKSEYGAFSEKAIKKLLPLMRMGKFWNYNNISEQSKSRIQKIITGEYDENIKDKVREKAIHLTTETDFQGLQLWLVQYIVYGRHSEAAMLGKWNSADDLEEFLKEFKQHSLRNPIVEQVITETLRVVKDIWQKYGNGAKDFFREIHIELGREMKLPAEERERLTRQISENENTNFRIKALLAEMMDDNSVENVRPFSPMQQEILKIYEEGVLNSDIEIEDDILKISKTAQPSSSDLKRYKLWLEQKYKSPYTGQIIPLNKLFTPEYEIEHIIPQSRYFDDSFTNKIICESAVNKLKDNYIGLEFIKKLGGSIVECGNGKSVAILKHDAYEDFIKKHYANNRSKRNKLLLEDIPEKMIERQMNDTRYISKYISGVLSNIVRVEDGTDEGVNSKNIVPGNGKITTQLKQDWGLNDVWNDLILPRFERMNHLTNSTDFTAWNENHQKFLPTVPVEFSKGFSKKRIDHRHHALDALVIACATKDHVNLLNNQSAKSDTKRYDLKKKLMKFEKVAYNHPQTGERIEREAPKQFLKPWETFTIDAKNHLETIIVSFKQNLRVINKATNYYEKYVEKEGTKVKERVEQKGTNWAIRKPMHKETVSGKIDLPRIKVPKGKILTATRKSLDTSFNLKTIGSITDTGIQKILKNYLQYKDNNPELAFSPEGIEDMNKNIEKFNNGKAHQSISKVRVFELGSKFPLGQSGNKKEKYVEAAKGTNLFFAIYQDKNGKRSYETIPLNEVIERQKQGLSVVDLKGVDDFYLSPNDLVYVPSEDELENISMIDFNKMSSERIYKVVSFTGNQIFFVRQDIATSVVNKAEFSTLNKMERAIDGTMIKETCVKLQIDRLGNISKI

SEQ ID NO: 424 - protein, 1110 aa, Sphingobium sp.
  Sphingobium sp. AP49
MAEGKKRIWRLGADLGANSLGWAAIELSAPVNGKPIAILAAGSRIFSDGRDPKSGASLAVDRRDARAMRRRRDRFKQRQKALIKYLIADGLFPADEAARNAMAAIDPYAVRARALDEALSLPELGRALFHLNQRRGFKSNRKADRKADDDAGKIAIGIDRTRDAIAEDEADAGAEPGSWTFGKWLHERRLKGQSVRTRLRPESGEDAKGDGYDFYPDRALMEEEFDAIWAAQAPHHPDVLTNDVHDRLHEIIFYQRPLKAPQVGMCSLIPGDRRLPKAHPLFQRRRLLEELNALMIVRPGEVAQRLTREERDILLLKLKDKNKVSFATLRKALKLDPDARFNKESEDRTDLKGDEVAAVMGSKTRFGNLWVHLSIEAQWDVLARLDAVESDAEDAAFCAWLVETYALTPEQARAVANAPLPPGYGRFGETATRKLIEALRDGKKDDRVLVYSEAVTEAGLGHHSDRRTGEVFEDAKGRPQLPYYGVALERHIMPGTGDPSDPEEMRVGRLTNPTVHIGLNQLRRILNVLIRAYGPPAEIAIELARELKLTDEDKKRINRENNDNRIAAERRSEKLLAIGQADSGANRALLKLWEELNPANVLDRRCIYSGRQISIDMLFSAAVEVDHILPFAATLDDSNGNKIVCLREANREKRKRSPHDAWGHSARWDEIAARAAQLPRNKRWRFEPDAMDKFRDEGGFQARHLVDTQYLARLSREYLATLYPEKGEGSGHIWVSPGRLTEMVRRKLGLNDLLPDHNFGGGADQAKNRLDHRHHAIDAVVVAIVDRGMLNAIARASGQEGAEGRERIIIPEPWDGFRDALRETVNRITVSHRTDHGTASKAGLPKGKDATAGRLHNDTAYGFTGDTDAKGNSIVVRRVPLSSFKKLADLDRIRDADLKAALYQHLNGLEGKAFEKALAEFHKLEWHNFGGVRRVRVTEPLTVIPIKDRNGRIYKGYKGDSNYRYDVWELPDGKWVTNWKNEAGEAMSSVISMFDAHQSSEPPRPHPAARKILSLHQNDLLAIEREGEDRKLMRVVKFGQSGQITLAEHQQAGDLKKRDAVSNDDDPFKYFAPTSGGLKKVKARQVRIDEIGRVLDPGFPARTARRKTRG

SEQ ID NO: 425 - protein, 1090 aa, Sphingomonas sp.
  Sphingomonas sp. S17
MDWRLGLDLGANSLGWAALRLDRAGDPIGILAMGSRIFSDGRDPKSGASLAVDRRAARAMRRRRDRFKQRQAALLKYLIRDGLFPADQADRQRLADEDPYALRARALDEELSLFEIGRALFHLNQRRGFQSNRKADRGQDDEAGKIAVGVDRLNQQMEEQGARTLGEFLHQRRRAATDANHIPSVRTRLRPETGEGAKGDGYDFYPSRALIAEEFEEIWAAQAPHYPDTLTQQVHDRLYEIIFHQRPLRAPQVGQCTLVAGETRLPKAHPLFQKRRLLEEINALMIVRPGEIAQRLTPEERDTLYLKLKDKRTVSFATLRKTLKLDSAARFNKESENRTELKGDEVAAELGAKTRLGTRWQHLSGDQQWEVVHRLMALESQADEAAFRDWISQTYDLLPEQAAAVLGARLPQGHGRFGPTATTTLIDSLLHDRTEDGRVVVYSEAVQRSGLGHHSDLRHDRDDEDVTELPYYGVALERHIMPGTAEPTDPEEMRIGRLTNPTVHIGLNQLRHVVNRLIRAYGPPKEIAIELARELKLSEDEKKKRNSENRDNRLAAEGRSKKLEEIRQRDTGANRALLKLWEELNPGNVLDRRCIYTGEQISIDMLFSDRVEVDHILPFAQTLDDSNGNKLLCLREANREKRRRSPYEAWGHTDRWPDIAERASRLPKPKRWRFEPDAMQRFATEDGFLARHLVDTQYLGRLAREYLSWLYPGRGEGSGHVWVSPGRLTEMVRRKLGLNDLLPDHNFGGGADQPKNRLDHRHHAIDALVVAIVDRGMLQAIARASGQDGSEGRERIHIPAPWDGFRDDLRVAVNGIIVSHRPDHGTVAKAGLARGRDQTAGRLHNDTAYGLTGETDAKGNSIVVRRIPLSAIKKPADIARVRDPLLRNALAEFTKGLDGKAFEARIGRFHELGPLLYRGIRRVRVVETLTVIPIRDAEGRAYKGYKGDSNYRYDVWEMPDGKWRCQVVSMFDAHQSTEQARPHPAARKILSLQRNDILAIERTEGDRELVRVVKFSEKQFAVAPPHEGGSLKTRDGNADDPFRYLYPSPNTLKGWRARQVRIDELGRVLDPGFPARKSVRRTRPRAAPVD

SEQ ID NO: 426 - protein, 1084 aa, Sporolactobacillus vineae
  Sporolactobacillus vineae DSM 21990 = SL153
MKYSIGLDIGISSVGWSVINLDRERIELMGARLFDAAENPKNGSSLAAPRRDARSARRRLRRRRYRVGRVRHFIIDRGLVTRGQADQLFDWKDGDLDIWLVRVNALERLLTDREFARVLIHIAKNRGYRSNRKSEAKSGENGQVLSAIKANKELMEEKGYQTVAEMLVNEPETFAGRKRNRGGEYTHVIARSELEHEIRLIFTKQRAFGNRFATEENENTYVKIWAAQRPVATKDDILKKIGDCTFEKGEKRAPKASYAFQYFRALDKLNRLRILSVREPSRNLTDDERNLIVPALFNHDKQKYSDLRKILQLRDDQKFNELFYDPGKSLKENENKTFLSLAEQYKIRKVIRDVQGKDGLLQYRPLDIDTIAYALTVFKDDQDTRDYLSNTFVNGNGKQVLNLANRAFDAELIDGLLSLSFAKFGHLSLKALHKLIPHMEQGLSYYDACKKVGYHDNEQVGKSKQHLLPVIPADEIRNPVVVRSLSQTRKVINAIIKRYGSPTFMYIELAREMGRPYNERRDLEKQYNKNRTVNDSAIEQIHELYPEIGAPRGHDILKYKLWQQQDCKCAYSLEKIPAEKIFEPGYAEVDHIIPYSRSFDDSNSNKVLVLSRMNQEKKNRTPYEWFGGDEHRWNKFESYVNALKVNRKKKSLLTKKNMDTEEEDTFKSRHLNDTRYITRFIKSFVEDNLLFREIEGAKQHVFTVNGAYTSLMRKRWGFNKNREESDLHHSVDAVIIAVSQPFRNEVSRYFKHREISLPQLLKRTWDYFPEPWEGFVKELRARTLQDPEKLKLALESLDLDSYDPEFIDEVKPIFISRMPKRSIKGQIHDETLRRNRGKTKDGFVKIVTRTRLENIKFDKNGDFPMYGRESDPKTYQAIKQRYLENNKDKKKAFIEPLYKPAKNPNNASLIRSVKIEDKANQIVPLRDEAVAYNASIVRTEVYRNKETGKFYLAPVYVSDVFAGREPRRFIRANVPYEQWVNITDKFTFLFNLYPNDVIYIKMKKVKTTKSNINKTISWQESYFYFKGTDIHTGAITIIDHMNSFTDRVGTQGLQLFEKYQVDPLGNLSRVHGETQYGVPALSHS

SEQ ID NO: 427 - protein, 1053 aa, Staphylococcus aureus; identical to SEQ ID NO: 28
  Staphylococcus aureus subsp. aureus

SEQ ID NO: 428 - protein, 1054 aa, Staphylococcus lugdunensis
  Staphylococcus lugdunensis M23590
MNQKFILGLDIGITSVGYGLIDYETKNIIDAGVRLFPEANVENNEGRRSKRGSRRLKRRRIHRLERVKKLLEDYNLLDQSQIPQSTNPYAIRVKGLSEALSKDELVIALLHIAKRRGIHKIDVIDSNDDVGNELSTKEQLNKNSKLLKDKFVCQIQLERMNEGQVRGEKNRFKTADIIKEIIQLLNVQKNFHQLDENFINKYIELVEMRREYFEGPGKGSPYGWEGDPKAWYETLMGHCTYFPDELRSVKYAYSADLFNALNDLNNLVIQRDGLSKLEYHEKYHIIENVFKQKKKPTLKQIANEINVNPEDIKGYRITKSGKPQFTEFKLYHDLKSVLFDQSILENEDVLDQIAEILTIYQDKDSIKSKLTELDILLNEEDKENIAQLTGYTGTHRLSLKCIRLVLEEQWYSSRNQMEIFTHLNIKPKKINLTAANKIPKAMIDEFILSPVVKRTFGQAINLINKIIEKYGVPEDIIIELARENNSKDKQKFINEMQKKNENTRKRINEIIGKYGNQNAKRLVEKIRLHDEQEGKCLYSLESIPLEDLLNNPNHYEVDHIIPRSVSFDNSYHNKVLVKQSENSKKSNLTPYQYFNSGKSKLSYNQFKQHILNLSKSQDRISKKKKEYLLEERDINKFEVQKEFINRNLVDTRYATRELTNYLKAYFSANNMNVKVKTINGSFTDYLRKVWKFKKERNHGYKHHAEDALIIANADFLFKENKKLKAVNSVLEKPEIESKQLDIQVDSEDNYSEMFIIPKQVQDIKDFRNFKYSHRVDKKPNRQLINDTLYSTRKKDNSTYIVQTIKDIYAKDNTTLKKQFDKSPEKFLMYQHDPRTFEKLEVIMKQYANEKNPLAKYHEETGEYLTKYSKKNNGPIVKSLKYIGNKLGSHLDVTHQFKSSTKKLVKLSIKPYRFDVYLTDKGYKFITISYLDVLKKDNYYYIPEQKYDKLKLGKAIDKNAKFIASFYKNDLIKLDGEIYKIIGVNSDTRNMIELDLPDIRYKEYCELNNIKGEPRIKKTIGKKVNSIEKLTTDVLGNVFTNTQYTKPQLLFKRGN

SEQ ID NO: 429 - protein, 1334 aa, Staphylococcus pseudintermedius
MGRKPYILSLDIGTGSVGYACMDKGFNVLKYHDKDALGVYLFDGALTAQERRQFRTSRRRKNRRIKRLGLLQELLAPLVQNPNFYQFQRQFAWKNDNMDFKNKSLSEVLSFLGYESKKYPTIYHLQEALLLKDEKFDPELIYMALYHLVKYRGHFLFDHLKIENLTNNDNMHDFVELIETYENLNNIKLNLDYEKTKVIYEILKDNEMTKNDRAKRVKNMEKKLEQFSIMLLGLKFNEGKLFNHADNAEELKGANQSHTFADNYEENLTPFLTVEQSEFIERANKIYLSLTLQDILKGKKSMAMSKVAAYDKFRNELKQVKDIVYKADSTRTQFKKIFVSSKKSLKQYDATPNDQTFSSLCLFDQYLIRPKKQYSLLIKELKKIIPQDSELYFEAENDTLLKVLNTTDNASIPMQINLYEAETILRNQQKYHAEITDEMIEKVLSLIQFRIPYYVGPLVNDHTASKFGWMERKSNESIKPWNFDEVVDRSKSATQFIRRMTNKCSYLINEDVLPKNSLLYQEMEVLNELNATQIRLQTDPKNRKYRMMPQIKLFAVEHIFKKYKTVSHSKFLEIMLNSNHRENFMNHGEKLSIFGTQDDKKFASKLSSYQDMTKIFGDIEGKRAQIEEIIQWITIFEDKKILVQKLKECYPELTSKQINQLKKLNYSGWGRLSEKLLTHAYQGHSIIELLRHSDENFMEILTNDVYGFQNFIKEENQVQSNKIQHQDIANLTTSPALKKGIWSTIKLVRELTSIFGEPEKIIMEFATEDQQKGKKQKSRKQLWDDNIKKNKLKSVDEYKYIIDVANKLNNEQLQQEKLWLYLSQNGKCMYSGQSIDLDALLSPNATKHYEVDHIFPRSFIKDDSIDNKVLVIKKMNQTKGDQVPLQFIQQPYERIAYWKSLNKAGLISDSKLHKLMKPEFTAMDKEGFIQRQLVETRQISVHVRDFLKEEYPNTKVIPMKAKMVSEFRKKFDIPKIRQMNDAHHAIDAYLNGVVYHGAQLAYPNVDLFDFNFKWEKVREKWKALGEFNTKQKSRELFFFKKLEKMEVSQGERLISKIKLDMNHFKINYSRKLANIPQQFYNQTAVSPKTAELKYESNKSNEVVYKGLTPYQTYVVAIKSVNKKGKEKMEYQMIDHYVFDFYKFQNGNEKELALYLAQRENKDEVLDAQIVYSLNKGDLLYINNHPCYFVSRKEVINAKQFELTVEQQLSLYNVMNNKETNVEKLLIEYDFIAEKVINEYHHYLNSKLKEKRVRTFFSESNQTHEDFIKALDELFKVVTASATRSDKIGSRKNSMTHRAFLGKGKDVKIAYTSISGLKTTKPKSLFKLAESRNEL

SEQ ID NO: 430 - protein, 1334 aa, Staphylococcus pseudintermedius; identical to SEQ ID NO: 429
  Staphylococcus pseudintermedius ED99

SEQ ID NO: 431 - protein, 1112 aa, Staphylococcus simulans
  Staphylococcus simulans ACS-120-V-Sch1
MLVGLKFKQSILFENMENAEDIKESATGSDAISLSDDYYENLSEFLTDEQLNFIESANTFFMGIMLDRILKGATSISAAKVRDYKIFKSQLKLIKDIVYQNKYDKYHEFFVTSKEDMRAYQENPDAKNFGKLSKFDQYLIHSKDQYAKLMKDLKGLVPKEYTEVLNLIDEQKFLVVQNTTDNASIPYQNNVFEAENILRNQQKYYPEITEEMIGKVINLISFRIPYYVGPLTNKNGQSDFAWMIRKSDEQTLPWNFDKVIDKSKSAEKFIRRMTSKCTYLLEEDVLPKHSLLYQEMEVLNELNNVQLRGENEPKHRIHRLDPKVKQFIYHNLFQKKKNVTHKDLITLLQNSEHRNTLNKTSGQKLKVFGTQNDSKFASKLSTYNDMKAILGSVENKRQMIEELVLWITIFEDKAILKQKIGEKYPNITEKQLNQIVKLNYSGWGRLSEKLLTKEVNGRSLIDLMYSTENNFMEIITDKTLGFDCFIKNSNKVKNAKISYKDVAELRTSPALKKGIWNAIKMVREISNLFGAPEKIIIEFATEDQAKGKRQKSRSELWDDLVKKNNLKRNKEFEGLFEELKAYPDLDFSNPKLWLYIHQNGKCMYTKKPIDLERLMSDTNNQLYEIDHILPRTFVKDDSINNKVLVIQSANQKKSGDKMPLEIFDNHVLVPFWKMLYENDLISSSKLSKLMKKEFNDLDKEGFIQRQLVETRQIISHVSDFLTEEYPSTTVVPMKANVVSELRRKFDIPKIRQLNDWHHAVDAYLNGFVYQAARVFYPKVNLFEFNFKWEKVREKWRQLGEFTENNKKREFFLFKRMENYVNEYGEGMISKLIFDLDNFKFNYSRKVESTESAFYKQSAFSPKNTTAQYDSDKNKTAIYKEMKNKRGIVVSYTYVKKDQELIGYGVFNETVFEYVNNADVDMNTRALKIVRKAFPKLDIKKAQYLFSINKGDALLVNGHPFLFVSAYERINGKQLEFDIAMQRKIKQALSPYNNMTEQEKVEFYNQFAEKVIEEFRNSIGLQSRDRKVNLIKNLFNNTEKSNDSMTQSILEVLKMTKVSAERSKELKIRWNGQTPNTFIDTKNNAEIQYKSITGLKTTKPKSIFKLAESKNEL

SEQ ID NO: 432 - protein, 1370 aa, Streptococcus agalactiae
  Streptococcus agalactiae 2603V/R
MNKPYSIGLDIGTNSVGWSIITDDYKVPAKKMRVLGNTDKEYIKKNLIGALLFDGGNTAADRRLKRTARRRYTRRRNRILYLQEIFAEEMSKVDDSFFHRLEDSFLVEEDKRGSKYPIFATLQEEKDYHEKFSTIYHLRKELADKKEKADLRLIYIALAHIIKFRGHFLIEDDSFDVRNTDISKQYQDFLEIFNTTFENNDLLSQNVDVEAILTDKISKSAKKDRILAQYPNQKSTGIFAEFLKLIVGNQADFKKYFNLEDKTPLQFAKDSYDEDLENLLGQIGDEFADLFSAAKKLYDSVLLSGILTVIDLSTKAPLSASMIQRYDEHREDLKQLKQFVKASLPEKYQEIFADSSKDGYAGYIEGKTNQEAFYKYLSKLLTKQEDSENFLEKIKNEDFLRKQRTFDNGSIPHQVHLTELKAIIRRQSEYYPFLKENQDRIEKILTFRIPYYIGPLAREKSDFAWMTRKTDDSIRPWNFEDLVDKEKSAEAFIHRMTNNDFYLPEEKVLPKHSLIYEKFTVYNELTKVRYKNEQGETYFFDSNIKQEIFDGVFKEHRKVSKKKLLDFLAKEYEEFRIVDVIGLDKENKAFNASLGTYHDLEKILDKDFLDNPDNESILEDIVQTLTLFEDREMIKKRLENYKDLFTESQLKKLYRRHYTGWGRLSAKLINGIRDKESQKTILDYLIDDGRSNRNFMQLINDDGLSFKSIISKAQAGSHSDNLKEVVGELAGSPAIKKGILQSLKIVDELVKVMGYEPEQIVVEMARENQTTNQGRRNSRQRYKLLDDGVKNLASDLNGNILKEYPTDNQALQNERLFLYYLQNGRDMYTGEALDIDNLSQYDIDHIIPQAFIKDDSIDNRVLVSSAKNRGKSDDVPSLEIVKDCKVFWKKLLDAKLMSQRKYDNLTKAERGGLTSDDKARFIQRQLVETRQITKHVARILDERFNNELDSKGRRIRKVKIVTLKSNLVSNFRKEFGFYKIREVNNYHHAHDAYLNAVVAKAILTKYPQLEPEFVYGDYPKYNSYKTRKSATEKLFFYSNIMNFFKTKVTLADGTVVVKDDIEVNNDTGEIVWDKKKHFATVRKVLSYPQNNIVKKTEIQTGGFSKESILAHGNSDKLIPRKTKDIYLDPKKYGGFDSPIVAYSVLVVADIKKGKAQKLKTVTELLGITIMERSRFEKNPSAFLESKGYLNIRADKLIILPKYSLFELENGRRRLLASAGELQKGNELALPTQFMKFLYLASRYNESKGKPEEIEKKQEFVNQHVSYFDDILQLINDFSKRVILADANLEKINKLYQDNKENISVDELANNIINLFTFTSLGAPAAFKFFDKIVDRKRYTSTKEVLNSTLIHQSITGLYETRIDLGKLGED

SEQ ID NO: 433 - protein, 1377 aa, Streptococcus agalactiae
  Streptococcus agalactiae 515
MNKPYSIGLDIGTNSVGWSIITDDYKVPAKKMRVLGNTDKEYIKKNLIGALLFDGGNTAADRRLKRTARRRYTRRRNRILYLQEIFAEEMSKVDDSFFHRLEDSFLVEEDKRGSKYPIFATMQEEKYYHEKFPTIYHLRKELADKKEKADLRLVYLALAHIIKFRGHFLIEDDRFDVRNTDIQKQYQAFLEIFDTTFENNHLLSQNVDVEAILTDKISKSAKKDRILAQYPNQKSTGIFAEFLKLIVGNQADFKKHFNLEDKTPLQFAKDSYDEDLENLLGQIGDEFADLFSVAKKLYDSVLLSGILTVTDLSTKAPLSASMIQRYDEHHEDLKHLKQFVKASLPENYREVFADSSKDGYAGYIEGKTNQEAFYKYLLKLLTKQEGSEYFLEKIKNEDFLRKQRTFDNGSIPHQVHLTELRAIIRRQSEYYPFLKENQDRIEKILTFRIPYYVGPLAREKSDFAWMTRKTDDSIRPWNFEDLVDKEKSAEAFIHRMTNNDLYLPEEKVLPKHSLIYEKFTVYNELTKVRFLAEGFKDFQFLNRKQKETIFNSLFKEKRKVTEKDIISFLNKVDGYEGIAIKGIEKQFNASLSTYHDLKKILGKDFLDNTDNELILEDIVQTLTLFEDREMIKKCLDIYKDFFTESQLKKLYRRHYTGWGRLSAKLINGIRNKENQKTILDYLIDDGSANRNFMQLINDDDLSFKPIIDKARTGSHSDNLKEVVGELAGSPAIKKGILQSLKIVDELVKVMGYEPEQIVVEMARENQTTAKGLSRSRQRLTTLRESLANLKSNILEEKKPKYVKDQVENHHLSDDRLFLYYLQNGRDMYTKKALDIDNLSQYDIDHIIPQAFIKDDSIDNRVLVSSAKNRGKSDDVPSIEIVKARKMFWKNLLDAKLMSQRKYDNLTKAERGGLTSDDKARFIQRQLVETRQITKHVARILDERFNNEVDNGKKICKVKIVTLKSNLVSNFRKEFGFYKIREVNDYHHAHDAYLNAVVAKAILTKYPQLEPEFVYGMYRQKKLSKIVHEDKEEKYSEATRKMFFYSNLMNMFKRVVRLADGSIVVRPVIETGRYMGKTAWDKKKHFATVRKVLSYPQNNIVKKTEIQTGGFSKESILAHGNSDKLIPRKTKDIYLDPKKYGGFDSPIVAYSVLVVADIKKGKAQKLKTVTELLGITIMERSRFEKNPSAFLESKGYLNIRDDKLMILPKYSLFELENGRRRLLASAGELQKGNELALPTQFMKFLYLASRYNESKGKPEEIEKKQEFVNQHVSYFDDILQLINDFSKRVILADANLEKINKLYQDNKENIPVDELANNIINLFTFTSLGAPAAFKFFDKIVDRKRYTSTKEVLNSTLIHQSITGLYETRIDLGKLGED

SEQ ID NO: 434 - protein, 1370 aa, Streptococcus agalactiae; identical to SEQ ID NO: 432

SEQ ID NO: 435 - protein, 1378 aa, Streptococcus agalactiae
  Streptococcus agalactiae ATCC 13813
MNKPYSIGLDIGTNSVGWSIITDDYKVPAKKMRVLGNTDKEYIKKNLIGALLFDGGNTAADRRLKRTARRRYTRRRNRILYLQEIFAEEMSKVDDSFFHRLEDSFLVEEDKRGSKYPIFATMQEEKYYHEKFPTIYHLRKELADKKEKADLRLIYLALAHIIKFRGHFLIEDDRFDVRNTDIQKQYQAFLEIFDTTFENNDLLSQNVDVEAILTDKISKSAKKDRILARYPNQKSTGIFAEFLKLIVGNQADFKKHFNLEDKTPLQFAKDSYDEDLENLLGQIGDEFADLFSAAKKLYDSVLLSGILTVIDLSTKAPLSASMIQRYDEHHEDLKHLKQFVKASLPENYREVFADSSKDGYAGYIEGKTSQEAFYKYLLKLLTKQEGSEYLLEKIKNEDFLRKQRTFDNGSIPHQVHLTELRAIIRRQSEYYPFLKENLDRIEKILTFRIPYYVGPLAREKSDFAWMTRKTDDSIRPWNFEDLVDKEKSAEAFIHRMTNNDLYLPEEKVLPKHSLIYEKFTVYNELTKVRFLAEGFKDFQFLNRKQKETIFNSLFKEKRKVTEKDIISFLNKVDGYEGIAIKGIEKQFNASLSTYHDLKKILGKDFLDNTDNELILEDIIQTLTLFEDREMIKKRLDIYKDFFTESQLKKLYRRHYTGWGRLSAKLINGIRNKENQKTILDYLIDDGSANRNFMQLIKDAGLSFKPIIDKARTGSHSDNLKEVVGELAGSPAIKKGILQSLKIVDELVKVMGYEPEQIVVEMARENQTTAKGLSRSRQRLTTLRESLGNLKSNILEEKKPKYVKDQVENHHLSDDRLFLYYLQNGKDMYTDDELDIDNLSQYDIDHIIPQAFIKDDSIDNRVLVSSAKNRGKSDDVPSIEIVKARKMFWKNLLDAKLMSQRKYDNLTKAERGGLTSDDKARFIQRQLVETRQITKHVARILDERFNNELDSKGRRIRKVKIVTLKSNLVSNFRKEFGFYKIREVNNYHHAHDAYLNAVVAKAILTKYPQLEPEFVYGLYRRKKLSKIVREDKEEKYSEATRKMFFYSNLMNMFKRVVRLADGSIVVRPVIETGRYMGKTAWDKKKHFATVRKVLSYPQNNIVKKTEIQTGGFSKESILAHGNSDKLIPRKTKDIYLDPKKYGGFDSPIVAYSVLVVADIKKGKAQKLKTVTELLGITIMERSRFEKNTSAFLESKGYLNIRDDKLMILPKYSLFELENGRRRLLASAGELQKGNELALPTQFMKFLYLASRYNESKGKPEEIEKKQEFVNQHVSYFDDILQLINDFSNRVILADANLEKINKLYQDNKENIPVDELANNIINLFTFTSLGAPAAFKFFDKIVDRKRYTSTKEVLNSTLIHQSITGLYETRIDLGKLGEG

SEQ ID NO: 436 - protein, 1370 aa, Streptococcus agalactiae
  Streptococcus agalactiae CJB111
  MOD_RES (117)..(117): Any amino acid
MNKPYSIGLDIGTNSVGWSIITDDYKVPAKKMRVLGNTDKEYIKKNLIGALLFDGGNTAADRRLKRTARRRYTRRRNRILYLQEIFAEEMSKVDDSFFHRLEDSFLVEEDKRGSKYXIFATLQEEKDYHEKFSTIYHLRKELADKKEKADLRLIYIALAHIIKFRGHFLIEDDSFDVRNTDISKQYQDFLEIFNTTFENNDLLSQNVDVEAILTDKISKSAKKDRILAQYPNQKSTGIFAEFLKLIVGNQADFKKYFNLEDKTPLQFAKDSYDEDLENLLGQIGDEFADLFSAAKKLYDSVLLSGILTVIDLSTKAPLSASMIQRYDEHREDLKQLKQFVKASLPEKYQEIFADSSKDGYAGYIEGKTNQEAFYKYLSKLLTKQEDSENFLEKIKNEDFLRKQRTFDNGSIPHQVHLTELKAIIRRQSEYYPFLKENQDRIEKILTFRIPYYIGPLAREKSDFAWMTRKTDDSIRPWNFEDLVDKEKSAEAFIHRMTNNDFYLPEEKVLPKHSLIYEKFTVYNELTKVRYKNEQGETYFFDSNIKQEIFDGVFKEHRKVSKKKLLDFLAKEYEEFRIVDVIGLDKENKAFNASLGTYHDLEKILDKDFLDNPDNESILEDIVQTLTLFEDREMIKKRLENYKDLFTESQLKKLYRRHYTGWGRLSAKLINGIRDKESQKTILDYLIDDGRSNRNFMQLINDDGLSFKSIISKAQAGSHSDNLKEVVGELAGSPAIKKGILQSLKIVDELVKVMGYEPEQIVVEMARENQTTNQGRRNSRQRYKLLDDGVKNLASDLNGNILKEYPTDNQALQNERLFLYYLQNGRDMYTGEALDIDNLSQYDIDHIIPQAFIKDDSIDNRVLVSSAKNRGKSDDVPSLEIVKDCKVFWKKLLDAKLMSQRKYDNLTKAERGGLTSDDKARFIQRQLVETRQITKHVARILDERFNNELDSKGRRIRKVKIVTLKSNLVSNFRKEFGFYKIREVNNYHHAHDAYLNAVVAKAILTKYPQLEPEFVYGDYPKYNSYKTRKSATEKLFFYSNIMNFFKTKVTLADGTVVVKDDIEVNNDTGEIVWDKKKHFATVRKVLSYPQNNIVKKTEIQTGGFSKESILAHGNSDKLIPRKTKDIYLDPKKYGGFDSPIVAYSVLVVADIKKGKAQKLKTVTELLGITIMERSRFEKNPSAFLESKGYLNIRADKLIILPKYSLFELENGRRRLLASAGELQKGNELALPTQFMKFLYLASRYNESKGKPEEIEKKQEFVNQHVSYFDDILQLINDFSKRVILADANLEKINKLYQDNKENISVDELANNIINLFTFTSLGAPAAFKFFDKIVDRKRYTSTKEVLNSTLIHQSITGLYETRIDLGKLGED

SEQ ID NO: 437 - protein, 1370 aa, Streptococcus agalactiae
  Streptococcus agalactiae COH1
MNKPYSIGLDIGTNSVGYSVVTDDYKVPAKKMRVLGNTDKEYIKKNLIGALLFDGGNTASDRRLKRTARRRYTRRRNRILYLQEIFAEEMSKVDDSFFHRLEDSFLVEDDKRGSKYPIFATMQEEKDYHEKFPTIYHLRKELADKKEKANLRLVYLALAHIIKFRGHFLIEDDSFDVRNTDIQRQYQAFLEIFDTTFENNHLLSQNIDVEGILTDKISKSAKKDRILAQYPNQKSTGIFAEFLKLIVGNQADFKKHFNLEDKTPLQFAKDSYDEDLENLLGQIGDEFADLFSVAKKLYDSVLLSGILTVTDLSTKAPLSASMIQRYDEHREDLKQLKQFVKASLPEKYQEIFTDSSKDGYAGYIEGKTNQGAFYKYLSKLLTKQEGSEYFLEKIKNEDFLRKQRTFDNGSIPHQVHLTELKAIIRRQSEYYPFLKENLDRIEKILTFRIPYYVGPLAREKSDFAWMTRKTDDSIRPWNFEELVDKEASAEAFIHRMTNNDLYLPEEKVLPKHSLIYEKFTVYNELTKVRYKNEQGETYFFDSNIKQEIFDGVFKEHRKVSKKKLLDFLAKEYEEFRIVDVIGLDKENKAFNASLGTYHDLKKILDKDFLDNPDNESILEDIVQTLTLFEDREMIKKRLENYKDLFTESQLKKLYRRHYTGWGRLSAKLINGIRDKESQKTILDYLISDGRANRNFMQLIHDDGLSFKPIIDKAQAGSHSDNLKEVVGELAGSPAIKKGILQSLKIVDELVKVMGYEPEQVVVEMARENQTTNQGRRNTRQRYKLLEEGVKNLASDLNGNILKEYPTDNQALQNERLFLYYLQNGRDMYTGEALDIDNLSQYDIDHIVPQAFIKDDSIDNRVLVSSAKNRGKSDNVPSIDIVKARKAFWKKLLDAKLMSQRKYDNLTKAERGGLTSDDKARFIQRQLVETRQITKHVARILDERFNNELDSKGRRIRKVKIVTLKSNLVSNFRKEFGFYKIREVNDYHHAHDAYLNAVVAKAILTKYPQLEPEFVYGDYPKYNSYKTRKSATEKLFFYSNIMNFFKTKVTLADGTVVVKDDIEVNNDTGEIVWDKKKHFATVRKVLSYPQVNIVKKTEIQTGGFSKESILAHGNSDKLIPRKTKDIYLDPKKYGGFDSPIVAYSVLVVADIKKGKAQKLKTVTELLGITIMERFRFEKNPSAFLESKGYLNIRDDKLMILPKYSLFELENGRRRLLASAGELQKGNELALPTQYMKFLYLASRYNELKGKPEEIEQKQEFVVQHVSYFDDILQIINDFSNRVILADANLEKINKLYQDNKENISVDELANNIINLFTFTSLGAPAAFKFFDKIVDRKRYTSTKEVLNSTLIHQSITGLYETRIDLGKLGED

SEQ ID NO: 438 - protein, 1370 aa, Streptococcus agalactiae
  Streptococcus agalactiae FSL S3-026
MNKPYSIGLDIGTNSVGWSIITDDYKVPAKKMRVLGNTDKEYIKKNLIGALLFDGGNTAADRRLKRTARRRYTRRRNRILYLQEIFAEEMSKVDDSFFHRLEDSFLVEEDKRGSKYPIFATMQEEKYYHEKFPTIYHLRKELADKKEKADLRLIYLALAHIIKFRGHFLIEDDRFDVRNTDIQKQYQAFLEIFDTTFENNDLLSQNVDVEAILTDKISKSAKKDRILARYPNQKSTGIFAEFLKLIVGNQADFKKHFNLEDKTPLQFAKDSYDEDLENLLGQIGDEFADLFSAAKKLYDSVLLSGILTVTDLSTKAPLSASMIQRYDEHREDLKQLKQFVKASLPEKYQEIFADSSKDGYAGYIEGKTNQEAFYKYLSKLLTKQEGSEYLLEKIKNEDFLRKQRTFDNGSIPHQVHLTELRAIIRRQSEYYPFLKENLDRIEKILTFRIPYYVGPLAREKSDFAWMTRKTDDSIRPWNFEDLVDKEKSAEAFIHRMTNNDLYLPEEKVLPKHSLIYEKFTVYNELTKVRFLAEGFKDFQFLNRKQKETIFNSLFKEKRKVTEKDIISFLNKVDGYEGIAIKGIEKQFNASLSTYHDLKKILGKDFLDNTDNELILEDIVQTLTLFEDREMIRKRLDIYKDFFTESQLKKLYRRHYTGWGRLSAKLINGIRNKENQKTILDYLIDDGSANRNFMQLIKDAGLSFKPIIDKARTGSHSDNLKEVVGELAGSPAIKKGILQSLKIVDELVKVMGYEPEQIVVEMARENQTTAKGLSRLRQRLTTLRESLANLKSNILEEKKPKYVKDQVENHHLSDDRLFLYYLQNGKDMYTDDELDIDNLSQYDIDHIIPQAFIKDDSIDNRVLVSSAKNRGKSDDVPSVEIVKDCKVFWKKLLDAKLMSQRKYDNLTKAERGGLTSDDKARFIQRQLVETRQITKHVARILDERFNNELDSKGRRIRKVKIVTLKSNLVSNFRKEFGFYKIREVNNYHHAHDAYLNAVVAKAILTKYPQLEPEFVYGDYPKYNSYKTRKSATEKLFFYSNIMNFFKTKVTLADGTVVVKDDIEVNNDTGEIVWDKKKHFATVRKVLSYPQVNIVKKTEIQTGGFSKESILAHGNSDKLIPRKTKDIYLDPKKYGGFDSPIVAYSVLVVADIKKGKAQKLKTVTELLGITIMERSRFEKNPSAFLESKGYLNIRDDKLMILPKYSLFELENGRRRLLASADELQKGNELALPTQFMKFLYLASRYNELKGKPEEIEQKQEFVVQHVSYFDDILQIINDFSNRVILADANLEKINKLYQDNKENIPVDELANNIINLFTFTSLGAPAAFKFFDKIVDRKRYTSTKEVLNSTLIHQSITGLYETRIDLGKLGED

SEQ ID NO: 439 - protein, 1370 aa, Streptococcus agalactiae
  Streptococcus agalactiae GB00112
MNKPYSIGLDIGTNSVGYSVVTDDYKVPAKKMRVLGNTDKEYIKKNLIGALLFDGGNTASDRRLKRTARRRYTRRRNRILYLQEIFAEEMSKVDDSFFHRLEDSFLVEDDKRGSKYPIFATMQEEKDYHEKFPTIYHLRKELADKKEKADLRLVYLALAHIIKFRGHFLIEDDSFDVRNTDIQRQYQAFLEIFDTTFENNHLLSQNIDVEGILTDKISKSAKKDRILAQYPNQKSTGIFAEFLKLIVGNQADFKKHFNLEDKTPLQFAKDSYDEDLENLLGQIGDEFADLFSVAKKLYDSVLLSGILTVTDLSTKAPLSASMIQRYDEHREDLKQLKQFVKASLPEKYQEIFTDSSKDGYAGYIEGKTNQGAFYKYLSKLLTKQEGSEYFLEKIKNEDFLRKQRTFDNGSIPHQVHLTELKAIIRRQSEYYPFLKENLDRIEKILTFRIPYYVGPLAREKSDFAWMTRKTDDSIRPWNFEELVDKEASAEAFIHRMTNNDLYLPEEKVLPKHSLIYEKFTVYNELTKVRYKNEQGETYFFDSNIKQEIFDGVFKEHRKVSKKKLLDFLAKEYEEFRIVDVIGLDKENKAFNASLGTYHDLKKILDKDFLDNPDNESILEDIVQTLTLFEDREMIKKRLENYKDLFTESQLKKLYRRHYTGWGRLSAKLINGIRDKESQKTILDYLISDGRANRNFMQLIHDDGLSFKPIIDKAQAGSHSDNLKEVVGELAGSPAIKKGILQSLKIVDELVKVMGYEPEQVVVEMARENQTTNQGRRNTRQRYKLLEEGVKNLASDLNGNILKEYPTDNQALQNERLFLYYLQNGRDMYTGEALDIDNLSQYDIDHIVPQAFIKDDSIDNRVLVSSAKNRGKSDNVPSIDIVKARKAFWKKLLDAKLMSQRKYDNLTKAERGGLTSDDKARFIQRQLVETRQITKHVARILDERFNNELDSKGRRIRKVKIVTLKSNLVSNFRKEFGFYKIREVNDYHHAHDAYLNAVVAKAILTKYPQLEPEFVYGDYPKYNSYKTRKSATEKLFFYSNIMNFFKTKVTLADGTVVVKDDIEVNNDTGEIVWDKKKHFATVRKVLSYPQVNIVKKTEIQTGGFSKESILAHGNSDKLIPRKTKDIYLDPKKYGGFDSPIVAYSVLVVADIKKGKAQKLKTVTELLGITIMERFRFEKNPSAFLESKGYLNIRDDKLMILPKYSLFELENGRRRLLASAGELQKGNELALPTQYMKFLYLASRYNELKGKPEEIEQKQEFVVQHVSYFDDILQIINDFSNRVILADANLEKINKLYQDNKENISVDELANNIINLFTFTSLGAPAAFKFFDKIVDRKRYTSTKEVLNSTLIHQSITGLYETRIDLGKLGED

SEQ ID NO: 440 - protein, 1370 aa, Streptococcus agalactiae
  Streptococcus agalactiae H36B
  MOD_RES (9)..(9): Any amino acid
MNKPYSIGXDIGTNSVGWSIITDDYKVPAKKMRVLGNTDKEYIKKNLIGALLFDGGNTAADRRLKRTARRRYTRRRNRILYLQEIFAEEMSKVDDSFFHRLEDSFLVEEDKRGSKYPIFATLQEEKDYHEKFSTIYHLRKELADKKEKADLRLIYIALAHIIKFRGHFLIEDDSFDVRNTDISKQYQDFLEIFNTTFENNDLLSQNVDVEAILTDKISKSAKKDRILAQYPNQKSTGIFAEFLKLIVGNQADFKKYFNLEDKTPLQFAKDSYDEDLENLLGQIGDEFADLFSAAKKLYDSVLLSGILTVIDLSTKAPLSASMIQRYDEHREDLKQLKQFVKASLPEKYQEIFADSSKDGYAGYIEGKTNQEAFYKYLSKLLTKQEDSENFLEKIKNEDFLRKQRTFDNGSIPHQVHLTELKAIIRRQSEYYPFLKENQDRIEKILTFRIPYYIGPLAREKSDFAWMTRKTDDSIRPWNFEDLVDKEKSAEAFIHRMTNNDFYLPEEKVLPKHSLIYEKFTVYNELTKVRYKNEQGETYFFDSNIKQEIFDGVFKEHRKVSKKKLLDFLAKEYEEFRIVDVIGLDKENKAFNASLGTYHDLEKILDKDFLDNPDNESILEDIVQTLTLFEDREMIKKRLENYKDLFTESQLKKLYRRHYTGWGRLSAKLINGIRDKESQKTILDYLIDDGRSNRNFMQLINDDGLSFKSIISKAQAGSHSDNLKEVVGELAGSPAIKKGILQSLKIVDELVKVMGYEPEQIVVEMARENQTTNQGRRNSRQRYKLLDDGVKNLASDLNGNILKEYPTDNQALQNERLFLYYLQNGRDMYTGEALDIDNLSQYDIDHIIPQAFIKDDSIDNRVLVSSAKNRGKSDDVPSLEIVKDCKVFWKKLLDAKLMSQRKYDNLTKAERGGLTSDDKARFIQRQLVETRQITKHVARILDERFNNELDSKGRRIRKVKIVTLKSNLVSNFRKEFGFYKIREVNNYHHAHDAYLNAVVAKAILTKYPQLEPEFVYGDYPKYNSYKTRKSATEKLFFYSNIMNFFKTKVTLADGTVVVKDDIEVNNDTGEIVWDKKKHFATVRKVLSYPQNNIVKKTEIQTGGFSKESILAHGNSDKLIPRKTKDIYLDPKKYGGFDSPIVAYSVLVVADIKKGKAQKLKTVTELLGITIMERSRFEKNPSAFLESKGYLNIRADKLIILPKYSLFELENGRRRLLASAGELQKGNELALPTQFMKFLYLASRYNESKGKPEEIEKKQEFVNQHVSYFDDILQLINDFSKRVILADANLEKINKLYQDNKENISVDELANNIINLFTFTSLGAPAAFKFFDKIVDRKRYTSTKEVLNSTLIHQSITGLYETRIDLGKLGED

SEQ ID NO: 441 - protein, 1377 aa, Streptococcus agalactiae
MNKPYSIGLDIGTNSVGWSIITDDYKVPAKKMRVLGNTDKEYIKKNLIGALLFDGGNTAADRRLKRTARRRYTRRRNRILYLQEIFAEEMSKVDDSFFHRLEDSFLVEEDKRGSKYPIFATMQEEKYYHEKFPTIYHLRKELADKKEKADLRLVYLALAHIIKFRGHFLIEDDRFDVRNTDIQKQYQAFLEIFDTTFENNHLLSQNVDVEAILTDKISKSAKKDRILAQYPNQKSTGIFAEFLKLIVGNQADFKKHFNLEDKTPLQFAKDSYDEDLENLLGQIGDEFADLFSVAKKLYDSVLLSGILTVTDLSTKAPLSASMIQRYDEHHEDLKHLKQFVKASLPENYREVFADSSKDGYAGYIEGKTNQEAFYKYLLKLLTKQEGSEYFLEKIKNEDFLRKQRTFDNGSIPHQVHLTELRAIIRRQSEYYPFLKENQDRIEKILTFRIPYYVGPLAREKSDFAWMTRKTDDSIRPWNFEDLVDKEKSAEAFIHRMTNNDLYLPEEKVLPKHSLIYEKFTVYNELTKVRFLAEGFKDFQFLNRKQKETIFNSLFKEKRKVTEKDIISFLNKVDGYEGIAIKGIEKQFNASLSTYHDLKKILGKDFLDNTDNELILEDIVQTLTLFEDREMIKKCLDIYKDFFTESQLKKLYRRHYTGWGRLSAKLINGIRNKENQKTILDYLIDDGSANRNFMQLINDDDLSFKPIIDKARTGSHSDNLKEVVGELAGSPAIKKGILQSLKIVDELVKVMGYEPEQIVVEMARENQTTAKGLSRSRQRLTTLRESLANLKSNILEEKKPKYVKDQVENHHLSDDRLFLYYLQNGRDMYTKKALDIDNLSQYDIDHIIPQAFIKDDSIDNRVLVSSAKNRGKSDDVPSIEIVKARKMFWKNLLDAKLMSQRKYDNLTKAERGGLTSDDKARFIQRQLVETRQITKHVARILDERFNNEVDNGKKICKVKIVTLKSNLVSNFRKEFGFYKIREVNDYHHAHDAYLNAVVAKAILTKYPQLEPEFVYGMYRQKKLSKIVHEDKEEKYSEATRKMFFYSNLMNMFKRVVRLADGSIVVRPVIETGRYMRKTAWDKKKHFATVRKVLSYPQNNIVKKTEIQTGGFSKESILAHGNSDKLIPRKTKDIYLDPKKYGGFDSPIVAYSVLVVADIKKGKAQKLKTVTELLGITIMERSRFEKNPSAFLESKGYLNIRDDKLMILPKYSLFELENGRRRLLASAGELQKGNELALPTQFMKFLYLASRYNESKGKPEEIEKKQEFVNQHVSYFDDILQLINDFSKRVILADANLEKINKLYQDNKENIPVDELANNIINLFTFTSLGAPAAFKFFDKIVDRKRYTSTKEVLNSTLIHQSITGLYETRIDLGKLGED

SEQ ID NO: 442 - protein, 1370 aa, Streptococcus agalactiae
MNKPYSIGLDIGTNSVGWSIITDDYKVPAKKMRVLGNTDKEYIKKNLIGALLFDGGNTAADRRLKRTARRRYTRRRNRILYLQEIFAEEMSKVDDSFFHRLEDSFLVEEDKRGSKYPIFATMQEEKDYHEKFPTIYHLRKELADKKEKADLRLVYLALAHIIKFRGHFLIEDDRFDVRNTDIQKQYQAFLEIFDTSFENNHLLSQNVDVEAILTDKISKSAKKDRILAQYPNQKSTGIFAEFLKLIVGNQADFKKHFNLEDKTPLQFAKDSYDEDLENLLGQIGDEFADLFSAAKKLYDSVLLSGILTVTDLSTKAPLSASMIQRYDEHREDLKQLKQFVKASLPEKYQEIFADSSKDGYAGYIEGKTNQEAFYKYLSKLLTKQEDSEYFLEKIKNEDFLRKQRTFDNGSIPHQVHLTELKAIIRRQSEYYPFLKENQDKIEKILTFRIPYYVGPLARGNSDFAWMTRKTDDSIRPWNFEDLVDKEKSAEAFIHRMTNNDLYLPEEKVLPKHSLIYEKFTVYNELTKVRYKNEQGETYFFDSNVKQEIFDGVFKEHRKVSKKQLLDFLAKEFEEFRIVDVTGLDKENKAFNASLGTYHDLKKILDKDFLDNPDNESILEDIVQTITLFEDREMIKKRLENYKDLFTESQLKKLYRRHYTGWGRLSAKLINGIRDRESQKTILDYLISDGRANRNFMQLINDDGLSFKSIISKAQSGSHSDNLKEVVGELAGSPAIKKGILQSLKIVDELVKVMGYEPEQIVVEMARENQTTNQGRRNSRQRYKLLEDGVKNLASDLNGDILKEYPTDNQALQNERLFLYYLQNGRDMYTGEALDIDNLSQYDIDHIVPQAFIKDDSIDNRVLVSSAKNRGKSDDVPSIDIVKARKAFWKKLLDAKLISQRKYDNLTKAERGGLTPDDKAGFIQRQLVETRQITKHVARILDERFNNKVDDNNKPIRKVKIVTLKSNLVSNFRKEFGFYKIREVNNYHHAHDAYLNAVVAKAILTKYPQLEPEFVYGDYPKYNSYKTRKSATEKLFFYSNIMNFFKTKVTLADETVVVKDDIEVNNETGEIAWDKKKHFATVRKVLSYPQVNIVKKTEVQTGGFSKESILAHSNSDKLIPRKTKDIYLDPKKYGGFDSPIVAYSVLVLADIKKGKAQKLKTVKELIGITIMERERFEKNPSAFLESKGYLNIRTDKLIILPKYSLFELENGRRRLLASAGELQKGNELALPTQYMKFLYLASRYNESKGKPEEIEKKQEFVNQHVSYFDDILQLINDFSKRVILADANLEKINKLYSDNKDNTPVDELAKNIINLFTFTSLGAPAAFKFFDKSVDRKRYTSTKEVLDSTLIHQSITGLYETRIDLGKLGED

SEQ ID NO: 443 - protein, 1370 aa, Streptococcus agalactiae
  Streptococcus agalactiae STIR-CD-17
MNKPYSIGLDIGTNSVGWSIITDDYKVPAKKMRVLGNTDKEYIKKNLIGALLFDGGNTAADRRLKRTARRRYTRRRNRILYLQEIFAEEMSKVDDSFFHRLEDSFLVEEDKRGSKYPIFATMQEEKDYHEKFPTIYHLRKELADKKEKADLRLVYLALAHIIKFRGHFLIEDDRFDVRNTDIQKQYQAFLEIFDTSFENNHLLSQNVDVEAILTDKISKSAKKDRILAQYPNQKSTGIFAEFLKLIVGNQADFKKHFNLEDKTPLQFAKDSYDEDLENLLGQIGDEFADLFSAAKKLYDSVLLSGILTVTDLSTKAPLSAYMIQRYDEHREDLKQLKQFVKASLPEKYQEIFADSSKDGYAGYIEGKTNQEAFYKYLSKLLTKQEDSEYFLEKIKNEDFLRKQRTFDNGSIPHQVHLTELKAIIRRQSEYYPFLKENQDKIEKILTFRIPYYVGPLARGNSDFAWMTRKTDDSIRPWNFEDLVDKEKSAEAFIHRMTNNDLYLPEEKVLPKHSLIYEKFTVYNELTKVRYKNEQGETYFFDSNVKQEIFDGVFKEHRKVSKKQLLDFLAKEFEEFRIVDVTGLDKENKAFNASLGTYHDLKKILDKDFLDNPDNESILEDIVQTITLFEDREMIKKRLENYKDLFTESQLKKLYRRHYTGWGRLSAKLINGIRDRESQKTILDYLISDGRANRNFMQLINDDGLSFKSIISKAQSGSHSDNLKEVVGELAGSPAIKKGILQSLKIVDELVKVMGYEPEQIVVEMARENQTTNQGRRNSRQRYKLLEDGVKNLASDLNGDILKEYPTDNQALQNERLFLYYLQNGRDMYTGEALDIDNLSQYDIDHIVPQAFIKDDSIDNRVLVSSAKNRGKSDDVPSIDIVKARKAFWKKLLDAKLISQRKYDNLTKAERGGLTPDDKAGFIQRQLVETRQITKHVARILDERFNNKVDDNNKPIRKVKIVTLKSNLVSNFRKEFGFYKIREVNNYHHAHDAYLNAVVAKAILTKYPQLEPEFVYGDYPKYNSYKTRKSATEKLFFYSNIMNFFKTKVTLADETVVVKDDIEVNNETGEIAWDKKKHFATVRKVLSYPQVNIVKKTEVQTGGFSKESILAHSNSDKLIPRKTKDIYLDPKKYGGFDSPIVAYSVLVLADIKKGKAQKLKTVKELIGITIMERERFEKNPSAFLESKGYLNIRTDKLIILPKYSLFELENGRRRLLASAGELQKGNELALPTQYMKFLYLASRYNESKGKPEEIEKKQEFVNQHISYFDDILQLINDFSKRVILADANLEKINKLYSDNKDNTPVDELAKNIINLFTFTSLGAPAAFKFFDKSVDRKRYTSTKEVLDSTLIHQSITGLYETRIDLGKLGED

SEQ ID NO: 444 - protein, 1125 aa, Streptococcus anginosus
  Streptococcus anginosus 1_2_62CV
MNGLVLGLDIGIASVGVGILNKETGEIIHANSRIFPAATADSNVERRGFRQGRRLGRRKKHRSARLNNLFEEFGFITDFSAIPLNLNPYALRVKGLSEELTNEELFIALKNIIKRRGISYLDDASEDGETASNEYGKAVEENRKLLADKTPGQIQLERFEKYGQVRGDFTVVENGENHRLINVFSTSAYKKEAERILRRQQEFNVRISDEFIEAYLTILTGKRKYYHGPGNEKSRTDYGRFRTDGTTLDNIFGILIGKCTFYPDEYRAAKASYTAQEFNLLNDLNNLTVPTETKKLSPEQKRQIVEYARTAKTLGTPTLLKYIAKLVDGSIDDIKGYRIDKSDKPEMHTFDAYRKMRTLDLVNIDALSRETLDDLAHILTLNTESEGILEALNSKMPSTFTKEQIDELIQFRKKNSAVFGKGWHNFSLKLMNELISELYETSEEQMTILTRLGKQRSREISKRTKYIDEKELTEEIYNPVVAKSVRQAIKIINEATKRYGIFDNIVIEMARENNEEDAKKDYIKRQKANQDEKNASMEKAAFQYNGKKELPDSIFHGHKELATKIRLWHQQGERCLYTGKNISIRDLIHNPHQYEIDHILPLSLSFDDGLANKVLVLATANQEKGQRTPFQAIDSMDDAWSYREFKQYVRNSKSLSNKKKDYLLTEEDISKIEVKQKFIERNLVDTRYSSRVVLNTLQEFYKTNDFDTKISVVRGQFTSQLRRKWKIEKSRDTYHHHAVDALIIAASSQLRLWKKQNNPLISYKEGQFVDPETGEILSLTDDEYKELVFRPPYDYFVDTLKSKSFEDSILFSYQVDSKYNRKISDATIYGTRKAQLGKDKQEETYVLGKIKDIYSQKGYEDFIKRYNKDETQFLIYHKDPQTFEKVIEEILKTYPDKELNEKGKEIPCNPFEKYRQENGPIRKYSKKGKGPEIKSLKYYDNKLGNHIDITPVNSQNQVVLQSLKPWRTDVYFNPRTSKYELMGLKYSDLRFEKGSGSYGISPEKYNKVKAKEGVNEDSEFKFTLYKNDLILIKDTETGEQQLFRYGSRNDTSKHYVELKPYEKAKFEGNQQLMNLLGTVAKGGQCLKGINKPNLSIYKVKTDVLGNKYFIKKEGDQPQLNFKKKF

SEQ ID NO: 445 - protein, 1345 aa, Streptococcus anginosus
  Streptococcus anginosus F0211
MDQKYSIGLDIGTNSVGWAVVTDDYKVPAKKMKVLGNTDKQSIKKNLLGALLFDSGETAEATRLKRTARRRYTRRRNRLRYLQEIFAEEMNKVDENFFQRLDDSFLVDEDKRGERHPIFGNIAAEVKYHDDFPTIYHLRKHLADISQKADLRLVYLALAHMIKFRGHFLIEGQLKAENTNVQALFKDFVEVYDKTVEESHLSEMTVDALSILTEKVSKSRRLENLIAHYPAEKKNTLFGNLIALSLGLQPNFKTNFQLSEDAKLQFSKDTYEEDLEGLLGEIGDEYADLFASAKNLYDAILLSGILTVDDNSTKAPLSASMVKRYEEHQKDLKKLKDFIKVNAPDQYNAIFKDKNKKGYAGYIENGVKQDEFYKYLKGILLQINGSGDFLDKIDREDFLRKQRTFDNGSIPHQIHLQEMHAILRRQEEHYPFLKENQDKIEKILTFRIPYYVGPLARKGSRFAWAEYKADEKITPWNFDDILDKEKSAEKFITRMTLNDLYLPEEKVLPKHSLLYETFTVYNELTKVKYVNEQGEAKFFDANMKQEIFDHVFKENRKVTKDKLLNYLNKEFEEFRIVNLTGLDKENKAFNSSLGTYHDLRKILDKSFLDDKANEKTIEDIIQTLTLFEDREMIRQRLQKYSDIFTKAQLKKLERRHYTGWGRLSYKLINGIRNKENKKTILDYLIDDGYANRNFMQLINDDALSFKEEIARAQIIGDVDDIANVVHDLPGSPAIKKGILQSVKIVDELVKVMGHNPANIIIEMARENQMTDKGRRNSQQRLKLLQDSLKNLDNPVNIKNVENQQLQNDRLFLYYIQNGKDMYTGETLDINNLSQYDIDHIIPQAFIKDNSLDNRVLTRSDKNRGKSDDVPSIEVVHEMKSFWSKLLSVKLITQRKFDNLTKAERGGLTEEDKAGFIKRQLVETRQITKHVAQILDERFNTEFDGNKRRIRNVKIITLKSNLVSNFRKEFELYKVREINDYHHAHDAYLNAVVGNALLLKYPQLEPEFVYGEYPKYNSYRSRKSATEKFLFYSNILRFFKKEDIQTNEDGEIAWNKEKHIKILRKVLSYPQVNIVKKTEEQTGGFSKESILPKGESDKLIPRKTKNSYWNPKKYGGFDSPVVAYSILVFADVEKGKSKKLRKVQDMVGITIMEKKRFEKHPVDFLEQRGYRNVRLEKIIKLPKYSLFELENKRRRLLASARELQKGNELVIPQRFTTLLYHSYQIEKNYEPEHREYVEKHKDEFKELLEYISVFSRKYVLADNNLTKIEMLFSKNKDAEVSSLAKSFISLLTFTAFGAPAAFNFFGENIDRKRYTSVTECLNATLIHQSITGLYETRIDLSKLGED

SEQ ID NO: 446 - protein, 1386 aa, Streptococcus anginosus
  Streptococcus anginosus SK1138
MNQKYSIGLDIGTNSVGWAVITDDYKVPAKKMKVLGNTDKQSIKKNLLGALLFDSGETAEATRLKRTARRRYTRRRNRLRYLQEIFAEEMMQVDESFFQRLDDSFLVDEDKRGERHPIFGNIAAEVKYHDEFPTIYHLRKHLADISQKADLRLVYLALAHMIKFRGHFLIEGQLKAENTNVQALFKDFVEVYDKTVEESHLSEITVDALSILTEKVSKSRRLENLIAHYPAEKKNTLFGNLIALFLGLQPNFKTNFQLSEDAKLQFSKDTYEEDLEGLLGEVGDEYADLFASAKNLYDAILLSGILTVDDNSTKAPLSASMVKRYEEHQKDLKKFEDFIKVNALDQYNAIFKDKNKKGYAGYIESGVKQDEFYKYLKGILLQINGSGDFLDKIDREDFLRKQRTFDNGSIPHQIHLQEMHAILRRQGEHYPFLKENQDKIEKILTFRIPYYVGPLARKGSRFAWAEYKADEKITPWNFDDILDKEKSAEKFITRMTLNDLYLPEEKVLPKHSLLYETFTVYNELTKVKYVNEQGEAKFFDANMKQEIFDHVFKENRKVTKDKLLNYLNKEFEEFRIVNLTGLDKENKVFNSSLGTYHDLRKILNKSFLDNKENAQIIEDIIQTLTLFEDREMIRQRLQKYSDIFTKAQLKKLERRHYTGWGRLSYKLINGIRNKENKKTILDYLIDDGYANRNFMQLINDDALSFKEEIAKAQIIGDVDDIANVVHDLPGSPAIKKGILQSVKIVDELVKVMGHNPANIIIEMARENQTTDRGRRNSQQRLKLLQDSLKNLDNPVNIKNVENQQLQNDRLFLYYIQNGKDMYTGETLDINNLSQYDIDHIIPQAYIKDDSFDNRVLTSSSENRGKSDNVPSIEVVCARKADWMRLRKAGLISQRKFDNLTKAERGGLTENDKAGFIKRQLVETRQITKHVAQVLDARFNAKHDENKKVIRDVKIITLKSNLVSQFRKDFKFYKVREINDYHHAHDAYLNAVIGTALLKKYPKLASEFVYGEFKKYDVRKFIAKSDKEIGKATAKYFFYSNLMNFFKKEVKFADGTVVERPDIETSEDGEIAWNKQTDFKIVRKVLSYPQVNIVKKTEVQTHGLDRGKPRGLFNANPSPKPKPDSSENLVGVKRNLDPKKYGGYAGISNSYAVLVKAIIEKGVKKKETMVLEFQGISILDRITFEKDKRAFLLGKGYKDIKKIIELPKYSLFELKDGSRRMLASILSTNNKRGEIHKGNELFVPQKFTTLLYHAKRINNPINKDHIEYVKKHRDDFKELLNYVLEFNEKYVGATKNGERLKEAVADFDSKSNEEICTSFLGAVNSKNAGLFELTSLGSASDFEFLGVKIPRYRDYTPSSLLKDSTLIHQSITGLYETRIDLSKLGED

SEQ ID NO: 447 - protein, 1396 aa, Streptococcus anginosus
  Streptococcus anginosus SK52 = DSM 20563
MTKPYSIGLDIGTNSVGWAVITDDYKVPAKKMKVLGNTNRDYIKKNLLGALLFDGGETAEGRRLKRTARRRYTRRKNRLRYLQEIFAEEMMQVDESFFQRLDDSFLVEEDKQGSKYPIFGTLKEEKEYHKKFKTIYHLREELANSKEKADLRLVYLALAHMIKFRGHFLYEGDLKAENTDVQALFKDFVEEYDKTIEESHLSEITVDALSILTEKVSKSSRLENLIAHYPTEKKNTLFGNLIALSLGLQANFKTNFQLSEDAKLQFSKDTYEEDLEGLLGEVGDEYADLFVSAKNLYDAILLSGILTVDDNSTKAPLSASMVKRYKEHKEELAAFKRFIKEKLPKKYEEIFKDDTKNGYAGYVGADKKLRKRSGKLATEEEFYKYVKGILNKVEGADYFLDKIDREDFLRKQRTFDNGSIPHQIHLQEMHAILRRQGEHYPFLKENQDKIEKILTFRIPYYVGPLARKGSRFAWAEYKADEKITPWNFDDILDKEKSAEKFITRMTLNDLYLPEEKVLPKHSPLYETFTVYNELTKVKYVNEQGEAKFFDTNMKQEIFDHVFKENRKVTKDKLLNYLNKEFEEFRIVNLTGLDKENKAFNASLGTYHDLRKILDKSFLDDKVNEKIIEDIIQTLTLFEDREMIRQRLQKYSDIFTTQQLKELERRHYTGWGRLSYKLINGIRNKENKKTILDYLIDDGYANRNFMQLINDDALSFKEEIARAQIIGDVDDIANVVHDLPGSPAIKKGILQSVKIVDELVKVMGHNPTNIIIEMARENQTTDKGRRNSQQRLKLLQDSLKNLDNPVNIKNVENQQLQNDRLFLYYIQNGKDMYTGETLDINNLSQYDIDHIIPQAFIKDNSLDNRVLTRSDKNRGKSDDVPSIEVVHEMKSFWSKLLSVKLITQRKFDNLTKAERGGLTENDKAGFIKRQLVETRQITKHVAQVLDARFNAKHDENKKVIRDVKIITLKSNLVSQFRKDFKFYKVREINDYHHAHDAYLNAVIGTALLKKYPKLASEFVYGEFKKYDVRKFIAKSDKEIGKATAKYFFYSNLMNFFKKEVKFADGTVVERPDIETSEDGEIAWNKQTDFKIVRKVLSYPQVNIVKKTEVQTHGLDRGKPRGLFNANPSPKPKPDSSENLVGIKRNLDPKKYGGYAGISNSYAVLVKAIIEKGVKKKETMVLEFQGISILDRITFEKDKRAFLLGKGYKDIKKIIELPKYSLFELKDGSRRMLASILSTNNKRGEIHKGNELFVPQKFTTLLYHAKRINNPINKDHIEYVKKHRDDFKELLNYVLEFNEKYVGATKNGERLKEAVADFDSKSNEEICTSFLGAVNSKNAGLFELTSLGSASDFEFLGVKIPRYRDYTPSSLLKDSILIHQSITGLYETRIDLSKLGED

SEQ ID NO: 448 - protein, 1373 aa, Streptococcus bovis
  Streptococcus bovis ATCC 700338
MTKKNYSIGLDIGTNSVGWAVITDDYKVPAKKMKVLGNTDKKYIKKNLLGALLFDSGETAEATRLKRTARRRYTRRKNRLRYLQEIFAEEMTKVDESFFQRLDESFLRWDDDNKKLGRYPIFGNKADVVKYHQEFPTIYHLRKHLADSSEKADLRLVYLALAHMIKFRGHFLIEGELNAENTDVQKIFADFVGVYDRTFDDSHLSEITVDAASILTEKISKSRRLENLIKYYPTEKKNTLFGNLIALALGLQPNFKMNFKLSEDAKLQFSKDSYEEDLGELLGKIGDDYADLFTSAKNLYDAILLSGILIVDDNSTKAPLSASMIKRYVEHQEDLEKLKEFIKANKSELYHDIFKDKNKNGYAGYIENGVKQDEFYKYLKNTLSKIAGSDYFLDKIEREDFLRKQRTFDNGSIPHQIHLQEMHAILRRQGDYYPFLKENQDRIEKILTFRIPYYVGPLARKDSRFSWAEYHSDEKITPWNFDKVIDKEKSAEKFITRMTLNDLYLPEEKVLPKHSHVYETYAVYNELTKIKYVNEQGKDSFFDSNMKQEIFDHVFKENRKVTKEKLLNYLNKEFPEYRIKDLIGLDKENKSFNASLGTYHDLKKILDKAFLDDKVNEEVIEDIIKTLTLFEDKDMIHERLQKYSDIFTADQLKKLERRHYTGWGRLSYKLINGIRNKENNKTILDYLIDDGSANRNFMQLINDDTLPFKQIIQKSQVVGDVDDIEAVVHDLPGSPAIKKGILQSVKIVDELVKVMGDNPDNIVIEMARENQTTNRGRSQSQQRLKKLQNSLKELGSNILNEEKPSYIEDKVENSHLQNDQLFLYYIQNGKDMYTGDELDIDHLSDYDIDHIIPQAFIKDDSIDNRVLTSSAKNRGKSDDVPSLDIVRARKAEWVRLYKSGLISKRKFDNLTKAERGGLTEADKAGFIKRQLVETRQITKHVAQILDARFNTESDENDKVIRDVKVITLKSNLVSQFRKDFEFYKVREINDYHHAHDAYLNAVVGTALLKKYPKLASEFVYGEYKKYDIRKFITNSSDKATAKYFFYSNLMNFFKRVIRYSNGKVIVRPVVEYSKDTEDIAWDKKSNFRTICKVLSYPQVNIVKKVETQTGGFSKESILPKGDSDKLIPRKTKKAYWDTKKYGGFDSPTVAYSVFVVADVEKGKAKKLKTVKELVGISIMERSFFEENPVEFLENKGYHNIREDKLIKLPKYSLFEFEGGKRRLLASASELQKGNEMVIPGHLVKLLYHAQRINSFNSTKYLDYVSAHKKEFEKVLSCVEDFANLYVDVEKNLSKIRAVADSMDNFSIEEISNSFINLLTLTALGAPADFNFLGEKIPRKRYTSTKECLNATLIHQSITGLYETRIDLSKIGEE

SEQ ID NO: 449 - protein, 1375 aa, Streptococcus canis
  Streptococcus canis FSL Z3-227
MEKKYSIGLDIGTNSVGWAVITDDYKVPSKKFKVLGNTNRKSIKKNLMGALLFDSGETAEATRLKRTARRRYTRRKNRIRYLQEIFANEMAKLDDSFFQRLEESFLVEEDKKNERHPIFGNLADEVAYHRNYPTIYHLRKKLADSPEKADLRLIYLALAHIIKFRGHFLIEGKLNAENSDVAKLFYQLIQTYNQLFEESPLDEIEVDAKGILSARLSKSKRLEKLIAVFPNEKKNGLFGNIIALALGLTPNFKSNFDLTEDAKLQLSKDTYDDDLDELLGQIGDQYADLFSAAKNLSDAILLSDILRSNSEVTKAPLSASMVKRYDEHHQDLALLKTLVRQQFPEKYAEIFKDDTKNGYAGYVGIGIKHRKRTTKLATQEEFYKFIKPILEKMDGAEELLAKLNRDDLLRKQRTFDNGSIPHQIHLKELHAILRRQEEFYPFLKENREKIEKILTFRIPYYVGPLARGNSRFAWLTRKSEEAITPWNFEEVVDKGASAQSFIERMTNFDEQLPNKKVLPKHSLLYEYFTVYNELTKVKYVTERMRKPEFLSGEQKKAIVDLLFKTNRKVTVKQLKEDYFKKIECFDSVEIIGVEDRFNASLGTYHDLLKIIKDKDFLDNEENEDILEDIVLTLTLFEDREMIEERLKTYAHLFDDKVMKQLKRRHYTGWGRLSRKMINGIRDKQSGKTILDFLKSDGFSNRNFMQLIHDDSLTFKEEIEKAQVSGQGDSLHEQIADLAGSPAIKKGILQTVKIVDELVKVMGHKPENIVIEMARENQTTTKGLQQSRERKKRIEEGIKELESQILKENPVENTQLQNEKLYLYYLQNGRDMYVDQELDINRLSDYDVDHIVPQSFIKDDSIDNKVLTRSVENRGKSDNVPSEEVVKKMKNYWRQLLNAKLITQRKFDNLTKAERGGLSEADKAGFIKRQLVETRQITKHVARILDSRMNTKRDKNDKPIREVKVITLKSKLVSDFRKDFQLYKVRDINNYHHAHDAYLNAVVGTALIKKYPKLESEFVYGDYKVYDVRKMIAKSEQEIGKATAKRFFYSNIMNFFKTEVKLANGEIRKRPLIETNGETGEVVWNKEKDFATVRKVLAMPQVNIVKKTEVQTGGFSKESILSKRESAKLIPRKKGWDTRKYGGFGSPTVAYSILVVAKVEKGKAKKLKSVKVLVGITIMEKGSYEKDPIGFLEAKGYKDIKKELIFKLPKYSLFELENGRRRMLASATELQKANELVLPQHLVRLLYYTQNISATTGSNNLGYIEQHREEFKEIFEKIIDFSEKYILKNKVNSNLKSSFDEQFAVSDSILLSNSFVSLLKYTSFGASGGFTFLDLDVKQGRLRYQTVTEVLDATLIYQSITGLYETRTDLSQLGGD

SEQ ID NO: 450 - protein, 1345 aa, Streptococcus constellatus
  Streptococcus constellatus subsp. constellatus SK53
MGKPYSIGLDIGTNSVGWAVVTDDYKVPAKKMKVLGNTDKQSIKKNLLGALLFDSGETAEATRLKRTARRRYTRRKNRLRYLQEIFTGEMNKVDENFFQRLDDSFLVDEDKRGEHHPIFGNIAAEVKYHDDFPTIYHLRRHLADTSKKADLRLVYLALAHMIKFRGHFLYEGDLKAENTDVQALFKDFVEEYDKTIEESHLSEITVDALSILTEKVSKSSRLENLIAHYPTEKKNTLFGNLIALSLDLHPNFKTNFQLSEDAKLQFSKDTYEEDLEGFLGEVGDEYADLFASAKNLYDAILLSGILTVDDNSTKAPLSASMVKRYEEHQKDLKKLKDFIKVNAPDQYNAIFKDKNKKGYASYIESGVKQDEFYKYLKGILLKINGSGDFLDKIDREDFLRKQRTFDNGSIPHQIHLQEMHAILRRQGEHYPFLKENQDKIEKILTFRIPYYVGPLARKGSRFAWAEYKADEKITPWNFDDILDKEKSAEKFITRMTLNDLYLPEEKVLPKHSPLYEAFTVYNELTKVKYVNEQGEAKFFDTNMKQEIFDHVFKENRKVTKDKLLNYLNKEFEEFRIVNLTGLDKENKAFNSSLGTYHDLRKILDKSFLDDKANEKTIEDIIQTLTLFEDREMIRQRLQKYSDIFTKAQLKKLERRHYTGWGRLSYKLINGIRNKENKKTILDYLIDDGYANRNFMQLINDDALSFKEEIARAQIIDDVDDIANVVHDLPGSPAIKKGILQSVKIVDELVKVMGHNPANIIIEMARENQTTDKGRRNSQQRLKLLQDSLKNLDNPVNIKNVENQQLQNDRLFLYYIQNGKDMYTGETLDINNLSQYDIDHIIPQAFIKDNSLDNRVLTRSDKNRGKSDDVPSIEVVHEMKSFWSKLLSVKLITQRKFDNLTKAERGGLTEEDKAGFIKRQLVETRQITKHVAQILDERFNTEFDGNKRRIRNVKIITLKSNLVSNFRKEFELYKVREINDYHHAHDAYLNAVVGNALLLKYPQLEPEFVYGEYPKYNSYRSRKSATEKFLFYSNILRFFKKEDIQTNEDGEIAWNKEKHIKILRKVLSYPQVNIVKKTEEQTGGFSKESILPKGESDKLIPRKTKNSYWDPKKYGGFDSPVVAYSILVFADVEKGKSKKLRKVQDMVGITIMEKKRFEKNPVDFLEQRGYRNVRLEKIIKLPKYSLFELENKRRRLLASAKELQKGNELVIPQRFTTLLYHSYRIEKDYEPEHREYVEKHKDEFKELLEYISVFSRKYVLADNNLTKIEMLFSKNKDAEVSSLAKSFISLLTFTAFGAPAAFNFFGENIDRKRYTSVTECLNATLIHQSITGLYETRIDLSKLGED

SEQ ID NO: 451 - protein, 1371 aa, Streptococcus dysgalactiae
MDKKYSIGLDIGTNSVGWAVITDDYKVPSKKFKVLGNTDRHSIKKNLIGALLFDSGETAEATRLKRTARRRYTRRKNRIRYLQEIFSSEMSKVDDSFFHRLEESFLVEEDKKHERHPIFGNIVDEVAYHEKYPTIYHLRKKLADSTDKADLRLIYLALAHMIKFRGHFLIEGDLNPDNSDMDKLFIQLVQTYNQLFEENPINASRVDAKAILSARLSKSRRLENLIAQLPGEKRNGLFGNLIALSLGLTPNFKSNFDLAEDAKLQLSKDTYDDDLDNLLAQIGDQYADLFLAAKNLSDAILLSDILRVNSEITKAPLSASMIKRYDEHHQDLTLLKALVRQQLPEKYKEIFFDQSKNGYAGYIDGGASQEEFYKFIKPILEKMDGTEELLAKLNREDLLRKQRTFDNGSIPHQIHLGELHAILRRQEDFYPFLKDNREKIEKILTFRIPYYVGPLARGNSRFAWMTRKSEETITPWNFEEVVDKGASAQSFIERMTNFDKNLPNEKVLPKHSLLYEYFTVYNELTKVKYVTEGMRKPEFLSGKQKEAIVDLLFKTNRKVTVKQLKEDYFKKIECFDSVEISGVEDRFNASLGTYHDLLKIIKDKDFLDNEENEDILEDIVLTLTLFEDKEMIEERLKKYANLFDDKVMKQLKRRHYTGWGRLSRKLINGIRDKQSGKTILDFLKSDGFANRNFMQLINDDSLTFKEAIQKAQVSGQGHSLHEQIANLAGSPAIKKGILQSVKVVDELVKVMGHKPENIVIEMARENQTTQKGQKNSRERMKRIEEGIKELGSQILKEHPVENTQLQNEKLYLYYLQNGRDMYVDQELDINRLSDYDVDHIVPQSFIKDDSIDNKVLTRSDKNRGKSDNVPSEEVVKKMKNYWRQLLNAKLITQRKFDNLTKAERGGLSELDKAGFIKRQLVETRQITKHVAQILDSRMNTKYDENDKLIREVKVITLKSKLVSDFRKDFQFYKVREINNYHHAHDAYLNAVVGTALIKKYPKLESEFVYGDYKVYDVRKMIAKSEQEIGKATAKRFFYSNIMNFFKTEITLANGEIRKRPLIETNEETGEIVWDKGRDFATVRKVLSMPQVNIVKKTEVQTGALTNESIYARGSFDKLISRKHRFESSKYGGFGSPTVTYSVLVVAKSKVQDGKVKKIKTGKELIGITLLDKLVFEKNPLKFIEDKGYGNVQIDKCIKLPKYSLFEFENGTRRMLASVMANNNSRGDLQKANEMFLPAKLVTLLYHAHKIESSKELEHEAYILDHYNDLYQLLSYIERFASLYVDVEKNISKVKELFSNIESYSISEICSSVINLLTLTASGAPADFKFLGTTIPRKRYGSPQSILSSTLIHQSITGLYETRIDLSQLGGD

SEQ ID NO: 452 - protein, 1371 aa, Streptococcus dysgalactiae
MDKKYSIGLDIGTNSVGWAVITDDYKVPSKKFKVLGNTDRHSIKKNLIGALLFDSGETAEATRLKRTARRRYTRRKNRIRYLQEIFSSEMSKVDDSFFHRLEESFLVEEDKKHERHPIFGNIVDEVAYHEKYPTIYHLRKKLADSTDKADLRLIYLALAHMIKFRGHFLIEGDLNPDNSDVDKLFIQLVQTYNQLFEEKPINASGVDAKAILSARLSKSKRLENLIAQLPGEKKNGLFGNLIALSLGLTPNFKSNFDLAEDAKLQLSKDTYDDDLDNLLAQIGNQYADLFLAAKNLSDAILLSDILRVNSEITKAPLSASMIKRYDEHHQDLTLLKALVRQQLPEKYKEIFFDQSKNGYAGYIDGGASQEEFYKFIKPILEKMDGTEELLAKLNREDLLRKQRTFDNGSIPHQIHLGELHAILRRQEDFYPFLKDNREKIEKILTFRIPYYVGPLARGNSRFAWMTRKSEETITPWNFEEVVDKGASAQSFIERMTNFDKNLPNEKVLPKHSLLYEYFTVYNELTKVKYVTEGMRKPEFLSGKQKEAIVDLLFKTNRKVTVKQLKEDYFKKIECFDSVEISGVEDRFNASLGTYHDLLKIIKDKDFLDNEENEDILEDIVLTLTLFEDKEMIEERLKKYANLFDDKVMKQLKRRHYTGWGRLSRKLINGIRDKQSGKTILDFLKSDGFANRNFMQLINDDSLTFKEAIQKAQVSGQGHSLHEQIANLAGSPAIKKGILQSVKVVDELVKVMGHKPENIVIEMARENQTTQKGQKNSRERMKRIEEGIKELGSQILKEHPVENTQLQNEKLYLYYLQNGRDMYVDQELDINRLSDYDVDHIVPQSFIKDDSIDNKVLTRSDKNRGKSDNVPSEEVVKKMKNYWRQLLNAKLITQRKFDNLTKAERGGLSELDKAGFIKRQLVETRQITKHVAQILDSRMNTKYDENDKLIREVKVITLKSKLVSDFRKDFQFYKVREINNYHHAHDAYLNAVVGTALIKKYPKLESEFVYGDYKVYDVRKMIAKSEQEIGKATAKRFFYSNIMNFFKTEITLANGEIRKRPLIETNEETGEIVWDKGRDFATVRKVLSMPQVNIVKKTEVQTGALTNESIYARGSFDKLISRKHRFESSKYGGFGSPTVTYSVLVVAKSKVQDGKVKKIKTGKELIGITLLDKLVFEKNPLKFIEDKGYGNVQIDKCIKLPKYSLFEFENGTRRMLASVMANNNSRGDLQKANEMFLPAKLVTLLYHAHKIESSKELEHEAYILDHYNDLYQLLSYIERFASLYVDVEKNISKVKELFSNIESYSISEICSSVINLLTLTASGAPADFKFLGTTIPRKRYGSPQSILSSTLIHQSITGLYETRIDLSQLGGD

SEQ ID NO: 453 - protein, 1371 aa, Streptococcus dysgalactiae
MDKKYSIGLDIGTNSVGWAVITDDYKVPSKKFKVLGNTDRHSIKKNLIGALLFDSGETAEATRLKRTARRRYTRRKNRIRYLQEIFSSEMSKVDDSFFHRLEESFLVEEDKKHERHPIFGNIVDEVAYHEKYPTIYHLRKKLADSTDKADLRLIYLALAHMIKFRGHFLIEGDLNPDNSDMDKLFIQLVQTYNQLFEENPINASRVDAKAILSARLSKSRRLENLIAQLPGEKRNGLFGNLIALSLGLTPNFKSNFDLAEDAKLQLSKDTYDDDLDNLLAQIGDQYADLFLAAKNLSDAILLSDILRVNSEITKAPLSASMIKRYDEHHQDLTLLKALVRQQLPEKYKEIFFDQSKNGYAGYIDGGASQEEFYKFIKPILEKMDGTEELLAKLNREDLLRKQRTFDNGSIPHQIHLGELHAILRRQEDFYPFLKDNREKIEKILTFRIPYYVGPLARGNSRFAWMTRKSEETITPWNFEEVVDKGASAQSFIERMTNFDKNLPNEKVLPKHSLLYEYFTVYNELTKVKYVTEGMRKPEFLSGKQKEAIVDLLFKTNRKVTVKQLKEDYFKKIECFDSVEISGVEDRFNASLGTYHDLLKIIKDKDFLDNEENEDILEDIVLTLTLFEDKEMIEERLKKYANLFDDKVMKQLKRRHYTGWGRLSRKLINGIRDKQSGKTILDFLKSDGFANRNFMQLINDDSLTFKEAIQKAQVSGQGHSLHEQIANLAGSPAIKKGILQSVKVVDELVKVMGHKPENIVIEMARENQTTQKGQKNSRERMKRIEEGIKELGSQILKEHPVENTQLQNEKLYLYYLQNGRDMYVDQELDINRLSDYDVDHIVPQSFIKDDSIDNKILTRSDKNRGKSDNVPSEEVVKKMKNYWRQLLNAKLITQRKFDNLTKAERGGLSELDKAGFIKRQLVETRQITKHVAQILDSRMNTKYDENDKLIREVKVITLKSKLVSDFRKDFQFYKVREINNYHHAHDAYLNAVVGTALIKKYTKLESEFVYGDYKVYDVRKMIAKSEQEIGKATAKRFFYSNIMNFFKTEITLANGEIRKRPLIETNEETGEIVWDKGRDFATVRKVLSMPQVNIVKKTEVQTGALTNESIYARGSFDKLISRKHRFESSKYGGFGSPTVTYSVLVVAKSKVQDGKVKKIKTGKELIGMTLLDKLVFEKNPLKFIEDKGYGNVQIDKCIKLPKYSLFEFENGTRRMLASVMANNNSRGDLQKANEMFLPAKLVTLLYHAHKIESSKELEHEAYILDHYNDLYQLLSYIERFASLYVDVEKNISKVKELFSNIESYSISEICSSVINLLTLTASGAPADFKFLGTTIPRKRYGSPQSILSSTLIHQSITGLYETRIDLSQLGGD

SEQ ID NO: 454 - protein, 1371 aa, Streptococcus dysgalactiae
MDKKYSIGLDIGTNSVGWAVITDDYKVPSKKFKVLGNTDRHSIKKNLIGALLFDSGETAEATRLKRTARRRYTRRKNRIRYLQEIFSSEMSKVDDSFFHRLEESFLVEEDKKHERHPIFGNIVDEVAYHEKYPTIYHLRKKLADSTDKADLRLIYLALAHMIKFRGHFLIEGDLNPDNSDMDKLFIQLVQTYNQLFEENPINASRVDAKAILSARLSKSRRLENLIAQLPGEKRNGLFGNLIALSLGLTPNFKSNFDLAEDAKLQLSKDTYDDDLDNLLAQIGDQYADLFLAAKNLSDAILLSDILRVNSEITKAPLSASMIKRYDEHHQDLTLLKALVRQQLPEKYKEIFFDQSKNGYAGYIDGGASQEEFYKFIKPILEKMDGTEELLAKLNREDLLRKQRTFDNGSIPHQIHLGELHAILRRQEDFYPFLKDNREKIEKILTFRIPYYVGPLARGNSRFAWMTRKSEETITPWNFEEVVDKGASAQSFIERMTNFDKNLPNEKVLPKHSLLYEYFTVYNELTKVKYVTEGMRKPEFLSGKQKEAIVDLLFKTNRKVTVKQLKEDYFKKIECFDSVEISGVEDRFNASLGTYHDLLKIIKDKDFLDNEENEDILEDIVLTLTLFEDKEMIEERLKTYAHLFDDKVMKQLKRRHYTGWGRLSRKLINGIRDKQSGKTILDFLKSDGFANRNFIQLIHDDSLTFKEAIQKAQVSGQGHSLHEQIANLAGSPAIKKGILQSVKVVDELVKVMGHKPENIVIEMARENQTTQKGQKNSRERMKRIEEGIKELGSQILKEHPVENTQLQNEKLYLYYLQNGRDMYVDQELDINRLSDYDVDHIVPQSFIKDDSIDNKVLTRSDKNRGKSDDVPSEEVVKKMKNYWRQLLNAKLITQRKFDNLTKAERGGLSELDKAGFIKRQLVETRQITKHVAQILDSRMNTKYDENDKLIREVKVITLKSKLVSDFRKDFQFYKVREINNYHHAHDAYLNAVVGTALIKKYPKLESEFVYGDYKVYDVRKMIAKSEQEIGKATAKRFFYSNIMNFFKTEITLANGEIRKRPLIETNEETGEIVWNKGRDFATVRKVLSMPQVNIVKKTEVQTGALTNESIYARGSFDKLISRKHRFESSKYGGFGSPTVTYSVLVVAKSKVQDGKVKKIKTGKELIGITLLDKLVFEKNPLKFIEDKGYGNVQIDKCIKLPKYSLFEFENGTRRMLASVMANNNSRGDLQKANEMFLPAKLVTLLYHAHKIESSKELEHEAYILDHYNDLYQLLSYIERFASLYVDVEKNISKVKELFSNIESYSISEICSSVINLLTLTASGAPADFKFLGTTIPRKRYGSPQSILSSTLIHQSITGLYETRIDLSQLGGD

SEQ ID NO: 455 - protein, 1348 aa, Streptococcus equi
MKKPYTIALDIGTNSVGWVVVTDDYRVPTKKMKVLGNTERKTIKKNLIGALLFDSGDTAEGTRLKRTARRRYTRRKNRLRYLKEIFTEEMAKVDDGFFQRLEDSFYVLEDKEGNKHPIFANLADEVAYHKKYPTIYHLRKELVDNPQKADLRLIYLAVAHIIKFRGHFLIEGTLSSKNNNLQKSFDHLVDTYNLLFEEQRLLTEGINAKELLSAALSKSKRLENLISLIPGQKKTGIFGNIIALSLGLTPNFKANFGLSKDVKLQLAKDTYADDLDSLLAQIGDQYADLFLAAKNLSDAILLSDILTESDEITRAPLSASMVKRYREHHKDLVTLKTLIKDQLPEKYQEIFLDKTKNGYAGYIEGQVSQEEFYKYLKPILARLDGSEPLLLKIDREDFLRKQRTFDNGSIPHQIHLEELHAILRRQEVFYPFLKDNRKKIESLLTFRIPYYVGPLARGHSRFAWVKRKFDGAIRPWNFEEIVDEEASAQIFIEKMTKNDLYLPNEKVLPKHSLLYETFTVYNELTKVKYATEGMTRPQFLSADQKQAIVDLLFKTNRKVTVKQLKENYFKKIECWDSVEITGVEDSFNASLGTYHDLLKIIQDKDFLDNPDNQKIIEDIILTLTLFEDKKMISKRLDQYAHLFDKVVLNKLERHHYTGWGRLSGKLINGIRDKQSGKTILDFLKADGFANRNFMQLIHDSELSFIDEIAKAQVIGKTEYSKDLVGNLAGSPAIKKGISQTIKIVDELVKIMGYLPQQIVIEMARENQTTAQGIKNARQRMRKLEETAKKLGSNILKEHPVDNSQLQNDKRYLYYLQNGKDMYTGDDLDIDYLSSYDIDHIIPQSFIKNNSIDNKVLTSQGANRGKLDNVPSEAIVRKMKGYWQSLLRAGAISKQKFDNLTKAERGGLTQVDKAGFIQRQLVETRQITKHVAQILDSRFNTEFDDHNKRIRKVHIITLKSKLVSDFRKEFGLYKIRDINHYHHAHDAYLNAVVAKAILGKYPQLAPEFVYGDYPKYNSFKERQKATQKMLFYSNILKFFKDQESLHVNSDGEEIWNANKHLPIIKNVLSIPQVNIVKKTEVQTGGFYKESILSKGNSDKLIPRKNNWDTRKYGGFDSPTVAYSVLVIAKMEKGKAKVLKPVKEMVGITIMERTAFEENPVVFLEARGYREIQEHLIIKLPKYSLFELENGRRRLLASASELQKGNELFLPVDYMTFLYLAAHYHELTGSSEDVLRKKYFVDRHLHYFDDIIQMINDFAERHILASSNLEKINHTYHNNSDLPVNERAENIINVFTFVALGAPAAFKFFDATIDRKRYTSTKEVLNATLIHQSVTGLYETRIDLSQLGEN

SEQ ID NO: 456 - protein, 1377 aa, Streptococcus equinus
  Streptococcus equinus ATCC 9812
MEKTYSIGLDIGTNSVGWAVITDDYKVPAKKMKVLGNTDKKYIKKNLLGALLFDSGETAEATRLKRAARRRYTRRKNRLRYLQEIFAKEMAKVDESFFQRLEESFLTDDDKTFDSHPIFGNKAEEDTYHQEFPTIYHLRKHLADSPEKVDLRLVYLALAHMIKFRGHFLIEGQLNAENTDVQKIFADFVGVYDRTFDDSHLSEITVDAASILTEKISKSRRLENLIKQYPTEKKNTLFGNLVALALGLQPNFKTNFKLSEDAKLQFSKDTYDEDLEELLGKIGDDYADLFTAAKNLYDAILLSGILTVDDNSTKAPLSASMIKRYEEHHEDLEKLKTFIKVNNFDKYHEIFKDKSKNGYAGYIENGVKQDIFYKHLKSIISEKNGGQYFLDKIEREDFLRKQRTFDNGSIPYQIHLQEMRTILRRQGEYYPFLKENQAKIEKILTFRIPYYVGPLARKNSRFAWAKYHSDEPITPWNFDEVVDKEKSAEKFITRMTLNDLYLPEEKVLPKHSYVYETFAVYNELTKIKYVNEQGKSFFFDANMKQEIFDHVFKENRKVTKAKLLSYLNNEFEEFRINDLIGLDKDSKSFNASLGTYHDLKKILDKSFLDDKTNEQIIEDIVLTLTLFEDRDMIHERLQKYSDIFTSQQLKKLERRHYTGWGRLSYKLINGIRNKENNKTILDFLIDDGDANRNFMQLINDDSLSFKTTIQEAQVVGDVDDIEAVVHDLPGSPAIKKGILQSVKIVDELVKVMGHNPQNIVIEMARENQITGYGRNRSNQRLKRLQDSLKEFGSDILSKKKPSYVDSKVENSHLQNDRLFLYYIQNGKDMYTGEELDIDHLSDYDIDHIIPQAFIKDNSIDNRVLTSSAKNRGKSDDVPSIEIVRNRKSYWYKLYKSGLISKRKFDNLTKAERGGLTETDKAGFIKRQLVETRQITKHVAQILDARFNTKCDENDKVIRDVKVITLKSSLVSQFRKEFKFYKVREINDYHHAHDAYLNAVVGTALLKKYPKLAPEFVYGEYKKYDVRKLVAKSSDNHSELGKATAKYFFYSNLMNFFKTEVKYADGRVFERPDIETNADGEVVWNKQRDFNIVRKVLSYPQVNIVKKVEVQTGGFSKESILPKGDSDKLIPRKTKKLQWETQKYGGFDSPTVAYSVLVVADVEKGKTRKLKTVKELVGISIMERSSFEENPVSFLEKKGYHNVQEDKLIKLPKYSLFEFEGGRRRLLASATELQKGNEVVLPQYMVNLLYHSQHVNNSHKPEHLNYVKQHKDEFKDIFNLIISIARINILKPKVVDNLINEFTEYGQEDISSLSESFINLLKFISFGAPGAFKFLKLDVKQSNLRYKSTTEALSATLIHQSVTGLYETRIDLSKLGEE

SEQ ID NO: 457 - protein, 1370 aa, Streptococcus gallolyticus
MTKKNYSIGLDIGTNSVGWAVITDDYKVPAKKMKVLGNTDKKYIKKNLLGALLFDSGETAEATRLKRTARRRYTRRKNRLRYLQEIFAEEMTKVDESFFYRLDESFLTTDEKDFERHPIFGNKAEEDAYHQKFPTIYHLRNYLADSSEKADLRLVYLALAHMIKYRGHFLIEGKLNAENTDVQKLFTDFVGVYDRTFDDSHLSEITVDVASTLTEKISKSRRLENLIKYYPTEKKNTLFGNLIALALGLQPNFKMNFKLSEDAKLQFSKDTYEEDLEELLGKIGDDYADLFTSAKNLYDAILLSGILTVDDNSTKAPLSASMIKRYVEHHEDLEKLKEFIKANKSELYHDIFKDKNKNGYAGYIENGVKQDEFYKYLKNTLSKIDGSDYFLDKIEREDFLRKQRTFDNGSIPHQIHLQEMHAILRRQGDYYPFLKEKQDRIEKILTFRIPYYVGPLVRKDSRFAWAEYRSDEKITPWNFDKVIDKEKSAEKFITRMTLNDLYLPEEKVLPKHSHVYETYAVYNELTKIKYVNEQGKESFFDSNMKQEIFDHVFKENRKVTKEKLLNYLNKEFPEYRIKDLIGLDKENKSFNASLGTYHDLKKILDKAFLDDKVNEEVIEDIIKTLTLFEDKDMIHERLQKYSDIFTANQLKKLERRHYTGWGRLSYKLINGIRNKENNKTILDYLIDDGSANRNFMQLINDDTLPFKQIIQKSQVVGDVDDIEAVVHDLPGSPAIKKGILQSVKIVDELVKVMGDNPDNIVIEMARENQTTNRGRSQSQQRLKKLQSSLKELGSNILNEEKPSYIEDKVENSHLQNDQLFLYYIQNGKDMYTGDELDIDHLSDYDIDHIIPQAFIKDDSIDNRVLTSSAKNRGKSDDVPSLDIVRARKAEWVRLYKSGLISKRKFDNLTKAERGGLTEADKAGFIKRQLVETRQITKHVAQILDARFNTEHDENDKVIRDVKVITLKSNLVSQFRKDFEFYKVREINDYHHAHDAYLNAVVGTALLKKYPKLASEFVYGEYKKYDIRKFITNSSDKATAKYFFYSNLMNFFKTKVKYADGTVFERPIIETNADGEIAWNKQIDFEKVRKVLSYPQVNIVKKVETQTGGFSKESILPKGDSDKLIPRKTKKVYWDTKKYGGFDSPTVAYSVFVVADVEKGKAKKLKTVKELVGISIMERSFFEENPVEFLENKGYHNIREDKLIKLPKYSLFEFEGGRRRLLASASELQKGNEMVLPGYLVELLYHAHRADNFNSTEYLNYVSEHKKEFEKVLSCVEDFANLYVDVEKNLSKIRAVADSMDNFSIEEISNSFINLLTLTALGAPADFNFLGEKIPRKRYTSTKECLTATLIHQSITGLYETRIDLSKLGEE

SEQ ID NO: 458 - protein, 1370 aa, Streptococcus gallolyticus; identical to SEQ ID NO: 457
  Streptococcus gallolyticus subsp. gallolyticus TX20005

SEQ ID NO: 459 - protein, 1371 aa, Streptococcus gallolyticus
MTEKNYSIGLDIGTNSVGWAVITDDYKVPAKKMKVLGNTDKKYIKKNLLGALLFDNGETAEATRLKRTARRRYTRRKNRLRYLQEIFAEEMAKVDESFFYRLDESFLTTDDKDFERHPIFGNKADEIKYHQEFPTIYHLRKHLADSHEKADLRLIYLALAHMIKFRGHFLIEGELNAENTDVQKLFEAFVEVYDRTFDDSNLSEITVDASSILTEKFSKSRRLENLIKHYPTEKKNTLFGNLVALALGLQPNFKTSFKLSEDAKLQFSKDTYEEDLEELIGKIGDEYADLFTSAKNLYDAILLSGILTVADNTTKAPLSASMIKRYNEHQVDLKKLKEFIKNNASDKYDEIFNDKDKNGYAGYIENGVKQDEFYKYLKTTLSKIDGSDYFLDKIEREDFLRKQRTFDNGSIPHQIHLQEMHAILRRQGEHYAFLKENQAKIEKILTFRIPYYVGPLARKNSRFAWAEYHSDEKITPWNFDEIIDKEKSAEKFITRMTLNDLYLPEEKVLPKHSLVYETYTVYNELTKVKYVNEQGKSNFFDANMKQEIFEHVFKENRKVTKDKFLNYLNKEFPEYRIQDLIGLDKENKSFNASLGTYHDLKKILDKSFLDDKTNETIIEDIIQTLTLFEDRDMIRQRLQKYSDIFTPQQLKKLERRHYTGWGRLSYKLINGIRNKENGKSILDYLIDDGYANRNFMQLISDDTLPFKQIIKDAQIIGDIDDVTSVVRELPGSPAIKKGILQSVKIVDELVKVMGHNPDNIVIEMARENQTTNRGRNQSQQRLKKLQDSLKELGSNILNEEKPSYIEGKVENNHLQDDRLFLYYIQNGKDMYTGDELDIDHLSDYDIDHIIPQAFIKDDSIDNRVLTSSAKNRGKSDDVPSLDIVHDRKADWIRLYKSGLISKRKFDNLTKAERGGLTENDKAGFIKRQLVETRQITKHVAQILDSRFNTERDENDKVIRNVKVITLKSNLVSQFRKDFKFYKVREINDYHHAHDAYLNAVVGTALLKKYPKLAPEFVYGEYKKYDIRKFITSSGDKATAKYFFYSNLMNFFKRVIRYSNGKVVVRPVIECSKDTGEIAWNKQTDFEKVRRVLSYPQVNIVKKVETQTGGFSKESILPKGNSDKLIPRKTKKFRWDTPKYGGFDSPNIAYSVFVIADVEKGKAKKLKTVKELVGISIMERSSFEENPVVFLEKKGYQNVQEDNLIKLPKYSLFEFEGGRRRLLASASELQKGNEVVLSRHLVELLYHAHRVNSFNNSEHLKYVSEHKKEFGEVLSCVENFAKSYVDVEKNLGKIRAVADKIDTFSIEDISISFVNLLTLTALGAPADFNFLGEKIPRKRYTSTKECLNATLIHQSITGLYETRIDLSKLGEE

SEQ ID NO: 460 - protein, 1130 aa, Streptococcus gallolyticus
MTNGKILGLDIGIASVGVGIIEAKTGKVVHANSRLFSAANAENNAERRGFRGSRRLNRRKKHRVKRVRDLFEKYEIVTDFRNLNLNPYELRVKGLTEQLTNEELFAALRTISKRRGISYLDDAEDDSTGSTDYAKSIDENRRLLKTKTPGQIQLERLEKYGQLRGNFTVYDENGEAHRLINVFSTSDYEKEARKILETQADYNKKITAEFIDDYVEILTQKRKYYHGPGNEKSRTDYGRFRTDGTTLENIFGILIGKCSFYPDEYRASKASYTAQEYNFLNDLNNLKVPTETGKLSTEQKEALVEFAKSTATLGPAKLLKEIAKILDCKVDEIKGYREDDKGKPDLHTFEPYRKLKFNLDSVNIDDLSREVLDKLADILTLNTEREGIEDAIRHNLPNQFTEGQISEIIKVRKSQSTAFNKGWHSFSAKLMNELIPELYATSDEQMTILTRLEKFKVNKKSSKNTKTIDEKEVTDEIYNPVVAKSVRQTIKIINAAVKKYGDFDKIVIEMPRDKNADDEKKFIDKRNKENKKEKDDALKRAAYLYNGTDKLPDEVFHGNKQLETKIRLWYQQGERCLYSGKPIPIQELVHNSNNFEIDHILPLSLSFDDSLANKVLVYAWTNQEKGQKTPYQVIDSMDAAWSFREMKDYVLKQKGLGKKKRDYLLTTENIDKIEVKKKFIERNLVDTRYASRVVLNSLQSALRELGKDTKISVIRGQFTSQLRRKWKIDKSRETYHHHAVDALIIAASSQLKLWEKQDNPMFVDYGNNQVVDKQTGEILSVSDDEYKELVFQPPYQGFVNMISSKGFEDEILFSYQVDSKYNRKVSDATIYSTRKAKIGKDKKEETYVLGKIKDIYSQNGFDTFIKKYNKDKTQFLMYQKDPLTWENVIEVILRDYPTTKKSEDGKNDVKCNPFEEYRRENGLVCKYSKKGKGTPIKSLKYYDKKLGNCIDITPEGSKNEVVLQSLNPWRADVYFNPETLKYELLGLKYSDLSFEKGTGKYHISQEKYDVIKEKEGIGKKSEFKFTLYRNDLILIKDTASGEQEIYRFLSRTMPNVKHYAELKPYDKEKFDNVQELVEALGEADKVGRCIKGLNKSNLSIYKVRTDVLGNKYFVKKEGDKPKLDFKNNKK

SEQ ID NO: 461 - protein, 1136 aa, Streptococcus gordonii
MNGLVLGLDIGIASVGVGILEKDTGKIIHASSRLFPAATADNNVERRSNRQGRRLNRRKKHRSVRLQDLFEGYGLLTDFSKVSMNLNPYQLRVQGMENQLTNEELFVALKNIVKRRGISYLDDASEDGGTVSSDYGKAVEENRKLLAEKTPGQIQLERFEKYGQLRGDFTVEENGEKHRLINVFSTSAYRKEAERILRKQQEFNSKITDEFIEDYLIILTGKRKYYHGPGNEKSRTDYGRFRTDGTTLDNIFGILIGKCTFYTEEYRASKASYTAQEFNLLNDLNNLTVPTETKKLSEEQKKLIIEYAKSAKTLGASTLLKYIAKMIDASVDQIRGYRVDVNNKPEMHTFEVYRKMQSLETIKVEELPRKVLDELAHILTLNTEREGIEEAINSKLKDIFNRDQVLELVQFRKNNSSLFSKGWHNFSIKLMMELIPELYETSEEQMTILTRLGKQRSKETSKRTKYIDEKELTEEIYNPVVAKSVRQAIKIINEATKKYGIFDNIVIEMARENNEEDAKKDYIKRQKANQDEKNAAMEKAAFQYNGKKELPDNIFHGHKELTTKIRLWHQQGEKCLYTGKNIPISDLIHNQYKYEIDHILPLSLSFDDSLSNKVLVLATANQEKGQRTPFQALDSMDDAWSYREFKSYVKDSKLLSNKKKDYLLTEEDISKIEVKQKFIERNLVDTRYSSRVVLNALQDFYKSHQLDTTISVVRGQFTSQLRRKWGIEKSRETYHHHAVDALIIAASSQLRLWKKHSNPLIAYKEGQFVDSETGEIVSLSDEEYKELVFKAPYDHFVDTLRSKKFEDSILFSYQVDSKYNRKISDATIYATRKAKLDKEKKEYTYTLGKIKDIYALGTKTPSKTGFYKFLDLYKTDKSQFLMYQKDRKTWDEVIEKIIEQYRPFKEYDKNGKEVDFNPFEKYRIGNGPIRKYSKKGNGPEIKSLKYYDILLGKHKNITPDGSRNTVALLSLNPWRTDVYYNSETKKYEFLGLKYADLCFEEGGAYGISEVKYKKIREKEGIGKNSEFKFTLYKNDLILIKDTETNCQQFFRFWSRTGKDNPKSFEKHKIELKPYEKAKFEKGEELKVLGKVPPSSNQFQKNMQIENLSIYKVKTDILGNKHFIKKEGDEPKLKFKK

SEQ ID NO: 462 - protein, 1129 aa, Streptococcus infantarius
  Streptococcus infantarius subsp. infantarius ATCC BAA-102
MSNGKILGLDIGVASVGVGIIDSKTGNVIHANSRLFSAANAENNAERRGFRGARRLTRRKKHRVKRVRDLFEKYDISTDFRNLNLNPYELRVKGLTEQLTNEELFAALRTIAKRRGISYLDDAEDDSTGSSDYAKSIDENRRLLKTKTPGQIQLERLEKYGQLRGNFTVYDENGEAHRLINVFSTSDYKNEARKILETQSNYNKQITDEFIEDYIEILTQKRKYYHGPGNEKSRTDYGRFRTDGTTLENIFGILIGKCSFYPEEYRASKASYTAQEFNFLNDLNNLKVPTETGKLSTEQKEYLVDFAKKSKALGASKLLKEIAKIVDCSVDDIKGYRVDNKDKPDLHTFEPYRKLKFNLSSIDIDELSRETLDKLADILTLNTEREGIEDAIKRNLPSQFTEEQISEIVQIRKNQSSAFNKGWHSFSAKLMNELIPELYVTSEEQMTILTRLEKFKVNKKSSKNTKTIDEKEITDEIYNPVVAKSVRQTIKIINAAVKKYGDFDKIVIEMPRDKNAEDEKKFIDKKQKENKKEKDDSLKRAAFLYNGTDNLPDGVFHGNKELKTKIRLWYQQGERCLYSGKLISIHDLVHNSNKFEIDHILPLSLSFDDSLANKVLVYAWTNQEKGQKTPYQVIDSMDTAWSFREMKDYVLKQKGLGKKKCEYLLTTENIDKIEVKKKFIERNLVDTRYASRVVLNSLQTALKELGKDTKVSVVRGQFTSQLRRKWNIDKSRETYHHHAVDALIIAASSQLKLWQKQENPMFESYGENQVVNKETGEILSISDDKYKELVFQPPYQGFVNTISSKGFEDEILFSYQVDSKFNRKVSDATIYSTRKAKLGKDKKDETYVLGKIKDIYSQDGFDTFIKRYKKDKTQFLMYQKDPLTWENVIEVILRDYPSEKLSEDGKKTVKCNPFEEYRRENGLICKYSKKGNGTPIKSLKYYDKKLGNCIDITPEKSKNRVVLRQISPWRADIYFNLETLKYELMGLKYSDLSFEKGTGKYHISQEKYDAIREKEGIGKKSEFKFTLYRNDLILIKDTLNNCERMLRFGSKNDTSKHYVELKPLEKGTFDSEEEILPVLGKVAKSGQFIKGLNKPNISIYKVRTDVLGNKFFIKKEGDKPKLDFKNNNK

SEQ ID NO: 463 - protein, 1375 aa, Streptococcus infantarius
MEKSYSIGLDIGTNSVGWAVITDDYKVPAKKMKVLGNTDKKYIKKNLLGALLFDSGETAEVTRLKRTARRRYTRRKNRLRYLQEIFAKEMTKVDESFFQRLEESFLTDDDKTFDSHPIFGNKAEEDAYHQKFPTIYHLRKYLADSQEKADLRLVYLALAHMIKYRGHFLIEGELNAENTDVQKLFNVFVETYDKIVDESHLSEIEVDASSILTEKVSKSRRLENLIKQYPTEKKNTLFGNLIALALGLQPNFKTNFKLSEDAKLQFSKDTYEEDLEELLGKVGDDYADLFISAKNLYDAILLSGILTVDDNSTKAPLSASMIKRYVEHHEDLEKLKEFIKINKLKLYHDIFKDKTKNGYAGYIDNGVKQDEFYKYLKTILTKIDDSDYFLDKIERDDFLRKQRTFDNGSIPHQIHLQEMHSILRRQGDYYPFLKENQAKIEKILTFRIPYYVGPLARKDSRFAWANYHSDEPITPWNFDEVVDKEKSAEKFITRMTLNDLYLPEEKVLPKHSHVYETFTVYNELTKIKYVNEQGESFFFDANMKQEIFDHVFKENRKVTKAKLLSYLNNEFEEFRINDLIGLDKDSKSFNASLGTYHDLKKILDKSFLDDKTNGQIIEDIVLTLTLFEDRDMIHERLQKYSDFFTSQQLKKLERRHYTGWGRLSYKLINGIRNKENNKTILDFLIDDGHANRNFMQLINDESLSFKTIIQEAQVVGDVDDIEAVVHDLPGSPAIKKGILQSVKIVDELVKVMGDNPDNIVIEMARENQTTGYGRNKSNQRLKRLQDSLKEFGSDILSKKKPSYVDSKVENSHLQNDRLFLYYIQNGKDMYTGEELDIDRLSDYDIDHIIPQAFIKDNSIDNKVLTSSAKNRGKSDDVPSIEIVRNRRSYWYKLYKSGLISKRKFDNLTKAERGGLTEADKAGFIKRQLVETRQITKHVAQILDARFNTKRDENDKVIRDVKVITLKSNLVSQFRKEFKFYKVREINDYHHAHDAYLNAVVGTALLKKYPKLTPEFVYGEYKKYDVRKLIAKSSDDYSEMGKATAKYFFYSNLMNFFKTEVKYADGRVFERPDIETNADGEVVWNKQKDFDIVRKVLSYPQVNIVKKVEAQTGGFSKESILSKGDSDKLIPRKTKKVYWNTKKYGGFDSPTVAYSVLVVADIEKGKAKKLKTVKELVGISIMERSFFEENPVSFLEKKGYHNVQEDKLIKLPKYSLFEFEGGRRRLLASATELQKGNEVMLPAHLVELLYHAHRIDSFNSTEHLKYVSEHKKEFEKVLSCVENFSNLYVDVEKNLSKVRAAAESMTNFSLEEISASFINLLTLTALGAPADFNFLGEKIPRKRYTSTKECLSATLIHQSVTGLYETRIDLSKLGEE

SEQ ID NO: 464 - protein, 1368 aa, Streptococcus iniae
  Streptococcus iniae 9117
MRKPYSIGLDIGTNSVGWAVITDDYKVPSKKMRIQGTTDRTSIKKNLIGALLFDNGETAEATRLKRTTRRRYTRRKYRIKELQKIFSSEMNELDIAFFPRLSESFLVSDDKEFENHPIFGNLKDEITYHNDYPTIYHLRQTLADSDQKADLRLIYLALAHIIKFRGHFLIEGNLDSENTDVHVLFLNLVNIYNNLFEEDIVETASIDAEKILTSKTSKSRRLENLIAEIPNQKRNMLFGNLVSLALGLTPNFKTNFELLEDAKLQISKDSYEEDLDNLLAQIGDQYADLFIAAKKLSDAILLSDIITVKGASTKAPLSASMVQRYEEHQQDLALLKNLVKKQIPEKYKEIFDNKEKNGYAGYIDGKTSQEEFYKYIKPILLKLDGTEKLISKLEREDFLRKQRTFDNGSIPHQIHLNELKAIIRRQEKFYPFLKENQKKIEKLFTFKIPYYVGPLANGQSSFAWLKRQSNESITPWNFEEVVDQEASARAFIERMTNFDTYLPEEKVLPKHSPLYEMFMVYNELTKVKYQTEGMKRPVFLSSEDKEEIVNLLFKKERKVTVKQLKEEYFSKMKCFHTVTILGVEDRFNASLGTYHDLLKIFKDKAFLDDEANQDILEEIVWTLTLFEDQAMIERRLVKYADVFEKSVLKKLKKRHYTGWGRLSQKLINGIKDKQTGKTILGFLKDDGVANRNFMQLINDSSLDFAKIIKNEQEKTIKNESLEETIANLAGSPAIKKGILQSIKIVDEIVKIMGQNPDNIVIEMARENQSTMQGIKNSRQRLRKLEEVHKNTGSKILKEYNVSNTQLQSDRLYLYLLQDGKDMYTGKELDYDNLSQYDIDHIIPQSFIKDNSIDNTVLTTQASNRGKSDNVPNIETVNKMKSFWYKQLKSGAISQRKFDHLTKAERGALSDFDKAGFIKRQLVETRQITKHVAQILDSRFNSNLTEDSKSNRNVKIITLKSKMVSDFRKDFGFYKLREVNDYHHAQDAYLNAVVGTALLKKYPKLEAEFVYGDYKHYDLAKLMIQPDSSLGKATTRMFFYSNLMNFFKKEIKLADDTIFTRPQIEVNTETGEIVWDKVKDMQTIRKVMSYPQVNIVMKTEVQTGGFSKESIWPKGDSDKLIARKKSWDPKKYGGFDSPIIAYSVLVVAKIAKGKTQKLKTIKELVGIKIMEQDEFEKDPIAFLEKKGYQDIQTSSIIKLPKYSLFELENGRKRLLASAKELQKGNELALPNKYVKFLYLASHYTKFTGKEEDREKKRSYVESHLYYFDEIMQIIVEYSNRYILADSNLIKIQNLYKEKDNFSIEEQAINMLNLFTFTDLGAPSAFKFFNGDIDRKRYSSTNEIINSTLIYQSPTGLYETRIDLSKLGGK

SEQ ID NO: 465 - protein, 1338 aa, Streptococcus macacae
  Streptococcus macacae NCTC 11558
MTKPYSIGLDIGTNSVGWAVVTDGYKVPAKKMKVLGNTDKSHIKKNLLGALLFDSGNTAKDRRLKRTARRRYTRRRNRILYLQEIFAEEMAKADESFFQRLNESFLTNDDKEFDSHPIFGNKAEEEAHHHKFPTIFHLRKHLADSTEKSDLRLIYLALAHMIKFRGHFLIEGQLKAENTNVQTLFDDFVEVYDKTVEESHLSEISVSSILTEKISKSRRLENLIKYYPTEKKNTLFGNLIALSLGLQPNFKTNFKLSEDAKLQFSKDTYEEDLGELLGKIGDNYADLFISAKNLYDAILLSGILTIDDNTTKAPLSASMIKRYEEHQEDLAQLKKFIRQNLPDQYSEVFSDKTKDGYAGYIDGKTNQEAFYKYIKNMLSKTEGADYFLDKIDREDFLRKQRTFDNGSVPHQIHLQEMHAILRRQGEYYPFLKENQDKIEKILTFRIPYYVGPLARKGSRFAWAEYKADKKVTPWNFDDILDKEKSAEEFITRMTLNDLYLPEEKVLPKHSLVYETFNVYNELTKVKYVNEQGKAIFFDANMKQEIFDHVFKENRKVTKDKLLNYLNKEFEEFRIVNLTGLDKENKAFNSSLGTYHDLRKILDKSFLDDKVNEKIIEDIIQTLTLFEDREMIRQRLQKYSDIFTTQQLKKLERRHYTGWGRLSAKLINGIRDKQSNKTILGYLIDDGYSNRNFMQLINDDSLPFKEEIARAQVIGETDDLNQLVSDIAGSPAIKKGILQSLKIVDELVKVMGHNPANIVIEMARENQTTAKGRRSSQQRYKRLEEAIKNLDHDLNHKILKEHPTDNQALQNDRLFLYYLQNGRDMYTEDPLDINRLSDYDIDHIIPQSFIKDDSIDNKVLVSSAKNRGKSDNVPSEDVVNRMRPFWNKLLSCGLISQRKYSNLTKKELKPDDKAGFIKRQLVETRQITKHVAQILDARFNTKRDENKKVIRDVKIITLKSNLVSQFRKDFKFYKVREINDYHHAHDAYLNAVIGKALLDVYPQLEPEFVYGEYPHFHGYKENKATAKKFFYSNIMNFFKKDDIRTDENGEIVWKKDEHISNIKRVLSYPQVNIVKKVEIQTVGQNGGLFDDNPKSPLEVTPSKLVPLKKELNPKKYGGYQKPTTAYPVLLITDTKQLIPISVMNKKQFEQNPVKFLRDRGYQQVGKNDFIKLPKYTLVDIGDGIKRLWASSKEIHKGNQLVVSKKSQILLYHAHHLDSDLSNDYLQNHNQQFDVLFNEIISFSKKCKLGKEHIQKIENVYSNKKNSASIEELAESFIKLLGFTQLGATSPFNFLGVKLNQKQYKGKKDYILPCTEGTLIRQSITGLYETRVDLSKIGED

SEQ ID NO: 466 - protein, 1130 aa, Streptococcus macedonicus
MTNGKILGLDIGIASVGVGIIEAKTGKVVHANSRLFSAANAENNAERRGFRGSRRLNRRKKHRVKRVRDLFEKYGIVTDFRNLNLNPYELRVKGLTEQLTNEELFAALRTISKRRGISYLDDAEDDSTGSTDYAKSIDENRRLLKTKTPGQIQLERLEKYGQLRGNFTVYDENGEAHRLINVFSTSDYEKEARKILETQADYNKKITAEFIDDYVEILTQKRKYYHGPGNEKSRTDYGRFRTDGTTLENIFGILIGKCNFYPDEYRASKASYTAQEYNFLNDLNNLKVPTETGKLSTEQKESLVEFAKNTAILGPAKLLKEIAKILDCKVDEIKGYREDDKGKPDLHTFEPYRKLKFNLDSVNIDYLSREVLDKLADILTLNTEREGIEDAIKRNLPNQFTEEQISEIINVRKSQSTAFNKGWHSFSAKLMNELIPELYATSDEQMTILTRLEKFKVKKKSSKNIKTIDEKEITDEIYNPVVAKSVRQTIKIINAAVKKYGDFDKIVIEMPRDKNADDEKKFINKRNKENKKEKDDALKRAAYLYNGTDKLPDEVFHGNKQLETKIRLWYQQGERCLYSGKPIPIQELVHNSNNFEIDHILPLSLSFDDSLANKVLVYSWTNQEKGQKTPYQVIDSMDAAWSFREMKEYVLKQKGLGKKKRDYLLTTENIDKIEVKKKFIERNLVDTRYASRVVLNSLQSALRELGKDTKVSVVRGQFTSQLRRKWKIDKSRETYHHHAVDALIIAASSQLKLWEKQDNPMFVDYGNNQVVDKQTGEILSVSDNEYKELVFQPPYQGFVNTISSKGFEDEILFSYQVDSKYNRKVSDATIYSTRKAKIGKDKKEETYVLGKIKDIYSQNGFDTFVKKYNKDKTQFLMYQKDPLTWENVIEVILGDYPTTKKSEDGKNDVKCNPFEEYRRENGLICKYSKKGKGTPIKSLKYYDKKLGNCIDITPEESRNKVILQSINPWRADVYFNPETLKYELMGLKYSDLSFEKGTGNYHISQEKYDAIKEKEGIGKKSEFKFTLYRNDLILIKDIASGEQEIYRFLSRTMPNVNHYVELKPYDKEKFDNVQELVEALGEADKVGRCIKSLNKPNISIYKVRTDVLGNKYFVKKEGDKPKLDFKNNKK

SEQ ID NO: 467 - protein, 1134 aa, Streptococcus mitis
  Streptococcus mitis ATCC 6249
MNGLVLGLDIGIASEGVGILEKNSGKIIHANSRLFPAATADNNVERRKNRQARRLNRRKKHRGVRFQDLFEDYGLLTDFSKVSINLNPYRLRVDGLNQQLTNEELFIALKNIVKRRGISYLDDASEDGGAVSSDYGKAVEENRKLLAEQTPGQIQLERFEKYGQVRGDFTVVENGEKLRLINVFSTSAYKKEAERILRKQQEFNNQITDEFIEDYLKILTGKRKYYHGPGNEKSRTDYGRFRTDGTTLDNIFGILIGKCTFYPEEYRASKASYTAQEFNLLNDLNNLTVPTETKKLSEEQKKVIVEYAKEAKTLGASTLLKYIAKMIDASVDQIRGYRVDVNNKPEMHTFEVYRKMQSLETISVGELSRNVLDELAHILTLNTEREGMEEAINTKLKDSFSQDQVLELVQFRKNNSSLFSKGWHNFSLKLMMELIPELYETSEEQMTILTRLGKQKSKETSKRTKYIDEKELTEEIYNPVVAKSVRQAIKIINEATKKHGIFDNIVIEMARENNEEDAKKDYIKRQKANQDEKNAAMEKAAFQYNGKKELPDNIFHGHKELATKIRLWHQQGEKCLYTGKTIPISDLIYNQYKYEIDHILPLSLSFDDSLSNKVLALATANQEKGQRTPFQALDSMDDAWSYREFKSYVKDLKSLSNKKKDYLLTEEDISKIEVKQKFIERNLVDTRYSSRVVLNALQDFYKSHQFDTTISVVRGQFTSQLRRKWGLEKSRETYHHHAVDALIIAASSQLRLWKKQNNPLITYKEGQFVDSQTGEIISLTDDEYKELVFKAPYDHFVDTLSSKTFEDSILFSYQVDSKFNRKISDATIYATRKAKLDKEKKEYTYTLGKIKDIYSLGTKTPSKTGFYKFLDLYNKDKSQFLMFQKDRKTWDEVIEKIMEQYRPFKEYDKTGKLVDFNPFEKYRQENEPIRKYSKKGNGPEIKSLKYYDILLGKHKNITPEGSRNTVALLSLNPWRTDVYYNMETKKYEFLGLKYADLPFEEGGAYGISTETYNELREKEGIGKNSEFKFTLYKNDLILIKDTETNCQQIFRFWSRTGKDNPKSFEKHKIELKPYEKARFEKGEELEVLGKVPPSSNQLQKNMQIENLSIYKVKTDVLGNKHFIKKEGDKPKLKF

SEQ ID NO: 468 - protein, 1392 aa, Streptococcus mitis
  Streptococcus mitis SK321
MNNNNYSIGLDIGTNSVGWAVITDDYKVPSKKMKVLGNTDKHFIKKNLIGALLFDEGATAEDRRFKRTARRRYTRRKNRLRYLQEIFSEEMSKVDSSFFHRLDDSFLVPEDKRGSKYPIFATLAEEKEYHKKFPTIYHLRKHLADSKEKTDLRLIYLALAHMIKYRGHFLYEESFDIKNNDIQKIFSEFISIYDNTFEGSSLSGQNAQVEAIFTDKISKSAKRERILKLFAYEKSTDLFSEFLKLIVGNQADFKKHFDLEEKAPLQFSKDTYDEDLENLLGQIGDDFADLFLVAKKLYDAILLSGILTVTDSSTKAPLSASMIERYENHQKDLAALKQFIQNNLQEKYDEVFSDQSKDGYARYINGKTTQEAFYKYIKNLLSKFEGSDYFLDKIEREDFLRKQRTFDNGSIPHQIHLQEMNAIIRRQGEHYPFLKEYKEKIETILTFRIPYYVGPLARGNRNFAWLTRNSDQAIRPWNFEEIVDQASSAEEFINKMTNYDLYLPEEKVLPKHSLLYETFAVYNELTKVKFISEGLRDYQFLDSGQKKQIVNQLFKEKRKVTEKDIIQYLHNVDGYDGIELKGIEKQFNASLSTYHDLLKIIKDKEFMDDPKNEEILENIVHTLTIFEDREMIKQRLAQYASIFDKKVIKALTRRHYTGWGKLSAKLINGICDKKTGKTILDYLIDDGYSNRNFMQLINDDGLSFKDIIQKAQVVGKTNDVKQVVQELPGSPAIKKGILQSIKLVDELVKVMGHAPESIVIEIARENQTTARGKKNSQQRYKRIEDALKNLAPGLDSNILKEHPTDNIQLQNDRLFLYYLQNGKDMYTGEALDINQLSSYDIDHIVPQAFIKDDSLDNRVLTSSKDNRGKSDNVPSLEVVQKRKAFWQQLLDSKLISEHKFNNLTKAERGGLDERDKVGFIRRQLVETRQITKHVAQILDARFNTEVNEKDKKNRTVKIITLKSNLVSNFRKEFKLYKVREINDYHHAHDAYLNAVVAKAILKKYPKLEPGFVYGDYQKYDIKRYISRSKDPKEVEKATEKYFFYSNLLNFFKEEVHYADGTIVKRENIEYSKDTGEIAWNKEKDFATIKKVLSLPQVNIVKKTEIQTHGLDRGKPRGLFNSNPSPKPSEDRKENLVPIKQGLDPRKYGGYAGISNSYAVLVKAIIEKGAKKQQKTVLEFQGISILDKINFEKNKENYLLEKGYIKILSTITLPKYSLFEFPDGTRRRLASILSTNNKRGEIHKGNELVIPEKYTTLLYHAKNINKTLEPEHLEYVEKHRNDFAKLLEYVLNFNDKYVGALKNGERIRQAFIDWETVDIEKLCFSFIGPRNSKNAGLFELTSQGSASDFEFLGVKIPRYRDYTPSSLLNATLIHQSITGLYETRIDLSKLGED

SEQ ID NO: 469 - protein, 1345 aa, Streptococcus mutans
  Streptococcus mutans 11SSST2
MKKPYSIGLDIGTNSVGWAVVTDDYKVPAKKMKVLGNTDKSHIKKNLLGALLFDSGNTAADRRLKRTARRRYTRRRNRILYLQEIFAEEMSKVDDSFFHRLEDSFLVTEDKRGERHPIFGNLEEEVKYHENFPTIYHLRQYLADNPEKVDLRLVYLALAHIIKFRGHFLIEGKFDTRNNDVQRLFQEFLAVYDNTFENSSLQEQNVQVEEILTDKISKSAKKDRVLKLFPNEKSNGRFAEFLKLIVGNQADFKKHFELEEKAPLQFSKDTYEEELEVLLTQIGDNYAELFLSAKKLYDSILLSGILTVTDVSTKAPLSASMIQRYNEHQMDLAQLKQFIRQKLSDKYNEVFSDVSKDGYAGYIDGKTNQEAFYKYLKGLLNKIEGSGYFLDKIEREDFLRKQRTFDNGSIPHQIHLQEMRAIIRRQAEFYPFLADNQDRIEKILTFRIPYYVGPLARGKSDFAWLSRKSADKITPWNFDEIVDKESSAEAFINRMTNYDLYLPNQKVLPKHSLLYEKFTVYNELTKVKYKTEQGKTAFFDANMKQEIFDGVFKVYRKVTKDKLMDFLEKEFDEFRIVDLTGLDKENKAFNASYGTYHDLRKILDKDFLDNSKNEKILEDIVLTLTLFEDREMIRKRLENYSDLLTKEQVKKLERRHYTGWGRLSAELIHGIRNKESRKTLLDYLIDDGNSNRNFMQLINDDALSFKEEIAKAQVIGETDNLNQVVSDIAGSPAIKKGILQSLKIVDELVKIMGHQPENIVVEMARENQFTNQGRRNSQQRLKGLTDSIKEFGSQILKEHPVENSQLQNDRLFLYYLQNGRDMYTGEELDIDYLSQYDIDHIIPQAFIKDNSIDNRVLTSSKENRGKSDDVPSKDVVRKMKPYWSKLLSAKLITQRKFDNLTKAERGGLTDDDKAGFIKRQLVETRQITKHVARILDERFNTETDENNKKIRQVKIVTLKSNLVSNFRKEFELYKVREINDYHHAHDAYLNAVIGKALLGVYPQLEPEFVYGDYPHFHGHEENKATAKKFFYSNIMNFFKKDDVRTDKNGEIIWKKDEHISNIKKVLSYPQVNIVKKVEEQTGGFSKESILPKGNSDKLIPRKTKKFYWDTKKYGGFDSPIVAYSILVIADIEKGKSKKLKTVKALVGVTIMEKMTFERDPVAFLERKGYRNVQEENIIKLPKYSLFKLENGRKRLLASARELQKGNEIVLPNHLGTLLYHAKNIHKVDEPKHLDYVDKHKDEFKELLDVVSNFSKKYTLAEGNLEKIKELYAQNNGEDLKELSSSFINLLTFTAIGAPAAFKFFDKNIDRKRYTSTTEILNATLIHQSITGLYETRIDLSKLGGD

SEQ ID NO: 470 - protein, 1345 aa, Streptococcus mutans; identical to SEQ ID NO: 469
  Streptococcus mutans 11SSST2

SEQ ID NO: 471 - protein, 1345 aa, Streptococcus mutans
  Streptococcus mutans 11VS1
MKKPYSIGLDIGTNSVGWAVVTDDYKVPAKKMKVLGNTDKSHIKKNLLGALLFDSGNTAEDRRLKRTARRRYTRRRNRILYLQEIFSEEMGKVDDSFFHRLEDSFLVTEDKRGERHPIFGNLEEEVKYHENFPTIYHLRQYLADNPEKVDLRLVYLALAHIIKFRGHFLIEGKFDTRNNDVQRLFQEFLAVYDNTFENSSLQEQNVQVEEILTDKISKSAKKDRVLKLFPNEKSNGRFAEFLKLIVGNQADFKKHFELEEKAPLQFSKDTYEEELEVLLAQIGDNYAELFLSAKKLYDSILLSGILTVTDVSTKAPLSASMIQRYNEHQMDLAQLKQFIRQKLSDKYNEVFSDVSKDGYAGYIDGKTNQEAFYKYLKGLLNKIEGSGYFLDKIEREDFLRKQRTFDNGSIPHQIHLQEMRAIIRRQAEFYPFLADNQDRIEKILTFRIPYYVGPLARGKSDFAWLSRKSADKITPWNFDEIVDKESSAEAFINRMTNYDLYLPNQKVLPKHSLLYEKFTVYNELTKVKYKTEQGKTAFFDANMKQEIFDGVFKVYRKVTKDKLMDFLEKEFDEFRIVDLTGLDKENKVFNASYGTYHDLCKILDKDFLDNSKNEKILEDIVLTLTLFEDREMIRKRLENYSDLLTKEQVKKLERRHYTGWGRLSAELIHGIRNKESRKTILDYLIDDGNSNRNFMQLINDDALSFKEEIAKAQVIGETDNLNQVVSDIAGSPAIKKGILQSLKIVDELVKIMGHQPENIVVEMARENQFTKQGRRNSQQRLKGLTDSIKEFGSQILKEHPVENSQLQNDRLFLYYLQNGRDMYTGEELDIDYLSQYDIDHIIPQAFIKDNSIDNRVLTSSKENRGKSDDVPSKDVVRKMKSYWSKLLSAKLITQRKFDNLTKAERGGLTDDDKAGFIKRQLVETRQITKHVARILDERFYTETDENNKKIRQVKIVTLKSNLVSNFRKEFELYKVREINDYHHAHDAYLNAVIGKALLGVYPQLEPEFVYGDYPHFHGHKENKATAKKFFYSNIMNFFKKDDVRTDKNGEIIWKKDEHISNIKKVLSYPQVNIVKKVEEQTGGFSKESILPKGNSDKLIPRKTKKFYWDTKKYGGFDSPIVAYSILVIADIEKGKSKKLKTVKALVGVTIMEKMTFERDPVAFLERKGYRNVQEENIIKLPKYSLFKLENGRKRLLASARELQKGNEIVLPNHLGTLLYHAKNIHKVDEPKHLDYVDKHKDEFKELLDVVSNFSKKYTLAEGNLEKIKELYAQNNGEDLKELASSFINLLTFTAIGAPATFKFFDKNIDRKRYTSTTEILNATLIHQSITGLYETRIDLSKLGGD

SEQ ID NO: 472 - protein, 1345 aa, Streptococcus mutans
  Streptococcus mutans 14D
MKKPYSIGLDIGTNSVGWAVVTDDYKVPAKKMKVLGNTDKSHIKKNLLGALLFDSGNTAADRRLKRTARRRYTRRRNRILYLQEIFAEEMSKVDDSFFHRLEDSFLVTEDKRGERHPIFGNLEEEVKYHENFPTIYHLRQYLADNPEKVDLRLVYLALAHIIKFRGHFLIEGKFDTRNNDVQRLFQEFLAVYDNTFENSSLQEQNVQVEEILTDKISKSAKKDRVLKLFPNEKSNGRFAEFLKLIVGNQADFKKHFELEEKAPLQFSKDTYEEELEVLLAQIGDNYAELFLSAKKLYDSILLSGILTVTDVSTKAPLSASMIQRYNEHQMDLAQLKQFIRQKLSDKYNEVFSDVSKDGYAGYIDGKTNQEAFYKYLKGLLNKIEGSGYFLDKIEREDFLRKQRTFDNGSIPHQIHLQEMRAIIRRQAEFYPFLADNQDRIEKILTFRIPYYVGPLARGKSDFAWLSRKSADKITPWNFDEIVDKESSAEAFINRMTNYDLYLPNQKVLPKHSLLYEKFTVYNELTKVKYKTEQGKTAFFDANMKQEIFDGVFKVYRKVTKDKLMDFLEKEFDEFRIVDLTGLDKENKAFNASYGTYHDLRKILDKDFLDNSKNEKILEDIVLTLTLFEDREMIRKRLENYSDLLTKEQVKKLERRHYTGWGRLSAELIHGIRNKESRKTILDYLIDDGNSNRNFMQLINDDALSFKEEIAKAQVIGETDNLNQVVSDIAGSPAIKKGILQSLKIVDELVKIMGHQPENIVVEMARENQFTNQGRRNSQQRLKGLTDSIKEFGSQILKEHPVEHSQLQNDRLFLYYLQNGRDMYTGEELDIDYLSQYDIDHIIPQAFIKDNSIDNRVLTSSKENRGKSDDVPSKNVVRKMKSYWSKLLSAKLITQRKFDNLTKAERGGLTDDDKAGFIKRQLVETRQITKHVARILDERFHTETDENNKKIRQVKIVTLKSNLVSNFRKEFELYKVREINDYHHAHDAYLNAVIGKALLGVYPQLEPEFVYGDYPHFHGHKENKATAKKFFYSNIMNFFKKDDVRTDKNGEIIWKKDEHISNIKKVLSYPQVNIVKKVEEQTGGFSKESILPKGNSDKLIPRKTKKFYWDTKKYGGFDSPIVAYSILVIADIEKGKSKKLKTVKALVGVTIMEKMTFERDPVAFLERKGYRNVQEENIIKLPKYSLFKLENGRKRLLASARELQKGNEIVLPNHLGTLLYHAKNIHKVDEPKHLDYVDKHKDEFKELLDVVSNFSKKYTLAEGNLEKIKELYAQNNGEDLKELASSFINLLTFTAIGAPATFKFFDKNIDRKRYTSTTEILNATLIHQSITGLYETRIDLSKLGGD

SEQ ID NO: 473 - protein, 1355 aa, Streptococcus mutans
  Streptococcus mutans 15VF2
MKKSYSIGLDIGTNSVGWAVVTDDYKVPAKKMKVLGNTDKSHIKKNLLGALLFDSGNTAEDRRLKRTARRRYTRRRNRILYLQEIFSEEMGKVDDSFFHRLDESFLTDDDKNFDSHPIFGNKAEEDAYHQKFPTIYHLRKHLADSTEKADLRLVYLALAHMIKFRGHFLIEGELNAENTDVQKLFADFVGVYDRTFDDSHLSEITVDASSILTEKISKSRRLEKLINNYPKEKKNTLFGNLIALSLGLQPNFKTNFKLSEDAKLQFSKDTYEEDLEELLGKIGDDYADLFTLAKNLYDAILLSGILTADDSSTKAPLSASMIKRYAEHHEDLEKLKEFIKANKPELYHDIFKDETKNGYAGYIENGVKQDEFYKYLKNTLSKIAGSDYFLDKIEREDFLRKQRTFDNGSIPHQIHLQEMHAILRRQGDYYPFLKENQDRIEKILTFRIPYYVGPLARKNSRFAWAEYHSDEAVMPWNFDQVIDKESSAQAFIEHMTNNDLYLPNEKVLPKHSPLYEKYTVYNELTKIKYVTEIGEAKFFDANLKQEIFDGLFKHERKVTKKKLRTFLDKNFDEFRIVDIQGLDKETETFNASYATYQDLLKVIKDKVFMDNPENAEILENIVLTLTLFEDREMIKQRLAKYADVFDKKVIDQLARRHYTGWGRLSAKLLNGIRDKQSCKTIMDYLIDDAQSNRNLMQLITDDNLTFKDDIVKAQYVDNSDDLHQVVQSLAGSPAIKKGILQSLKIVDELVKVMGKEPEQIVVEMARENQTTAKGRRNSQQRYKRLKEAIKSLDRDLNHKILKEHPTDNQALQNNRLFLYYLQNGRDMYTGESLDINRLSDYDIDHVIPQAFIKDNSIDNRVLTSSKANRGKSDDVPSEDVVNRMRPFWNKLLSSGLISQRKYNNLTKKELTPDDKAGFIKRQLVETRQITKHVARMLDERFNKEFDDNNKRIRRVKIVTLKSNLVSSFRKEFELYKVREINDYHHAHDAYLNAVVVKALLVKYPKLEPEFVYGEYPKYNSYRERKTATQKMFFYSNIMNMFKSKVKLADDQIVERPMIEVNDETGEIAWDKTKHITTVKKVLSYPQVNIVKKVEEQTIGQNGGLFDDNPKSPLEVIPSKLVPLKKALNPEKYGGYQKPTTAYPILLIVDTKQLIPISVMDKKRFEQNPVKFLKDKGYQQIEKNNFVKLPKYTLVDIGNGIKRLWASSKEVHKGNQLVVSKKSQDLLYHAHHLDNDYSNEYVKNHYQQFDILFNEITSFSKKCKLGKEHIQKIEEAYSKERDSASIEELADGFIKLLGFTQLGATSPFSFLGIKLNQKQYTGKKDYLLPCMEATLIHQSITGLYETRIDLNKLGGD

SEQ ID NO: 474 - protein, 1355 aa, Streptococcus mutans; identical to SEQ ID NO: 473
  Streptococcus mutans 15VF2

SEQ ID NO: 475 - protein, 1345 aa, Streptococcus mutans
  Streptococcus mutans 1SM1
MKKPYSIGLDIGTNSVGWAVVTDDYKVPAKKMKVLGNTDKSHIKKNLLGALLFDSGNTAEDRRLKRTARRRYTRRRNRILYLQEIFSEEMGKVDDSFFHRLEDSFLVTEDKRGERHPIFGNLEEEVKYHENFPTIYHLRQYLADNPEKVDLRLVYLALAHIIKFRGHFLIEGKFDTRNNDVQRLFQEFLAVYDNTFENSSLQEQNVQVEEILTDKISKSAKKDRVLKLFPNEKSNGRFAEFLKLIVGNQADFKKHFELEEKAPLQFSKDTYEEDLEELLGKIGDDYADLFTLAKNLYDAILLSGILTADDSSTKAPLSASMIQRYNEHQMDLAQLKQFIRQKLSDKYNEVFSDVSKDGYAGYIDGKTNQEAFYKYLKGLLNKIEGSGYFLDKIEREDFLRKQRTFDNGSIPHQIHLQEMRAIIRRQAEFYPFLADNQDRIEKILTFRIPYYVGPLARGKSDFAWLSRKSADKITPWNFDEIVDKESSAEAFINRMTNYDLYLPNQKVLPKHSLLYEKFTVYNELTKVKYKTEQGKTAFFDANMKQEIFDGVFKVYRKVTKDKLMDFLEKEFDEFRIVDLTGLDKENKVFNASYGTYHDLCKILDKDFLDNSKNEKILEDIVLTLTLFEDREMIRKRLENYSDLLTKEQVKKLERRHYTGWGRLSAELIHGIRNKESRKTILDYLIDDGNSNRNFMQLINDDALSFKEEIAKAQVIGETDNLNQVVSDIAGSPAIKKGILQSLKIVDELVKIMGHQPENIVVEMARENQFTNQGRRNSQQRLKGLTDSIKEFGSQILKEHPVENSQLQNDRLFLYYLQNGRDMYTGEELDIDYLSQYDIDHIIPQAFIKDNSIDNRVLTSSKENRGKSDDVPSKDVVRKMKSYWSKLLSAKLITQRKFDNLTKAERGGLTDDDKAGFIKRQLVETRQITKHVARILDERFYTETDENNKKIRQVKIVTLKSNLVSNFRKEFELYKVREINDYHHAHDAYLNAVIGKALLGVYPQLEPEFVYGDYPHFHGHKENKATAKKFFYSNIMNFFKKDDVRTDKNGEIIWKKDEHISNIKKVLSYPQVNIVKKVEEQTGGFSKESILPKGNSDKLIPRKTKKFYWDTKKYGGFDSPIVAYSILVIADIEKGKSKKLKTVKALVGVTIMEKMTFERDPVAFLERKGYRNVQEENIIKLPKYSLFKLENGRKRLLASARELQKGNEIVLPNHLGTLLYHAKNIHKVDEPKHLDYVDKHKDEFKELLDVVSNFSKKYTLAEGNLEKIKELYAQNNGEDLKELASSFINLLTFTAIGAPATFKFFDKNIDRKRYTSTTEILNATLIHQSITGLYETRIDLSKLGGD

SEQ ID NO: 476 - protein, 1345 aa, Streptococcus mutans; identical to SEQ ID NO: 475
  Streptococcus mutans 1SM1

SEQ ID NO: 477 - protein, 1350 aa, Streptococcus mutans
  Streptococcus mutans 24
MKKPYSIGLDIGTNSVGWAVVTDDYKVPAKKMKVLGNTDKSHIEKNLLGALLFDSGNTAEDRRLKRTARRRYTRRRNRILYLQEIFSEEMGKVDDSFFHRLEDSFLVTEDKRGERHPIFGNLEEEVKYHENFPTIYHLRQYLADNPEKVDLRLVYLALAHIIKFRGHFLIEGKFDTRNNDVQRLFQEFLAVYDNTFENSSLQEQNVQVEEILTDKISKSAKKDRVLKLFPNEKSNGRFAEFLKLIVGNQADFKKHFELEEKAPLQFSKDTYEEELEVLLAQIGDNYAELFLSAKKLYDSILLSGILTVTDVSTKAPLSASMIQRYNEHQMDLTQLKQFIRQKLSDKYNEVFSDVSKDGYAGYIDGKTNQEAFYKYLKGLLNKIEGSGYFLDKIEREDFLRKQRTFDNGSIPHQIHLQEMRAIIRRQAEFYPFLADNQDRIEKILTFRIPYYVGPLARGKSDFAWLSRKSADKITPWNFDEIVDKESSAEAFINRMTNYDLYLPNQKVLPKHSLLYEKFTVYNELTKVKYKTEQGKTAFFDANMKQEIFDGVFKVYRKVTKDKLMDFLEKEFDEFRIVDLTGLDKENKAFNASYGTYHDLRKILDKDFLDNSKNEKILEDIVLTLTLFEDREMIRKRLKNYSDLLTKEQLKKLERRHYTGWGRLSAELIHGIRNKESRKTILDYLIDDGNSNRNFMQLINDDALSFKEEIAKAQVIGETDNLNQVVSDIAGSPAIKKGILQSLKIVDELVKIMGHQPENIVVEMARENQFTNQGRQNSQQRLKGLTDSIKEFGSQILKEHPVENSQLQNDRLFLYYLQNGRDMYTGEELDIDYLSQYDIDHIIPQAFIKDNSIDNRVLTSSKENRGKSDDVPSEDVVNRMRPFWNKLLSSGLISQRKYNNLTKKELTLDDKAGFIKRQLVETRQITKHVARMLDERFNKEFDDNNKRICKVKIVTLKSNLVSSFRKEFELYKVREINDYHHAHDAYLNAVVVKALLVKYSKLEPEFVYGEYPKYNSYRERKTATQKMFFYSNIMNMFKSKVKLADDQIVERPMIEVNDETGEIAWDKTKHITTVKKVLSYPQVNIVKKVEEQTIGQNGGLFDDNPKSPLEVIPSKLVPLKKALNPEKYGGYQKPTTAYPILLIVDTKQLIPISVMDKKRFEQNPVKFLKDKGYQQIEKNNFVKLPKYTLVDIGNGIKRLWASSKEVHKGNQLVVSKKSQDLLYHAHHLDNDYSNEYVKNHYQQFDILFNEITSFSKKCKLGKEHIQKIEEAYSKERDSASIEELADGFIKLLGFTQLGATSPFSFLGIKLNQKQYTGKKDYLLPCMEATLIHQSITGLYETRIDLSKLGGD

SEQ ID NO: 478 - protein, 1350 aa, Streptococcus mutans; identical to SEQ ID NO: 477
  Streptococcus mutans 24

SEQ ID NO: 479 - protein, 1345 aa, Streptococcus mutans; identical to SEQ ID NO: 472
  Streptococcus mutans 2VS1

SEQ ID NO: 480 - protein, 1345 aa, Streptococcus mutans; identical to SEQ ID NO: 472
  Streptococcus mutans 2VS1

SEQ ID NO: 481 - protein, 1345 aa, Streptococcus mutans; identical to SEQ ID NO: 471
  Streptococcus mutans 3SN1

SEQ ID NO: 482 - protein, 1345 aa, Streptococcus mutans; identical to SEQ ID NO: 471
  Streptococcus mutans 3SN1

SEQ ID NO: 483 - protein, 1345 aa, Streptococcus mutans
  Streptococcus mutans 4SM1
MKKPYSIGLDIGTNSVGWAVVTDDYKVPAKKMKVLGNTDKSHIKKNLLGALLFDSGNTAEDRRLKRTARRRYTRRRNRILYLQEIFSEEMGKVDDSFFHRLEDSFLVTEDKRGERHPIFGNLEEEVKYHENFPTIYHLRQYLADNPEKVDLRLVYLALAHIIKFRGHFLIEGKFDTRNNDVQRLFQEFLAVYDNTFENSSLQEQNVQVEEILTDKISKSAKKDRVLKLFPNEKSNGRFAEFLKLIVGNQADFKKHFELEEKAPLQFSKDTYEEDLEELLGKIGDDYADLFTLAKNLYDAILLSGILTADDSSTKAPLSASMIQRYNEHQMDLAQLKQFIRQKLSDKYNEVFSDVSKDGYAGYIDGKTNQEAFYKYLKGLLNKIEGSGYFLDKIEREDFLRKQRTFDNGSIPHQIHLQEMRAIIRRQAEFYPFLADNQDRIEKILTFRIPYYVGPLARGKSDFAWLSRKSADKITPWNFDEIVDKESSAEAFINRMTNYDLYLPNQKVLPKHSLLYEKFTVYNELTKVKYKTEQGKTAFFDANMKQEIFDGVFKVYRKVTKDKLMDFLEKEFDEFRIVDLTGLDKENKVFNASYGTYHDLCKILDKDFLDNSKNEKILEDIVLTLTLFEDREMIRKRLENYSDLLTKEQVKKLERRHYTGWGRLSAELIHGIRNKESRKTILDYLIDDGNSNRNFMQLINDDALSFKEEIAKAQVIGETDNLNQVVSDIAGSPAIKKGILQSLKIVDELVKIMGHQPENIVVEMARENQFTNQGRRNSQQRLKGLTDSIKEFGSQILKEHPVENSQLQNDRLFLYYLQNGRDMYTGEELDIDYLSQYDIDHIIPQAFIKDNSIDNRVLTSSKENRGKSDDVPSKDVVRKMKPYWSKLLSAKLITQRKFDNLTKAERGGLTDDDKAGFIKRQLVETRQITKHVARILDERFNTETDENNKKIRQVKIVTLKSNLVSNFRKEFELYKVREINDYHHAHDAYLNAVIGKALLGVYPQLEPEFVYGDYPHFHGHEENKATAKKFFYSNIMNFFKKDDVRTDKNGEIIWKKDEHISNIKKVLSYPQVNIVKKVEEQTGGFSKESILPKGNSDKLIPRKTKKFYWDTKKYGGFDSPIVAYSILVIADIEKGKSKKLKTVKALVGVTIMEKMTFERDPVAFLERKGYRNVQEENIIKLPKYSLFKLENGRKRLLASARELQKGNEIVLPNHLGTLLYHAKNIHKVDEPKHLDYVDKHKDEFKELLDVVSNFSKKYTLAEGNLEKIKELYAQNNGEDLKELASSFINLLTFTAIGAPATFKFFDKNIDRKRYTSTTEILNATLIHQSITGLYETRIDLSKLGGD

SEQ ID NO: 484 - protein, 1345 aa, Streptococcus mutans; identical to SEQ ID NO: 483
  Streptococcus mutans 4SM1

SEQ ID NO: 485 - protein, 1345 aa, Streptococcus mutans
  Streptococcus mutans 4VF1
MKKPYSIGLDIGTNSVGWAVVTDDYKVPAKKMKVLGNTDKSHIKKNLLGALLFDSGNTAEDRRLKRTARRRYTRRRNRILYLQEIFSEEMGKVDDSFFHRLEDSFLVTEDKRGERHPIFGNLEEEVKYHENFPTIYHLRQYLADNPEKVDLRLVYLALAHIIKFRGHFLIEGKFDTRNNDVQRLFQEFLAVYDNTFENSSLQEQNVQVEEILTDKISKSAKKDRVLKLFPNEKSNGRFAEFLKLIVGNQADFKKHFELEEKAPLQFSKDTYEEELEVLLAQIGDNYAELFLSAKKLYDSILLSGILTVTDVSTKAPLSASMIQRYNEHQMDLAQLKQFIRQKLSDKYNEVFSDVSKDGYAGYIDGKTNQEAFYKYLKGLLNKIEGSGYFLDKIEREDFLRKQRTFDNGSIPHQIHLQEMRAIIRRQAEFYPFLADNQDRIEKILTFRIPYYVGPLARGKSDFAWLSRKSADKITPWNFDEIVDKESSAEAFINRMTNYDLYLPNQKVLPKHSLLYEKFTVYNELTKVKYKTEQGKTAFFDANMKQEIFDGVFKVYRKVTKDKLMDFLEKEFDEFRIVDLTGLDKENKVFNASYGTYHDLCKILDKDFLDNSKNEKILEDIVLTLTLFEDREMIRKRLENYSDLLTKEQVKKLERRHYTGWGRLSAELIHGIRNKESRKTILDYLIDDGNSNRNFMQLINDDALSFKEEIAKAQVIGETDNLNQVVSDIAGSPAIKKGILQSLKIVDELVKIMGHQPENIVVEMARENQFTKQGRRNSQQRLKGLTDSIKEFGSQILKEHPVENSQLQNDRLFLYYLQNGRDMYTGEELDIDYLSQYDIDHIIPQAFIKDNSIDNRVLTSSKENRGKSDDVPSKDVVRKMKSYWSKLLSAKLITQRKFDNLTKAERGGLTDDDKAGFIKRQLVETRQITKHVARILDERFYTETDENNKKIRQVKIVTLKSNLVSNFRKEFELYKVREINDYHHAHDAYLNAVIGKALLGVYPQLEPEFVYGDYPHFHGHKENKATAKKFFYSNIMNFFKKDDVRTDRNGEIIWKKDEHISNIKKVLSYPQVNIVKKVEEQTGGFSKESILPKGNSDKLIPRKTKKFYWDTKKYGGFDSPIVAYSILVIADIEKGKSKKLKTVKALVGVTIMEKMTFERDPVAFLERKGYRNVQEENIIKLPKYSLFKLENGRKRLLASARELQKGNEIVLPNHLGTLLYHAKNIHKVDEPKHLDYVDKHKDEFKELLDVVSNFSKKYTLAEGNLEKIKELYAQNNGEDLKELASSFINLLTFTAIGAPATFKFFDKNIDRKRYTSTTEILNATLIHQSITGLYETRIDLSKLGGD

SEQ ID NO: 486 - protein, 1345 aa, Streptococcus mutans; identical to SEQ ID NO: 485
  Streptococcus mutans 4VF1

SEQ ID NO: 487 - protein, 1345 aa, Streptococcus mutans
  Streptococcus mutans 5SM3
MKKPYSIGLDIGTNSVGWAVVTDDYKVPAKKMKVLGNTDKSHIEKNLLGALLFDSGNTAEDRRLKRTARRRYTRRRNRILYLQEIFSEEMGKVDDSFFHRLEDFFLVTEDKRGERHPIFGNLEEEVKYHENFPTIYHLRQYLADNPEKVDLRLVYLALAHIIKFRGHFLIEGKFDTRNNDVQRLFQEFLAVYDNTFENSSLQEQNVQVEEILTDKISKSAKKDRVLKLFPNEKSNGRFAEFLKLIVGNQADFKKHFELEEKAPLQFSKDTYEEELEVLLAQIGDNYAELFLSAKKLYDSILLSGILTADDSSTKAPLSASMIQRYNEHQMDLAQLKQFIRQKLSDKYNEVFSDVSKDGYAGYIDGKTNQEAFYKYLKGLLNKIEGSGYFLDKIEREDFLRKQRTFDNGSIPHQIHLQEMRAIIRRQSEFYPFLADNQDRIEKILTFRIPYYVGPLARGKSDFAWLSRKSADKITPWNFDEIVDKESSAEAFINRMTNYDLYLPNQKVLPKHSLLYEKFTVYNELTKVKYKTEQGETAFFDANMKQEIFDGVFKVYRKVTKDKLMDFLEKEFDEFRIVDLTGLDKENKAFNASYGTYHDLRKILDKDFLDNSKNEKILEDIVLTLTLFEDREMIRKRLKNYSDLLTKEQLKKLERRHYTGWGRLSAELIHGIRNKESRKTILDYLIDDGNSNRNFMQLINDDALSFKEEIAKAQVIGETDNLNQVVSDIAGSPAIKKGILQSLKIVDELVKIMGHQPENIVVEMARENQFTNQGRRNSQQRLKGLTDSIKEFGSQILKEHPVENSQLQNDRLFLYYLQNGRDMYTGEELDIDYLSQYDIDHIIPQAFIKDNSIDNRVLTSSKENRGKSDDVPSKDVVRKMKPYWSKLLSAKLITQRKFDNLTKAERGGLTDDDKAGFIKRQLVETRQITKHVARILDERFNTETDENNKKIRQVKIVTLKSNLVSNFRKEFELYKVREINDYHHAHDAYLNAVIGKALLGVYPQLEPEFVYGDYPHFHGHEENKATAKKFFYSNIMNFFKKDDVRTDKNGEIIWKKDEHISNIKKVLSYPQVNIVKKVEEQTGGFSKESILPKGNSDKLIPRKTKKFYWDTKKYGGFDSPIVAYSILVIADIEKGKSKKLKTVKALVGVTIMEKMTFERDPVAFLERKGYRNVQEENIIKLPKYSLFKLENGRKRLLASARELQKGNEIVLPNHLGTLLYHAKNIHKVDEPKHLDYVDKHKDEFKELLDVVSNFSKKYTLAEGNLEKIKELYAQNNGEDLKELASSFINLLTFTAIGAPATFKFFDKNIDRKRYTSTTEILNATLIHQSITGLYETRIDLSKLGGD

SEQ ID NO: 488 - protein, 1345 aa, Streptococcus mutans; identical to SEQ ID NO: 487
  Streptococcus mutans 5SM3

SEQ ID NO: 489 - protein, 1359 aa, Streptococcus mutans
  Streptococcus mutans 66-2A
MKKPYSIGLDIGTNSVGWAVVTDDYKVPAKKMKVLGNTDKSHIKKNLLGALLFDSGNTAEDRRLKRTARRRYTRRRNRILYLQEIFAEEMMQVDESFFQRLDDSFLVEEDKRGSRYPIFGTLKEEKKYHKEFKTIYHLREKLANSTEKADLRLVYLSLAHMIKFRGHFLIEGQLKAENTNVQALFKDFVEVYDKTVEESHLSEMTVDALSILTEKVSKSRRLENLVECYPTEKKNTLFGNLIALSLGLQPNFKTNFQLSEDAKLQFSKDTYEEDLEGLLGEIGDEYADLFASAKNLYDAILLSGILAVDDNTTKAPLSASMVKRYKEHKEELAAFKRFIKEKLPKKYEEIFKDDTKNGYAGYVGADKKLRKRSGKLATEEEFYKYVKGILNKVEGADVWLDKIDREDFLRKQRTFDNGSIPHQIHLQEMHAILRRQGEHYPFLKENQDKIEKILTFRIPYYVGPLVRKGSRFAWAEYKADEKITPWNFDDILDKEKSAEKFITRMTLNDLYLPEEKVLPKHSLLYETFTVYNELTKVKYVNEQGEAKFFDANMKQEIFDHVFKENRKVTKDKLLNYLNKEFEEFRIVNLTGLDKENKVFNSSLGTYHDLRKILNKSFLDNKENEQIIEDIIQTLTLFEDREMIRQRLQKYSDIFTKAQLKKLERRHYTGWGRLSYKLINGIRDKQSNKTILGYLIDDGYSNRNFMQLINDDALSFKEEIAKAQVIGEMDGLNQVVSDIAGSPAIKKGILQSLKIVDELVKVMGHNPANIVIEMARENQTTAKGRRSSQKRYKRLEEAIKNLDHDLNHKILKEHPTDNQALQNDRLFLYYLQNGRDMYTEDPLDINRLSDYDIDHIIPQAFIKDNSIDNRVLTRSDKNRGKSDDVPSEEVVHKMKPFWSKLLSAKLITQRKFDNLTKAERGGLTDDDKAGFIKRQLVETRQITKHVARILDERFNTETDENNKKIRQVKIVTLKSNLVSNFRKEFELYKVREINDYHHAHDAYLNAVIGKALLGVYPQLEPEFVYGDYPHFHGHKENKATAKKFFYSNIMNFFKKGDVRTDKNGEIIWKKDEHISNIKKVLSYPQVNIVKKVEEQTGGFSKESILPKGNSDKLIPRKTKKFYWDTKKYGGFDSPIVAYSILVIADIEKGKSKKLKTVKALVGVTIMEKMTFERDPVAFLERKGYRNVQEENIIKLPKYSLFKLENGRKRLLASARELQKGNEIVLPNHLETLLYHAKNIHKVDEPKHLDYVDKHKDEFKELLDVVSNFSKKYTLAEGNLEKIKELYAQNNGEDLKELASSFINLLTFTAIGAPAAFKFFDKNIDRKRYTSTTEILNATLIHQSITGLYETRIDLNKLGGD

SEQ ID NO: 490 - protein, 1359 aa, Streptococcus mutans; identical to SEQ ID NO: 489
  Streptococcus mutans 66-2A

SEQ ID NO: 491 - protein, 1345 aa, Streptococcus mutans
  Streptococcus mutans 8ID3
MKKPYSIGLDIGTNSVGWAVVTDDYKVPAKKMKVLGNTDKSHIEKNLLGALLFDSGNTAEDRRLKRTARRRYTRRRNRILYLQEIFSEEMGKVDDSFFHRLEDSFLVTEDKRGERHPIFGNLEEEVKYHENFPTIYHLRQYLADNPEKVDLRLVYLALAHIIKFRGHFLIEGKFDTRNNDVQRLFQEFLAVYDNTFENSSLQEQNVQVEEILTDKISKSAKKDRVLKLFPNEKSNGRFAEFLKLIVGNQADFKKHFELEEKAPLQFSKDTYEEELEVLLAQIGDNYAELFLSAKKLYDSILLSGILTVTDVGTKAPLSASMIQRYNEHQMDLAQLKQFIRQKLSDKYNEVFSDVSKDGYAGYIDGKTNQEAFYKYLKGLLNKIEGSGYFLDKIEREDFLRKQRTFDNGSIPHQIHLQEMRAIIRRQAEFYPFLADNQDRIEKLLTFRIPYYVGPLARGKSDFAWLSRKSADKITPWNFDEIVDKESSAEAFINRMTNYDLYLPNQKVLPKHSLLYEKFTVYNELIKVKYKTEQGKTAFFDANMKQEIFDGVFKVYRKVTKDKLMDFLEKEFDEFRIVDLTGLDKENKVFNASYGTYHDLCKILDKDFLDNSKNEKILEDIVLTLTLFEDREMIRKRLENYSDLLTKEQVKKLERRHYTGWGRLSAELIHGIRNKESRKTILDYLIDDGNSNRNFMQLINDDALSFKEEIAKAQVIGETDNLNQVVSDIAGSPAIKKGILQSLKIVDELVKIMGHQPENIVVEMARENQFTNQGRRNSQQRLKGLTDSIKEFGSQILKEHPVENSQLQNDRLFLYYLQNGRDMYTGEELDIDYLSQYDIDHIIPQAFIKDNSIDNRVLTSSKENRGKSDDVPSKDVVRKMKSYWSKLLSAKLITQRKFDNLTKAERGGLTDDDKAGFIKRQLVETRQITKHVARILDERFNTETDENNKKIRQVKIVTLKSNLVSNFRKEFELYKVREINDYHHAHDAYLNAVIGKALLGVYPQLEPEFVYGDYPHFHGHKENKATAKKFFYSNIMNFFKKDDVRTDKNGEIIWKKDEHISNIKKVLSYPQVNIVKKVEEQTGGFSKESILPKGNSDKLIPRKTKKFYWDTKKYGGFDSPIVAYSILVIADIEKGKSKKLKTVKALVGVTIMEKMTFERDPVAFLERKGYRNVQEENIIKLPKYSLFKLENGRKRLLASARELQKGNEIVLPNHLGTLLYHAKNIHKVDEPKHLDYVDKHKDEFKELLDVVSNFSKKYTLAEGNLEKIKELYAQNNGEDLKELASSFINLLTFTAIGAPATFKFFDKNIDRKRYTSTTEILNATLIHQSITGLYETRIDLNKLGGD

SEQ ID NO: 492 - protein, 1345 aa, Streptococcus mutans; identical to SEQ ID NO: 491
  Streptococcus mutans 8ID3

SEQ ID NO: 493 - protein, 1345 aa, Streptococcus mutans
  Streptococcus mutans A19
MKKPYSIGLDIGTNSVGWSVVTDDYKVPAKKMKVLGNTDKSHIEKNLLGALLFDSGNTAEDRRLKRTARRRYTRRRNRILYLQEIFSEEMGKVDDSFFHRLEDSFLVTEDKRGERHPIFGNLEEEVKYHENFPTIYHLRQYLADNPEKVDLRLVYLALAHIIKFRGHFLIEGKFDTRNNDVQRLFQEFLAVYDNTFENSSLQEQNVQVEEILTDKISKSAKKDRVLKLFPNEKSNGRFAEFLKLIVGNQADFKKHFELEEKAPLQFSKDTYEEELEVLLAQIGDNYAELFLSAKKLYDSILLSGILTVTDVGTKAPLSASMIQRYNEHQMDLAQLKQFIRQKLSDKYNEVFSDVSKDGYAGYIDGKTNQEAFYKYLKGLLNKIEGSGYFLDKIEREDFLRKQRTFDNGSIPHQIHLQEMRAIIRRQAEFYPFLADNQDRIEKLLTFRIPYYVGPLARGKSDFAWLSRKSADKITPWNFDEIVDKESSAEAFINRMTNYDLYLPNQKVLPKHSLLYEKFTVYNELTKVKYKTEQGKTAFFDANMKQEIFDGVFKVYRKVTKDKLMDFLEKEFDEFRIVDLTGLDKENKVFNASYGTYHDLCKILDKDFLDNSKNEKILEDIVLTLTLFEDREMIRKRLENYSDLLTKEQVKKLERRHYTGWGRLSAELIHGIRNKESRKTILDYLIDDGNSNRNFMQLINDDALSFKEEIAKAQVIGETDNLNQVVSDIAGSPAIKKGILQSLKIVDELVKIMGHQPENIVVEMARENQFTNQGRRNSQQRLKGLTDSIKEFGSQILKEHPVENSQLQNDRLFLYYLQNGRDMYTGEELDIDYLSQYDIDHIIPQAFIKDNSIDNRVLTSSKENRGKSDDVPSKDVVRKMKSYWSKLLSAKLITQRKFDNLTKAERGGLTDDDKAGFIKRQLVETRQITKHVARILDERFNTETDENNKKIRQVKIVTLKSNLVSNFRKEFELYKVREINDYHHAHDAYLNAVIGKALLGVYPQLEPEFVYGDYPHFHGHKENKATAKKFFYSNIMNFFKKDDVRIDKNGEIIWKKDEHISNIKKVLSYPQVNIVKKVEEQTGGFSKESILPKGNSDKLIPRKTKKFYWDTKKYGGFDSPIVAYSILVIADIEKGKSKKLKTVKALVGVTIMEKMTFERDPVAFLERKGYRNVQEENIIKLPKYSLFKLENGRKRLLASARELQKGNEIVLPNHLGTLLYHAKNIHKVDEPKHLDYVDKHKDEFKELLDVVSNFSKKYTLAEGNLEKIKELYAQNNGEDLKELASSFINLLTFTAIGAPATFKFFDKNIDRKRYTSTTEILNATLIHQSITGLYETRIDLSKLGGD

SEQ ID NO: 494 - protein, 1345 aa, Streptococcus mutans; identical to SEQ ID NO: 493
  Streptococcus mutans A19

SEQ ID NO: 495 - protein, 1345 aa, Streptococcus mutans; identical to SEQ ID NO: 472
  Streptococcus mutans B

SEQ ID NO: 496 - protein, 1345 aa, Streptococcus mutans; identical to SEQ ID NO: 472
  Streptococcus mutans G123

SEQ ID NO: 497 - protein, 1345 aa, Streptococcus mutans
MKKPYSIGLDIGTNSVGWAVVTDDYKVPAKKMKVLGNTDKSHIKKNLLGALLFDSGNTAEDRRLKRTARRRYTRRRNRILYLQEIFSEEMGKVDDSFFHRLDESFLTDDDKNFDSHPIFGNKAEEDAYHQKFPTIYHLRKHLADSTEKADLRLVYLALAHMIKFRGHFLIEGELNAENTDVQKLFADFVGVYDRTFDDSHLSEITVDASSILTEKISKSRRLEKLINNYPKEKKNTLFGNLIALSLGLQPNFKTNFKLSEDAKLQFSKDTYEEELEVLLAQIGDNYAELFLSAKKLYDSILLSGILTVTDVSTKAPLSASMIQRYNEHQMDLAQLKQFIRQKLSDKYNEVFSDVSKDGYAGYIDGKTNQEAFYKYLKGLLNKIEGSGYFLDKIEREDFLRKQRTFDNGSIPHQIHLQEMRAIIRRQAEFYPFLADNQDRIEKILTFRIPYYVGPLARGKSDFAWLSRKSADKITPWNFDEIVDKESSVEAFINRMTNYDLYLPNQKVLPKHSLLYEKFTVYNELTKVKYKTEQGKTAFFDANMKQEIFDGVFKVYRKVTKDKLMDFLEKEFDEFRIVDLTGLDKENKAFNASYGTYHDLRKILDKDFLDNSKNEKILEDIVLTLTLFEDREMIRKRLKNYSDLLTKEQLKKLERRHYTGWGRLSAELIHGIRNKESRKTILDYLIDDGNSNRNFMQLINDDALSFKEEIAKAQVIGETDNLNQVVSDIAGSPAIKKGILQSLKIVDELVKIMGHQPENIVVEMARENQFTNQGRRNSQQRLKGLTDSIKEFGSQILKEHPVENSQLQNDRLFLYYLQNGRDMYTGEELDIDYLSQYDIDHIIPQAFIKDNSIDNRVLTSSKENRGKSDDVPSKDVVRKMKSYWSKLLSAKLITQRKFDNLTKGERGGLTDDDKAGFIKRQLVETRQITKHVARILDERFNTETDENNKKIRQVKIVTLKSNLVSNFRKEFELYKVREINDYHHAHDAYLNAVIGKALLGVYPQLEPEFVYGDYPHFHGHKENKATAKKFFYSNIMNFFKKDDVRTDKNGEIIWKKDEYISNIKKVLSYPQVNIVKKVEEQTGGFSKESILPKGDSDKLIPRKTKKFYWDTKKYGGFDSPIVAYSILVIADIEKGKSKKLKTVKALVGVTIMEKMTFERDPVAFLERKGYRNVQEENIIKLPKYSLFKLENGRKRLLASARELQKGNEIVLPNHLGTLLYHAKNIHKVDEPKHLDYVDKHKDEFKELLDVVSNFSKKYTLAEGNLEKIKELYAQNNGEDLKELASSFINLLTFTAIGAPATFKFFDKNIDRKRYTSTTEILNATLIHQSITGLYETRIDLSKLGGD

SEQ ID NO: 498 - protein, 1345 aa, Streptococcus mutans
MKKPYSIGLDIGTNSVGWAVVTDDYKVPDKKMKVLGNTDKSHIKKNLLGALLFDSGNTAEDRRLKRTARRRYTRRRNRILYLQEIFSEEMGKVDDSFFHRLEDSFLVTEDKRGERHPIFGNLEEEVKYHENFPTIYHLRQYLADNPEKTDLRLVYLALAHIIKFRGHFLIEGKFDTRNNDVQRLFQEFLAVYDNTFENSSLQEQNVQVEEILTDKISKSAKKDRVLKLFPNEKSNGRFAEFLKLIVGNQADFKKHFELEEKAPLQFSKDIYEEELEVLLAQIGDNYAELFLSAKKLYDSILLSGILTVTDVSTKAPLSASMIQRYNEHQMDLAQLKQFIRQKLSDKYNEVFSDVSKDGYAGYIDGKTNQEAFYKYLKGLLNKIEGSGYFLDKIEREDFLRKQRTFDNGSIPHQIHLQEMRAIIRRQAEFYPFLADNQDRIEKILTFRIPYYVGPLARGKSDFAWLSRKSADKITPWNFDEIVDKESSVEAFINRMTNYDLYLPNQKVLPKHSLLYEKFTVYNELTKVKYKTEQGKTAFFDANMKQEIFDGVFKVYRKVTKDKLMDFLEKEFDEFRIVDLTGLDKENKAFNASYGTYHDLRKILDKDFLDNSKNEKILEDIVLTLTLFEDREMIRKRLKNYSDLLTKEQLKKLERRHYTGWGRLSAELIHGIRNKESRKTILDYLIDDGNSNRNFMQLINDDALSFKEEIAKAQVIGETDNLNQVVSDIAGSPAIKKGILQSLKIVDELVKIMGHQPENIVVEMARENQFTNQGRRNSQQRLKGLTDSIKEFGSQILKEHPVENSQLQNDRLFLYYLQNGRDMYTGEELDIDYLSQYDIDHIIPQAFIKDNSIDNRVLTSSKENRGKSDDVPSKDVVRKMKSYWSKLLSAKLITQRKFDNLTKAERGGLTDDDKAGFIKRQLVETRQITKHVARILDERFYTETDENNKKIRQVKIVTLKSNLVSNFRKEFELYKVREINDYHHAHDAYLNAVIGKALLGVYPQLEPEFVYGDYPHFHGHKENKATAKKFFYSNIMNFFKKDDVRTDKNGEIIWKKDEHISNIKKVLSYPQVNIVKKVEEQTGGFSKESILPKGNSDKLIPRKTKKFYWDTKKYGGFDSPIVAYSILVIADIEKGKSKKLKTVKALVGVTIMEKMTFERDPVAFLERKGYRNVQEENIIKLPKYSLFKLENGRKRLLASARELQKGNEIVLPNHLGTLLYHAKNIHKVDEPKHLDYVDKHKDEFKELLDVVSNFSKKYTLAEGNLEKIKELYAQNNGEDLKELASSFINLLTFTAIGAPATFKFFDKNIDRKRYTSTTEILNATLIHQSITGLYETRIDLSKLGGD

SEQ ID NO: 499 - protein, 1345 aa, Streptococcus mutans
  Streptococcus mutans M21
MKKPYSIGLDIGTNSVGWAVVTDDYKVPAKKMKVLGNTDKSHIKKNLLGALLFDSGNTAEDRRLKRTARRRYTRRRNRILYLQEIFSEEMGKVDDSFFHRLEDSFLVTEDKRGERHPIFGNLEEEVKYHENFPTIYHLRQYLADNPEKTDLRLVYLALAHIIKFRGHFLIEGKFDTRNNDVQRLFQEFLAVYDNTFENSSLQEQNVQVEEILTDKISKSAKKDRVLKLFPNEKSNGRFAEFLKLIVGNQADFKKHFELEEKAPLQFSKDIYEEELEVLLAQIGDNYAELFLSAKKLYDSILLSGILTVTDVSTKAPLSASMIQRYNEHQMDLAQLKQFIRQKLSDKYNEVFSDVSKDGYAGYIDGKTNQEAFYKYLKGLLNKIEGSGYFLDKIEREDFLRKQRTFDNGSIPHQIHLQEMRAIIRRQAEFYPFLADNQDRIEKILTFRIPYYVGPLARGKSDFAWLSRKSADKITPWNFDEIVDKESSVEAFINRMTNYDLYLPNQKVLPKHSLLYEKFTVYNELTKVKYKTEQGKTAFFDANMKQEIFDGVFKVYRKVTKDKLMDFLEKEFDEFRIVDLTGLDKENKAFNASYGTYHDLRKILDKDFLDNSKNEKILEDIVLTLTLFEDREMIRKRLKNYSDLLTKEQLKKLERRHYTGWGRLSAELIHGIRNKESRKTILDYLIDDGNSNRNFMQLINDDALSFKEEIAKAQVIGETDNLNQVVSDIAGSPAIKKGILQSLKIVDELVKIMGHQPENIVVEMARENQFTNQGRRNSQQRLKGLTDSIKEFGSQILKEHPVENSQLQNDRLFLYYLQNGRDMYTGEELDIDYLSQYDIDHIIPQAFIKDNSIDNRVLTSSKENRGKSDDVPSKNVVRKMKSYWSKLLSAKLITQRKFDNLTKAERGGLTDDDKAGFIKRQLVETRQITKHVARILDERFHTETDENNKKIRQVKIVTLKSNLVSNFRKEFELYKVREINDYHHAHDAYLNAVIGKALLGVYPQLEPEFVYGDYPHFHGHKENKATAKKFFYSNIMNFFKKDDVRTDKNGEIIWKKDEHISNIKKVLSYPQVNIVKKVEEQTGGFSKESILPKGNSDKLIPRKTKKFYWDTKKYGGFDSPIVAYSILVIADIEKGKSKKLKTVKALVGVTIMEKMTFERDPVAFLERKGYRNVQEENIIKLPKYSLFKLENGRKRLLASARELQKGNEIVLPNHLGTLLYHAKNIHKVDEPKHLDYVDKHKDEFKELLDVVSNFSKKYTLAEGNLEKIKELYAQNNGEDLKELASSFINLLTFTAIGAPATFKFFDKNIDRKRYTSTTEILNATLIHQSITGLYETRIDLSKLGGD

SEQ ID NO: 500 - protein, 1345 aa, Streptococcus mutans; identical to SEQ ID NO: 499
  Streptococcus mutans M21

SEQ ID NO: 501 - protein, 1345 aa, Streptococcus mutans
  Streptococcus mutans M230
MKKPYSIGLDIGTNSVGWAVVTDDYKVPAKKMKVLGNTDKSHIKKNLLGALLFDSGNTAEDRRLKRTARRRYTRRRNRILYLQEIFSEEMGKVDDSFFHRLEDSFLVTEDKRGERHPIFGNLEEEVKYHENFPTIYHLRQYLADNPEKVDLRLVYLALAHIIKFRGHFLIEGKFDTRNNDVQRLFQEFLAVYDNTFENSSLQEQNVQVEEILTDKISKSAKKDRVLKLFPNEKSNGRFAEFLKLIVGNQADFKKHFELEEKAPLQFSKDTYEEELEVLLAQIGDNYAELFLSAKKLYDSILLSGILTVTDVSTKAPLSASMIQRYNEHQMDLAQLKQFIRQKLSDKYNEVFSDVSKDGYAGYIDGKTNQEAFYKYLKGLLNKIEGSGYFLDKIEREDFLRKQRTFDNGSIPHQIHLQEMRAIIRRQAEFYPFLADNQDRIEKILTFRIPYYVGPLARGKSDFAWLSRKSADKITPWNFDEIVDKESSAEAFINRMTNYDLYLPNQKVLPKHSLLYEKFTVYNELTKVKYKTEQGKTAFFDANMKQEIFDGVFKVYRKVTKDKLMDFLEKEFDEFRIVDLTGLDKENKVFNASYGTYHDLCKILDKDFLDNSKNEKILEDIVLTLTLFEDREMIRKRLENYSDLLTKEQVKKLERRHYTGWGRLSAELIHGIRNKESRKTILDYLIDDGNSNRNFMQLINDDALSFKEEIAKAQVIGETDNLNQVVSDIAGSPAIKKGILQSLKIVDELVKIMGHQPENIVVEMARENQFTNQGRQNSQQRLKGLTDSIKEFGSQILKEHPVENSQLQNDRLFLYYLQNGRDMYTGEELDIDYLSQYDIDHIIPQAFIKDNSIDNRVLTSSKENRGKSDDVPSEDVVRKMKSYWSKLLSAKLITQRKFDNLTKAERGGLTDDDKAGFIKRQLVETRQITKHVARILDERFYTETDENNKKIRQVKIVTLKSNLVSNFRKEFELYKVREINDYHHAHDAYLNAVIGKALLGVYPQLEPEFVYGDYPHFHGHKENKATAKKFFYSNIMNFFKKDDVRTDKNGEIIWKKDEHISNIKKVLSYPQVNIVKKVEEQTGGFSKESILPKGNSDKLIPRKTKKFYWDTKKYGGFDSPIVAYSILVIADIEKGKSKKLKTVKALVGVTIMEKMTFERDPVAFLERKGYRNVQEENIIKLPKYSLFKLENGRKRLLASARELQKGNEIVLPNHLGTLLYHAKNIHKVDEPKHLDYVDKHKDEFKELLDVVSNFSKKYTLAEGNLEKIKELYAQNNGEDLKELASSFINLLTFTAIGAPATFKFFDKNIDRKRYTSTTEILNATLIHQSITGLYETRIDLSKLGGD

SEQ ID NO: 502 - protein, 1345 aa, Streptococcus mutans; identical to SEQ ID NO: 501
  Streptococcus mutans M230

SEQ ID NO: 503 - protein, 1345 aa, Streptococcus mutans
  Streptococcus mutans M2A
MKKPYSIGLDIGTNSVGWAVVTDDYKVPAKKMKVLGNTDKSHIKKNLLGALLFDSGNTAEDRRLKRTARRRYTRRRNRILYLQEIFSEEMGKVDDSFFHRLEDSFLVTEDKRGERHPIFGNLEEEVKYHENFPTIYHLRQYLADNPEKTDLRLVYLALAHIIKFRGHFLIEGKFDTRNNDVQRLFQEFLAVYDNTFENSSLQEQNVQVEEILTDKISKSAKKDRVLKLFPNEKSNGRFAEFLKLIVGNQADFKKHFELEEKAPLQFSKDIYEEELEVLLAQIGDNYAELFLSAKKLYDSILLSGILTVTDVSTKAPLSASMIQRYNEHQMDLAQLKQFIRQKLSDKYNEVFSDVSKDGYAGYIDGKTNQEAFYKYLKGLLNKIEGSGYFLDKIEREDFLRKQRTFDNGSIPHQIHLQEMRAIIRRQAEFYPFLADNQDRIEKILTFRIPYYVGPLARGKSDFAWLSRKSADKITPWNFDEIVDKESSVEAFINRMTNYDLYLPNQKVLPKHSLLYEKFTVYNELTKVKYKTEQGKTAFFDANMKQEIFDGVFKVYRKVTKDKLMDFLEKEFDEFRIVDLTGLDKENKAFNASYGTYHDLRKILDKDFLDNSKNEKILEDIVLTLTLFEDREMIRKRLKNYSDLLTKEQLKKLERRHYTGWGRLSAELIHGIRNKESRKTILDYLIDDGNSNRNFMQLINDDALSFKEEIAKAQVIGETDNLNQVVSDIAGSPAIKKGILQSLKIVDELVKIMGHQPENIVVEMARENQFTNQGRRNSQQRLKGLTDSIKEFGSQILKEHPVENSQLQNDRLFLYYLQNGRDMYTGEELDIDYLSQYDIDHIIPQAFIKDNSIDNRVLTSSKENRGKSDDVPSKDVVRKMKSYWSKLLSAKLITQRKFDNLTKAERGGLTDDDKAGFIKRQLVETRQITKHVARILDERFNTETDENNKKIRQVKIVTLKSNLVSNFRKEFELYKVREINDYHHAHDAYLNAVIGKALLGVYPQLEPEFVYGDYPHFHGHKENKATAKKFFYSNIMNFFKKDDVRTDKNGEIIWKKDEHISNIKKVLSYPQVNIVKKVEEQTGGFSKESILPKGNSYKLIPRKTKKFYWDTKKYGGFDSPIVAYSILVIADIEKGKSKKLKTVKALVGVTIMEKMTFERDPVAFLERKGYRNVQEENIIKLPKYSLFKLENGRKRLLASARELQKGNEIVLPNHLGTLLYHAKNIHKVDEPKHLDYVDKHKDEFKELLDVVSNFSKKYTLAEGNLEKIKELYAQNNGEDLKELASSFINLLTFTAIGAPAAFKFFDKNIDRKRYTSTTEILNATLIHQSITGLYETRIDLSKLGGD

SEQ ID NO: 504 - protein, 1345 aa, Streptococcus mutans; identical to SEQ ID NO: 503
  Streptococcus mutans M2A

SEQ ID NO: 505 - protein, 1345 aa, Streptococcus mutans
  Streptococcus mutans N29
MKKPYSIGLDIGTNSVGWAVVTDDYKVPAKKMKVLGNTDKSHIKKNLLGALLFDSGNTAADRRLKRTARRRYTRRRNRILYLQEIFAEEMSKVDDSFFHRLEDSFLVTEDKRGERHPIFGNLEEEVKYHENFPTIYHLRQYLADNPEKVDLRLVYLALAHIIKFRGHFLIEGKFDTRNNDVQRLFQEFLAVYDNTFENSSLQEQNVQVEEILTDKISKSAKKDRVLKLFPNEKSNGRFAEFLKLIVGNQADFKKHFELEEKAPLQFSKDTYEEELEVLLAQIGDNYAELFLSAKKLYDSILLSGILTVTDVSTKAPLSASMIQRYNEHQMDLAQLKQFIRQKLSDKYNEVFSDVSKDGYAGYIDGKTNQEAFYKYLKGLLNKIEGSGYFLDKIEREDFLRKQRTFDNGSIPHQIHLQEMRAIIRRQAEFYPFLADNQDRIEKILTFRIPYYVGPLARGKSDFAWLSRKSADKITPWNFDEIVDKESSAEAFINRMTNYDLYLPNQKVLPKHSLLYEKFTVYNELTKVKYKTEQGKTAFFDANMKQEIFDGVFKVYRKVTKDKLMDFLEKEFDEFRIVDLTGLDKENKAFNASYGTYHDLRKILDKDFLDNSKNEKILEDIVLTLTLFEDREMIRKRLENYSDLLTKEQVKKLERRHYTGWGRLSAELIHGIRNKESRKTILDYLIDDGNSNRNFMQLINDDALSFKEEIAKAQVIGETDNLNQVVSDIAGSPAIKKGILQSLKIVDELVKIMGHQPENIVVEMARENQFTNQGRRNSQQRLKGLTDSIKEFGSQILKEHPVENSQLQNDRLFLYYLQNGRDMYTGEELDIDYLSQYDIDHIIPQAFIKDNSIDNRVLTSSKENRGKSDDVPSKNVVRKMKSYWSKLLSAKLITQRKFDNLTKAERGGLTDDDKAGFIKRQLVETRQITKHVARILDERFHTETDENNKKIRQVKIVTLKSNLVSNFRKEFELYKVREINDYHHAHDAYLNAVIGKALLGVYPQLEPEFVYGDYPHFHGHKENKATAKKFFYSNIMNFFKKDDVRTDKNGEIIWKKDEHISNIKKVLSYPQVNIVKKVEEQTGGFSKESILPKGNSDKLIPRKTKKFYWDTKKYGGFDSPIVAYSILVIADIEKGKSKKLKTVKALVGVTIMEKMTFERDPVAFLERKGYRNVQEENIIKLPKYSLFKLENGRKRLLASARELQKGNEIVLPNHLGTLLYHAKNIHKVDEPKHLDYVDKHKDEFKELLDVVSNFSKKYTLAEGNLEKIKELYAQNNGEDLKELSSSFINLLTFTAIGAPAAFKFFDKNIDRKRYTSTTEILNATLIHQSITGLYETRIDLSKLGGD

SEQ ID NO: 506 - protein, 1345 aa, Streptococcus mutans; identical to SEQ ID NO: 505
  Streptococcus mutans N29

SEQ ID NO: 507 - protein, 1345 aa, Streptococcus mutans
  Streptococcus mutans N3209
MKKPYSIGLDIGTNSVGWAVVTDDYKVPAKKMKVLGNTDKSHIKKNLLGALLFDSGNTAEDRRLKRTTRRRYTRRRNRILYLQEIFSEEMGKVDDSFFHRLEDSFLVTEDKRGERHPIFGNLEEEVKYHENFPTIYHLRQYLADNPEKTDLRLVYLALAHIIKFRGHFLIEGKFDTRNNDVQRLFQEFLAVYDNTFENSSLQEQNVQVEEILTDKISKSAKKDRVLKLFPNEKSNGCFAEFLKLIVGNQADFKKHFELEEKAPLQFSKDTYEEELEVLLAQIGDNYAELFLSAKKLYDSILLSGILTVTDVSTKAPLSASMIQRYNEHQMDLTQLKQFIRQKLSDKYNEVFSDVSKDGYAGYIDGKTNQEAFYKYLKGLLNKIEGSGYFLDKIEREDFLRKQRTFDNGSIPHQIHLQEMRAIIRRQAEFYPFLADNQDRIEKLLTFRIPYYVGPLASGKSDFAWLSRKSADKITPWNFDEIVDKESSAEAFINRMTNYDLYLPNQKVLPKHSLLYEKFTVYNELTKVKYKTEQGKTAFFDANMKQEIFDGVFKVYRKVTKDKLMDFLEKEFDEFRIVDLTGLDKENKVFNASYGTYHDLCKILDKDFLDNSKNEKILEDIVLTLTLFEDREMIRKRLENYSDLLTKEQVKKLERRHYTGWGRLSAELIHGIRNKESRKTILDYLIDDGNSNRNFMQLINDDALSFKEEIAKAQVIGETDNLNQVVSDIAGSPAIKKGILQSLKIVDELVKIMGHQPENIVVEMARENQFTNQGRRNSQQRLKGLTDSIKEFGSQILKEHPVENSQLQNDRLFLYYLQNGRDMYTGEELDIDYLSQYDIDHIIPQAFIKDNSIDNRVLTSSKENRGKSDDVPSKDVVRKMKSYWSKLLSAKLITQRKFDNLTKAERGGLTDDDKAGFIKRQLVETRQITKHVARILDERFNTETDENNKKIRQVKIVTLKSNLVSNFRKEFELYKVREINDYHHAHDAYLNAVIGKALLGVYPQLEPEFVYGDYPHFHGHKENKATAKKFFYSNIMNFFKKDDVRTDKNGEIIWKKDEHISNIKKVLSYPQVNIVKKVEEQTGGFSKESILPKGNSDKLIPRKTKKFYWDTKKYGGFDSPIVAYSILVIADIEKGKSKKLKTVKALVGVTIMEKMTFERDPVAFLERKGYRNVQEENIIKLPKYSLFKLENGRKRLLASARELQKGNEIVLPNHLGTLLYHAKNIHKVDEPKHLDYVDKHKDEFKELLDVVSNFSKKYTLAEGNLEKIKELYAQNNGEDLKELASSFINLLTFTAIGAPATFKFFDKNIDRKRYTSTTEILNATLIHQSITGLYETRIDLSKLGGD

SEQ ID NO: 508 - protein, 1345 aa, Streptococcus mutans; identical to SEQ ID NO: 507
  Streptococcus mutans N3209

SEQ ID NO: 509 - protein, 1345 aa, Streptococcus mutans
  Streptococcus mutans N66
MKKPYSIGLDIGTNSVGWAVVTDDYKVPAKKMKVLGNTDKSHIKKNLLGALLFDSGNTAEDRRLKRTARRRYTRRRNRILYLQEIFSEEMGKVDDSFFHRLEDSFLVTEDKRGERHPIFGNLEEEVKYHENFPTIYHLRQYLADNPEKTDLRLVYLALAHIIKFRGHFLIEGKFDTRNNDVQRLFQEFLAVYDNTFENSSLQEQNVQVEEILTDKISKSAKKDRVLKLFPNEKSNGRFAEFLKLIVGNQADFKKHFELEEKAPLQFSKDIYEEELEVLLAQIGDNYAELFLSAKKLYDSILLSGILTVTDVSTKAPLSASMIQRYNEHQMDLAQLKQFIRQKLSDKYNEVFSDVSKDGYAGYIDGKTNQEAFYKYLKGLLNKIEGSGYFLDKIEREDFLRKQRTFDNGSIPHQIHLQEMRAIIRRQAEFYPFLADNQDRIEKILTFRIPYYVGPLARGKSDFAWLSRKSADKITPWNFDEIVDKESSAEAFINRMTNYDLYLPNQKVLPKHSLLYEKFTVYNELTKVKYKTEQGKTAFFDANMKQEIFDGVFKVYRKVTKDKLMDFLEKEFDEFRIVDLTGLDKENKAFNASYGTYHDLRKILDKDFLDNSKNEKILEDIVLTLTLFEDREMIRKRLKNYSDLLTKEQLKKLERRHYTGWGRLSAELIHGIRNKESRKTILDYLIDDGNSNRNFMQLINDDALSFKEEIAKAQVIGETDNLNQVVSDIAGSLAIKKGILQSLKIVDELVKIMGHQPENIVVEMARENQFTNQGRRNSQQRLKGLTDSIKEFGSQILKEHPVENSQLQNDRLFLYYLQNGRDMYTGEELDIDYLSQYDIDHIIPQAFIKDNSIDNRVLTSSKENRGKSDDVPSKDVVRKMKSYWSKLLSAKLITQRKFDNLTKGERGGLTDDDKAGFIKRQLVETRQITKHVARILDERFNTETDENNKKIRQVKIVTLKSNLVSNFRKEFELYKVREINDYHHAHDAYLNAVIGKALLGVYPQLEPEFVYGDYPHFHGHKENKATAKKFFYSNIMNFFKKDDVRTDKNGEIIWKKDEYISNIKKVLSYPQVNIVKKVEEQTGGFFKESILPKGDSDKLIPRKTKKFYWDTKKYGGFDSPIVAYSILVIADIEKGKSKKLKTVKALVGVTIMEKMTFERDPVAFLERKGYRNVQEENIIKLPKYSLFKLENGRKRLLASARELQKGNEIVLPNHLGTLLYHAKNIHKVDEPKHLDYVDKHKDEFKELLDVVSNFSKKYTLAEGNLEKIKELYAQNNGEDLKELASSFINLLTFTAIGAPATFKFFDKNIDRKRYTSTTEILNATLIHQSITGLYETRIDLSKLGGD

SEQ ID NO: 510 - protein, 1345 aa, Streptococcus mutans; identical to SEQ ID NO: 509
  Streptococcus mutans N66

SEQ ID NO: 511 - protein, 1350 aa, Streptococcus mutans
  Streptococcus mutans NFSM1
MKKPYSIGLDIGTNSVGWAVVTDDYKVPAKKMTVLGNTDKSHIKKNLLGALLFDSGNTAADRRLKRTARRRYTRRRNRILYLQEIFAEEMSKVDDSFFHRLEDSFLVTEDKRGERHPIFGNLEEEVKYHENFPTIYHLRQYLADNPEKVDLRLVYLALAHIIKFRGHFLIEGKFDTRNNDVQRLFQEFLAVYDNTFENSSLQEQNVQVEEILTDKISKSAKKDRVLKLFPNEKSNGRFAEFLKLIVGNQADFKKHFELEEKTPLQFSKDTYEEELEVLLAQIGDNYAELFLSAKKLYDSILLSGILTVTDVSTKAPLSASMIQRYNEHQMDLAQLKQFIRQKLSDKYNEVFSDVSKDGYAGYIDGKTNQEAFYKYLKGLLNKIEGSGYFLDKIEREDFLRKQRTFDNGSIPHQIHLQEMRAIIRRQAEFYPFLADNQDRIEKILTFRIPYYVGPLARGKSDFAWLSRKSADKITPWNFDEIVDKESSAEAFINRMTNYDLYLPNQKVLPKHSLLYEKFTVYNELTKVKYKTEQGKTAFFDANMKQEIFDGVFKVYRKVTKDKLMDFLEKEFDEFRIVDLTGLDKENKAFNASYGTYHDLRKILDKDFLDNSKNEKILEDIVLTLTLFEDREMIRKRLENYSDLLTKEQVKKLERRHYTGWGRLSAELIHGIRNKESRKTILDYLIDDGNSNRNFMQLINDDALSFKEEIAKAQVIGETDNLNQVVSDIAGSPAIKKGILQSLKIVDELVKIMGHQPENIVVEMARENQFTNQGRRNSQQRLKGLTDSIKEFGSQILKEHPVENSQLQNDRLFLYYLQNGRDMYTGEELDIDYLSQYDIDHIIPQAFIKDNSIDNRVLTSSKENRGKSDDVPSEDVVNRMRPFWNKLLSSGLISQRKYNNLTKKELTPDDKAGFIKRQLVETRQITKHVARMLDERFNKEFDDNNKRIRRVKIVTLKSNLVSSFRKEFELYKVREINDYHHAHDAYLNAVVVKALLVKYPKLEPEFVYGEYPKYNSYRERKTATQKMFFYSNIMNMFKSKVKLADDQIVERPMIEVNDETGEIAWDKTKHITTVKKVLSYPQVNIVKKVEEQTIGQNGGLFDDNPKSPLEVIPSKLVPLKKALNPEKYGGYQKPTTAYPILLIVDTKQLIPISVMDKKRFEQNPVKFLKDKGYQQIEKNNFVKLPKYTLVDIGNGIKRLWASSKEVHKGNQLVVSKKSQDLLYHAHHLDNDYSNEYVKNHYQQFDILFNEITSFSKKCKLGKEHIQKIEEAYSKERDSASIEELADGFIKLLGFTQLGATSPFSFLGIKLNQKQYTGKKDYLLPCMEATLIHQSITGLYETRIDLSKLGGD

SEQ ID NO: 512 - protein, 1350 aa, Streptococcus mutans; identical to SEQ ID NO: 511
  Streptococcus mutans NFSM1

SEQ ID NO: 513 - protein, 1345 aa, Streptococcus mutans; identical to SEQ ID NO: 485
  Streptococcus mutans NLML1

SEQ ID NO: 514 - protein, 1338 aa, Streptococcus mutans
  Streptococcus mutans NLML4
MDLIGTNSVGWAVVTDDYKVPAKKMKVLGNTDKSHIKKNLLGALLFDSGNTAADRRLKRTARRRYTRRRNRILYLQEIFAEEMSKVDDSFFHRLEDSFLVTEDKRGERHPIFGNLEEEVKYHENFPTIYHLRQYLADNPEKVDLRLVYLALAHIIKFRGHFLIEGKFDTRNNDVQRLFQEFLAVYDNTFENSSLQEQNVQVEEILTDKISKSAKKDRVLKLFPNEKSNGRFAEFLKLIVGNQADFKKHFELEEKAPLQFSKDTYEEELEVLLAQIGDNYAELFLSAKKLYDSILLSGILTVTDVSTKAPLSASMIQRYNEHQMDLAQLKQFIRQKLSDKYNEVFSDVSKDGYAGYIDGKTNQEAFYKYLKGLLNKIEGSGYFLDKIEREDFLRKQRTFDNGSIPHQIHLQEMRAIIRRQAEFYPFLADNQDRIEKILTFRIPYYVGPLARGKSDFAWLSRKSADKITPWNFDEIVDKESSAEAFINRMTNYDLYLPNQKVLPKHSLLYEKFTVYNELTKVKYKTEQGKTAFFDANMKQEIFDGVFKVYRKVTKDKLMDFLEKEFDEFRIVDLTGLDKENKAFNASYGTYHDLRKILDKDFLDNSKNEKILEDIVLTLTLFEDREMIRKRLENYSDLLTKEQVKKLERRHYTGWGRLSAELIHGIRNKESRKTILDYLIDDGNSNRNFMQLINDDALSFKEEIAKAQVIGETDNLNQVVSDIAGSPAIKKGILQSLKIVDELVKIMGHQPENIVVEMARENQFTNQGRRNSQQRLKGLTDSIKEFGSQILKEHPVEHSQLQNDRLFLYYLQNGRDMYTGEELDIDYLSQYDIDHIIPQAFIKDNSIDNRVLTSSKENRGKSDDVPSKNVVRKMKSYWSKLLSAKLITQRKFDNLTKAERGGLTDDDKAGFIKRQLVETRQITKHVARILDERFHTETDENNKKIRQVKIVTLKSNLVSNFRKEFELYKVREINDYHHAHDAYLNAVIGKALLGVYPQLEPEFVYGDYPHFHGHKENKATAKKFFYSNIMNFFKKDDVRTDKNGEIIWKKDEHISNIKKVLSYPQVNIVKKVEEQTGGFSKESILPKGNSDKLIPRKTKKFYWDTKKYGGFDSPIVAYSILVIADIEKGKSKKLKTVKALVGVTIMEKMTFERDPVAFLERKGYRNVQEENIIKLPKYSLFKLENGRKRLLASARELQKGNEIVLPNHLGTLLYHAKNIHKVDEPKHLDYVDKHKDEFKELLDVVSNFSKKYTLAEGNLEKIKELYAQNNGEDLKELASSFINLLTFTAIGAPATFKFFDKNIDRKRYTSTTEILNATLIHQSITGLYETRIDLSKLGGD

SEQ ID NO: 515 - protein, 1338 aa, Streptococcus mutans; identical to SEQ ID NO: 514
  Streptococcus mutans NLML4

SEQ ID NO: 516 - protein, 1128 aa, Streptococcus mutans
  Streptococcus mutans NLML5
MANSKILGLDIGIASVGVGIIDKETGKIIHVNSRIFPAATADSNVERRGFRQGRRLVRRKKHRKVRLADLFLDSNLLTDFSKVSLNLNPYQLRVKGLNEELSNEELFIALKSIVSRRGISYLDDASEDSGANSSEYGKAVEENRKLLEDRTPGQIQLERFEKYGKVRGDFTVVENGENHRLINVFSTSAYKKEAERILRRQQEFNIRIADEFIEAYLTILTGKRKYYHGPGNEKSRTDYGRFRTDGTTLDNIFGILIGKCTFYPDEYRAAKASYTAQEFNLLNDLNNLTVPTETKKLSEEQKRQIIEHAKTVKTLGAPTLLKYIAKLVGCSADDIKGYRIDKSDKPEIHTFEAYRKMRTMELIKVADLSRESLDALAHILTLNTEREGIEEAIRDRFTNKEFNQEQINELVLFRKNNSSLFGKGWHNFSLKLMKELIPELYETSEEQMTILTRLGKQRVKKSSNRTNYIDEKELTEEIYNPVVAKSVRQAIKIINLATKKYGVFDNIVIEMARESNEDDEKKAIQNAQKANEDEKEAALLKAAHQFNGKEELPDSIFHGHKELLTKIRLWHQQGEKCLYTGKTIFINDLIHNPYKYEIDHILPLSLSFDDSLANKVLVLSTANQEKGQRTPFQSLDSMDGAWTYREFKAYVKGLKTLSNKKKDYLLNEEDINKNEVKQKFIERNLVDTRYSSRVVLNTLQDFYKKREFDTKISVVRGQFTSQIRRKWRIEKTRETYHHHAVDALIIAASSQLNLWKKQNNPLISYKEDQFVDPETGEILSLSDDEYKELVFKAPYDHFVDTLKSKKFEDSILFSYQVDSKYNRKISDATIYGTRKARLGKDSQEETYVLGKIKDIYSQKGYEDFIKKYKKDKTQFLMYHKDPQTFEKVIEEILKTYSDKELNEKGKEVPCNPFEKYRQENGPVRKYSKKGNGPEIKSIKYYDNKLGNHIDITPNNSHHQVVLQSLKPWRTDVYFNPKSGKYELMGLKYSDLRFEKVSGDYGISVKKYNEIKSKEGVDENSEFKFTLYKNDLILIKDTESGEQELFRFLSRTMPNQKHYVELKPYDKSKFEGHQKLMDIFGEVAKGGQCLKGLNKSNISIYKVKTDVLGNKYFIKKEGDQPQLNFKKKI

SEQ ID NO: 517 - protein, 1128 aa, Streptococcus mutans; identical to SEQ ID NO: 516
  Streptococcus mutans NLML5

SEQ ID NO: 518 - protein, 1125 aa, Streptococcus mutans
  Streptococcus mutans NLML8
MTNGKILGLDIGIASVGVGIINAKTGNVEHASSRIFPAANADNNVERRSARGGRRLIRRKKHRLKRVEDLFEKYNIDTDFSNLNLNPYQLRVKGLNEQLSNEELFAILKNIAKRRGISYLDDAEDDSVGSSDYAKAIDENRKLLKKQTPGEIQLKRLEKYGQLRGNFTIQDENGEYHRLINVFSTSDYVKEARRILETQSYYNKFITESFVEDYIKILQGKRKYYVGPGNEKSRTDYGIYRTDGETLDNLFGILIGKCGFYPEEYRAAKASYTAQEYNFLNDLNNLTVPTETKKLSTEQKYQLVDFAKTASTLEAAKLLKEIAKLVGCQVEEIKGYRLDNKDKPDLHTFEPFRKLKSNLTTIAVENLSITTLDTLAHILTLNTEREGIEEAIQKELPNIFSDEQITGIIAVRKKNSQIFGKGWHSFSIKLMKELIPELYETSEEQMTILIRLKKVKTNSKITNRTKYINEQEVTDEIYNPVVSKSIRQTVKIINAAIKKYGAFDQIVIEMPRESNEEDERKFIADLQKSNAKEKDDAMKQAALLYNGKAELPHGVFHGHKELATKIRLWYQQGERCLYSGKHIDIHDLIHNQHMFEIDHVLPLSLSFDDSLANKVLVYSWANQEKGQRTPFQALPQMASAWSFRELRDYISKQKGISKKKRDYLLTEQDINKVEVKQKFIERNLVDTRYVSRVVLNTLQDALKVMNKETKISVIRGQFTSQLRRQWRIDKSRETYHHHAVDALIIAASSQLRLWKKQNNPMFAEDKHGQKINLDTGEVLSDDAYKELVYQAPYQGFVNTISSKSFEDEILFSYQVDSKVNRKISDATIYATRQAQLGKDKKEETYVLGKIKDIYSQAGYDAFRKKYDKDKAVFLMYQKDPETWEKVIEVILRDYKELDDKGKEIGNPFERYKVKHGFVRKYSRKNKGTEIKSLKYYDNKLGNHIDITPNNSKHSVVLQSINPWRADLYFNPETTKYELMGLKYADLSFEKGTGKYSISREKYDEIKEREGISSKSEFKFTLYKNDLILVKDIGNHKELIARFNSKNDTSKHYVELKPWNKAKFDSEEELIPAFGKVAKSGQFIKGLNKPDLSIYKVKTDILGHKYYIKKEGDKPKLNFENKIKNK

SEQ ID NO: 519 - protein, 1125 aa, Streptococcus mutans; identical to SEQ ID NO: 518
  Streptococcus mutans NLML8

SEQ ID NO: 520 - protein, 1345 aa, Streptococcus mutans
  Streptococcus mutans NLML9
MKKPYSIGLDIGTNSVGWAVVTDDYKVSAKKMKVLGNTDKSHIKKNLLGALLFDSGNTAEDRRLKRTARRRYTRRRNRILYLQEIFAEEMSKVDDSFFHRLEDSFLVTEDKRGERHPIFGNLEEEVKYHENFPTIYHLRQYLADNPEKVDLRLVYLALAHIIKFRGHFLIEGKFDTRNNDVQRLFQEFLAVYDNTFENSSLQEQNVQVEEILTDKISKSAKKDRVLKLFPNEKSNGRFAEFLKLIVGNQADFKKHFELEEKAPLQFSKDTYEEELEVLLAQIGDNYAELFLSAKKLYDSILLSGILTVTDVSTKAPLSASMIQRYNEHQMDLAQLKQFIRQKLSDKYNEVFSDVSKDGYAGYIDGKTNQEAFYKYLKGLLNKIEGSGYFLDKIEREDFLRKQRTFDNGSIPHQIHLQEMRAIIRRQAEFYPFLADNQDRIEKILTFRIPYYVGPLARGKSDFAWLSRKSADKITPWNFDEIVDKESSAEAFINRMTNYDLYLPNQKVLPKHSLLYEKFTVYNELTKVKYKTEQGKTAFFDANMKQEIFDGVFKVYRKVTKDKLMDFLEKEFDEFRIVDLTGLDKENKAFNASYGTYHDLRKILDKDFLDNSKNEKILEDIVLTLTLFEDREMIRKRLENYSDLLTKEQVKKLERRHYTGWGRLSAELIHGIRNKESRKTILDYLIDDGNSNRNFMQLINDDALSFKEEIAKAQVIGETDNLNQVVSDIAGSPAIKKGILQSLKIVDELVKIMGHQPENIVVEMARENQFTNQGRRNSQQRLKGLTDSIKEFGSQILKEHPVEHSQLQNDRLFLYYLQNGRDMYTGEELDIDYLSQYDIDHIIPQAFIKDNSIDNRVLTSSKENRGKSDDVPSKNVVRKMKSYWSKLLSAKLITQRKFDNLTKAERGGLTDDDKAGFIKRQLVETRQITKHVARILDERFHTETDENNKKIRQVKIVTLKSNLVSNFRKEFELYKVREINDYHHTHDAYLNAVIGKALLGVYPQLEPEFVYGDYPHFHGHKENKATAKKFFYSNIMNFFKKDDVRTDKNGEIIWKKDEHISNIKKVLSYPQVNIVKKVEEQTGGFSKESILPKGNSDKLIPRKTKKFYWDTKKYGGFDSPIVAYSILVIADIEKGKSKKLKTVKALVGVTIMEKMTFERDPVAFLERKGYRNVQEENIIKLPKYSLFKLENGRKRLLASARELQKGNEIVLPNHLGTLLYHAKNIHKVDEPKHLDYVDKHKDEFKELLDVVSNFSKKYTLAEGNLEKIKELYAQNNGEDLKELASSFINLLTFTAIGAPATFKFFDKNIDRKRYTSTTEILNATLIHQSITGLYETRIDLSKLGGD

SEQ ID NO: 521 - protein, 1345 aa, Streptococcus mutans; identical to SEQ ID NO: 520
  Streptococcus mutans NLML9

SEQ ID NO: 522 - protein, 1355 aa, Streptococcus mutans
  Streptococcus mutans NMT4863
MKKPYSIGLDIGTNSVGWAVVTDDYKVPAKKMKVLGNTDKSHIKKNLLGALLFDSGNTAEDRRLKRTARRRYTRRRNRILYLQEIFAEEMSKVDDSFFHRLDESFLTDDDKNFDSHPIFGNKAEEDAYHQKFPTIYHLRKHLADSTEKADLRLVYLALAHMIKFRGHFLIEGELNAENTDVQKLFADFVGVYDRTFDDSHLSEITVDASSILTEKISKSRRLEKLINNYPKEKKNTLFGNLIALSLGLQPNFKTNFKLSEDAKLQFSKDTYEEDLEELLGKIGDDYADLFTLAKNLYDAILLSGILTADDSSTKAPLSASMIKRYAEHHEDLEKLKEFIKANKPELYHDIFKDETKNGYAGYIENGVKQDEFYKYLKNTLSKITGSDYFLDQIEREDFLRKQRTFDNGSIPHQIHLQEMHAILRRQGDYYPFLKENQDRIEKILTFRIPYYVGPLARKNSRFAWAEYHSDEAVTPWNFDQVIDKESSAQAFIEHMTNNDLYLPNEKVLPKHSPLYEKYTVYNELTKIKYVTEIGEAKFFDANLKQEIFDGLFKHERKVTKKKLRTFLDKNFDEFRIVDIQGLDKETETFNASYATYQDLLKVIKDKVFMDNPENAEILENIVLTLTLFEDREMIKQRLAKYADVFDKKVIDQLARRHYTGWGRLSAKLLNGIRDKQSCKTIMDYLIDDAQSNRNLMQLITDDNLTFKDDIVKAQYVDNSDDLHQVVQSLAGSPAIKKGILQSLKIVDELVKVMGKEPEQIVVEMARENQTTAKGRRNSQQRYKRLKEAIKSLDRDLNHKILKEHPTDNQALQNNRLFLYYLQNGRDMYTGESLDINRLSDYDIDHVIPQAFIKDNSIDNRVLTSSKANRGKSDDVPSEDVVNRMRPFWNKLLSSGLISQRKYNNLTKKELTLDDKAGFIKRQLVETRQITKHVARMLDERFNKEFDDNNKRIRRVKIVTLKSNLVSSFRKEFELYKVREINDYHHAHDAYLNAVVVKALLVKYPKLEPEFVYGEYPKYNSYRERKTATQKMFFYSNIMNMFKSKVKLADDQIVERPMIEVNDETGEIAWDKTKHITTVKKVLSYPQVNIVKKVEEQTIGQNGGLFDDNPKSPLEVIPSKLVPLKKALNPEKYGGYQKPTTAYPILLIVDTKQLIPISVMDKKRFEQNPVKFLKDKGYQQIEKNNFVKLPKYTLVDIGNGIKRLWASSKEVHKGNQLVVSKKSQDLLYHAHHLDNDYSNEYVKNHYQQFDILFNEITSFSKKCKLGKEHIQKIEEAYSKERDFASIEELADGFIKLLGFTQLGATSPFSFLGIKLNQKQYTGKKDYLLPCMEATLIHQSITGLYETRIDLSKLGGD

SEQ ID NO: 523 - protein, 1355 aa, Streptococcus mutans; identical to SEQ ID NO: 522
  Streptococcus mutans NMT4863

SEQ ID NO: 524 - protein, 1345 aa, Streptococcus mutans
MKKPYSIGLDIGTNSVGWAVVTDDYKVPAKKMKVLGNTDKSHIKKNLLGALLFDSGNTAADRRLKRTARRRYTRRRNRILYLQEIFAEEMSKVDDSFFHRLEDSFLVTEDKRGERHPIFGNLEEEVKYHENFPTIYHLRQYLADNPEKVDLRLVYLALAHIIKFRGHFLIEGKFDTRNNDVQRLFQEFLAVYDNTFENSSLQEQNVQVEEILTDKISKSAKKDRVLKLFPNEKSNGRFAEFLKLIVGNQADFKKHFELEEKAPLQFSKDTYEEELEVLLAQIGDNYAELFLSAKKLYDSILLSGILTVTDVSTKAPLSASMIQRYNEHQMDLAQLKQFIRQKLSDKYNEVFSDVSKDGYAGYIDGKTNQEAFYKYLKGLLNKIEGSGYFLDKIEREDFLRKQRTFDNGSIPHQIHLQEMRAIIRRQAEFYPFLADNQDRIEKILTFRIPYYVGPLARGKSDFAWLSRKSADKITPWNFDEIVDKESSAEAFINRMTNYDLYLPNQKVLPKHSLLYEKFTVYNELTKVKYKTEQGKTAFFDANMKQEIFDGVFKVYRKVTKDKLMDFLEKEFDEFRIVDLTGLDKENKAFNASYGTYHDLRKILDKDFLDNSKNEKILEDIVLTLTLFEDREMIRKRLENYSDLLTKEQVKKLERRHYTGWGRLSAELIHGIRNKESRKTILDYLIDDGNSNRNFMQLINDDALSFKEEIAKAQVIGETDNLNQVVSDIAGSPAIKKGILQSLKIVDELVKIMGHQPENIVVEMARENQFTNQGRRNSQQRLKGLTDSIKEFGSQILKEHPVKHSQLQNDRLFLYYLQNGRDMYTGEELDIDYLSQYDIDHIIPQAFIKDNSIDNRVLTSSKENRGKSDDVPSKNVVRKMKSYWSKLLSAKLITQRKFDNLTKAERGGLTDDDKAGFIKRQLVETRQITKHVARILDERFHTETDENNKKIRQVKIVTLKSNLVSNFRKEFELYKVREINDYHHAHDAYLNAVIGKALLGVYPQLEPEFVYGDYPHFHGHKENKATAKKFFYSNIMNFFKKDDVRTDKNGEIIWKKDEHISNIKKVLSYPQVNIVKKVEEQTGGFSKESILPKGNSDKLIPRKTKKFYWDTKKYGGFDSPIVAYSILVIADIEKGKSKKLKTVKALVGVTIMEKMTFERDPVAFLERKGYRNVQEENIIKLPKYSLFKLENGRKRLLASARELQKGNEIVLPNHLGTLLYHAKNIHKVDEPKHLDYVDKHKDEFKELLDVVSNFSKKYTLAEGNLEKIKELYAQNNGEDLKELASSFINLLTFTAIGAPATFKFFDKNIDRKRYTSTTEILNATLIHQSITGLYETRIDLSKLGGD

SEQ ID NO: 525 - protein, 1345 aa, Streptococcus mutans; identical to SEQ ID NO: 471
  Streptococcus mutans NV1996

SEQ ID NO: 526 - protein, 1345 aa, Streptococcus mutans
  Streptococcus mutans NVAB
MKKPYSIGLDIGTNSVGWAVVTDDYKVPAKKMKVLGNTDKSHIKKNLLGALLFDSGNTAADRRLKRTARRRYTRRRNRILYLQEIFAEEMSKVDDSFFHRLEDSFLVTEDKRGERHPIFGNLEEEVKYHENFPTIYHLRQYLADNPEKVDLRLVYLALAHIIKFRGHFLIEGKFDTRNNDVQRLFQEFLAVYDNTFENSSLQEQNVQVEEILTDKISKSAKKDRVLKLFPNEKSNGRFAEFLKLIVGNQADFKKHFELEEKAPLQFSKDTYEEELEVLLAQIGDNYAELFLSAKKLYDSILLSGILTVTDVSTKAPLSASMIQRYNEHQMDLAQLKQFIRQKLSDKYNEVFSDVSKDGYAGYIDGKTNQEAFYKYLKGLLNKIEGSGYFLDKIEREDFLRKQRTFDNGSIPHQIHLQEMRAIIRRQAEFYPFLADNQDRIEKILTFRIPYYVGPLARGKSDFAWLSRKSADKITPWNFDEIVDKESSAEAFINRMTNYDLYLPNQKVLPKHSLLYEKFTVYNELTKVKYKTEQGKTAFFDANMKQEIFDGVFKVYRKVTKDKLMDFLEKEFDEFRIVDLTGLDKENKVFNASYGTYHDLCKILDKDFLDNSKNEKILEDIVLTLTLFEDREMIRKRLENYSDLLTKEQVKKLERRHYTGWGRLSAELIHGIRNKESRKTILDYLIDDGNSNRNFMQLINDDALSFKEEIAKAQVIGETDNLNQVVSDIAGSPAIKKGILQSLKIVDELVKIMGHQPENIVVEMARENQFTKQGRRNSQQRLKGLTDSIKEFGSQILKEHPVENSQLQNDRLFLYYLQNGRDMYTGEELDIDYLSQYDIDHIIPQAFIKDNSIDNRVLTSSKENRGKSDDVPSKDVVRKMKSYWSKLLSAKLITQRKFDNLTKAERGGLTDDDKAGFIKRQLVETRQITKHVARILDERFYTETDENNKKIRQVKIVTLKSNLVSNFRKEFELYKVREINDYHHAHDAYLNAVIGKALLGVYPQLEPEFVYGDYPHFHGHKENKATAKKFFYSNIMNFFKKDDVRTDKNGEIIWKKDEHISNIKKVLSYPQVNIVKKVEEQTGGFSKESILPKGNSDKLIPRKTKKFYWDTKKYGGFDSPIVAYSILVIADIEKGKSKKLKTVKALVGVTIMEKMTFERDPVAFLERKGYRNVQEENIIKLPKYSLFKLENGRKRLLASARELQKGNEIVLPNHLGTLLYHAKNIHKVDEPKHLDYVDKHKDEFKELLDVVSNFSKKYTLAEGNLEKIKELYAQNNGEDLKELASSFINLLTFTAIGAPATFKFFDKNIDRKRYTSTTEILNATLIHQSITGLYETRIDLSKLGGD

SEQ ID NO: 527 - protein, 1345 aa, Streptococcus mutans; identical to SEQ ID NO: 526
  Streptococcus mutans NVAB

SEQ ID NO: 528 - protein, 1345 aa, Streptococcus mutans
  Streptococcus mutans R221
MKKPYSIGLDIGTNSVGWAVVTDDYKVPAKKMKVLGNTDKSHIKKNLLGALLFDSGNTAEDRRLKRTARRRYTRRRNRILYLQEIFSEEMGKVDDSFFHRLEDSFLVTEDKRGERHPIFGNLEEEVKYHENFPTIYHLRQYLADNPEKTDLRLVYLALAHIIKFRGHFLIEGKFDTRNNDVQRLFQEFLAVYDNTFENSSLQEQNVQVEEILTDKISKSAKKDRVLKLFPNEKSNGRFAEFLKLIVGNQADFKKHFELEEKAPLQFSKDIYEEELEVLLAQIGDNYAELFLSAKKLYDSILLSGILTVTDVSTKAPLSASMIQRYNEHQMDLAQLKQFIRQKLSDKYNEVFSDVSKDGYAGYIDGKTNQEAFYKYLKGLLNKIEGSGYFLDKIEREDFLRKQRTFDNGSIPHQIHLQEMRAIIRRQAEFYPFLADNQDRIEKILTFRIPYYVGPLARGKSDFAWLSRKSADKITPWNFDEIVDKESSVEAFINRMTNYDLYLPNQKVLPKHSLLYEKFTVYNELTKVKYKTEQGKTAFFDANMKQEIFDGVFKVYRKVTKDKLMDFLEKEFDEFRIVDLTGLDKENKAFNASYGTYHDLRKILDKDFLDNSKNEKILEDIVLTLTLFEDREMIRKRLKNYSDLLTKEQLKKLERRHYTGWGRLSAELIHGIRNKESRKTILDYLIDDGNSNRNFMQLINDDALSFKEEIAKAQVIGETDNLNQVVSDIAGSPAIKKGILQSLKIVDELVKIMGHQPENIVVEMARENQFTNQGRRNSQQRLKGLTDSIKEFGSQILKEHPVENSQLQNDRLFLYYLQNGRDMYTGEELDIDYLSQYDIDHIIPQAFIKDNSIDNRVLTSSKENRGKSDDVPSKDVVRKMKSYWSKLLSAKLITQRKFDNLTKAERGGLTDDDKAGFIKRQLVETRQITKHVARILDERFNTETDENNKKIRQVKIVTLKSNLVSNFRKEFELYKVREINDYHHAHDAYLNAVIGKALLGVYPQLEPEFVYGDYPHFHGHKENKATAKKFFYSNIMNFFKKDDVRTDKNGEIIWKKDEHISNIKKVLSYPQVNIVKKVEEQTGGFSKESILPKGNSDKLIPRKTKKFYWDTKKYGGFDSPIVAYSILVIADIEKGKSKKLKTVKALVGVTIMEKMTFERDPVAFLERKGYRNVQEENIIKLPKYSLFKLENGRKRLLASARELQKGNEIVLPNHLGTLLYHAKNIHKVDEPKHLDYVDKHKDEFKELLDVVSNFSKKYTLAEGNLEKIKELYAQNNGEDLKELASSFINLLTFTAIGAPATFKFFDKNIDRKRYTSTTEILNATLIHQSITGLYETRIDLNKLGGD

SEQ ID NO: 529 - protein, 1345 aa, Streptococcus mutans; identical to SEQ ID NO: 528
  Streptococcus mutans R221

SEQ ID NO: 530 - protein, 1345 aa, Streptococcus mutans
  Streptococcus mutans S1B
MKKPYSIGLDIGTNSVGWAVVTDDYKVPAKKMKVLGNTDKSHIKKNLLGALLFDSGNTAEDRRLKRTARRRYTRRRNRILYLQEIFSEEMGKVDDSFFHRLDESFLTDDDKNFDSYPIFGNKAEEDAYHQKFPTIYHLRKHLADSTEKADLRLVYLALAHMIKFRGHFLIEGELNAENTDVQKLFADFVGVYDRTFDDSHLSEITVDASSILTEKISKSRRLEKLINNYPKEKKNTLFRNLVALSLGLQPNFKTNFKLSEDAKLQFSKDTYEEDLEELLGKIGDDYADLFTLAKNLYDAILLSGILTADDSSTKAPLSASMIKRYAEHHEDLEKLKEFIKANKPELYHDIFKDETKNGYAGYIENGVKQDEFYKYLKNTLSKIAGSDYFLDKIEREDFLRKQRTFDNGSIPHQIHLQEMHAILRRQGDYYPFLKENQDRIEKILTFRIPYYVGPLARGKSDFAWLSRKSADKITPWNFDEIVDKESSVEAFINRMTNYDLYLPNQKVLPKHSLLYEKFTVYNELTKVKYKTEQGKTAFFDANMKQEIFDGVFKVYRKVTKDKLMDFLEKEFDEFRIVDLTGLDKENKAFNASYGTYHDLRKILDKDFLDNSKNEKILEDIVLTLTLFEDREMIRKRLKNYSDLLTKEQLKKLERRHYTGWGRLSAELIHGIRNKESRKTILDYLIDDGNSNRNFMQLINDDALSFKEEIAKAQVIGETDNLNQVVSDIAGSPAIKKGILQSLKIVDELVKIMGHQPENIVVEMARENQFTNQGRRNSQQRLKGLTDSIKEFGSQILKEHPVENSQLQNDRLFLYYLQNGRDMYTGEELDIDYLSQYDIDHIIPQAFIKDNSIDNRVLTSSKENRGKSDDVPSKDVVRKMKSYWSKLLSAKLITQRKFDNLTKGERGGLTDDDKAGFIKRQLVETRQITKHVARILDERFNTETDENNKKIRQVKIVTLKSNLVSNFRKEFELYKVREINDYHHAHDAYLNAVIGKALLGVYPQLEPEFVYGDYPHFHGHKENKATAKKFFYSNIMNFFKKDDVRTDKNGEIIWKKDEYISNIKKVLSYPQVNIVKKVEEQTGGFSKESILPKGDSDKLIPRKTKKFYWDTKKYGGFDSPIVAYSILVIADIEKGKSKKLKTVKALVGVTIMEKMTFERDPVAFLERKGYRNVQEENIIKLPKYSLFKLENGRKRLLASARELQKGNEIVLPNHLGTLLYHAKNIHKVDEPKHLDYVDKHKDEFKELLDVVSNFSKKYTLAEGNLEKIKELYAQNNGEDLKELASSFINLLTFTAIGAPATFKFFDKNIDRKRYTSTTEILNATLIHQSITGLYETRIDLSKLGGD

SEQ ID NO: 531 - protein, 1345 aa, Streptococcus mutans; identical to SEQ ID NO: 530
  Streptococcus mutans S1B

SEQ ID NO: 532 - protein, 1345 aa, Streptococcus mutans; identical to SEQ ID NO: 471
  Streptococcus mutans SF1

SEQ ID NO: 533 - protein, 1345 aa, Streptococcus mutans
  Streptococcus mutans SF14
MKKPYSIGLDIGTNSVGWAVVTDDYKVPAKKMKVLGNTDKSHIKKNLLGALLFDSGNTAEDRRLKRTARRRYTRRRNRILYLQEIFSEEMGKVNDSFFHRLEDSFLVTEDKRGERHPIFGNLEEEVKYHENFPTIYHLRQYLADNPEKVDLRLVYLALAHIIKFRGHFLIEGKFDTRNNDVQRLFQEFLAVYDNTFENSSLQEQNVQVEEILTDKISKSAKKDRVLKLFPNEKSNGRFAEFLKLIVGNQADFKKHFELEEKAPLQFSKDTYEEELEVLLAQIGDNYAELFLSAKKLYDSILLSGILTVTDVSTKAPLSASMIQRYNEHQMDLAQLKQFIRQKLSDKYNEVFSDVSKDGYAGYIDGKTNQEAFYKYLKGLLNKIEGSGYFLDKIEREDFLRKQRTFDNGSIPHQIHLQEMRAIIRRQAEFYPFLADNQDRIEKILTFRIPYYVGPLARGKSDFAWLSRKSADKITPWNFDEIVDKESSAEAFINRMTNYDLYLPNQKVLPKHSLLYEKFTVYNELTKVKYKTEQGKTAFFDANMKQEIFDGVFKVYRKVTKDKLMDFLEKEFDEFRIVDLTGLDKENKVFNASYGTYHDLCKILDKDFLDNSKNEKILEDIVLTLTLFEDREMIRKRLENYSDLLTKEQVKKLERRHYTGWGRLSAELIHGIRNKESRKTILDYLIDDGNSNRNFMQLINDDALSFKEEIAKAQVIGETDNLNQVVSDIAGSPAIKKGILQSLKIVDELVKIMGHQPENIVVEMARENQFTKQGRRNSQQRLKGLTDSIKEFGSQILKEHPVENSQLQNDRLFLYYLQNGRDMYTGEELDIDYLSQYDIDHIIPQAFIKDNSIDNRVLTSSKENRGKSDDVPSKDVVRKMKSYWSKLLSAKLITQRKFDNLTKAERGGLTDDDKAGFIKRQLVETRQITKHVARILDERFYTETDENNKKIRQVKIVTLKSNLVSNFRKEFELYKVREINDYHHAHDAYLNAVIGKALLGVYPQLEPEFVYGDYPHFHGHKENKATAKKFFYSNIMNFFKKDDVRTDKNGEIIWKKDEYISNIKKVLSYPQVNIVKKVEEQTGGFSKESILPKGNSDKLIPRKTKKFYWDTKKYGGFDSPIVAYSILVIADIEKGKSKKLKTVKALVGVTIMEKMTFERDPIAFLERKGYRNVQEENIIKLPKYSLFKLENGRKRLLASARELQKGNEIVLPNHLGTLLYHAKNIHKVDEPKHLDYVDKHKDEFKELLDVVSNFSKKYTLAEGNLEKIKELYAQNNGEDLKELASSFINLLTFTAIGAPAAFKFFDKNIDRKRYTSTTEILNATLIHQSITGLYETRIDLSKLGGD

SEQ ID NO: 534 - protein, 1345 aa, Streptococcus mutans; identical to SEQ ID NO: 533
  Streptococcus mutans SF14

SEQ ID NO: 535 - protein, 1345 aa, Streptococcus mutans
  Streptococcus mutans SM1
MKKPYSIGLDIGTNSVGWAVVTDDYKVPAKKMKVLGNTDKSHIKKNLLGALLFDSGNTAEDRRLKRTARRRYTRRRNRILYLQEIFSEEMGKVDDSFFHRLEDSFLVTEDKRGERHPIFGNLEEEVKYHENFPTIYHLRQYLADNPEKVDLRLVYLALAHIIKFRGHFLIEGKFDTRNNDVQKLFQEFLAVYDNTFENSSLQEQNVQVEEILTDKISKSAKKDRVLKLFPNEKSNGRFAEFLKLIVGNQADFKKHFELEEKAPLQLSKDTYEEELEVLLAQIGDNYAELFLSAKKLYDSILLSGILTVTDVSTKAPLSASMIQRYNEHQMDLAQLKQFIRQKLSDKYNEVFSDVSKDGYAGYIDGKTNQEAFYKYLKGLLNKIEGSGYFLDKIEREDFLRKQRTFDNGSIPHQIHLQEMRAIIRRQAEFYPFLADNQDRIEKILTFRIPYYVGPLARGKSDFAWLSRKSADKITPWNFDEIVDKESSVEAFINRMTNYDLYLPNQKVLPKHSLLYEKFTVYNELTKVKYKTEQGKTAFFDANMKQEIFDGVFKVYRKVTKDKLMDFLEKEFDEFRIVDLTGLDKENKAFNASYGTYHDLRKILDKDFLDNSKNEKILEDIVLTLTLFEDREMIRKRLENYSDLLTKEQVKKLERRHYTGWGRLSAELIHGIRNKESRKTLLDYLIDDGNSNRNFMQLINDDALSFKEEIAKAQVIGETDNLNQVVSDIAGSPAIKKGILQSLKIVDELVKIMGHQPENIVVEMARENQFTNQGRRNSQQRLKGLTDSIKEFGSQILKEHPVENSQLQNDRLFLYYLQNGRDMYTGEELDIDYLSQYDIDHIIPQAFIKDNSIDNRVLTSSKENRGKSDDVPSKDVVRKMKSYWSKLLSAKLITQRKFDNLTKAERGGLTDDDKAGFIKRQLVETRQITKHVARILDERFNTETDENNKKIRQVKIVTLKSNLVSNFRKEFELYKVREINDYHHAHDAYLNAVIGKALLGVYPQLEPEFVYGDYPHFHGHKENKATAKKFFYSNIMNFFKKDDVRTDKNGEIIWKKDEYISNIKKVLSYPQVNIVKKVEEQTGGFSKESILPKGNSDKLIPRKTKKFYWDTKKYGGFDSPIVAYSILVIADIEKGKSKKLKTVKALVGVTIMEKMTFERDPIAFLERKGYRNVQEENIIKLPKYSLFKLENGRKRLLASARELQKGNEIVLPNHLGTLLYHAKNIHKVDEPKHLDYVDKHKDEFKELLDVVSNFSKKYTLAEGNLEKIKELYAQNNGEDLKELASSFINLLTFTAIGAPATFKFFDKNIDRKRYTSTTEILNATLIHQSITGLYETRIDLSKLGGD

SEQ ID NO: 536 - protein, 1345 aa, Streptococcus mutans; identical to SEQ ID NO: 535
  Streptococcus mutans SM1

SEQ ID NO: 537 - protein, 1345 aa, Streptococcus mutans
  Streptococcus mutans SM4
MKKPYSIGLDIGTNSVGWAVVTDDYKVPAKKMKVLGNTDKSHIKKNLLGALLFDSGNTAEDRRLKRTARRRYTRRRNRILYLQEIFSEEMDKVDDSFFHRLEDSFLVTEDKRGERHPIFGNLEEEVKYHENFPTIYHLRQYLADNPEKVDLRLVYLALAHIIKFRGHFLIEGKFDTRNNDVQRLFQEFLAVYDNTFENSSLQEQNVQVEEILTDKISKSAKKDRVLKLFPNEKSNGRFAEFLKLIVGNQADFKKHFELEEKAPLQFSKDTYEEELEVLLAQIGDNYAELFLSAKKLYDSILLSGILTVTDVSTKAPLSASMIQRYNEHQMDLAQLKQFIRQKLSDKYNEVFSDVSKDGYAGYIDGKTNQEAFYKYLKGLLNKIEGSGYFLDKIEREDFLRKQRTFDNGSIPHQIHLQEMRAIIRRQAEFYPFLADNQDRIEKILTFRIPYYVGPLARGKSDFAWLSRKSADKITPWNFDEIVDKESSAEAFINRMTNYDLYLPNQKVLPKHSLLYEKFTVYNELTKVKYKTEQGKTAFFDANMKQEIFDGVFKVYRKVTKDKLMDFLEKEFDEFRIVDLTGLDKENKVFNASYGTYHDLCKILDKDFLDNSKNEKILEDIVLTLTLFEDREMIRKRLENYSDLLTKEQVKKLERRHYTGWGRLSAELIHGIRNKESRKTILDYLIDDGNSNRNFMQLINDDALSFKEEIAKAQVIGETDNLNQVVSDIAGSPAIKKGILQSLKIVDELVKIMGHQPENIVVEMARENQFTKQGRRNSQQRLKGLTDSIKEFGSQILKEHPVENSQLQNDRLFLYYLQNGRDMYTGEELDIDYLSQYDIDHIIPQAFIKDNSIDNRVLTSSKENRGKSDDVPSKDVVRKMKSYWSKLLSAKLITQRKFDNLTKAERGGLTDDDKAGFIKRQLVETRQITKHVARILDERFYTETDENNKKIRQVKIVTLKSNLVSNFRKEFELYKVREINDYHHAHDAYLNAVIGKALLGVYPQLEPEFVYGDYPHFHGHKENKATAKKFFYSNIMNFFKKDDVRTDKNGEIIWKKDEHISNIKKVLSYPQVNIVKKVEEQTGGFSKESILPKGNSDKLIPRKTKKFYWDTKKYGGFDSPIVAYSILVIADIEKGKSKKLKTVKALVGVTIMEKMTFERDPVAFLERKGYRNVQEENIIKLPKYSLFKLENGRKRLLASARELQKGNEIVLPNHLGTLLYHAKNIHKVDEPKHLDYVDKHKDEFKELLDVVSNFSKKYTLAEGNLEKIKELYAQNNGEDLKELASSFINLLTFTAIGAPATFKFFDKNIDRKRYTSTTEILNATLIHQSITGLYETRIDLSKLGGD

SEQ ID NO: 538 - protein, 1345 aa, Streptococcus mutans; identical to SEQ ID NO: 537
  Streptococcus mutans SM4

SEQ ID NO: 539 - protein, 1345 aa, Streptococcus mutans
  Streptococcus mutans SM6
MKKPYSIGLDIGTNSVGWAVVTDDYKVPAKKMKVLGNTDKSHIKKNLLGALLFDSGNTAEDRRLKRTARRRYTRRRNRILYLQEIFSEEMGKVDDSFFHRLEDSFLVTEDKRGERHPIFGNLEEEVKYHENFPTIYHLRQYLADNPEKTDLRLVYLALAHIIKFGGHFLIEGKFDTRNNDVQRLFQEFLAVYDNTFENSSLQEQNVQVEEILTDKISKSAKKDRVLKLFPNEKSNGRFAEFLKLIVGNQADFKKHFELEEKAPLQFSKDIYEEELEVLLAQIGDNYAELFLSAKKLYDSILLSGILTVTDVSTKAPLSASMIQRYNEHQMDLAQLKQFIRQKLSDKYNEVFSDVSKDGYAGYIDGKTNQEAFYKYLKGLLNKIEGSGYFLDKIEREDFLRKQRTFDNGSIPHQIHLQEMRAIIRRQAEFYPFLADNQDRIEKILTFRIPYYVGPLARGKSDFAWLSRKSADKITPWNFDEIVDKESSVEAFINRMTNYDLYLPNQKVLPKHSLLYEKFTVYNELTKVKYKTEQGKTAFFDANMKQEIFDGVFKVYRKVTKDKLMDFLEKEFDEFRIVDLTGLDKENKAFNASYGTYHDLRKILDKDFLDNSKNEKILEDIVLTLTLFEDREMIRKRLKNYSDLLTKEQLKKLERRHYTGWGRLSAELIHGIRNKESRKTILDYLIDDGNSNRNFMQLINDDALSFKEEIAKAQVIGETDNLNQVVSDIAGSPAIKKGILQSLKIVDELVKIMGHQPENIVVEMARENQFTNQGRRNSQQRLKGLTDSIKEFGSQILKEHPVENSQLQNDRLFLYYLQNGRDMYTGEELDIDYLSQYDIDHIIPQAFIKDNSIDNRVLTSSKENRGKSDDVPSKNVVRKMKSYWSKLLSAKLITQRKFDNLTKAERGGLTDDDKAGFIKRQLVETRQITKHVARILDERFHTETDENNKKIRQVKIVTLKSNLVSNFRKEFELYKVREINDYHHAHDAYLNAVIGKALLGVYPQLEPEFVYGDYPHFHGHKENKATAKKFFYSNIMNFFKKDDVRTDKNGEIIWKKDEHISNIKKVLSYPQVNIVKKVEEQTGGFSKESILPKGNSDKLIPRKTKKFYWDTKKYGGFDSPIVAYSILVIADIEKGKSKKLKTVKALVGVTIMEKMTFERDPVAFLERKGYRNVQEENIIKLPKYSLFKLENGRKRLLASARELQKGNEIVLPNHLGTLLYHAKNIHKVDEPKHLDYVDKHKDEFKELLDVVSNFSKKYTLAEGNLEKIKELYAQNNGEDLKELASSFINLLTFTAIGAPATFKFFDKNIDRKRYTSTTEILNATLIHQSITGLYETRIDLSKLGGD

SEQ ID NO: 540 - protein, 1345 aa, Streptococcus mutans; identical to SEQ ID NO: 539
  Streptococcus mutans SM6

SEQ ID NO: 541 - protein, 1134 aa, Streptococcus mutans
  Streptococcus mutans ST1
MANGKILGLDIGIASVGVGIIDKETGKIIHVNSRIFPAATADSNVERRGFRQGRRLVRRKKHRKVRLADLFLDSNLLTDFSKVSLNLNPYQLRVKGLNEELSNEELFIALKSIVSRRGISYLDDASEDSGANSSEYGKAVEENRKLLEDRTPGQIQLERFEKYGKVRGDFTVVENGENHRLINVFSTSAYKKEAERILRRQQEFNMRIADEFIEAYLTILTGKRKYYHGPGNEKSRTDYGRFRTDGTTLDNIFGILIGKCTFYPDEYRAAKASYTAQEFNLLNDLNNLTVPTETKKLSEEQKRQIIEHAKTVKTLGAPTLLKYIVKLVGCSADDIKGYRIDKSDKPEIHTFEAYRKMRTMELIKVDDLSRESLDALAHILTLNTEREGIEEAIRDRFTNKEFNQEQINELVLFRKNNSSLFGKGWHNFSLKLMKELIPELYETSEEQMTILTRLGKQRVKKSSNRTNYIDEKELTEEIYNPVVAKSVRQAIKIINLATKKYGVFDNIVIEMARESNEDDEKKAIQNAQKANEDEKKAALLKAAHQFNGKEELPDSIFHGHKELLTKIRLWHQQGEKCLYTGKTIFINDLIHNPYKYEIDHILPLSLSFDDSLANKVLVLSTANQEKGQRTPFQSLDSMDGAWTYREFKSYVKGLKTLSNKKKDYLLTEENIDKIEVKQKFIERNLVDTRYSSRVVLNALQDFYKERKFDTKISVVRGQFTSQLRRKWRIEKTRETYHHHAVDALIIAASSQLNLWKKQNNPLISYKEDQFVDPETGEILSLSDDEYKKLVFKAPYEHFVDTLKSKKFEDSILFSYQVDSKYNRKISGATICGTRKAQLGKDTQEETYVLGKIKDIYSQKGYEDFIKKYKKDKTQFLMYHKDPQTFEKVIEEILKTYPDKELNEKGKEVSCNPFEKYRQENGPVRKYSKKGNGPEIKSLKYYDEVLGKNIDITPKNSLNKVVLRSLNPWRTDVYFNHETRKYEFLGLKYSDLRYLKGEHRYGILIGDYKKIKDKEGIEKESEFKFTLYKNDLILIKDTAKGKEELFRFWSRTGKDNAKTFEKNKIELKPYSKSQFEKGEDTNVLGKLYASSNQLQKSFGTLENLSIYKVRTDVLGNKYFIKKEGDKPQLNFKKKL

SEQ ID NO: 542 - protein, 1134 aa, Streptococcus mutans; identical to SEQ ID NO: 541
  Streptococcus mutans ST1

SEQ ID NO: 543 - protein, 1350 aa, Streptococcus mutans
  Streptococcus mutans ST6
MKKPYSIGLDIGTNSVGWAVVTDDYKVPAKKMKVLGNTDKSHIEKNLLGALLFDSGNTAEDRRLKRTARRRYTRRRNRILYLQEIFSEEMGKVDDSFFHRLEDSFLVTEDKRGERHPIFGNLEEEVKYHENFPTIYHLRQYLADNPEKVDLRLVYLALAHIIKFRGHFLIEGKFDTRNNDVQRLFQEFLAVYDNTFENSSLQEQNVQVEEILTDKISKSAKKDRVLKLFPNEKSNGRFAEFLKLIVGNQADFKKHFELEEKAPLQFSKDTYEEELEVLLAQIGDNYAELFLSAKKLYDSILLSGILTVTDVSTKAPLSASMIQRYNEHQMDLTQLKQFIRQKLSDKYNEVFSDVSKDGYAGYIDGKTNQEAFYKYLKGLLNKIEGSGYFLDKIEREDFLRKQRTFDNGSIPHQIHLQEMRAIIRRQAEFYSFLADNQDRIEKILTFRIPYYVGPLARGKSDFAWLSRKSADKITPWNFDEIVDKESSAEAFINRMTNYDLYLPNQKVLPKHSLLYEKFTVYNELTKVKYKTEQGKTAFFDANMKQEIFDGVFKVYRKVTKDKLMDFLEKEFDEFRIVDLTGLDKENKAFNASYGTYHDLRKILDKDFLDNSKNEKILEDIVLTLTLFEDREMIRKRLENYSDLLTKEQVKKLERRHYTGWGRLSAELIHGIRNKESRKTILDYLIDDGNSNRNFMQLINDDALSFKEEIAKAQVIGETDNLNQVVSDIAGSPAIKKGILQSLKIVDELVKIMGHQPENIVVEMARENQFTNQGRRNSQQRLKGLTDSIKEFGSQILKEHPVENSQLQNDRLFLYYLQNGRDMYTGEELDIDYLSQYDIDHIIPQAFIKDNSIDNRVLTSSKENRGKSDDVPSEDVVNRMRPFWNKLLSSGLISQRKYNNLTKKELTLDDKAGFIKRQLVETRQITKHVARMLDERFNKEFDDNNKRIRKVKIVTLKSNLVSSFRKEFELYKVREINDYHHAHDAYLNAVVVKALLVKYSKLEPEFVYGEYPKYNSYRERKTATQKMFFYSNIMNMFKSKVKLADDQIVERPMIEVNDETGEIAWDKTKHITTVKKVLSYPQVNIVKKVEEQTIGQNGGLFDDNPKSPLEVIPSKLVPLKKALNPEKYGGYQKPTTAYPILLIVDTKQLIPISVMDKKRFEQNPVKFLKDKGYQQIEKNNFVKLPKYTLVDIGNGIKRLWASSKEVHKGNQLVVSKKSQDLLYHAHHLDNDYSNEYVKNHYQQFDILFNEITSFSKKCKLGKEHIQKIEEAYSKERDSASIEELADGFIKLLGFTQLGATSPFSFLGIKLNQKQYTGKKDYLLPCMEATLIHQSITGLYETRIDLSKLGGD

SEQ ID NO: 544 - protein, 1350 aa, Streptococcus mutans; identical to SEQ ID NO: 543
  Streptococcus mutans ST6

SEQ ID NO: 545 - protein, 1125 aa, Streptococcus mutans
  Streptococcus mutans U2A
MTNGKILGLDIGIASVGVGIINAKTGNVEHASSRIFPAANADNNVERRSARGGRRLIRRKKHRLKRVEDLFEKYNIDTDFSNLNLNPYQLRVKGLNEQLSNEELFAILKNIAKRRGISYLDDAEDDSVGSSDYAKAIDENRKLLKKQTPGEIQLKRLEKYGQLRGNFTIQDENGEYHRLINVFSTSDYVKEARRILETQSYYNKFITESFVEDYIKILQGKRKYYVGPGNEKSRTDYGIYRTDGETLDNLFGILIGKCGFYPEEYRAAKASYTAQEYNFLNDLNNLTVPTETKKLSTEQKYQLVDFAKTASTLGAAKLLKEIAKLVGCQVEEIKGYRLDNKDKPDLHTFEPFRKLKSNLTTIAVENLSITTLDTLAHILTLNTEREGIEEAIQKELPNIFSDEQITEIIAVRKKNSQIFGKGWHSFSIKLMKELIPELYETSEEQMTILTRLKKVKTNSKITNRTKYINEEEITDEIYNPVVSKSIRQTVKIINATIKKYGAFDQIIIEMPRESNEEDERKFIADLQKSNAKEKDDAMKQAALLYNGKDELPHDVFHGHKELATKIRLWYQQGERCLYSGKHIDIHDLIHNQHMFEIDHVLPLSLSFDDSLANKVLVYSWANQEKGQRTPFQALPQMASAWSFRELRDYISKQKGISKKKRDYLLTEQDINKVEVKQKFIERNLVDTRYVSRVVLNTLQDALKVMNKETKISVIRGQFTSQLRRQWRIDKSRETYHHHAVDALIIAASSQLRLWKKQNNPMFAEDKHGQKINLDTGEVLSDDAYKELVYQAPYQGFVNTISSKSFEDEILFSYQVDSKVNRKISDATIYATRQAQLGKDKKEETYVLGKIKDIYSQAGYDAFRKKYDKDKAVFLMYQKDPETWEKVIEVILRDYKELDDKGKEIGNPFERYKVKHGFVRKYSRKNKGTEIKSLKYYDNKLGNHIDITPNNSKHSVVLQSINPWRADLYFNPETTKYELMGLKYADLSFEKGTGKYSISREKYDEIKEREGISSKSEFKFTLYKNDLILVKDIGNHKELIARFNSKNDTSKHYVELKPWNKAKFDSEEELIPAFGKVAKSGQFIKGLNKPDLSIYKVKTDILGHKYYIKKEGDKPKLNFENKIKNK

SEQ ID NO: 546 - protein, 1125 aa, Streptococcus mutans; identical to SEQ ID NO: 545
  Streptococcus mutans U2A

SEQ ID NO: 547 - protein, 1345 aa, Streptococcus mutans
  Streptococcus mutans UA159
MKKPYSIGLDIGTNSVGWAVVTDDYKVPAKKMKVLGNTDKSHIEKNLLGALLFDSGNTAEDRRLKRTARRRYTRRRNRILYLQEIFSEEMGKVDDSFFHRLEDSFLVTEDKRGERHPIFGNLEEEVKYHENFPTIYHLRQYLADNPEKVDLRLVYLALAHIIKFRGHFLIEGKFDTRNNDVQRLFQEFLAVYDNTFENSSLQEQNVQVEEILTDKISKSAKKDRVLKLFPNEKSNGRFAEFLKLIVGNQADFKKHFELEEKAPLQFSKDTYEEELEVLLAQIGDNYAELFLSAKKLYDSILLSGILTVTDVGTKAPLSASMIQRYNEHQMDLAQLKQFIRQKLSDKYNEVFSDVSKDGYAGYIDGKTNQEAFYKYLKGLLNKIEGSGYFLDKIEREDFLRKQRTFDNGSIPHQIHLQEMRAIIRRQAEFYPFLADNQDRIEKLLTFRIPYYVGPLARGKSDFAWLSRKSADKITPWNFDEIVDKESSAEAFINRMTNYDLYLPNQKVLPKHSLLYEKFTVYNELTKVKYKTEQGKTAFFDANMKQEIFDGVFKVYRKVTKDKLMDFLEKEFDEFRIVDLTGLDKENKVFNASYGTYHDLCKILDKDFLDNSKNEKILEDIVLTLTLFEDREMIRKRLENYSDLLTKEQVKKLERRHYTGWGRLSAELIHGIRNKESRKTILDYLIDDGNSNRNFMQLINDDALSFKEEIAKAQVIGETDNLNQVVSDIAGSPAIKKGILQSLKIVDELVKIMGHQPENIVVEMARENQFTNQGRRNSQQRLKGLTDSIKEFGSQILKEHPVENSQLQNDRLFLYYLQNGRDMYTGEELDIDYLSQYDIDHIIPQAFIKDNSIDNRVLTSSKENRGKSDDVPSKDVVRKMKSYWSKLLSAKLITQRKFDNLTKAERGGLTDDDKAGFIKRQLVETRQITKHVARILDERFNTETDENNKKIRQVKIVTLKSNLVSNFRKEFELYKVREINDYHHAHDAYLNAVIGKALLGVYPQLEPEFVYGDYPHFHGHKENKATAKKFFYSNIMNFFKKDDVRTDKNGEIIWKKDEHISNIKKVLSYPQVNIVKKVEEQTGGFSKESILPKGNSDKLIPRKTKKFYWDTKKYGGFDSPIVAYSILVIADIEKGKSKKLKTVKALVGVTIMEKMTFERDPVAFLERKGYRNVQEENIIKLPKYSLFKLENGRKRLLASARELQKGNEIVLPNHLGTLLYHAKNIHKVDEPKHLDYVDKHKDEFKELLDVVSNFSKKYTLAEGNLEKIKELYAQNNGEDLKELASSFINLLTFTAIGAPATFKFFDKNIDRKRYTSTTEILNATLIHQSITGLYETRIDLNKLGGD

SEQ ID NO: 548 - protein, 1345 aa, Streptococcus mutans; identical to SEQ ID NO: 472
  Streptococcus mutans W6

SEQ ID NO: 549 - protein, 1121 aa, Streptococcus oralis
  Streptococcus oralis SK1074
MNGLVLGLDIGIASVGVGILEKNSGKIIHANSRLFPAATADNNVERRKNRQARRLNRRKKHRGVRFQDLFEDYGLLTDFSKVSINLNPYRLRVDGLNQQLTNEELFIALKNIVKRRGISYLDDASEDGGAVSSDYGKAVEENRKLLAEQTPGQIQLERFEKYGQVRGDFTVVENGEKCRLINVFSTSAYRKEAEKILRKQQEFNNQITDEFIEDYLKILTGKRKYYHGPGNEKSRTDYGRFRTDGTTLDNIFGVLIGKCTFYPNEYRASKSSYTAQEFNLLNDLNNLTVPTETKKLSEEQKKVIVEYAKEAKTLGASTLLKYIVKMIDASVDQISGYRVDVNNKPEMHTFEVYRKMQSLETISVGELSRNVLDELAHILTLNTEREGIEEAINSKLMGVFSQDQVLELVQFRKNNSSLFSKGWHNFSLKLMMELIPELYETSEEQMTILTRLGKQKSKETSKRTKYIDEKELTEEIYNPVVAKSVRQAIKIINEATKKHGIFDNIVIEMARENNEEDAKKDYIKRQKANQDEKNAAMEKAAFQYNGKKELPGNIFNGHKELATKIRLWHQQGEKCLYTGKTIPISDLIHNQYKYEIDHILPLSLSFDDSLSNKVLVHATANQEKGQRTPFQALDSMDDAWSYREFKSYVKDLKSLSNKKKDYLLTEEDISKIEVKQKFIERNLVDTRYSSRVVLNALQDFYKSHQFDTTISVVRGQFTSQLRRKWGLEKSRETYHHHAVDALIIAASSQLRLWKKQNNPLITYKEGQFVDSQTGEIISLTDDEYKELVFKAPYDHFVDTLHSKTFEDGILFSYQVDSKYNRKISDATIYATRKAKLDKDKSEETYVLGKIKDIYSQAGYDAFIKIYNKDKRKFLMYHKDPQTFEKVIEEILRTYPSKERNDKNKEVPCNPFEKYRQENGPIRKYSKKGNGPEIKCLKYYDNKLGNYIDISPDGSDNQVVLQSLKPWRTDVYFNHQTKEYELMGLKYSDLSFEKGSGKYSISNEKYNSIKRIEGVNEQSEFKFTLYKNDLILIKDSENNEQKLFRFNSRNDTAKHYVELKPYDKARFDGQQELITILGNVAKGGQCLKGLNKSNISIFKVKTDVLGKKHIIKKEGDEPKLKF

SEQ ID NO: 550 - protein, 1373 aa, Streptococcus oralis
  Streptococcus oralis SK304
MENKNYSIGLDIGTNSVGWAVITDDYKVPSKKMKVLGNTDKRFIKKNLIGALLFDEGTTAEARRLKRTARRRYTRRKNRLRYLQEIFAEEMSKVDSSFFHRLDDSFLIPEDKKGSKYPIFATLIEEKEYHKQFPTIYHLRKQLADSKEKTDLRLIYLALAHMIKYRGHFLYEDTFDIKNNDIQKIFNEFISIYNNTFEGNSLSGQNVQVEAIFTDKISKSAKRERVLKLFPDEKSTGLFSEFLKLIVGNQADFKKHFDLEEKAPLQFSRDTYDEDLENLLGQIGDDFADLFVAAKKLYDAILLSGILTVTDPSTKAPLSASMIERYENHQKDLATLKQFIKTNLPEKYDEVFSDQSKDGYAGYIDGKTTQESFYKYIKNLLSKFEGADYFLEKIEREDFLRKQRTFDNGSIPHQIHLQEMNAILRRQGEHYPFLKENKEKIEKILTFRIPYYVGPLARGNRDFAWLTRNSDQAIRPWNFEEIVDKASSAESFINKMTNYDLYLPEEKVLPKHSLLYETFAVYNELTKVKFIAEGLRDYQFLDSRQKKDIFYTLFKAEDKRKVTEKDIIQYLHTVDGYDGIELKGIEKQFNASLSTYHDLLKIIKDKEFMDDPNNEEILENIVHTLTIFEDREMIKQRLAQYDSLFDEKVIKALTRRHYTGWGKLSSKLINGIRDKQTGKTILDYLMDDGYNNRNFMQLINDDELSFKEIIKKAQVVGKTDDVKQVVQELPGSPAIKKGILQSIKLVDELVKVMGHEPESIVIEMARENQTTARGKKNSQQRYKRIEDSLKILASGLNAKILKEHPTDNIQLQNDRLFLYYLQNGRDMYTGKPLDINQLSSYDIDHIVPQAFIKDDSLDNRVLTSLKDNRGKSDNVPSLEVVEKMKTFWQQLLDSKLISYRKFNNLTKAERGGLDERDKVGFIKRQLVETRQITKHVAQILDARYNTEVNEKDKKNRTVKIITLKSNLVSNFRKEFRLYKIREINDYHHAHDAYLNAVVAKAILKKYPKLEPEFVYGDYQKYDLKRYISRSKDPKEIEKATEKYFFYSNLLNFFKEEVHYADGTIVKRENIEYSKDTGEIAWNKEKDFATIKKVLSLPQVNIVKKREVQTGGFSKESILPKGNSDKLIPRKTKDILWDTTKYGGFDSPVIAYSILLIADIEKGKAKRLKTVKTLVGITIMEKATFEKSPIAFLENKGYHNVRKENILCLPKYSLFELKNGRRRMLASAKELQKGNEIVLPVHLTTLLYHAKNIHRLDEPEHLEYIQKHRNEFKGLLNLVSEFSQKYVLADANLEKIKNLYADNEQADIEILANSFINLLTFTALGAPAAFKFFGKDVDRKRYTTVSEILNATLIHQSITGLYETRIDLSKLGED

SEQ ID NO: 551 - protein, 1134 aa, Streptococcus oralis
  Streptococcus oralis SK313
MNGLVLGLDIGIASVGVGILEKNSGKIVHASSRIFPAATADNNVERRKNRQARRLHRRKKHRGARLKDLFEYYGLLTDFSKVSINLNPYRLRVDGLDQQLTNEELFIALKNIVKRRGISYLDDASEDGGTVSSDYGKAVEENRKLLAEQTPGQIQLERFEKYGQLRGDFTVVENSEKCRLINVFSTSAYKKEAERILRKQQEFNNQITDEFIEDYLKILTGKRKYYHGPGNEKSRTDYGRFRTDGATLDNIFGILIGKCTFYPNEYRASKASYTAQEFNLLNDLNNLTVPTETKKLSEEQKKTIIEYAKSAKTLGASTLLKYIAKMIDASVDQIRGYRVDVNNKPEMHTFEVYRKMQSLETISVGELSRNILDELAHILTLNTEREGIEEAINTKLRDSFSQDQVLELVQFRKNNSSLFSKGWHNFSLKLMMELIPELYETSEEQMTILTRLGKQKSKETSKRTKYIDEKEVTEEIYNPVVAKSVRQAIKIINEATKKHGIFDNIVIEMARENNEEDAKKDYIKRQKANQDEKYAAMEKAAFQYNGKKELPDNIFHGHKELATKIRLWHQQGEKCLYTGKSIPISDLIHNQYKYEIDHILPLSLSFDDSLSNKVLVLATANQEKGQRTPFQALDSMDDAWSYREFKSYVKESKLLGNKKKEYLLTEEDISKIEVKQKFIERNLVDTRYSSRVVLNALQDFYKNHNFDTTISVVRGQFTSQLRRKWGLEKSRETYHHHAVDALIIAASSQLRLWKKQNNPLIAYKEGQFVDSQTGEIISLTDDEYKELVFKAPYDHFVDTLSSKTFEDSILFSYQVDSKFNRKISDATIYATRKAKLDKEKKEYTYTLGKIKDIYSLGTKTPSKTGFYKFLDLYNKDKSQFLMFQKDRKTWDEVIEKIMEQYRPFKEYDKAGKLVDFNPFEKYRQENGPIRKYSKKGNGPEIKSLKYYDILLGKHKNITPEGSRNTVALLSLNPWRTDVYYNMETKKYEFLGLKYADLPFEEGGAYGISTETYNELREKEGIGKNSEFKFTLYKNDLILIKDTETNCQQFFRFWSRTGKDNPKSFEKHKIELKPYEKAKFEKGEELEVLGKVPPSSNQFQKNMQIENLSIYKVKTDVLGNKHFIKKEGDKPKLKF

SEQ ID NO: 552 - protein, 1371 aa, Streptococcus oralis
  Streptococcus oralis SK610
MENKNYSIGLDIGTNSVGWSVITDDYKVPSKKMKVLGNTDKRFIKKNLIGALLFDEGTTAEARRLKRTARRRYTRRKNRLRYLQEIFAEEMSKVDSSFFHRLDDSFLIPEDKRGSKYPIFATLAEEKEYHKQFPTIYHLRKQLADSKEKTDLRLIYLALAHMIKYRGHFLYEDTFDIKNNDIQKIFSEFISIYDNTFEGSSLSGQNAQVEAIFTDKISKSAKRERVLKLFPDEKSTGLFSEFLKLIVGNQADFKKHFDLGEKAPLQFSKDTYDEDLENLLGQIGDDFADLFLVAKKLYDAILLSGILTVTDPSTKAPLSASMIERYENHQKDLAVLKQFIKNNLPEKYDEVFSDQSKDGYAGYIDGKTTQEAFYKYIKNLLSKFEGTDYFLEKIEREDFLRKQRTFDNGSIPHQIHLQEMNAILRRQGEHYPFLKDNKEKIEKILTFRIPYYVGPLARGNRDFAWLTRNSDEAIRPWNFEEIVDKASSAEDFINKMTNYDLYLPEEKVLPKHSLLYETFAVYNELTKVKFIAEGLRDYQFLDSGQKKQIVTQLFKEKRKVTEKDIIQFLHNVDGYDGIELKGIEKQFNASLSTYHDLLKIIKDKEFMDDSKNEEILENIVHTLTIFEDREMIKQRLAQYDSLFDEKVIKALIRRHYTGWGKLSAKLIDGICDKQTGNTILDYLIDDGKNNRNFMQLINDDGLSFKEITQKAQVVGKTDDVKQVVQELPGSPAIKKGILQSIKIVDELVKVMGHTPESIVIEMARENQTTARGKKNSQQRYKRIEDALKNLASGLDSNILKEHPTNNIQLQNDRLFLYYLQNGRDMYTGKPLDINQLSSYDIDHIVPQAFIKDDSLDNRVLTSLKDNRGKSDNVPSIEVVQKRKAFWQQLLDSKLISERKFNNLTKAERGGLDERDKVGFIKRQLVETRQITKHVAQILDARFNKEVNEKDKKNRTVKIITLKSNLVSNFRKEFRLYKVREINDYHHAHDAYLNAVVAKAILKKYPKLEPEFVYGDYQKYDLKRYISRSRNPKEVEKATEKYFFYSNLLNFFKEEVHYADGTIVKRENIEYSKDTGEIAWNKEKDFATIKKVLSYPQVNIVKKREVQTGGFSKESILPKGNSDKLIPRKTKDILWETTKYGGFDSPVIAYSILLIADIEKGKAKKLKTVKTLVGITIMEKAAFEENPITFLENKGYHNVRKENILCLPKYSLFELENGRRRLLASAKELQKGNEIVLPVYLTTLLYHSKNVHKLDEPEHLEYIQKHRNEFKDLLNLVSEFSQKYVLADANLEKIQNLYADNEQADIEILANSFINLLTFTALGAPAAFKFFGKDIDRKRYTTVSEILNATLIHQSITGLYETRIDLSKLGED

SEQ ID NO: 553 - protein, 1140 aa, Streptococcus parasanguinis
  Streptococcus parasanguinis F0449
MNGLVLGLDIGIASVGVGILKKDIGEIIHTNSRLFSAATADSNIERRGHRGGKRLTRRKKHRSIRLHDLFEDFGLLTDFSKVSINLNPYQLRVQGLDNQLTNEELFIALKNIVKRRGISYLDDASEDGGTVSSDYGKAVEENRKLLAEQTPGQIQLDRFEKYGQVRGDFNVVENGEKRRLINVFTTSAYSKEAERILRKQQEFNKKITDEFIEDYLTILTGKRKYYHGPGNEKSRTDYGRYTTKKDPEGKYITLDNIFGILIGKCTFYPDEYRASKASYTAQEFNLLNDLNNLTVPTETKKLSEEQKKTIIKYAKTAKTLGASTLLKYIAKLIGASVDQIHGYRIDPNKKPEMHTFETYRKMQSLETISVEELPRKVLDELAHILTLNTEREGIEEAINATLKDTFSQDQVLELVQFRKNNSSLFSKGWHSFSLKLMMELIPELYETSEEQMTILTRLGKQKSKETSKRTKYIDEKELTEEIYNPVVAKSVRQAIKIINEATKKYGIFDNIVIEMARENNEEDAKKEYIKRQKANLDEKNAAMEKAAFQYNGKKELPDNVFHGHKELATKIRLWHQQGEKCLYTGKNIPISDLIQNQYKYEIDHILPLSLSFDDSLSNKVLVLATANQEKGQRTPFQALDSMDDAWSYREFKSYVKDSKLLGNKKKEYLLTEEDISKIEVKQKFIERNLVDTRYSSRVVLNALQDFYKEHQFDTTISVVRGQFTSQLRRKWGLEKSRETYHHHAVDALIIAASSQLRLWKKQNNPLISYTEGQFVDQVTGEIISLSDDEYKELVFKAPYDHFVDTLKSKKFEDSILFSYQVDSKYNRKISDATIYATRKAKLDKENKEYTYTLGKIKDIYALGTKSPSKTGFYKFLDLYNKDKSQFLMFQKDRKTWDEVIEKIIEQYRPFKEYDENGKEVDFNPFEKYRIENGPIRKYSKKGNGPEIKSLKYYDNLLGKFVDITPSESKNPVALLSLNPWRTDVYYNTETSKYEFLGLKYADLCFEKGGAYGISEVKYNKIREKEGIGKESEFKFTLYKNDLILIKDTETNCQQIFRFWSRTGKDNPKSFEKHKIELKPYEKARFEKGEELEVLGKVPPSSNQLQKNMQIENLSIYKVKTDVLGNKHFIKKEGEEPKLKF

SEQ ID NO: 554 - protein, 1130 aa, Streptococcus pasteurianus
MTNGKILGLDIGIASVGVGIIEAKTGKVVHANSRLFSAANAENNAERRGFRGSRRLNRRKKHRVKRVRDLFEKYGIVTDFRNLNLNPYELRVKGLTEQLKNEELFAALRTISKRRGISYLDDAEDDSTGSTDYAKSIDENRRLLKNKTPGQIQLERLEKYGQLRGNFTVYDENGEAHRLINVFSTSDYEKEARKILETQADYNKKITAEFIDDYVEILTQKRKYYHGPGNEKSRTDYGRFRTDGTTLENIFGILIGKCNFYPDEYRASKASYTAQEYNFLNDLNNLKVSTETGKLSTEQKESLVEFAKNTATLGPAKLLKEIAKILDCKVDEIKGYREDDKGKPDLHTFEPYRKLKFNLESINIDDLSREVIDKLADILTLNTEREGIEDAIKRNLPNQFTEEQISEIIKVRKSQSTAFNKGWHSFSAKLMNELIPELYATSDEQMTILTRLEKFKVNKKSSKNTKTIDEKEVTDEIYNPVVAKSVRQTIKIINAAVKKYGDFDKIVIEMPRDKNADDEKKFIDKRNKENKKEKDDALKRAAYLYNSSDKLPDEVFHGNKQLETKIRLWYQQGERCLYSGKPISIQELVHNSNNFEIDHILPLSLSFDDSLANKVLVYAWTNQEKGQKTPYQVIDSMDAAWSFREMKDYVLKQKGLGKKKRDYLLTTENIDKIEVKKKFIERNLVDTRYASRVVLNSLQSALRELGKDTKVSVVRGQFTSQLRRKWKIDKSRETYHHHAVDALIIAASSQLKLWEKQDNPMFVDYGKNQVVDKQTGEILSVSDDEYKELVFQPPYQGFVNTISSKGFEDEILFSYQVDSKYNRKVSDATIYSTRKAKIGKDKKEETYVLGKIKDIYSQNGFDTFIKKYNKDKTQFLMYQKDSLTWENVIEVILRDYPTTKKSEDGKNDVKCNPFEEYRRENGLICKYSKKGKGTPIKSLKYYDKKLGNCIDITPEESRNKVILQSINPWRADVYFNPETLKYELMGLKYSDLSFEKGTGNYHISQEKYDAIKEKEGIGKKSEFKFTLYRNDLILIKDIASGEQEIYRFLSRTMPNVNHYVELKPYDKEKFDNVQELVEALGEADKVGRCIKGLNKPNISIYKVRTDVLGNKYFVKKKGDKPKLDFKNNKK

SEQ ID NO: 555 - protein, 1374 aa, Streptococcus pseudoporcinus
  Streptococcus pseudoporcinus LQ 940-04
MKKRYSYSIGLDIGTNSVGWAVINEDYKVPAKKMTVFGNTDRKTIKKNLLGTVLFDSGETAQARRLKRTNRRRYTRRRYRLCQLQNIFATEMVKVDDTFFQRLSESFFYYQDKAFDKHPIFGNSKEERAYHKTYPTIYHLRKDLADRDQKADLRLIYLALSHIIKFRGHFLIEGKLNSENTDVQKLFIALVTVYNLLFEEEPIAGETCDAKALLTAKTSKSKRLESLISEFPGQKKNGLFGNLLALALGLRPNFKSNFGLSEDAKLQITKDTYEEELDNLLAEIGDHYADLFLAAKNLSDAILLSDILTLSDENTRAPLSASMIKRYEEHQEDLALLKKLVKEQMPEKYWEIFSNAKKNGYAGYIEGKVSQEDFYRYIKPILSRLKGGDEFLAKIDRDDFLRKQRTFDNGSIPHQIHLKELHAILRRQEKYYPFLAEQKEKIEQLLCFRIPYYVGPLAKGGNSSFAWLKRRSDEPITPWNFKDVVDEEASAQAFIEGMTNYDTYLPEEKVLPKHSPLYEMFTVYNELTKVKYIAENMTKPLYLSAEQKEAIIDHLFKQTRKVTVKDLKEKYFSQIEGLENVDVTGVEGAFNASLGTYNDLLKIIKDKAFLDDEANAEILEEIVLILTLFQDEKLIEKRLAKYANLFEKSVLKKLRKRHYRGWGRLSRQLIDGMKDKASGKTILDFLKADDFANRNFIQLINDSSLDFEKLIDDAQKKAIKRESLTEAVANLAGSPAIKKGILQSLKVVDEIVKVMGHNPDNIVIEMSRENQTTAQGLKNARQRLKKIKEVHKKTGSRILEDNSERITNLTLQDNRLYLYLLQDGKDMYTGQDLDINNLSQYDIDHIIPQSFIKDNSIDNLVLTTQKANRGKSDNVPSIEVVRDMKDRVWRRQLANGAISRQKFDHLTKAERGGLADSDKARFLRRQLVETRQITKHVAQLLDSRFNSKSNQNKKLARNVKIITLKSKIVSDFRKDFGLYKLREVNNYHHAHDAYLNAVVGTALLKKYPKLEAEFVYGDYKHFDLVKLISKSDPSLGKATAKVFFYSNIMNFFKEELSLADGTLMKRPVIETNTETGEVVWDKVKDFKTIRKVLSYPQVNIVKKTEIQSGAFSKESVLSKGNSDKLIERKKGWDPKKYGGFDSPNTAYSIFVVAKVAKRKAQKLKTVKEIVGITIMEQAEYEKDNIAFLEKKGYQDIQEKLLIKLPKYSLFELENGRRRLLASANEFQKGNELALSGKYMKFLYLASRYDKLSSKIESEQQKKLFVEQHLHYFDEILDIVVKHATCYIKAENNLKKIISLYKKKEAYSINEQALNMLNLFIFTSLGAPSTFVFFDETIDRKRYTTSSDVLNGILIQQSITGLYETRIDLSRFGGD

SEQ ID NO: 556 - protein, 1368 aa, Streptococcus pyogenes
  Streptococcus pyogenes MGAS10270
MDKKYSIGLDIGTNSVGWAVITDDYKVPSKKFKVLGNTDRHSIKKNLIGALLFDSGETAEATRLKRTARRRYTRRKNRICYLQEIFSNEMAKVDDSFFHRLEESFLVEEDKKHERHPIFGNIVDEVAYHEKYPTIYHLRKKLVDSTDKADLRLIYLALAHMIKFRGHFLIEGDLNPDNSDVDKLFIQLVQTYNQLFEENPINASGVDAKAILSARLSKSRRLENLIAQLPGEKKNGLFGNLIALSLGLTPNFKSNFDLAEDAKLQLSKDTYDDDLDNLLAQIGDQYADLFLAAKNLSDAILLSDILRLNSEITKAPLSASMIKRYDEHHQDLTLLKALVRQQLPEKYKEIFFDQSKNGYAGYIDGGASQEEFYKFIKPILEKMDGTEELLAKLNREDLLRKQRTFDNGSIPHQIHLGELHAILRRQEDFYPFLKDNREKIEKILTFRIPYYVGPLARGNSRFAWMTRKSEETITPWNFEEVVDKGASAQSFIERMTNFDKNLPNEKVLPKHSLLYEYFTVYNELTKVKYVTEGMRKPAFLSGEQKKAIVDLLFKTNRKVTVKQLKEDYFKKIECFDSVEISGVEDRFNASLGTYHDLLKIIKDKDFLDNEENEDILEDIVLTLTLFEDREMIEERLKTYAHLFDDKVMKQLKRRRYTGWGRLSRKLINGIRDKQSGKTILDFLKSDGFANRNFMQLIHDDSLTFKEDIQKAQVSGQGDSLHEHIANLAGSPAIKKGILQTVKVVDELVKVMGRHKPENIVIEMARENQTTQKGQKNSRERMKRIEEGIKELGSQILKEHPVENTQLQNEKLYLYYLQNGRDMYVDQELDINRLSDYDVDHIVPQSFIKDDSIDNKVLTRSDKNRGKSDNVPSEEVVKKMKNYWRQLLNAKLITQRKFDNLTKAERGGLSELDKAGFIKRQLVETRQITKHVAQILDSRMNTKYDENDKLIREVKVITLKSKLVSDFRKDFQFYKVREINNYHHAHDAYLNAVVGTALIKKYPKLESEFVYGDYKVYDVRKMIAKSEQEIGKATAKYFFYSNIMNFFKTEITLANGEIRKRPLIETNGETGEIVWDKGRDFATVRKVLSMPQVNIVKKTEVQTGGFSKESILPKRNSDKLIARKKDWDPKKYGGFDSPTVAYSVLVVAKVEKGKSKKLKSVKELLGLTIMERSSFEKNPIDFLEAKGYKEVKKDLIIKLPKYSLFELENGRKRMLASAGELQKGNELALPSKYVNFLYLASHYEKLKGSPEDNEQKQLFVEQHKHYLDEIIEQISEFSKRVILADANLDKVLSAYNKHRDKPIREQAENIIHLFTLTNLGAPAAFKYFDTTIDRKRYTSTKEVLDATLIHQSITGLYETRIDLSQLGGD

SEQ ID NO: 557 - protein, 1371 aa, Streptococcus pyogenes
MDKKYSIGLDIGTNSVGWAVITDDYKVPSKKFKVLGNTDRHSIKKNLIGALLFDSGETAEATRLKRTARRRYTRRKNRICYLQEIFSNEMAKVDDSFFHRLEESFLVEEDKKHERHPIFGNIVDEVAYHEKYPTIYHLRKKLADSTDKADLRLIYLALAHMIKFRGHFLIEGDLNPDNSDVDKLFIQLVQTYNQLFEENPINASRVDAKAILSARLSKSRRLENLIAQLPGEKKNGLFGNLIALSLGLTPNFKSNFDLAEDAKLQLSKDTYDDDLDNLLAQIGDQYADLFLAAKNLSDATLLSDILRVNSEITKAPLSASMIKRYDEHHQDLTLLKALVRQQLPEKYKEIFFDQSKNGYAGYIDGGASQEEFYKFIKPILEKMDGTEELLAKLNREDLLRKQRTFDNGSIPHQIHLGELHAILRRQEDFYPFLKDNREKIEKILTFRIPYYVGPLARGNSRFAWMTRKSEETITPWNFEEVVDKGASAQSFIERMTNFDKNLPNEKVLPKHSLLYEYFTVYNELTKVKYVTEGMRKPAFLSGEQKKAIVDLLFKTNRKVTVKQLKEDYFKKIECFDSVEISGVEDRFNASLGTYHDLLKIIKDKDFLDNEENEDILEDIVLTLTLFEDKEMIEERLKTYAHLFDDKVMKQLKRRHYTGWGRLSRKLINGIRDKQSGKTILDFLKSDGFANRNFIQLIHDDSLTFKEAIQKAQVSGQGHSLHEQIANLAGSPAIKKGILQSVKVVDELVKVMGHKPENIVIEMARENQTTQKGQKNSRERMKRIEEGIKELGSQILKEHPVENTQLQNEKLYLYYLQNGRDMYVDQELDINRLSDYDVDHIVPQSFIKDDSIDNKVLTRSDKNRGKSDDVPSEEVVKKMKNYWRQLLNAKLITQRKFDNLTKAERGGLSELDKAGFIKRQLVETRQITKHVAQILDSRMNTKYDENDKLIREVKVITLKSKLVSDFRKDFQFYKVREINNYHHAHDAYLNAVVGTALIKKYPKLESEFVYGDYKVYDVRKMIAKSEQEIGKATAKRFFYSNIMNFFKTEITLANGEIRKRPLIETNEETGEIVWDKGRDFATVRKVLSMPQVNIVKKTEVQTGALTNESIYARGSFDKLISRKHRFESSKYGGFGSPTVTYSVLVVAKSKVQDGKVKKIKTGKELIGITLLDKLVFEKNPLKFIEDKGYGNVQIDKCIKLPKYSLFEFENGTRRMLASVMANNNSRGDLQKANEMFLPAKLVTLLYHAHKIESSKELEHEAYILDHYNDLYQLLSYIERFASLYVDVEKNISKVKELFSNIESYSISEICSSVINLLTLTASGAPADFKFLGTTIPRKRYGSPQSILSSTLIHQSITGLYETRIDLSQLGSD

SEQ ID NO: 558 - protein, 1367 aa, Streptococcus pyogenes
MDKKYSIGLDIGTNSVGWAVITDDYKVPSKKFKVLGNTDRHSIKKNLIGALLFGSGETAEATRLKRTARRRYTRRKNRICYLQEIFSNEMAKVDDSFFHRLEESFLVEEDKKHERHPIFGNIVDEVAYHEKYPTIYHLRKKLADSTDKADLRLIYLALAHMIKFRGHFLIEGDLNPDNSDVDKLFIQLVQIYNQLFEENPINASRVDAKAILSARLSKSRRLENLIAQLPGEKRNGLFGNLIALSLGLTPNFKSNFDLAEDAKLQLSKDTYDDDLDNLLAQIGDQYADLFLAAKNLSDAILLSDILRVNSEITKAPLSASMIKRYDEHHQDLTLLKALVRQQLPEKYKEIFFDQSKNGYAGYIDGGASQEEFYKFIKPILEKMDGTEELLVKLNREDLLRKQRTFDNGSIPHQIHLGELHAILRRQEDFYPFLKDNREKIEKILTFRIPYYVGPLARGNSRFAWMTRKSEETITPWNFEEVVDKGASAQSFIERMTNFDKNLPNEKVLPKHSLLYEYFTVYNELTKVKYVTEGMRKPAFLSGEQKKAIVDLLFKTNRKVTVKQLKEDYFKKIECFDSVEISGVEDRFNASLGAYHDLLKIIKDKDFLDNEENEDILEDIVLTLTLFEDRGMIEERLKTYAHLFDDKVMKQLKRRRYTGWGRLSRKLINGIRDKQSGKTILDFLKSDGFANRNFMQLIHDDSLTFKEDIQKAQVSGQGHSLHEQIANLAGSPAIKKGILQTVKIVDELVKVMGHKPENIVIEMARENQTTQKGQKNSRERMKRIEEGIKELGSQILKEHPVENTQLQNEKLYLYYLQNGRDMYVDQELDINRLSDYDVDHIVPQSFIKDDSIDNKVLTRSDKNRGKSDNVPSEEVVKKMKNYWRQLLNAKLITQRKFDNLTKAERGGLSELDKAGFIKRQLVETRQITKHVAQILDSRMNTKYDENDKLIREVKVITLKSKLVSDFRKDFQFYKVREINNYHHAHDAYLNAVVGTALIKKYPKLESEFVYGDYKVYDVRKMIAKSEQEIGKATAKYFFYSNIMNFFKTEITLANGEIRKRPLIETNGETGEIVWDKGRDFATVRKVLSMPQVNIVKKTEVQTGGFSKESILPKRNSDKLIARKKDWDPKKYGGFDSPTVAYSVLVVAKVEKGKSKKLKSVKELLGITIMERSSFEKNPIDFLEAKGYKEVKKDLIIKLPKYSLFELENGRKRMLASAGELQKGNELALPSKYVNFLYLASHYEKLKGSPEDNEQKQLFVEQHKHYLDEIIEQISEFSKRVILADANLDKVLSAYNKHRDKPIREQAENIIHLFTLTNLGAPAAFKYFDTTIDRKRYTSTKEVLDATLIHQSITGLYETRIDLSQLGGD

SEQ ID NO: 559 - protein, 1368 aa, Streptococcus sp.
MDKKYSIGLDIGTNSVGWAVITDDYKVPSKKFKVLGNTDRHSIKKNLIGALLFDSGEIAEATRLKRTARRRYTRRKNRICYLQEIFSNEMAKVDDSFFHRLEESFLVEEDKKHERHPIFGNIVDEVAYHEKYPTIYHLRKKLVDSTDKADLRLIYLALAHMIKFRGHFLIEGDLNPDNSDVDKLFIQLVQTYNQLFEENPINASGVDAKAILSARLSKSRRLENLIAQLPGEKKNGLFGNLIALSLGLTPNFKSNFDLAEDAKLQLSKDTYDDDLDNLLAQIGDQYADLFLAAKNLSDAILLSDILRLNSEITKAPLSASMIKRYDEHHQDLTLLKALVRQQLPEKYKEIFFDQSKNGYAGYIDGGASQEEFYKFIKPILEKMDGTEELLAKLNREDLLRKQRTFDNGSIPHQIHLGELHAILRRQEDFYPFLKDNREKIEKILTFRIPYYVGPLARGNSRFAWMTRKSEETITPWNFEEVVDKGASAQSFIERMTNFDKNLPNEKVLPKHSLLYEYFTVYNELTKVKYVTEGMRKPAFLSGEQKKAIVDLLFKTNRKVTVKQLKEDYFKKIECFDSVEISGVEDRFNASLGTYHDLLKIIKDKDFLDNEENEDILEDIVLTLTLFEDREMIEERLKTYAHLFDDKVMKQLKRRRYTGWGRLSRKLINGIRDKQSGKTILDFLKSDGFANRNFMQLIHDDSLTFKEDIQKAQVSGQGDSLHEHIANLAGSPAIKKGILQTVKVVDELVKVMGRHKPENIVIEMARENQTTQKGQKNSRERMKRIEEGIKELGSQILKEHPVENTQLQNEKLYLYYLQNGRDMYVDQELDINRLSDYDVDHIVPQSFIKDDSIDNKVLTRSDKNRGKSDNVPSEEVVKKMKNYWRQLLNAKLITQRKFDNLTKAERGGLSELDKAGFIKRQLVETRQITKHVAQILDSRMNTKYDENDKLIREVKVITLKSKLVSDFRKDFQFYKVREINNYHHAHDAYLNAVVGTALIKKYPKLESEFVYGDYKVYDVRKMLAKSEQEIGKATAKYFFYSNIMNFFKTEITLANGEIRKRPLIETNGETGEIVWDKGRDFATVRKVLSMPQVNIVKKTEVQTGGFSKESILPKRNSDKLIARKKDWDPKKYGGFDSPTVAYSVLVVAKVEKGKSKKLKSVKELLGITIMERSSFEKNPIDFLEAKGYKEVRKDLIIKLPKYSLFELENGRKRMLASAGELQKGNELALPSKYVNFLYLASHYEKLKGSPEDNEQKQLFVEQHKHYLDEIIEQISEFSKRVILADANLDKVLSAYNKHRDKPIREQAENIIHLFTLTNLGAPTAFKYFDTTIDRKRYTSTKEVLDATFIHQSITGLYETRIDLSQLGGD

SEQ ID NO: 560 - protein, 1368 aa, Streptococcus pyogenes
MDKKYSIGLDIGTNSVGWAVITDDYKVPSKKLKGLGNTDRHGIKKNLIGALLFDSGETAEATRLKRTARRRYTRRKNRICYLQEIFSNEMAKVDDSFFHRLEESFLVEEDKKHERHPIFGNIVDEVAYHEKYPTIYHLRKKLADSTDKVDLRLIYLALAHMIKFRGHFLIEGDLNPDNSDVDKLFIQLVQTYNQLFEENPINASRVDAKAILSARLSKSRRLENLIAQLPGEKKNGLFGNLIALSLGLTPNFKSNFDLAEDAKLQLSKDTYDDDLDNLLAQIGDQYADLFLAAKNLSDATLLSDILRVNSEITKAPLSASMIKRYDEHHQDLTLLKALVRQQLPEKYKEIFFDQSKNGYAGYIDGGASQEEFYKFIKPILEKMDGTEELLAKLNREDLLRKQRTFDNGSIPYQIHLGELHAILRRQEDFYPFLKDNREKIEKILTFRIPYYVGPLARGNSRFAWMTRKSEETITPWNFEEVVDKGASAQSFIERMTNFDKNLPNEKVLPKHSLLYEYFTVYNELTKVKYVTEGMRKPAFLSGEQKKAIVDLLFKTNRKVTVKQLKEDYFKKIECFDSVEISGVEDRFNASLGTYHDLLKIIKDKDFLDNEENEDILEDIVLTLTLFEDREMIEERLKTYAHLFDDKVMKQLKRRRYTGWGRLSRKLINGIRDKQSGKTILDFLKSDGFANRNFMQLIHDDSLTFKEDIQKAQVSGQGDSLHEHIANLAGSPAIKKGILQTVKVVDELVKVMGRHKPENIVIEMARENQTTQKGQKNSRERMKRIEEGIKELGSDILKEYPVENTQLQNEKLYLYYLQNGRDMYVDQELDINRLSDYDVDHIVPQSFLKDDSIDNKVLTRSDKNRGKSDNVPSEEVVKKMKNYWRQLLNAKLITQRKFDNLTKAERGGLSELDKVGFIKRQLVETRQITKHVAQILDSRMNTKYDENDKLIREVRVITLKSKLVSDFRKDFQFYKVREINNYHHAHDAYLNAVVGTALIKKYPKLESEFVYGDYKVYDVRKMIAKSEQEIGKATAKYFFYSNIMNFFKTEITLANGEIRKRPLIETNGETGEIVWDKGRDFATVRKVLSMPQVNIVKKTEVQTGGFSKESILPKRNSDKLIARKKDWDPKKYGGFDSPTVAYSVLVVAKVEKGKSKKLKSVKELLGITIMERSSFEKDPIDFLEAKGYKEVRKDLIIKLPKYSLFELENGRKRMLASAGELQKGNELALPSKYVNFLYLASHYEKLKGSPEDNEQKQLFVEQHKHYLDEIIEQISEFSKRVILADANLDKVLSAYNKHRDKPIREQAENIIHLFTLTNLGAPAAFKYFDTTIDRKRYTSTKEVLDATLIHQSITGLYETRIDLSQLGGD

SEQ ID NO: 561 - protein, 1368 aa, Streptococcus pyogenes
MDKKYSIGLDIGTNSVGWAVITDDYKVPSKKFKVLGNTDRHSIKKNLIGALLFDSGETAEATRLKRTARRRYTRRKNRICYLQEIFSNEMAKVDDSFFHRLEESFLVEEDKKHERHPIFGNIVDEVAYHEKYPTIYHLRKKLVDSTDKADLRLIYLALAHMIKFRGHFLIEGDLNPDNSDVDKLFIQLVQTYNQLFEENPINASGVDAKAILSARLSKSRRLENLIAQLPGEKKNGLFGNLIALSLGLTPNFKSNFDLAEDAKLQLSKDTYDDDLDNLLAQIGDQYADLFLAAKNLSDAILLSDILRVNTEITKAPLSASMIKRYDEHHQDLTLLKALVRQQLPEKYKEIFFDQSKNGYAGYIDGGASQEEFYKFIKPILEKMDGTEELLVKLNREDLLRKQRTFDNGSIPHQIHLGELHAILRRQEDFYPFLKDNREKIEKILTFRIPYYVGPLARGNSRFAWMTRKSEETITPWNFEEVVDKGASAQSFIERMTNFDKNLPNEKVLPKHSLLYEYFTVYNELTKVKYVTEGMRKPAFLSGEQKKAIVDLLFKTNRKVTVKQLKEDYFKKIECFDSVEISGVEDRFNASLGTYHDLLKIIKDKDFLDNEENEDILEDIVLTLTLFEDREMIEERLKTYAHLFDDKVMKQLKRRRYTGWGRLSRKLINGIRDKQSGKTILDFLKSDGFANRNFMQLIHDDSLTFKEDIQKAQVSGQGDSLHEHIANLAGSPAIKKGILQTVKVVDELVKVMGRHKPENIVIEMARENQTTQKGQKNSRERMKRIEEGIKELGSQILKEHPVENTQLQNEKLYLYYLQNGRDMYVDQELDINRLSDYDVDHIVPQSFLKDDSIDNKVLTRSDKNRGKSDNVPSEEVVKKMKNYWRQLLNAKLITQRKFDNLTKAERGGLSELDKAGFIKRQLVETRQITKHVAQILDSRMNTKYDENDKLIREVKVITLKSKLVSDFRKDFQFYKVREINNYHHAHDAYLNAVVGTALIKKYPKLESEFVYGDYKVYDVRKMIAKSEQEIGKATAKYFFYSNIMNFFKTEITLANGEIRKRPLIETNGETGEIVWDKGRDFATVRKVLSMPQVNIVKKTEVQTGGFSKESILPKRNSDKLIARKKDWDPKKYGGFDSPTVAYSVLVVAKVEKGKSKKLKSVKELLGITIMERSSFEKNPIDFLEAKGYKEVKKDLIIKLPKYSLFELENGRKRMLASAGELQKGNELALPSKYVNFLYLASHYEKLKGSPEDNEQKQLFVEQHKHYLDEIIEQISEFSKRVILADANLDKVLSAYNKHRDKPIREQAENIIHLFTLTNLGAPAAFKYFDTTIDRKRYTSTKEVLDATLIHQSITGLYETRIDLSQLGGD

SEQ ID NO: 562 - protein, 1368 aa, Streptococcus pyogenes
MDKKYSIGLDIGTNSVGWAVITDDYKVPSKKFKVLGNTDRHSIKKNLIGALLFDSGETAEATRLKRTARRRYTRRKNRICYLQEIFSNEMAKVDDSFFHRLEESFLVEEDKKHERHPIFGNIVDEVAYHEKYPTIYHLRKKLVDSTDKADLRLIYLALAHMIKFRGHFLIEGDLNPDNSDVDKLFIQLVQTYNQLFEENPINASGVDAKAILSARLSKSRRLENLIAQLPGEKKNGLFGNLIALSLGLTPNFKSNFDLAEDAKLQLSKDTYDDDLDNLLAQIGDQYADLFLAAKNLSDAILLSDILRLNSEITKAPLSASMIKRYDEHHQDLTLLKALVRQQLPEKYKEIFFDQSKNGYAGYIDGGASQEEFYKFIKPILEKMDGTEELLAKLNREDLLRKQRTFDNGSIPHQIHLGELHAILRRQEDFYPFLKDNREKIEKILTFRIPYYVGPLARGNSRFAWMTRKSEETITPWNFEEVVDKGASAQSFIERMTNFDKNLPNEKVLPKHSLLYEYFTVYNELTKVKYVTEGMRKPAFLSGEQKKAIVDLLFKTNRKVTVKQLKEDYFKKIECFDSVEISGVEDRFNASLGTYHDLLKIIKDKDFLDNEENEDILEDIVLTLTLFEDREMIEERLKTYAHLFDDKVMKQLKRRRYTGWGRLSRKLINGIRDKQSGKTILDFLKSDGFANRNFMQLIHDDSLTFKEDIQKAQVSGQGDSLHEHIANLAGSPAIKKGILQTVKVVDELVKVMGRHKPENIVIEMARENQTTQKGQKNSRERMKRIEEGIKELGSQILKEHPVENTQLQNEKLYLYYLQNGRDMYVDQELDINRLSDYDVDHIVPQSFIKDDSIDNKVLTRSDKNRGKSNNVPSEEVVKKMKNYWRQLLNAKLITQRKFDNLTKAERGGLSELDKAGFIKRQLVETRQITKHVAQILDSRMNTKYDENDKLIREVKVITLKSKLVSDFRKDFQFYKVREINNYHHAHDAYLNAVVGTALIKKYPKLESEFVYGDYKVYDVRKMIAKSEQEIGKATAKYFFYSNIMNFFKTEITLANGEIRKRPLIETNGETGEIVWDKGRDFATVRKVLSMPQVNIVKKTEVQTGGFSKESILPKRNSDKLIARKKDWDPKKYGGFDSPTVAYSVLVVAKVEKGKSKKLKSVKELLGITIMERSSFEKNPIDFLEAKGYKEVRKDLIVKLPKYSLFELENGRKRMLASAGELQKGNELALPSKYVNFLYLASHYEKLKGSPEDNEQKQLFVEQHKHYLDEIIEQISEFSKRVILADANLDKVLSAYNKHRDKPIREQAENIIHLFTLTNLGAPAAFKYFDTTIDRKRYTSTKEVLDATFIHQSITGLYETRIDLSQLGGD

SEQ ID NO: 563 - protein, 1368 aa, Streptococcus pyogenes
MDKKYSIGLDIGTNSVGWAVITDDYKVPSKKFKVLGNTDRHSIKKNLIGALLFDSGEIAEATRLKRTARRRYTRRKNRICYLQEIFSNEMAKVDDSFFHRLEESFLVEEDKKHERHPIFGNIVDEVAYHEKYPTIYHLRKKLVDSTDKADLRLIYLALAHMIKFRGHFLIEGDLNPDNSDVDKLFIQLVQTYNQLFEENPINASGVDAKAILSARLSKSRRLENLIAQLPGEKKNGLFGNLIALSLGLTPNFKSNFDLAEDAKLQLSKDTYDDDLDNLLAQIGDQYADLFLAAKNLSDAILLSDILRLNSEITKAPLSASMIKRYDEHHQDLTLLKALVRQQLPEKYKEIFFDQSKNGYAGYIDGGASQEEFYKFIKPILEKMDGTEELLAKLNREDLLRKQRTFDNGSIPHQIHLGELHAILRRQEDFYPFLKDNREKIEKILTFRIPYYVGPLARGNSRFAWMTRKSEETITPWNFEEVVDKGASAQSFIERMTNFDKNLPNEKVLPKHSLLYEYFTVYNELTKVKYVTEGMRKPAFLSGEQKKAIVDLLFKTNRKVTVKQLKEDYFKKIECFDSVEISGVEDRFNASLGTYHDLLKIIKDKDFLDNEENEDILEDIVLTLTLFEDREMIEERLKTYAHLFDDKVMKQLKRRRYTVWGRLSRKLINGIRDKQSGKTILDFLKSDGFANRNFMQLIHDDSLTFKEDIQKAQVSGQGDSLHEHIANLAGSPAIKKGILQTVKVVDELVKVMGRHKPENIVIEMARENQTTQKGQKNSRERMKRIEEGIKELGSQILKEHPVENTQLQNEKLYLYYLQNGRDMYVDQELDINRLSDYDVDHIVPQSFIKDDSIDNKVLTRSDKNRGKSDNVPSEEVVKKMKNYWRQLLNAKLITQRKFDNLTKAERGGLSELDKAGFIKRQLVETRQITKHVAQILDSRMNTKYDENDKLIREVKVITLKSKLVSDFRKDFQFYKVREINNYHHAHDAYLNAVVGTALIKKYPKLESEFVYGDYKVYDVRKMLAKSEQEIGKATAKYFFYSNIMNFFKTEITLANGEIRKRPLIETNGETGEIVWDKGRDFATVRKVLSMPQVNIVKKTEVQTGGFSKESILPKRNSDKLIARKKDWDPKKYGGFDSPTVAYSVLVVAKVEKGKSKKLKSVKELLGITIMERSSFEKNPIDFLEAKGYKEVRKDLIIKLPKYSLFELENGRKRMLASAGELQKGNELALPSKYVNFLYLASHYEKLKGSPEDNEQKQLFVEQHKHYLDEIIEQISEFSKRVILADANLDKVLSAYNKHRDKPIREQAENIIHLFTLTNLGAPTAFKYFDTTIDRKRYTSTKEVLDATFIHQSITGLYETRIDLSQLGGD

SEQ ID NO: 564 - protein, 1368 aa, Streptococcus pyogenes
MDKKYSIGLDIGTNSVGWAVITDDYKVPSKKFKVLGNTDRHSIKKNLIGALLFDSGETAEATRLKRTARRRYTRRKNRICYLQEIFSNEIAKVDDSFFHRLEESFLVEEDKKHERHPIFGNIVDEVAYHEKYPTIYHLRKKLADSTDKADLRLIYLALAHMIKFRGHFLIEGDLNPDNSDVDKLFIQLVQTYNQLFEENPINASRVDAKAILSARLSKSRRLENLIAQLPGEKRNGLFGNLIALSLGLTPNFKSNFDLAEDAKLQLSKDTYDDDLDNLLAQIGDQYADLFLAAKNLSDAILLSDILRVNTEITKAPLSASMIKRYDEHHQDLTLLKALVRQQLPEKYKEIFFDQSKNGYAGYIDGGASQEEFYKFIKPILEKMDGTEELLAKLNREDLLRKQRTFDNGSIPHQIHLGELHAILRRQEDFYPFLKDNREKIEKILTFRIPYYVGPLARGNSRFAWMTRKSEETITPWNFEEVVDKGASAQSFIERMTNFDKNLPNEKVLPKHSLLYEYFTVYNELTKVKYVTEGMRKPAFLSGEQKKAIVDLLFKTNRKVTVKQLKEDYFKKIECFDSVEISGVEDRFNASLGTYHDLLKIIKDKDFLDNEENEDILEDIVLTLTLFEDREMIEERLKTYAHLFDDKVMKQLKRRRYTGWGRLSRKLINGIRDKQSGKTILDFLKSDGFANRNFMQLIHDDSLTFKEDLQKAQVSGQGDSLHEHIANLAGSPAIKKGILQTVKVVDELVKVMGRHKPENIVIEMARENQTTQKGQKNSRERMKRIEEGIKELGSDILKEYPVETTQLQNEKLYLYYLQNGRDMYVDQELDINRLSDYDVDHIVPQSFLKDDSIDNKVLTRSDKNRGKSDNVPSEEVVKKMKNYWKQLLNAKLITQRKFDNLTKAERGGLSELDKAGFIKRQLVETRQITKHVAQILDSRMNTKYDENDKLIREVRVITLKSKLVSDFRKDFQFYKVREINNYHHAHDAYLNAVVGTALIKKYPKLESEFVYGDYKVYDIRKMIAKSEQEIGKATAKYFFYSNIMNFFKTEITLANGEIRKRPLIETNGETGEIVWDKGRDFATVRKVLSMPQVNIVKKTEVQTGGFSKESILPKRNSDKLIARKKDWDPKKYGGFDSPTVAYSVLVVAKVEKGKSKKLKSVKELVGITIMERSSFEKDPVDFLEAKGYKEVRKDLIIKLPKYSLFELENGRKRMLASAGELQKGNELALPSKYVNFLYLASHYEKLKGSPEDNEQKQLFVEQHKHYLDEIIEQISEFSKRVILADANLDKVLSAYNKHRDKPIREQAENIIHLFTLTNLGAPAAFKCFDTTIGRNRYKSIKEVLDATLIHQSITGLYETRIDLSQLGGD

SEQ ID NO: 565 - protein, 1368 aa, Streptococcus pyogenes [sequence omitted]

SEQ ID NO: 566 - protein, 1368 aa, Streptococcus pyogenes; identical to SEQ ID NO: 560

SEQ ID NO: 567 - protein, 1370 aa, Streptococcus ratti
  Streptococcus ratti FA-1 = DSM 20564
MKKPYSIGLDIGTNSVGWAVITDDYKVPAKKMKVLGNTDKNYIKKNLLGALLFDSGNTAEDRRLKRTARRRYTRRRNRLLYLQDIFSDEMNKVDESFFHRLEDSFLVSEDKRGDHHPIFGNVVDEVKYHEQFPTIYHLRKYLADTPEKADLRLVYLALAHMIKFRGHFLIDDPKLDVKNTDSQELFSQFLTAYDVTQEDSHLADVKINISDIITEKMNKSRKVEALLFHFPSQKKNSFFGNLVSLVFGLLPNFKTNFNLAEDAKLQLSKDSYDEDLENLLGQIGDEYTDVFVAARKLYDSILLSGILTVNDLSTKAILSASMVRRYEEHNKDLAKLKAFVKANFTHDVFKEVFSDASKNGYAGYIEGKTSQEDFYKYVKNLIGKVDGSADFIEKIDREDFLRKQRTFDNGSIPHQVHLAEMKAILRRQGEYYPFLKEHAEKIQQILTFRIPYYVGPLDRHGHSDFAWASFNSEEKVTPWNFEEIIDKNKSAQAFIERMTNQDLYLPNEKVLPKHSPLYEKYTVYNELTKIKYVTETGTAKFFDANLKQEIFDGLFKKERKVTKRKLLTFLEKNFDEFRIVDIQGLDKETETFNASYGIYQDLLKIIKDKAFMDDSENADILEDIVLTLTLFEDREMIKQRLAKYADLFDKKVIDNLARRRYTGWGRLSAKLLNGIRDKRSRKTIMDYLVDDGRSNRNLMQLITDDNLTFKDEIAKAQYSDNSDDLHQVVQDLAGSPAIKKGILQSVKIVDELVKVMGYEPEQIVVEMARENQTTAKGRRNSQQRYKRLEEAIKNLDRDLNYKILKEHPTDNQALQNDRLFLYYLQNGRDMYTGESLDINRLSDYDIDHIIPQAFIKDNSIDNRVLVSSAKNRGKSDDVPSEDVVNRMRPFWNKLLNCGLISQRKYSNLTKKELTPNDKAGFIKRQLVETRQITKHVARILDEHFNKEFDEDKKRIRKVKVVTLKSNLVSNFRKEFELYKVREINDYHHAHDAYLNAVVAKALLMKYPKLEPEFVYGEYPKYNSYRERKTATQRMFFYSNIMNMFKSKVKLADERIIERPMIEVNDETGEIAWDKTKHIATVKKVLSYPQINIVKKVEEQTGGLTNETIYPRGSFDKLLNRKNTLEASKYGGFGSPTVAYCVLVVADSKNENGKVKKLKLGSELLGITILEKNDFENNSLDFLSRKGYQGVQEKKIIKLPKYSLFEFQDGSRRMLSSVMANDNKRGDLQKANEMILPAYLVKLLYHAKHINSVGEPAHKNYINEHCSEFQDLLNYIRQFADKFVDVDKNLSKIRSLSKSMAEYSVSEICSSFVNLLTLTALGAPADFKFFGTTIPRKRYGSPQSILSATLIHQSITGLYETRIDLSKLGED

SEQ ID NO: 568 - protein, 1127 aa, Streptococcus salivarius
MSDLVLGLDIGIGSVGVGILNKVTGEIIHKNSRIFPAAQAENNVERRINRQGRRLTRRKKHRRVRLNHLFEESGLITDFTNVSINLNPYQLRVKGLTDELSNEELFIALKNMVKHRGISYLDDASDDGNSSVGDYAQIVKENSKQLETKTPGQIQLERYQKYGQLRGDFTVEEDGKKHRLINVFPTSAYRAEALRILQTQQEFNPQITDEFINSYLQILTGKRKYYHGPGNEKSRTDYGRYTTKKDSEDEYITLDNIFGILIGKCTFYPEEYRAAKASYTAQEFNLLNDLNNLTVPTETKKLSEEQKNQIITNVKNEKAMGPAKLFKYIAKLLSCDVADIKGYRIDKSDKAEIHTFEAYRKMKTLATIDIEQMERENLDKLAYVLTLNTEKEGIQEALEHEFADGTFSQEQIDELVQFRKANSSIFGKGWHSFSVKLMMELIPELYATSEEQMTILTRLGKQKTTSSSNKTKYIDEKQLTEEIYNPVAAKSVRQAIKIVNAAIKEYGDFDNIVIEMARETNEDDEKKAIQKIQKANKDEKDAAMLKAANQYNGKAELPHSVFHGHKQLATKIRLWHQQGERCLYTGKTISIHDLINNSNQFEIDHILPLSITFDDSLANKVLVYATANQEKGQRTPYQALDSMDDAWSFRELKAFVRDSKALSNKKKEYLLTEEDISKFDVRKKFIERNLVDTRYASRVVLNALQEHFRVHKTDTKVSVVRGQFTSQLRRHWGIEKTRDTYHHHAVDALIIAASSQLNLWKKQKNTLVSYSEDQLLDIETGELISDDEYKESVFKAPYQHFVDTLKSKEFEDSILFSYQVDSKFNRKISDATIYATRQAKVGKDKKDETYVLGKIKDIYSQTGYDAFIKIYKKDKSKFLMYRHDPQTFEKVIEPILENYPNKELNEKGKEVPCNPFLKYKEDHGYIRKYSKKGNGPEIKSLKYYDSKLGNHIDITPKNSNNKVVLQSVSPWRADVYFNKTTGKYEILGLKYADLKFEKGTGTYKISEEKYNDIKIKEGVDSDSEFKFTLYKNDLLLIKDTETKEQQLFRFLSRTMPNVKHYVELKPYDKQKFDDNEELIKILGIVAKGGQCKKGVSKPNISIYKIRTDVLGNQHIIKNEGDKPKLDF

SEQ ID NO: 569 - protein, 1385 aa, Streptococcus salivarius
  Streptococcus salivarius K12
MTKPYSIGLDIGTNSVGWAVITDDYKVPSKKMKVLGNTSKKYIKKNLLGALLFDSGITAEGRRLKRTARRRYTRRRNRILYLQEIFSTEMATLDDAFFQRLDDSFLVPDDKRDSKYPIFGNLVEEKVYHDEFPTIYHLRKHLADSSKKADLRLVYLALAHMIKYRGHFLIEGDFNSKNNDLQKNFQDFLDTYNAIFESDLSLENSKQLEEIVKDKISKSAKKDRILKLFPGEKNSGIFSEFLKLIVGNQADFRKYFNLDEKTSLQFSKESYDEDLETLLGHIGDDYSDVFLKAKKLYDAILLSGILTVTDNGTEAPLSSAMIMRYKEHEEDLALLKAYIRNISLETYNEVFKDNTKNGYAGYIDGKTSQEDFYVYLKRLLAGLEGADYFLEKIDREDFLRKQRTFDNGSIPYQIYLQEMRAILDKQAKFYPFLAKNKERIEKILTFRIPYYVGPLARGNSDFAWSIRKRNEKITPWNFEDVIDKESSAEAFINRMTSFDLYLPEEKVLPKHSLLYENFTVYNELTKVRFIAEGMRDYQFLDSKQKKDIVRLYFKGKRKVTDKDIIEYLHAIDGYDGIELKGIEKQFNSSLSTYHDLLNIINDKEFLDDSSNETIIEEIIHTLTMFEDREMIKQRLSKFDNIFDKSVLKKLSRRHYTGWGKLSAKLINGIRDEKSGNTILDYLIDDGVSNRNFMQLIHDDALSFKKKIKKAQIIGDKDNIKQVVKSLPGSPAIKKGILQSIKIVDELVKVMGREPESIVVEMARENQYTNQGKSNSQQRLKRLEESLKGLGSKILKENVPTRLSKIDNNALQNDRLYLYYLQNGKDMYTGEELDIDRLSNYDIDHIIPQAFLKDDSIDNKVLVSSASNRGKSDDVPSLEVVKKRKTLWYQLLKSKLISQRKFDNLTKAERGGLSQEEKAGFIQRQLVETRQITKHVARLLDERFNNKKDENNRTLRTVKIITLKSSLVSQFRKDFELYKVREINDFHHAHDAYLNAVVASALLKKYPKLEPEFVYGDYPKYNSFRERKSATEKVYFYSNIMNIFKKSIPLADGTVIDRPLIEVNEETGESVWNKVADLNTVRKVLSYSQVNIVKKVEEQNHGLDRGKPKGLFNANLSSKPKPNSKENLVGAKEYLDPKKYGGYAGISNSFAILVKGTIEKGAKKKITNVLEFQGISILDRIYYRKDKLNFLLEKGYKDIELIIELPKYSLFELSDGSRRMLASILSTNNKRGEIHKGNQIFISQKFVKLLYHAKRISSTFNENHRKYVENHKKEFEELFYYILEFNENYVGAKKNGELLKSAFQSWQNHSIDELCSSFIGPTGSERKGLFELTSRGGAADFEFLGVKIPRYRDYTPSSLLKDATLIHQSVTGLYETRIDLGKLGED

SEQ ID NO: 570 - protein, 1135 aa, Streptococcus salivarius
  Streptococcus salivarius PS4
MSDLVLGLDIGIGSVGVGILNKVTGEIIHKNSRIFPAAQAENNLERRTNRQGRRLTRRKKHRRVRLNHLFEESGLITDFTKVSINLNPYQLRVKGLTAELSNEELFIALKNMVKHRGISYLDDASDDGNSSVGDYAQIVKENSKQLETKTPGQIQLERYQKYGQLRGDFTVEEDGRKHRLINVFPTSAYHAEALRILQTQQEFNPQITDEFINSYLEILTGKRKYYHGPGNEKSRTDYGKYTTKKDAQGQYITLNNIFGILIGKCTFYPEEYRAAKASYTAQEFNLLNDLNNLTVPTETKKLSEEQKYQIITYVKNEKAMGPAKLFKYIAKLLACDIADIKGYRIDKSDKAEIHTFEAYRKMKTLETIDIEQIEREKLDKLAYVLTLNTEREGIQEALDHEFADGTFSQEQVDELVQFRKANSSIFGKGWHSFSVKLMMELIPELYATSEEQMTILTRLGKQKTTSSSNKTKYIDEKQLTEEIYNPVVAKSVRQAIKIVNAAIKKYGDFDNIVIEMARETNEDDEKKAIQKIQKANKAEKDAAMRKAANQYNGKAELPHSVFHGHKQLATKIRLWHQQGERCLYTGKTISIHDLINNPNQFEIDHILPLSITFDDSLANKVLVYATANQEKGQRTPYQALDSMDDAWSFRELKAFVRESKALSNKKKEYLLTEEDISKFDVRKKFIERNLVDTRYASRVVLNALQEHFKAHKIDTKVSVVRGQFTSQLRRHWGIDKTRDTYHHHAVDALIIAASSQLNLWKKQKNTLVSYSEDQLLDIETGELISDDEYKESVFKAPYQHFVDTLKSKEFEDSILFSYQVDSKFNRKISDATIYATRQAKVGKDKKDETYVLGKIKDIYALGTKTPSKTGFYKFLDLYNKDKSQFLVYQKDRKTWDEVIEKIMEQYRPFKESDKNGKEVDFNPFEKYRIENGPIRKYSRKGNGPEIKSLKYYASKLGNHIDITPKDSNNKVVLQSVSPWRADVYFNKTTGSYEILGLKYADLQFEKGTGTYRISEEKYNDIKKKEGVDSDSEFKFTLYKNDLLLIKDTETKEQRLFRFLSRSMPNKKHYVELKPYSKDKFEKNESLIEILGSADKSGRCIKGLAKSNLSIFKVRTDVLGNQHIIKNEGDKPKLDF

SEQ ID NO: 571 - protein, 1377 aa, Streptococcus sanguinis
  Streptococcus sanguinis SK115
MKKPYSIGLDIGTNSVGWAVITDDYKVPSKKMKVLGNTDKHFIKKNLIGALLFDEGTTAEDRRLKRTSRRRYTRRKNRLRYLQEIFSEEISKLDSSFFHRLDDSFLVPEDKRGSKYPIFATLEEEKEYHKKFPTIYHLRKHLADSKEKTDLRLIYLALAHMIKYRGHFLYEESFDIKNNDIQKIFNEFISIYDNTFEGSSLSGQNAQVEAIFTDKISKSTKRERVLKLFSDEKSTGLFSEFLKLIVGNQADFKKHFDLEEKAPLQFSKDTYDEDLENLLGQIGDGFADLFLVAKKLYDAILLSGILTVTDPSTKAPLSASMIERYENHQEDLAALKQFIKNNLSEKYAEVFSDQSKDGYAGFIDGKTTQEAFYKYIKNLLSKLEGADYFLNKIEREDFLRKQRTFDNGSIPHQIHLQEMNAILRRQGEHYLFLKENREKIEKILAFRIPYYVGPLARGNRDFAWLTRNSDQAIRPWNFEEVVDKASSAEDFINKMTNYDLYLPEEKVLPKHSLLYETFAVYNELTKVKFIAEGLRDYQFLDSGQKKQIVNQLFKDKRKVTEKDIIHYLHNVDGYDGIELKGIEKQFNASLSTYHDLLKIIKDKEFMDNPKNGEILENIIHTLTIFEDREMIKQRLAQYDTLFDEKVIKALTRRHYTGWGKLSAKLINGIRDKQTGKTILEYLIDDGDCNRNFMQLINDDGLSFKEIIQKAQVVGKTDDVKQVVQEIPGSPAIKKGILQSIKIVDELVKVMGHNPESIVIEMARENQTTAKGKKNSQQRYKRIEDALKNLAPGLDSNILKENPTDNIQLQNDRLFLYYLQNGKDMYTGKAIDINQLSNYDIDHIIPQAFIKDDSLDNRVLTSSKDNRGKSDNVPSIEVVQKRKAFWQQLLDSKLISERKFNNLTKAKRGGLDERDKVGFIKRQLVETRQITKHVAQLLDTRFNTEVNEENQKIRTVKIITLKSNLVSNFRKEFGLYKVREINDYHHAHDAYLNAVVAKAILKKYPKLEPEFVYGDYQKYDLKRYILKSKASNTIDKATEKYFFYSNLLNFFKEKVRYADGTIKKRENIEYSNDTGEIAWNKEKDFATIKKVLSLPQVNIVKKTEEQTVGQNGGLFDNNIVSKKKVVDASKLIPIKSSLSPEKYGGYARPTIAYSVLVIADIEKGKGKAKKLKRIKEIVGITIQDKKKFESNPVTYLEECGYKNINSNLIIKLPKYSLFEFNDGQRRLLASSIELQKGNELILPYHLTALLYHAQRINKISEPIHKQYVEAHQNEFKELLTTIISLSKKYIQKPNVELLLQQAFDQADKDIYQLSESFISLLKLTSFGAPGAFKFLGVEISQSSVRYKPNSQFLDTTLIHQSITGLYETRIDLSKLGED

SEQ ID NO: 572 - protein, 1392 aa, Streptococcus sanguinis
  Streptococcus sanguinis SK330
MENKNYSIGLDIGTNSVGWAVITDDYKVPSKKMKVFGNTDKHFIKKNLIGALLFDEGATAEDRRLKRTARRRYTRRKNRLRYLQEIFSEEISKLDSSFFHRLDDSFLVPKDKRGSKYPIFATLEEEKEYHKKFPTIYHLRKHLADSKEKTDLRLIYLALAHMIKYRGHFLYEESFDIKNNDIQKIFNEFISIYDNTFEGSSLSGQNAQVEAIFTDKISKSAKRERVLKLFSDEKSTSLFSEFLKLIVGNQADFKKHFDLEEKAPLQFSKDTYDEDLENLLGQIGDGFTDLFLVAKKLYDAILLSGILTVTDPSTKAPLSASMIERYESHQKDLAALKQFIKNNLPKRYNEVFSDQSKDGYAGYIDGKTTQEAFYKYIKNLLSKFEGADYFLDKIEREDFLRKQRTFDNGSIPHQIHLQEMNAILRRQGEHYPFLKENREKIEKILTFRIPYYVGPLARGNRDFAWLTRNSDQAIRPWNFEEIVDKASSAEEFINKMTNYDLYLPEEKVLPKHSLLYETFAVYNELTKVKFIAEGLRDYQFLDSGQKKQIVNQLFKEKRKVTEKDIIHYLHNVDGYDGIELKGIEKQFNASLSTYHDLLKIIKDKEFMDDPKNEEILENIVHTLTIFEDREMIKQRLAQYDSIFDEKVIKALTRRHYTGWGKLSAKLINGICDKQTGDTILDYLIDDGKINRNFMQLINDDGLSFKEIIQKAQVVGKTDDVKQVVQELPGSPAIKKGILQSIKIVDELVKVMGYAPESIVIEMARENQTTARGKKNSQQRYKRIEDSLKNLAPGLDSNILKENPTDNIQLQNDRLFLYYLQNGKDMYTGKPLDIDQLSSYDIDHIIPQAFIKDDSIDNRVLTSSKDNRGKSDNVPSLEVVQKRKAFWQQLLDSKLISERKFNNLTKAERGGLDERDKVGFIRRQLVETRQITKHVAQILDASFNTEVNEKNQKIRTVKIITLKSNLVSNFRKEFELYKVREINDYHHAHDAYLNAVVAKAILKKYPKLEPEFVYGDYQKYDLKRYISRFKPSKEIEKATEKYFFYSNLLNFFKEEVHYADGIIVKRENIEYSKDTGEIAWNKEKDFATIKKVLSYPQVNIVKKTEIQTHGLDRGKPKGLFNSNPSPKPSEDSKENLVPIKQGLDPRKYGGYAGISNSYAVLVKAIVEKGAKKQQKTILEFQGISILDKINFENNKENYLLKKRYIEILSTITLPKYSLFEFPDGTRRRLASILSTNNKRGEIHKGNELVLPGKYTTLLYHAKNINKKLEPEHLEYVEKHRNDFAKLLECVLNFNDKYVGALKNGERIRQAFTDWETVDIEKLCFSFIGPENSKNAGLFELTSQGSASDFEFLGVKIPRYRDYAPSSLLKATLIHQSITGLYETRIDLSKLGED

SEQ ID NO: 573 - protein, 1370 aa, Streptococcus sanguinis
  Streptococcus sanguinis SK353
MKKPYSIGLDIGTNSVGWAVVTDDYKVPAKKMRVFGDTDRSHIKKNLLGTLLFDDGNTAESRRLKRTARRRYTRRRNRILYLQEIFTESMNEIDESFFHRLDDSFLVPEDKRGSKYPIFATLQEEKEYHKQFPTIYHLRKQLADSKEKSDVRLIYLALAHMIKYRGHFLYEETFDIKNNDIQKIFNEFINIYDNTFEGSSLSGQNAQVEAIFTDKISKSAKRERVLKLFPDEKSTGLFSEFLKLIVGNQADFKKHFDLEEKAPLQFSKDTYDEELENLLGQIGDDFADLFLIAKKLYDAILLSGILTVTDPSTKAPLSASMIERYENHQKDLAALKQFIKNNLPEKYVEVFSDQSKDGYAGYIDGKTTQEAFYKYIKNLLSKFEGADYFLDKIEREDFLRKQRTFDNGSIPHQIHLQEMNAILRRQGEHYPFLKENREKIEKILTFRIPYYVGPLARDNRDFSWLTRNSDEPIRPWNFEEVVDKARSAEDFIHRMTNYDLYLPEEKVLPKHSLLYETFAVYNELTKVKFIAEGLRDYQFLDSGQKKQIVNQLFKEKRKVTEKDIIHYLHNVDGYDGIELKGIEKQFNANLSTYHDLLKITKDKEFMDDPKNEEILENIVHTLTIFEDREMIKQRLAQYDTLFDEKVIKALTRRHYTGWGKLSAKLINGIRDKQSGKTILDYLIDDDKINRNFMQLINDDGLSFKEIIQKAQVVGKTDDVKQVVQELPGSPAIKKGILQSIKIVDELVKVMGYALESIVIEMARENQTTARGKKNSQQRYKRIEDALKNLAPGLDSNILKENPTDNIQLKNDRLFLYYLQNGKDMYTGKPLDINQLSSYDIDHIIPQAFIKDDSIDNRVLTSSKDNRGKSDNVPSLEVVQKRKAFWQQLLDSKLISERKFNNLTKAERGGLDERDKVGFIRRQLVETQQITKNVAQILDARFNTEVKEKNQKIRTVKIITLKSNLVSNFRKEFGLYKVREINNYHHAHDAYLNAVVAKAILKKYPKLEPEFVYGDYQKYDLKKYISRFKPSKEIEKATEKYFFYSNLLNFFKEEVLYADGTIRKRENIEYSKDTGEIAWDKEKDFATIKKVLSYPQVNIVKKREVQTGGFSKESILPKGNSDKLIPRKTKDILWDTTKYGGFDSPVIAYSILLIADIEKGKAKKLKTVKTLVGITIMEKAAFEENPITFLENKGYHNVRKENILCLPKYSLFELENGRRRLLASAKELQKGNEIVLPVCLTTLLYHSKNLHKLDEPEHLEYIQKHRNEFKDLLNLVSEFSQKYILAEANLEKIKDLYADNEQADIEILANSFINLLTFTALGAPAAFKFFGKDVDRKRYTTVSEILNATLIHQSITGLYETRIDLSKLGEE

SEQ ID NO: 574 - protein, 1421 aa, Streptococcus sanguinis
  Streptococcus sanguinis SK49
MTKFNKNYSIGLDIGVSSVGYAVVTEDYRVPAFKFKVLGNTEKEKIKKNLIGSTTFVSAQPAKGTRVFRVNRRRIDRRNHRITYLRDIFQKEIEKVDKNFYRRLDESFRVLGDKSEDLQIKQPFFGDKELETAYHKKYPTIYHLRKHLADADKNSPVADIREVYMAISHILKYRGHFLTLDKINPNNINMQNSWIDFIESCQEVFDLEISDESKNIADIFKSSENRQEKVKKILPYFQQELLKKDKSIFKQLLQLLFGLKTKFKDCFELEEEPDLNFSKENYDENLENFLGSLEEDFSDVFAKLKVLRDTILLSGMLTYTGATHARFSATMVERYEEHRKDLQRFKFFIKQNLSEQDYLDIFGRKTQNGFDVDKETKGYVGYITNKMVLTNPQKQKTIQQNFYDYISGKITGIEGAEYFLNKISDGTFLRKLRTSDNGAIPNQIHAYELEKIIERQGKDYPFLLENKDKLLSILTFKIPYYVGPLAKGSNSRFAWIKRATSSDILDDNDEDTRNGKIRPWNYQKLINMDETRDAFITNLIGNDIILLNEKVLPKRSLIYEEVMLQNELTRVKYKDKYGKAHFFDSELRQNIINGLFKNNSKRVNAKSLIKYLSDNHKDLNAIEIVSGVEKGKSFNSTLKTYNDLKTIFSEELLDSEIYQKELEEIIKVITVFDDKKSIKNYLTKFFGHLEILDEEKINQLSKLRYSGWGRYSAKLLLDIRDEDTGFNLLQFLRNDEENRNLTKLISDNTLSFEPKIKDIQSKSTIEDDIFDEIKKLAGSPAIKRGILNSIKIVDELVQIIGYPPHNIVIEMARENMTTEEGQKKAKTRKTKLESALKNIENSLLENGKVPHSDEQLQSEKLYLYYLQNGKDMYTLDKTGSPAPLYLDQLDQYEVDHIIPYSFLPIDSIDNKVLTHRENNQQKLNNIPDKETVANMKPFWEKLYNAKLISQTKYQRLTTSERTPDGVLTESMKAGFIERQLVETRQIIKHVARILDNRFSDTKIITLKSQLITNFRNTFHIAKIRELNDYHHAHDAYLAVVVGQTLLKVYPKLAPELIYGHHAHFNRHEENKATLRKHLYSNIMRFFNNPDSKVSKDIWDCNRDLPIIKDVIYNSQINFVKRTMIKKGAFYNQNPVGKFNKQLAANNRYPLKTKALCLDTSIYGGYGPMNSALSIIIIAERFNEKKGKIETVKEFHDIFIIDYEKFNNNPFQFLNDTSENGFLKKNNINRVLGFYRIPKYSLMQKIDGTRMLFESKSNLHKATQFKLTKTQNELFFHMKRLLTKSNLMDLKSKSAIKESQNFILKHKEEFDNISNQLSAFSQKMLGNTTSLKNLIKGYNERKIKEIDIRDETIKYFYDNFIKMFSFVKSGAPKDINDFFDNKCTVARMRPKPDKKLLNATLIHQSITGLYETRIDLSKLGED

SEQ ID NO: 575 - protein, 1026 aa, Streptococcus sp.
  Streptococcus sp. BS35b
MNGLVLGLDIGIASVGVGILEKNSGKIIHANSRLFPAATADNNVERRKNRQARRLNRRKKHRGVRFQDLFEDYGLLTDFSKVSINLNPYRLRVDGLNQQLTNEELFIALKNIVKRRGISYLDDASEDGGAVSSDYGKAVEENRKLLAEQTPGQIQLERFEKYGQVRGDFTVVENGEKRRLINVFSTSAYRKEAEKILRKQQEFNNQITDEFIEDYLKILTGKRKYYHGPGNEKSRTDYGRFRTDGTTLDNIFGVLIGKCTFYPNEYRASKSSYTAQEFNLLNDLNNLTVPTETKKLSEEQKKVIVEYAKEAKTLGASTLLKYIVKMIDASVDQISGYRVDVNNKPEMHTFEVYRKMQSLETISVGELSRNVLDELAHILTLNTEREGIEEAINSKLMGVFSQDQVLELVQFRKNNSSLFSKGWHNFSLKLMMELIPELYETSEEQMTILTRLGKQKSKETSKRTKYIDEKELTEEIYNPVVAKSVRQAIKIINEATKKHGIFDNIVIEMARENNEEDAKKDYIKRQKANQDEKNAAMEKAAFQYNGKKELPGNIFNGHKELATKIRLWHQQGEKCLYTGKTIPISDLIHNQYKYEIDHILPLSLSFDDSLSNKVLVHATANQEKGQRTPFQALDSMDDAWSYREFKSYVKDLKSLSNKKKDYLLTEEDISKIEVKQKFIERNLVDTRYSSRVVLNALQDFYKSHQFDTTISVVRGQFTSQLRRKWGLEKSRETYHHHAVDALIIAASSQLRLWKKQNNPLITYKEGQFIDSQTGEIISLTDDEYKELVFKAPYDHFVDTLHSKTFEDGILFSYQVDSKYNRKISDATIYATRKAKLDKDKSEETYVLGKIKDIYSQAGYDAFIKIYNKDKRKFLMYHKDPQTFEKVIEEILRTYPSKERNDKNKEVPCNPFEKYRQENGPIRKYSKKGNGPEIKCLKYYDNKLGNYIDISPDGSDNQVVLQSLKPWRTDVYFNHQTKKYELMGLKYSDLSFEKGSGKYSISNEKYNSIKRIEGVNEQSEFKFTLYK

SEQ ID NO: 576 - protein, 1139 aa, Streptococcus sp.
  Streptococcus sp. C150
MSDLVLGLDIGIGSVGVGILNKVTGEIIHKNSRIFPAAQAENNLERRTNRQGRRLTRRKKHRRVRLNHLFEESGLITDFTKVSINLNPYQLRVKGLTAELSNEELFIALKNMVKHRGISYLDDASDDGNSSVGDYAQIVKENSKQLETKTPGQIQLERYQKYGQLRGDFTVEEDGRKHRLINVFPTSAYHAEALRILQTQQEFNPQITDEFINSYLEILTGKRKYYHGPGNEKSRTDYGKYTTKKDAQGQYITLNNIFGILIGKCTFYPEEYRAAKASYTAQEFNLLNDLNNLTVPTETKKLSEEQKYQIITYVKNEKAMGPAKLFKYIAKLLSCDVADIKGYRIDKSDKAEIHTFEAYRKMKTLETLDVKKMAREELDKLAYVLTLNTEREGIQEALDHEFADGTFSQEQVDELVQFRKANSSIFGKGWHSFSVKLMMELIPELYATSEEQMTILTRLGKQKTTSSSNKTKYIDEKQLTEEIYNPVVAKSVRQAIKIVNAAIKKYGDFDNIVIEMARETNEDDEKKAIQKIQKANKAEKDAAMRKAANQYNGKAELPHSVFHGHKQLATKIRLWHQQGERCLYTGKTISIHDLINNPNQFEIDHILPLSITFDDSLANKVLVYATANQEKGQRTPYQALDSMDDAWSFRELKAFVRESKALSNKKKEYLLTEEDISKFDVRKKFIERNLVDTRYASRVVLNALQEHFRTHKIDTKVSVVRGQFTSQLRRHWGIEKTRDTYHHHAVDALIIAASSQLNLWKKQKNTLVSYSEDQLLDIETGELISDDEYKESVFKAPYQHFVDTLKSKEFEDSILFSYQVDSKFNRKISDATIYATRKAKLDKEKKEYTYTLGKIKDIYALGTKTPSKTGFYKFLDLYKKDKSQFLMYQKDRRTWDEVIEKILEQYRPFKEKDKNGKEVDFNPFEKYRIENGPIRKYSRKGNGPEIKSLKYYDNLLGRFVDITPSESKNPVALLSLNPWRTDVYYNTETRKYEFLGLKYADLCFEKGGSYGISKVKYNKIREKEGIGKNSEFKFTLYKNDLILIKDTETNRQQIFRFWSRTGKDNPKSFEKHKLELKPYEKTRFEKGEELKVLGKVPPSSNRLQKNMQIENLSIYKVRTDVLGNQHIIKNEGDKPKLDF

SEQ ID NO: 577 - protein, 1377 aa, Streptococcus sp.
  Streptococcus sp. C300
MNNKPYSIGLDIGTNSVGWSVITDDYKVPSKKMKVLGNTDKRFIKKNLIGALLFDEGTTAEARRLKRTARRRYTRRKNRLRYLQEIFAEEMSKVDSSFFHRLDDSFLIPEDKRGSKYPIFATLVEEKEYHKQFPTIYHLRKQLADSKEKADLRLIYLVLAHMIKYRGHFLYEEAFDIKNNDIQKIFNEFISIYDNTFEGSSLSGQNAQVETIFTDKISKSAKRERVLKLFPDEKSTGLFSEFLKLIVGNQADFKKHFDLEEKAPLQFSKDTYDEDLENLLEQIGDDFADLFVAAKKLYDAILLSGILTVTDPSTKAPLSASMIERYENHQKDLAVLKQFIKTNLPEKYVEVFSDQSKDGYAGYIDGKTTQEAFYKYIKNLLSKFDGADYFLDKIEREVFLRKQRTFDNGSIPHQIHLQEMNTILRRQGEHYPFLKENKEKIEKILTFRIPYHVGPLARGNRDFAWLTRNSDQAIRPWNFEEIVDKASSAEDFINKMTNYDLYLPEEKVLPKHSLLYETFAVYNELTKVKFIAEGMRDYQFLDSGQKKKIINQLFKKKRKVTEDDIIDCLQKIDNYDGIELKGIEKQFNASLSTYHDILKIIRDKEFMDDPKNGDILENVIHTLTIFEDREMIKQRLAQYNSIFDEKVIKALSRKHYTGWGKLSAKLIDGIRDKQTGKTILDYLMDDGKSNRNFMQLIKDDELSFTEIIQKAQVVGDTDNLRQVVQNLPGSPAIKKGILQSIKIVDELVKVMGHAPESIVIEMARENQTTARGKKNSQQRYKRIEDSLKNLASGLDSNILKENPTDNIQLQNDRLFLYYLQNGKDMYTGEALNINQLSSYDIDHIIPQAFIKDDSLDNRVLTSSKDNRGKSDNVPSLEVVEKMKAFWQQLLDSKLISERKYNNLTKAERERGGLNELDKVGFIKRQLVETRQITKHVAQILDARFNKEVTEKNKKNRNVKIITLKSNMVSNFRKEFGLYKVREINDYHHAHDAYLNAVVAKAILKKYPKLEPEFVYGDYQKYDLKRYISRSKDPKEVEKATEKYFFYSNLLNFFKEEVHYADGTIVKRENIEYSKDTGEIAWNKEKDFATIKKVLSLPQVNIVKKTEEQTVGQNGGLFDNNIVSKKKVVDASKLIPIKSGLSPEKYGGYARPTIAYSVLVTYKQNNKIKNTMVGIPVLTKLEFERDPNLYLRNLGINNVSHVIKLVKYTVLEFKHKYGTYRRFIVSNQELKRANQIFVTTKQMKLISQYTTLDKNEHDSLLKNNQQLIQSIWNQFLEFMLATDLVNKKQYDELILTNNQTIEECRNIMNRVITTLSFTNINAGQKKIIFDDTLSLPIKRWQFTDSDKMVKKIIESTLIHQSITGLYETRIDLSKLGED

SEQ ID NO: 578 - protein, 1371 aa, Streptococcus sp.
  Streptococcus sp. F0441
MENKNYSIGLDIGTNSVGWSVITDDYKVPSKKMKVLGNTDKHFIKKNLIGALLFDEGTTAEARRLKRTARRRYTRRKNRLRYLQEIFSEEIGKVDSSFFHRLDDSFLIPEDKRGSKYPIFATLAEEKKYHKQFPTIYHLRKQLADSKEKTDLRLIYLALAHMIKYRGHFLYEEAFDIKNNDIQKIFNEFISIYNNTFEGNSLSGQNVQVEAIFTDKISKSAKRERVLKLFPDEKSTGLFSEFLKLIVGNQADFKKHFDLEEKAPLQFSRDTYDEDLENLLGQIGDDFADLFLVAKKLYDAILLSGILTVTNPSTKAPLSASMIERYENHQKDLASLKQFIKNNLPEKYDEVFSDQSEDGYAGYIDGKTTQETFYKYIKNLLSKFEGADYFLDKIEREDFLRKQRTFDNGSIPHQIHLQEMNAILRRQGEHYPFLKENKEKIEKILTFRIPYYVGPLARGNRDFAWLTRNSDQAIRPWNFEEIVDKASSAEDFINKMTNYDLYLPEEKVLPKHSLLYETFAVYNELTKVKFIAEGLRDYQFLDSGQKKQIVTQLFKEKRKVTEKDIIQFLHNVDGYDGIELKGIEKQFNASLSTYHDLLKIIKDKAFMDDAKNEAILENIVHTLTIFEDREMIKQRLAQYDSLFDEKVIKALTRRHYTGWGKLSAKLINGISDKQTGNTILDYLIDDGEINRNFMQLINDDGLSFKEIIQKAQVVGKTNDVKQVVQELPGSPAIKKGILQSIKIVDELVKVMGHAPESIVIEMARENQTTARGKKNSQQRYKRIEDSLKILASGLNSKILKEHPTDNIQLQNDRLFLYYLQNGKDMYTGEALDINQLSSCDIDHIIPQAFIKDDSLDNRVLTSSKDNRGKSDNVPSLEVVDKMKVFWQQLLDSKLISYRKFNNLTKAERGGLNELDKVGFIKRQLVETRQITKHVAQILDARFNKEVTEKDKKNRTVKIITLKSNLVSNFRKEFELYKVREINDYHHAHDAYLNAVVAKAILKKYPKLEPEFVYGDYQKYDLKRYISRSKDPKEIEKATEKYFFYSNLLNFFKEEVHYADGTIVKRENIEYSKDTGEIAWNKEKDFATIKKVLSLPQVNIVKKREVQTGGFSKESILPKGNSDKLIPRKTKDILWDTTKYGGFDSPVIAYSILLIADIEKGKAKKLKTVKTLVGITIMEKDAFEKNPIAFLENKGYHNVCKENILCLPKYSLFELENGRRRLLASAKELQKCNEIVLPVYLTTLLYHSKNVHKLDEPGHLEYIQKHRNEFKDLLNLVSEFSQKYVLADANLEKIKNLYADNEQADIEILANSFINLLTFTALGAPAAFKFFGKDVDRKRYTTVSEILNATLIHQSITGLYETRIDLSKLGED

SEQ ID NO: 579 - protein, 1121 aa, Streptococcus sp.
  Streptococcus sp. GMD6S
MNGLVLGLDIGIASVGVGILEKNSGKIIHANSRLFPAATADNNVERRKNRQARRLHRRKKHRGVRFQDLFEDYGLLTDFSKVSINLNPYRLRVDGLNQQLTNEELFIALKNIVKRRGISYLDDASEDGGTVSSDYGKAVEENRKLLAEQTPGQIQLERFEKYGQVRGDFTVVENGEKRRLINVFSTSAYRKEAERILRKQQEFNSKITDEFIEDCLKILTGKRKYYHGPGNEKSRTDYGRFRTDGTTLDNIFGILIGKCTFYPDEYRASKASYTAQEFNLLNDLNNLTVPTETKKLSEEQKKVIVEYAKEAKTLGASTLLKYIAKMIDASVDQIRGYRVDVNNKPEIHTFEAYRKMQSLETISVGELSRNVLDELAHILTLNTEREGIEEAINTKLKDSFSQDQVLELVQFRKNNSSLFSKGWHNFSLKLMMELIPELYETSEEQMTILTRLGKQKSKEISKRTKYIDEKELTEEIYNPVVAKSVRQAIKIINEATKKHGIFDNIVIEMARENNEEDAKKDYIKRQKANQDEKNAAMEKAAFQYNGKKELPDSIFHGQKELATKIRLWHQQGEKCLYTGKNIPISDLIHNQYKYEIDHILPLSLSFDDSLSNKVLVLATANQEKGQRTPFQALDSMDDAWSYREFKSYVKESKLLGNKKKEYLLTEEDISKIEVKQKFIERNLIDTRYSSRVVLNALQDFYKAHKFDTTISVVRGQFTSQLRRKWGLEKSRETYHHHAVDALIIAASSQLRLWKKQNNPLIAYKEGQFVDSETGEIISLSDDEYKELVFKAPYDHFVDTLSSKTFEDSILFSYQVDSKFNRKISDATIYATRKAKLDKEKSEETYVLGKIKDIYSQAGYDAFIKIYNKDKSKFLMYHKDPQTFEKVIEEILRTYPSKELNDKNKEIPCNPFEKYRQENGPIRKYSKKSNGPEIKSLKYYDNKLGNHIDITPESSDNQVVLQSLKPWRTDVYFNHQTKKYELMGLKYSDLSFEKGSGKYSISNQKYNSIKRIEGIDEQSEFKFTLYKNDLILIKDSENNEQKLFRFNSRNDTAKHYIELKPYDKAKFDGEQELITILGNVAKGGRCLKGLNKSNISIFKVKTDVLGKKHIIKKEGDEPKLKF

SEQ ID NO: 580 - protein, 1375 aa, Streptococcus sp.
  Streptococcus sp. M334
MSNKSYSIGLDIGTNSVGWAVITDDYKVPSKKMKVLGNTDKHFIKKNLIGALLFDEGTTAEDRRLKRTARRRYTRRKNRLRYLQEIFSQEISKVDSSFFHRLDDFFLVPEDKRGSKYPIFATLVEEKEYHKKFPTIYHLRKHLADSKEKTDLRLIYLALAHMIKYRGHFLYEESFDIKNNDIQKIFSEFISIYDNTFEGKSLSGQNAQVEAIFTDKISKSTKRERVLKLFPDEKSTGLFSEFLKLIVGNQADFKKHFDLEEKAPLQFSKDTYDEDLENLLGQIGDDFADLFLVAKKLYDAILLSGILTVKDLSTKAPLSASMIERYENHQKDLAALKQFIQNNLQEKYDEVFSDQSKDGYAGYIDGKTTQEAFYKYIKNLLSKFEGADYFLDKIEREDFLKKQRTFDNGSIPHQIHLQEMNAIIRRQGEHYPFLQENKEKIEKILTFRIPYYVGPLARGNGDFAWLTRNSDQAIRPWNFEEIVDQASSAEDFINKMTNYDLYLPEEKVLPKHSLLYETFAVYNELTKVKFIAEGLTRYQFLDKKQKKDIFDTFFKAENKRKVTEKDIIHYLHNVDGYDGIELKGIEKQFNASLSTYHDLLKIIKDKAFMDDSKNEEILENIIHTLTIFEDREMIKQRLAQYDSLFDEKVIKALTRRHYTGWGKLSAKLINGIRDKKSGKTILDYLIDDGEINRNFMQLIHDDGLSFKEIIQKAQVFGKTNDVKQVVQELPGSPAIKKGILQSIKIVDELVKVMGHAPESIVIEMARENQTTARGKKNSQQRYKRIEDSLKNLASGLDSNILKENPTDNIQLQNDRLFLYYLQNGRDMYTGKPLEINQLSNYDIDHIIPQAFIKDDSLDNRVLTSSKDNRGKSDNVPSLEVVEKMKAFWQQLLDSKLISERKFNNLTKAERERGGLNELDKVGFIKRQLVETRQITKHVAQFLDARFNKEVTEKDKKNRNVKIITLKSNLVSNFRKEFGLYKVREINDYHHAHDAYLNAVLAKAILKKYPKLEPEFVYGDYQKYDLQRYISKSREPKEVEKATQKYFFYSNLLNFFKEEVHYADGTIVKRENIEYSKDTGEIAWNKEKDFATVKKVLSLPQVNIVKKTEVQTGGFSKESILPKGNSDKLIPRKTKEILWDTTKYGGFDSPVIAYSILLIADIEKGKAKKLKTVKTLVGITIMEKATFEKNPITFLENKGYHNVRKENILCLPKYSLFELESGRRRMLASAKELQKGNEIVLPVYLTTLLYHSKNVHKLDEPEHLEYIQKHRYEFKDLLNLVSEFSQKYVLADANLEKIKNLYADNEQADIEILANSFINLLTFTALGAPAAFKFLGKDVDRKRYTTVSEILNATLIHQSITGLYETRIDLSKLGED

SEQ ID NO: 581 - protein, 1371 aa, Streptococcus sp.
  Streptococcus sp. oral taxon 056 str. F0418
MNNNNYSIGLDIGTNSVGWAVITDDYKVPSKKMRVLGNTDKRFIKKNLIGALLFDEGTTAEDRRLKRTARRRYTRRKNRLRYLQEIFAEEMSKVDSSFFHRLDDSFLVPEDKSGSKYPIFATLAEEKEYHKKFPTIYHLRKHLADSKEKADLRLIYLALAHITKYRGHFLYEEAFDIKNNDIQKIFNEFINIYDNTFEGSSLSGQNAQVEAIFTGKISKSVKREHVLKLFPDEKSTGLFSEFLKLIVGNQADFKKHFDLEEKASLQFSKDTYDEDLENLLGQIGDDFADLFLVAKKLYDAILLSGILTVTDPSTKAPLSASMIERYENHQEDLAALKQFIKNNLPEKYAEVFSDQSKDGYAGYIDGKTTQEAFYKYIKNLLSKFEGADYFLDKIEREDFLRKQRTFDNGSIPHQIHLQEMNAILRRQGEHYPLLKENKEKIEKILTFRIPYYVGPLARGNRDFAWLTRNSDQAIRPWNFEEIVDKASSAESFINKMTNYDLYLPEEKVLPKHSLLYETFAVYNELTKVKFIAEGLRDYQFFDSGQKKQIVNQLFKEKRKVTEKDIIHYLHNVDGYDGIELKGIEKQFNASLSTYHDLLKIIKDKEFMDNHKNQEILENIVHTLTIFEDREMIKQRLAQYDSIFDEKVIKALTRRHYTGWGKLSAKLINGICDKKTGKTILDYLIDDGYNNRNFMQLINDDGLSFKEIIQKAQVVGKTDDLTQVVRELSGSPAIKKGILQSIKIVDELVKIMGYAPESIVIEMARENQTTAKGKKNSQQRYKRIEDALKNLAPGLDSTISKENPTDNIQLQNDRLFLYYLQNGKDMYTGEALDINQLSSYDIDHIIPQAFIKDDSLDNRVLTSSKDNRGKSDNVPSLEVVKKRKAFWQQLLDSKLISERKFNNLTKAERGGLDERDKVGFIKRQLVETRQITKHVARILDARFNTEVSEKNQKIRSVKIITLKSNLVSNFRKEFKLYKVREINDYHHAHDAYLNAVVAKAILKKYPKLEPEFVYGDYQKYDLKRYISKSKDPKEVEKATEKYFFYSNLLNFFKEEVHYADGTIVKRENIEYSKDTGEIAWNKEKDFVTIKKVLSYPQVNIVKKREVQTGGFSKESILPKGNSDKLIPRKTKDILWDTTKYGGFDSPVIAYSILLIADIEKGKAKKLKTVKTLVGITIMEKAAFEKNPITFLENKGYHNVRKENILCLPKYSLFELENGRRRLLASAKELQKGNEIVLPVYLTTLLYHSKNVHKLDEPEHLEYIQKHRYEFKDLLNLVSEFSQKYVLAEANLEKIKSLYVDNEQADIEILANSFINLLTFTALGAPAAFKFFGKDVDRKRYTTVSEILNATLIHQSITGLYETRIDLSKLGED

SEQ ID NO: 582 - protein, 1420 aa, Streptococcus sp.
  Streptococcus sp. oral taxon 071 str. 73H25AP
MAKFNKNYSIGLDIGVSSVGYAVVTEDYRVPAFKFKVLGNTEKEKIKKNLIGSTTFVPAQSAQGTRVFRVNRRRIDRRNHRIAYLRDIFQKEIEKIDKNFYRRLDESFRVLGDKSEDIQIKQPFFGNKELETAYHKKYPTIYHLRKHLADADKNSPVADIREVYMVLSHILKYRGHFLTLGKIDPNNINMQNSWIDFIESCQDAFDLEISDESKTIAAIFKSSENRQEKVKQILSYFQQELLKKDKSIFKQLLQLLFGLKTKFKDCFELEEEPDLNFSKENYDENLENLLGALEEDFSDVFAKLKILRDTILLSSMLTYTGATHARFSATMVERYEEHRKDLQRFKSFVKQNLSEQDYLDIFGRKTPTGFDVDKETKGYVGYISNKMVLTNPQKQKTIQQNFYDYISGKITGIEGAECFLNKISDGTFLRKLRTTDNGAIPNQIHAYELEKIIERQGRDYPFLLENKDKLLSILTFKIPYYVGPLAKGNNSRFAWIKRTTSQDVLDDNDEDTRNGKIRPWNYHKLINMDETRDAFIINLIGNDIILLNEKVLPKRSLIYEEVMLQNELTRVKYKDKYGKIHFFNSELRQEIINNLFKTNSKRVSSAMLLSYLENFTNLQAVEIVSGIEKGKSLNSTLKTYNDLKTIFSEELLDSEIYQKELEEIIKVITVFDDKKSIKNYLTKYFGHLEFLNEEKINQLSKLRYTGWGRYSGKLLLGIRDEDTGFNLMQFLRNDDENRNLTQLISDTTLSFDSAIKAIQSKSTVEDDVFEEIKNLAGSPAIKRGILNSIKIVDELVQIIGYPPQNIIIEMARENMTTEEGQKKAKTRKSKLESALKNIEDSVLESGKVPHSDEQLQSEKLYLYYLQNGKDMYSLDKTGSPTPLYRDQLDQYEVDHIIPYSFLPIDSIDNKVLTHRENNQRKLNNIPDKETVANMKPFWEKLYNAKLISQTKYQRLTTSERTPDGVLTESMKAGFIERQLVETRQIIKHVARILDNRFSDTKIITLKSQLVTNFRNTFHIAKIRELNDYHHAHDAYLAVVVGQTLLKAYPKLAPELIYGHHAHFNRHEENKATLRKHLYSNIMRFFNNPDSKVSKDIWDCNRDLPIVKDVIYNSQINFVKRTMIKKGAFYNQNPVGKLNKQIAANNRYPLKTKVSSLDTSIYGGYGPMNSALSIIIIAERFNEKKGKIETVKEFHDIFIIDYEKFNNNPFQFLNNVSEEGFLKKNDLNRVLAFYRISKYSLMQKIDGTRMLFESKSNLHKVTQFKLTKTQNELFFHMKRLLTKSNLMDLKSESAIKESQNFIQTHQNEFDNIADRLSNYSQKMLGETKSLQTLINGYNERPIKQIDNNEETIRYYYDNFIKMFSFVKSGAPKDIINFFNDKYTVPRMRPKPDRKMLDATLIHQSITGLYETRIDLSKLGED

SEQ ID NO: 583 - protein, 1122 aa, Streptococcus suis
  Streptococcus suis 89/1591
MSNGKILGLDIGIASVGVGVIDAQTGEIIHASSRIFPSANAANNAERRTFRGSRRLIRRKKHRIKRLDDLFNDFHINLDGEMSTDNPYVLRVKGLSQKLTVEELYISIKNIMKRRGISYLDDAESDNEAGRSDYAKAIERNRQLLTSKTPGEIQLERLEKYGQLRGNFTIIDEEGQSQQIINVFSTSDYVKEVEKILDCQKMYHKFISDEFCDKLIELLREKRKYYVGPGNEKSRTDYGIYRTDGTTLENLFGILIGKCTFYPDQYRSSRASYTAQEFNFLNDLNNLTVPTETKKLSQEQKEFLVNYAKETSVLGAGKILQQIAKLADCKVEDIRGYRLDNKDKPELHTFETYRAMKGLVPLVDIGVLSREQLDILADILTLNTDFEGIREALKKQLPNVFDEKQVKGLASFRKSKSQLFAKGWHNLSQKIMLEVIPELYATSDEQMTILTRLGKFEKSSVAEYPSSINVDEITDEIYNPVVAKSIRQTIKIINASIKKWGEFDQIVIEMPRDRNEDEEKKRIADGQKANAKEKADSILRAAELYCAGKVLPDYVYNGHNQLATKIRLWYQQGERCIYTGQPISIHDLIHNQNQYEIDHILPLSLTFDDSLSNKVLVLATANQEKAQRTPYNYLKSATSAWSYREFKDYVTKRKGIGKKKCEYLTFEEDINGFEVRSKFIQRNLVDTRYASKVILNALQDYFKISGIQTKVSVVRGQFTSQLRHKWGIEKTRETYHHHAVDALIIAASSQLRLWKKQESPLVVDYQEGRQVDLETGEILELTDEQYKELVYQPPYQGFVNTISSSAFDNEILFSYQVDSKVNRKISDATIYATRNAQLGKDKTEGIYVLGKIKDIYTQAGYEAFLKRYTKDKTSFLMYHKDLDTWEKVIEIILRDYREYDEKGKEIGNPFERYRRENGYVKKYSRKGNGTAIKSLKYYDNKLGNHIDITPENSRNAVVLQSLKPWRTDVYFNKETGKYEFLGIKYSDLSFEKGTGEYGISQEKYDSIKIAEGVAKKSIFKFTLYKQDLLFIKDIENNFGKLLRFTSKNDTSKHYVELKPYDKNKFGTEEPLLPVLGNVAKSGQCIKGLNKSNISIYKVRTDILGYRHFIKQEGEHPQLKFKK

SEQ ID NO: 584 - protein, 1122 aa, Streptococcus suis
MSNGKILGLDIGIASVGVGVIDAQTGEIIHASSRIFPSANAANNAERRTFRGSRRLIRRKKHRIKRLDDLFNDFHINLDGEMSTDNPYVLRVKGLSQKLTVEELYISIKNIMKRRGISYLDDAESDNEAGRSDYAKAIERNRQLLTSKTPGEIQLERLEKYGQLRGNFTIIDEEGQSQQIINVFSTSDYVKEVEKILDCQKMYHKFISDEFCDKLIELLREKRKYYVGPGNEKSRTDYGIYRTDGTTLENLFGILIGKCTFYPDQYRSSRASYTAQEFNFLNDLNNLTVPTETKKLSQEQKEFLVNYAKETSVLGAGKILQQIAKLADCKVEDIRGYRLDNKDKPELHTFETYRAMKGLVPLVDIGVLSREQLDILADILTLNTDFEGIREALKKQLPNVFDEKQVKGLASFRKSKSQLFAKGWHNLSQKIMLEVIPELYATSDEQMTILTRLGKFEKSSVAEYPSSINVDEITDEIYNPVVAKSIRQTIKIINASIKKWDEFDQIVIEMPRDRNEDEEKKRIADGQKANAKEKADSILRAAELYCAGKVLPDYVYNGHNQLATKIRLWYQQGERCIYTGQPISIHDLIHNQNQYEIDHILPLSLTFDDSLSNKVLVLATANQEKAQRTPYNYLKSATSAWSYREFKDYVTKRKGIGKKKCEYLTFEEDINGFEVRSKFIQRNLVDTRYASKVILNALQDYFKISGIQTKVSVVRGQFTSQLRHKWGIEKTRETYHHHAVDALIIAASSQLRLWKKQESPLVVDYQEGRQVDLETGEILELTDEQYKELVYQPPYQGFVNTISSSAFDNEILFSYQVDSKVNRKISDATIYATRNAQLGKDKTEGIYVLGKIKDIYTQAGYEAFLKRYTKDKTSFLMYHKDLDTWEKVIEIILRDYREYDEKGKEIGNPFERYRRENGYVKKYSRKGNGTAIKSLKYYDNKLGNHIDITPENSRNAVVLQSLKPWRTDVYFNKETGKYEFLGIKYSDLSFEKGTGEYGISQEKYDSIKIAEGVAKKSIFKFTLYKQDLLFIKDIENNFGKLLRFTSKNDTSKHYVELKPYDKNKFGTEEPLLPVLGNVAKSGQCIKGLNKSNISIYKVRTDILGYRHFIKQEGEHPQLKFKK

SEQ ID NO: 585 - protein, 1381 aa, Streptococcus suis
MVKKKYAIGIDIGTNSVGWSIVTDDYKVPSKKMKVFGNTEKRYIKKNLLGTLLFDEGNTAENRRLKRTARRRYTRRRNRILYLQEIFAEEINKIDDSFFQRLDDSFLIVEDKQGSKHPIFGTLQEEKEYHKQFPTIYHLRKQLADSSQKADIRLIYLALAHIIKYRGHFLFEGDLKSENKDVQHLFNDFVEMFDKTVEGSYLSENLPNVADVLVEKVSKSRRLENILHYFPNEKKNGLFGNFLALALGLQPNFKTNFELAEDAKIQFSKETYEEDLEELLGKIGDDYADLFIATKSLYDGILLAGILSTTDSTTKAPLSSSMVNRYEEHQKDLALLKNFIHQNLSDSYKEVFNDKLKDGYAGYIEGKTTQENFYRFIKKAIEKIEGSNYFIDKIDREDFLRKQRTFDNGSIPHQIHLQEMHAIIRRQAEFYPFLVENQDKIEKILTFRIPYYVGPLARGKSEFAWLNRKSDEKIRPWNFDEMVDKETSAENFITRMTNYDRYLPDQKVLPKHSLLYEKFAVYNELTKVKFIAEGMRDYQFLDSGQKKDIVKTLFKTKRKVTAKDIKAYLENSNGYAGVELKGLEEQFNASLPTYHDLLKILRDKAFIDAEENQEILEDIVLTLTLFEDREMIRKRLEKYKDILTEEQRKKLERRHYTGWGRLSAKLINGILDKVTRKTILGYLIDDGTSNRNFMQLINDDTLSFVDEIRLAQGSGEAEDYRAEVQNLAGSPAIKKGILQSLKIVDELIEVMGYEPEHIVVEMARENQFTNQGRRNSQQRINRLENALKDFGSKILEEQKPYGVSKVNNIHLQSDRLFLYYLQNGKDMYTDEELDIDHLSEYDIDHIIPQAFIKDDSLDNKVLTKSAKNRGKSDDVPSMEIVHNRKNFWRQLLKSKLISQRKFDNLTKAERGGLTNEDKARFIQRQLVETRQITKHVARMLDTRFNTKLDEAGNRIRDPKVNIITLKSNLVSQFRKDYQLYKIREINNYHHAHDAYINAVVATALLKKYPQLAPEFVYGEYPTYNSYNSRKSATEKVLFYSNIMNFFKRIVVHSKTGEVRIRPVIEVNKETGEIVWDKKSDFRTVRKVLSYPQVNVVKKTEVQNHGLDRGKPKGFYNANLSPRPKEGSVENLVPAKQSFDTKRYGGYAGISNSYAVLVNGIIEKGKKKSKAEVTEFQGISILARKDFDKNPKQYLLNLGYKDIKSIIKLPKYSLFELENGSRRMLASILSTNNKRGEIHKGNEMYLPDKFVTLLYHAMRVNRTLEPGHKKYVETHRHVFDELLIYILEYNEKIVGAKANGKRIVEAYSARKDTDNLEELCNSFINLLNLTALGSAVDFEFLGTKIPRYRDYTPSSLLKATLIHQSVTGLYETRIDLSKLGGD

SEQ ID NO: 586 - protein, 1122 aa, Streptococcus suis; identical to SEQ ID NO: 583

SEQ ID NO: 587 - protein, 1388 aa, Streptococcus thermophilus
MTKPYSIGLDIGTNSVGWAVITDNYKVPSKKMKVLGNTSKKYIKKNLLGVLLFDSGITAEGRRLKRTARRRYTRRRNRILYLQEIFSTEMATLDDAFFQRLDDSFLVPDDKRDSKYPIFGNLVEEKVYHDEFPTIYHLRKYLADSTKKADLRLVYLALAHMIKYRGHFLIEGEFNSKNNDIQKNFQDFLDTYNAIFESDLSLENSKQLEEIVKDKISKLEKKDRILKLFPGEKNSGIFSEFLKLIVGNQADFRKCFNLDEKASLHFSKESYDEDLETLLGYIGDDYSDVFLKAKKLYDAILLSGFLTVTDNETEAPLSSAMIKRYNEHKEDLALLKEYIRNISLKTYNEVFKDDTKNGYAGYIDGKTNQEDFYVYLKNLLAEFEGADYFLEKIDREDFLRKQRTFDNGSIPYQIHLQEMRAILDKQAKFYPFLAKNKERIEKILTFRIPYYVGPLARGNSDFAWSIRKRNEKITPWNFEDVIDKESSAEAFINRMTSFDLYLPEEKVLPKHSLLYETFNVYNELTKVRFIAESMRDYQFLDSKQKKDIVRLYFKDKRKVTDKDIIEYLHAIYGYDGIELKGIEKQFNSSLSTYHDLLNIINDKEFLDDSSNEAIIEEIIHTLTIFEDREMIKQRLSKFENIFDKSVLKKLSRRHYTGWGKLSAKLINGIRDEKSGNTILDYLIDDGISNRNFMQLIHDDALSFKKKIQKAQIIGDEDKGNIKEVVKSLPGSPAIKKGILQSIKIVDELVKVMGGRKPESIVVEMARENQYTNQGKSNSQQRLKRLEKSLKELGSKILKENIPAKLSKIDNNALQNDRLYLYYLQNGKDMYTGDDLDIDRLSNYDIDHIIPQAFLKDNSIDNKVLVSSASNRGKSDDFPSLEVVKKRKTFWYQLLKSKLISQRKFDNLTKAERGGLLPEDKAGFIQRQLVETRQITKHVARLLDEKFNNKKDENNRAVRTVKIITLKSTLVSQFRKDFELYKVREINDFHHAHDAYLNAVIASALLKKYPKLEPEFVYGDYPKYNSFRERKSATEKVYFYSNIMNIFKKSISLADGRVIERPLIEVNEETGESVWNKESDLATVRRVLSYPQVNVVKKVEEQNHGLDRGKPKGLFNANLSSKPKPNSNENLVGAKEYLDPKKYGGYAGISNSFAVLVKGTIEKGAKKKITNVLEFQGISILDRINYRKDKLNFLLEKGYKDIELIIELPKYSLFELSDGSRRMLASILSTNNKRGEIHKGNQIFLSQKFVKLLYHAKRISNTINENHRKYVENHKKEFEELFYYILEFNENYVGAKKNGKLLNSAFQSWQNHSIDELCSSFIGPTGSERKGLFELTSRGSAADFEFLGVKIPRYRDYTPSSLLKDATLIHQSVTGLYETRIDLAKLGEG

SEQ ID NO: 588 - protein, 1128 aa, Streptococcus thermophilus
MSDLVLGLDIGIGSVGVGILNKVTGEIIHKNSRIFPAAQAENNLVRRTNRQGRRLTRRKKHRIVRLNRLFEESGLITDFTKISINLNPYQLRVKGLTDELSNEELFIALKNMVKHRGISYLDDASDDGNSSVGDYAQIVKENSKQLETKTPGQIQLERYQTYGQLRGDFTVEKDGKKHRLINVFPTSAYRSEALRILQTQQEFNPQITDEFINRYLEILTGKRKYYHGPGNEKSRTDYGRYRTSGETLDNIFGILIGKCTFYPEEFRAAKASYTAQEFNLLNDLNNLTVPTETKKLSKEQKNQIINYVKNEKAMGPAKLFKYIAKLLSCDVADIKGYRIDKSGKAEIHTFEAYRKMKTLETLDIEQMDRETLDKLAYVLTLNTEREGIQEALEHEFADGSFSQKQVDELVQFRKANSSIFGKGWHNFSVKLMMELIPELYETSEEQMTILTRLGKQKRLRLQIKQNISNKTKYIDEKLLTEEIYNPVVAKSVRQAIKIVNAAIKEYGDFDNIVIEMARETNEDDEKKAIQKIQKANKDEKDAAMLKAANQYNGKAELPHSVFHGHKQLATKIRLWHQQGERCLYTGKTISIHDLINNPNQFEVDHILPLSITFDDSLANKVLVYATANQEKGQRTPYQALDSMDDAWSFRELKAFVRESKTLSNKKKEYLLTEEDISKFDVRKKFIERNLVDTRYASRVVLNALQEHFRAHKIDTKVSVVRGQFTSQLRRHWGIEKTRDTYHHHAVDALIIAASSQLNLWKKQKNTLVSYSEEQLLDIETGELISDDEYKESVFKAPYQHFVDTLKSKEFEDSILFSYQVDSKFNRKISDATIYATRQAKVGKDKKDETYVLGKIKDIYTQDGYDAFMKIYKKDKSKFLMYRHDPQTFEKVIEPILENYPNKQMNEKGKEVPCNPFLKYKEEHGYIRKYSKKGNGPEIKSLKYYDSKLLGNPIDITPENSKNKVVLQSLKPWRTDVYFNKATGKYEILGLKYADLQFEKGTGTYKISQEKYNDIKKKEGVDSDSEFKFTLYKNDLLLVKDTETKEQQLFRFLSRTLPKQKHYVELKPYDKQKFEGGEALIKVLGNVANGGQCIKGLAKSNISIYKVRTDVLGNQHIIKNEGDKPKLDF

SEQ ID NO: 589 - protein, 1121 aa, Streptococcus thermophilus
MSDLVLGLDIGIGSVGVGILNKVTGEIIHKNSRIFPAAQAENNLVRRTNRQGRRLTRRKKHRIVRLNRLFEESGLITDFTKISINLNPYQLRVKGLTDELSNEELFIALKNMVKHRGISYLDDASDDGNSSVGDYAQIVKENSKQLETKTPGQIQLERYQTYGQLRGDFTVEKDGKKHRLINVFPTSAYRSEALRILQTQQEFNPQITDEFINRYLEILTGKRKYYHGPGNEKSRTDYGRYRTSGETLDNIFGILIGKCTFYPDEFRAAKASYTAQEFNLLNDLNNLTVPTETKKLSKEQKNQIINYVKNEKAMGPAKLFKYIAKLLSCDVADIKEYRIDKSGKAEIHTFEAYRKMKTLETLDIEQMDRETLDKLAYVLTLNTEREGIQEALEHEFADGSFSQKQVDELVQFRKANSSIFGKGWHNFSVKLMMELIPELYETSEEQMTILTRLGKQKTTSSSNKTKYIDEKLLTEEIYNPVVAKSVRQAIKIVNAAIKEYGDFDNIVIEMARETNEDDEKKAIQKIQKANKDEKDAAMLKAANQYNGKAELPHSVFHGHKQLATKIRLWHQQGERCLYTGKTISIHDLINNSNQFEVDHILPLSITFDDSLANKVLVYATANQEKGQRTPYQALDSMDDAWSFRELKAFVRESKTLSNKKKEYLLTEEDISKFDVRKKFIERNLVDTRYASRVVLNALQEHFRAHKIDTKVSVVRGQFTSQLRRHWGIEKTRDTYHHHAVDALIIAASIQLNLWKKQKNTLVSYSEDQLLDIETGELISDDEYKESVFKAPYQHFVDTLKSKEFEDSILFSYQVDSKFNRKISDATIYATRQAKVGKDKADETYVLGKIKDIYTQDGYDAFMKIYKKDKSKFLMYRHDPQTFEKVIEPILENYPNKQINEKGKEVPVNPFLKYKEEHGYIRKYSKKGNGPEIKSLKYYDSKLGNHIDITPKDSNNKVVLQSVSPWRADVYFNKTTGKYEILGLKYADLQFEKGTGTYKISQEKYNDIKKKEGVDSDSEFKFTLYKNDLLLVKDTETKEQQLFRFLSRTMPKQKHYVELKPYDKQKFEGGEALIKVLGNVANSGQCKKGLGKSNISIYKVRTDVLGNQHIIKNEGDKPKLDF

SEQ ID NO: 590 - protein, 1388 aa, Streptococcus thermophilus
MTKPYSIGLDIGTNSVGWAVTTDNYKVPSKKMKVLGNTSKKYIKKNLLGVLLFDSGITAEGRRLKRTARRRYTRRRNRILYLQEIFSTEMATLDDAFFQRLDDSFLVPDDKRDSKYPIFGNLVEEKAYHDEFPTIYHLRKYLADSTKKADLRLVYLALAHMIKYRGHFLIEGEFNSKNNDIQKNFQDFLDTYNAIFESDLSLENSKQLEEIVKDKISKLEKKDRILKLFPGEKNSGIFSEFLKLIVGNQADFRKCFNLDEKASLHFSKESYDEDLETLLGYIGDDYSDVFLKAKKLYDAILLSGFLTVTDNETEAPLSSAMIKRYNEHKEDLALLKEYIRNISLKTYNEVFKDDTKNGYAGYIDGKTNQEDFYVYLKKLLAEFEGADYFLEKIDREDFLRKQRTFDNGSIPYQIHLQEMRAILDKQAKFYPFLAKNKERIEKILTFRIPYYVGPLARGNSDFAWSIRKRNEKITPWNFEDVIDKESSAEAFINRMTSFDLYLPEEKVLPKHSLLYETFNVYNELTKVRFIAESMRDYQFLDSKQKKDIVRLYFKDKRKVTDKDIIEYLHAIYGYDGIELKGIEKQFNSSLSTYHDLLNIINDKEFLDDSSNEAIIEEIIHTLTIFEDREMIKQRLSKFENIFDKSVLKKLSRRHYTGWGKLSAKLINGIRDEKSGNTILDYLIDDGISNRNFMQLIHDDALSFKKKIQKAQIIGDEDKGNIKEVVKSLPGSPAIKKGILQSIKIVDELVKVMGGRKPESIVVEMARENQYTNQGKSNSQQRLKRLEKSLKELGSKILKENIPAKLSKIDNNALQNDRLYLYYLQNGKDMYTGDDLDIDRLSNYDIDHIIPQAFLKDNSIDNKVLVSSASNRGKSDDVPSLEVVKKRKTFWYQLLKSKLISQRKFDNLTKAERGGLSPEDKAGFIQRQLVETRQITKHVARLLDEKFNNKKDENNRAVRTVKIITLKSTLVSQFRKDFELYKVREINDFHHAHDAYLNAVVASALLKKYPKLEPEFVYGDYPKYNSFRERKSATEKVYFYSNIMNIFKKSISLADGRVIERPLIEVNEETGESVWNKESDLATVRRVLSYPQVNVVKKVEEQNHGLDRGKPKGLFNANLSSKPKPNSNENLVGAKEYLDPKKYGGYAGISNSFTVLVKGTIEKGAKKKITNVLEFQGISILDRINYRKDKLNFLLEKGYKDIELIIELPKYSLFELSDGSRRMLASILSTNNKRGEIHKGNQIFLSQKFVKLLYHAKRISNTINENHRKYVENHKKEFEELFYYILEFNENYVGAKKNGKLLNSAFQSWQNHSIDELCSSFIGPTGSERKGLFELTSRGSAADFEFLGVKIPRYRDYTPSSLLKDATLIHQSVTGLYETRIDLAKLGEG

SEQ ID NO: 591 - protein, 1121 aa, Streptococcus thermophilus
MSDLVLGLDIGIGSVGVGILNKVTGEIIHKNSRIFPAAQAENNLVRRTNRQGRRLARRKKHRRVRLNRLFEESGLITDFTKISINLNPYQLRVKGLTDELSNEELFIALKNMVKHRGISYLDDASDDGNSSVGDYAQIVKENSKQLETKTPGQIQLERYQTYGQLRGDFTVEKDGKKHRLINVFPTSAYRSEALRILQTQQEFNPQITDEFINRYLEILTGKRKYYHGPGNEKSRTDYGRYRTSGETLDNIFGILIGKCTFYPDEFRAAKASYTAQEFNLLNDLNNLTVPTETKKLSKEQKNQIINYVKNEKAMGPAKLFKYIAKLLSCDVADIKGYRIDKSGKAEIHTFEAYRKMKTLETLDIEQMDRETLDKLAYVLTLNTEREGIQEALEHEFADGSFSQKQVDELVQFRKANSSIFGKGWHNFSVKLMMELIPELYETSEEQMTILTRLGKQKTTSSSNKTKYIDEKLLTEEIYNPVVAKSVRQAIKIVNAAIKEYGDFDNIVIEMARETNEDDEKKAIQKIQKANKDEKDAAMLKAANQYNGKAELPHSVFHGHKQLATKIRLWHQQGERCLYTGKTISIHDLINNSNQFEVDHILPLSITFDDSLANKVLVYATANQEKGQRTPYQALDSMDDAWSFRELKAFVRESKTLSNKKKEYLLTEEDISKFDVRKKFIERNLVDTRYASRVVLNALQEHFRAHKIDTKVSVVRGQFTSQLRRHWGIEKTRDTYHHHAVDALIIAASSQLNLWKKQKNTLVSYSEDQLLDIETGELISDDEYKESVFKAPYQHFVDTLKSKEFEDSILFSYQVDSKFNRKISDATIYATRQAKVGKDKADETYVLGKIKDIYTQDGYDAFMKIYKKDKSKFLMYRHDPQTFEKVIEPILENYPNKQINEKGKEVPCNPFLKYKEEHGYIRKYSKKGNGPEIKSLKYYDSKLGNHIDITPKDSNNKVVLQSVSPWRADVYFNKTTGKYEILGLKYADLQFEKGTGTYKISQEKYNDIKKKEGVDSDSEFKFTLYKNDLLLVKDTETKEQQLFRFLSRTMPKQKHYVELKPYDKQKFEGGEALIKVLGNVANSGQCKKGLGKSNISIYKVRTDVLGNQHIIKNEGDKPKLDF

SEQ ID NO: 592 - protein, 1122 aa, Streptococcus thermophilus
MSDLVLGLDIGIGSVGVGILNKVTGEIIHKNSRIFPAAQAENNLVRRTNRQGRRLTRRKKHRIVRLNRLFEESGLITDFTKISINLNPYQLRVKGLTDELSNEELFIALKNMVKHRGISYLDDASDDGNSSVGDYAQIVKENSKQLETKTPGQIQLERYQTYGQLRGDFTVEKDGKKHRLINVFPTSAYRSEALRILQTQQEFNSQITDEFINRYLEILTGKRKYYHGPGNEKSRTDYGRYRTNGETLDNIFGILIGKCTFYPDEFRAAKASYTAQEFNLLNDLNNLTVPTETKKLSKEQKNQIINYVKNEKVMGPAKLFKYIAKLLSCDVADIKGHRIDKSGKAEIHTFEAYRKMKTLETLDIEQMDRETLDKLAYVLTLNTEREGIQEALEHEFADGSFSQKQVDELVQFRKANSSIFGKGWHNFSVKLMMELIPELYETSEEQMTILTRLGKQKTTSSSNKTKYIDEKLLTEEIYNPVVAKSVRQAIKIVNAAIKEYGDFDNIVIEMARETNEDDEKKAIQKIQKANKDEKDAAMLKAANQYNGKAELPHSVFHGHKQLATKIRLWHQQGERCLYTGKTISIHDLINNPNQFEVDHILPLSITFDDSLANKVLVYATANQEKGQRTPYQALDSMDDAWSFRELKAFVRESKTLSNKKKEYLLTEEDISKFDVRKKFIERNLVDTRYASRVVLNALQEHFRAHKIDTKVSVVRGQFTSQLRRHWGIEKTRDTYHHHAVDALIIAASSQLNLWKKQKNTLVSYSEEQLLDIETGELISDDEYKESVFKAPYQHFVDTLKSKEFEDSILFSYQVDSKFNRKISDATIYATRQAKVGKDKKDETYVLGKIKDIYTQDGYDAFMKIYKKDKSKFLMYRHDPQTFEKVIEPILENYPNKEMNEKGKEVPCNPFLKYKEEHGYIRKYSKKGNGPEIKSLKYYDSKLLGNPIDITPENSKNKVVLQSLKPWRTDVYFNKNTGKYEILGLKYADLQFEKKTGTYKISQEKYNGIMKEEGVDSDSEFKFTLYKNDLLLVKDTETKEQQLFRFLSRTMPNVKYYVELKPYSKDKFEKNESLIEILGSADKSGRCIKGLGKSNISIYKVRTDVLGNQHIIKNEGDKPKLDF

SEQ ID NO: 593 - protein, 1388 aa, Streptococcus thermophilus
MTKPYSIGLDIGTNSVGWAVITDNYKVPSKKMKVLGNTSKKYIKKNLLGVLLFDSGITAEGRRLKRTARRRYTRRRNRILYLQEIFSTEMATLDDAFFQRLDDSFLVPDDKRDSKYPIFGNLVEEKAYHDEFPTIYHLRKYLADSTKKADLRLVYLALAHMIKYRGHFLIEGEFNSKNNDIQKNFQDFLDTYNAIFESDLSLENSKQLEEIVKDKISKLEKKDRILKLFPGEKNSGIFSEFLKLIVGNQADFRKCFNLDEKASLHFSKESYDEDLETLLGYIGDDYSDVFLKAKKLYDAILLSGFLTVTDNETEAPLSSAMIKRYNEHKEDLALLKEYIRNISLKTYNEVFKDDTKNGYAGYIDGKTNQEDFYVYLKNLLAEFEGADYFLEKIDREDFLRKQRTFDNGSIPYQIHLQEMRAILDKQAKFYPFLAKNKERIEKILTFRIPYYVGPLARGNSDFAWSIRKRNEKITPWNFEDVIDKESSAEAFINRMTSFDLYLPEEKVLPKHSLLYETFNVYNELTKVRFIAESMRDYQFLDSKQKKDIVRLYFKDKRKVTDKDIIEYLHAIYGYDGIELKGIEKQFNSSLSTYHDLLNIINDKEFLDDSSNEAIIEEIIHTLTIFEDREMIKQRLSKFENIFDKSVLKKLSRRHYTGWGKLSAKLINGIRDEKSGNTILDYLIDDGISNRNFMQLIHDDALSFKKKIQKAQIIGDEDKGNIKEVVKSLPGSPAIKKGILQSIKIVDELVKVMGGRKPESIVVEMARENQYTNQGKSNSQQRLKRLEKSLKELGSKILKENIPAKLSKIDNNALQNDRLYLYYLQNGKDMYTGDDLDIDRLSNYDIDHIIPQAFLKDNSIDNKVLVSSASNRGKSDDFPSLEVVKKRKTFWYQLLKSKLISQRKFDNLTKAERGGLLPEDKAGFIQRQLVETRQITKHVARLLDEKFNNKKDENNRAVRTVKIITLKSTLVSQFRKDFELYKVREINDFHHAHDAYLNAVIASALLKKYPKLEPEFVYGDYPKYNSFRERKSATEKVYFYSNIMNIFKKSISLADGRVIERPLIEVNEETGESVWNKESDLATVRRVLSYPQVNVVKKVEEQNHGLDRGKPKGLFNANLSSKPKPNSNENLVGAKEYLDPKKYGGYAGISNSFAVLVKGTIEKGAKKKITNVLEFQGISILDRINYRKDKLNFLLEKGYKDIELIIELPKYSLFELSDGSRRMLASILSTNNKRGEIHKGNQIFLSQKFVKLLYHAKRISNTINENHRKYVENHKKEFEELFYYILEFNENYVGAKKNGKLLNSAFQSWQNHSIDELCSSFIGPTGSERKGLFELTSRGSAADFEFLGVKIPRYRDYTPSSLLKDATLIHQSVTGLYETRIDLAKLGEG

SEQ ID NO: 594 - protein, 1121 aa, Streptococcus thermophilus
MSDLVLGLDIGIGSVGVGILNKVTGEIIHKNSRIFPAAQAENNLVRRTNRQGRRLTRRKKHRRVRLNRLFEESGLITDFTKISINLNPYQLRVKGLTDELSNEELFIALKNMVKHRGISYLDDASDDGNSSVGDYAQIVKENSKQLETKTPGQIQLERYQTYGQLRGDFTVEKDGKKHRLINVFPTSAYRSEALRILQTQQEFNPQITDEFVNRYLEILTGKRKYYHGPGNEKSRTDYGRYRTNGETLDNIFGILIGKCTFYPEEFRAAKASYTAQEFNLLNDLNNLTVPTETKKLSKEQKNQIINYVKNEKAMGPAKLFKYIAKLLSCDVADIKGYRIDKSGKAEIHTFEAYRKMKTLETLDIEQMDRETLDKLAYVLTLNTEREGIQEALEHEFADGSFSQKQVDELVQFRKANSSIFGKGWHNFSVKLMMELIPELYETSEEQMTILKRLGKQKTTSSSNKTKYIDEKLLTEEIYNPVVAKSIRQAIKIVNAAIKEYGDFDNIVIEMARETNEDDEKKAIQKIQKANKDEKDAAMLKAANQYNGKAELPHSVFHGHKQLATKIRLWHQQGERCLYTGKTISIHDLINNPNQFEVDHILPLSITFDDSLANKVLVYATANQEKGQRTPYQALDSMDDAWSFRELKAFVRESKTLSNKKKEYLLTEEDISKFDVRKKFIERNLVDTRYASRVVLNALQEHFRAHKIDTKVSVVRGQFTSQLRRHWGIEKTRDTYHHHAVDALIIAASSQLNLWKKQKNTLVSYSEDQLLDIETGELISDDEYKESVFKAPYQHFVDTLKSKEFEDSILFSYQVDSKFNRKISDATIYATRQAKVGKDKKDETYVLGKIKDIYTQDGYDAFMKIYKKDKSKFLMYRHDPQTFEKVIEPILENYPNKEMNEKGKEVPCNPFLKYKEEHGYIRKYSKKGNDPEIKSLKYYDSKLGNHIDITPKDSNNKVVLQSVSPWRADVYFNKTTGKYEILGLKYADLQFEKGTGTYKISQEKYNDIKKKEGVDSDSEFKFTLYKNDLLLVKDTETKEQQLFRFLSRTMPKQKHYVELKPYDKQKFEGGEALIKVLGNVANSGQCKKGLGKSNISIYKVRTDVLGNQHIIKNEGDKPKLDF

SEQ ID NO: 595 - protein, 1122 aa, Streptococcus thermophilus
  Streptococcus thermophilus MTCC 5460
MSDLVLGLDIGIGSVGVGILNKVTGEIIHKNSRIFPAAQAENNVERRTNRQGRRLTRRKKHRRVRLNRLFEESGLITDFTKISINLNPYQLRVRGLTDELSNEELFIALKNMVKHRGISYLDDASDDGNSSVGDYAQIVKENSKQLETKTPGQIQLERYQTYGQLRGDFTVEKDGKKHRLINVFPTSAYRSEALRILQTQQEFNSQITDEFINRYLEILTGKRKYYHGPGNEKSRTDYGRYRTSGETLDNIFGILIGKCTFYPEEFRAAKASYTAQEFNLLNDLNNLTVPTETKKLSKEQKNQIINYVKNEKAMGPAKLFKYIAKLLSCDVADIKGYRIDKSGKAEIHTFEAYRKMKTLETLDIEQMDRETLDKLAYVLTLNTEREGIQEALEHEFADGSFSQKQVDELVQFRKASSSIFGKGWHNFSVKLMMELIPELYETSEEQMTILTRLGKQKTTSSSNKTKYIDEKLLTEEIYNPVVAKSVRQAIKIVNAAIKEYGDFDNIVIEMARETNEDDEKKAIQKIQKANKDEKDAAMLKAANQYNGKAELPHSVFHGHKQLATKIRLWHQQGERCLYTGKTISIHDLINNPNQFEVDHILPLSITFDDSLANKVLVYATANQEKGQRTPYQALDSMDDAWSFRELKAFVRESKTLSNKKKEYLLTEEDISKFDVRKKFIERNLVDTRYASRVVLNALQEHFRAHKIDTKVSVVRGQFTSQLRRHWGIEKTRDTYHHHAVDALIIAASSQLNLWKKQKNTLVSYSEDQLLDIETGELISDDEYKESVFKAPYQHFVDTLKSKEFEDSILFSYQVDSKFNRKLSDATIYATRQAKVGKDKKDETYVLGKIKDIYTQDGYDAFMKIYKKDKSKFLMYRHDPQTFEKVIEPILENYPNKEMNEKGKEVPCNPFLKYKEEHGYIRKYSKKGNGPEIKSLKYYDSKLLGNPIDITPENSKNKVVLQSLKPWRADVYFNKTTGKYEILGLKYADLQFEKKTGTYKISQEKYNGIMKEEGVDSDSEFKFTLYKNDLLLVKDTETKEQQLFRFLSRTMPNVKYYVELKPYSKDKFEKNESLIEILGSADKSGRCIKGLGKSNISIYKVRTDVLGNQHIIKNEGDKPKLDF

SEQ ID NO: 596 - protein, 1121 aa, Streptococcus thermophilus
MSDLVLGLDIGIGSVGVGILNKVTGEIIHKNSRIFPAAQAENNLVRRTNRQGRRLTRRKKHRIVRLNRLFEESGLITDFTKISINLNPYQLRVKGLTDELSNEELFIALKNMVKHRGISYLDDASDDGNSSVGDYAQIVKENSKQLETKTPGQIQLERYQTYGQLRGDFTVEKDGKKHRLINVFPTSAYRSEALRILQTQQEFNPQITDEFINRYLEILTGKRKYYHGPGNEKSRTDYGRYRTSGETLDNIFGILIGKCTFYPDEFRAAKASYTAQEFNLLNDLNNLTVPTETKKLSKEQKNQIINYVKNEKAMGPAKLFKYIAKLLSCDVADIKGYRIDKSGKAEIHTFEAYRKMKTLETLDIEQMDRETLDKLAYVLTLNTEREGIQEALEHEFADGSFSQKQVDELVQFRKANSSIFGKGWHNFSVKLMMELIPELYETSEEQMTILTRLGKQKTTSSSNKTKYIDEKLLTEEIYNPVVAKSVRQAIKIVNAAIKEYGDFDNIVIEMARETNEDDEKKAIQKIQKANKDEKDAAMLKAANQYNGKAELPHSVFHGHKQLATKIRLWHQQGERCLYTGKTISIHDLINNSNQFEVDHILPLSITFDDSLANKVLVYATANQEKGQRTPYQALDSMDDAWSFRELKAFVRESKTLSNKKKEYLLTEEDISKFDVRKKFIERNLVDTRYASRVVLNALQEHFRAHKIDTKVSVVRGQFTSQLRRHWGIEKTRDTYHHHAVDALIIAASSQLNLWKKQKNTLVSYSEDQLLDIETGELISDDEYKESVFKAPYQHFVDTLKSKEFEDSILFSYQVDSKFNRKISDATIYATRQAKVGKDKADETYVLGKIKDIYTQDGYDAFMKIYKKDKSKFLMYRHDPQTFEKVIEPILENYPNKQMNEKGKEVPCNPFLKYKEEHGYIRKYSKKGNGPEIKSLKYYDSKLGNHIDITPKDSNNKVVLQSVSPWRADIYFNNTTGKYEILGLKYADLQFEKGTGTYKISQEKYNDIKKKEGVDSDSEFKFTLYKNDLLLVKETETKEQQLFRFLSRTMPKQKHYVELKPYDKQKFEGGEALIKVLGNVANGGQCIKGLGKSNISIYKVRTDVLGNQHIIKNEGDKPKLDF

SEQ ID NO: 597 - protein, 1388 aa, Streptococcus thermophilus
MTKPYSIGLDIGTNSVGWAVITDNYKVPSKKMKVLGNTSKKYIKKNLLGVLLFDSGITAEGRRLKRTARRRYTRRRNRILYLQEIFSTEMATLDDAFFQRLDDSFLVPDDKRDSKYPIFGNLVEEKAYHDEFPTIYHLRKYLADSTKKADLRLVYLALAHMIKYRGHFLIEGEFNSKNNDIQKNFQDFLDTYNAIFESDLSLENSKQLEEIVKDKISKLEKKDRILKLFPGEKNSGIFSEFLKLIVGNQADFRKCFNLDEKASLHFSKESYDEDLETLLGYIGDDYSDVFLKAKKLYDAILLSGFLTVTDNETEAPLSSAMIKRYNEHKEDLALLKEYIRNISLKTYNEVFKDDTKNGYAGYIDGKTNQEDFYVYLKNLLAEFEGADYFLEKIDREDFLRKQRTFDNGSIPYQIHLQEMRAILDKQAKFYPFLAKNKERIEKILTFRIPYYVGPLARGNSDFAWSIRKRNEKITPWNFEDVIDKESSAEAFINRMTSFDLYLPEEKVLPKHSLLYETFNVYNELTKVRFIAESMRDYQFLDSKQKKDIVRLYFKDKRKVTDKDIIEYLHAIYGYDGIELKGIEKQFNSSLSTYHDLLNIINDKEFLDDSSNEAIIEEIIHTLTIFEDREMIKQRLSKFENIFDKSVLKKLSRRHYTGWGKLSAKLINGIRDEKSGNTILDYLIDDGISNRNFMQLIHDDALSFKKKIQKAQIIGDEDKGNIKEVVKSLPGSPAIKKGILQSIKIVDELVKVMGGRKPESIVVEMARENQYTNQGKSNSQQRLKRLEKSLKELGSKILKENIPAKLSKIDNNALQNDRLYLYYLQNGKDMYTGDDLDIDRLSNYDIDHIIPQAFLKDNSIDNKVLVSSASNRGKSDDFPSLEVVKKRKTFWYQLLKSKLISQRKFDNLTKAERGGLLPEDKAGFIQRQLVETRQITKHVARLLDEKFNNKKDENNRAVRTVKIITLKSTLVSQFRKDFELYKVCEINDFHHAHDAYLNAVIASALLKKYPKLEPEFVYGDYPKYNSFRERKSATEKVYFYSNIMNIFKKSISLADGRVIERPLIEVNEETGESVWNKESDLATVRRVLSYPQVNVVKKVEEQNHGLDRGKPKGLFNANLSSKPKPNSNENLVGAKEYLDPKKYGGYAGISNSFAVLVKGTIEKGAKKKITNVLEFQGISILDRINYRKDKLNFLLEKGYKDIELIIELPKYSLFELSDGSRRMLASILSTNNKRGEIHKGNQIFLSQKFVKLLYHAKRISNTINENHRKYVENHKKEFEELFYYILEFNENYVGAKKNGKLLNSAFQSWQNHSIDELCSSFIGPTGSERKGLFELTSRGSAADFEFLGVKIPRYRDYTPSSLLKDATLIHQSVTGLYETRIDLAKLGEG

SEQ ID NO: 598 - protein, 1128 aa, Streptococcus vestibularis
  Streptococcus vestibularis ATCC 49124
MSDLVLGLDIGIGSVGVGILNKVTGEIIHKNSRIFPAAQAENNVERRTNRQGRRLTRRKKHRRVRLNHLFEESGLITDFTKVSINLNPYQLRVKGLIDELSNEELFIALKNMVKHRGISYLDDASDDGNSSVGDYAQIVKENSKQLETKTPGQIQLERYQKYGQLRGDFTVEEDGKKHRLINVFPTSAYRSEALRILQTQKEFNPQITDEFINRYLEILTGKRKYYHGPGNEKSRTDYGRYTTKKDSENEYITLDNIFGILIGKCTFYPEEYRAAKASYTAQEFNLLNDLNNLTVPTETKKLSEEQKNQIINYVKNEKAMGPAKLFKYIAKLLSCDVADIKGYRIDKSDKAEIHTFEAYRKMKTLETIDFEKMSRDQLDKLAYVLTLNTEREGIQEALDHEFADGNFSQEQIDELVQFRKANSSIFGKGWHNFSVKLMMELIPELYATSEEQMTILTRLGKQKTTSSSNKTKYIDEKLLTEEIYNPVVAKSVRQAIKIVNAAIKEYGDFDNIVIEMARETNEDDEKKAIQKIQKANKDEKDAAMLKAANQYNGRAELPHSVFHGHKQLATKIRLWHQQGERCLYTGKTISIHDLINNPNQFEIDHILPLSITFDDSLANKVLVYATANQEKGQRTPYQALDSMDDAWSFRELKAFVRESKSLSNKKKEYLLTEEDISRFDVRKKFIERNLVDTRYASRVVLNALQEHFRAHKTDTKVSVVRGQFTSQLRRHWGIEKTRDTYHHHAVDALIIAASSQLNLWKKQKNTLVNYSENQLLDIETGELISDDEYKESVFKAPYQHFVDTLKSKEFEDSILFSYQVDSKFNRKISDATIYATRQAKVGKDKKDETYVLGKIKDIYSQTGYDAFIKIYQKDKSKFLMYRHDPQTFEKVIEPILENYPNKEMNEKGKEVPCNPFLKYKEEHGDYIRKYSKKGNGPEIKSLKYYDSKLGNHIDITPKDSNNKVVLQSVSPWRADVYFNKTTGKYEILGLKYADLQFEKGTGTYKISQEKYNVIKKKEGVDSDSEFKFTLYKNDLLLIKDTETKEQQLFRFLSRTKPNVKHYVELKPYDKQKFEGNESLINVLGAVAKGGQCQKGINKPNISIYKVRTDVLGNQHIIKNEGDKPKLDF

SEQ ID NO: 599 - protein, 1084 aa, Subdoligranulum sp.
  Subdoligranulum sp. 4_3_54A2FAA
MKNTLYGIGLDIGVASVGWAVVGLNGTGEPVGLHRLGVRIFDKAEQPKTGESLAAPRRMARGMRRRLRRKALRRADVYALLERSGLSTREELAQMFEAGGLEDIYALRTRALDEPVGKAEFSRILLHLAQRRGFKSNRRTASDGEDGRLLAAVNENRRRMAQGGWRTVGEMLYRHEAFALHKRNKADDYLSTVGRDMVAEEASILFERQRAMGCSWAAPELQAEYLSILLRQRSFDEGPGGNSPYGGNQVEKMVGRCTFEPDEPRAAKAAYSFEYFSLLQKLNHIRLAENGETRPLTQPQRQQLLSLAHKTPDISLARIRKELALPETVQFNGVRCRANETLEESEKKEKFACLPAYHKMRKALDGVVKGRISSLSISQRDAAATALSLYKNEDTLRAKLTEAGFQAPEIDALAGLTGFSKFGHLSLKACRKLIPHLEQGLTYDQACTAAGYDFKGHGAGERAFTLPAAAPEMEQITSPVVRRAVAQTIKVVNGIIREMDASPAWVRIELARELSKTFGERQEMDRSMRENAAQNERLMQELRDTFHLLSPTGQDLVKYRLWKEQDGVCAYSLRRLDVERLFEPGYVDVDHIVPYSLSFDDRRSNKVLVLSSENRQKGNRLPLQYLQGKRREDFIVWTNSSVHDYRKRQNLLREKLSGDEAEGFRQRNLQDTQHMARFLYNYISDHLAFAQSEALGKKRVFAVSGAVTSHLRKRWGLSKVRADGDLHHALDAAVVACTTDGMIRRISGYYGHIEGEYLQDADGAGSQHARTKERFPAPWPRFRDELIVRLSEQPAEPLLDINPEFYCEYGTEHIRPVFVSRMPRRKVTGPGHKETIKGAAAADEGLLTVRKALTELKLDKDGEIKDYYMPSSDTLLYEALKAQLRRFGGDGKKAFAEPFYKPKADGTPGPLVRKVKTTEKATLTVPVHGGAASNDTMVRVDVFLVPGDGYYWVPVYTADTLKPELPNRAVVQGKPYSEWKEMREEDFIFSLYPNDLVYVEHKSGLKFTLQNADSTLEKTRTQTSAFAYFVSGSISTASITIRTHDNAYGIPSLGVKTLKTFHKYQVDVLGNVFPVHKETRQKFR

SEQ ID NO: 600 - protein, 1422 aa, Sutterella wadsworthensis
  Sutterella wadsworthensis 3_1_45B
MTQSERRFSCSIGIDMGAKYTGVFYALFDREELPTNLNSKAMTLVMPETGPRYVQAQRTAVRHRLRGQKRYTLARKLAFLVVDDMIKKQEKRLTDEEWKRGREALSGLLKRRGYSRPNADGEDLTPLENVRADVFAAHPAFSTYFSEVRSLAEQWEEFTANISNVEKFLGDPNIPADKEFIEFAVAEGLIDKTEKKAYQSALSTLRANANVLTGLRQMGHKPRSEYFKAIEADLKKDSRLAKINEAFGGAERLARLLGNLSNLQLRAERWYFNAPDIMKDRGWEPDRFKKTLVRAFKFFHPAKDQNKQHLELIKQIENSEDIIETLCTLDPNRTIPPYEDQNNRRPPLDQTLLLSPEKLTRQYGEIWKTWSARLTSAEPTLAPAAEILERSTDRKSRVAVNGHEPLPTLAYQLSYALQRAFDRSKALDPYALRALAAGSKSNKLTSARTALENCIGGQNVKTFLDCARRYYREADDAKVGLWFDNADGLLERSDLHPPMKKKILPLLVANILQTDETTGQKFLDEIWRKQIKGRETVASRCARIETVRKSFGGGFNIAYNTAQYREVNKLPRNAQDKELLTIRDRVAETADFIAANLGLSDEQKRKFANPFSLAQFYTLIETEVSGFSATTLAVHLENAWRMTIKDAVINGETVRAAQCSRLPAETARPFDGLVRRLVDRQAWEIAKRVSTDIQSKVDFSNGIVDVSIFVEENKFEFSASVADLKKNKRVKDKMLSEAEKLETRWLIKNERIKKASRGTCPYTGDRLAEGGEIDHILPRSLIKDARGIVFNAEPNLIYASSRGNQLKKNQRYSLSDLKANYRNEIFKTSNIAAITAEIEDVVTKLQQTHRLKFFDLLNEHEQDCVRHALFLDDGSEARDAVLELLATQRRTRVNGTQIWMIKNLANKIREELQNWCKTTNNRLHFQAAATNVSDAKNLRLKLAQNQPDFEKPDIQPIASHSIDALCSFAVGSADAERDQNGFDYLDGKTVLGLYPQSCEVIHLQAKPQEEKSHFDSVAIFKEGIYAEQFLPIFTLNEKIWIGYETLNAKGERCGAIEVSGKQPKELLEMLAPFFNKPVGDLSAHATYRILKKPAYEFLAKAALQPLSAEEKRLAALLDALRYCTSRKSLMSLFMAANGKSLKKREDVLKPKLFQLKVELKGEKSFKLNGSLTLPVKQDWLRICDSPELADAFGKPCSADELTSKLARIWKRPVMRDLAHAPVRREFSLPAIDNPSGGFRIRRTNLFGNELYQVHAINAKKYRGFASAGSNVDWSKGILFNELQHENLTECGGRFITSADVTPMSEWRKVVAEDNLSIWIAPGTEGRRYVRVETTFIQASHWFEQSVENWAITSPLSLPASFKVDKPAEFQKAVGTELSELLGQPRSEIFIENVGNAKHIRFWYIVVSSNKKMNESYNNVSKS

SEQ ID NO: 601 - protein, 1049 aa, Tistrella mobilis
MINERLTFGIDLGIGSCGWAVLRHADAAGEPGVIEGLGSWCFDVPETSKERIPTNQVRRSNRLLRRVIRRRRNRMAEIRRLFHAQGLLPSADEDALKRPRLDPWELRARGLDQCLSAEEFAVALGHIARHRGFRSSAKRKAANTSGEDSKMLSALLVTRERTARYRTVGEMFARDPEYSARRRNRDGIFDRTVARDDLIHEVGKLFEAQRARGSAFASPDLEADFNAIAFRQAEMQDSERLVGNCPFERDEKRAARWAPSFERFRLLTRLINLRIATAEGERRFTPEDLARVSAELGATAKLPVSRVRALIGLLPDERFTTIRVEDEDRDIVARTGEAAPGTWRLRKTLGEALWAEMQARPDQLDAIAHVLSFFEATAKIRSELDRLGLPAAVIEALDRGLEDGAFAKFKGAGHISAKACRNLLPHLQQGHRYDQACRLAGYDHAASTLSHTAQVVSKAGFNALVTELGESIANPIARKALTEGLKQIRAMCARWGLPGAIHIELAREVGNSIEKRRELESQRETTTKRRQTERDEIRGLLALEDVDDDTLLRYRLWKEQGGKCLYTGKDIHVRQLIATDNSVQVDHILPWSRFGDDSFNNKTLCLASANQRKRGQTPWEWFSLTGTPEAWEVFASRVETSKDLRGFKKRNLLLKNADEVAQRFRSRNLNDTRYAARLLAEAAKLFYPAGDRQEKDGRRRVLTRPGPLTAALRHAWGLESLKKADGKRVSDDRHHALDALAVAAISEREVQRLTRSFQEWEQQGLARPLRHVAPPWPGFRGDVLAAYAQAFVARPERRRARGKGHDASIRQVVGEGPEAQVFERRGLADLKEADLDRVKDPERNQAIIEAVRAWILAGRPADAPPRSPRGDVIVKLRTAPAKKIKPAVPVRGGTADRGDMVRIDVFTRPNRKGRDEWYLVPIYPHQVMNRKAWPHPPMRSVVAYKDEAGWTEIGAEHSFRFSLYPRSYVQLVKSNGDVIEGYLVSMDRSTGAFRVFVHNNPAEMAKGIGAKTLLNLRKFNVDRFGVRTEVKSEVRTWHGEVCTSPVPPD

SEQ ID NO: 602 - protein, 1395 aa, Treponema denticola
  Treponema denticola AL-2
MKKEIKDYFLGLDVGTGSVGWAVTDTDYKLLKANRKDLWGMRCFETAETAEVRRLHRGARRRIERRKKRIKLLQELFSQEIAKIDEGFFQRMKESPFYAEDKTILQENALFNDKDFTDKTYHKAYPTINHLIKAWIENKVKPDPRLLYLACHNIIKKRGHFLFEGDFDSENQFDTSIQALFEYLREDMEVDIDADSQKVKEILKDSSLKNSEKQSRLNKILGLKPSDKQKKAITNLISGNKINFADLYDNPDLKDAEKNSISFSKDDFDALSDDLASILGDSFELLLKAKAVYNCSVLSKVIGDEQYLSFAKVKIYEKHKTDLTKLKAVIKKHFPNNYKKVFGYNQDNESKNNYSGYVGVCKTKNKKLVINNSVNQEDFYKFLKPILSAKSEIKEVNDILAEIETGNFLPKQISKSNAEIPYQLRKMELEKILSNAEKHFSFLKQKDEKGLSHSEKIIMLLTFKIPYYIGPINDNHKKSFPDRCWVVKKEKSPSGKTTPWNFFDHIDKEKTAEEFITSRTNFCTYLIGESVLPKNSLLYSEYTVLNEINNLQIIIDGKNICDTKLKQKIYEDLFKKYKKITQKQISTFIKHEGICNKTDEVIILGIDKECTSSLKSYIELKNIFGKQVDEISTKNMLEEIIRWATIYDEGEGKTILKTKIKAEYGKYCSDEQIKKILNLKFSGWGRLSRKFLETVTSEMPGFSEPVNIITAMRETQNNLMELLSSEFKFTENIKKINSGFEDAEKQFSYDGLVKPLFLSPSVKKMLWQTLKLVKEISHITQAPPKKIFIEMAKGAELEPARTKTRLKILQDLYSSCKNDADAFSSEIQYLSGKIENEDNLRLRSDKLYLYYTQLGKCMYCGKPIEIGHVFDTSNYDIDHIYPQSKIKDDSISNRVLVCSSCNKNKEDKYPLKSEIQSKQRGFWNFLQRNNFISLEKLNRLTRTTPISDDETAKFIARQLVETRQATKVAAKVLEKMFPETKIVYSKAETVSMFRNKFDIIKCREINDFHHAHDAYLNIVVGNVYNTKFTNNPWNFIKEKRDNPKIADTYNYYKVFDYDVKRNNITAWEKGKTIITVKDMLKRNTPIYTRQAACKKGGLFDQTIMKKGLGQHPLKKEGPFSNISKYGGYNKVSAAYYTLIEYEEKGNKIRSLETIPLYLVKDIQKDQDVLKSYLTDLLGKKEFKILVPKIKINSLLKINGFPCHITGKTNDSFLLRPAVQFCCSNDEVLYFKKIIRFSEIRSQREKIGKTISPYEDLSFRSYIKENLCKKTKNDEIGEKEFYDLLQKKNLEIYDMLLTKHKDTIYKKRPNSATIDILVKGKEKFKSLIIENQFEVILEILKLFSATRNVSELQHIGGSKYSGVAKIGNKISSLDNCILIYQSITGIFEKRIDLLKV

SEQ ID NO: 603 - protein, 1395 aa, Treponema denticola
  Treponema denticola ASLM
MKKEIKDYFLGLDVGTGSVGWAVTDTDYKLLKANRKDLWGMRCFETAETAEVRRLHRGARRRIERRKKRIKLLQELFSQEIAKIDEGFFQRMKESPLYAEDKTILQENTLFNDKDFTDKTYHKAYPTINHLIKAWIENKVKPDPRLLYLACHNIIKKRGHFLFEGDFDSENQFDTSIQALFEYLREDMEVDIDADSQKVKEILKDSSLKNSEKQSRLNKMLGLKPSDKQKKAITNLISGNKINFADLYDNPDLKDAEKNSISFSKDDFDALSDDLASILGDSFELLLKAKAVYNCSVLSKVIGDEQYLSFAKVKIYEKHKTDLTKLKNVIKKHFPKDYKKVFGYNKNEKNNNNYSGYVGVCKTKSKKLIINNSVNQEDFYKFLKTILSAKSEIKEVNDILTEIETGTFLPKQISKSNAEIPYQLRKMELEKILSNAEKHFSFLKQKDEKGLSHSEKIIMLLTFKIPYYIGPINDNHKKSFPDRCWVVKKEKSPSGKTTPWNFFDHIDKEKTAEEFITSRTNFCTYLIGESVLPKNSLLYSEYTVLNEINNLQIIIDGKNICDTKLKQKIYEELFKKYKKITQKQISTFIKHEGICNKTDEVIILGIDKECTSSLKSYIELKNIFGKQVDEISTKNMLEEIIRWATIYDEGEGKTILKTKIKAEYGKYCSDEQIKKILNLKFSGWGRLSRKFLETVTSEMPGFSEPVNIITAMRETQNNLMELLSSEFKFTENIKKINSGFEDVEKQFSYDGLVKPLFLSPSVKKMLWQTLKLVKEISHITQAPPKKIFIEMAKGAELDPVRTKTRLKILQDLYNNCKNDADAFSSEIKDLSGKIENEDNLRLRSDKLYLYYTQLGKCMYCGKPIEIGHVFDTSNYDIDHIYPQSKIKDDSISNRVLVCSSCNKNKEDKYPLKAEIQSKQRGFWNFLQRNNFISLEKFNRLTRATPISDDETAKFIARQLVETRQATKVAARVLEKMFPETKIVYSKAETVSMFRNKFDIVKCREINDFHHAHDAYLNIVVGNVYNTKFTNNLWNFIKEKRDNPKIADTYNYYKVFDYDVKRNNITAWEKGKTIITVKDMLKRNTPIYTRQAACKKGGLFDQTIMKKGLGQHPLKKEGPFSNISKYGGYNKVSAAYYTLIEYEEKGNKIRSLETIPLYLVKDIQKDQDVLKSYLTDLLGKKEFKILVPKIKINSLLKINGFPCHITGKTNDSFLLRPAVQFCCSNDEVLYFKKIIRFSEIRSQREKIGKTISPYEDLSFRSYIKENLCKKTKNDEIGEKEFYDLLQKKNLEIYDMLLTKHKDTIYKKRPNSATIDILVKGKEKFKSLIIENQFEVILEILKLFSATRNVSDLQHIGGSKYSGVAKIGNKISSLDNCILIYQSITGIFEKRIDLLKV

SEQ ID NO: 604 - protein, 1395 aa, Treponema denticola
  Treponema denticola ATCC 35405
MKKEIKDYFLGLDVGTGSVGWAVTDTDYKLLKANRKDLWGMRCFETAETAEVRRLHRGARRRIERRKKRIKLLQELFSQEIAKTDEGFFQRMKESPFYAEDKTILQENTLFNDKDFADKTYHKAYPTINHLIKAWIENKVKPDPRLLYLACHNIIKKRGHFLFEGDFDSENQFDTSIQALFEYLREDMEVDIDADSQKVKEILKDSSLKNSEKQSRLNKILGLKPSDKQKKAITNLISGNKINFADLYDNPDLKDAEKNSISFSKDDFDALSDDLASILGDSFELLLKAKAVYNCSVLSKVIGDEQYLSFAKVKIYEKHKTDLTKLKNVIKKHFPKDYKKVFGYNKNEKNNNNYSGYVGVCKTKSKKLIINNSVNQEDFYKFLKTILSAKSEIKEVNDILTEIETGTFLPKQISKSNAEIPYQLRKMELEKILSNAEKHFSFLKQKDEKGLSHSEKIIMLLTFKIPYYIGPINDNHKKFFPDRCWVVKKEKSPSGKTTPWNFFDHIDKEKTAEAFITSRTNFCTYLVGESVLPKSSLLYSEYTVLNEINNLQIIIDGKNICDIKLKQKIYEDLFKKYKKITQKQISTFIKHEGICNKTDEVIILGIDKECTSSLKSYIELKNIFGKQVDEISTKNMLEEIIRWATIYDEGEGKTILKTKIKAEYGKYCSDEQIKKILNLKFSGWGRLSRKFLETVTSEMPGFSEPVNIITAMRETQNNLMELLSSEFTFTENIKKINSGFEDAEKQFSYDGLVKPLFLSPSVKKMLWQTLKLVKEISHITQAPPKKIFIEMAKGAELEPARTKTRLKILQDLYNNCKNDADAFSSEIKDLSGKIENEDNLRLRSDKLYLYYTQLGKCMYCGKPIEIGHVFDTSNYDIDHIYPQSKIKDDSISNRVLVCSSCNKNKEDKYPLKSEIQSKQRGFWNFLQRNNFISLEKLNRLTRATPISDDETAKFIARQLVETRQATKVAAKVLEKMFPETKIVYSKAETVSMFRNKFDIVKCREINDFHHAHDAYLNIVVGNVYNTKFTNNPWNFIKEKRDNPKIADTYNYYKVFDYDVKRNNITAWEKGKTIITVKDMLKRNTPIYTRQAACKKGELFNQTIMKKGLGQHPLKKEGPFSNISKYGGYNKVSAAYYTLIEYEEKGNKIRSLETIPLYLVKDIQKDQDVLKSYLTDLLGKKEFKILVPKIKINSLLKINGFPCHITGKTNDSFLLRPAVQFCCSNNEVLYFKKIIRFSEIRSQREKIGKTISPYEDLSFRSYIKENLWKKTKNDEIGEKEFYDLLQKKNLEIYDMLLTKHKDTIYKKRPNSATIDILVKGKEKFKSLIIENQFEVILEILKLFSATRNVSDLQHIGGSKYSGVAKIGNKISSLDNCILIYQSITGIFEKRIDLLKV

SEQ ID NO: 605 - protein, 1395 aa, Treponema denticola
  Treponema denticola H1-T
MKKEIKDYFLGLDVGTGSVGWAVTDTDYKLLKANRKDLWGMRCFETAETAEVRRLHRGARRRIERRKKRIKLLQELFSQEIAKIDEGFFQRMKESPFYAEDKTILQENALFNDKDFTDKTYHKAYPTINHLIKAWIENKVKPDPRLLYLACHNIIKKRGHFLFEGDFDSENQFDTSIQALFEYLREDMEVDIDADSQKVKEILKDSSLKNSEKQSRLNKILGLKPSDKQKKAITNLISGNKINFADLYDNPDLKDAEKNSISFSKDDFDALSDDLASILGDSFELLLKAKAVYNCSVLSKVIGDEQYLSFAKVKIYEKHKTDLTKLKAVIKKHFPNNYKKVFGYNQDNESKNNYSGYVGVCKTKNKKLVINNSVNQEDFYKFLKPILSAKSEIKEVNDILAEIETGNFLPKQISKSNAEIPYQLRKMELEKILSNAEKHFSFLKQKDEKGLSHSEKIIMLLTFKIPYYIGPINDNHKKSFPDRCWVVKKEKSPSGKTTPWNFFDHIDKEKTAEEFITSRTNFCTYLIGESVLPKNSLLYSEYTVLNEINNLQIIIDGKNICDTKLKQKIYEDLFKKYKKITQKQISTFIKHEGICNKTDEVIILGIDKECTSSLKSYIELKNIFGKQVDEISTKNMLEEIIRWATIYDEGEGKTILKTKIKAEYGKYCSDEQIKKILNLKFSGWGRLSRKFLETVTSEMPGFSEPVNIITAMRETQNNLMELLSSEFKFTENIKKINSGFEDAEKQFSYDGLVKPLFLSPSVKKMLWQTLKLVKEISHITQAPPKKIFIEMAKGAELEPARTKTRLKILQDLYSSCKNDADAFSSEIQYLSGKIENEDNLRLRSDKLYLYYTQLGKCMYCGKPIEIGHVFDTSNYDIDHIYPQSKIKDDSISNRVLVCSSCNKNKEDKYPLKSEIQSKQRGFWNFLQRNNFISLEKLNRLTRTTPISDDETAKFIARQLVETRQATKVAAKVLEKMFPETKIVYSKAETVSMFRNKFDIIKCREINDFHHAHDAYLNIVVGNVYNTKFTNNPWNFIKEKRDNPKIADTYNYYKVFDYDVKRNNITAWEKGKTIITVKDMLKRNTPIYTRQAACKKGELFNQTIMKKGLGQHPLKKEGPFSNISKYGGYNKVSAAYYTLIEYEEKVNKIRSLETIPLYLVKDIQKDQDVLKSYLTDLLGKKEIKILVPKIKINSLLKINGFPCHITGKTGDSFVLRPAVQFCCSNDEVLYFKKIIRFNEIRSQREKMGKTISPYEDLSFRSYIKENLCKKTKADEIGEKEFYDLLQKKNLEIYDMLLTKHKDTIYNKRPNSTTLGMLTKGRYEFINLKPKDQIIVMLEILKLFCTTREAIDLGLIKGKPAAGVATLGKKISNLDNCILIYQSITGIFEKRIDLLKV

SEQ ID NO: 606 - protein, 1395 aa, Treponema denticola
  Treponema denticola H-22
MKKEIKDYFLGLDVGTGSVGWAVTDTDYKLLKANRKDLWGMRCFETAETAEVRRLHRGARRRIERRKKRIKLLQELFSQEIAKIDEGFFQRMKESPFYAEDKTILQENTLFNDKDFTDKTYHKAYPTINHLIKAWIENKVKPDPRLLYLACHNIIKKRGHFLFEGDFDSENQFDTSIQALFEYLREDMEVDIDADSQKVKEILKDSSLKNSEKQSRLNKILGLKPSDKQKKAITNLISGNKINFADLYDNPDLKDAEKNSISFSKDDFDALSDDLASILGDSFELLLKAKAVYNCSVLSKVIGDEQYLSFAKVKIYEKHKTDLTKLKNVIKKHFPKDYKKVFGYNKNEKNNNNYSGYVGVCKTKSKKLIINNSVNQEDFYKFLKTILSAKSEIKEVNDILTEIETGTFLPKQISKSNAEIPYQLRKMELEKILSNAEKHFSFLKQKDEKGLSHSEKIIMLLTFKIPYYIGPINDNHKKSFPDRCWVIKKEKSPSGKTTPWNFFDHIDKDKTAEAFITSRTNFCTYLVGESVLPKSSLLYSEYTVLNEINNLQIIIDGKNICDIKLKQKIYEELFKKYKKITQKQISTFIKHEGICNKTDEVIILGIDKECTSSLKSYIELKNIFGKQVDEISTKNMLEEIIRWATIYDEGEGKTILKTKIKAEYGKYCSDEQIKKILNLKFSGWGRLSRKFLETVTSEMPGFSEPVNIITAMRETQNNLMELLSSEFKFTENIKKINSGFEDAEKQFSYNGLVKPLFLSPSVKKMLWQTLKLVKEISHITQAPPKKIFIEMAKGAELEPARTKTRLKILQDLYNNCKNDADAFSSEIKDLSGKIENEDNLRLRSDKLYLYYTQLGKCMYCGKPIEIGHVFDTSNYDIDHIYPQSKIKDDSISNRVLVCSSCNKNKEDKYPLKSEIQSKQRGFWNFLQRNNFISLEKLNRLTRTTPISDDETAKFIARQLVETRQATKVAAKVLEKMFPETKIVYSKAETVSMFRNKFDIIKCREINDFHHAHDAYLNIVVGNVYNTKFTNNPWNFIKEKRDNPKIADTYNYYKVFDYDVKRNNITAWEKGKTIITVKDMLKRNTPIYTRQAACKKGGLFDQTIMKKGLGQHPLKKEGAFSNISKYGGYNKVSAAYYTLIEYEEKGNKIRSLETIPLYLVKDIQKDQDVLKSYLTDLLGKKEIKILVPKIKINSLLKINGFPCHITGKTGDSFVLRPAVQFCCSNDEVLYFKKIIRFNEIRSQREKMGKTISPYEDLSFRSYIKENLCKKTKADEIGEKEFYDLLQKKNLEIYDMLLTKHKDTIYNKRPNSTTLGMLTKGRYEFINLKPKDQIIVMLEILKLFCTTREAIDLGLIKGKPAAGVATLGKKISNPDNCILIYQSITGIFEKRIDLLKV

SEQ ID NO: 607 - protein, 1395 aa, Treponema denticola
  Treponema denticola OTK
MKKEIKDYFLGLDVGTGSVGWAVTDTDYKLLKANRKDLWGMRCFETAETAEVRRLHRGARRRIERRKKRIKLLQELFSQEIAKIDEGFFQRMKESPLYAEDKTILQENTLFNDKDFTDKTYHKAYPTINHLIKAWIENKVKPDPRLLYLACHNIIKKRGHFLFEGDFDSENQFDTSIQALFEYLREDMELDIDADSQKVKEILKDSSLKNSEKQSRLNKMLGLKPSDKQKKAITNLISGNKINFADLYDNPDLKDAEKNSISFSKDDFDALSDDLASILGDSFELLLKAKAVYNCSVLSKVIGDEQYLSFAKVKIYEKHKTDLTKLKNVIKKHFPKDYKKVFGYNKNEKNNNNYSAYVGVCKITHKKLVIKNSASQEDFYKFLKTILSAKSEIKEVNDILTEIETGTFLPKQISKSNAEIPYQLRKMELEKILSNAEKHFSFLKQKDEKGLSHSEKIIMLLTFKIPYYIGPINDNHKKSFPDRCWVVKKEKSPSGKTTPWNFFDHIDKEKTAEEFITSRTNFCTYLIGESVLPKSSLLYSEYTVLNEINNLQIIIDGKNICDIKLKQKIYEELFKKYKKITQKQISTFIKHEGICNKTDEVIILGIDKECTSSLKSYIELKNIFGKQVDEISTKNMLEEIIRWATIYDEGEGKTILKTKIKAEYGKYCSDEQIKKILNLKFSGWGRLSRKFLETVTSEMPGFSEPVNIITAMRETQNNLMELLSSEFKFTENIKKINSGFEDAEKQFSYNGLVKPLFLSPSVKKMLWQTLKLVKEISHITQAPPKKIFIEMAKGAELEPARTKTRLKILQDLYSSCKNDADAFSSEIQYLSGKIENEDNLRLRSDKLYLYYTQLGKCMYCGKPIEIGHVFDTSNYDIDHIYPQSKIKDDSISNRVLVCSSCNKNKEDKYPLKAEIQSKQRGFWNFLQRNNFISLEKLNRLTRTSPISDDETAKFIARQLVETRQATKVAAKVLEKMFPETKIVYSKAETVSMFRNKFDIIKCREINDFHHAHDAYLNIVVGNVYNTKFTNNPWNFIKEKRDNPKIADTYNYYKVFDYDVKRNNITAWEKGKTIITVKDMLKRNTPIYTRQAACKKGELFNQTIMKKGLGQHPLKKEGPLSNISKYGGYNKVSAAYYTLIEYEEKGSKIRSLETIPLYLVKDIQKNKDGLKSYLTDQIGKKEIKILIPKIKINSLLKINGFPCHITGKMGEAFVLRPAVQFCCSNDEALYFKKIIRFNEIRKQREKMGKTISPYEDLSFRSYIKDNLCKKTKADEIEEKEFYDLLQKKNLEIYDMLLTKHKDTIYKKRPNSATIDILVKGKEKFKSLIIENQFEVILEILKLFSATRNVSDLQHIGGSKNAGNARVGNKISSLDNCILIYQSITGIFEKRIDLLKI

SEQ ID NO: 608 - protein, 1395 aa, Treponema denticola
  Treponema denticola SP37
MKKEIKDYFLGLDVGTGSVGWAVTDTDYKLLKANRKDLWGMRCFETAETAEVRRLHRGARRRIERRKKRIKLLQELFSQEIAKTDEGFFQRMKESPFYAEDKTILQENALFNDRDFTDKTYHKAYPTINHLIKAWIENKVKPDPRLLYLACHNIIKKRGHFLFEGDFDSENQFDTSIQALFEYLREDMEVDIDADSQKVKEILKDSSLKNSEKQSRLNKMLGLKPSDKQKKAITNLISGNKINFADLYDNPDLKDAEKNSISFSKDDFDALSDDLASILGDSFELLLKAKAVYNCSVLSKVIGDEQYLSFAKVKIYEKHKTDLTKLKNVIKKHFPNDYKKVFGYNKNEKNNNNYSAYVGVCKTKSKKLVINNTVNQEDFYKFLKPILLAKSEIKEVNDILTEIETGTFLPKQISKSNAEIPYQLRKMELEKILSNAEKHFSFLKQKDEKGLSHSEKIIMLLTFKIPYYIGPINDNHKKSFPDRCWVIKKEKSPSGKTTPWNFFDHIDKDKTAEAFITSRTNFCTYLVGESVLPKNSLLYSEYTVLNEINNLQIIIDGKNICDIKLKQKIYEELFKKYKKITQKQISTFIKHEGICNKTDEVIILGIDKECTSSLKSYIELKNIFGKQVDEISTKNMLEEIIRWATIYDEGEGKTILKTKIKAEYGKYCSDEQIKKILNLKFSGWGRLSRKFLETVTSEMPGFSEPVNIITAMRETQNNLMELLSSEFKFTENIKKINSGFEDVEKQFSYDSLVKPLFLSPSVKKMLWQTLKLVKEISHITQAPPKKIFIEMAKGAELDPVRTKTRLKILQDLYNNCKNDADAFSSEIKDLSGKIENEDNLRLRSDKLYLYYTQLGKCMYCGKPIEIGHVFDTSNYDIDHIYPQSKIKDDSISNRVLVCSSCNKNKEDKYPLKAEIQSKQRGFWNFLQRNNFISLEKLNRLTRTSPISDDETAKFIARQLVETRQATKVAAKVLEKMFPETKIVYSKAETVSMFRNKFDIIKCREINDFHHAHDAYLNIVVGNVYNTKFTNNPWNFIKEKRDNPKIADTYNYYKVFDYDVKRNNITAWEKGKTIITVKDMLKRNTPIYTRQAACKKGELFNQTIMKKGLGQHPLKKEGPLSNISKYGGYNKVSAAYYTLIEYEEKGSKIRSLETIPLYLVKDIQKNKDGLKSYLTDQIGKKEIKILIPKIKINSLLKINGFPCHITGKMGEAFVLRPAVQFCCSNDEALYFKKIIRFNEIRKQREKMGKTISPYEDLSFRSYIKDNLCKKTKADEIEEKEFYDLLQKKNLEIYDMLLTKHKDTIYKKRPNSATIDILVKGKEKFKSLIIENQFEVILEILKLFSATRNVSDLQHIGGSKNAGNARVGNKISSLDNCILIYQSITGIFEKRIDLLKI

SEQ ID NO: 609 - protein, 1062 aa, Treponema sp.
  Treponema sp. JC4
MIMKLEKWRLGLDLGTNSIGWSVFSLDKDNSVQDLIDMGVRIFSDGRDPKTKEPLAVARRTARSQRKLIYRRKLRRKQVFKFLQEQGLFPKTKEECMTLKSLNPYELRIKALDEKLEPYELGRALFNLAVRRGFKSNRKDGSREEVSEKKSPDEIKTQADMQTHLEKAIKENGCRTITEFLYKNQGENGGIRFAPGRMTYYPTRKMYEEEFNLIRSKQEKYYPQVDWDDIYKAIFYQRPLKPQQRGYCIYENDKERTFKAMPCSQKLRILQDIGNLAYYEGGSKKRVELNDNQDKVLYELLNSKDKVTFDQMRKALCLADSNSFNLEENRDFLIGNPTAVKMRSKNRFGKLWDEIPLEEQDLIIETIITADEDDAVYEVIKKYDLTQEQRDFIVKNTILQSGTSMLCKEVSEKLVKRLEEIADLKYHEAVESLGYKFADQTVEKYDLLPYYGKVLPGSTMEIDLSAPETNPEKHYGKISNPTVHVALNQTRVVVNALIKEYGKPSQIAIELSRDLKNNVEKKAEIARKQNQRAKENIAINDTISALYHTAFPGKSFYPNRNDRMKYRLWSELGLGNKCIYCGKGISGAELFTKEIEIEHILPFSRTLLDAESNLTVAHSSCNAFKAERSPFEAFGTNPSGYSWQEIIQRANQLKNTSKKNKFSPNAMDSFEKDSSFIARQLSDNQYIAKAALRYLKCLVENPSDVWTTNGSMTKLLRDKWEMDSILCRKFTEKEVALLGLKPEQIGNYKKNRFDHRHHAIDAVVIGLTDRSMVQKLATKNSHKGNRIEIPEFPILRSDLIEKVKNIVVSFKPDHGAEGKLSKETLLGKIKLHGKETFVCRENIVSLSEKNLDDIVDEKIKSKVKDYVAKHKGQKIEAVLSDFSKENGIKKVRCVNRVQTPIEITSGKISRYLSPEDYFAAVIWEIPGEKKTFKAQYIRRNEVEKNSKGLNVVKPAVLENGKPHPAAKQVCLLHKDDYLEFSDKGKMYFCRIAGYAATNNKLDIRPVYAVSYCADWINSTNETMLTGYWKPTPTQNWVSVNVLFDKQKARLVTVSPIGRVFRK

SEQ ID NO: 610 - protein, 1011 aa, Unknown
  Description of Unknown: uncultured delta proteobacterium HF0070_07E19 polypeptide
MSSKAIDSLEQLDLFKPQEYTLGLDLGIKSIGWAILSGERIANAGVYLFETAEELNSTGNKLISKAAERGRKRRIRRMLDRKARRGRHIRYLLEREGLPTDELEEVVVHQSNRTLWDVRAEAVERKLTKQELAAVLFHLVRHRGYFPNTKKLPPDDESDSADEEQGKINRATSRLREELKASDCKTIGQFLAQNRDRQRNREGDYSNLMARKLVFEEALQILAFQRKQGHELSKDFEKTYLDVLMGQRSGRSPKLGNCSLIPSELRAPSSAPSTEWFKFLQNLGNLQISNAYREEWSIDAPRRAQIIDACSQRSTSSYWQIRRDFQIPDEYRFNLVNYERRDPDVDLQEYLQQQERKTLANFRNWKQLEKIIGTGHPIQTLDEAARLITLIKDDEKLSDQLADLLPEASDKAITQLCELDFTTAAKISLEAMYRILPHMNQGMGFFDACQQESLPEIGVPPAGDRVPPFDEMYNPVVNRVLSQSRKLINAVIDEYGMPAKIRVELARDLGKGRELRERIKLDQLDKSKQNDQRAEDFRAEFQQAPRGDQSLRYRLWKEQNCTCPYSGRMIPVNSVLSEDTQIDHILPISQSFDNSLSNKVLCFTEENAQKSNRTPFEYLDAADFQRLEAISGNWPEAKRNKLLHKSFGKVAEEWKSRALNDTRYLTSALADHLRHHLPDSKIQTVNGRITGYLRKQWGLEKDRDKHTHHAVDAIVVACTTPAIVQQVTLYHQDIRRYKKLGEKRPTPWPETFRQDVLDVEEEIFITRQPKKVSGGIQTKDTLRKHRSKPDRQRVALTKVKLADLERLVEKDASNRNLYEHLKQCLEESGDQPTKAFKAPFYMPSGPEAKQRPILSKVTLLREKPEPPKQLTELSGGRRYDSMAQGRLDIYRYKPGGKRKDEYRVVLQRMIDLMRGEENVHVFQKGVPYDQGPEIEQNYTFLFSLYFDDLVEFQRSADSEVIRGYYRTFNIANGQLKISTYLEGRQDFDFFGANRLAHFAKVQVNLLGKVIK

SEQ ID NO: 611 - protein, 1032 aa, Unknown
  Description of Unknown: uncultured Termite group 1 bacterium phylotype Rs-D17 polypeptide
MLYHIANHRGTDSVRSFLEYDDDKIKENTLTAKIAKETKKVIDAKKYRTFGEYLYKGKIEKFQQNIRKKVSNRKTPANKNKEFAVTRDVIIKETEKILASQKQYYTYILTDEYIKKIKDAISYQTEKLIPESGYCPYFKDEKRLPRSHKLNEYRRMYEALNNAKYFDPVLDENTGEILSYQEKEFSREEKKILFDEVLLKGMELTESGAKKLLYHLPDGCEVQLQGRDKTTQKIKGYALVDLEASPFWLRLSQQQQDEFLYDWNSLPLEKLKPKLTNYYSLTESEVDETFQEIKLPSNYASVGKKAMEILLTYIKDGCSYTEALEKAVSEGKLKVDKQTMIYDSLPYYGKILKESTQKLIGKAFSKQFADRNYKEPDTNKNEREFGKIANPVVHQTLNELRKLINEIITVFGKKPLEIGLETTRELKKSKKNREYLSKQQNKNEYARNRIYKEYIEPHLSQIKSRQENPSKYISKFELLEEQNFICPFCSEKITPDDIINSKVDVEHIFPIEESEDITKNNLVIAHNECNADKGKKSPFDAFGDKTSGKYRWNCILHNAQKNLPHKVWRFYQGSLEKFLENKPMSRRFGTDNSYISKIAARYLACLFNDPYHSEIFCIKSSLIAQLRIAWDLNSIMVPLVKNILSEKELEEFKISKNKKIRIDNRHHALDAIVIAYANRGYHNFLNRIHAKEYKINYREKSWLSKILLPPLNRDLEDFKISVKDSIEKANVSIKHDHNTNGSLVKATAYKVYYSGAGEYIITTSKNVEEISFKEKEDPKDTLYRALCKFECRDIDIKDEKLIKKLKYNSTLYKKVQNNLSKAKQELEQDNKKTEEEGKKSQKITEVRIYKKACSLVKGQYIQCGSRLKDKFFAVKEPTEIKTGLGYDTGDNLFLDLYYDKTGKLCGEIIRKVNFNRNKPNYQKEGYTLFERIYQSDILEVDTSEDRISLKNKTGSAPSDRTFIKVNTFTEVNAYFDGKRDKIQIFFGNLLKSSFKNDSFFISSMQKYNVRKVILTSLGIIKYRSQILKNKEV

SEQ ID NO: 612 - protein, 1398 aa, Veillonella atypica
  Veillonella atypica ACS-134-V-Col7a
METQTSNQLITSHLKDYPKQDYFVGLDIGTNSVGWAVTNTSYELLKFHSHKMWGSRLFEEGESAVTRRGFRSMRRRLERRKLRLKLLEELFADAMAQVDSTFFIRLHESKYHYEDKTTGHSSKHILFIDEDYTDQDYFTEYPTIYHLRKDLMENGTDDIRKLFLAVHHILKYRGNFLYEGATFNSNAFTFEDVLKQALVNITFNCFDTNSAISSISNILMESGKTKSDKAKAIERLVDTYTVFDEVNTPDKPQKEQVKEDKKTLKAFANLVLGLSANLIDLFGSVEDIDDDLKKLQIVGDTYDEKRDELAKVWGDEIHIIDDCKSVYDAIILMSIKEPGLTISQSKVKAFDKHKEDLVILKSLLKLDRNVYNEMFKSDKKGLHNYVHYIKQGRTEETSCSREDFYKYTKKIVEGLADSKDKEYILNEIELQTLLPLQRIKDNGVIPYQLHLEELKVILDKCGPKFPFLHTVSDGFSVTEKLIKMLEFRIPYYVGPLNTHHNIDNGGFSWAVRKQAGRVTPWNFEEKIDREKSAAAFIKNLTNKCTYLFGEDVLPKSSLLYSEFMLLNELNNVRIDGKALAQGVKQHLIDSIFKQDHKKMTKNRIELFLKDNNYITKKHKPEITGLDGEIKNDLTSYRDMVRILGNNFDVSMAEDIITDITIFGESKKMLRQTLRNKFGSQLNDETIKKLSKLRYRDWGRLSKKLLKGIDGCDKAGNGAPKTIIELMRNDSYNLMEILGDKFSFMECIEEENAKLAQGQVVNPHDIIDELALSPAVKRAVWQALRIVDEVAHIKKALPSRIFVEVARTNKSEKKKKDSRQKRLSDLYSAIKKDDVLQSGLQDKEFGALKSGLANYDDAALRSKKLYLYYTQMGRCAYTGNIIDLNQLNTDNYDIDHIYPRSLTKDDSFDNLVLCERTANAKKSDIYPIDNRIQTKQKPFWAFLKHQGLISERKYERLTRIAPLTADDLSGFIARQLVETNQSVKATTTLLRRLYPDIDVVFVKAENVSDFRHNNNFIKVRSLNHHHHAKDAYLNIVVGNVYHEKFTRNFRLFFKKNGANRTYNLAKMFNYDVICTNAQDGKAWDVKTSMNTVKKMMASNDVRVTRRLLEQSGALADATIYKASVAAKAKDGAYIGMKTKYSVFADVTKYGGMTKIKNAYSIIVQYTGKKGEEIKEIVPLPIYLINRNATDIELIDYVKSVIPKAKDISIKYRKLCINQLVKVNGFYYYLGGKTNDKIYIDNAIELVVPHDIATYIKLLDKYDLLRKENKTLKASSITTSIYNINTSTVVSLSNKVGIDVFDYFMSKLRTPLYMKMKGNKVDELSSTGRSKFIKMTLEEQSIYLLEVLNLLTNSKTTFDVKPLGITGSRSTIGVKIHNLDEFKIINESITGLYSNEVTIV

SEQ ID NO: 613 - protein, 1398 aa, Veillonella parvula
  Veillonella parvula ATCC 17745
METQASNQLISSHLKGYPIKDYFVGLDIGTSSVGWAVTNKAYELLKFRSHKMWGSRLFDEGESAVARRGFRSMRRRLERRKLRLKLLEELFADAMAQVDPTFFMRLRESKYHYEDKTTGHSSKHILFIDKNYNDQDYFKEYPTVYHLRSELMKSGTDDIRKLFLAVHHILKYRGNFLYEGATFDSNASTLDDVIKQALENITFNCFDCNSAISSIGQILMEAGKTKSDKAKAIEHLVDTYIATDTVDTSSKTQKDQVKEDKKRLKAFANLVLGLNASLIDLFGSVEELEEDLKKLQITGDTYDDKRDELAKAWSDEIYIIDDCKSVYDAIILLSIKEPGLTISESKVKAFNKHKDDLAILKSLLKSDRSIYNTMFKVDEKGLHNYVHYIKQGRTEETSCNREDFYKYTKKIVEGLSDSKDKEYILSQIELQILLPLQRIKDNGVIPYQLHLEELKAILAKCGPKFPFLNEVADGFSVAEKLIKMLEFRIPYYVGPLNTHHNVDNGGFAWAVRKASGRVTPWNFDDKIDREKSAAAFIKNLTNKCTYLLGEDVLPKSSLLYSEFMLLNELNNVRIDGKPLEKVVKEHLIEAVFKQDHKKMTKNRIEQFLKDNGYISETHKHEITGLDGEIKNDLASYRDMVRILGDGFDRSMAEEIITDITIFGESKKMLRETLRKKFASCLDDEAIKKLTKLRYRDWGRLSQKLLNGIEGCDKAGDGTPETIIILMRNFSYNLMELLGDKFSFMERIQEINAKLTEGQIVNPHDIIDDLALSPAVKRAVWQALRIVDEVAHIKKALPARIFVEVTRSNKNEKKKKDSRQKRLSDLYAAIKKDDVLLNGLNNEIFGELKSSLAKYDDAALRSKKLYLYYTQMGRCAYTGEIIELSLLNTDNYDIDHIYPRSLTKDDSFDNLVLCKRTANAQKSDAYPISEEIQKTQKPFWTFLKQQGLISERKYERLTRITPLTADDLSGFIARQLVETNQSVKAATTLLRRLYPGVDVVFVKAENVTDFRHDNNFIKVRSLNHHHHAKDAYLNIVVGNVYHERFTRNFRAFFKKNGANRTYNLAKMFNYDVNCTNAKDGKAWDVKTSMDTVKKMMDSNDVRVTKRLLEQTGALADATIYKATVAGKAKDGAYIGMKTKSSVFADVSKYGGMTKIKNAYSIIVQYTGKKGEVIKEIVPLPIYLTNRNTTDQDLINYVASIIPQAKDISIIYGKLCINQLVKVNGFYYYLGGKTNSKFCIDNAIQVIVSNEWIPYLKVLEKFNNMRKDNKDLKANVVSTRALDNKHTIEVRIVEEKNIEFFDYLVSKLKMPIYQKMKGNKAAELSEKGYGLFKKMSLEEQSIHLIELLNLLTNQKTTFEVKPLGITASRSTVGSKISNQDEFKVINESITGLYSNEVTIV

SEQ ID NO: 614 - protein, 1395 aa, Veillonella sp.
  Veillonella sp. 6_1_27
METQASNQLISSHLKGYPIKDYFVGLDIGTSSVGWAVTNKAYELLKFRSHKMWGSRLFDEGESAVARRGFRSMRRRLERRKLRLKLLEELFADAMAQVDPTFFMRLRESKYHYEDKTTGHSSKHILFIDKNYTDQDYYKEYPTIYHLRVALMKSGTDDIRKLFLAVHHILKYRGNFLYEGATFDSNASTLDDVLKQALENITFNCFDSSAAIGSIGQILMELGKTKSDKAKAIERLVDTYIITDEVDTSGKTQKEQVKEDKKRLKSFANLVLGLSASLTDLFGSVEDLDEDLKKLQIIGDTYDERRDDLAKVWGDEIHIIDDCKSVYDAIILMSIKEPGLTISESKVKAFKKHKDDLAILKSLLKSDRSIYNTMFKVDEKGLHNYVHYIKQGRTEETSCNREDFYKYTKKVVEGLPDSKDKEYILSEIELQTLLPLQRIKDNGVIPYQLHLEELKVILAKCGPKFPFLNEVADGFSVAEKLIKMLEFRIPYYVGPLNTHHNVDNGGFAWAVRKASGRVTPWNFDDKIDREKSAAAFIKNLTNKCTYLLGEDVLPKSSLLYSEFMLLNELNNVRIDGKPLEKAVKEHLIEAVFKQDHKKMTKNRIEQFLKDNNYIPEKHKPEITGLDGEIKNDLASYRDMVRILGNNFDLSMAEEIITDITIFGESKKMLRETLRNKFSSRLDDEAIKKLSKLRYRDWGRLSRKLLNVIEGCDKAGDGTPETIIILMRNFSYNLMELLGDKFSFMERIQEINAKLIEGQIVNPHDIIDDLALSPAVKRAVWQALRIVDEIVHIKKTLPARIFVEVTRSNKAEKKKKDSRQKRLSDLYAAIKKDDALLSGLTNEEFGGLKSGLAKYDDAALRSKKLYLYYTQMGRCAYTGEVIDLSQLNTDNYDIDHIYPRSLTKDDSFDNLVLCKRTANAQKSDTYPISKEIQKAQKAFWIFLKQQGLISERKYERLTRITPLTADDLSGFIARQLVETNQSVKAATTLLRRLYPGVDVVFVKAENVTDFRHDNDFIKVRSLNHHHHAKDAYLNIVVGNVYHERFTRNFRAFFKKNGANRTYNLAKMFNYDVKCTNAKDGKAWAVKTSMDTVKKMMDSNDVRVTKRVYEQKGQLSDINLTKASKVKADIYLPIKANDPIMSQNMKYGGYSDIKNAYYTIIEYSDKKNNSIKAFIPIPIFIATKTLTKQALLEYIKTVLPKANNLRIIYKKVYNDQLLKIDGFNYYLGGRSNDRFCIDNAIQLIVPLEIQFYIKLVEKFTAIISENKNIALKASSVKSRNPINNQVENITLEYTQKLFDYLVSKFNELIYLKMRGNKLTDVNNIGRKQFIKLSLEERCKALAELLNIFTNMNKKLSLSTINVSASRKVVNFKISSLDEFKIVNESITGLYSHEITIV

SEQ ID NO: 615 - protein, 1120 aa, Veillonella sp.
  Veillonella sp. oral taxon 780 str. F0422
MGFKANLVNLFTDEDIEVILPEEKEFKSINLHEGIYEDVRDAYEDAWGDRFAIVDQCKVLHDIIVISSIIKPGQSLSEAKIESYNQHKEDLVLLKSVLKEDRKLYDDMFVVDTDKGTNYVKYTKQGVNGNTSATQEEFYKYVRKVVSVLPETEHTRRIVQKLEEGTFLPLQRISKNGVVPYQLHKEELVRILDKATVNFPFLNKVENGLTVADKIISILEFKIPYYVGPLNPTHSIENGGFAWVVRKEAGQVLPWNFEQKVDVQASAVKFIENLTNKCTYLIDQDVLPKYSLLYAEFSLLNELNNIRVNDKPLPADVKQAFIRDHFISLQDSKTATKKVVAKYLVDNNYVSQPPIITGMDQQIATKLTSHRDMTRILGEHFDHAMAEDIIRYITIFGESKDMLRQVLKNYYGDRLTTEQIKKLGKLTYTGWGRLSKKFLSDIWGMKKNDDDAEAGTIIEHMREGQENLMQLLSSSYSFIDVVQEYVTNVLGEKEKTAFEMLEDLSLSPMVKRSVWQTLRILDEIVSIRKELPKKIFVEVARTNKADKKRTQSRKALLEELYKQIKDEDVHVLQQELESKEDSALNSKKLYLYFTQMGRCMYSGRRIDIHELFTDKYDIDHIYPRSLTKDDSWHNIVLVEKQLNAEKTDRFPILSAIQSKQKGFWKLLWDRGFISEKKYDRLVRTTDLTDEELNQFINRQMVSTNQSVKAVTTLLHQLYPETEVVFSKAENVSDFRHDYDFVKVRSINHHHHAKDAYLNIVVGNVYHEKFTKNFLSFAKQKGTRRTYNLTKIFEYEIKLTEESKKVIWDPNIHMDIVKKMMKSNDVRVTQRAVPQKGGLSDETIYKKGIAKRGVYLPLKSSDERVRDVEKYGGRTSITISEYIILNIRDTSDQDRIEIFSLPLYIAGKKDIHKAIEEAYLSTCKKPASVVDIQILYRGLYIGSKVNINGFTYYMGGKTGSNVSIDSAVDVVMDITSSVYIKLLEKVAIKKIENPKTFRIENIKTSYNHKEVTVSKEQNIALYQELLKKLDTPLFSKMKGNKLEEFRTVGFDTFIALSLEEQASVLLEVLNVLTNFKTKRDITKIGMTSSRSTLGINISNTEQFSVITTSITGLYEQEIKIK

SEQ ID NO: 616 - protein, 1068 aa, Verminephrobacter eiseniae
MNKAVAYRLALDLGSTSLGWAIFRLNEAREPTAIIRAGVRIFSDGRNANSEPLAVHRRVARAMRRRRDRLLKRKKRMHDQLVQHGFFPAEVAERKELERLNPYQLRAKGLHEALTPGEFARALFHINQRRGFKSNRKTDRKDNDSGALKQAISELRKRIQDSDCATAGEWFWKERMQQKPEGVRGQWVRARYRKTPSTTDEGKKRIGYDLYVDRAMVEQEFDALWAAQAALQPGLFTEAARAELKDTLLYQRDLRPVKPGRCTLLPAEERAPLALPSTQRFRILQEVNNLRLLDEALREVPLNLAQRDAVVSALEGKKELSFAAIRKLLTLSGKFNLEDEKRAELKGNATSVILARKDLFGDAWAGFDAAVQDEIVWRLVSQESEGALIAWLQQHTGVDGVCAEAIVNTRLPDGYGRLSRKALERIVPALQREVCTYDKAVQAAGFAHHSDLGFDFDYAEDEVQQVGEHTIASTGEVQAQYAFKQLPYYGKALQRHVAFGSGDAKDHEEKCYGKIANPTVHIGLNQVRTVVNALIRRYGHPTEVVVELARDLKQSREQKQQTQREQADNQKRNEDIRKRIAPILETSPERVRDRDIKKWILWEELNKKDIADRHCPYSGERISATMLLSEAVEIEHILPFSRTLDDSLNNRTVAMRRANRIKGDRTPWEARADFEAQGWRYEAILQRAEGMPPRKRYRFAEDGYQRWLGKDRNFLARALNDTSYLSRLAANYLRLVCPQGVRVIPGQMTDKLRGKFGLNSVLGLDGKKNRNDHRHHAVDACVIGVTDQGLMQRFANASKQARENGLTRLVQDMLLPWWPSYYDHVERAVRHIRVSHRPDHGFEGAMMKGTAHGIREDGIREDGRIKQRPKAKGSADHKTITLIPIDEPRQLARHGVDAEGKPLPYKGYASGSNYCIEITKNGKGKWEGQVISTFDAYRIKAAADAAARAGQVISTVEADSIVRKSGWERLRGAQSQNGQPLVMRLVIGDSVRMEVDGRDEVMRVVKMSGKEMVFAPVREANVDKRNNMPDEQDPFTYTYKRADQLRKAKARQVTISPIGELRDPGFKG

SEQ ID NO: 617 - protein, 1440 aa, Weeksella virosa
MKTILGLDLGTNSIGWALVEQDFENKQGLILGMGSRIIPMDAGIIGKFAEGSSISQTAERTGYRSIRRLRERHLLRRERLHRVLNILKFLPEHYAAEIDFEKRFGQFLAETEPKLAWKKNAEGKFEFLFQRSFDEMVADFKANGQDIKIPYDWTIYYLRKKALTQKISPQELAWIILNFNQKRGYYQLRGEEEEENPNKKVEFYSLKIVDVVADEQPNKKGDTWYSLHLENGWVYRRSSKIPLYDWKDKVRDFIVTTDINEDGSEKLDKDGEVKRSFRAPKEDDWTLIKKKTEQEIEQFNQTVGSYIYEALLDNPTQKIRGKLVRTIERKFYKSELKKILEKQIELQPELFTEDLYNACARELYRRNVAHQQQLSSRDFVYLFLNDIIFYQRPLRSQKSLISNCSLEFRTIKDKDGNGQIIYLKAIPKSNPYYQEFRVWQWLYNLKIFTKEDDKDVTNQFINKVEDLEALFEFLMNQKEVNHTDILTYLIEPIVKSKYPNAKGKAFKDELKKELKKYRWNYVYDADKDESKSYPMNETRYELRKRLDKVENVPADFMTRKIEQHLWHIIYSVTDKIEFEKALKSFANKYDLHQESFVENFKRFKPFDSDYGTYSEKAIKKLLPLMRVGKYWSWDIIDDKTKTRIGKIITGEYDETIKNRVREKAIDLTEENHFQGLQLWLAQYIVYDRHSEADIAGKWNSVADLEQYLSEFKQHSLRNPIVEQVITETLRVVRDIWKQYGKGAKDYFDEIHIELGREMKNTAEERKRLSSIISENETTNLRIRAILEELMYDENMENVRPYSPMQQEALKIYEDGVLSSSVEIPEDIEKISKKSEPTKSEIQRYKLWLEQKYRSPYTGRPIPLSKLFTPAYQIEHIIPQARFFDDGFSNKVICESEVNALKDKMLGLEFIQNYYGQKVTTSFGEVTILTEDAYKAFVKEHYDKNRSKRNKLLLEEIPEKMIDRQMNDTRYISKYISKVLSNLVRGEKDDEGVNSKNIIPGNGKITGILKQDWGLNDVWNDLILPRFERMNQLTNSTDFTAWNEKHQKFLPSVPLELSKGFQKKRIDHRHHALDALIIACATRDHVNLLNNKHAKSRNERYDLQHKLRHTTPWQDKEGKVRTKFTEFKKPWETFTQDTKKELEKIVVNFKQNLRVINKATNYYEKIVDGKKVMFKQEGVNWAIRKPMHKETVSGKIDLPRVKVSKGKILTATRKSLDTSFNAKTILSITDTGIQKILLNYLKAKGNPELAFSPEGIEEMNQNISLYNDGKPHQPILKVRVFEQGSKFPLGETGNKTTKYVEAAKGTNLFFGVYEDNQGKRSYDTIPLNIVIERQKQGLNSVPETNEKGHRLLFSLSPNDLVYVPIEGEVFDETNPDVNRIYKVVSFSGSQMFCVRQDVATSIVYKLEFSSLNKMERTIDGIMIKEICIKLKVDRLGNISKA

SEQ ID NO: 618 - protein, 1409 aa, Wolinella succinogenes
MLVSPISVDLGGKNTGFFSFTDSLDNSQSGTVIYDESFVLSQVGRRSKRHSKRNNLRNKLVKRLFLLILQEHHGLSIDVLPDEIRGLFNKRGYTYAGFELDEKKKDALESDTLKEFLSEKLQSIDRDSDVEDFLNQIASNAESFKDYKKGFEAVFASATHSPNKKLELKDELKSEYGENAKELLAGLRVTKEILDEFDKQENQGNLPRAKYFEELGEYIATNEKVKSFFDSNSLKLTDMTKLIGNISNYQLKELRRYFNDKEMEKGDIWIPNKLHKITERFVRSWHPKNDADRQRRAELMKDLKSKEIMELLTTTEPVMTIPPYDDMNNRGAVKCQTLRLNEEYLDKHLPNWRDIAKRLNHGKFNDDLADSTVKGYSEDSTLLHRLLDTSKEIDIYELRGKKPNELLVKTLGQSDANRLYGFAQNYYELIRQKVRAGIWVPVKNKDDSLNLEDNSNMLKRCNHNPPHKKNQIHNLVAGILGVKLDEAKFAEFEKELWSAKVGNKKLSAYCKNIEELRKTHGNTFKIDIEELRKKDPAELSKEEKAKLRLTDDVILNEWSQKIANFFDIDDKHRQRFNNLFSMAQLHTVIDTPRSGFSSTCKRCTAENRFRSETAFYNDETGEFHKKATATCQRLPADTQRPFSGKIERYIDKLGYELAKIKAKELEGMEAKEIKVPIILEQNAFEYEESLRKSKTGSNDRVINSKKDRDGKKLAKAKENAEDRLKDKDKRIKAFSSGICPYCGDTIGDDGEIDHILPRSHTLKIYGTVFNPEGNLIYVHQKCNQAKADSIYKLSDIKAGVSAQWIEEQVANIKGYKTFSVLSAEQQKAFRYALFLQNDNEAYKKVVDWLRTDQSARVNGTQKYLAKKIQEKLTKMLPNKHLSFEFILADATEVSELRRQYARQNPLLAKAEKQAPSSHAIDAVMAFVARYQKVFKDGTPPNADEVAKLAMLDSWNPASNEPLTKGLSTNQKIEKMIKSGDYGQKNMREVFGKSIFGENAIGERYKPIVVQEGGYYIGYPATVKKGYELKNCKVVTSKNDIAKLEKIIKNQDLISLKENQYIKIFSINKQTISELSNRYFNMNYKNLVERDKEIVGLLEFIVENCRYYTKKVDVKFAPKYIHETKYPFYDDWRRFDEAWRYLQENQNKTSSKDRFVIDKSSLNEYYQPDKNEYKLDVDTQPIWDDFCRWYFLDRYKTANDKKSIRIKARKTFSLLAESGVQGKVFRAKRKIPTGYAYQALPMDNNVIAGDYANILLEANSKTLSLVPKSGISIEKQLDKKLDVIKKTDVRGLAIDNNSFFNADFDTHGIRLIVENTSVKVGNFPISAIDKSAKRMIFRALFEKEKGKRKKKTTISFKESGPVQDYLKVFLKKIVKIQLRTDGSISNIVVRKNAADFTLSFRSEHIQKLLK

SEQ ID NO: 619 - protein, 1059 aa, Wolinella succinogenes
MIERILGVDLGISSLGWAIVEYDKDDEAANRIIDCGVRLFTAAETPKKKESPNKARREARGIRRVLNRRRVRMNMIKKLFLRAGLIQDVDLDGEGGMFYSKANRADVWELRHDGLYRLLKGDELARVLIHIAKHRGYKFIGDDEADEESGKVKKAGVVLRQNFEAAGCRTVGEWLWRERGANGKKRNKHGDYEISIHRDLLVEEVEAIFVAQQEMRSTIATDALKAAYREIAFFVRPMQRIEKMVGHCTYFPEERRAPKSAPTAEKFIAISKFFSTVIIDNEGWEQKIIERKTLEELLDFAVSREKVEFRHLRKFLDLSDNEIFKGLHYKGKPKTAKKREATLFDPNEPTELEFDKVEAEKKAWISLRGAAKLREALGNEFYGRFVALGKHADEATKILTYYKDEGQKRRELTKLPLEAEMVERLVKIGFSDFLKLSLKAIRDILPAMESGARYDEAVLMLGVPHKEKSAILPPLNKTDIDILNPTVIRAFAQFRKVANALVRKYGAFDRVHFELAREINTKGEIEDIKESQRKNEKERKEAADWIAETSFQVPLTRKNILKKRLYIQQDGRCAYTGDVIELERLFDEGYCEIDHILPRSRSADDSFANKVLCLARANQQKTDRTPYEWFGHDAARWNAFETRTSAPSNRVRTGKGKIDRLLKKNFDENSEMAFKDRNLNDTRYMARAIKTYCEQYWVFKNSHTKAPVQVRSGKLTSVLRYQWGLESKDRESHTHHAVDAIIIAFSTQGMVQKLSEYYRFKETHREKERPKLAVPLANFRDAVEEATRIENTETVKEGVEVKRLLISRPPRARVTGQAHEQTAKPYPRIKQVKNKKKWRLAPIDEEKFESFKADRVASANQKNFYETSTIPRVDVYHKKGKFHLVPIYLHEMVLNELPNLSLGTNPEAMDENFFKFSIFKDDLISIQTQGTPKKPAKIIMGYFKNMHGANMVLSSINNSPCEGFTCTPVSMDKKHKDKCKLCPEENRIAGRCLQGFLDYWSQEGLRPPRKEFECDQGVKFALDVKKYQIDPLGYYYEVKQEKRLGTIPQMRSAKKLVKK

SEQ ID NO: 620 - protein, 1388 aa, Zunongwangia profunda
MKRILGLDLGTNSIGWALVNEAENEKEISKIIKLGVRVNPLTIDEKTNFEKGRPLSTNADRTLKRGARRNLQRYKLRRENLIEILIDNHIITKETPLTEIGKGTTYQTLSLRAKAVRERIDLEDFAKVLLAINKKRGYKSSRKASNDEEGQAIDGMAIAKELYERGITPGQYVLELLENDRKYIPDFYRSDLKQEFNKIWNNQKTFYPEILTDELFKELDGKNKSQTWAICQKPFNIKGIKRITKGREKTIENYHWRVKGLSGKLNLEKLAIILQEINNDINQSSGYLGGISDKSKKLYLNKETVGEFLYKQIAKNPHTSLKNQVFYRHDYLDEFEQIWKTQSNFNANLTDELKQEIRDVIIFYQRKIKSQKSLISFCQFESWEQEYFDKETGKTKTRTVGRRVIPKSSPLFQEFKIWQNLNHLVFTNSETDEKIEIKEVEQEIRKELFEELNLRGDLNPNDLLKILRSQFKIGKLSNWKCNFEKIEGNRTNAALFNIYQKISDFEGYGIDWNKSNAKKIRKELKATFPEIGIDASILEFDAYKKQLTNQSSYELWHLLYSAEEDFKISEQDKLIYGNSSVSLKKKLHLKFGFNPEYAKMLANLSLMSDYGNLSAKAIKKILPYLEDGHLYSEACRLAGYNHSKSLTAEELEKFEPKAKLDLLKKNSLRNPVVEKILNQMVNVVNQVIDTYGKPDGVRIELARELKKSAKERAEMTKGIADGTRRNEEIKKIITQKFGIPNPTKSDLVRYRLWQELESRGYKDIFTDKYISPDKIFSSEIDIEHIIPKALLFDDSFSNKTLSFRNVNLKKANRTALDFITQDYQSNVEAYKERVETWNKDNHISKGKRNKLLMSLKDIPDGFIERDLRNSQYIARKAKRMLYEVFPNEVLATSGSITDKLRSDWDLINVMKELNLPKYKALGLTEYEERLDKGTEELFKHEVIKDWTKRNDHRHHAMDALAVAFTTHNHIQYINNLNARKDITQDNHPIIKNIENLITEVNSKGKRVFKAPMSSFRESAKEQIEAILVSFKNKNKVVTKNINQTKKEGGFNYQNAKTPRGQLHKETIYGKSKQPLEKPVKINNRFCKKQVGLIINFKEQEAVLHHLKKYDNNEKIAFSNKTLKSDPIQVNGSPLREVKIFEEIFTIRKDINPDNFKTQKHLDKIIDKGIKEVMKKRLEEYNGDFKTAFSDLDKNPIWLNQSKGITIKRATISGVTNAEPLHQAKDHLGNIILDDNGKEIPIDYVSTGNNHHVAIYQDESGNLQEEVVSFYEAVIRKNQDQPIIKKRHPKGWKFLFTMKQNEMFVFSSENFNPSEIDLLDEKNAAIISPNLFRVQKIATKNYMFRHHLETEVTNNLDFTYRHFQATEWLRNLCKVRIDHIGRIVQIGEY

SEQ ID NO: 621-631 - skipped (11 entries)

SEQ ID NO: 632 - RNA, 22 nt, Homo sapiens
ugcucagguugcacagcuggga

SEQ ID NO: 633 - RNA, 22 nt, Homo sapiens
ucccagcugugcaaccugagca

SEQ ID NO: 634 - RNA, 22 nt, Homo sapiens
ucagguguggaaacugaggcag

SEQ ID NO: 635 - RNA, 22 nt, Homo sapiens
cugccucaguuuccacaccuga

SEQ ID NO: 636 - RNA, 22 nt, Homo sapiens
caaaaccgcgauuacucuugca

SEQ ID NO: 637 - RNA, 22 nt, Homo sapiens
ugcaagaguaaucgcgguuuug

SEQ ID NO: 638 - RNA, 21 nt, Homo sapiens
aaaaguaauugugguuuuugc

SEQ ID NO: 639 - RNA, 21 nt, Homo sapiens
gcaaaaaccacaauuacuuuu

SEQ ID NO: 640 - RNA, 21 nt, Homo sapiens
aaaaacugcaaucacuuuugc

SEQ ID NO: 641 - RNA, 21 nt, Homo sapiens
gcaaaagugauugcaguuuuu

SEQ ID NO: 642 - RNA, 22 nt, Homo sapiens
caaaagugauugugguuuuugc

SEQ ID NO: 643 - RNA, 22 nt, Homo sapiens
gcaaaaaccacaaucacuuuug

SEQ ID NO: 644 - RNA, 22 nt, Homo sapiens
agcaguguuuguuuugcccaca

SEQ ID NO: 645 - RNA, 22 nt, Homo sapiens
ugugggcaaaacaaacacugcu

SEQ ID NO: 646 - RNA, 22 nt, Homo sapiens
ucgggcgcaagagcacugcagu

SEQ ID NO: 647 - RNA, 22 nt, Homo sapiens
acugcagugcucuugcgcccga

SEQ ID NO: 648 - RNA, 21 nt, Homo sapiens
acacuuguugggaugaccugc

SEQ ID NO: 649 - RNA, 21 nt, Homo sapiens
gcaggucaucccaacaagugu

SEQ ID NO: 650 - RNA, 24 nt, Homo sapiens
aggagcuauccacuccaggugucc

SEQ ID NO: 651 - RNA, 24 nt, Homo sapiens
ggacaccuggaguggauagcuccu

SEQ ID NO: 652 - RNA, 23 nt, Homo sapiens
ccagagcagccugcgguaacagu

SEQ ID NO: 653 - RNA, 23 nt, Homo sapiens
acuguuaccgcaggcugcucugg

SEQ ID NO: 654 - RNA, 22 nt, Homo sapiens
aguugccagggcugccuuuggu

SEQ ID NO: 655 - RNA, 22 nt, Homo sapiens
accaaaggcagcccuggcaacu

SEQ ID NO: 656 - RNA, 21 nt, Homo sapiens
uagaccaucuuucuagaguau

SEQ ID NO: 657 - RNA, 21 nt, Homo sapiens
auacucuagaaagauggucua

SEQ ID NO: 658 - RNA, 22 nt, Homo sapiens
agcucuagaaagauuguugacc

SEQ ID NO: 659 - RNA, 22 nt, Homo sapiens
ggucaacaaucuuucuagagcu

SEQ ID NO: 660 - RNA, 21 nt, Homo sapiens
gggacuaggaugcagaccucc

SEQ ID NO: 661 - RNA, 21 nt, Homo sapiens
ggaggucugcauccuaguccc

SEQ ID NO: 662 - RNA, 23 nt, Homo sapiens
aggucugcauucaaauccccaga

SEQ ID NO: 663 - RNA, 23 nt, Homo sapiens
ucuggggauuugaaugcagaccu

SEQ ID NO: 664 - RNA, 20 nt, Homo sapiens
cauuacagcacagccauucu

SEQ ID NO: 665 - RNA, 20 nt, Homo sapiens
agaauggcugugcuguaaug

SEQ ID NO: 666 - RNA, 21 nt, Homo sapiens
ucuggcugugcuguaaugcag

SEQ ID NO: 667 - RNA, 21 nt, Homo sapiens
cugcauuacagcacagccaga

SEQ ID NO: 668 - RNA, 21 nt, Homo sapiens
ugacuucuaccucuuccaaag

SEQ ID NO: 669 - RNA, 21 nt, Homo sapiens
cuuuggaagagguagaaguca

SEQ ID NO: 670 - RNA, 22 nt, Homo sapiens
uuggaauaggggauaucucagc

SEQ ID NO: 671 - RNA, 22 nt, Homo sapiens
gcugagauauccccuauuccaa

SEQ ID NO: 672 - RNA, 22 nt, Homo sapiens
ucguaucagagauuccagacac

SEQ ID NO: 673 - RNA, 22 nt, Homo sapiens
gugucuggaaucucugauacga

SEQ ID NO: 674 - RNA, 23 nt, Homo sapiens
acugggaugucacugaauauggu

SEQ ID NO: 675 - RNA, 23 nt, Homo sapiens
accauauucagugacaucccagu

SEQ ID NO: 676 - RNA, 22 nt, Homo sapiens
caaaguccuuccuauuuuuccc

SEQ ID NO: 677 - RNA, 22 nt, Homo sapiens
gggaaaaauaggaaggacuuug

SEQ ID NO: 678 - RNA, 21 nt, Homo sapiens
gaagaauaggagggacuuugu

SEQ ID NO: 679 - RNA, 21 nt, Homo sapiens
acaaagucccuccuauucuuc

SEQ ID NO: 680 - RNA, 22 nt, Homo sapiens
ugggccaugcauuucuagaacu

SEQ ID NO: 681 - RNA, 22 nt, Homo sapiens
aguucuagaaaugcauggccca

SEQ ID NO: 682 - RNA, 21 nt, Homo sapiens
ucuagaaaugcaugacccacc

SEQ ID NO: 683 - RNA, 21 nt, Homo sapiens
ggugggucaugcauuucuaga

SEQ ID NO: 684 - RNA, 22 nt, Homo sapiens
uuccacugccacuaccuaauuu

SEQ ID NO: 685 - RNA, 22 nt, Homo sapiens
aaauuagguaguggcaguggaa

SEQ ID NO: 686 - RNA, 21 nt, Homo sapiens
auuagguaguggcaguggaac

SEQ ID NO: 687 - RNA, 21 nt, Homo sapiens
guuccacugccacuaccuaau

SEQ ID NO: 688 - RNA, 21 nt, Homo sapiens
caccgacucugucuccugcag

SEQ ID NO: 689 - RNA, 21 nt, Homo sapiens
cugcaggagacagagucggug

SEQ ID NO: 690 - RNA, 22 nt, Homo sapiens
cagcaggggagagagaggaguc

SEQ ID NO: 691 - RNA, 22 nt, Homo sapiens
gacuccucucucuccccugcug

SEQ ID NO: 692 - RNA, 22 nt, Homo sapiens
uuccagcccuucuaaugguagg

SEQ ID NO: 693 - RNA, 22 nt, Homo sapiens
ccuaccauuagaagggcuggaa

SEQ ID NO: 694 - RNA, 22 nt, Homo sapiens
uaccauuagaagagcuggaaga

SEQ ID NO: 695 - RNA, 22 nt, Homo sapiens
ucuuccagcucuucuaauggua

SEQ ID NO: 696 - RNA, 21 nt, Homo sapiens
ucaagugucaucugucccuag

SEQ ID NO: 697 - RNA, 21 nt, Homo sapiens
cuagggacagaugacacuuga

SEQ ID NO: 698 - RNA, 23 nt, Homo sapiens
uuugggauugacgccacaugucu

SEQ ID NO: 699 - RNA, 23 nt, Homo sapiens
agacauguggcgucaaucccaaa

SEQ ID NO: 700 - RNA, 21 nt, Homo sapiens
cugccuguucuuccacuccag

SEQ ID NO: 701 - RNA, 21 nt, Homo sapiens
cuggaguggaagaacaggcag

SEQ ID NO: 702 - RNA, 23 nt, Homo sapiens
uauggaguggacuuucagcuggc

SEQ ID NO: 703 - RNA, 23 nt, Homo sapiens
gccagcugaaaguccacuccaua

SEQ ID NO: 704 - RNA, 22 nt, Homo sapiens
ccucaccaucccuucugccugc

SEQ ID NO: 705 - RNA, 22 nt, Homo sapiens
gcaggcagaagggauggugagg

SEQ ID NO: 706 - RNA, 23 nt, Homo sapiens
caggcagaaguggggcugacagg

SEQ ID NO: 707 - RNA, 23 nt, Homo sapiens
ccugucagccccacuucugccug

SEQ ID NO: 708 - RNA, 20 nt, Homo sapiens
ucucuucaucuaccccccag

SEQ ID NO: 709 - RNA, 20 nt, Homo sapiens
cugggggguagaugaagaga

SEQ ID NO: 710 - RNA, 21 nt, Homo sapiens
uuggaggguguggaagacauc

SEQ ID NO: 711 - RNA, 21 nt, Homo sapiens
gaugucuuccacacccuccaa

SEQ ID NO: 712 - RNA, 22 nt, Homo sapiens
cugccagccccguuccagggca

SEQ ID NO: 713 - RNA, 22 nt, Homo sapiens
ugcccuggaacggggcuggcag

SEQ ID NO: 714 - RNA, 23 nt, Homo sapiens
acaaaguacagcauuagccuuag

SEQ ID NO: 715 - RNA, 23 nt, Homo sapiens
cuaaggcuaaugcuguacuuugu

SEQ ID NO: 716 - RNA, 23 nt, Homo sapiens
aaaggucauuguaagguuaaugc

SEQ ID NO: 717 - RNA, 23 nt, Homo sapiens
gcauuaaccuuacaaugaccuuu

SEQ ID NO: 718 - RNA, 22 nt, Homo sapiens
ugaggcuaaugcacuacuucac

SEQ ID NO: 719 - RNA, 22 nt, Homo sapiens
gugaaguagugcauuagccuca

SEQ ID NO: 720 - RNA, 24 nt, Homo sapiens
uauagagagcaggaagauuaaugu

SEQ ID NO: 721 - RNA, 24 nt, Homo sapiens
acauuaaucuuccugcucucuaua

SEQ ID NO: 722 - RNA, 23 nt, Homo sapiens
gugcuucaucguaauuaaccuua

SEQ ID NO: 723 - RNA, 23 nt, Homo sapiens
uaagguuaauuacgaugaagcac

SEQ ID NO: 724 - RNA, 24 nt, Homo sapiens
guggaaagcaugcauccagggugu

SEQ ID NO: 725 - RNA, 24 nt, Homo sapiens
acacccuggaugcaugcuuuccac

SEQ ID NO: 726 - RNA, 22 nt, Homo sapiens
agacacauuuggagagggaacc

SEQ ID NO: 727 - RNA, 22 nt, Homo sapiens
gguucccucuccaaaugugucu

SEQ ID NO: 728 - RNA, 22 nt, Homo sapiens
uucccuuugucauccuaugccu

SEQ ID NO: 729 - RNA, 22 nt, Homo sapiens
aggcauaggaugacaaagggaa

SEQ ID NO: 730 - RNA, 21 nt, Homo sapiens
gcugggaaggcaaagggacgu

SEQ ID NO: 731 - RNA, 21 nt, Homo sapiens
acgucccuuugccuucccagc

SEQ ID NO: 732 - RNA, 21 nt, Homo sapiens
uaccacaggguagaaccacgg

SEQ ID NO: 733 - RNA, 21 nt, Homo sapiens
ccgugguucuacccuguggua

SEQ ID NO: 734 - RNA, 22 nt, Homo sapiens
ggcuggagcgagugcaguggug

SEQ ID NO: 735 - RNA, 22 nt, Homo sapiens
caccacugcacucgcuccagcc

SEQ ID NO: 736 - RNA, 18 nt, Homo sapiens
ccaggcucugcaguggga

SEQ ID NO: 737 - RNA, 18 nt, Homo sapiens
ucccacugcagagccugg

SEQ ID NO: 738 - RNA, 22 nt, Homo sapiens
cugggaggugugauauuguggu

SEQ ID NO: 739 - RNA, 22 nt, Homo sapiens
accacaauaucacaccucccag

SEQ ID NO: 740 - RNA, 22 nt, Homo sapiens
gggaggugugaucucacacucg

SEQ ID NO: 741 - RNA, 22 nt, Homo sapiens
cgagugugagaucacaccuccc

SEQ ID NO: 742 - RNA, 22 nt, Homo sapiens
ugugauaucaugguuccuggga

SEQ ID NO: 743 - RNA, 22 nt, Homo sapiens
ucccaggaaccaugauaucaca

SEQ ID NO: 744 - RNA, 22 nt, Homo sapiens
ugugauaucgugcuuccuggga

SEQ ID NO: 745 - RNA, 22 nt, Homo sapiens
ucccaggaagcacgauaucaca

SEQ ID NO: 746 - RNA, 18 nt, Homo sapiens
ggugggcuucccggaggg

SEQ ID NO: 747 - RNA, 18 nt, Homo sapiens
cccuccgggaagcccacc

SEQ ID NO: 748 - RNA, 18 nt, Homo sapiens
cacugcaggacucagcag

SEQ ID NO: 749 - RNA, 18 nt, Homo sapiens
cugcugaguccugcagug

SEQ ID NO: 750 - RNA, 17 nt, Homo sapiens
ugagggaggagacugca

SEQ ID NO: 751 - RNA, 17 nt, Homo sapiens
ugcagucuccucccuca

SEQ ID NO: 752 - RNA, 18 nt, Homo sapiens
gaggcugaaggaagaugg

SEQ ID NO: 753 - RNA, 18 nt, Homo sapiens
ccaucuuccuucagccuc

SEQ ID NO: 754 - RNA, 22 nt, Homo sapiens
gucacugaugucuguagcugag

SEQ ID NO: 755 - RNA, 22 nt, Homo sapiens
cucagcuacagacaucagugac

SEQ ID NO: 756 - RNA, 22 nt, Homo sapiens
accugucuguggaaaggagcua

SEQ ID NO: 757 - RNA, 22 nt, Homo sapiens
uagcuccuuuccacagacaggu

SEQ ID NO: 758 - RNA, 22 nt, Homo sapiens
agaguuaacucaaaauggacua

SEQ ID NO: 759 - RNA, 22 nt, Homo sapiens
uaguccauuuugaguuaacucu

SEQ ID NO: 760 - RNA, 22 nt, Homo sapiens
uguugggauucagcaggaccau

SEQ ID NO: 761 - RNA, 22 nt, Homo sapiens
augguccugcugaaucccaaca

SEQ ID NO: 762 - RNA, 17 nt, Homo sapiens
gaagauggacguacuuu

SEQ ID NO: 763 - RNA, 17 nt, Homo sapiens
aaaguacguccaucuuc

SEQ ID NO: 764 - RNA, 21 nt, Homo sapiens
ucugaauagagucugaagagu

SEQ ID NO: 765 - RNA, 21 nt, Homo sapiens
acucuucagacucuauucaga

SEQ ID NO: 766 - RNA, 22 nt, Homo sapiens
caaggagacgggaacauggagc

SEQ ID NO: 767 - RNA, 22 nt, Homo sapiens
gcuccauguucccgucuccuug

SEQ ID NO: 768 - RNA, 20 nt, Homo sapiens
aaaagcugggcugagaggcg

SEQ ID NO: 769 - RNA, 20 nt, Homo sapiens
cgccucucagcccagcuuuu

SEQ ID NO: 770 - RNA, 18 nt, Homo sapiens
aggcuggagugagcggag

SEQ ID NO: 771 - RNA, 18 nt, Homo sapiens
cuccgcucacuccagccu

SEQ ID NO: 772 - RNA, 22 nt, Homo sapiens
gcgacucugaaaacuagaaggu

SEQ ID NO: 773 - RNA, 22 nt, Homo sapiens
accuucuaguuuucagagucgc

SEQ ID NO: 774 - RNA, 20 nt, Homo sapiens
aaagacucugcaagaugccu

SEQ ID NO: 775 - RNA, 20 nt, Homo sapiens
aggcaucuugcagagucuuu

SEQ ID NO: 776 - RNA, 21 nt, Homo sapiens
acaggagugggggugggacau

SEQ ID NO: 777 - RNA, 21 nt, Homo sapiens
augucccacccccacuccugu

SEQ ID NO: 778 - RNA, 21 nt, Homo sapiens
cgucccaccccccacuccugu

SEQ ID NO: 779 - RNA, 21 nt, Homo sapiens
acaggaguggggggugggacg

SEQ ID NO: 780 - RNA, 18 nt, Homo sapiens
aggagaaguaaaguagaa

SEQ ID NO: 781 - RNA, 18 nt, Homo sapiens
uucuacuuuacuucuccu

SEQ ID NO: 782 - RNA, 22 nt, Homo sapiens
auggccagagcucacacagagg

SEQ ID NO: 783 - RNA, 22 nt, Homo sapiens
ccucugugugagcucuggccau

SEQ ID NO: 784 - RNA, 21 nt, Homo sapiens
ugggcucaggguacaaagguu

SEQ ID NO: 785 - RNA, 21 nt, Homo sapiens
aaccuuuguacccugagccca

SEQ ID NO: 786 - RNA, 21 nt, Homo sapiens
cacaggcuuagaaaagacagu

SEQ ID NO: 787 - RNA, 21 nt, Homo sapiens
acugucuuuucuaagccugug

SEQ ID NO: 788 - RNA, 22 nt, Homo sapiens
gugacugauaccuuggaggcau

SEQ ID NO: 789 - RNA, 22 nt, Homo sapiens
augccuccaagguaucagucac

SEQ ID NO: 790 - RNA, 22 nt, Homo sapiens
ugucguggggcuugcuggcuug

SEQ ID NO: 791 - RNA, 22 nt, Homo sapiens
caagccagcaagccccacgaca

SEQ ID NO: 792 - RNA, 17 nt, Homo sapiens
acagggaggagauugua

SEQ ID NO: 793 - RNA, 17 nt, Homo sapiens
uacaaucuccucccugu

SEQ ID NO: 794 - RNA, 17 nt, Homo sapiens
gccggacaagagggagg

SEQ ID NO: 795 - RNA, 17 nt, Homo sapiens
ccucccucuuguccggc

SEQ ID NO: 796 - RNA, 17 nt, Homo sapiens
uuggaggcguggguuuu

SEQ ID NO: 797 - RNA, 17 nt, Homo sapiens
aaaacccacgccuccaa

SEQ ID NO: 798 - RNA, 18 nt, Homo sapiens
cucgaguuggaagaggcg

SEQ ID NO: 799 - RNA, 18 nt, Homo sapiens
cgccucuuccaacucgag

SEQ ID NO: 800 - RNA, 21 nt, Homo sapiens
cacggcaaaagaaacaaucca

SEQ ID NO: 801 - RNA, 21 nt, Homo sapiens
uggauuguuucuuuugccgug

SEQ ID NO: 802 - RNA, 22 nt, Homo sapiens
agauuguuucuuuugccgugca

SEQ ID NO: 803 - RNA, 22 nt, Homo sapiens
ugcacggcaaaagaaacaaucu

SEQ ID NO: 804 - RNA, 17 nt, Homo sapiens
ggugggggcuguuguuu

SEQ ID NO: 805 - RNA, 17 nt, Homo sapiens
aaacaacagcccccacc

SEQ ID NO: 806 - RNA, 20 nt, Homo sapiens
ggcuccuuggucuaggggua

SEQ ID NO: 807 - RNA, 20 nt, Homo sapiens
uaccccuagaccaaggagcc

SEQ ID NO: 808 - RNA, 22 nt, Homo sapiens
cgucccggggcugcgcgaggca

SEQ ID NO: 809 - RNA, 22 nt, Homo sapiens
ugccucgcgcagccccgggacg

SEQ ID NO: 810 - RNA, 22 nt, Homo sapiens
uggggauuuggagaagugguga

SEQ ID NO: 811 - RNA, 22 nt, Homo sapiens
ucaccacuucuccaaaucccca

SEQ ID NO: 812 - RNA, 17 nt, Homo sapiens
ugguagagcugaggaca

SEQ ID NO: 813 - RNA, 17 nt, Homo sapiens
uguccucagcucuacca

SEQ ID NO: 814 - RNA, 23 nt, Homo sapiens
uugaauucuuggccuuaagugau

SEQ ID NO: 815 - RNA, 23 nt, Homo sapiens
aucacuuaaggccaagaauucaa

SEQ ID NO: 816 - RNA, 20 nt, Homo sapiens
gagcuuggucuguagcgguu

SEQ ID NO: 817 - RNA, 20 nt, Homo sapiens
aaccgcuacagaccaagcuc

SEQ ID NO: 818 - RNA, 20 nt, Homo sapiens
ggauccgagucacggcacca

SEQ ID NO: 819 - RNA, 20 nt, Homo sapiens
uggugccgugacucggaucc

SEQ ID NO: 820 - RNA, 17 nt, Homo sapiens
aggguguguguguuuuu

SEQ ID NO: 821 - RNA, 17 nt, Homo sapiens
aaaaacacacacacccu

SEQ ID NO: 822 - RNA, 17 nt, Homo sapiens
ccugguggcuuccuuuu

SEQ ID NO: 823 - RNA, 17 nt, Homo sapiens
aaaaggaagccaccagg

SEQ ID NO: 824 - RNA, 22 nt, Homo sapiens
ucacaagguauugacuggcgua

SEQ ID NO: 825 - RNA, 22 nt, Homo sapiens
uacgccagucaauaccuuguga

SEQ ID NO: 826 - RNA, 19 nt, Homo sapiens
agagguagguguggaagaa

SEQ ID NO: 827 - RNA, 19 nt, Homo sapiens
uucuuccacaccuaccucu

SEQ ID NO: 828 - RNA, 22 nt, Homo sapiens
ccaggaggcggaggagguggag

SEQ ID NO: 829 - RNA, 22 nt, Homo sapiens
cuccaccuccuccgccuccugg

SEQ ID NO: 830 - RNA, 22 nt, Homo sapiens
auagugguugugaauuuaccuu

SEQ ID NO: 831 - RNA, 22 nt, Homo sapiens
aagguaaauucacaaccacuau

SEQ ID NO: 832 - RNA, 23 nt, Homo sapiens
gauugagacuaguagggcuaggc

SEQ ID NO: 833 - RNA, 23 nt, Homo sapiens
gccuagcccuacuagucucaauc

SEQ ID NO: 834 - RNA, 23 nt, Homo sapiens
ugacacggaggguggcuugggaa

SEQ ID NO: 835 - RNA, 23 nt, Homo sapiens
uucccaagccacccuccguguca

SEQ ID NO: 836 - RNA, 17 nt, Homo sapiens
gagacugggguggggcc

SEQ ID NO: 837 - RNA, 17 nt, Homo sapiens
ggccccaccccagucuc

SEQ ID NO: 838 - RNA, 21 nt, Homo sapiens
aagguuuggauagaugcaaua

SEQ ID NO: 839 - RNA, 21 nt, Homo sapiens
uauugcaucuauccaaaccuu

SEQ ID NO: 840 - RNA, 22 nt, Homo sapiens
cucaaguagucugaccagggga

SEQ ID NO: 841 - RNA, 22 nt, Homo sapiens
uccccuggucagacuacuugag

SEQ ID NO: 842 - RNA, 18 nt, Homo sapiens
gggugcgggccggcgggg

SEQ ID NO: 843 - RNA, 18 nt, Homo sapiens
ccccgccggcccgcaccc

SEQ ID NO: 844 - RNA, 18 nt, Homo sapiens
agagcagaaggaugagau

SEQ ID NO: 845 - RNA, 18 nt, Homo sapiens
aucucauccuucugcucu

SEQ ID NO: 846 - RNA, 21 nt, Homo sapiens
uggcaaacguggaagccgaga

SEQ ID NO: 847 - RNA, 21 nt, Homo sapiens
ucucggcuuccacguuugcca

SEQ ID NO: 848 - RNA, 18 nt, Homo sapiens
ggugggggguguuguuuu

SEQ ID NO: 849 - RNA, 18 nt, Homo sapiens
aaaacaacaccccccacc

SEQ ID NO: 850 - RNA, 22 nt, Homo sapiens
cuagugcucuccguuacaagua

SEQ ID NO: 851 - RNA, 22 nt, Homo sapiens
uacuuguaacggagagcacuag

SEQ ID NO: 852 - RNA, 22 nt, Homo sapiens
caagggaccaagcauucauuau

SEQ ID NO: 853 - RNA, 22 nt, Homo sapiens
auaaugaaugcuuggucccuug

SEQ ID NO: 854 - RNA, 22 nt, Homo sapiens
caggaaggauuuagggacaggc

SEQ ID NO: 855 - RNA, 22 nt, Homo sapiens
gccugucccuaaauccuuccug

SEQ ID NO: 856 - RNA, 22 nt, Homo sapiens
cuauuaaggacauuugugauuc

SEQ ID NO: 857 - RNA, 22 nt, Homo sapiens
gaaucacaaauguccuuaauag

SEQ ID NO: 858 - RNA, 22 nt, Homo sapiens
auuaaggacauuugugauugau

SEQ ID NO: 859 - RNA, 22 nt, Homo sapiens
aucaaucacaaauguccuuaau

SEQ ID NO: 860 - RNA, 17 nt, Homo sapiens
gaggcugagcugaggag

SEQ ID NO: 861 - RNA, 17 nt, Homo sapiens
cuccucagcucagccuc

SEQ ID NO: 862 - RNA, 22 nt, Homo sapiens
cgcgcggccgugcucggagcag

SEQ ID NO: 863 - RNA, 22 nt, Homo sapiens
cugcuccgagcacggccgcgcg

SEQ ID NO: 864 - RNA, 21 nt, Homo sapiens
agccaaguggaaguuacuuua

SEQ ID NO: 865 - RNA, 21 nt, Homo sapiens
uaaaguaacuuccacuuggcu

SEQ ID NO: 866 - RNA, 17 nt, Homo sapiens
ggagugggcuggugguu

SEQ ID NO: 867 - RNA, 17 nt, Homo sapiens
aaccaccagcccacucc

SEQ ID NO: 868 - RNA, 22 nt, Homo sapiens
uuucuauuucucaguggggcuc

SEQ ID NO: 869 - RNA, 22 nt, Homo sapiens
gagccccacugagaaauagaaa

SEQ ID NO: 870 - RNA, 22 nt, Homo sapiens
aacccagugggcuauggaaaug

SEQ ID NO: 871 - RNA, 22 nt, Homo sapiens
cauuuccauagcccacuggguu

SEQ ID NO: 872 - RNA, 17 nt, Homo sapiens
gggguggucuguuguug

SEQ ID NO: 873 - RNA, 17 nt, Homo sapiens
caacaacagaccacccc

SEQ ID NO: 874 - RNA, 20 nt, Homo sapiens
aaaaggcgggagaagcccca

SEQ ID NO: 875 - RNA, 20 nt, Homo sapiens
uggggcuucucccgccuuuu

SEQ ID NO: 876 - RNA, 20 nt, Homo sapiens
uaacggccgcgguacccuaa

SEQ ID NO: 877 - RNA, 20 nt, Homo sapiens
uuaggguaccgcggccguua

SEQ ID NO: 878 - RNA, 17 nt, Homo sapiens
gcugggcgaggcuggca

SEQ ID NO: 879 - RNA, 17 nt, Homo sapiens
ugccagccucgcccagc

SEQ ID NO: 880 - RNA, 19 nt, Homo sapiens
agagcuggcugaagggcag

SEQ ID NO: 881 - RNA, 19 nt, Homo sapiens
cugcccuucagccagcucu

SEQ ID NO: 882 - RNA, 18 nt, Homo sapiens
agggggcgggcuccggcg

SEQ ID NO: 883 - RNA, 18 nt, Homo sapiens
cgccggagcccgcccccu

SEQ ID NO: 884 - RNA, 22 nt, Homo sapiens
ucugguaagagauuugggcaua

SEQ ID NO: 885 - RNA, 22 nt, Homo sapiens
uaugcccaaaucucuuaccaga

SEQ ID NO: 886 - RNA, 22 nt, Homo sapiens
aauguggacuggugugaccaaa

SEQ ID NO: 887 - RNA, 22 nt, Homo sapiens
uuuggucacaccaguccacauu

SEQ ID NO: 888 - RNA, 17 nt, Homo sapiens
ggggcugggcgcgcgcc

SEQ ID NO: 889 - RNA, 17 nt, Homo sapiens
ggcgcgcgcccagcccc

SEQ ID NO: 890 - RNA, 21 nt, Homo sapiens
agaaggccuuuccaucucugu

SEQ ID NO: 891 - RNA, 21 nt, Homo sapiens
acagagauggaaaggccuucu

SEQ ID NO: 892 - RNA, 22 nt, Homo sapiens
ccagacuguggcugaccagagg

SEQ ID NO: 893 - RNA, 22 nt, Homo sapiens
ccucuggucagccacagucugg

SEQ ID NO: 894 - RNA, 21 nt, Homo sapiens
aauguaaacaggcuuuuugcu

SEQ ID NO: 895 - RNA, 21 nt, Homo sapiens
agcaaaaagccuguuuacauu

SEQ ID NO: 896 - RNA, 22 nt, Homo sapiens
gaggaaacugaagcugagaggg

SEQ ID NO: 897 - RNA, 22 nt, Homo sapiens
cccucucagcuucaguuuccuc

SEQ ID NO: 898 - RNA, 17 nt, Homo sapiens
cuccgggacggcugggc

SEQ ID NO: 899 - RNA, 17 nt, Homo sapiens
gcccagccgucccggag

SEQ ID NO: 900 - RNA, 22 nt, Homo sapiens
ugggcuggcagggcaagugcug

SEQ ID NO: 901 - RNA, 22 nt, Homo sapiens
cagcacuugcccugccagccca

SEQ ID NO: 902 - RNA, 17 nt, Homo sapiens
aagacugagaggaggga

SEQ ID NO: 903 - RNA, 17 nt, Homo sapiens
ucccuccucucagucuu

SEQ ID NO: 904 - RNA, 17 nt, Homo sapiens
ugagguaguaguuucuu

SEQ ID NO: 905 - RNA, 17 nt, Homo sapiens
aagaaacuacuaccuca

SEQ ID NO: 906 - RNA, 21 nt, Homo sapiens
uaugugaccucggaugaauca

SEQ ID NO: 907 - RNA, 21 nt, Homo sapiens
ugauucauccgaggucacaua

SEQ ID NO: 908 - RNA, 22 nt, Homo sapiens
gcugaugaugauggugcugaag

SEQ ID NO: 909 - RNA, 22 nt, Homo sapiens
cuucagcaccaucaucaucagc

SEQ ID NO: 910 - RNA, 22 nt, Homo sapiens
uuuaagcaggaaauagaauuua

SEQ ID NO: 911 - RNA, 22 nt, Homo sapiens
uaaauucuauuuccugcuuaaa

SEQ ID NO: 912 - RNA, 22 nt, Homo sapiens
ugugacaauagagaugaacaug

SEQ ID NO: 913 - RNA, 22 nt, Homo sapiens
cauguucaucucuauugucaca

SEQ ID NO: 914 - RNA, 18 nt, Homo sapiens
aggcugggcugggacgga

SEQ ID NO: 915 - RNA, 18 nt, Homo sapiens
uccgucccagcccagccu

SEQ ID NO: 916 - RNA, 20 nt, Homo sapiens
aaauggguggucugaggcaa

SEQ ID NO: 917 - RNA, 20 nt, Homo sapiens
uugccucagaccacccauuu

SEQ ID NO: 918 - RNA, 20 nt, Homo sapiens
cuggguugggcugggcuggg

SEQ ID NO: 919 - RNA, 20 nt, Homo sapiens
cccagcccagcccaacccag

SEQ ID NO: 920 - RNA, 17 nt, Homo sapiens
gcggggcugggcgcgcg

SEQ ID NO: 921 - RNA, 17 nt, Homo sapiens
cgcgcgcccagccccgc

SEQ ID NO: 922 - RNA, 22 nt, Homo sapiens
acuaaaggauauagaagguuuu

SEQ ID NO: 923 - RNA, 22 nt, Homo sapiens
aaaaccuucuauauccuuuagu

SEQ ID NO: 924 - RNA, 22 nt, Homo sapiens
ugagggaguaggauguaugguu

SEQ ID NO: 925 - RNA, 22 nt, Homo sapiens
aaccauacauccuacucccuca

SEQ ID NO: 926 - RNA, 22 nt, Homo sapiens
gaagaacuguugcauuugcccu

SEQ ID NO: 927 - RNA, 22 nt, Homo sapiens
agggcaaaugcaacaguucuuc

SEQ ID NO: 928 - RNA, 22 nt, Homo sapiens
cagggccucacuguaucgccca

SEQ ID NO: 929 - RNA, 22 nt, Homo sapiens
ugggcgauacagugaggcccug

SEQ ID NO: 930 - RNA, 22 nt, Homo sapiens
agacugacggcuggaggcccau

SEQ ID NO: 931 - RNA, 22 nt, Homo sapiens
augggccuccagccgucagucu

SEQ ID NO: 932 - RNA, 18 nt, Homo sapiens
acaggcaggauuggggaa

SEQ ID NO: 933 - RNA, 18 nt, Homo sapiens
uuccccaauccugccugu

SEQ ID NO: 934 - RNA, 22 nt, Homo sapiens
aggacuggacucccggcagccc

SEQ ID NO: 935 - RNA, 22 nt, Homo sapiens
gggcugccgggaguccaguccu

SEQ ID NO: 936 - RNA, 17 nt, Homo sapiens
gggagaagggucggggc

SEQ ID NO: 937 - RNA, 17 nt, Homo sapiens
gccccgacccuucuccc

SEQ ID NO: 938 - RNA, 25 nt, Homo sapiens
aaauaugaugaaacucacagcugag

SEQ ID NO: 939 - RNA, 25 nt, Homo sapiens
cucagcugugaguuucaucauauuu

SEQ ID NO: 940 - RNA, 26 nt, Homo sapiens
gcucagggaugauaacugugcugaga

SEQ ID NO: 941 - RNA, 26 nt, Homo sapiens
ucucagcacaguuaucaucccugagc

SEQ ID NO: 942 - RNA, 18 nt, Homo sapiens
cagcagugcgcagggcug

SEQ ID NO: 943 - RNA, 18 nt, Homo sapiens
cagcccugcgcacugcug

SEQ ID NO: 944 - RNA, 22 nt, Homo sapiens
gcuaaggaaguccugugcucag

SEQ ID NO: 945 - RNA, 22 nt, Homo sapiens
cugagcacaggacuuccuuagc

SEQ ID NO: 946 - RNA, 21 nt, Homo sapiens
ugacucugccuguaggccggu

SEQ ID NO: 947 - RNA, 21 nt, Homo sapiens
accggccuacaggcagaguca

SEQ ID NO: 948 - RNA, 21 nt, Homo sapiens
gaccgagagggccucggcugu

SEQ ID NO: 949 - RNA, 21 nt, Homo sapiens
acagccgaggcccucucgguc

SEQ ID NO: 950 - RNA, 21 nt, Homo sapiens
ggggggaugugcaugcugguu

SEQ ID NO: 951 - RNA, 21 nt, Homo sapiens
aaccagcaugcacaucccccc

SEQ ID NO: 952 - RNA, 22 nt, Homo sapiens
uggucugcaaagagaugacugu

SEQ ID NO: 953 - RNA, 22 nt, Homo sapiens
acagucaucucuuugcagacca

SEQ ID NO: 954 - RNA, 22 nt, Homo sapiens
ucauuauauguaugaucuggac

SEQ ID NO: 955 - RNA, 22 nt, Homo sapiens
guccagaucauacauauaauga

SEQ ID NO: 956 - RNA, 18 nt, Homo sapiens
cccagcaggacgggagcg

SEQ ID NO: 957 - RNA, 18 nt, Homo sapiens
cgcucccguccugcuggg

SEQ ID NO: 958 - RNA, 17 nt, Homo sapiens
auggagaaggcuucuga

SEQ ID NO: 959 - RNA, 17 nt, Homo sapiens
ucagaagccuucuccau

SEQ ID NO: 960 - RNA, 17 nt, Homo sapiens
ccccggggagcccggcg

SEQ ID NO: 961 - RNA, 17 nt, Homo sapiens
cgccgggcuccccgggg

SEQ ID NO: 962 - RNA, 22 nt, Homo sapiens
uggaaggagguugccggacgcu

SEQ ID NO: 963 - RNA, 22 nt, Homo sapiens
agcguccggcaaccuccuucca

SEQ ID NO: 964 - RNA, 17 nt, Homo sapiens
ggauggaggaggggucu

SEQ ID NO: 965 - RNA, 17 nt, Homo sapiens
agaccccuccuccaucc

SEQ ID NO: 966 - RNA, 17 nt, Homo sapiens
guggaccuggcugggac

SEQ ID NO: 967 - RNA, 17 nt, Homo sapiens
gucccagccagguccac

SEQ ID NO: 968 - RNA, 21 nt, Homo sapiens
ucgugcauauaucuaccacau

SEQ ID NO: 969 - RNA, 21 nt, Homo sapiens
augugguagauauaugcacga

SEQ ID NO: 970 - RNA, 21 nt, Homo sapiens
ugugguagauauaugcacgau

SEQ ID NO: 971 - RNA, 21 nt, Homo sapiens
aucgugcauauaucuaccaca

SEQ ID NO: 972 - RNA, 22 nt, Homo sapiens
ugagccgagcugagcuuagcug

SEQ ID NO: 973 - RNA, 22 nt, Homo sapiens
cagcuaagcucagcucggcuca

SEQ ID NO: 974 - RNA, 22 nt, Homo sapiens
gagcuuggaugagcugggcuga

SEQ ID NO: 975 - RNA, 22 nt, Homo sapiens
ucagcccagcucauccaagcuc

SEQ ID NO: 976 - RNA, 22 nt, Homo sapiens
gcugaacugggcugagcugggc

SEQ ID NO: 977 - RNA, 22 nt, Homo sapiens
gcccagcucagcccaguucagc

SEQ ID NO: 978 - RNA, 21 nt, Homo sapiens
uuaguccugccuguagguuua

SEQ ID NO: 979 - RNA, 21 nt, Homo sapiens
uaaaccuacaggcaggacuaa

SEQ ID NO: 980 - RNA, 20 nt, Homo sapiens
uugggcugggcuggguuggg

SEQ ID NO: 981 - RNA, 20 nt, Homo sapiens
cccaacccagcccagcccaa

SEQ ID NO: 982 - RNA, 20 nt, Homo sapiens
uaggaugggggugagaggug

SEQ ID NO: 983 - RNA, 20 nt, Homo sapiens
caccucucacccccauccua

SEQ ID NO: 984 - RNA, 22 nt, Homo sapiens
aaaaguaauuguggauuuugcu

SEQ ID NO: 985 - RNA, 22 nt, Homo sapiens
agcaaaauccacaauuacuuuu

SEQ ID NO: 986 - RNA, 22 nt, Homo sapiens
caaaaaccggcaauuacuuuug

SEQ ID NO: 987 - RNA, 22 nt, Homo sapiens
caaaaguaauugccgguuuuug

SEQ ID NO: 988 - RNA, 22 nt, Homo sapiens
gaaaacgacaaugacuuuugca

SEQ ID NO: 989 - RNA, 22 nt, Homo sapiens
ugcaaaagucauugucguuuuc

SEQ ID NO: 990 - RNA, 21 nt, Homo sapiens
caaaaacugcaauuacuuuca

SEQ ID NO: 991 - RNA, 21 nt, Homo sapiens
ugaaaguaauugcaguuuuug

SEQ ID NO: 992 - RNA, 21 nt, Homo sapiens
aaagguaauugugguuucugc

SEQ ID NO: 993 - RNA, 21 nt, Homo sapiens
gcagaaaccacaauuaccuuu

SEQ ID NO: 994 - RNA, 22 nt, Homo sapiens
caaaaacugcaguuacuuuugc

SEQ ID NO: 995 - RNA, 22 nt, Homo sapiens
gcaaaaguaacugcaguuuuug

SEQ ID NO: 996 - RNA, 20 nt, Homo sapiens
aaaagugauugcaguguuug

SEQ ID NO: 997 - RNA, 20 nt, Homo sapiens
caaacacugcaaucacuuuu

SEQ ID NO: 998 - RNA, 22 nt, Homo sapiens
aaagguaauugcaguuuuuccc

SEQ ID NO: 999 - RNA, 22 nt, Homo sapiens
gggaaaaacugcaauuaccuuu

SEQ ID NO: 1000 - RNA, 21 nt, Homo sapiens
uaaaaacugcaauuacuuuua

SEQ ID NO: 1001 - RNA, 21 nt, Homo sapiens
uaaaaguaauugcaguuuuua

SEQ ID NO: 1002 - RNA, 23 nt, Homo sapiens
ugcaaaaguaauugcaguuuuug

SEQ ID NO: 1003 - RNA, 23 nt, Homo sapiens
caaaaacugcaauuacuuuugca

SEQ ID NO: 1004 - RNA, 21 nt, Homo sapiens
aaaaguaacugcgguuuuuga

SEQ ID NO: 1005 - RNA, 21 nt, Homo sapiens
ucaaaaaccgcaguuacuuuu

SEQ ID NO: 1006 - RNA, 22 nt, Homo sapiens
aacggcaaugacuuuuguacca

SEQ ID NO: 1007 - RNA, 22 nt, Homo sapiens
ugguacaaaagucauugccguu

SEQ ID NO: 1008 - RNA, 22 nt, Homo sapiens
caaaaacugcaguuacuuuugu

SEQ ID NO: 1009 - RNA, 22 nt, Homo sapiens
acaaaaguaacugcaguuuuug

SEQ ID NO: 1010 - RNA, 22 nt, Homo sapiens
aaaaguaauugcgguuuuugcc

SEQ ID NO: 1011 - RNA, 22 nt, Homo sapiens
ggcaaaaaccgcaauuacuuuu

SEQ ID NO: 1012 - RNA, 20 nt, Homo sapiens
aaaaggcauugugguuuuug

SEQ ID NO: 1013 - RNA, 20 nt, Homo sapiens
caaaaaccacaaugccuuuu

SEQ ID NO: 1014 - RNA, 23 nt, Homo sapiens
cggcccgggcugcugcuguuccu

SEQ ID NO: 1015 - RNA, 23 nt, Homo sapiens
aggaacagcagcagcccgggccg

SEQ ID NO: 1016 - RNA, 20 nt, Homo sapiens
agagguauagggcaugggaa

SEQ ID NO: 1017 - RNA, 20 nt, Homo sapiens
uucccaugcccuauaccucu

SEQ ID NO: 1018 - RNA, 22 nt, Homo sapiens
uuccuaugcauauacuucuuug

SEQ ID NO: 1019 - RNA, 22 nt, Homo sapiens
caaagaaguauaugcauaggaa

SEQ ID NO: 1020 - RNA, 22 nt, Homo sapiens
aucauagaggaaaauccauguu

SEQ ID NO: 1021 - RNA, 22 nt, Homo sapiens
aacauggauuuuccucuaugau

SEQ ID NO: 1022 - RNA, 22 nt, Homo sapiens
cguggauauuccuucuauguuu

SEQ ID NO: 1023 - RNA, 22 nt, Homo sapiens
aaacauagaaggaauauccacg

SEQ ID NO: 1024 - RNA, 22 nt, Homo sapiens
ugaguauuacauggccaaucuc

SEQ ID NO: 1025 - RNA, 22 nt, Homo sapiens
gagauuggccauguaauacuca

SEQ ID NO: 1026 - RNA, 21 nt, Homo sapiens
cuuccgccccgccgggcgucg

SEQ ID NO: 1027 - RNA, 21 nt, Homo sapiens
cgacgcccggcggggcggaag

SEQ ID NO: 1028 - RNA, 22 nt, Homo sapiens
uagcuuaucagacugauguuga

SEQ ID NO: 1029 - RNA, 22 nt, Homo sapiens
ucaacaucagucugauaagcua

SEQ ID NO: 1030 - RNA, 22 nt, Homo sapiens
cacuagauugugagcuccugga

SEQ ID NO: 1031 - RNA, 22 nt, Homo sapiens
uccaggagcucacaaucuagug

SEQ ID NO: 1032 - RNA, 22 nt, Homo sapiens
aaggagcucacagucuauugag

SEQ ID NO: 1033 - RNA, 22 nt, Homo sapiens
cucaauagacugugagcuccuu

SEQ ID NO: 1034 - RNA, 22 nt, Homo sapiens
uacgucaucguugucaucguca

SEQ ID NO: 1035 - RNA, 22 nt, Homo sapiens
ugacgaugacaacgaugacgua

SEQ ID NO: 1036 - RNA, 22 nt, Homo sapiens
cacgcucaugcacacacccaca

SEQ ID NO: 1037 - RNA, 22 nt, Homo sapiens
ugugggugugugcaugagcgug

SEQ ID NO: 1038 - RNA, 21 nt, Homo sapiens
caacaccagucgaugggcugu

SEQ ID NO: 1039 - RNA, 21 nt, Homo sapiens
acagcccaucgacugguguug

SEQ ID NO: 1040 - RNA, 22 nt, Homo sapiens
uucaccaccuucuccacccagc

SEQ ID NO: 1041 - RNA, 22 nt, Homo sapiens
gcuggguggagaagguggugaa

SEQ ID NO: 1042 - RNA, 23 nt, Homo sapiens
cggguagagagggcagugggagg

SEQ ID NO: 1043 - RNA, 23 nt, Homo sapiens
ccucccacugcccucucuacccg

SEQ ID NO: 1044 - RNA, 18 nt, Homo sapiens
aauccuugcuaccugggu

SEQ ID NO: 1045 - RNA, 18 nt, Homo sapiens
acccagguagcaaggauu

SEQ ID NO: 1046 - RNA, 22 nt, Homo sapiens
caauuuagugugugugauauuu

SEQ ID NO: 1047 - RNA, 22 nt, Homo sapiens
aaauaucacacacacuaaauug

SEQ ID NO: 1048 - RNA, 22 nt, Homo sapiens
uauugcacauuacuaaguugca

SEQ ID NO: 1049 - RNA, 22 nt, Homo sapiens
ugcaacuuaguaaugugcaaua

SEQ ID NO: 1050 - RNA, 22 nt, Homo sapiens
ccuauucuugauuacuuguuuc

SEQ ID NO: 1051 - RNA, 22 nt, Homo sapiens
gaaacaaguaaucaagaauagg

SEQ ID NO: 1052 - RNA, 22 nt, Homo sapiens
uucaaguaauccaggauaggcu

SEQ ID NO: 1053 - RNA, 22 nt, Homo sapiens
agccuauccuggauuacuugaa

SEQ ID NO: 1054 - RNA, 23 nt, Homo sapiens
ccaguuaccgcuuccgcuaccgc

SEQ ID NO: 1055 - RNA, 23 nt, Homo sapiens
gcgguagcggaagcgguaacugg

SEQ ID NO: 1056 - RNA, 21 nt, Homo sapiens
gauuucaguggagugaaguuc

SEQ ID NO: 1057 - RNA, 21 nt, Homo sapiens
gaacuucacuccacugaaauc

SEQ ID NO: 1058 - RNA, 22 nt, Homo sapiens
uccuucauuccaccggagucug

SEQ ID NO: 1059 - RNA, 22 nt, Homo sapiens
cagacuccgguggaaugaagga

SEQ ID NO: 1060 - RNA, 23 nt, Homo sapiens
aaaauggugcccuagugacuaca

SEQ ID NO: 1061 - RNA, 23 nt, Homo sapiens
uguagucacuagggcaccauuuu

SEQ ID NO: 1062 - RNA, 21 nt, Homo sapiens
caagucacuagugguuccguu

SEQ ID NO: 1063 - RNA, 21 nt, Homo sapiens
aacggaaccacuagugacuug

SEQ ID NO: 1064 - RNA, 22 nt, Homo sapiens
ccaguauuaacugugcugcuga

SEQ ID NO: 1065 - RNA, 22 nt, Homo sapiens
ucagcagcacaguuaauacugg

SEQ ID NO: 1066 - RNA, 23 nt, Homo sapiens
ucccccaggugugauucugauuu

SEQ ID NO: 1067 - RNA, 23 nt, Homo sapiens
aaaucagaaucacaccuggggga

SEQ ID NO: 1068 - RNA, 22 nt, Homo sapiens
aaaagcuggguugagagggcga

SEQ ID NO: 1069 - RNA, 22 nt, Homo sapiens
ucgcccucucaacccagcuuuu

SEQ ID NO: 1070 - RNA, 22 nt, Homo sapiens
uggacggagaacugauaagggu

SEQ ID NO: 1071 - RNA, 22 nt, Homo sapiens
acccuuaucaguucuccgucca

SEQ ID NO: 1072 - RNA, 22 nt, Homo sapiens
uggugggccgcagaacaugugc

SEQ ID NO: 1073 - RNA, 22 nt, Homo sapiens
gcacauguucugcggcccacca

SEQ ID NO: 1074 - RNA, 22 nt, Homo sapiens
agugccugcuaugugccaggca

SEQ ID NO: 1075 - RNA, 22 nt, Homo sapiens
ugccuggcacauagcaggcacu

SEQ ID NO: 1076 - RNA, 22 nt, Homo sapiens
cuuggcaccuagcaagcacuca

SEQ ID NO: 1077 - RNA, 22 nt, Homo sapiens
ugagugcuugcuaggugccaag

SEQ ID NO: 1078 - RNA, 23 nt, Homo sapiens
uuauugcuuaagaauacgcguag

SEQ ID NO: 1079 - RNA, 23 nt, Homo sapiens
cuacgcguauucuuaagcaauaa

SEQ ID NO: 1080 - RNA, 22 nt, Homo sapiens
uugcauagucacaaaagugauc

SEQ ID NO: 1081 - RNA, 22 nt, Homo sapiens
gaucacuuuugugacuaugcaa

SEQ ID NO: 1082 - RNA, 22 nt, Homo sapiens
gugaauuaccgaagggccauaa

SEQ ID NO: 1083 - RNA, 22 nt, Homo sapiens
uuauggcccuucgguaauucac

SEQ ID NO: 1084 - RNA, 22 nt, Homo sapiens
uauggcacugguagaauucacu

SEQ ID NO: 1085 - RNA, 22 nt, Homo sapiens
agugaauucuaccagugccaua

SEQ ID NO: 1086 - RNA, 22 nt, Homo sapiens
ugauauguuugauauauuaggu

SEQ ID NO: 1087 - RNA, 22 nt, Homo sapiens
accuaauauaucaaacauauca

SEQ ID NO: 1088 - RNA, 21 nt, Homo sapiens
ugauauguuugauauuggguu

SEQ ID NO: 1089 - RNA, 21 nt, Homo sapiens
aacccaauaucaaacauauca

SEQ ID NO: 1090 - RNA, 18 nt, Homo sapiens
agcaggugcggggcggcg

SEQ ID NO: 1091 - RNA, 18 nt, Homo sapiens
cgccgccccgcaccugcu

SEQ ID NO: 1092 - RNA, 21 nt, Homo sapiens
cagugcaaguguagaugccga

SEQ ID NO: 1093 - RNA, 21 nt, Homo sapiens
ucggcaucuacacuugcacug

SEQ ID NO: 1094 - RNA, 22 nt, Homo sapiens
uauguaauaugguccacaucuu

SEQ ID NO: 1095 - RNA, 22 nt, Homo sapiens
aagauguggaccauauuacaua

SEQ ID NO: 1096 - RNA, 21 nt, Homo sapiens
aauauaacacagauggccugu

SEQ ID NO: 1097 - RNA, 21 nt, Homo sapiens
acaggccaucuguguuauauu

SEQ ID NO: 1098 - RNA, 22 nt, Homo sapiens
aucgggaaugucguguccgccc

SEQ ID NO: 1099 - RNA, 22 nt, Homo sapiens
gggcggacacgacauucccgau

SEQ ID NO: 1100 - RNA, 23 nt, Homo sapiens
aaugacacgaucacucccguuga

SEQ ID NO: 1101 - RNA, 23 nt, Homo sapiens
ucaacgggagugaucgugucauu

SEQ ID NO: 1102 - RNA, 22 nt, Homo sapiens
uacucaggagaguggcaaucac

SEQ ID NO: 1103 - RNA, 22 nt, Homo sapiens
gugauugccacucuccugagua

SEQ ID NO: 1104 - RNA, 23 nt, Homo sapiens
uggaagacuagugauuuuguugu

SEQ ID NO: 1105 - RNA, 23 nt, Homo sapiens
acaacaaaaucacuagucuucca

SEQ ID NO: 1106 - RNA, 22 nt, Homo sapiens
auaaagcuagauaaccgaaagu

SEQ ID NO: 1107 - RNA, 22 nt, Homo sapiens
acuuucgguuaucuagcuuuau

SEQ ID NO: 1108 - RNA, 23 nt, Homo sapiens
ucuuugguuaucuagcuguauga

SEQ ID NO: 1109 - RNA, 23 nt, Homo sapiens
ucauacagcuagauaaccaaaga

SEQ ID NO: 1110 - RNA, 22 nt, Homo sapiens
acaggugagguucuugggagcc

SEQ ID NO: 1111 - RNA, 22 nt, Homo sapiens
ggcucccaagaaccucaccugu

SEQ ID NO: 1112 - RNA, 24 nt, Homo sapiens
ucccugagacccuuuaaccuguga

SEQ ID NO: 1113 - RNA, 24 nt, Homo sapiens
ucacagguuaaagggucucaggga

SEQ ID NO: 1114 - RNA, 22 nt, Homo sapiens
caacaaaucccagucuaccuaa

SEQ ID NO: 1115 - RNA, 22 nt, Homo sapiens
uuagguagacugggauuuguug

SEQ ID NO: 1116 - RNA, 22 nt, Homo sapiens
cguguucacagcggaccuugau

SEQ ID NO: 1117 - RNA, 22 nt, Homo sapiens
aucaagguccgcugugaacacg

SEQ ID NO: 1118 - RNA, 20 nt, Homo sapiens
uaaggcacgcggugaaugcc

SEQ ID NO: 1119 - RNA, 20 nt, Homo sapiens
ggcauucaccgcgugccuua

SEQ ID NO: 1120 - RNA, 22 nt, Homo sapiens
aacacaccugguuaaccucuuu

SEQ ID NO: 1121 - RNA, 22 nt, Homo sapiens
aaagagguuaaccagguguguu

SEQ ID NO: 1122 - RNA, 22 nt, Homo sapiens
uaacagucuacagccauggucg

SEQ ID NO: 1123 - RNA, 22 nt, Homo sapiens
cgaccauggcuguagacuguua

SEQ ID NO: 1124 - RNA, 22 nt, Homo sapiens
accguggcuuucgauuguuacu

SEQ ID NO: 1125 - RNA, 22 nt, Homo sapiens
aguaacaaucgaaagccacggu

SEQ ID NO: 1126 - RNA, 21 nt, Homo sapiens
uaacagucuccagucacggcc

SEQ ID NO: 1127 - RNA, 21 nt, Homo sapiens
ggccgugacuggagacuguua

SEQ ID NO: 1128 - RNA, 23 nt, Homo sapiens
accuuggcucuagacugcuuacu

SEQ ID NO: 1129 - RNA, 23 nt, Homo sapiens
aguaagcagucuagagccaaggu

SEQ ID NO: 1130 - RNA, 23 nt, Homo sapiens
ucucacacagaaaucgcacccgu

SEQ ID NO: 1131 - RNA, 23 nt, Homo sapiens
acgggugcgauuucugugugaga

SEQ ID NO: 1132 - RNA, 22 nt, Homo sapiens
ugguugaccauagaacaugcgc

SEQ ID NO: 1133 - RNA, 22 nt, Homo sapiens
gcgcauguucuauggucaacca

SEQ ID NO: 1134 - RNA, 23 nt, Homo sapiens
caguaacaaagauucauccuugu

SEQ ID NO: 1135 - RNA, 23 nt, Homo sapiens
acaaggaugaaucuuuguuacug

SEQ ID NO: 1136 - RNA, 22 nt, Homo sapiens
agaguugagucuggacgucccg

SEQ ID NO: 1137 - RNA, 22 nt, Homo sapiens
cgggacguccagacucaacucu

SEQ ID NO: 1138 - RNA, 22 nt, Homo sapiens
agaauuguggcuggacaucugu

SEQ ID NO: 1139 - RNA, 22 nt, Homo sapiens
acagauguccagccacaauucu

SEQ ID NO: 1140 - RNA, 21 nt, Homo sapiens
ugauuguccaaacgcaauucu

SEQ ID NO: 1141 - RNA, 21 nt, Homo sapiens
agaauugcguuuggacaauca

SEQ ID NO: 1142 - RNA, 22 nt, Homo sapiens
uauagggauuggagccguggcg

SEQ ID NO: 1143 - RNA, 22 nt, Homo sapiens
cgccacggcuccaaucccuaua

SEQ ID NO: 1144 - RNA, 23 nt, Homo sapiens
uauggcuuuuuauuccuauguga

SEQ ID NO: 1145 - RNA, 23 nt, Homo sapiens
ucacauaggaauaaaaagccaua

SEQ ID NO: 1146 - RNA, 22 nt, Homo sapiens
auguagggcuaaaagccauggg

SEQ ID NO: 1147 - RNA, 22 nt, Homo sapiens
cccauggcuuuuagcccuacau

SEQ ID NO: 1148 - RNA, 23 nt, Homo sapiens
uauggcuuuucauuccuauguga

SEQ ID NO: 1149 - RNA, 23 nt, Homo sapiens
ucacauaggaaugaaaagccaua

SEQ ID NO: 1150 - RNA, 22 nt, Homo sapiens
aaccaucgaccguugaguggac

SEQ ID NO: 1151 - RNA, 22 nt, Homo sapiens
guccacucaacggucgaugguu

SEQ ID NO: 1152 - RNA, 22 nt, Homo sapiens
aacauucaaccugucggugagu

SEQ ID NO: 1153 - RNA, 22 nt, Homo sapiens
acucaccgacagguugaauguu

SEQ ID NO: 1154 - RNA, 25 nt, Homo sapiens
cuuccagacgcuccgccccacgucg

SEQ ID NO: 1155 - RNA, 25 nt, Homo sapiens
cgacguggggcggagcgucuggaag

SEQ ID NO: 1156 - RNA, 24 nt, Homo sapiens
aacaacaaaaucacuagucuucca

SEQ ID NO: 1157 - RNA, 24 nt, Homo sapiens
uggaagacuagugauuuuguuguu

SEQ ID NO: 1158 - RNA, 22 nt, Homo sapiens
agguagacugggauuuguuguu

SEQ ID NO: 1159 - RNA, 22 nt, Homo sapiens
aacaacaaaucccagucuaccu

SEQ ID NO: 1160 - RNA, 22 nt, Homo sapiens
aaacaccauugucacacuccac

SEQ ID NO: 1161 - RNA, 22 nt, Homo sapiens
guggagugugacaaugguguuu

SEQ ID NO: 1162 - RNA, 23 nt, Homo sapiens
uuuagugugauaauggcguuuga

SEQ ID NO: 1163 - RNA, 23 nt, Homo sapiens
ucaaacgccauuaucacacuaaa

SEQ ID NO: 1164 - RNA, 22 nt, Homo sapiens
uauggaaagacuuugccacucu

SEQ ID NO: 1165 - RNA, 22 nt, Homo sapiens
agaguggcaaagucuuuccaua

SEQ ID NO: 1166 - RNA, 21 nt, Homo sapiens
aguggcaaagucuuuccauau

SEQ ID NO: 1167 - RNA, 21 nt, Homo sapiens
auauggaaagacuuugccacu

SEQ ID NO: 1168 - RNA, 22 nt, Homo sapiens
cagcccggaucccagcccacuu

SEQ ID NO: 1169 - RNA, 22 nt, Homo sapiens
aagugggcugggauccgggcug

SEQ ID NO: 1170 - RNA, 20 nt, Homo sapiens
guggguuggggcgggcucug

SEQ ID NO: 1171 - RNA, 20 nt, Homo sapiens
cagagcccgccccaacccac

SEQ ID NO: 1172 - RNA, 23 nt, Homo sapiens
uucgggcuggccugcugcuccgg

SEQ ID NO: 1173 - RNA, 23 nt, Homo sapiens
ccggagcagcaggccagcccgaa

SEQ ID NO: 1174 - RNA, 21 nt, Homo sapiens
ugugcagcaggccaaccgaga

SEQ ID NO: 1175 - RNA, 21 nt, Homo sapiens
ucucgguuggccugcugcaca

SEQ ID NO: 1176 - RNA, 22 nt, Homo sapiens
cagggcaggaagaaguggacaa

SEQ ID NO: 1177 - RNA, 22 nt, Homo sapiens
uuguccacuucuuccugcccug

SEQ ID NO: 1178 - RNA, 22 nt, Homo sapiens
guccacuucugccugcccugcc

SEQ ID NO: 1179 - RNA, 22 nt, Homo sapiens
ggcagggcaggcagaaguggac

SEQ ID NO: 1180 - RNA, 22 nt, Homo sapiens
uuuggacagaaaacacgcaggu

SEQ ID NO: 1181 - RNA, 22 nt, Homo sapiens
accugcguguuuucuguccaaa

SEQ ID NO: 1182 - RNA, 20 nt, Homo sapiens
ccugcguguuuucuguccaa

SEQ ID NO: 1183 - RNA, 20 nt, Homo sapiens
uuggacagaaaacacgcagg

SEQ ID NO: 1184 - RNA, 22 nt, Homo sapiens
ugccgcccucucgcugcucuag

SEQ ID NO: 1185 - RNA, 22 nt, Homo sapiens
cuagagcagcgagagggcggca

SEQ ID NO: 1186 - RNA, 23 nt, Homo sapiens
gagggcagcguggguguggcgga

SEQ ID NO: 1187 - RNA, 23 nt, Homo sapiens
uccgccacacccacgcugcccuc

SEQ ID NO: 1188 - RNA, 22 nt, Homo sapiens
aggagcuagccaggcauaugca

SEQ ID NO: 1189 - RNA, 22 nt, Homo sapiens
ugcauaugccuggcuagcuccu

SEQ ID NO: 1190 - RNA, 20 nt, Homo sapiens
auaugccuggcuagcuccuc

SEQ ID NO: 1191 - RNA, 20 nt, Homo sapiens
gaggagcuagccaggcauau

SEQ ID NO: 1192 - RNA, 19 nt, Homo sapiens
cggcgcgaccggcccgggg

SEQ ID NO: 1193 - RNA, 19 nt, Homo sapiens
ccccgggccggucgcgccg

SEQ ID NO: 1194 - RNA, 21 nt, Homo sapiens
ucuugaagucagaacccgcaa

SEQ ID NO: 1195 - RNA, 21 nt, Homo sapiens
uugcggguucugacuucaaga

SEQ ID NO: 1196 - RNA, 22 nt, Homo sapiens
aacucguguucaaagccuuuag

SEQ ID NO: 1197 - RNA, 22 nt, Homo sapiens
cuaaaggcuuugaacacgaguu

SEQ ID NO: 1198 - RNA, 23 nt, Homo sapiens
ccuggacaccgcucagccggccg

SEQ ID NO: 1199 - RNA, 23 nt, Homo sapiens
cggccggcugagcgguguccagg

SEQ ID NO: 1200 - RNA, 21 nt, Homo sapiens
acucggcugcgguggacaagu

SEQ ID NO: 1201 - RNA, 21 nt, Homo sapiens
acuuguccaccgcagccgagu

SEQ ID NO: 1202 - RNA, 20 nt, Homo sapiens
ucacucucaccuugcuuugc

SEQ ID NO: 1203 - RNA, 20 nt, Homo sapiens
gcaaagcaaggugagaguga

SEQ ID NO: 1204 - RNA, 22 nt, Homo sapiens
uugcuaaguaggcugagauuga

SEQ ID NO: 1205 - RNA, 22 nt, Homo sapiens
ucaaucucagccuacuuagcaa

SEQ ID NO: 1206 - RNA, 22 nt, Homo sapiens
cacccccuguuuccuggcccac

SEQ ID NO: 1207 - RNA, 22 nt, Homo sapiens
gugggccaggaaacagggggug

SEQ ID NO: 1208 - RNA, 23 nt, Homo sapiens
ugggccagggagcagcugguggg

SEQ ID NO: 1209 - RNA, 23 nt, Homo sapiens
cccaccagcugcucccuggccca

SEQ ID NO: 1210 - RNA, 24 nt, Homo sapiens
ugcccaugccauacuuuugccuca

SEQ ID NO: 1211 - RNA, 24 nt, Homo sapiens
ugaggcaaaaguauggcaugggca

SEQ ID NO: 1212 - RNA, 22 nt, Homo sapiens
auggcaucguccccugguggcu

SEQ ID NO: 1213 - RNA, 22 nt, Homo sapiens
agccaccaggggacgaugccau

SEQ ID NO: 1214 - RNA, 22 nt, Homo sapiens
gacacaugaccauaaaugcuaa

SEQ ID NO: 1215 - RNA, 22 nt, Homo sapiens
uuagcauuuauggucauguguc

SEQ ID NO: 1216 - RNA, 23 nt, Homo sapiens
uggagagagaaaagagacagaag

SEQ ID NO: 1217 - RNA, 23 nt, Homo sapiens
cuucugucucuuuucucucucca

SEQ ID NO: 1218 - RNA, 22 nt, Homo sapiens
agacaguaguucuugccugguu

SEQ ID NO: 1219 - RNA, 22 nt, Homo sapiens
aaccaggcaagaacuacugucu

SEQ ID NO: 1220 - RNA, 19 nt, Homo sapiens
accaggcaagaaauauugu

SEQ ID NO: 1221 - RNA, 19 nt, Homo sapiens
acaauauuucuugccuggu

SEQ ID NO: 1222 - RNA, 21 nt, Homo sapiens
auugucccucucccuucccag

SEQ ID NO: 1223 - RNA, 21 nt, Homo sapiens
cugggaagggagagggacaau

SEQ ID NO: 1224 - RNA, 22 nt, Homo sapiens
acugggaagaggagcugaggga

SEQ ID NO: 1225 - RNA, 22 nt, Homo sapiens
ucccucagcuccucuucccagu

SEQ ID NO: 1226 - RNA, 23 nt, Homo sapiens
gaagauggugcugugcugaggaa

SEQ ID NO: 1227 - RNA, 23 nt, Homo sapiens
uuccucagcacagcaccaucuuc

SEQ ID NO: 1228 - RNA, 20 nt, Homo sapiens
ugugggacugcaaaugggag

SEQ ID NO: 1229 - RNA, 20 nt, Homo sapiens
cucccauuugcagucccaca

SEQ ID NO: 1230 - RNA, 21 nt, Homo sapiens
ucugaggccugccucucccca

SEQ ID NO: 1231 - RNA, 21 nt, Homo sapiens
uggggagaggcaggccucaga

SEQ ID NO: 1232 - RNA, 24 nt, Homo sapiens
ugggcgaggggugggcucucagag

SEQ ID NO: 1233 - RNA, 24 nt, Homo sapiens
cucugagagcccaccccucgccca

SEQ ID NO: 1234 - RNA, 21 nt, Homo sapiens
agguagaaugaggccugacau

SEQ ID NO: 1235 - RNA, 21 nt, Homo sapiens
augucaggccucauucuaccu

SEQ ID NO: 1236 - RNA, 19 nt, Homo sapiens
ucaggccucuuucuaccuu

SEQ ID NO: 1237 - RNA, 19 nt, Homo sapiens
aagguagaaagaggccuga

SEQ ID NO: 1238 - RNA, 20 nt, Homo sapiens
cggggugggugaggucgggc

SEQ ID NO: 1239 - RNA, 20 nt, Homo sapiens
gcccgaccucacccaccccg

SEQ ID NO: 1240 - RNA, 22 nt, Homo sapiens
guucuguuaacccauccccuca

SEQ ID NO: 1241 - RNA, 22 nt, Homo sapiens
ugaggggauggguuaacagaac

SEQ ID NO: 1242 - RNA, 22 nt, Homo sapiens
aggggacugguuaauagaacua

SEQ ID NO: 1243 - RNA, 22 nt, Homo sapiens
uaguucuauuaaccaguccccu

SEQ ID NO: 1244 - RNA, 23 nt, Homo sapiens
uggaguuaaggguugcuuggaga

SEQ ID NO: 1245 - RNA, 23 nt, Homo sapiens
ucuccaagcaacccuuaacucca

SEQ ID NO: 1246 - RNA, 22 nt, Homo sapiens
ucucugagcaaggcuuaacacc

SEQ ID NO: 1247 - RNA, 22 nt, Homo sapiens
gguguuaagccuugcucagaga

SEQ ID NO: 1248 - RNA, 22 nt, Homo sapiens
ugugggaucuggaggcaucugg

SEQ ID NO: 1249 - RNA, 22 nt, Homo sapiens
ccagaugccuccagaucccaca

SEQ ID NO: 1250 - RNA, 21 nt, Homo sapiens
acccucgucagguccccgggg

SEQ ID NO: 1251 - RNA, 21 nt, Homo sapiens
ccccggggaccugacgagggu

SEQ ID NO: 1252 - RNA, 22 nt, Homo sapiens
caccggggauggcagagggucg

SEQ ID NO: 1253 - RNA, 22 nt, Homo sapiens
cgacccucugccauccccggug

SEQ ID NO: 1254 - RNA, 23 nt, Homo sapiens
ugggcugagggcaggaggccugu

SEQ ID NO: 1255 - RNA, 23 nt, Homo sapiens
acaggccuccugcccucagccca

SEQ ID NO: 1256 - RNA, 23 nt, Homo sapiens
aauguggaaguggucugaggcau

SEQ ID NO: 1257 - RNA, 23 nt, Homo sapiens
augccucagaccacuuccacauu

SEQ ID NO: 1258 - RNA, 23 nt, Homo sapiens
gugaguguggauccuggaggaau

SEQ ID NO: 1259 - RNA, 23 nt, Homo sapiens
auuccuccaggauccacacucac

SEQ ID NO: 1260 - RNA, 22 nt, Homo sapiens
uuucuucuuagacauggcaacg

SEQ ID NO: 1261 - RNA, 22 nt, Homo sapiens
cguugccaugucuaagaagaaa

SEQ ID NO: 1262 - RNA, 22 nt, Homo sapiens
cugccaugucuaagaagaaaac

SEQ ID NO: 1263 - RNA, 22 nt, Homo sapiens
guuuucuucuuagacauggcag

SEQ ID NO: 1264 - RNA, 22 nt, Homo sapiens
uuucuucuuagacauggcagcu

SEQ ID NO: 1265 - RNA, 22 nt, Homo sapiens
agcugccaugucuaagaagaaa

SEQ ID NO: 1266 - RNA, 19 nt, Homo sapiens
uugccaugucuaagaagaa

SEQ ID NO: 1267 - RNA, 19 nt, Homo sapiens
uucuucuuagacauggcaa

SEQ ID NO: 1268 - RNA, 23 nt, Homo sapiens
ugcagcucugguggaaaauggag

SEQ ID NO: 1269 - RNA, 23 nt, Homo sapiens
cuccauuuuccaccagagcugca

SEQ ID NO: 1270 - RNA, 22 nt, Homo sapiens
caggauccacagagcuagucca

SEQ ID NO: 1271 - RNA, 22 nt, Homo sapiens
uggacuagcucuguggauccug

SEQ ID NO: 1272 - RNA, 22 nt, Homo sapiens
aacuagcucuguggauccugac

SEQ ID NO: 1273 - RNA, 22 nt, Homo sapiens
gucaggauccacagagcuaguu

SEQ ID NO: 1274 - RNA, 22 nt, Homo sapiens
aaagauggacaauuggcuaaau

SEQ ID NO: 1275 - RNA, 22 nt, Homo sapiens
auuuagccaauuguccaucuuu

SEQ ID NO: 1276 - RNA, 24 nt, Homo sapiens
agcugagcuccauggacgugcagu

SEQ ID NO: 1277 - RNA, 24 nt, Homo sapiens
acugcacguccauggagcucagcu

SEQ ID NO: 1278 - RNA, 22 nt, Homo sapiens
cuuccggucugugagccccguc

SEQ ID NO: 1279 - RNA, 22 nt, Homo sapiens
gacggggcucacagaccggaag

SEQ ID NO: 1280 - RNA, 22 nt, Homo sapiens
uggggugcccacuccgcaaguu

SEQ ID NO: 1281 - RNA, 22 nt, Homo sapiens
aacuugcggagugggcacccca

SEQ ID NO: 1282 - RNA, 26 nt, Homo sapiens
cucggccgcggcgcguagcccccgcc

SEQ ID NO: 1283 - RNA, 26 nt, Homo sapiens
ggcgggggcuacgcgccgcggccgag

SEQ ID NO: 1284 - RNA, 23 nt, Homo sapiens
cugggggacgcgugagcgcgagc

SEQ ID NO: 1285 - RNA, 23 nt, Homo sapiens
gcucgcgcucacgcgucccccag

SEQ ID NO: 1286 - RNA, 21 nt, Homo sapiens
cauacaaucugacauguauuu

SEQ ID NO: 1287 - RNA, 21 nt, Homo sapiens
aaauacaugucagauuguaug

SEQ ID NO: 1288 - RNA, 21 nt, Homo sapiens
auacaugucagauuguaugcc

SEQ ID NO: 1289 - RNA, 21 nt, Homo sapiens
ggcauacaaucugacauguau

SEQ ID NO: 1290 - RNA, 21 nt, Homo sapiens
ucccuccuucuguccccacag

SEQ ID NO: 1291 - RNA, 21 nt, Homo sapiens
cuguggggacagaaggaggga

SEQ ID NO: 1292 - RNA, 22 nt, Homo sapiens
acuggggagcagaaggagaacc

SEQ ID NO: 1293 - RNA, 22 nt, Homo sapiens
gguucuccuucugcuccccagu

SEQ ID NO: 1294 - RNA, 23 nt, Homo sapiens
gaaaauccuuuuuguuuuuccag

SEQ ID NO: 1295 - RNA, 23 nt, Homo sapiens
cuggaaaaacaaaaaggauuuuc

SEQ ID NO: 1296 - RNA, 23 nt, Homo sapiens
agggaaaaaaaaaaggauuuguc

SEQ ID NO: 1297 - RNA, 23 nt, Homo sapiens
gacaaauccuuuuuuuuuucccu

SEQ ID NO: 1298 - RNA, 22 nt, Homo sapiens
uguguccgggaaguggaggagg

SEQ ID NO: 1299 - RNA, 22 nt, Homo sapiens
ccuccuccacuucccggacaca

SEQ ID NO: 1300 - RNA, 22 nt, Homo sapiens
ugaaguuacaucauggucgcuu

SEQ ID NO: 1301 - RNA, 22 nt, Homo sapiens
aagcgaccaugauguaacuuca

SEQ ID NO: 1302 - RNA, 22 nt, Homo sapiens
aagcgaccaugauguaacuuca

SEQ ID NO: 1303 - RNA, 22 nt, Homo sapiens
ugaaguuacaucauggucgcuu

SEQ ID NO: 1304 - RNA, 21 nt, Homo sapiens
uuagugcauagucuuuggucu

SEQ ID NO: 1305 - RNA, 21 nt, Homo sapiens
agaccaaagacuaugcacuaa

SEQ ID NO: 1306 - RNA, 22 nt, Homo sapiens
accgaagacugugcgcuaaucu

SEQ ID NO: 1307 - RNA, 22 nt, Homo sapiens
agauuagcgcacagucuucggu

SEQ ID NO: 1308 - RNA, 21 nt, Homo sapiens
uuacacagcuggacagaggca

SEQ ID NO: 1309 - RNA, 21 nt, Homo sapiens
ugccucuguccagcuguguaa

SEQ ID NO: 1310 - RNA, 22 nt, Homo sapiens
uccaggcaggagccggacugga

SEQ ID NO: 1311 - RNA, 22 nt, Homo sapiens
uccaguccggcuccugccugga

SEQ ID NO: 1312 - RNA, 21 nt, Homo sapiens
cugggcucgggacgcgcggcu

SEQ ID NO: 1313 - RNA, 21 nt, Homo sapiens
agccgcgcgucccgagcccag

SEQ ID NO: 1314 - RNA, 22 nt, Homo sapiens
ggggcugugauugaccagcagg

SEQ ID NO: 1315 - RNA, 22 nt, Homo sapiens
ccugcuggucaaucacagcccc

SEQ ID NO: 1316 - RNA, 22 nt, Homo sapiens
cacuguuucaccacuggcucuu

SEQ ID NO: 1317 - RNA, 22 nt, Homo sapiens
aagagccaguggugaaacagug

SEQ ID NO: 1318 - RNA, 21 nt, Homo sapiens
gagccaguggugagacaguga

SEQ ID NO: 1319 - RNA, 21 nt, Homo sapiens
ucacugucucaccacuggcuc

SEQ ID NO: 1320 - RNA, 22 nt, Homo sapiens
aagguauuguucagacuuauga

SEQ ID NO: 1321 - RNA, 22 nt, Homo sapiens
ucauaagucugaacaauaccuu

SEQ ID NO: 1322 - RNA, 22 nt, Homo sapiens
ucugugauagagauucuuugcu

SEQ ID NO: 1323 - RNA, 22 nt, Homo sapiens
agcaaagaaucucuaucacaga

SEQ ID NO: 1324 - RNA, 21 nt, Homo sapiens
ucugaauuguaagaguuguua

SEQ ID NO: 1325 - RNA, 21 nt, Homo sapiens
uaacaacucuuacaauucaga

SEQ ID NO: 1326 - RNA, 23 nt, Homo sapiens
agaacucuugcagucuuagaugu

SEQ ID NO: 1327 - RNA, 23 nt, Homo sapiens
acaucuaagacugcaagaguucu

SEQ ID NO: 1328 - RNA, 22 nt, Homo sapiens
aacgggaaugcaggcuguaucu

SEQ ID NO: 1329 - RNA, 22 nt, Homo sapiens
agauacagccugcauucccguu

SEQ ID NO: 1330 - RNA, 23 nt, Homo sapiens
ucugaguuccuggagccuggucu

SEQ ID NO: 1331 - RNA, 23 nt, Homo sapiens
agaccaggcuccaggaacucaga

SEQ ID NO: 1332 - RNA, 23 nt, Homo sapiens
uggagauccagugcucgcccgau

SEQ ID NO: 1333 - RNA, 23 nt, Homo sapiens
aucgggcgagcacuggaucucca

SEQ ID NO: 1334 - RNA, 22 nt, Homo sapiens
uguugcaagucgguggagacgu

SEQ ID NO: 1335 - RNA, 22 nt, Homo sapiens
acgucuccaccgacuugcaaca

SEQ ID NO: 1336 - RNA, 22 nt, Homo sapiens
cucucuacugacuugcaacaua

SEQ ID NO: 1337 - RNA, 22 nt, Homo sapiens
uauguugcaagucaguagagag

SEQ ID NO: 1338 - RNA, 22 nt, Homo sapiens
ucucccuuccugcccuggcuag

SEQ ID NO: 1339 - RNA, 22 nt, Homo sapiens
cuagccagggcaggaagggaga

SEQ ID NO: 1340 - RNA, 26 nt, Homo sapiens
cccagggcuuggaguggggcaagguu

SEQ ID NO: 1341 - RNA, 26 nt, Homo sapiens
aaccuugccccacuccaagcccuggg

SEQ ID NO: 1342 - RNA, 23 nt, Homo sapiens
uaucugcugggcuuucugguguu

SEQ ID NO: 1343 - RNA, 23 nt, Homo sapiens
aacaccagaaagcccagcagaua

SEQ ID NO: 1344 - RNA, 21 nt, Homo sapiens
uggcuguuggagggggcaggc

SEQ ID NO: 1345 - RNA, 21 nt, Homo sapiens
gccugcccccuccaacagcca

SEQ ID NO: 1346 - RNA, 22 nt, Homo sapiens
cagcccuccucccgcacccaaa

SEQ ID NO: 1347 - RNA, 22 nt, Homo sapiens
uuugggugcgggaggagggcug

SEQ ID NO: 1348 - RNA, 22 nt, Homo sapiens
uaggggcagcagaggaccuggg

SEQ ID NO: 1349 - RNA, 22 nt, Homo sapiens
cccagguccucugcugccccua

SEQ ID NO: 1350 - RNA, 22 nt, Homo sapiens
uugaggagacauggugggggcc

SEQ ID NO: 1351 - RNA, 22 nt, Homo sapiens
ggcccccaccaugucuccucaa

SEQ ID NO: 1352 - RNA, 21 nt, Homo sapiens
gcagcccagcugaggccucug

SEQ ID NO: 1353 - RNA, 21 nt, Homo sapiens
cagaggccucagcugggcugc

SEQ ID NO: 1354 - RNA, 22 nt, Homo sapiens
gagcaggcgaggcugggcugaa

SEQ ID NO: 1355 - RNA, 22 nt, Homo sapiens
uucagcccagccucgccugcuc

SEQ ID NO: 1356 - RNA, 23 nt, Homo sapiens
ccagccacggacugagagugcau

SEQ ID NO: 1357 - RNA, 23 nt, Homo sapiens
augcacucucaguccguggcugg

SEQ ID NO: 1358 - RNA, 23 nt, Homo sapiens
guccuccaggccaugagcugcgg

SEQ ID NO: 1359 - RNA, 23 nt, Homo sapiens
ccgcagcucauggccuggaggac

SEQ ID NO: 1360 - RNA, 22 nt, Homo sapiens
ucaggcaguguggguaucagau

SEQ ID NO: 1361 - RNA, 22 nt, Homo sapiens
aucugauacccacacugccuga

SEQ ID NO: 1362 - RNA, 23 nt, Homo sapiens
ugagaguggaauucacaguauuu

SEQ ID NO: 1363 - RNA, 23 nt, Homo sapiens
aaauacugugaauuccacucuca

SEQ ID NO: 1364 - RNA, 23 nt, Homo sapiens
auacugugaauuucacugucaca

SEQ ID NO: 1365 - RNA, 23 nt, Homo sapiens
ugugacagugaaauucacaguau

SEQ ID NO: 1366 - RNA, 21 nt, Homo sapiens
caaauggacaggauaacaccu

SEQ ID NO: 1367 - RNA, 21 nt, Homo sapiens
agguguuauccuguccauuug

SEQ ID NO: 1368 - RNA, 22 nt, Homo sapiens
agguguuauccuauccauuugc

SEQ ID NO: 1369 - RNA, 22 nt, Homo sapiens
gcaaauggauaggauaacaccu

SEQ ID NO: 1370 - RNA, 22 nt, Homo sapiens
ugaucucaccgcugccuccuuc

SEQ ID NO: 1371 - RNA, 22 nt, Homo sapiens
gaaggaggcagcggugagauca

SEQ ID NO: 1372 - RNA, 22 nt, Homo sapiens
caggaggcagugggcgagcagg

SEQ ID NO: 1373 - RNA, 22 nt, Homo sapiens
ccugcucgcccacugccuccug

SEQ ID NO: 1374 - RNA, 22 nt, Homo sapiens
ugcaagacggauacugucaucu

SEQ ID NO: 1375 - RNA, 22 nt, Homo sapiens
agaugacaguauccgucuugca

SEQ ID NO: 1376 - RNA, 24 nt, Homo sapiens
ugucagugacuccugccccuuggu

SEQ ID NO: 1377 - RNA, 24 nt, Homo sapiens
accaaggggcaggagucacugaca

SEQ ID NO: 1378 - RNA, 22 nt, Homo sapiens
agggggcgcagucacugacgug

SEQ ID NO: 1379 - RNA, 22 nt, Homo sapiens
cacgucagugacugcgcccccu

SEQ ID NO: 1380 - RNA, 23 nt, Homo sapiens
ucaaaauguagaggaagacccca

SEQ ID NO: 1381 - RNA, 23 nt, Homo sapiens
uggggucuuccucuacauuuuga

SEQ ID NO: 1382 - RNA, 22 nt, Homo sapiens
aauuuacucugcaaucuucucc

SEQ ID NO: 1383 - RNA, 22 nt, Homo sapiens
ggagaagauugcagaguaaauu

SEQ ID NO: 1384 - RNA, 22 nt, Homo sapiens
agaagauugcagaguaaguucc

SEQ ID NO: 1385 - RNA, 22 nt, Homo sapiens
ggaacuuacucugcaaucuucu

SEQ ID NO: 1386 - RNA, 26 nt, Homo sapiens
cacaggacugacuccucaccccagug

SEQ ID NO: 1387 - RNA, 26 nt, Homo sapiens
cacuggggugaggagucaguccugug

SEQ ID NO: 1388 - RNA, 22 nt, Homo sapiens
ucuggggaugaggacagugugu

SEQ ID NO: 1389 - RNA, 22 nt, Homo sapiens
acacacuguccucauccccaga

SEQ ID NO: 1390 - RNA, 20 nt, Homo sapiens
augggugauggguguggugu

SEQ ID NO: 1391 - RNA, 20 nt, Homo sapiens
acaccacacccaucacccau

SEQ ID NO: 1392 - RNA, 22 nt, Homo sapiens
uuggccaccacaccuaccccuu

SEQ ID NO: 1393 - RNA, 22 nt, Homo sapiens
aagggguaggugugguggccaa

SEQ ID NO: 1394 - RNA, 22 nt, Homo sapiens
uguaguuguauuguauugccac

SEQ ID NO: 1395 - RNA, 22 nt, Homo sapiens
guggcaauacaauacaacuaca

SEQ ID NO: 1396 - RNA, 23 nt, Homo sapiens
uagcaauacaguacaaauauagu

SEQ ID NO: 1397 - RNA, 23 nt, Homo sapiens
acuauauuuguacuguauugcua

SEQ ID NO: 1398 - RNA, 22 nt, Homo sapiens
ucagucacauaucuagugucua

SEQ ID NO: 1399 - RNA, 22 nt, Homo sapiens
uagacacuagauaugugacuga

SEQ ID NO: 1400 - RNA, 22 nt, Homo sapiens
gacacuaggcaugugagugauu

SEQ ID NO: 1401 - RNA, 22 nt, Homo sapiens
aaucacucacaugccuaguguc

SEQ ID NO: 1402 - RNA, 22 nt, Homo sapiens
ucaaucacuugguaauugcugu

SEQ ID NO: 1403 - RNA, 22 nt, Homo sapiens
acagcaauuaccaagugauuga

SEQ ID NO: 1404 - RNA, 25 nt, Homo sapiens
agcggggaggaagugggcgcugcuu

SEQ ID NO: 1405 - RNA, 25 nt, Homo sapiens
aagcagcgcccacuuccuccccgcu

SEQ ID NO: 1406 - RNA, 22 nt, Homo sapiens
agcccgccccagccgagguucu

SEQ ID NO: 1407 - RNA, 22 nt, Homo sapiens
agaaccucggcuggggcgggcu

SEQ ID NO: 1408 - RNA, 23 nt, Homo sapiens
gccccggcgcgggcggguucugg

SEQ ID NO: 1409 - RNA, 23 nt, Homo sapiens
ccagaacccgcccgcgccggggc

SEQ ID NO: 1410 - RNA, 22 nt, Homo sapiens
agcaaggcggcaucucucugau

SEQ ID NO: 1411 - RNA, 22 nt, Homo sapiens
aucagagagaugccgccuugcu

SEQ ID NO: 1412 - RNA, 21 nt, Homo sapiens
agagaugccgccuugcuccuu

SEQ ID NO: 1413 - RNA, 21 nt, Homo sapiens
aaggagcaaggcggcaucucu

SEQ ID NO: 1414 - RNA, 23 nt, Homo sapiens
uugaagaggaggugcucuguagc

SEQ ID NO: 1415 - RNA, 23 nt, Homo sapiens
gcuacagagcaccuccucuucaa

SEQ ID NO: 1416 - RNA, 22 nt, Homo sapiens
acaacagugacuugcucuccaa

SEQ ID NO: 1417 - RNA, 22 nt, Homo sapiens
uuggagagcaagucacuguugu

SEQ ID NO: 1418 - RNA, 18 nt, Homo sapiens
gggugagggcaggugguu

SEQ ID NO: 1419 - RNA, 18 nt, Homo sapiens
aaccaccugcccucaccc

SEQ ID NO: 1420 - RNA, 18 nt, Homo sapiens
cgugucuucuggcuugau

SEQ ID NO: 1421 - RNA, 18 nt, Homo sapiens
aucaagccagaagacacg

SEQ ID NO: 1422 - RNA, 23 nt, Homo sapiens
ugcaucaggccagaagacaugag

SEQ ID NO: 1423 - RNA, 23 nt, Homo sapiens
cucaugucuucuggccugaugca

SEQ ID NO: 1424 - RNA, 21 nt, Homo sapiens
aaugagagaccuguacuguau

SEQ ID NO: 1425 - RNA, 21 nt, Homo sapiens
auacaguacaggucucucauu

SEQ ID NO: 1426 - RNA, 22 nt, Homo sapiens
uccaguacaggucucucauuuc

SEQ ID NO: 1427 - RNA, 22 nt, Homo sapiens
gaaaugagagaccuguacugga

SEQ ID NO: 1428 - RNA, 22 nt, Homo sapiens
ugggauccagacagugggagaa

SEQ ID NO: 1429 - RNA, 22 nt, Homo sapiens
uucucccacugucuggauccca

SEQ ID NO: 1430 - RNA, 22 nt, Homo sapiens
uucucccacuaccaggcuccca

SEQ ID NO: 1431 - RNA, 22 nt, Homo sapiens
ugggagccugguagugggagaa

SEQ ID NO: 1432 - RNA, 22 nt, Homo sapiens
ccaaccuagguggucagaguug

SEQ ID NO: 1433 - RNA, 22 nt, Homo sapiens
caacucugaccaccuagguugg

SEQ ID NO: 1434 - RNA, 22 nt, Homo sapiens
aacucugaccccuuagguugau

SEQ ID NO: 1435 - RNA, 22 nt, Homo sapiens
aucaaccuaaggggucagaguu

SEQ ID NO: 1436 - RNA, 23 nt, Homo sapiens
gugccaccuuaacugcagccaau

SEQ ID NO: 1437 - RNA, 23 nt, Homo sapiens
auuggcugcaguuaagguggcac

SEQ ID NO: 1438 - RNA, 22 nt, Homo sapiens
aaguuggcugcaguuaaggugg

SEQ ID NO: 1439 - RNA, 22 nt, Homo sapiens
ccaccuuaacugcagccaacuu

SEQ ID NO: 1440 - RNA, 22 nt, Homo sapiens
aagggggaaggaaacauggaga

SEQ ID NO: 1441 - RNA, 22 nt, Homo sapiens
ucuccauguuuccuucccccuu

SEQ ID NO: 1442 - RNA, 22 nt, Homo sapiens
uccauguuuccuucccccuucu

SEQ ID NO: 1443 - RNA, 22 nt, Homo sapiens
agaagggggaaggaaacaugga

SEQ ID NO: 1444 - RNA, 21 nt, Homo sapiens
acacauggguggcuguggccu

SEQ ID NO: 1445 - RNA, 21 nt, Homo sapiens
aggccacagccacccaugugu

SEQ ID NO: 1446 - RNA, 22 nt, Homo sapiens
uaggccacagccacccaugugu

SEQ ID NO: 1447 - RNA, 22 nt, Homo sapiens
acacauggguggcuguggccua

SEQ ID NO: 1448 - RNA, 21 nt, Homo sapiens
agcuguaccugaaaccaagca

SEQ ID NO: 1449 - RNA, 21 nt, Homo sapiens
ugcuugguuucagguacagcu

SEQ ID NO: 1450 - RNA, 22 nt, Homo sapiens
ucacaaaucuauaauaugcagg

SEQ ID NO: 1451 - RNA, 22 nt, Homo sapiens
ccugcauauuauagauuuguga

SEQ ID NO: 1452 - RNA, 21 nt, Homo sapiens
ugcuuaaguuguaccaaguau

SEQ ID NO: 1453 - RNA, 21 nt, Homo sapiens
auacuugguacaacuuaagca

SEQ ID NO: 1454 - RNA, 22 nt, Homo sapiens
ccuggcauauuugguauaacuu

SEQ ID NO: 1455 - RNA, 22 nt, Homo sapiens
aaguuauaccaaauaugccagg

SEQ ID NO: 1456 - RNA, 22 nt, Homo sapiens
ugagggcuccaggugacggugg

SEQ ID NO: 1457 - RNA, 22 nt, Homo sapiens
ccaccgucaccuggagcccuca

SEQ ID NO: 1458 - RNA, 22 nt, Homo sapiens
accugccagcaccucccugcag

SEQ ID NO: 1459 - RNA, 22 nt, Homo sapiens
cugcagggaggugcuggcaggu

SEQ ID NO: 1460 - RNA, 23 nt, Homo sapiens
ggcaggagggcugugccagguug

SEQ ID NO: 1461 - RNA, 23 nt, Homo sapiens
caaccuggcacagcccuccugcc

SEQ ID NO: 1462 - RNA, 22 nt, Homo sapiens
cccucucuggcuccuccccaaa

SEQ ID NO: 1463 - RNA, 22 nt, Homo sapiens
uuuggggaggagccagagaggg

SEQ ID NO: 1464 - RNA, 24 nt, Homo sapiens
ugggggagccaugagauaagagca

SEQ ID NO: 1465 - RNA, 24 nt, Homo sapiens
ugcucuuaucucauggcuccccca

SEQ ID NO: 1466 - RNA, 21 nt, Homo sapiens
guaccuucugguucagcuagu

SEQ ID NO: 1467 - RNA, 21 nt, Homo sapiens
acuagcugaaccagaagguac

SEQ ID NO: 1468 - RNA, 23 nt, Homo sapiens
aacugaaccaggagugagcuucg

SEQ ID NO: 1469 - RNA, 23 nt, Homo sapiens
cgaagcucacuccugguucaguu

SEQ ID NO: 1470 - RNA, 22 nt, Homo sapiens
uggggaaggcgucagugucggg

SEQ ID NO: 1471 - RNA, 22 nt, Homo sapiens
cccgacacugacgccuucccca

SEQ ID NO: 1472 - RNA, 21 nt, Homo sapiens
agacccugcagccuucccacc

SEQ ID NO: 1473 - RNA, 21 nt, Homo sapiens
ggugggaaggcugcagggucu

SEQ ID NO: 1474 - RNA, 22 nt, Homo sapiens
acccagguucccucuggccgca

SEQ ID NO: 1475 - RNA, 22 nt, Homo sapiens
ugcggccagagggaaccugggu

SEQ ID NO: 1476 - RNA, 23 nt, Homo sapiens
agggccagaggagccuggagugg

SEQ ID NO: 1477 - RNA, 23 nt, Homo sapiens
ccacuccaggcuccucuggcccu

SEQ ID NO: 1478 - RNA, 22 nt, Homo sapiens
auagugggaagcuggcagauuc

SEQ ID NO: 1479 - RNA, 22 nt, Homo sapiens
gaaucugccagcuucccacuau

SEQ ID NO: 1480 - RNA, 21 nt, Homo sapiens
aucugccagcuuccacagugg

SEQ ID NO: 1481 - RNA, 21 nt, Homo sapiens
ccacuguggaagcuggcagau

SEQ ID NO: 1482 - RNA, 25 nt, Homo sapiens
caugcugaccucccuccugccccag

SEQ ID NO: 1483 - RNA, 25 nt, Homo sapiens
cuggggcaggagggaggucagcaug

SEQ ID NO: 1484 - RNA, 23 nt, Homo sapiens
ugggaggggagaggcagcaagca

SEQ ID NO: 1485 - RNA, 23 nt, Homo sapiens
ugcuugcugccucuccccuccca

SEQ ID NO: 1486 - RNA, 22 nt, Homo sapiens
ucauuuaucuguugggaagcua

SEQ ID NO: 1487 - RNA, 22 nt, Homo sapiens
uagcuucccaacagauaaauga

SEQ ID NO: 1488 - RNA, 23 nt, Homo sapiens
cuggcggagcccauuccaugcca

SEQ ID NO: 1489 - RNA, 23 nt, Homo sapiens
uggcauggaaugggcuccgccag

SEQ ID NO: 1490 - RNA, 22 nt, Homo sapiens
cacacaaguggcccccaacacu

SEQ ID NO: 1491 - RNA, 22 nt, Homo sapiens
aguguugggggccacuugugug

SEQ ID NO: 1492 - RNA, 22 nt, Homo sapiens
ugcugggggccacaugagugug

SEQ ID NO: 1493 - RNA, 22 nt, Homo sapiens
cacacucauguggcccccagca

SEQ ID NO: 1494 - RNA, 21 nt, Homo sapiens
gcccugaccuguccuguucug

SEQ ID NO: 1495 - RNA, 21 nt, Homo sapiens
cagaacaggacaggucagggc

SEQ ID NO: 1496 - RNA, 23 nt, Homo sapiens
uguagagcagggagcaggaagcu

SEQ ID NO: 1497 - RNA, 23 nt, Homo sapiens
agcuuccugcucccugcucuaca

SEQ ID NO: 1498 - RNA, 22 nt, Homo sapiens
ccaccaggucuagcauugggau

SEQ ID NO: 1499 - RNA, 22 nt, Homo sapiens
aucccaaugcuagaccuggugg

SEQ ID NO: 1500 - RNA, 22 nt, Homo sapiens
aaucccaaugcuagacccggug

SEQ ID NO: 1501 - RNA, 22 nt, Homo sapiens
caccgggucuagcauugggauu

SEQ ID NO: 1502 - RNA, 22 nt, Homo sapiens
gcugcgggcugcggucagggcg

SEQ ID NO: 1503 - RNA, 22 nt, Homo sapiens
cgcccugaccgcagcccgcagc

SEQ ID NO: 1504 - RNA, 21 nt, Homo sapiens
aaaggugcucaaauuagacau

SEQ ID NO: 1505 - RNA, 21 nt, Homo sapiens
augucuaauuugagcaccuuu

SEQ ID NO: 1506 - RNA, 22 nt, Homo sapiens
ccuaauuugaacaccuucggua

SEQ ID NO: 1507 - RNA, 22 nt, Homo sapiens
uaccgaagguguucaaauuagg

SEQ ID NO: 1508 - RNA, 19 nt, Homo sapiens
aggcagguuaucugggcug

SEQ ID NO: 1509 - RNA, 19 nt, Homo sapiens
cagcccagauaaccugccu

SEQ ID NO: 1510 - RNA, 20 nt, Homo sapiens
augcgaggaugcugacagug

SEQ ID NO: 1511 - RNA, 20 nt, Homo sapiens
cacugucagcauccucgcau

SEQ ID NO: 1512 - RNA, 22 nt, Homo sapiens
ugaaacuggagcgccuggagga

SEQ ID NO: 1513 - RNA, 22 nt, Homo sapiens
uccuccaggcgcuccaguuuca

SEQ ID NO: 1514 - RNA, 22 nt, Homo sapiens
accagcgcguuuucaguuucau

SEQ ID NO: 1515 - RNA, 22 nt, Homo sapiens
augaaacugaaaacgcgcuggu

SEQ ID NO: 1516 - RNA, 25 nt, Homo sapiens
aagggaggaggagcggaggggcccu

SEQ ID NO: 1517 - RNA, 25 nt, Homo sapiens
agggccccuccgcuccuccucccuu

SEQ ID NO: 1518 - RNA, 22 nt, Homo sapiens
gcccgagaggauccgucccugc

SEQ ID NO: 1519 - RNA, 22 nt, Homo sapiens
gcagggacggauccucucgggc

SEQ ID NO: 1520 - RNA, 22 nt, Homo sapiens
aggacugauccucucgggcagg

SEQ ID NO: 1521 - RNA, 22 nt, Homo sapiens
ccugcccgagaggaucaguccu

SEQ ID NO: 1522 - RNA, 23 nt, Homo sapiens
ucaggcaaagggauauuuacaga

SEQ ID NO: 1523 - RNA, 23 nt, Homo sapiens
ucuguaaauaucccuuugccuga

SEQ ID NO: 1524 - RNA, 21 nt, Homo sapiens
uuucugucuuuucugguccag

SEQ ID NO: 1525 - RNA, 21 nt, Homo sapiens
cuggaccagaaaagacagaaa

SEQ ID NO: 1526 - RNA, 23 nt, Homo sapiens
uggccggaugggacaggaggcau

SEQ ID NO: 1527 - RNA, 23 nt, Homo sapiens
augccuccugucccauccggcca

SEQ ID NO: 1528 - RNA, 23 nt, Homo sapiens
ucuaaagacuagacuucgcuaug

SEQ ID NO: 1529 - RNA, 23 nt, Homo sapiens
cauagcgaagucuagucuuuaga

SEQ ID NO: 1530 - RNA, 23 nt, Homo sapiens
uggcccggcgacgucucacgguc

SEQ ID NO: 1531 - RNA, 23 nt, Homo sapiens
gaccgugagacgucgccgggcca

SEQ ID NO: 1532 - RNA, 23 nt, Homo sapiens
ugaguggggcucccgggacggcg

SEQ ID NO: 1533 - RNA, 23 nt, Homo sapiens
cgccgucccgggagccccacuca

SEQ ID NO: 1534 - RNA, 21 nt, Homo sapiens
agcggugcuccugcgggccga

SEQ ID NO: 1535 - RNA, 21 nt, Homo sapiens
ucggcccgcaggagcaccgcu

SEQ ID NO: 1536 - RNA, 23 nt, Homo sapiens
ccggucccaggagaaccugcaga

SEQ ID NO: 1537 - RNA, 23 nt, Homo sapiens
ucugcagguucuccugggaccgg

SEQ ID NO: 1538 - RNA, 22 nt, Homo sapiens
aaggcccgggcuuuccucccag

SEQ ID NO: 1539 - RNA, 22 nt, Homo sapiens
cugggaggaaagcccgggccuu

SEQ ID NO: 1540 - RNA, 22 nt, Homo sapiens
agggaaggaggcuuggucuuag

SEQ ID NO: 1541 - RNA, 22 nt, Homo sapiens
cuaagaccaagccuccuucccu

SEQ ID NO: 1542 - RNA, 21 nt, Homo sapiens
gagguuuggggaggauuugcu

SEQ ID NO: 1543 - RNA, 21 nt, Homo sapiens
agcaaauccuccccaaaccuc

SEQ ID NO: 1544 - RNA, 20 nt, Homo sapiens
cgccccuccugcccccacag

SEQ ID NO: 1545 - RNA, 20 nt, Homo sapiens
cugugggggcaggaggggcg

SEQ ID NO: 1546 - RNA, 22 nt, Homo sapiens
ugcggggacaggccagggcauc

SEQ ID NO: 1547 - RNA, 22 nt, Homo sapiens
gaugcccuggccuguccccgca

SEQ ID NO: 1548 - RNA, 22 nt, Homo sapiens
ccugacccacccccucccgcag

SEQ ID NO: 1549 - RNA, 22 nt, Homo sapiens
cugcgggagggggugggucagg

SEQ ID NO: 1550 - RNA, 22 nt, Homo sapiens
cucgggcggaggugguugagug

SEQ ID NO: 1551 - RNA, 22 nt, Homo sapiens
cacucaaccaccuccgcccgag

SEQ ID NO: 1552 - RNA, 24 nt, Homo sapiens
agaggacccguagcugcuagaagg

SEQ ID NO: 1553 - RNA, 24 nt, Homo sapiens
ccuucuagcagcuacggguccucu

SEQ ID NO: 1554 - RNA, 22 nt, Homo sapiens
uuguggaucucaaggaugugcu

SEQ ID NO: 1555 - RNA, 22 nt, Homo sapiens
agcacauccuugagauccacaa

SEQ ID NO: 1556 - RNA, 22 nt, Homo sapiens
uucucuuucuuuagccuugugu

SEQ ID NO: 1557 - RNA, 22 nt, Homo sapiens
acacaaggcuaaagaaagagaa

SEQ ID NO: 1558 - RNA, 22 nt, Homo sapiens
caaggccaaaggaagagaacag

SEQ ID NO: 1559 - RNA, 22 nt, Homo sapiens
cuguucucuuccuuuggccuug

SEQ ID NO: 1560 - RNA, 23 nt, Homo sapiens
augcggaccuggguuagcggagu

SEQ ID NO: 1561 - RNA, 23 nt, Homo sapiens
acuccgcuaacccagguccgcau

SEQ ID NO: 1562 - RNA, 22 nt, Homo sapiens
agccaggcucugaagggaaagu

SEQ ID NO: 1563 - RNA, 22 nt, Homo sapiens
acuuucccuucagagccuggcu

SEQ ID NO: 1564 - RNA, 22 nt, Homo sapiens
uuucccuucagagccuggcuuu

SEQ ID NO: 1565 - RNA, 22 nt, Homo sapiens
aaagccaggcucugaagggaaa

SEQ ID NO: 1566 - RNA, 22 nt, Homo sapiens
ccagagaugguugccuuccuau

SEQ ID NO: 1567 - RNA, 22 nt, Homo sapiens
auaggaaggcaaccaucucugg

SEQ ID NO: 1568 - RNA, 23 nt, Homo sapiens
cagggaggcgcucacucucugcu

SEQ ID NO: 1569 - RNA, 23 nt, Homo sapiens
agcagagagugagcgccucccug

SEQ ID NO: 1570 - RNA, 22 nt, Homo sapiens
caugacgucacagaggcuucgc

SEQ ID NO: 1571 - RNA, 22 nt, Homo sapiens
gcgaagccucugugacgucaug

SEQ ID NO: 1572 - RNA, 23 nt, Homo sapiens
aggccucugugacgucacggugu

SEQ ID NO: 1573 - RNA, 23 nt, Homo sapiens
acaccgugacgucacagaggccu

SEQ ID NO: 1574 - RNA, 23 nt, Homo sapiens
ugccccaccugcugaccacccuc

SEQ ID NO: 1575 - RNA, 23 nt, Homo sapiens
gaggguggucagcagguggggca

SEQ ID NO: 1576 - RNA, 23 nt, Homo sapiens
gugagugggagccgguggggcug

SEQ ID NO: 1577 - RNA, 23 nt, Homo sapiens
cagccccaccggcucccacucac

SEQ ID NO: 1578 - RNA, 21 nt, Homo sapiens
uaggacuagauguuggaauua

SEQ ID NO: 1579 - RNA, 21 nt, Homo sapiens
uaauuccaacaucuaguccua

SEQ ID NO: 1580 - RNA, 22 nt, Homo sapiens
aaauucauguucaaucuaaacc

SEQ ID NO: 1581 - RNA, 22 nt, Homo sapiens
gguuuagauugaacaugaauuu

SEQ ID NO: 1582 - RNA, 22 nt, Homo sapiens
uuuagauugaacaugaaguuag

SEQ ID NO: 1583 - RNA, 22 nt, Homo sapiens
cuaacuucauguucaaucuaaa

SEQ ID NO: 1584 - RNA, 21 nt, Homo sapiens
gagggcaugcgcacuuugucc

SEQ ID NO: 1585 - RNA, 21 nt, Homo sapiens
ggacaaagugcgcaugcccuc

SEQ ID NO: 1586 - RNA, 21 nt, Homo sapiens
acaaggugugcaugccugacc

SEQ ID NO: 1587 - RNA, 21 nt, Homo sapiens
ggucaggcaugcacaccuugu

SEQ ID NO: 1588 - RNA, 22 nt, Homo sapiens
cuucugaucaagauuuguggug

SEQ ID NO: 1589 - RNA, 22 nt, Homo sapiens
caccacaaaucuugaucagaag

SEQ ID NO: 1590 - RNA, 21 nt, Homo sapiens
ccaaaucuugaucagaagccu

SEQ ID NO: 1591 - RNA, 21 nt, Homo sapiens
aggcuucugaucaagauuugg

SEQ ID NO: 1592 - RNA, 24 nt, Homo sapiens
aggcaggggcuggugcugggcggg

SEQ ID NO: 1593 - RNA, 24 nt, Homo sapiens
cccgcccagcaccagccccugccu

SEQ ID NO: 1594 - RNA, 21 nt, Homo sapiens
cgccugcccagcccuccugcu

SEQ ID NO: 1595 - RNA, 21 nt, Homo sapiens
agcaggagggcugggcaggcg

SEQ ID NO: 1596 - RNA, 22 nt, Homo sapiens
uuaacuccuuucacacccaugg

SEQ ID NO: 1597 - RNA, 22 nt, Homo sapiens
ccaugggugugaaaggaguuaa

SEQ ID NO: 1598 - RNA, 21 nt, Homo sapiens
uggauguggaaggaguuaucu

SEQ ID NO: 1599 - RNA, 21 nt, Homo sapiens
agauaacuccuuccacaucca

SEQ ID NO: 1600 - RNA, 22 nt, Homo sapiens
ugagugauugauagcuauguuc

SEQ ID NO: 1601 - RNA, 22 nt, Homo sapiens
gaacauagcuaucaaucacuca

SEQ ID NO: 1602 - RNA, 21 nt, Homo sapiens
auagcaauugcucuuuuggaa

SEQ ID NO: 1603 - RNA, 21 nt, Homo sapiens
uuccaaaagagcaauugcuau

SEQ ID NO: 1604 - RNA, 21 nt, Homo sapiens
ucugaaagagcaguugguguu

SEQ ID NO: 1605 - RNA, 21 nt, Homo sapiens
aacaccaacugcucuuucaga

SEQ ID NO: 1606 - RNA, 23 nt, Homo sapiens
cgcgggcgcuccuggccgccgcc

SEQ ID NO: 1607 - RNA, 23 nt, Homo sapiens
ggcggcggccaggagcgcccgcg

SEQ ID NO: 1608 - RNA, 20 nt, Homo sapiens
ccaggagauccagagagaau

SEQ ID NO: 1609 - RNA, 20 nt, Homo sapiens
auucucucuggaucuccugg

SEQ ID NO: 1610 - RNA, 22 nt, Homo sapiens
auucucucuggaucccauggau

SEQ ID NO: 1611 - RNA, 22 nt, Homo sapiens
auccaugggauccagagagaau

SEQ ID NO: 1612 - RNA, 22 nt, Homo sapiens
ucugccauccucccuccccuac

SEQ ID NO: 1613 - RNA, 22 nt, Homo sapiens
guaggggagggaggauggcaga

SEQ ID NO: 1614 - RNA, 24 nt, Homo sapiens
ggugggauggagagaagguaugag

SEQ ID NO: 1615 - RNA, 24 nt, Homo sapiens
cucauaccuucucuccaucccacc

SEQ ID NO: 1616 - RNA, 18 nt, Homo sapiens
ugagaugacacuguagcu

SEQ ID NO: 1617 - RNA, 18 nt, Homo sapiens
agcuacagugucaucuca

SEQ ID NO: 1618 - RNA, 21 nt, Homo sapiens
agcagacuugaccuacaauua

SEQ ID NO: 1619 - RNA, 21 nt, Homo sapiens
uaauuguaggucaagucugcu

SEQ ID NO: 1620 - RNA, 22 nt, Homo sapiens
cagaacaggagcauagaaaggc

SEQ ID NO: 1621 - RNA, 22 nt, Homo sapiens
gccuuucuaugcuccuguucug

SEQ ID NO: 1622 - RNA, 22 nt, Homo sapiens
uuaauuuuuuguuucggucacu

SEQ ID NO: 1623 - RNA, 22 nt, Homo sapiens
agugaccgaaacaaaaaauuaa

SEQ ID NO: 1624 - RNA, 23 nt, Homo sapiens
cuugccauccugguccacugcau

SEQ ID NO: 1625 - RNA, 23 nt, Homo sapiens
augcaguggaccaggauggcaag

SEQ ID NO: 1626 - RNA, 22 nt, Homo sapiens
guggaccaggauggcaagggcu

SEQ ID NO: 1627 - RNA, 22 nt, Homo sapiens
agcccuugccauccugguccac

SEQ ID NO: 1628 - RNA, 22 nt, Homo sapiens
auaccucaucuagaaugcugua

SEQ ID NO: 1629 - RNA, 22 nt, Homo sapiens
uacagcauucuagaugagguau

SEQ ID NO: 1630 - RNA, 22 nt, Homo sapiens
uucuagaugagagauauauaua

SEQ ID NO: 1631 - RNA, 22 nt, Homo sapiens
uauauauaucucucaucuagaa

SEQ ID NO: 1632 - RNA, 22 nt, Homo sapiens
ucuucuuccuuugcagaguuga

SEQ ID NO: 1633 - RNA, 22 nt, Homo sapiens
ucaacucugcaaaggaagaaga

SEQ ID NO: 1634 - RNA, 22 nt, Homo sapiens
aauucuguaaaggaagaagagg

SEQ ID NO: 1635 - RNA, 22 nt, Homo sapiens
ccucuucuuccuuuacagaauu

SEQ ID NO: 1636 - RNA, 22 nt, Homo sapiens
uaggagggaauaguaaaagcag

SEQ ID NO: 1637 - RNA, 22 nt, Homo sapiens
cugcuuuuacuauucccuccua

SEQ ID NO: 1638 - RNA, 22 nt, Homo sapiens
acccuugagccugaucccuagc

SEQ ID NO: 1639 - RNA, 22 nt, Homo sapiens
gcuagggaucaggcucaagggu

SEQ ID NO: 1640 - RNA, 22 nt, Homo sapiens
aauguuggaauccucgcuagag

SEQ ID NO: 1641 - RNA, 22 nt, Homo sapiens
cucuagcgaggauuccaacauu

SEQ ID NO: 1642 - RNA, 21 nt, Homo sapiens
uagcggggauuccaauauugg

SEQ ID NO: 1643 - RNA, 21 nt, Homo sapiens
ccaauauuggaauccccgcua

SEQ ID NO: 1644 - RNA, 22 nt, Homo sapiens
ugauugucuucauaucuagaac

SEQ ID NO: 1645 - RNA, 22 nt, Homo sapiens
guucuagauaugaagacaauca

SEQ ID NO: 1646 - RNA, 22 nt, Homo sapiens
uucuggauaugaagacaaucaa

SEQ ID NO: 1647 - RNA, 22 nt, Homo sapiens
uugauugucuucauauccagaa

SEQ ID NO: 1648 - RNA, 23 nt, Homo sapiens
ccccgguguuggggcgcgucugc

SEQ ID NO: 1649 - RNA, 23 nt, Homo sapiens
gcagacgcgccccaacaccgggg

SEQ ID NO: 1650 - RNA, 21 nt, Homo sapiens
ggcgcgcccagcucccgggcu

SEQ ID NO: 1651 - RNA, 21 nt, Homo sapiens
agcccgggagcugggcgcgcc

SEQ ID NO: 1652 - RNA, 20 nt, Homo sapiens
ugaggagaugcugggacuga

SEQ ID NO: 1653 - RNA, 20 nt, Homo sapiens
ucagucccagcaucuccuca

SEQ ID NO: 1654 - RNA, 21 nt, Homo sapiens
agagucggcgacgccgccagc

SEQ ID NO: 1655 - RNA, 21 nt, Homo sapiens
gcuggcggcgucgccgacucu

SEQ ID NO: 1656 - RNA, 22 nt, Homo sapiens
ugaagccagcucuggucugggc

SEQ ID NO: 1657 - RNA, 22 nt, Homo sapiens
gcccagaccagagcuggcuuca

SEQ ID NO: 1658 - RNA, 22 nt, Homo sapiens
ugagaccaggacuggaugcacc

SEQ ID NO: 1659 - RNA, 22 nt, Homo sapiens
ggugcauccaguccuggucuca

SEQ ID NO: 1660 - RNA, 24 nt, Homo sapiens
gaugcgccgcccacugccccgcgc

SEQ ID NO: 1661 - RNA, 24 nt, Homo sapiens
gcgcggggcagugggcggcgcauc

SEQ ID NO: 1662 - RNA, 22 nt, Homo sapiens
gcggggguggcggcggcauccc

SEQ ID NO: 1663 - RNA, 22 nt, Homo sapiens
gggaugccgccgccacccccgc

SEQ ID NO: 1664 - RNA, 22 nt, Homo sapiens
uuacggaccagcuaagggaggc

SEQ ID NO: 1665 - RNA, 22 nt, Homo sapiens
gccucccuuagcugguccguaa

SEQ ID NO: 1666 - RNA, 21 nt, Homo sapiens
cacacauagcagguguauaua

SEQ ID NO: 1667 - RNA, 21 nt, Homo sapiens
uauauacaccugcuaugugug

SEQ ID NO: 1668 - RNA, 22 nt, Homo sapiens
guauacaccugauauguguaug

SEQ ID NO: 1669 - RNA, 22 nt, Homo sapiens
cauacacauaucagguguauac

SEQ ID NO: 1670 - RNA, 22 nt, Homo sapiens
ugaaugguaaagcgaugucaca

SEQ ID NO: 1671 - RNA, 22 nt, Homo sapiens
ugugacaucgcuuuaccauuca

SEQ ID NO: 1672 - RNA, 20 nt, Homo sapiens
aucgcuuuaccauucauguu

SEQ ID NO: 1673 - RNA, 20 nt, Homo sapiens
aacaugaaugguaaagcgau

SEQ ID NO: 1674 - RNA, 18 nt, Homo sapiens
uggauaugaugacugaaa

SEQ ID NO: 1675 - RNA, 18 nt, Homo sapiens
uuucagucaucauaucca

SEQ ID NO: 1676 - RNA, 18 nt, Homo sapiens
cggugagcgcucgcuggc

SEQ ID NO: 1677 - RNA, 18 nt, Homo sapiens
gccagcgagcgcucaccg

SEQ ID NO: 1678 - RNA, 23 nt, Homo sapiens
ucugcacugugaguuggcuggcu

SEQ ID NO: 1679 - RNA, 23 nt, Homo sapiens
agccagccaacucacagugcaga

SEQ ID NO: 1680 - RNA, 24 nt, Homo sapiens
acauccugcuccacagggcagagg

SEQ ID NO: 1681 - RNA, 24 nt, Homo sapiens
ccucugcccuguggagcaggaugu

SEQ ID NO: 1682 - RNA, 22 nt, Homo sapiens
ucuggcuaucucacgagacugu

SEQ ID NO: 1683 - RNA, 22 nt, Homo sapiens
acagucucgugagauagccaga

SEQ ID NO: 1684 - RNA, 22 nt, Homo sapiens
auauuauuagccacuucuggau

SEQ ID NO: 1685 - RNA, 22 nt, Homo sapiens
auccagaaguggcuaauaauau

SEQ ID NO: 1686 - RNA, 21 nt, Homo sapiens
agaaguggcuaauaauauuga

SEQ ID NO: 1687 - RNA, 21 nt, Homo sapiens
ucaauauuauuagccacuucu

SEQ ID NO: 1688 - RNA, 22 nt, Homo sapiens
uaaaguggcagaguauagacac

SEQ ID NO: 1689 - RNA, 22 nt, Homo sapiens
gugucuauacucugccacuuua

SEQ ID NO: 1690 - RNA, 22 nt, Homo sapiens
ugucuauacucugucacuuuac

SEQ ID NO: 1691 - RNA, 22 nt, Homo sapiens
guaaagugacagaguauagaca

SEQ ID NO: 1692 - RNA, 21 nt, Homo sapiens
ucucaguaaguggcacucugu

SEQ ID NO: 1693 - RNA, 21 nt, Homo sapiens
acagagugccacuuacugaga

SEQ ID NO: 1694 - RNA, 21 nt, Homo sapiens
gacagagugccacuuacugaa

SEQ ID NO: 1695 - RNA, 21 nt, Homo sapiens
uucaguaaguggcacucuguc

SEQ ID NO: 1696 - RNA, 22 nt, Homo sapiens
aacucacgaaguauaccgaagu

SEQ ID NO: 1697 - RNA, 22 nt, Homo sapiens
acuucgguauacuucgugaguu

SEQ ID NO: 1698 - RNA, 22 nt, Homo sapiens
uucgguauacuuugugaauugg

SEQ ID NO: 1699 - RNA, 22 nt, Homo sapiens
ccaauucacaaaguauaccgaa

SEQ ID NO: 1700 - RNA, 22 nt, Homo sapiens
acuggcaugcugcauuuauaua

SEQ ID NO: 1701 - RNA, 22 nt, Homo sapiens
uauauaaaugcagcaugccagu

SEQ ID NO: 1702 - RNA, 22 nt, Homo sapiens
aucuaaaugcagcaugccaguc

SEQ ID NO: 1703 - RNA, 22 nt, Homo sapiens
gacuggcaugcugcauuuagau

SEQ ID NO: 1704 - RNA, 19 nt, Homo sapiens
cauccguccgucuguccac

SEQ ID NO: 1705 - RNA, 19 nt, Homo sapiens
guggacagacggacggaug

SEQ ID NO: 1706 - RNA, 21 nt, Homo sapiens
aguggaccgaggaaggaagga

SEQ ID NO: 1707 - RNA, 21 nt, Homo sapiens
uccuuccuuccucgguccacu

SEQ ID NO: 1708 - RNA, 22 nt, Homo sapiens
uacacaagaaaaccaaggcuca

SEQ ID NO: 1709 - RNA, 22 nt, Homo sapiens
ugagccuugguuuucuugugua

SEQ ID NO: 1710 - RNA, 21 nt, Homo sapiens
uaacauaauaguguggauuga

SEQ ID NO: 1711 - RNA, 21 nt, Homo sapiens
ucaauccacacuauuauguua

SEQ ID NO: 1712 - RNA, 21 nt, Homo sapiens
ugcuuaaccuugcccucgaaa

SEQ ID NO: 1713 - RNA, 21 nt, Homo sapiens
uuucgagggcaagguuaagca

SEQ ID NO: 1714 - RNA, 21 nt, Homo sapiens
uuggacgguaagguuaagcaa

SEQ ID NO: 1715 - RNA, 21 nt, Homo sapiens
uugcuuaaccuuaccguccaa

SEQ ID NO: 1716 - RNA, 21 nt, Homo sapiens
aaaagcaucaggaaguaccca

SEQ ID NO: 1717 - RNA, 21 nt, Homo sapiens
uggguacuuccugaugcuuuu

SEQ ID NO: 1718 - RNA, 21 nt, Homo sapiens
gcaggacaggcagaaguggau

SEQ ID NO: 1719 - RNA, 21 nt, Homo sapiens
auccacuucugccuguccugc

SEQ ID NO: 1720 - RNA, 22 nt, Homo sapiens
cagggcuggcagugacaugggu

SEQ ID NO: 1721 - RNA, 22 nt, Homo sapiens
acccaugucacugccagcccug

SEQ ID NO: 1722 - RNA, 22 nt, Homo sapiens
auuucccugccauucccuuggc

SEQ ID NO: 1723 - RNA, 22 nt, Homo sapiens
gccaagggaauggcagggaaau

SEQ ID NO: 1724 - RNA, 22 nt, Homo sapiens
uggcggcgguaguuaugggcuu

SEQ ID NO: 1725 - RNA, 22 nt, Homo sapiens
aagcccauaacuaccgccgcca

SEQ ID NO: 1726 - RNA, 22 nt, Homo sapiens
gcucccucuagggucgcucgga

SEQ ID NO: 1727 - RNA, 22 nt, Homo sapiens
uccgagcgacccuagagggagc

SEQ ID NO: 1728 - RNA, 22 nt, Homo sapiens
ugggaacuuaguagagguuuaa

SEQ ID NO: 1729 - RNA, 22 nt, Homo sapiens
uuaaaccucuacuaaguuccca

SEQ ID NO: 1730 - RNA, 21 nt, Homo sapiens
uggggcuagugaugcaggacg

SEQ ID NO: 1731 - RNA, 21 nt, Homo sapiens
cguccugcaucacuagcccca

SEQ ID NO: 1732 - RNA, 22 nt, Homo sapiens
gcugacagcagggcuggccgcu

SEQ ID NO: 1733 - RNA, 22 nt, Homo sapiens
agcggccagcccugcugucagc

SEQ ID NO: 1734 - RNA, 21 nt, Homo sapiens
auuggacugcugauggcccgu

SEQ ID NO: 1735 - RNA, 21 nt, Homo sapiens
acgggccaucagcaguccaau

SEQ ID NO: 1736 - RNA, 22 nt, Homo sapiens
aggccaucagcaguccaaugaa

SEQ ID NO: 1737 - RNA, 22 nt, Homo sapiens
uucauuggacugcugauggccu

SEQ ID NO: 1738 - RNA, 22 nt, Homo sapiens
uuggacagaaaacacgcaggaa

SEQ ID NO: 1739 - RNA, 22 nt, Homo sapiens
uuccugcguguuuucuguccaa

SEQ ID NO: 1740 - RNA, 20 nt, Homo sapiens
ccugcguguuuucuguccaa

SEQ ID NO: 1741 - RNA, 20 nt, Homo sapiens
uuggacagaaaacacgcagg

SEQ ID NO: 1742 - RNA, 22 nt, Homo sapiens
ugagacaggcuuaugcugcuau

SEQ ID NO: 1743 - RNA, 22 nt, Homo sapiens
auagcagcauaagccugucuca

SEQ ID NO: 1744 - RNA, 22 nt, Homo sapiens
auagcagcaugaaccugucuca

SEQ ID NO: 1745 - RNA, 22 nt, Homo sapiens
ugagacagguucaugcugcuau

SEQ ID NO: 1746 - RNA, 20 nt, Homo sapiens
gagacagguucaugcugcua

SEQ ID NO: 1747 - RNA, 20 nt, Homo sapiens
uagcagcaugaaccugucuc

SEQ ID NO: 1748 - RNA, 21 nt, Homo sapiens
auagcagcauaagccugucuc

SEQ ID NO: 1749 - RNA, 21 nt, Homo sapiens
gagacaggcuuaugcugcuau

SEQ ID NO: 1750 - RNA, 22 nt, Homo sapiens
uguguggauccuggaggaggca

SEQ ID NO: 1751 - RNA, 22 nt, Homo sapiens
ugccuccuccaggauccacaca

SEQ ID NO: 1752 - RNA, 22 nt, Homo sapiens
agacaucaagaucagucccaaa

SEQ ID NO: 1753 - RNA, 22 nt, Homo sapiens
uuugggacugaucuugaugucu

SEQ ID NO: 1754 - RNA, 22 nt, Homo sapiens
uuugggacugaucuugaugucu

SEQ ID NO: 1755 - RNA, 22 nt, Homo sapiens
agacaucaagaucagucccaaa

SEQ ID NO: 1756 - RNA, 22 nt, Homo sapiens
aaggaaccagaaaaugagaagu

SEQ ID NO: 1757 - RNA, 22 nt, Homo sapiens
acuucucauuuucugguuccuu

SEQ ID NO: 1758 - RNA, 22 nt, Homo sapiens
ucuggccuugacuugacucuuu

SEQ ID NO: 1759 - RNA, 22 nt, Homo sapiens
aaagagucaagucaaggccaga

SEQ ID NO: 1760 - RNA, 23 nt, Homo sapiens
ucaaggccagaggucccacagca

SEQ ID NO: 1761 - RNA, 23 nt, Homo sapiens
ugcugugggaccucuggccuuga

SEQ ID NO: 1762 - RNA, 21 nt, Homo sapiens
acuccaguuuuaguucucuug

SEQ ID NO: 1763 - RNA, 21 nt, Homo sapiens
caagagaacuaaaacuggagu

SEQ ID NO: 1764 - RNA, 22 nt, Homo sapiens
aagagaacugaaaguggagccu

SEQ ID NO: 1765 - RNA, 22 nt, Homo sapiens
aggcuccacuuucaguucucuu

SEQ ID NO: 1766 - RNA, 22 nt, Homo sapiens
uaagggguguauggcagaugca

SEQ ID NO: 1767 - RNA, 22 nt, Homo sapiens
ugcaucugccauacaccccuua

SEQ ID NO: 1768 - RNA, 21 nt, Homo sapiens
uuucagauaacaguauuacau

SEQ ID NO: 1769 - RNA, 21 nt, Homo sapiens
auguaauacuguuaucugaaa

SEQ ID NO: 1770 - RNA, 22 nt, Homo sapiens
aagcaauacuguuaccugaaau

SEQ ID NO: 1771 - RNA, 22 nt, Homo sapiens
auuucagguaacaguauugcuu

SEQ ID NO: 1772 - RNA, 22 nt, Homo sapiens
uacuaacugcagauucaaguga

SEQ ID NO: 1773 - RNA, 22 nt, Homo sapiens
ucacuugaaucugcaguuagua

SEQ ID NO: 1774 - RNA, 21 nt, Homo sapiens
auugccuaacaugugccagaa

SEQ ID NO: 1775 - RNA, 21 nt, Homo sapiens
uucuggcacauguuaggcaau

SEQ ID NO: 1776 - RNA, 22 nt, Homo sapiens
ucugguauguaguagguaauaa

SEQ ID NO: 1777 - RNA, 22 nt, Homo sapiens
uuauuaccuacuacauaccaga

SEQ ID NO: 1778 - RNA, 22 nt, Homo sapiens
aguugccuuuuuguucccaugc

SEQ ID NO: 1779 - RNA, 22 nt, Homo sapiens
gcaugggaacaaaaaggcaacu

SEQ ID NO: 1780 - RNA, 21 nt, Homo sapiens
auaggcaccaaaaagcaacaa

SEQ ID NO: 1781 - RNA, 21 nt, Homo sapiens
uuguugcuuuuuggugccuau

SEQ ID NO: 1782 - RNA, 22 nt, Homo sapiens
ccugcaacuuugccugaucaga

SEQ ID NO: 1783 - RNA, 22 nt, Homo sapiens
ucugaucaggcaaaguugcagg

SEQ ID NO: 1784 - RNA, 22 nt, Homo sapiens
ugaucaggcaaaauugcagacu

SEQ ID NO: 1785 - RNA, 22 nt, Homo sapiens
agucugcaauuuugccugauca

SEQ ID NO: 1786 - RNA, 22 nt, Homo sapiens
uuguggcuggucaugaggcuaa

SEQ ID NO: 1787 - RNA, 22 nt, Homo sapiens
uuagccucaugaccagccacaa

SEQ ID NO: 1788 - RNA, 21 nt, Homo sapiens
uuagucucaugaucagacaca

SEQ ID NO: 1789 - RNA, 21 nt, Homo sapiens
ugugucugaucaugagacuaa

SEQ ID NO: 1790 - RNA, 22 nt, Homo sapiens
aaagauagacaauuggcuaaau

SEQ ID NO: 1791 - RNA, 22 nt, Homo sapiens
auuuagccaauugucuaucuuu

SEQ ID NO: 1792 - RNA, 22 nt, Homo sapiens
uuagccaauuguccaucuuuag

SEQ ID NO: 1793 - RNA, 22 nt, Homo sapiens
cuaaagauggacaauuggcuaa

SEQ ID NO: 1794 - RNA, 22 nt, Homo sapiens
ucugugagaccaaagaacuacu

SEQ ID NO: 1795 - RNA, 22 nt, Homo sapiens
aguaguucuuuggucucacaga

SEQ ID NO: 1796 - RNA, 22 nt, Homo sapiens
uuguucuuuggucuuucagcca

SEQ ID NO: 1797 - RNA, 22 nt, Homo sapiens
uggcugaaagaccaaagaacaa

SEQ ID NO: 1798 - RNA, 23 nt, Homo sapiens
cgggcuguccggaggggucggcu

SEQ ID NO: 1799 - RNA, 23 nt, Homo sapiens
agccgaccccuccggacagcccg

SEQ ID NO: 1800 - RNA, 23 nt, Homo sapiens
ucuguauucuccuuugccugcag

SEQ ID NO: 1801 - RNA, 23 nt, Homo sapiens
cugcaggcaaaggagaauacaga

SEQ ID NO: 1802 - RNA, 23 nt, Homo sapiens
uacauggauggaaaccuucaagc

SEQ ID NO: 1803 - RNA, 23 nt, Homo sapiens
gcuugaagguuuccauccaugua

SEQ ID NO: 1804 - RNA, 22 nt, Homo sapiens
uauggagguucuagaccauguu

SEQ ID NO: 1805 - RNA, 22 nt, Homo sapiens
aacauggucuagaaccuccaua

SEQ ID NO: 1806 - RNA, 22 nt, Homo sapiens
gggaccauccugccugcugugg

SEQ ID NO: 1807 - RNA, 22 nt, Homo sapiens
ccacagcaggcaggaugguccc

SEQ ID NO: 1808 - RNA, 22 nt, Homo sapiens
ucagcaggcaggcuggugcagc

SEQ ID NO: 1809 - RNA, 22 nt, Homo sapiens
gcugcaccagccugccugcuga

SEQ ID NO: 1810 - RNA, 22 nt, Homo sapiens
ucaccugaccucccaugccugu

SEQ ID NO: 1811 - RNA, 22 nt, Homo sapiens
acaggcaugggaggucagguga

SEQ ID NO: 1812 - RNA, 22 nt, Homo sapiens
caggcacgggagcucaggugag

SEQ ID NO: 1813 - RNA, 22 nt, Homo sapiens
cucaccugagcucccgugccug

SEQ ID NO: 1814 - RNA, 21 nt, Homo sapiens
ugaguguugucuacgagggca

SEQ ID NO: 1815 - RNA, 21 nt, Homo sapiens
ugcccucguagacaacacuca

SEQ ID NO: 1816 - RNA, 21 nt, Homo sapiens
acugacaggagagcauuuuga

SEQ ID NO: 1817 - RNA, 21 nt, Homo sapiens
ucaaaaugcucuccugucagu

SEQ ID NO: 1818 - RNA, 22 nt, Homo sapiens
ugaccugggacucggacagcug

SEQ ID NO: 1819 - RNA, 22 nt, Homo sapiens
cagcuguccgagucccagguca

SEQ ID NO: 1820 - RNA, 22 nt, Homo sapiens
ucucaggaguaaagacagaguu

SEQ ID NO: 1821 - RNA, 22 nt, Homo sapiens
aacucugucuuuacuccugaga

SEQ ID NO: 1822 - RNA, 22 nt, Homo sapiens
aacucugucuucacucaugagu

SEQ ID NO: 1823 - RNA, 22 nt, Homo sapiens
acucaugagugaagacagaguu

SEQ ID NO: 1824 - RNA, 22 nt, Homo sapiens
uggggcggagcuuccggaggcc

SEQ ID NO: 1825 - RNA, 22 nt, Homo sapiens
ggccuccggaagcuccgcccca

SEQ ID NO: 1826 - RNA, 22 nt, Homo sapiens
caaucagcaaguauacugcccu

SEQ ID NO: 1827 - RNA, 22 nt, Homo sapiens
agggcaguauacuugcugauug

SEQ ID NO: 1828 - RNA, 22 nt, Homo sapiens
uggcagugucuuagcugguugu

SEQ ID NO: 1829 - RNA, 22 nt, Homo sapiens
acaaccagcuaagacacugcca

SEQ ID NO: 1830 - RNA, 22 nt, Homo sapiens
ccaauauuggcugugcugcucc

SEQ ID NO: 1831 - RNA, 22 nt, Homo sapiens
ggagcagcacagccaauauugg

SEQ ID NO: 1832 - RNA, 21 nt, Homo sapiens
uagcagcacagaaauauuggc

SEQ ID NO: 1833 - RNA, 21 nt, Homo sapiens
gccaauauuucugugcugcua

SEQ ID NO: 1834 - RNA, 21 nt, Homo sapiens
uaauuuuauguauaagcuagu

SEQ ID NO: 1835 - RNA, 21 nt, Homo sapiens
acuagcuuauacauaaaauua

SEQ ID NO: 1836 - RNA, 22 nt, Homo sapiens
gagcuuauucauaaaagugcag

SEQ ID NO: 1837 - RNA, 22 nt, Homo sapiens
cugcacuuuuaugaauaagcuc

SEQ ID NO: 1838 - RNA, 22 nt, Homo sapiens
aagacgggaggaaagaagggag

SEQ ID NO: 1839 - RNA, 22 nt, Homo sapiens
cucccuucuuuccucccgucuu

SEQ ID NO: 1840 - RNA, 22 nt, Homo sapiens
cagugguuuuacccuaugguag

SEQ ID NO: 1841 - RNA, 22 nt, Homo sapiens
cuaccauaggguaaaaccacug

SEQ ID NO: 1842 - RNA, 22 nt, Homo sapiens
auucuaauuucuccacgucuuu

SEQ ID NO: 1843 - RNA, 22 nt, Homo sapiens
aaagacguggagaaauuagaau

SEQ ID NO: 1844 - RNA, 22 nt, Homo sapiens
aaccagcaccccaacuuuggac

SEQ ID NO: 1845 - RNA, 22 nt, Homo sapiens
guccaaaguuggggugcugguu

SEQ ID NO: 1846 - RNA, 24 nt, Homo sapiens
aaagacauaggauagagucaccuc

SEQ ID NO: 1847 - RNA, 24 nt, Homo sapiens
gaggugacucuauccuaugucuuu

SEQ ID NO: 1848 - RNA, 22 nt, Homo sapiens
uaacugguugaacaacugaacc

SEQ ID NO: 1849 - RNA, 22 nt, Homo sapiens
gguucaguuguucaaccaguua

SEQ ID NO: 1850 - RNA, 20 nt, Homo sapiens
cgugccacccuuuuccccag

SEQ ID NO: 1851 - RNA, 20 nt, Homo sapiens
cuggggaaaaggguggcacg

SEQ ID NO: 1852 - RNA, 17 nt, Homo sapiens
guggggccaggcggugg

SEQ ID NO: 1853 - RNA, 17 nt, Homo sapiens
ccaccgccuggccccac

SEQ ID NO: 1854 - RNA, 22 nt, Homo sapiens
aaaagcuggguugagagggcaa

SEQ ID NO: 1855 - RNA, 22 nt, Homo sapiens
uugcccucucaacccagcuuuu

SEQ ID NO: 1856 - RNA, 22 nt, Homo sapiens
gguccagaggggagauagguuc

SEQ ID NO: 1857 - RNA, 22 nt, Homo sapiens
gaaccuaucuccccucuggacc

SEQ ID NO: 1858 - RNA, 23 nt, Homo sapiens
uagccuucagaucuugguguuuu

SEQ ID NO: 1859 - RNA, 23 nt, Homo sapiens
aaaacaccaagaucugaaggcua

SEQ ID NO: 1860 - RNA, 23 nt, Homo sapiens
ccacuuggaucugaaggcugccc

SEQ ID NO: 1861 - RNA, 23 nt, Homo sapiens
gggcagccuucagauccaagugg

SEQ ID NO: 1862 - RNA, 22 nt, Homo sapiens
ugugcgcagggagaccucuccc

SEQ ID NO: 1863 - RNA, 22 nt, Homo sapiens
gggagaggucucccugcgcaca

SEQ ID NO: 1864 - RNA, 22 nt, Homo sapiens
ugucuacuacuggagacacugg

SEQ ID NO: 1865 - RNA, 22 nt, Homo sapiens
ccagugucuccaguaguagaca

SEQ ID NO: 1866 - RNA, 21 nt, Homo sapiens
aaggcagggcccccgcucccc

SEQ ID NO: 1867 - RNA, 21 nt, Homo sapiens
ggggagcgggggcccugccuu

SEQ ID NO: 1868 - RNA, 21 nt, Homo sapiens
cugacuguugccguccuccag

SEQ ID NO: 1869 - RNA, 21 nt, Homo sapiens
cuggaggacggcaacagucag

SEQ ID NO: 1870 - RNA, 25 nt, Homo sapiens
aaaaaccacaauuacuuuugcacca

SEQ ID NO: 1871 - RNA, 25 nt, Homo sapiens
uggugcaaaaguaauugugguuuuu

SEQ ID NO: 1872 - RNA, 23 nt, Homo sapiens
caaaaaccgcaauuacuuuugca

SEQ ID NO: 1873 - RNA, 23 nt, Homo sapiens
ugcaaaaguaauugcgguuuuug

SEQ ID NO: 1874 - RNA, 22 nt, Homo sapiens
augugccugagggaguaagaca

SEQ ID NO: 1875 - RNA, 22 nt, Homo sapiens
ugucuuacucccucaggcacau

SEQ ID NO: 1876 - RNA, 20 nt, Homo sapiens
ucuuacucccucaggcacug

SEQ ID NO: 1877 - RNA, 20 nt, Homo sapiens
cagugccugagggaguaaga

SEQ ID NO: 1878 - RNA, 22 nt, Homo sapiens
agacacauuuggagagggaccc

SEQ ID NO: 1879 - RNA, 22 nt, Homo sapiens
gggucccucuccaaaugugucu

SEQ ID NO: 1880 - RNA, 22 nt, Homo sapiens
gguucccucuccaaaugugucu

SEQ ID NO: 1881 - RNA, 22 nt, Homo sapiens
agacacauuuggagagggaacc

SEQ ID NO: 1882 - RNA, 21 nt, Homo sapiens
aaaauuucuuucacuacuuag

SEQ ID NO: 1883 - RNA, 21 nt, Homo sapiens
cuaaguagugaaagaaauuuu

SEQ ID NO: 1884 - RNA, 21 nt, Homo sapiens
uuagugaaggcuauuuuaauu

SEQ ID NO: 1885 - RNA, 21 nt, Homo sapiens
aauuaaaauagccuucacuaa

SEQ ID NO: 1886 - RNA, 20 nt, Homo sapiens
acuguaaacgcuuucugaug

SEQ ID NO: 1887 - RNA, 20 nt, Homo sapiens
caucagaaagcguuuacagu

SEQ ID NO: 1888 - RNA, 22 nt, Homo sapiens
gcaugugaugaagcaaaucagu

SEQ ID NO: 1889 - RNA, 22 nt, Homo sapiens
acugauuugcuucaucacaugc

SEQ ID NO: 1890 - RNA, 24 nt, Homo sapiens
caaagugaugaguaauacuggcug

SEQ ID NO: 1891 - RNA, 24 nt, Homo sapiens
cagccaguauuacucaucacuuug

SEQ ID NO: 1892 - RNA, 20 nt, Homo sapiens
gaaucggaaaggaggcgccg

SEQ ID NO: 1893 - RNA, 20 nt, Homo sapiens
cggcgccuccuuuccgauuc

SEQ ID NO: 1894 - RNA, 21 nt, Homo sapiens
uugugaagaaagaaauucuua

SEQ ID NO: 1895 - RNA, 21 nt, Homo sapiens
uaagaauuucuuucuucacaa

SEQ ID NO: 1896 - RNA, 22 nt, Homo sapiens
aggaggcaucuugagaaaugga

SEQ ID NO: 1897 - RNA, 22 nt, Homo sapiens
uccauuucucaagaugccuccu

SEQ ID NO: 1898 - RNA, 24 nt, Homo sapiens
acaaaaaaaaaagcccaacccuuc

SEQ ID NO: 1899 - RNA, 24 nt, Homo sapiens
gaaggguugggcuuuuuuuuuugu

SEQ ID NO: 1900 - RNA, 22 nt, Homo sapiens
uguuguacuuuuuuuuuuguuc

SEQ ID NO: 1901 - RNA, 22 nt, Homo sapiens
gaacaaaaaaaaaaguacaaca

SEQ ID NO: 1902 - RNA, 21 nt, Homo sapiens
ucucucggcuccucgcggcuc

SEQ ID NO: 1903 - RNA, 21 nt, Homo sapiens
gagccgcgaggagccgagaga

SEQ ID NO: 1904 - RNA, 23 nt, Homo sapiens
cgagggcauuucaugaugcaggc

SEQ ID NO: 1905 - RNA, 23 nt, Homo sapiens
gccugcaucaugaaaugcccucg

SEQ ID NO: 1906 - RNA, 22 nt, Homo sapiens
augaagugcacucaugauaugu

SEQ ID NO: 1907 - RNA, 22 nt, Homo sapiens
acauaucaugagugcacuucau

SEQ ID NO: 1908 - RNA, 22 nt, Homo sapiens
ugucuacauuaaugaaaagagc

SEQ ID NO: 1909 - RNA, 22 nt, Homo sapiens
gcucuuuucauuaauguagaca

SEQ ID NO: 1910 - RNA, 22 nt, Homo sapiens
ucacccugcaucccgcacccag

SEQ ID NO: 1911 - RNA, 22 nt, Homo sapiens
cugggugcgggaugcaggguga

SEQ ID NO: 1912 - RNA, 22 nt, Homo sapiens
gugggcugggcugggcugggcc

SEQ ID NO: 1913 - RNA, 22 nt, Homo sapiens
ggcccagcccagcccagcccac

SEQ ID NO: 1914 - RNA, 20 nt, Homo sapiens
cgcgggucggggucugcagg

SEQ ID NO: 1915 - RNA, 20 nt, Homo sapiens
ccugcagaccccgacccgcg

SEQ ID NO: 1916 - RNA, 21 nt, Homo sapiens
ucaccugagcucccgugccug

SEQ ID NO: 1917 - RNA, 21 nt, Homo sapiens
caggcacgggagcucagguga

SEQ ID NO: 1918 - RNA, 20 nt, Homo sapiens
aggcaugggaggucagguga

SEQ ID NO: 1919 - RNA, 20 nt, Homo sapiens
ucaccugaccucccaugccu

SEQ ID NO: 1920 - RNA, 23 nt, Homo sapiens
caucagcacccuauguccuuucu

SEQ ID NO: 1921 - RNA, 23 nt, Homo sapiens
agaaaggacauagggugcugaug

SEQ ID NO: 1922 - RNA, 22 nt, Homo sapiens
aaagacauaguugcaagauggg

SEQ ID NO: 1923 - RNA, 22 nt, Homo sapiens
cccaucuugcaacuaugucuuu

SEQ ID NO: 1924 - RNA, 22 nt, Homo sapiens
uuugugaccugguccacuaacc

SEQ ID NO: 1925 - RNA, 22 nt, Homo sapiens
gguuaguggaccaggucacaaa

SEQ ID NO: 1926 - RNA, 22 nt, Homo sapiens
gaugguugaccagagagcacac

SEQ ID NO: 1927 - RNA, 22 nt, Homo sapiens
gugugcucucuggucaaccauc

SEQ ID NO: 1928 - RNA, 20 nt, Homo sapiens
aaaagcuggguugagagggu

SEQ ID NO: 1929 - RNA, 20 nt, Homo sapiens
acccucucaacccagcuuuu

SEQ ID NO: 1930 - RNA, 21 nt, Homo sapiens
cacaagguauugguauuaccu

SEQ ID NO: 1931 - RNA, 21 nt, Homo sapiens
agguaauaccaauaccuugug

SEQ ID NO: 1932 - RNA, 22 nt, Homo sapiens
uaguaccaguaccuuguguuca

SEQ ID NO: 1933 - RNA, 22 nt, Homo sapiens
ugaacacaagguacugguacua

SEQ ID NO: 1934 - RNA, 22 nt, Homo sapiens
aguauucuguaccagggaaggu

SEQ ID NO: 1935 - RNA, 22 nt, Homo sapiens
accuucccugguacagaauacu

SEQ ID NO: 1936 - RNA, 22 nt, Homo sapiens
uggcaguguauuguuagcuggu

SEQ ID NO: 1937 - RNA, 22 nt, Homo sapiens
accagcuaacaauacacugcca

SEQ ID NO: 1938 - RNA, 22 nt, Homo sapiens
uauacaagggcaagcucucugu

SEQ ID NO: 1939 - RNA, 22 nt, Homo sapiens
acagagagcuugcccuuguaua

SEQ ID NO: 1940 - RNA, 22 nt, Homo sapiens
agcgagguugcccuuuguauau

SEQ ID NO: 1941 - RNA, 22 nt, Homo sapiens
auauacaaagggcaaccucgcu

SEQ ID NO: 1942 - RNA, 22 nt, Homo sapiens
caaucacuaacuccacugccau

SEQ ID NO: 1943 - RNA, 22 nt, Homo sapiens
auggcaguggaguuagugauug

SEQ ID NO: 1944 - RNA, 23 nt, Homo sapiens
uaggcagugucauuagcugauug

SEQ ID NO: 1945 - RNA, 23 nt, Homo sapiens
caaucagcuaaugacacugccua

SEQ ID NO: 1946 - RNA, 22 nt, Homo sapiens
cagccacaacuacccugccacu

SEQ ID NO: 1947 - RNA, 22 nt, Homo sapiens
aguggcaggguaguuguggcug

SEQ ID NO: 1948 - RNA, 22 nt, Homo sapiens
aggcaguguauuguuagcuggc

SEQ ID NO: 1949 - RNA, 22 nt, Homo sapiens
gccagcuaacaauacacugccu

SEQ ID NO: 1950 - RNA, 22 nt, Homo sapiens
aaucacuaaccacacggccagg

SEQ ID NO: 1951 - RNA, 22 nt, Homo sapiens
ccuggccgugugguuagugauu

SEQ ID NO: 1952 - RNA, 23 nt, Homo sapiens
aggcaguguaguuagcugauugc

SEQ ID NO: 1953 - RNA, 23 nt, Homo sapiens
gcaaucagcuaacuacacugccu

SEQ ID NO: 1954 - RNA, 20 nt, Homo sapiens
guccgcucggcgguggccca

SEQ ID NO: 1955 - RNA, 20 nt, Homo sapiens
ugggccaccgccgagcggac

SEQ ID NO: 1956 - RNA, 23 nt, Homo sapiens
gaacgccuguucuugccaggugg

SEQ ID NO: 1957 - RNA, 23 nt, Homo sapiens
ccaccuggcaagaacaggcguuc

SEQ ID NO: 1958 - RNA, 19 nt, Homo sapiens
aagugugcagggcacuggu

SEQ ID NO: 1959 - RNA, 19 nt, Homo sapiens
accagugcccugcacacuu

SEQ ID NO: 1960 - RNA, 21 nt, Homo sapiens
aggggugcuaucugugauuga

SEQ ID NO: 1961 - RNA, 21 nt, Homo sapiens
ucaaucacagauagcaccccu

SEQ ID NO: 1962 - RNA, 22 nt, Homo sapiens
cuuucagucagauguuugcugc

SEQ ID NO: 1963 - RNA, 22 nt, Homo sapiens
gcagcaaacaucugacugaaag

SEQ ID NO: 1964 - RNA, 22 nt, Homo sapiens
uguaaacauccccgacuggaag

SEQ ID NO: 1965 - RNA, 22 nt, Homo sapiens
cuuccagucggggauguuuaca

SEQ ID NO: 1966 - RNA, 22 nt, Homo sapiens
uguaaacauccucgacuggaag

SEQ ID NO: 1967 - RNA, 22 nt, Homo sapiens
cuuccagucgaggauguuuaca

SEQ ID NO: 1968 - RNA, 22 nt, Homo sapiens
agaaguaauugcgguuuugcca

SEQ ID NO: 1969 - RNA, 22 nt, Homo sapiens
uggcaaaaccgcaauuacuucu

SEQ ID NO: 1970 - RNA, 22 nt, Homo sapiens
caaaacuggcaauuacuuuugc

SEQ ID NO: 1971 - RNA, 22 nt, Homo sapiens
gcaaaaguaauugccaguuuug

SEQ ID NO: 1972 - RNA, 22 nt, Homo sapiens
aaaaguaauugcgaguuuuacc

SEQ ID NO: 1973 - RNA, 22 nt, Homo sapiens
gguaaaacucgcaauuacuuuu

SEQ ID NO: 1974 - RNA, 22 nt, Homo sapiens
caagaaccucaguugcuuuugu

SEQ ID NO: 1975 - RNA, 22 nt, Homo sapiens
acaaaagcaacugagguucuug

SEQ ID NO: 1976 - RNA, 22 nt, Homo sapiens
caaaaaucucaauuacuuuugc

SEQ ID NO: 1977 - RNA, 22 nt, Homo sapiens
gcaaaaguaauugagauuuuug

SEQ ID NO: 1978 - RNA, 22 nt, Homo sapiens
caaaaaccacaguuucuuuugc

SEQ ID NO: 1979 - RNA, 22 nt, Homo sapiens
gcaaaagaaacugugguuuuug

SEQ ID NO: 1980 - RNA, 22 nt, Homo sapiens
aaaaguaauugugguuuuugcc

SEQ ID NO: 1981 - RNA, 22 nt, Homo sapiens
ggcaaaaaccacaauuacuuuu

SEQ ID NO: 1982 - RNA, 21 nt, Homo sapiens
ugacaacuauggaugagcucu

SEQ ID NO: 1983 - RNA, 21 nt, Homo sapiens
agagcucauccauaguuguca

SEQ ID NO: 1984 - RNA, 21 nt, Homo sapiens
aacaggugacugguuagacaa

SEQ ID NO: 1985 - RNA, 21 nt, Homo sapiens
uugucuaaccagucaccuguu

SEQ ID NO: 1986 - RNA, 21 nt, Homo sapiens
aaaacggugagauuuuguuuu

SEQ ID NO: 1987 - RNA, 21 nt, Homo sapiens
aaaacaaaaucucaccguuuu

SEQ ID NO: 1988 - RNA, 21 nt, Homo sapiens
gcuaguccugacucagccagu

SEQ ID NO: 1989 - RNA, 21 nt, Homo sapiens
acuggcugagucaggacuagc

SEQ ID NO: 1990 - RNA, 21 nt, Homo sapiens
aggguaagcugaaccucugau

SEQ ID NO: 1991 - RNA, 21 nt, Homo sapiens
aucagagguucagcuuacccu

SEQ ID NO: 1992 - RNA, 22 nt, Homo sapiens
auauuaccauuagcucaucuuu

SEQ ID NO: 1993 - RNA, 22 nt, Homo sapiens
aaagaugagcuaaugguaauau

SEQ ID NO: 1994 - RNA, 22 nt, Homo sapiens
gaugagcucauuguaauaugag

SEQ ID NO: 1995 - RNA, 22 nt, Homo sapiens
cucauauuacaaugagcucauc

SEQ ID NO: 1996 - RNA, 19 nt, Homo sapiens
agguugacauacguuuccc

SEQ ID NO: 1997 - RNA, 19 nt, Homo sapiens
gggaaacguaugucaaccu

SEQ ID NO: 1998 - RNA, 20 nt, Homo sapiens
auguauaaauguauacacac

SEQ ID NO: 1999 - RNA, 20 nt, Homo sapiens
guguguauacauuuauacau

SEQ ID NO: 2000 - RNA, 24 nt, Homo sapiens
cugaagugauguguaacugaucag

SEQ ID NO: 2001 - RNA, 24 nt, Homo sapiens
cugaucaguuacacaucacuucag

SEQ ID NO: 2002 - RNA, 22 nt, Homo sapiens
aagauguggaaaaauuggaauc

SEQ ID NO: 2003 - RNA, 22 nt, Homo sapiens
gauuccaauuuuuccacaucuu

SEQ ID NO: 2004 - RNA, 21 nt, Homo sapiens
uagauaaaauauugguaccug

SEQ ID NO: 2005 - RNA, 21 nt, Homo sapiens
cagguaccaauauuuuaucua

SEQ ID NO: 2006 - RNA, 21 nt, Homo sapiens
cuucuugugcucuaggauugu

SEQ ID NO: 2007 - RNA, 21 nt, Homo sapiens
acaauccuagagcacaagaag

SEQ ID NO: 2008 - RNA, 22 nt, Homo sapiens
uaugcauuguauuuuuaggucc

SEQ ID NO: 2009 - RNA, 22 nt, Homo sapiens
ggaccuaaaaauacaaugcaua

SEQ ID NO: 2010 - RNA, 21 nt, Homo sapiens
uuuccauaggugaugagucac

SEQ ID NO: 2011 - RNA, 21 nt, Homo sapiens
gugacucaucaccuauggaaa

SEQ ID NO: 2012 - RNA, 21 nt, Homo sapiens
uuggccacaauggguuagaac

SEQ ID NO: 2013 - RNA, 21 nt, Homo sapiens
guucuaacccauuguggccaa

SEQ ID NO: 2014 - RNA, 22 nt, Homo sapiens
ugugucacucgaugaccacugu

SEQ ID NO: 2015 - RNA, 22 nt, Homo sapiens
acaguggucaucgagugacaca

SEQ ID NO: 2016 - RNA, 23 nt, Homo sapiens
acuuacagacaagagccuugcuc

SEQ ID NO: 2017 - RNA, 23 nt, Homo sapiens
gagcaaggcucuugucuguaagu

SEQ ID NO: 2018 - RNA, 19 nt, Homo sapiens
aggcugcggaauucaggac

SEQ ID NO: 2019 - RNA, 19 nt, Homo sapiens
guccugaauuccgcagccu

SEQ ID NO: 2020 - RNA, 23 nt, Homo sapiens
uaaaucccauggugccuucuccu

SEQ ID NO: 2021 - RNA, 23 nt, Homo sapiens
aggagaaggcaccaugggauuua

SEQ ID NO: 2022 - RNA, 21 nt, Homo sapiens
aaacuacugaaaaucaaagau

SEQ ID NO: 2023 - RNA, 21 nt, Homo sapiens
aucuuugauuuucaguaguuu

SEQ ID NO: 2024 - RNA, 21 nt, Homo sapiens
guucaaauccagaucuauaac

SEQ ID NO: 2025 - RNA, 21 nt, Homo sapiens
guuauagaucuggauuugaac

SEQ ID NO: 2026 - RNA, 19 nt, Homo sapiens
ccgguuccagucccuggag

SEQ ID NO: 2027 - RNA, 19 nt, Homo sapiens
cuccagggacuggaaccgg

SEQ ID NO: 2028 - RNA, 20 nt, Homo sapiens
aggguguuucucucaucucu

SEQ ID NO: 2029 - RNA, 20 nt, Homo sapiens
agagaugagagaaacacccu

SEQ ID NO: 2030 - RNA, 24 nt, Homo sapiens
gaccuggacauguuugugcccagu

SEQ ID NO: 2031 - RNA, 24 nt, Homo sapiens
acugggcacaaacauguccagguc

SEQ ID NO: 2032 - RNA, 20 nt, Homo sapiens
auggagauagauauagaaau

SEQ ID NO: 2033 - RNA, 20 nt, Homo sapiens
auuucuauaucuaucuccau

SEQ ID NO: 2034 - RNA, 19 nt, Homo sapiens
agcugucugaaaaugucuu

SEQ ID NO: 2035 - RNA, 19 nt, Homo sapiens
aagacauuuucagacagcu

SEQ ID NO: 2036 - RNA, 21 nt, Homo sapiens
agaccuggcccagaccucagc

SEQ ID NO: 2037 - RNA, 21 nt, Homo sapiens
gcugaggucugggccaggucu

SEQ ID NO: 2038 - RNA, 23 nt, Homo sapiens
acuugggcacugaaacaaugucc

SEQ ID NO: 2039 - RNA, 23 nt, Homo sapiens
ggacauuguuucagugcccaagu

SEQ ID NO: 2040 - RNA, 24 nt, Homo sapiens
acugggggcuuucgggcucugcgu

SEQ ID NO: 2041 - RNA, 24 nt, Homo sapiens
acgcagagcccgaaagcccccagu

SEQ ID NO: 2042 - RNA, 23 nt, Homo sapiens
aucgcugcgguugcgagcgcugu

SEQ ID NO: 2043 - RNA, 23 nt, Homo sapiens
acagcgcucgcaaccgcagcgau

SEQ ID NO: 2044 - RNA, 22 nt, Homo sapiens
gucccucuccaaaugugucuug

SEQ ID NO: 2045 - RNA, 22 nt, Homo sapiens
caagacacauuuggagagggac

SEQ ID NO: 2046 - RNA, 22 nt, Homo sapiens
acuuguaugcuagcucagguag

SEQ ID NO: 2047 - RNA, 22 nt, Homo sapiens
cuaccugagcuagcauacaagu

SEQ ID NO: 2048 - RNA, 22 nt, Homo sapiens
uuuaggauaagcuugacuuuug

SEQ ID NO: 2049 - RNA, 22 nt, Homo sapiens
caaaagucaagcuuauccuaaa

SEQ ID NO: 2050 - RNA, 21 nt, Homo sapiens
guguugaaacaaucucuacug

SEQ ID NO: 2051 - RNA, 21 nt, Homo sapiens
caguagagauuguuucaacac

SEQ ID NO: 2052 - RNA, 22 nt, Homo sapiens
uaugucugcugaccaucaccuu

SEQ ID NO: 2053 - RNA, 22 nt, Homo sapiens
aaggugauggucagcagacaua

SEQ ID NO: 2054 - RNA, 22 nt, Homo sapiens
ggggcuggggccggggccgagc

SEQ ID NO: 2055 - RNA, 22 nt, Homo sapiens
gcucggccccggccccagcccc

SEQ ID NO: 2056 - RNA, 22 nt, Homo sapiens
ugagguaguagguuguaugguu

SEQ ID NO: 2057 - RNA, 22 nt, Homo sapiens
aaccauacaaccuacuaccuca

SEQ ID NO: 2058 - RNA, 21 nt, Homo sapiens
gugucuuuugcucugcaguca

SEQ ID NO: 2059 - RNA, 21 nt, Homo sapiens
ugacugcagagcaaaagacac

SEQ ID NO: 2060 - RNA, 24 nt, Homo sapiens
ccccgggaacgucgagacuggagc

SEQ ID NO: 2061 - RNA, 24 nt, Homo sapiens
gcuccagucucgacguucccgggg

SEQ ID NO: 2062 - RNA, 22 nt, Homo sapiens
acccgucccguucguccccgga

SEQ ID NO: 2063 - RNA, 22 nt, Homo sapiens
uccggggacgaacgggacgggu

SEQ ID NO: 2064 - RNA, 22 nt, Homo sapiens
augggugaauuuguagaaggau

SEQ ID NO: 2065 - RNA, 22 nt, Homo sapiens
auccuucuacaaauucacccau

SEQ ID NO: 2066 - RNA, 22 nt, Homo sapiens
cuggacugagccgugcuacugg

SEQ ID NO: 2067 - RNA, 22 nt, Homo sapiens
ccaguagcacggcucaguccag

SEQ ID NO: 2068 - RNA, 22 nt, Homo sapiens
cuggacugagccaugcuacugg

SEQ ID NO: 2069 - RNA, 22 nt, Homo sapiens
ccaguagcauggcucaguccag

SEQ ID NO: 2070 - RNA, 22 nt, Homo sapiens
uacguagauauauauguauuuu

SEQ ID NO: 2071 - RNA, 22 nt, Homo sapiens
aaaauacauauauaucuacgua

SEQ ID NO: 2072 - RNA, 24 nt, Homo sapiens
aaauauauauauauauguacguau

SEQ ID NO: 2073 - RNA, 22 nt, Homo sapiens
gcucuuuucauuaauguagaca

SEQ ID NO: 2074 - RNA, 22 nt, Homo sapiens
ugcuggaucagugguucgaguc

SEQ ID NO: 2075 - RNA, 22 nt, Homo sapiens
gacucgaaccacugauccagca

SEQ ID NO: 2076 - RNA, 19 nt, Homo sapiens
uggauuuuuggaucaggga

SEQ ID NO: 2077 - RNA, 19 nt, Homo sapiens
ucccugauccaaaaaucca

SEQ ID NO: 2078 - RNA, 22 nt, Homo sapiens
uuauaaagcaaugagacugauu

SEQ ID NO: 2079 - RNA, 22 nt, Homo sapiens
aaucagucucauugcuuuauaa

SEQ ID NO: 2080 - RNA, 23 nt, Homo sapiens
uagugcaauauugcuuauagggu

SEQ ID NO: 2081 - RNA, 23 nt, Homo sapiens
acccuauaagcaauauugcacua

SEQ ID NO: 2082 - RNA, 22 nt, Homo sapiens
acccuaucaauauugucucugc

SEQ ID NO: 2083 - RNA, 22 nt, Homo sapiens
gcagagacaauauugauagggu

SEQ ID NO: 2084 - RNA, 17 nt, Homo sapiens
uaagugcuuccaugcuu

SEQ ID NO: 2085 - RNA, 17 nt, Homo sapiens
aagcauggaagcacuua

SEQ ID NO: 2086 - RNA, 22 nt, Homo sapiens
ucggccugaccacccaccccac

SEQ ID NO: 2087 - RNA, 22 nt, Homo sapiens
gugggguggguggucaggccga

SEQ ID NO: 2088 - RNA, 21 nt, Homo sapiens
ggggggggggggggggggccg

SEQ ID NO: 2089 - RNA, 21 nt, Homo sapiens
cggcccccccccccccccccc

SEQ ID NO: 2090 - RNA, 22 nt, Homo sapiens
cuauacgaccugcugccuuucu

SEQ ID NO: 2091 - RNA, 22 nt, Homo sapiens
agaaaggcagcaggucguauag

SEQ ID NO: 2092 - RNA, 22 nt, Homo sapiens
agagguaguagguugcauaguu

SEQ ID NO: 2093 - RNA, 22 nt, Homo sapiens
aacuaugcaaccuacuaccucu

SEQ ID NO: 2094 - RNA, 22 nt, Homo sapiens
ccgcacuguggguacuugcugc

SEQ ID NO: 2095 - RNA, 22 nt, Homo sapiens
gcagcaaguacccacagugcgg

SEQ ID NO: 2096 - RNA, 21 nt, Homo sapiens
uaaagugcugacagugcagau

SEQ ID NO: 2097 - RNA, 21 nt, Homo sapiens
aucugcacugucagcacuuua

SEQ ID NO: 2098 - RNA, 22 nt, Homo sapiens
aacuggaucaauuauaggagug

SEQ ID NO: 2099 - RNA, 22 nt, Homo sapiens
cacuccuauaauugauccaguu

SEQ ID NO: 2100 - RNA, 26 nt, Homo sapiens
aaguaguugguuuguaugagaugguu

SEQ ID NO: 2101 - RNA, 26 nt, Homo sapiens
aaccaucucauacaaaccaacuacuu

SEQ ID NO: 2102 - RNA, 21 nt, Homo sapiens
aagugaucuaaaggccuacau

SEQ ID NO: 2103 - RNA, 21 nt, Homo sapiens
auguaggccuuuagaucacuu

SEQ ID NO: 2104 - RNA, 22 nt, Homo sapiens
ucagaugaucuaaaggccuaua

SEQ ID NO: 2105 - RNA, 22 nt, Homo sapiens
uauaggccuuuagaucaucuga

SEQ ID NO: 2106 - RNA, 21 nt, Homo sapiens
uaggccuuuagaucacuuaaa

SEQ ID NO: 2107 - RNA, 21 nt, Homo sapiens
uuuaagugaucuaaaggccua

SEQ ID NO: 2108 - RNA, 21 nt, Homo sapiens
acucuagcugccaaaggcgcu

SEQ ID NO: 2109 - RNA, 21 nt, Homo sapiens
agcgccuuuggcagcuagagu

SEQ ID NO: 2110 - RNA, 22 nt, Homo sapiens
agaaggaaauugaauucauuua

SEQ ID NO: 2111 - RNA, 22 nt, Homo sapiens
uaaaugaauucaauuuccuucu

SEQ ID NO: 2112 - RNA, 21 nt, Homo sapiens
agagaagaagaucagccugca

SEQ ID NO: 2113 - RNA, 21 nt, Homo sapiens
ugcaggcugaucuucuucucu

SEQ ID NO: 2114 - RNA, 24 nt, Homo sapiens
agccuggaagcuggagccugcagu

SEQ ID NO: 2115 - RNA, 24 nt, Homo sapiens
acugcaggcuccagcuuccaggcu

SEQ ID NO: 2116 - RNA, 23 nt, Homo sapiens
aggaugagcaaagaaaguagauu

SEQ ID NO: 2117 - RNA, 23 nt, Homo sapiens
aaucuacuuucuuugcucauccu

SEQ ID NO: 2118 - RNA, 22 nt, Homo sapiens
aaccacuuucuuugcucaucca

SEQ ID NO: 2119 - RNA, 22 nt, Homo sapiens
uggaugagcaaagaaagugguu

SEQ ID NO: 2120 - RNA, 22 nt, Homo sapiens
cggaugagcaaagaaagugguu

SEQ ID NO: 2121 - RNA, 22 nt, Homo sapiens
aaccacuuucuuugcucauccg

SEQ ID NO: 2122 - RNA, 22 nt, Homo sapiens
aggcauugacuucucacuagcu

SEQ ID NO: 2123 - RNA, 22 nt, Homo sapiens
agcuagugagaagucaaugccu

SEQ ID NO: 2124 - RNA, 21 nt, Homo sapiens
agugaaugauggguucugacc

SEQ ID NO: 2125 - RNA, 21 nt, Homo sapiens
ggucagaacccaucauucacu

SEQ ID NO: 2126 - RNA, 21 nt, Homo sapiens
aguuaggauuaggucguggaa

SEQ ID NO: 2127 - RNA, 21 nt, Homo sapiens
uuccacgaccuaauccuaacu

SEQ ID NO: 2128 - RNA, 19 nt, Homo sapiens
auggauaaggcuuuggcuu

SEQ ID NO: 2129 - RNA, 19 nt, Homo sapiens
aagccaaagccuuauccau

SEQ ID NO: 2130 - RNA, 22 nt, Homo sapiens
augguacccuggcauacugagu

SEQ ID NO: 2131 - RNA, 22 nt, Homo sapiens
acucaguaugccaggguaccau

SEQ ID NO: 2132 - RNA, 23 nt, Homo sapiens
caagucuuauuugagcaccuguu

SEQ ID NO: 2133 - RNA, 23 nt, Homo sapiens
aacaggugcucaaauaagacuug

SEQ ID NO: 2134 - RNA, 22 nt, Homo sapiens
caggauguggucaaguguuguu

SEQ ID NO: 2135 - RNA, 22 nt, Homo sapiens
aacaacacuugaccacauccug

SEQ ID NO: 2136 - RNA, 23 nt, Homo sapiens
ccucagggcuguagaacagggcu

SEQ ID NO: 2137 - RNA, 23 nt, Homo sapiens
agcccuguucuacagcccugagg

SEQ ID NO: 2138 - RNA, 21 nt, Homo sapiens
ccuguugaaguguaaucccca

SEQ ID NO: 2139 - RNA, 21 nt, Homo sapiens
uggggauuacacuucaacagg

SEQ ID NO: 2140 - RNA, 18 nt, Homo sapiens
cgggcguggugguggggg

SEQ ID NO: 2141 - RNA, 18 nt, Homo sapiens
cccccaccaccacgcccg

SEQ ID NO: 2142 - RNA, 20 nt, Homo sapiens
cgggcgugguggugggggug

SEQ ID NO: 2143 - RNA, 20 nt, Homo sapiens
cacccccaccaccacgcccg

SEQ ID NO: 2144 - RNA, 23 nt, Homo sapiens
cuggagauauggaagagcugugu

SEQ ID NO: 2145 - RNA, 23 nt, Homo sapiens
acacagcucuuccauaucuccag

SEQ ID NO: 2146 - RNA, 26 nt, Homo sapiens
gaugaugauggcagcaaauucugaaa

SEQ ID NO: 2147 - RNA, 26 nt, Homo sapiens
uuucagaauuugcugccaucaucauc

SEQ ID NO: 2148 - RNA, 25 nt, Homo sapiens
gggcgacaaagcaagacucuuucuu

SEQ ID NO: 2149 - RNA, 25 nt, Homo sapiens
aagaaagagucuugcuuugucgccc

SEQ ID NO: 2150 - RNA, 25 nt, Homo sapiens
gaacccaugagguugaggcugcagu

SEQ ID NO: 2151 - RNA, 25 nt, Homo sapiens
acugcagccucaaccucauggguuc

SEQ ID NO: 2152 - RNA, 17 nt, Homo sapiens
gugggggagaggcuguc

SEQ ID NO: 2153 - RNA, 17 nt, Homo sapiens
gacagccucucccccac

SEQ ID NO: 2154 - RNA, 20 nt, Homo sapiens
uaaagagcccuguggagaca

SEQ ID NO: 2155 - RNA, 20 nt, Homo sapiens
ugucuccacagggcucuuua

SEQ ID NO: 2156 - RNA, 22 nt, Homo sapiens
uaguacugugcauaucaucuau

SEQ ID NO: 2157 - RNA, 22 nt, Homo sapiens
auagaugauaugcacaguacua

SEQ ID NO: 2158 - RNA, 20 nt, Homo sapiens
ucguuugccuuuuucugcuu

SEQ ID NO: 2159 - RNA, 20 nt, Homo sapiens
aagcagaaaaaggcaaacga

SEQ ID NO: 2160 - RNA, 21 nt, Homo sapiens
uggacugcccugaucuggaga

SEQ ID NO: 2161 - RNA, 21 nt, Homo sapiens
ucuccagaucagggcagucca

SEQ ID NO: 2162 - RNA, 22 nt, Homo sapiens
uggguggucuggagauuugugc

SEQ ID NO: 2163 - RNA, 22 nt, Homo sapiens
gcacaaaucuccagaccaccca

SEQ ID NO: 2164 - RNA, 22 nt, Homo sapiens
ugugagguuggcauuguugucu

SEQ ID NO: 2165 - RNA, 22 nt, Homo sapiens
agacaacaaugccaaccucaca

SEQ ID NO: 2166 - RNA, 17 nt, Homo sapiens
uucaaguaauucaggug

SEQ ID NO: 2167 - RNA, 17 nt, Homo sapiens
caccugaauuacuugaa

SEQ ID NO: 2168 - RNA, 22 nt, Homo sapiens
uucuggaauucugugugaggga

SEQ ID NO: 2169 - RNA, 22 nt, Homo sapiens
ucccucacacagaauuccagaa

SEQ ID NO: 2170 - RNA, 22 nt, Homo sapiens
uuuucaacucuaaugggagaga

SEQ ID NO: 2171 - RNA, 22 nt, Homo sapiens
ucucucccauuagaguugaaaa

SEQ ID NO: 2172 - RNA, 18 nt, Homo sapiens
acguuggcucugguggug

SEQ ID NO: 2173 - RNA, 18 nt, Homo sapiens
caccaccagagccaacgu

SEQ ID NO: 2174 - RNA, 22 nt, Homo sapiens
ccaccuccccugcaaacgucca

SEQ ID NO: 2175 - RNA, 22 nt, Homo sapiens
uggacguuugcaggggaggugg

SEQ ID NO: 2176 - RNA, 22 nt, Homo sapiens
acucggcguggcgucggucgug

SEQ ID NO: 2177 - RNA, 22 nt, Homo sapiens
cacgaccgacgccacgccgagu

SEQ ID NO: 2178 - RNA, 21 nt, Homo sapiens
ucgaccggaccucgaccggcu

SEQ ID NO: 2179 - RNA, 21 nt, Homo sapiens
agccggucgagguccggucga

SEQ ID NO: 2180 - RNA, 22 nt, Homo sapiens
ugagaacugaauuccauaggcu

SEQ ID NO: 2181 - RNA, 22 nt, Homo sapiens
agccuauggaauucaguucuca

SEQ ID NO: 2182 - RNA, 22 nt, Homo sapiens
aaucauacacgguugaccuauu

SEQ ID NO: 2183 - RNA, 22 nt, Homo sapiens
aauaggucaaccguguaugauu

SEQ ID NO: 2184 - RNA, 22 nt, Homo sapiens
uagguuauccguguugccuucg

SEQ ID NO: 2185 - RNA, 22 nt, Homo sapiens
cgaaggcaacacggauaaccua

SEQ ID NO: 2186 - RNA, 21 nt, Homo sapiens
ccaguccugugccugccgccu

SEQ ID NO: 2187 - RNA, 21 nt, Homo sapiens
aggcggcaggcacaggacugg

SEQ ID NO: 2188 - RNA, 22 nt, Homo sapiens
ucugcccccuccgcugcugcca

SEQ ID NO: 2189 - RNA, 22 nt, Homo sapiens
uggcagcagcggagggggcaga

SEQ ID NO: 2190 - RNA, 22 nt, Homo sapiens
ggaggggucccgcacugggagg

SEQ ID NO: 2191 - RNA, 22 nt, Homo sapiens
ccucccagugcgggaccccucc

SEQ ID NO: 2192 - RNA, 22 nt, Homo sapiens
cccugugcccggcccacuucug

SEQ ID NO: 2193 - RNA, 22 nt, Homo sapiens
cagaagugggccgggcacaggg

SEQ ID NO: 2194 - RNA, 20 nt, Homo sapiens
ccccagggcgacgcggcggg

SEQ ID NO: 2195 - RNA, 20 nt, Homo sapiens
cccgccgcgucgcccugggg

SEQ ID NO: 2196 - RNA, 22 nt, Homo sapiens
accuugccuugcugcccgggcc

SEQ ID NO: 2197 - RNA, 22 nt, Homo sapiens
ggcccgggcagcaaggcaaggu

SEQ ID NO: 2198 - RNA, 21 nt, Homo sapiens
auuugugcuuggcucugucac

SEQ ID NO: 2199 - RNA, 21 nt, Homo sapiens
gugacagagccaagcacaaau

SEQ ID NO: 2200 - RNA, 22 nt, Homo sapiens
auuguccuugcuguuuggagau

SEQ ID NO: 2201 - RNA, 22 nt, Homo sapiens
aucuccaaacagcaaggacaau

SEQ ID NO: 2202 - RNA, 21 nt, Homo sapiens
auccccagauacaauggacaa

SEQ ID NO: 2203 - RNA, 21 nt, Homo sapiens
uuguccauuguaucuggggau

SEQ ID NO: 2204 - RNA, 23 nt, Homo sapiens
cagugcaauaguauugucaaagc

SEQ ID NO: 2205 - RNA, 23 nt, Homo sapiens
gcuuugacaauacuauugcacug

SEQ ID NO: 2206 - RNA, 22 nt, Homo sapiens
gcucugacuuuauugcacuacu

SEQ ID NO: 2207 - RNA, 22 nt, Homo sapiens
aguagugcaauaaagucagagc

SEQ ID NO: 2208 - RNA, 23 nt, Homo sapiens
uaagugcuuccauguuuuaguag

SEQ ID NO: 2209 - RNA, 23 nt, Homo sapiens
cuacuaaaacauggaagcacuua

SEQ ID NO: 2210 - RNA, 22 nt, Homo sapiens
acuuuaacauggaagugcuuuc

SEQ ID NO: 2211 - RNA, 22 nt, Homo sapiens
gaaagcacuuccauguuaaagu

SEQ ID NO: 2212 - RNA, 23 nt, Homo sapiens
uaagugcuuccauguuucagugg

SEQ ID NO: 2213 - RNA, 23 nt, Homo sapiens
ccacugaaacauggaagcacuua

SEQ ID NO: 2214 - RNA, 22 nt, Homo sapiens
uuuaacauggggguaccugcug

SEQ ID NO: 2215 - RNA, 22 nt, Homo sapiens
cagcagguacccccauguuaaa

SEQ ID NO: 2216 - RNA, 23 nt, Homo sapiens
uaagugcuuccauguuugagugu

SEQ ID NO: 2217 - RNA, 23 nt, Homo sapiens
acacucaaacauggaagcacuua

SEQ ID NO: 2218 - RNA, 22 nt, Homo sapiens
acuuuaacauggaggcacuugc

SEQ ID NO: 2219 - RNA, 22 nt, Homo sapiens
gcaagugccuccauguuaaagu

SEQ ID NO: 2220 - RNA, 22 nt, Homo sapiens
aauugcacuuuagcaaugguga

SEQ ID NO: 2221 - RNA, 22 nt, Homo sapiens
ucaccauugcuaaagugcaauu

SEQ ID NO: 2222 - RNA, 22 nt, Homo sapiens
acuguugcuaauaugcaacucu

SEQ ID NO: 2223 - RNA, 22 nt, Homo sapiens
agaguugcauauuagcaacagu

SEQ ID NO: 2224 - RNA, 23 nt, Homo sapiens
agcucggucugaggccccucagu

SEQ ID NO: 2225 - RNA, 23 nt, Homo sapiens
acugaggggccucagaccgagcu

SEQ ID NO: 2226 - RNA, 22 nt, Homo sapiens
aaaaacugagacuacuuuugca

SEQ ID NO: 2227 - RNA, 22 nt, Homo sapiens
ugcaaaaguagucucaguuuuu

SEQ ID NO: 2228 - RNA, 19 nt, Homo sapiens
aaaaacuguaauuacuuuu

SEQ ID NO: 2229 - RNA, 19 nt, Homo sapiens
aaaaguaauuacaguuuuu

SEQ ID NO: 2230 - RNA, 22 nt, Homo sapiens
aaaacuguaauuacuuuuguac

SEQ ID NO: 2231 - RNA, 22 nt, Homo sapiens
guacaaaaguaauuacaguuuu

SEQ ID NO: 2232 - RNA, 23 nt, Homo sapiens
ugcaaaaguaauugcaguuuuug

SEQ ID NO: 2233 - RNA, 23 nt, Homo sapiens
caaaaacugcaauuacuuuugca

SEQ ID NO: 2234 - RNA, 23 nt, Homo sapiens
caaaaaccgcaauuacuuuugca

SEQ ID NO: 2235 - RNA, 23 nt, Homo sapiens
ugcaaaaguaauugcgguuuuug

SEQ ID NO: 2236 - RNA, 22 nt, Homo sapiens
aaaaguaaucgcgguuuuuguc

SEQ ID NO: 2237 - RNA, 22 nt, Homo sapiens
gacaaaaaccgcgauuacuuuu

SEQ ID NO: 2238 - RNA, 22 nt, Homo sapiens
aaaaguacuugcggauuuugcu

SEQ ID NO: 2239 - RNA, 22 nt, Homo sapiens
agcaaaauccgcaaguacuuuu

SEQ ID NO: 2240 - RNA, 22 nt, Homo sapiens
aaaaguauuugcggguuuuguc

SEQ ID NO: 2241 - RNA, 22 nt, Homo sapiens
gacaaaacccgcaaauacuuuu

SEQ ID NO: 2242 - RNA, 21 nt, Homo sapiens
caaagguauuugugguuuuug

SEQ ID NO: 2243 - RNA, 21 nt, Homo sapiens
caaaaaccacaaauaccuuug

SEQ ID NO: 2244 - RNA, 22 nt, Homo sapiens
ccaaaacugcaguuacuuuugc

SEQ ID NO: 2245 - RNA, 22 nt, Homo sapiens
gcaaaaguaacugcaguuuugg

SEQ ID NO: 2246 - RNA, 22 nt, Homo sapiens
aaaaguaauugcgguuuuugcc

SEQ ID NO: 2247 - RNA, 22 nt, Homo sapiens
ggcaaaaaccgcaauuacuuuu

SEQ ID NO: 2248 - RNA, 22 nt, Homo sapiens
uagcaaaaacugcaguuacuuu

SEQ ID NO: 2249 - RNA, 22 nt, Homo sapiens
aaaguaacugcaguuuuugcua

SEQ ID NO: 2250 - RNA, 20 nt, Homo sapiens
ggagguugggaagggcagag

SEQ ID NO: 2251 - RNA, 20 nt, Homo sapiens
cucugcccuucccaaccucc

SEQ ID NO: 2252 - RNA, 18 nt, Homo sapiens
ugaggcgggggggcgagc

SEQ ID NO: 2253 - RNA, 18 nt, Homo sapiens
gcucgcccccccgccuca

SEQ ID NO: 2254 - RNA, 20 nt, Homo sapiens
agagaugaagcgggggggcg

SEQ ID NO: 2255 - RNA, 20 nt, Homo sapiens
cgcccccccgcuucaucucu

SEQ ID NO: 2256 - RNA, 24 nt, Homo sapiens
ggaggccgggguggggcggggcgg

SEQ ID NO: 2257 - RNA, 24 nt, Homo sapiens
ccgccccgccccaccccggccucc

SEQ ID NO: 2258 - RNA, 19 nt, Homo sapiens
ggggagcgaggggcggggc

SEQ ID NO: 2259 - RNA, 19 nt, Homo sapiens
gccccgccccucgcucccc

SEQ ID NO: 2260 - RNA, 23 nt, Homo sapiens
uauucauuuauccccagccuaca

SEQ ID NO: 2261 - RNA, 23 nt, Homo sapiens
uguaggcuggggauaaaugaaua

SEQ ID NO: 2262 - RNA, 24 nt, Homo sapiens
acuggcuagggaaaaugauuggau

SEQ ID NO: 2263 - RNA, 24 nt, Homo sapiens
auccaaucauuuucccuagccagu

SEQ ID NO: 2264 - RNA, 22 nt, Homo sapiens
uucauuugccucccagccuaca

SEQ ID NO: 2265 - RNA, 22 nt, Homo sapiens
uguaggcugggaggcaaaugaa

SEQ ID NO: 2266 - RNA, 24 nt, Homo sapiens
ugggcuaagggagaugauugggua

SEQ ID NO: 2267 - RNA, 24 nt, Homo sapiens
uacccaaucaucucccuuagccca

SEQ ID NO: 2268 - RNA, 22 nt, Homo sapiens
acuccagccccacagccucagc

SEQ ID NO: 2269 - RNA, 22 nt, Homo sapiens
gcugaggcuguggggcuggagu

SEQ ID NO: 2270 - RNA, 22 nt, Homo sapiens
aggaggaauuggugcuggucuu

SEQ ID NO: 2271 - RNA, 22 nt, Homo sapiens
aagaccagcaccaauuccuccu

SEQ ID NO: 2272 - RNA, 22 nt, Homo sapiens
aggcagcgggguguaguggaua

SEQ ID NO: 2273 - RNA, 22 nt, Homo sapiens
uauccacuacaccccgcugccu

SEQ ID NO: 2274 - RNA, 22 nt, Homo sapiens
uccauuacacuacccugccucu

SEQ ID NO: 2275 - RNA, 22 nt, Homo sapiens
agaggcaggguaguguaaugga

SEQ ID NO: 2276 - RNA, 22 nt, Homo sapiens
acugcugagcuagcacuucccg

SEQ ID NO: 2277 - RNA, 22 nt, Homo sapiens
cgggaagugcuagcucagcagu

SEQ ID NO: 2278 - RNA, 23 nt, Homo sapiens
caaagugcuguucgugcagguag

SEQ ID NO: 2279 - RNA, 23 nt, Homo sapiens
cuaccugcacgaacagcacuuug

SEQ ID NO: 2280 - RNA, 23 nt, Homo sapiens
cacccggcugugugcacaugugc

SEQ ID NO: 2281 - RNA, 23 nt, Homo sapiens
gcacaugugcacacagccgggug

SEQ ID NO: 2282 - RNA, 23 nt, Homo sapiens
agcuucuuuacagugcugccuug

SEQ ID NO: 2283 - RNA, 23 nt, Homo sapiens
caaggcagcacuguaaagaagcu

SEQ ID NO: 2284 - RNA, 23 nt, Homo sapiens
agcagcauuguacagggcuauga

SEQ ID NO: 2285 - RNA, 23 nt, Homo sapiens
ucauagcccuguacaaugcugcu

SEQ ID NO: 2286 - RNA, 17 nt, Homo sapiens
ccugagaaaagggccaa

SEQ ID NO: 2287 - RNA, 17 nt, Homo sapiens
uuggcccuuuucucagg

SEQ ID NO: 2288 - RNA, 19 nt, Homo sapiens
ggccacugagucagcacca

SEQ ID NO: 2289 - RNA, 19 nt, Homo sapiens
uggugcugacucaguggcc

SEQ ID NO: 2290 - RNA, 18 nt, Homo sapiens
agggcauguccagggggu

SEQ ID NO: 2291 - RNA, 18 nt, Homo sapiens
acccccuggacaugcccu

SEQ ID NO: 2292 - RNA, 23 nt, Homo sapiens
gccuggagcuacuccaccaucuc

SEQ ID NO: 2293 - RNA, 23 nt, Homo sapiens
gagaugguggaguagcuccaggc

SEQ ID NO: 2294 - RNA, 17 nt, Homo sapiens
caguguucagagaugga

SEQ ID NO: 2295 - RNA, 17 nt, Homo sapiens
uccaucucugaacacug

SEQ ID NO: 2296 - RNA, 18 nt, Homo sapiens
aucugaccugaugaaggu

SEQ ID NO: 2297 - RNA, 18 nt, Homo sapiens
accuucaucaggucagau

SEQ ID NO: 2298 - RNA, 18 nt, Homo sapiens
ccagagguggggacugag

SEQ ID NO: 2299 - RNA, 18 nt, Homo sapiens
cucaguccccaccucugg

SEQ ID NO: 2300 - RNA, 17 nt, Homo sapiens
ccccgccaccgccuugg

SEQ ID NO: 2301 - RNA, 17 nt, Homo sapiens
ccaaggcgguggcgggg

SEQ ID NO: 2302 - RNA, 22 nt, Homo sapiens
caguugggucuaggggucagga

SEQ ID NO: 2303 - RNA, 22 nt, Homo sapiens
uccugaccccuagacccaacug

SEQ ID NO: 2304 - RNA, 19 nt, Homo sapiens
cuuggggcauggaguccca

SEQ ID NO: 2305 - RNA, 19 nt, Homo sapiens
ugggacuccaugccccaag

SEQ ID NO: 2306 - RNA, 16 nt, Homo sapiens
aggaaacagggaccca

SEQ ID NO: 2307 - RNA, 16 nt, Homo sapiens
ugggucccuguuuccu

SEQ ID NO: 2308 - RNA, 17 nt, Homo sapiens
gacauucagacuaccug

SEQ ID NO: 2309 - RNA, 17 nt, Homo sapiens
cagguagucugaauguc

SEQ ID NO: 2310 - RNA, 18 nt, Homo sapiens
auucuaagugccuuggcc

SEQ ID NO: 2311 - RNA, 18 nt, Homo sapiens
ggccaaggcacuuagaau

SEQ ID NO: 2312 - RNA, 17 nt, Homo sapiens
acucagucauggucauu

SEQ ID NO: 2313 - RNA, 17 nt, Homo sapiens
aaugaccaugacugagu

SEQ ID NO: 2314 - RNA, 19 nt, Homo sapiens
cugugggcucagcucuggg

SEQ ID NO: 2315 - RNA, 19 nt, Homo sapiens
cccagagcugagcccacag

SEQ ID NO: 2316 - RNA, 16 nt, Homo sapiens
cuaggaggccuuggcc

SEQ ID NO: 2317 - RNA, 16 nt, Homo sapiens
ggccaaggccuccuag

SEQ ID NO: 2318 - RNA, 16 nt, Homo sapiens
uccagcucgguggcac

SEQ ID NO: 2319 - RNA, 16 nt, Homo sapiens
gugccaccgagcugga

SEQ ID NO: 2320 - RNA, 21 nt, Homo sapiens
ggcuccuccucucaggaugug

SEQ ID NO: 2321 - RNA, 21 nt, Homo sapiens
cacauccugagaggaggagcc

SEQ ID NO: 2322 - RNA, 21 nt, Homo sapiens
gcaggcacagacagcccuggc

SEQ ID NO: 2323 - RNA, 21 nt, Homo sapiens
gccagggcugucugugccugc

SEQ ID NO: 2324 - RNA, 20 nt, Homo sapiens
ucagggagucaggggagggc

SEQ ID NO: 2325 - RNA, 20 nt, Homo sapiens
gcccuccccugacucccuga

SEQ ID NO: 2326 - RNA, 19 nt, Homo sapiens
gggggaagaaaaggugggg

SEQ ID NO: 2327 - RNA, 19 nt, Homo sapiens
ccccaccuuuucuuccccc

SEQ ID NO: 2328 - RNA, 18 nt, Homo sapiens
cauucaacuagugauugu

SEQ ID NO: 2329 - RNA, 18 nt, Homo sapiens
acaaucacuaguugaaug

SEQ ID NO: 2330 - RNA, 18 nt, Homo sapiens
cagcagucccucccccug

SEQ ID NO: 2331 - RNA, 18 nt, Homo sapiens
cagggggagggacugcug

SEQ ID NO: 2332 - RNA, 17 nt, Homo sapiens
ccaauuaccacuucuuu

SEQ ID NO: 2333 - RNA, 17 nt, Homo sapiens
aaagaagugguaauugg

SEQ ID NO: 2334 - RNA, 17 nt, Homo sapiens
cucagugacucaugugc

SEQ ID NO: 2335 - RNA, 17 nt, Homo sapiens
gcacaugagucacugag

SEQ ID NO: 2336 - RNA, 21 nt, Homo sapiens
gcaguucugagcacaguacac

SEQ ID NO: 2337 - RNA, 21 nt, Homo sapiens
guguacugugcucagaacugc

SEQ ID NO: 2338 - RNA, 18 nt, Homo sapiens
cuaggggguuugcccuug

SEQ ID NO: 2339 - RNA, 18 nt, Homo sapiens
caagggcaaacccccuag

SEQ ID NO: 2340 - RNA, 16 nt, Homo sapiens
cucuccucccggcuuc

SEQ ID NO: 2341 - RNA, 16 nt, Homo sapiens
gaagccgggaggagag

SEQ ID NO: 2342 - RNA, 21 nt, Homo sapiens
gaguguaguucugagcagagc

SEQ ID NO: 2343 - RNA, 21 nt, Homo sapiens
gcucugcucagaacuacacuc

SEQ ID NO: 2344 - RNA, 18 nt, Homo sapiens
gggucccggggagggggg

SEQ ID NO: 2345 - RNA, 18 nt, Homo sapiens
ccccccuccccgggaccc

SEQ ID NO: 2346 - RNA, 18 nt, Homo sapiens
uaaaauuugcauccagga

SEQ ID NO: 2347 - RNA, 18 nt, Homo sapiens
uccuggaugcaaauuuua

SEQ ID NO: 2348 - RNA, 17 nt, Homo sapiens
uggggcucagcgaguuu

SEQ ID NO: 2349 - RNA, 17 nt, Homo sapiens
aaacucgcugagcccca

SEQ ID NO: 2350 - RNA, 18 nt, Homo sapiens
gggcucacaucaccccau

SEQ ID NO: 2351 - RNA, 18 nt, Homo sapiens
auggggugaugugagccc

SEQ ID NO: 2352 - RNA, 18 nt, Homo sapiens
gcggcgaguccgacucau

SEQ ID NO: 2353 - RNA, 18 nt, Homo sapiens
augagucggacucgccgc

SEQ ID NO: 2354 - RNA, 17 nt, Homo sapiens
accccacuccugguacc

SEQ ID NO: 2355 - RNA, 17 nt, Homo sapiens
gguaccaggaguggggu

SEQ ID NO: 2356 - RNA, 19 nt, Homo sapiens
ucucccuugagggcacuuu

SEQ ID NO: 2357 - RNA, 19 nt, Homo sapiens
aaagugcccucaagggaga

SEQ ID NO: 2358 - RNA, 17 nt, Homo sapiens
uugucugcugaguuucc

SEQ ID NO: 2359 - RNA, 17 nt, Homo sapiens
ggaaacucagcagacaa

SEQ ID NO: 2360 - RNA, 19 nt, Homo sapiens
gcauugugcagggcuauca

SEQ ID NO: 2361 - RNA, 19 nt, Homo sapiens
ugauagcccugcacaaugc

SEQ ID NO: 2362 - RNA, 19 nt, Homo sapiens
ugcccuccuuucuucccuc

SEQ ID NO: 2363 - RNA, 19 nt, Homo sapiens
gagggaagaaaggagggca

SEQ ID NO: 2364 - RNA, 16 nt, Homo sapiens
uucagcaggaacagcu

SEQ ID NO: 2365 - RNA, 16 nt, Homo sapiens
agcuguuccugcugaa

SEQ ID NO: 2366 - RNA, 18 nt, Homo sapiens
ccccugggccggccuugg

SEQ ID NO: 2367 - RNA, 18 nt, Homo sapiens
ccaaggccggcccagggg

SEQ ID NO: 2368 - RNA, 17 nt, Homo sapiens
cagccugacaggaacag

SEQ ID NO: 2369 - RNA, 17 nt, Homo sapiens
cuguuccugucaggcug

SEQ ID NO: 2370 - RNA, 17 nt, Homo sapiens
gggagucuacagcaggg

SEQ ID NO: 2371 - RNA, 17 nt, Homo sapiens
cccugcuguagacuccc

SEQ ID NO: 2372 - RNA, 18 nt, Homo sapiens
cagugcaauguuuuccuu

SEQ ID NO: 2373 - RNA, 18 nt, Homo sapiens
aaggaaaacauugcacug

SEQ ID NO: 2374 - RNA, 17 nt, Homo sapiens
augugggcucaggcuca

SEQ ID NO: 2375 - RNA, 17 nt, Homo sapiens
ugagccugagcccacau

SEQ ID NO: 2376 - RNA, 16 nt, Homo sapiens
ugccuuccugucugug

SEQ ID NO: 2377 - RNA, 16 nt, Homo sapiens
cacagacaggaaggca

SEQ ID NO: 2378 - RNA, 22 nt, Homo sapiens
cugggacaggaggaggaggcag

SEQ ID NO: 2379 - RNA, 22 nt, Homo sapiens
cugccuccuccuccugucccag

SEQ ID NO: 2380 - RNA, 18 nt, Homo sapiens
gcuggugacaugagaggc

SEQ ID NO: 2381 - RNA, 18 nt, Homo sapiens
gccucucaugucaccagc

SEQ ID NO: 2382 - RNA, 18 nt, Homo sapiens
ugggagcuggacuacuuc

SEQ ID NO: 2383 - RNA, 18 nt, Homo sapiens
gaaguaguccagcuccca

SEQ ID NO: 2384 - RNA, 20 nt, Homo sapiens
ucccacuacuucacuuguga

SEQ ID NO: 2385 - RNA, 20 nt, Homo sapiens
ucacaagugaaguaguggga

SEQ ID NO: 2386 - RNA, 18 nt, Homo sapiens
ccaguguggcucagcgag

SEQ ID NO: 2387 - RNA, 18 nt, Homo sapiens
cucgcugagccacacugg

SEQ ID NO: 2388 - RNA, 17 nt, Homo sapiens
uucugagcugaggacag

SEQ ID NO: 2389 - RNA, 17 nt, Homo sapiens
cuguccucagcucagaa

SEQ ID NO: 2390 - RNA, 17 nt, Homo sapiens
ccggcauguccagggca

SEQ ID NO: 2391 - RNA, 17 nt, Homo sapiens
ugcccuggacaugccgg

SEQ ID NO: 2392 - RNA, 18 nt, Homo sapiens
ccuagacaccuccaguuc

SEQ ID NO: 2393 - RNA, 18 nt, Homo sapiens
gaacuggaggugucuagg

SEQ ID NO: 2394 - RNA, 17 nt, Homo sapiens
uggagagaaaggcagua

SEQ ID NO: 2395 - RNA, 17 nt, Homo sapiens
uacugccuuucucucca

SEQ ID NO: 2396 - RNA, 19 nt, Homo sapiens
aauguuuuuuccuguuucc

SEQ ID NO: 2397 - RNA, 19 nt, Homo sapiens
ggaaacaggaaaaaacauu

SEQ ID NO: 2398 - RNA, 18 nt, Homo sapiens
ucccuggaguuucuucuu

SEQ ID NO: 2399 - RNA, 18 nt, Homo sapiens
aagaagaaacuccaggga

SEQ ID NO: 2400 - RNA, 18 nt, Homo sapiens
cuggagucuaggauucca

SEQ ID NO: 2401 - RNA, 18 nt, Homo sapiens
uggaauccuagacuccag

SEQ ID NO: 2402 - RNA, 16 nt, Homo sapiens
gcagcauucauguccc

SEQ ID NO: 2403 - RNA, 16 nt, Homo sapiens
gggacaugaaugcugc

SEQ ID NO: 2404 - RNA, 18 nt, Homo sapiens
gaaagagagcugagugug

SEQ ID NO: 2405 - RNA, 18 nt, Homo sapiens
cacacucagcucucuuuc

SEQ ID NO: 2406 - RNA, 19 nt, Homo sapiens
ggccuuguuccugucccca

SEQ ID NO: 2407 - RNA, 19 nt, Homo sapiens
uggggacaggaacaaggcc

SEQ ID NO: 2408 - RNA, 20 nt, Homo sapiens
agcccccuggccccaaaccc

SEQ ID NO: 2409 - RNA, 20 nt, Homo sapiens
ggguuuggggccagggggcu

SEQ ID NO: 2410 - RNA, 18 nt, Homo sapiens
cucugggaaaugggacag

SEQ ID NO: 2411 - RNA, 18 nt, Homo sapiens
cugucccauuucccagag

SEQ ID NO: 2412 - RNA, 18 nt, Homo sapiens
ccgcuuucugagcuggac

SEQ ID NO: 2413 - RNA, 18 nt, Homo sapiens
guccagcucagaaagcgg

SEQ ID NO: 2414 - RNA, 17 nt, Homo sapiens
ggugaggcuagcuggug

SEQ ID NO: 2415 - RNA, 17 nt, Homo sapiens
caccagcuagccucacc

SEQ ID NO: 2416 - RNA, 17 nt, Homo sapiens
acauugccagggaguuu

SEQ ID NO: 2417 - RNA, 17 nt, Homo sapiens
aaacucccuggcaaugu

SEQ ID NO: 2418 - RNA, 17 nt, Homo sapiens
cacuguggguacaugcu

SEQ ID NO: 2419 - RNA, 17 nt, Homo sapiens
agcauguacccacagug

SEQ ID NO: 2420 - RNA, 17 nt, Homo sapiens
ucccugagcaaagccac

SEQ ID NO: 2421 - RNA, 17 nt, Homo sapiens
guggcuuugcucaggga

SEQ ID NO: 2422 - RNA, 18 nt, Homo sapiens
gggauucuguagcuuccu

SEQ ID NO: 2423 - RNA, 18 nt, Homo sapiens
aggaagcuacagaauccc

SEQ ID NO: 2424 - RNA, 21 nt, Homo sapiens
uuagcgguggaccgcccugcg

SEQ ID NO: 2425 - RNA, 21 nt, Homo sapiens
cgcagggcgguccaccgcuaa

SEQ ID NO: 2426 - RNA, 21 nt, Homo sapiens
cugugggcucagcgcgugggg

SEQ ID NO: 2427 - RNA, 21 nt, Homo sapiens
ccccacgcgcugagcccacag

SEQ ID NO: 2428 - RNA, 18 nt, Homo sapiens
cagccccacagccucaga

SEQ ID NO: 2429 - RNA, 18 nt, Homo sapiens
ucugaggcuguggggcug

SEQ ID NO: 2430 - RNA, 20 nt, Homo sapiens
cccugagacccuaaccuuaa

SEQ ID NO: 2431 - RNA, 20 nt, Homo sapiens
uuaagguuagggucucaggg

SEQ ID NO: 2432 - RNA, 18 nt, Homo sapiens
uugcacuugucucaguga

SEQ ID NO: 2433 - RNA, 18 nt, Homo sapiens
ucacugagacaagugcaa

SEQ ID NO: 2434 - RNA, 20 nt, Homo sapiens
uguuccucugucucccagac

SEQ ID NO: 2435 - RNA, 20 nt, Homo sapiens
gucugggagacagaggaaca

SEQ ID NO: 2436 - RNA, 19 nt, Homo sapiens
ggcuugcaugggggacugg

SEQ ID NO: 2437 - RNA, 19 nt, Homo sapiens
ccagucccccaugcaagcc

SEQ ID NO: 2438 - RNA, 17 nt, Homo sapiens
ccaguuuucccaggauu

SEQ ID NO: 2439 - RNA, 17 nt, Homo sapiens
aauccugggaaaacugg

SEQ ID NO: 2440 - RNA, 19 nt, Homo sapiens
ccugagacccuaguuccac

SEQ ID NO: 2441 - RNA, 19 nt, Homo sapiens
guggaacuagggucucagg

SEQ ID NO: 2442 - RNA, 19 nt, Homo sapiens
ccucagaucagagccuugc

SEQ ID NO: 2443 - RNA, 19 nt, Homo sapiens
gcaaggcucugaucugagg

SEQ ID NO: 2444 - RNA, 22 nt, Homo sapiens
cauugcacuugucucggucuga

SEQ ID NO: 2445 - RNA, 22 nt, Homo sapiens
ucagaccgagacaagugcaaug

SEQ ID NO: 2446 - RNA, 21 nt, Homo sapiens
aggcggagacuugggcaauug

SEQ ID NO: 2447 - RNA, 21 nt, Homo sapiens
caauugcccaagucuccgccu

SEQ ID NO: 2448 - RNA, 22 nt, Homo sapiens
ccuauucuugguuacuugcacg

SEQ ID NO: 2449 - RNA, 22 nt, Homo sapiens
cgugcaaguaaccaagaauagg

SEQ ID NO: 2450 - RNA, 19 nt, Homo sapiens
aauggauuuuuggagcagg

SEQ ID NO: 2451 - RNA, 19 nt, Homo sapiens
ccugcuccaaaaauccauu

SEQ ID NO: 2452 - RNA, 22 nt, Homo sapiens
ugcggggcuagggcuaacagca

SEQ ID NO: 2453 - RNA, 22 nt, Homo sapiens
ugcuguuagcccuagccccgca

SEQ ID NO: 2454 - RNA, 22 nt, Homo sapiens
aaaaguaauugcggauuuugcc

SEQ ID NO: 2455 - RNA, 22 nt, Homo sapiens
ggcaaaauccgcaauuacuuuu

SEQ ID NO: 2456 - RNA, 22 nt, Homo sapiens
caaaaguaauuguggauuuugu

SEQ ID NO: 2457 - RNA, 22 nt, Homo sapiens
acaaaauccacaauuacuuuug

SEQ ID NO: 2458 - RNA, 23 nt, Homo sapiens
uaagugcuuccauguuuugguga

SEQ ID NO: 2459 - RNA, 23 nt, Homo sapiens
ucaccaaaacauggaagcacuua

SEQ ID NO: 2460 - RNA, 23 nt, Homo sapiens
acuuaaacguggauguacuugcu

SEQ ID NO: 2461 - RNA, 23 nt, Homo sapiens
agcaaguacauccacguuuaagu

SEQ ID NO: 2462 - RNA, 21 nt, Homo sapiens
cuauacaaucuacugucuuuc

SEQ ID NO: 2463 - RNA, 21 nt, Homo sapiens
gaaagacaguagauuguauag

SEQ ID NO: 2464 - RNA, 22 nt, Homo sapiens
ugagguaguagguuguauaguu

SEQ ID NO: 2465 - RNA, 22 nt, Homo sapiens
aacuauacaaccuacuaccuca

SEQ ID NO: 2466 - RNA, 22 nt, Homo sapiens
cuguacagccuccuagcuuucc

SEQ ID NO: 2467 - RNA, 22 nt, Homo sapiens
ggaaagcuaggaggcuguacag

SEQ ID NO: 2468 - RNA, 20 nt, Homo sapiens
caccaggcauuguggucucc

SEQ ID NO: 2469 - RNA, 20 nt, Homo sapiens
ggagaccacaaugccuggug

SEQ ID NO: 2470 - RNA, 23 nt, Homo sapiens
ugaguaccgccaugucuguuggg

SEQ ID NO: 2471 - RNA, 23 nt, Homo sapiens
cccaacagacauggcgguacuca

SEQ ID NO: 2472 - RNA, 22 nt, Homo sapiens
uacccagagcaugcagugugaa

SEQ ID NO: 2473 - RNA, 22 nt, Homo sapiens
uucacacugcaugcucugggua

SEQ ID NO: 2474 - RNA, 22 nt, Homo sapiens
aagugcugucauagcugagguc

SEQ ID NO: 2475 - RNA, 22 nt, Homo sapiens
gaccucagcuaugacagcacuu

SEQ ID NO: 2476 - RNA, 23 nt, Homo sapiens
cacucagccuugagggcacuuuc

SEQ ID NO: 2477 - RNA, 23 nt, Homo sapiens
gaaagugcccucaaggcugagug

SEQ ID NO: 2478 - RNA, 22 nt, Homo sapiens
ucgacagcacgacacugccuuc

SEQ ID NO: 2479 - RNA, 22 nt, Homo sapiens
gaaggcagugucgugcugucga

SEQ ID NO: 2480 - RNA, 22 nt, Homo sapiens
uagguaguuuccuguuguuggg

SEQ ID NO: 2481 - RNA, 22 nt, Homo sapiens
cccaacaacaggaaacuaccua

SEQ ID NO: 2482 - RNA, 21 nt, Homo sapiens
uacaguacugugauaacugaa

SEQ ID NO: 2483 - RNA, 21 nt, Homo sapiens
uucaguuaucacaguacugua

SEQ ID NO: 2484 - RNA, 22 nt, Homo sapiens
caguuaucacagugcugaugcu

SEQ ID NO: 2485 - RNA, 22 nt, Homo sapiens
agcaucagcacugugauaacug

SEQ ID NO: 2486 - RNA, 23 nt, Homo sapiens
ugugcaaaucuaugcaaaacuga

SEQ ID NO: 2487 - RNA, 23 nt, Homo sapiens
ucaguuuugcauagauuugcaca

SEQ ID NO: 2488 - RNA, 22 nt, Homo sapiens
aguuuugcauaguugcacuaca

SEQ ID NO: 2489 - RNA, 22 nt, Homo sapiens
uguagugcaacuaugcaaaacu

SEQ ID NO: 2490 - RNA, 23 nt, Homo sapiens
aguuuugcagguuugcauccagc

SEQ ID NO: 2491 - RNA, 23 nt, Homo sapiens
gcuggaugcaaaccugcaaaacu

SEQ ID NO: 2492 - RNA, 22 nt, Homo sapiens
aguuuugcagguuugcauuuca

SEQ ID NO: 2493 - RNA, 22 nt, Homo sapiens
ugaaaugcaaaccugcaaaacu

SEQ ID NO: 2494 - RNA, 23 nt, Homo sapiens
ugugcaaauccaugcaaaacuga

SEQ ID NO: 2495 - RNA, 23 nt, Homo sapiens
ucaguuuugcauggauuugcaca

SEQ ID NO: 2496 - RNA, 23 nt, Homo sapiens
uacugcaucaggaacugauugga

SEQ ID NO: 2497 - RNA, 23 nt, Homo sapiens
uccaaucaguuccugaugcagua

SEQ ID NO: 2498 - RNA, 22 nt, Homo sapiens
augguuccgucaagcaccaugg

SEQ ID NO: 2499 - RNA, 22 nt, Homo sapiens
ccauggugcuugacggaaccau

SEQ ID NO: 2500 - RNA, 21 nt, Homo sapiens
agcuacaucuggcuacugggu

SEQ ID NO: 2501 - RNA, 21 nt, Homo sapiens
acccaguagccagauguagcu

SEQ ID NO: 2502 - RNA, 22 nt, Homo sapiens
cucaguagccaguguagauccu

SEQ ID NO: 2503 - RNA, 22 nt, Homo sapiens
aggaucuacacuggcuacugag

SEQ ID NO: 2504 - RNA, 22 nt, Homo sapiens
uuaucagaaucuccagggguac

SEQ ID NO: 2505 - RNA, 22 nt, Homo sapiens
guaccccuggagauucugauaa

SEQ ID NO: 2506 - RNA, 23 nt, Homo sapiens
aucaacagacauuaauugggcgc

SEQ ID NO: 2507 - RNA, 23 nt, Homo sapiens
gcgcccaauuaaugucuguugau

SEQ ID NO: 2508 - RNA, 21 nt, Homo sapiens
caaaacgugaggcgcugcuau

SEQ ID NO: 2509 - RNA, 21 nt, Homo sapiens
auagcagcgccucacguuuug

SEQ ID NO: 2510 - RNA, 22 nt, Homo sapiens
cagcagcaauucauguuuugaa

SEQ ID NO: 2511 - RNA, 22 nt, Homo sapiens
uucaaaacaugaauugcugcug

SEQ ID NO: 2512 - RNA, 18 nt, Homo sapiens
uucacagggaggugucau

SEQ ID NO: 2513 - RNA, 18 nt, Homo sapiens
augacaccucccugugaa

SEQ ID NO: 2514 - RNA, 20 nt, Homo sapiens
gcggagagagaauggggagc

SEQ ID NO: 2515 - RNA, 20 nt, Homo sapiens
gcuccccauucucucuccgc

SEQ ID NO: 2516 - RNA, 21 nt, Homo sapiens
ccugcgagucuccggcggugg

SEQ ID NO: 2517 - RNA, 21 nt, Homo sapiens
ccaccgccggagacucgcagg

SEQ ID NO: 2518 - RNA, 21 nt, Homo sapiens
gggcuagggccugcugccccc

SEQ ID NO: 2519 - RNA, 21 nt, Homo sapiens
gggggcagcaggcccuagccc

SEQ ID NO: 2520 - RNA, 19 nt, Homo sapiens
uucugcugccggccaaggc

SEQ ID NO: 2521 - RNA, 19 nt, Homo sapiens
gccuuggccggcagcagaa

SEQ ID NO: 2522 - RNA, 22 nt, Homo sapiens
uccucaucacacugcaccuuag

SEQ ID NO: 2523 - RNA, 22 nt, Homo sapiens
cuaaggugcagugugaugagga

SEQ ID NO: 2524 - RNA, 20 nt, Homo sapiens
gguagugaguuaucagcuac

SEQ ID NO: 2525 - RNA, 20 nt, Homo sapiens
guagcugauaacucacuacc

SEQ ID NO: 2526 - RNA, 20 nt, Homo sapiens
gauauucagaggcuaggugg

SEQ ID NO: 2527 - RNA, 20 nt, Homo sapiens
ccaccuagccucugaauauc

SEQ ID NO: 2528 - RNA, 21 nt, Homo sapiens
acggcccaggcggcauuggug

SEQ ID NO: 2529 - RNA, 21 nt, Homo sapiens
caccaaugccgccugggccgu

SEQ ID NO: 2530 - RNA, 21 nt, Homo sapiens
agcaugacagaggagaggugg

SEQ ID NO: 2531 - RNA, 21 nt, Homo sapiens
ccaccucuccucugucaugcu

SEQ ID NO: 2532 - RNA, 21 nt, Homo sapiens
gggaagagcuguacggccuuc

SEQ ID NO: 2533 - RNA, 21 nt, Homo sapiens
gaaggccguacagcucuuccc

SEQ ID NO: 2534 - RNA, 19 nt, Homo sapiens
ccgccugagcuagcugugg

SEQ ID NO: 2535 - RNA, 19 nt, Homo sapiens
ccacagcuagcucaggcgg

SEQ ID NO: 2536 - RNA, 24 nt, Homo sapiens
uuggaagcuuggaccaacuagcug

SEQ ID NO: 2537 - RNA, 24 nt, Homo sapiens
cagcuaguugguccaagcuuccaa

SEQ ID NO: 2538 - RNA, 19 nt, Homo sapiens
ucuagugcgggcguucccg

SEQ ID NO: 2539 - RNA, 19 nt, Homo sapiens
cgggaacgcccgcacuaga

SEQ ID NO: 2540 - RNA, 24 nt, Homo sapiens
aggagcagugccggccaaggcgcc

SEQ ID NO: 2541 - RNA, 24 nt, Homo sapiens
ggcgccuuggccggcacugcuccu

SEQ ID NO: 2542 - RNA, 19 nt, Homo sapiens
gaauacgucugguugaucc

SEQ ID NO: 2543 - RNA, 19 nt, Homo sapiens
ggaucaaccagacguauuc

SEQ ID NO: 2544 - RNA, 20 nt, Homo sapiens
cuuauaucagaggcuguggg

SEQ ID NO: 2545 - RNA, 20 nt, Homo sapiens
cccacagccucugauauaag

SEQ ID NO: 2546 - RNA, 20 nt, Homo sapiens
uuccgccagucgguggccgg

SEQ ID NO: 2547 - RNA, 20 nt, Homo sapiens
ccggccaccgacuggcggaa

SEQ ID NO: 2548 - RNA, 19 nt, Homo sapiens
aaggggcugggggagcaca

SEQ ID NO: 2549 - RNA, 19 nt, Homo sapiens
ugugcucccccagccccuu

SEQ ID NO: 2550 - RNA, 23 nt, Homo sapiens
agguugggaucgguugcaaugcu

SEQ ID NO: 2551 - RNA, 23 nt, Homo sapiens
agcauugcaaccgaucccaaccu

SEQ ID NO: 2552 - RNA, 22 nt, Homo sapiens
ggguggggauuuguugcauuac

SEQ ID NO: 2553 - RNA, 22 nt, Homo sapiens
guaaugcaacaaauccccaccc

SEQ ID NO: 2554 - RNA, 22 nt, Homo sapiens
uauugcacuugucccggccugu

SEQ ID NO: 2555 - RNA, 22 nt, Homo sapiens
acaggccgggacaagugcaaua

SEQ ID NO: 2556 - RNA, 22 nt, Homo sapiens
uauugcacucgucccggccucc

SEQ ID NO: 2557 - RNA, 22 nt, Homo sapiens
ggaggccgggacgagugcaaua

SEQ ID NO: 2558 - RNA, 22 nt, Homo sapiens
agggacgggacgcggugcagug

SEQ ID NO: 2559 - RNA, 22 nt, Homo sapiens
cacugcaccgcgucccgucccu

SEQ ID NO: 2560 - RNA, 21 nt, Homo sapiens
aucacauugccagggauuucc

SEQ ID NO: 2561 - RNA, 21 nt, Homo sapiens
ggaaaucccuggcaaugugau

SEQ ID NO: 2562 - RNA, 22 nt, Homo sapiens
gggguuccuggggaugggauuu

SEQ ID NO: 2563 - RNA, 22 nt, Homo sapiens
aaaucccauccccaggaacccc

SEQ ID NO: 2564 - RNA, 22 nt, Homo sapiens
acugcagugaaggcacuuguag

SEQ ID NO: 2565 - RNA, 22 nt, Homo sapiens
cuacaagugccuucacugcagu

SEQ ID NO: 2566 - RNA, 23 nt, Homo sapiens
agcuacauugucugcuggguuuc

SEQ ID NO: 2567 - RNA, 23 nt, Homo sapiens
gaaacccagcagacaauguagcu

SEQ ID NO: 2568 - RNA, 22 nt, Homo sapiens
accuggcauacaauguagauuu

SEQ ID NO: 2569 - RNA, 22 nt, Homo sapiens
aaaucuacauuguaugccaggu

SEQ ID NO: 2570 - RNA, 22 nt, Homo sapiens
ucguaccgugaguaauaaugcg

SEQ ID NO: 2571 - RNA, 22 nt, Homo sapiens
cgcauuauuacucacgguacga

SEQ ID NO: 2572 - RNA, 21 nt, Homo sapiens
cauuauuacuuuugguacgcg

SEQ ID NO: 2573 - RNA, 21 nt, Homo sapiens
cgcguaccaaaaguaauaaug

SEQ ID NO: 2574 - RNA, 23 nt, Homo sapiens
uacuccagagggcgucacucaug

SEQ ID NO: 2575 - RNA, 23 nt, Homo sapiens
caugagugacgcccucuggagua

SEQ ID NO: 2576 - RNA, 21 nt, Homo sapiens
ucccacguuguggcccagcag

SEQ ID NO: 2577 - RNA, 21 nt, Homo sapiens
cugcugggccacaacguggga

SEQ ID NO: 2578 - RNA, 23 nt, Homo sapiens
ccucaccaccccuucugccugca

SEQ ID NO: 2579 - RNA, 23 nt, Homo sapiens
ugcaggcagaagggguggugagg

SEQ ID NO: 2580 - RNA, 24 nt, Homo sapiens
cugcaggcagaaguggggcugaca

SEQ ID NO: 2581 - RNA, 24 nt, Homo sapiens
ugucagccccacuucugccugcag

SEQ ID NO: 2582 - RNA, 21 nt, Homo sapiens
ccaaaccagucgugccugugg

SEQ ID NO: 2583 - RNA, 21 nt, Homo sapiens
ccacaggcacgacugguuugg

SEQ ID NO: 2584 - RNA, 22 nt, Homo sapiens
cucaaaccggcugugccugugg

SEQ ID NO: 2585 - RNA, 22 nt, Homo sapiens
ccacaggcacagccgguuugag

SEQ ID NO: 2586 - RNA, 21 nt, Homo sapiens
acaggcacgacugguuuggca

SEQ ID NO: 2587 - RNA, 21 nt, Homo sapiens
ugccaaaccagucgugccugu

SEQ ID NO: 2588 - RNA, 22 nt, Homo sapiens
uccgaacucuccauuccucugc

SEQ ID NO: 2589 - RNA, 22 nt, Homo sapiens
gcagaggaauggagaguucgga

SEQ ID NO: 2590 - RNA, 20 nt, Homo sapiens
ugggaauggggguaagggcc

SEQ ID NO: 2591 - RNA, 20 nt, Homo sapiens
ggcccuuacccccauuccca

SEQ ID NO: 2592 - RNA, 22 nt, Homo sapiens
aggcgauguggggauguagaga

SEQ ID NO: 2593 - RNA, 22 nt, Homo sapiens
ucucuacauccccacaucgccu

SEQ ID NO: 2594 - RNA, 21 nt, Homo sapiens
uaguggucagagggcuuauga

SEQ ID NO: 2595 - RNA, 21 nt, Homo sapiens
ucauaagcccucugaccacua

SEQ ID NO: 2596 - RNA, 22 nt, Homo sapiens
ucugacaucagugauucuccug

SEQ ID NO: 2597 - RNA, 22 nt, Homo sapiens
caggagaaucacugaugucaga

SEQ ID NO: 2598 - RNA, 22 nt, Homo sapiens
cgcgccugcaggaacugguaga

SEQ ID NO: 2599 - RNA, 22 nt, Homo sapiens
ucuaccaguuccugcaggcgcg

SEQ ID NO: 2600 - RNA, 23 nt, Homo sapiens
ugggcaggggcuuauuguaggag

SEQ ID NO: 2601 - RNA, 23 nt, Homo sapiens
cuccuacaauaagccccugccca

SEQ ID NO: 2602 - RNA, 22 nt, Homo sapiens
ugcaggggucgggugggccagg

SEQ ID NO: 2603 - RNA, 22 nt, Homo sapiens
ccuggcccacccgaccccugca

SEQ ID NO: 2604 - RNA, 20 nt, Homo sapiens
aggcgcacccgaccacaugc

SEQ ID NO: 2605 - RNA, 20 nt, Homo sapiens
gcauguggucgggugcgccu

SEQ ID NO: 2606 - RNA, 22 nt, Homo sapiens
auaguccgaguaacgucggggc

SEQ ID NO: 2607 - RNA, 22 nt, Homo sapiens
gccccgacguuacucggacuau

SEQ ID NO: 2608 - RNA, 23 nt, Homo sapiens
cugggcccgcggcgggcgugggg

SEQ ID NO: 2609 - RNA, 23 nt, Homo sapiens
ccccacgcccgccgcgggcccag

SEQ ID NO: 2610 - RNA, 21 nt, Homo sapiens
uacuuggaaaggcaucaguug

SEQ ID NO: 2611 - RNA, 21 nt, Homo sapiens
caacugaugccuuuccaagua

SEQ ID NO: 2612 - RNA, 22 nt, Homo sapiens
ugcaacgaaccugagccacuga

SEQ ID NO: 2613 - RNA, 22 nt, Homo sapiens
ucaguggcucagguucguugca

SEQ ID NO: 2614 - RNA, 22 nt, Homo sapiens
ugcaacuuaccugagucauuga

SEQ ID NO: 2615 - RNA, 22 nt, Homo sapiens
ucaaugacucagguaaguugca

SEQ ID NO: 2616 - RNA, 21 nt, Homo sapiens
cacuguguccuuucugcguag

SEQ ID NO: 2617 - RNA, 21 nt, Homo sapiens
cuacgcagaaaggacacagug

SEQ ID NO: 2618 - RNA, 22 nt, Homo sapiens
cacuggcuccuuucuggguaga

SEQ ID NO: 2619 - RNA, 22 nt, Homo sapiens
ucuacccagaaaggagccagug

SEQ ID NO: 2620 - RNA, 22 nt, Homo sapiens
cacuguuuccuuucugagugga

SEQ ID NO: 2621 - RNA, 22 nt, Homo sapiens
uccacucagaaaggaaacagug

SEQ ID NO: 2622 - RNA, 21 nt, Homo sapiens
uauucagaaaggugccaguca

SEQ ID NO: 2623 - RNA, 21 nt, Homo sapiens
ugacuggcaccuuucugaaua

SEQ ID NO: 2624 - RNA, 20 nt, Homo sapiens
auuccuagaaauuguucaua

SEQ ID NO: 2625 - RNA, 20 nt, Homo sapiens
uaugaacaauuucuaggaau

SEQ ID NO: 2626 - RNA, 22 nt, Homo sapiens
uaauacugucugguaaaaccgu

SEQ ID NO: 2627 - RNA, 22 nt, Homo sapiens
acgguuuuaccagacaguauua

SEQ ID NO: 2628 - RNA, 22 nt, Homo sapiens
ugaaacauacacgggaaaccuc

SEQ ID NO: 2629 - RNA, 22 nt, Homo sapiens
gagguuucccguguauguuuca

SEQ ID NO: 2630 - RNA, 22 nt, Homo sapiens
cuauacaaccuacugccuuccc

SEQ ID NO: 2631 - RNA, 22 nt, Homo sapiens
gggaaggcaguagguuguauag

SEQ ID NO: 2632 - RNA, 22 nt, Homo sapiens
ugagguaguagguugugugguu

SEQ ID NO: 2633 - RNA, 22 nt, Homo sapiens
aaccacacaaccuacuaccuca

SEQ ID NO: 2634 - RNA, 22 nt, Homo sapiens
uaacacugucugguaacgaugu

SEQ ID NO: 2635 - RNA, 22 nt, Homo sapiens
acaucguuaccagacaguguua

SEQ ID NO: 2636 - RNA, 22 nt, Homo sapiens
caucuuaccggacagugcugga

SEQ ID NO: 2637 - RNA, 22 nt, Homo sapiens
uccagcacuguccgguaagaug

SEQ ID NO: 2638 - RNA, 22 nt, Homo sapiens
uaauacugccugguaaugauga

SEQ ID NO: 2639 - RNA, 22 nt, Homo sapiens
ucaucauuaccaggcaguauua

SEQ ID NO: 2640 - RNA, 22 nt, Homo sapiens
caucuuacugggcagcauugga

SEQ ID NO: 2641 - RNA, 22 nt, Homo sapiens
uccaaugcugcccaguaagaug

SEQ ID NO: 2642 - RNA, 23 nt, Homo sapiens
uaauacugccggguaaugaugga

SEQ ID NO: 2643 - RNA, 23 nt, Homo sapiens
uccaucauuacccggcaguauua

SEQ ID NO: 2644 - RNA, 22 nt, Homo sapiens
cgucuuacccagcaguguuugg

SEQ ID NO: 2645 - RNA, 22 nt, Homo sapiens
ccaaacacugcuggguaagacg

SEQ ID NO: 2646 - RNA, 22 nt, Homo sapiens
uccagcaucagugauuuuguug

SEQ ID NO: 2647 - RNA, 22 nt, Homo sapiens
caacaaaaucacugaugcugga

SEQ ID NO: 2648 - RNA, 20 nt, Homo sapiens
uacaguauagaugauguacu

SEQ ID NO: 2649 - RNA, 20 nt, Homo sapiens
aguacaucaucuauacugua

SEQ ID NO: 2650 - RNA, 22 nt, Homo sapiens
ggauaucaucauauacuguaag

SEQ ID NO: 2651 - RNA, 22 nt, Homo sapiens
cuuacaguauaugaugauaucc

SEQ ID NO: 2652 - RNA, 21 nt, Homo sapiens
cggggcagcucaguacaggau

SEQ ID NO: 2653 - RNA, 21 nt, Homo sapiens
auccuguacugagcugccccg

SEQ ID NO: 2654 - RNA, 21 nt, Homo sapiens
uccuucugcuccgucccccag

SEQ ID NO: 2655 - RNA, 21 nt, Homo sapiens
cugggggacggagcagaagga

SEQ ID NO: 2656 - RNA, 21 nt, Homo sapiens
cgggggcggggccgaagcgcg

SEQ ID NO: 2657 - RNA, 21 nt, Homo sapiens
cgcgcuucggccccgcccccg

SEQ ID NO: 2658 - RNA, 21 nt, Homo sapiens
uccugcgcgucccagaugccc

SEQ ID NO: 2659 - RNA, 21 nt, Homo sapiens
gggcaucugggacgcgcagga

SEQ ID NO: 2660 - RNA, 22 nt, Homo sapiens
caucagaauucauggaggcuag

SEQ ID NO: 2661 - RNA, 22 nt, Homo sapiens
cuagccuccaugaauucugaug

SEQ ID NO: 2662 - RNA, 22 nt, Homo sapiens
agcuuccaugacuccugaugga

SEQ ID NO: 2663 - RNA, 22 nt, Homo sapiens
uccaucaggagucauggaagcu

SEQ ID NO: 2664 - RNA, 21 nt, Homo sapiens
ugacagcgcccugccuggcuc

SEQ ID NO: 2665 - RNA, 21 nt, Homo sapiens
gagccaggcagggcgcuguca

SEQ ID NO: 2666 - RNA, 24 nt, Homo sapiens
agcgcgggcugagcgcugccaguc

SEQ ID NO: 2667 - RNA, 24 nt, Homo sapiens
gacuggcagcgcucagcccgcgcu

SEQ ID NO: 2668 - RNA, 22 nt, Homo sapiens
cugggaggugugauaucguggu

SEQ ID NO: 2669 - RNA, 22 nt, Homo sapiens
accacgauaucacaccucccag

SEQ ID NO: 2670 - RNA, 22 nt, Homo sapiens
ugugauaucaugguuccuggga

SEQ ID NO: 2671 - RNA, 22 nt, Homo sapiens
ucccaggaaccaugauaucaca

SEQ ID NO: 2672 - RNA, 22 nt, Homo sapiens
aggugcuccaggcuggcucaca

SEQ ID NO: 2673 - RNA, 22 nt, Homo sapiens
ugugagccagccuggagcaccu

SEQ ID NO: 2674 - RNA, 22 nt, Homo sapiens
gagcaauguagguagacuguuu

SEQ ID NO: 2675 - RNA, 22 nt, Homo sapiens
aaacagucuaccuacauugcuc

SEQ ID NO: 2676 - RNA, 22 nt, Homo sapiens
uguccucuagggccugcagucu

SEQ ID NO: 2677 - RNA, 22 nt, Homo sapiens
agacugcaggcccuagaggaca

SEQ ID NO: 2678 - RNA, 20 nt, Homo sapiens
aaaggcauaaaaccaagaca

SEQ ID NO: 2679 - RNA, 20 nt, Homo sapiens
ugucuugguuuuaugccuuu

SEQ ID NO: 2680 - RNA, 21 nt, Homo sapiens
uaacgcauaauauggacaugu

SEQ ID NO: 2681 - RNA, 21 nt, Homo sapiens
acauguccauauuaugcguua

SEQ ID NO: 2682 - RNA, 22 nt, Homo sapiens
uugaggaaaagauggucuuauu

SEQ ID NO: 2683 - RNA, 22 nt, Homo sapiens
aauaagaccaucuuuuccucaa

SEQ ID NO: 2684 - RNA, 26 nt, Homo sapiens
aagaggaagaaauggcugguucucag

SEQ ID NO: 2685 - RNA, 26 nt, Homo sapiens
cugagaaccagccauuucuuccucuu

SEQ ID NO: 2686 - RNA, 20 nt, Homo sapiens
gcucggacugagcagguggg

SEQ ID NO: 2687 - RNA, 20 nt, Homo sapiens
cccaccugcucaguccgagc

SEQ ID NO: 2688 - RNA, 21 nt, Homo sapiens
acagggccgcagauggagacu

SEQ ID NO: 2689 - RNA, 21 nt, Homo sapiens
agucuccaucugcggcccugu

SEQ ID NO: 2690 - RNA, 21 nt, Homo sapiens
gcagagaacaaaggacucagu

SEQ ID NO: 2691 - RNA, 21 nt, Homo sapiens
acugaguccuuuguucucugc

SEQ ID NO: 2692 - RNA, 22 nt, Homo sapiens
acugauuaucuuaacucucuga

SEQ ID NO: 2693 - RNA, 22 nt, Homo sapiens
ucagagaguuaagauaaucagu

SEQ ID NO: 2694 - RNA, 23 nt, Homo sapiens
ucucugaguaccauaugccuugu

SEQ ID NO: 2695 - RNA, 23 nt, Homo sapiens
acaaggcauaugguacucagaga

SEQ ID NO: 2696 - RNA, 22 nt, Homo sapiens
aacuaguaauguuggauuaggg

SEQ ID NO: 2697 - RNA, 22 nt, Homo sapiens
cccuaauccaacauuacuaguu

SEQ ID NO: 2698 - RNA, 22 nt, Homo sapiens
auauguauaugugacugcuacu

SEQ ID NO: 2699 - RNA, 22 nt, Homo sapiens
aguagcagucacauauacauau

SEQ ID NO: 2700 - RNA, 21 nt, Homo sapiens
uggccaaaaagcaggcagaga

SEQ ID NO: 2701 - RNA, 21 nt, Homo sapiens
ucucugccugcuuuuuggcca

SEQ ID NO: 2702 - RNA, 22 nt, Homo sapiens
ggaggaaccuuggagcuucggc

SEQ ID NO: 2703 - RNA, 22 nt, Homo sapiens
gccgaagcuccaagguuccucc

SEQ ID NO: 2704 - RNA, 23 nt, Homo sapiens
gaggcugaugugaguagaccacu

SEQ ID NO: 2705 - RNA, 23 nt, Homo sapiens
aguggucuacucacaucagccuc

SEQ ID NO: 2706 - RNA, 21 nt, Homo sapiens
cuguccuaagguuguugaguu

SEQ ID NO: 2707 - RNA, 21 nt, Homo sapiens
aacucaacaaccuuaggacag

SEQ ID NO: 2708 - RNA, 21 nt, Homo sapiens
ucuucaaccucaggacuugca

SEQ ID NO: 2709 - RNA, 21 nt, Homo sapiens
ugcaaguccugagguugaaga

SEQ ID NO: 2710 - RNA, 22 nt, Homo sapiens
ugugauaucaugguuccuggga

SEQ ID NO: 2711 - RNA, 22 nt, Homo sapiens
ucccaggaaccaugauaucaca

SEQ ID NO: 2712 - RNA, 22 nt, Homo sapiens
cugggaggugugauauuguggu

SEQ ID NO: 2713 - RNA, 22 nt, Homo sapiens
accacaauaucacaccucccag

SEQ ID NO: 2714 - RNA, 22 nt, Homo sapiens
cagguagauauuugauaggcau

SEQ ID NO: 2715 - RNA, 22 nt, Homo sapiens
augccuaucaaauaucuaccug

SEQ ID NO: 2716 - RNA, 21 nt, Homo sapiens
gccuaucacauaucugccugu

SEQ ID NO: 2717 - RNA, 21 nt, Homo sapiens
acaggcagauaugugauaggc

SEQ ID NO: 2718 - RNA, 20 nt, Homo sapiens
gggcuggggcgcggggaggu

SEQ ID NO: 2719 - RNA, 20 nt, Homo sapiens
accuccccgcgccccagccc

SEQ ID NO: 2720 - RNA, 18 nt, Homo sapiens
ugcuuccuuucagagggu

SEQ ID NO: 2721 - RNA, 18 nt, Homo sapiens
acccucugaaaggaagca

SEQ ID NO: 2722 - RNA, 21 nt, Homo sapiens
ugaguuggccaucugagugag

SEQ ID NO: 2723 - RNA, 21 nt, Homo sapiens
cucacucagauggccaacuca

SEQ ID NO: 2724 - RNA, 23 nt, Homo sapiens
aacauucauuguugucggugggu

SEQ ID NO: 2725 - RNA, 23 nt, Homo sapiens
acccaccgacaacaaugaauguu

SEQ ID NO: 2726 - RNA, 21 nt, Homo sapiens
ucacagugaaccggucucuuu

SEQ ID NO: 2727 - RNA, 21 nt, Homo sapiens
aaagagaccgguucacuguga

SEQ ID NO: 2728 - RNA, 22 nt, Homo sapiens
caacaaaucacagucugccaua

SEQ ID NO: 2729 - RNA, 22 nt, Homo sapiens
uauggcagacugugauuuguug

SEQ ID NO: 2730 - RNA, 21 nt, Homo sapiens
cucacugaacaaugaaugcaa

SEQ ID NO: 2731 - RNA, 21 nt, Homo sapiens
uugcauucauuguucagugag

SEQ ID NO: 2732 - RNA, 23 nt, Homo sapiens
aacauucauugcugucggugggu

SEQ ID NO: 2733 - RNA, 23 nt, Homo sapiens
acccaccgacagcaaugaauguu

SEQ ID NO: 2734 - RNA, 22 nt, Homo sapiens
accaucgaccguugauuguacc

SEQ ID NO: 2735 - RNA, 22 nt, Homo sapiens
gguacaaucaacggucgauggu

SEQ ID NO: 2736 - RNA, 23 nt, Homo sapiens
aacauucaacgcugucggugagu

SEQ ID NO: 2737 - RNA, 23 nt, Homo sapiens
acucaccgacagcguugaauguu

SEQ ID NO: 2738 - RNA, 22 nt, Homo sapiens
accacugaccguugacuguacc

SEQ ID NO: 2739 - RNA, 22 nt, Homo sapiens
gguacagucaacggucaguggu

SEQ ID NO: 2740 - RNA, 22 nt, Homo sapiens
cuguugccacuaaccucaaccu

SEQ ID NO: 2741 - RNA, 22 nt, Homo sapiens
agguugagguuaguggcaacag

SEQ ID NO: 2742 - RNA, 22 nt, Homo sapiens
auaagacgagcaaaaagcuugu

SEQ ID NO: 2743 - RNA, 22 nt, Homo sapiens
acaagcuuuuugcucgucuuau

SEQ ID NO: 2744 - RNA, 22 nt, Homo sapiens
auaagacgaacaaaagguuugu

SEQ ID NO: 2745 - RNA, 22 nt, Homo sapiens
acaaaccuuuuguucgucuuau

SEQ ID NO: 2746 - RNA, 21 nt, Homo sapiens
agggagggacgggggcugugc

SEQ ID NO: 2747 - RNA, 21 nt, Homo sapiens
gcacagcccccgucccucccu

SEQ ID NO: 2748 - RNA, 23 nt, Homo sapiens
ucuggcuccgugucuucacuccc

SEQ ID NO: 2749 - RNA, 23 nt, Homo sapiens
gggagugaagacacggagccaga

SEQ ID NO: 2750 - RNA, 22 nt, Homo sapiens
uggaauguaaagaaguauguau

SEQ ID NO: 2751 - RNA, 22 nt, Homo sapiens
auacauacuucuuuacauucca

SEQ ID NO: 2752 - RNA, 22 nt, Homo sapiens
aacaucacagcaagucugugcu

SEQ ID NO: 2753 - RNA, 22 nt, Homo sapiens
agcacagacuugcugugauguu

SEQ ID NO: 2754 - RNA, 21 nt, Homo sapiens
uuaagacuugcagugauguuu

SEQ ID NO: 2755 - RNA, 21 nt, Homo sapiens
aaacaucacugcaagucuuaa

SEQ ID NO: 2756 - RNA, 22 nt, Homo sapiens
aacaucacugcaagucuuaaca

SEQ ID NO: 2757 - RNA, 22 nt, Homo sapiens
uguuaagacuugcagugauguu

SEQ ID NO: 2758 - RNA, 21 nt, Homo sapiens
acagacuugcugugauguuca

SEQ ID NO: 2759 - RNA, 21 nt, Homo sapiens
ugaacaucacagcaagucugu

SEQ ID NO: 2760 - RNA, 22 nt, Homo sapiens
aaaccguuaccauuacugaguu

SEQ ID NO: 2761 - RNA, 22 nt, Homo sapiens
aacucaguaaugguaacgguuu

SEQ ID NO: 2762 - RNA, 22 nt, Homo sapiens
uagcaagagaaccauuaccauu

SEQ ID NO: 2763 - RNA, 22 nt, Homo sapiens
aaugguaaugguucucuugcua

SEQ ID NO: 2764 - RNA, 23 nt, Homo sapiens
ugaggggcagagagcgagacuuu

SEQ ID NO: 2765 - RNA, 23 nt, Homo sapiens
aaagucucgcucucugccccuca

SEQ ID NO: 2766 - RNA, 22 nt, Homo sapiens
caagcucgcuucuaugggucug

SEQ ID NO: 2767 - RNA, 22 nt, Homo sapiens
cagacccauagaagcgagcuug

SEQ ID NO: 2768 - RNA, 22 nt, Homo sapiens
aacccguagauccgaucuugug

SEQ ID NO: 2769 - RNA, 22 nt, Homo sapiens
cacaagaucggaucuacggguu

SEQ ID NO: 2770 - RNA, 22 nt, Homo sapiens
caagcucgugucuguggguccg

SEQ ID NO: 2771 - RNA, 22 nt, Homo sapiens
cggacccacagacacgagcuug

SEQ ID NO: 2772 - RNA, 22 nt, Homo sapiens
cacccguagaaccgaccuugcg

SEQ ID NO: 2773 - RNA, 22 nt, Homo sapiens
cgcaaggucgguucuacgggug

SEQ ID NO: 2774 - RNA, 23 nt, Homo sapiens
uggagacgcggcccuguuggagu

SEQ ID NO: 2775 - RNA, 23 nt, Homo sapiens
acuccaacagggccgcgucucca

SEQ ID NO: 2776 - RNA, 23 nt, Homo sapiens
ucuacagugcacgugucuccagu

SEQ ID NO: 2777 - RNA, 23 nt, Homo sapiens
acuggagacacgugcacuguaga

SEQ ID NO: 2778 - RNA, 22 nt, Homo sapiens
caaauucguaucuaggggaaua

SEQ ID NO: 2779 - RNA, 22 nt, Homo sapiens
uauuccccuagauacgaauuug

SEQ ID NO: 2780 - RNA, 23 nt, Homo sapiens
uacccuguagauccgaauuugug

SEQ ID NO: 2781 - RNA, 23 nt, Homo sapiens
cacaaauucggaucuacagggua

SEQ ID NO: 2782 - RNA, 23 nt, Homo sapiens
ccugcagcgacuugauggcuucc

SEQ ID NO: 2783 - RNA, 23 nt, Homo sapiens
ggaagccaucaagucgcugcagg

SEQ ID NO: 2784 - RNA, 22 nt, Homo sapiens
ucagugcacuacagaacuuugu

SEQ ID NO: 2785 - RNA, 22 nt, Homo sapiens
acaaaguucuguagugcacuga

SEQ ID NO: 2786 - RNA, 22 nt, Homo sapiens
aaaguucugagacacuccgacu

SEQ ID NO: 2787 - RNA, 22 nt, Homo sapiens
agucggagugucucagaacuuu

SEQ ID NO: 2788 - RNA, 22 nt, Homo sapiens
ccuguucuccauuacuuggcuc

SEQ ID NO: 2789 - RNA, 22 nt, Homo sapiens
gagccaaguaauggagaacagg

SEQ ID NO: 2790 - RNA, 21 nt, Homo sapiens
uucaaguaauucaggauaggu

SEQ ID NO: 2791 - RNA, 21 nt, Homo sapiens
accuauccugaauuacuugaa

SEQ ID NO: 2792 - RNA, 22 nt, Homo sapiens
gcccugaacgaggggucuggag

SEQ ID NO: 2793 - RNA, 22 nt, Homo sapiens
cuccagaccccucguucagggc

SEQ ID NO: 2794 - RNA, 22 nt, Homo sapiens
gcugacuccuaguccagggcuc

SEQ ID NO: 2795 - RNA, 22 nt, Homo sapiens
gagcccuggacuaggagucagc

SEQ ID NO: 2796 - RNA, 22 nt, Homo sapiens
aucacacaaaggcaacuuuugu

SEQ ID NO: 2797 - RNA, 22 nt, Homo sapiens
acaaaaguugccuuugugugau

SEQ ID NO: 2798 - RNA, 22 nt, Homo sapiens
agagguugcccuuggugaauuc

SEQ ID NO: 2799 - RNA, 22 nt, Homo sapiens
gaauucaccaagggcaaccucu

SEQ ID NO: 2800 - RNA, 21 nt, Homo sapiens
gguagauuuuccuucuauggu

SEQ ID NO: 2801 - RNA, 21 nt, Homo sapiens
accauagaaggaaaaucuacc

SEQ ID NO: 2802 - RNA, 21 nt, Homo sapiens
aucauagaggaaaauccacgu

SEQ ID NO: 2803 - RNA, 21 nt, Homo sapiens
acguggauuuuccucuaugau

SEQ ID NO: 2804 - RNA, 22 nt, Homo sapiens
guagauucuccuucuaugagua

SEQ ID NO: 2805 - RNA, 22 nt, Homo sapiens
uacucauagaaggagaaucuac

SEQ ID NO: 2806 - RNA, 22 nt, Homo sapiens
cugguacaggccugggggacag

SEQ ID NO: 2807 - RNA, 22 nt, Homo sapiens
cugucccccaggccuguaccag

SEQ ID NO: 2808 - RNA, 22 nt, Homo sapiens
ucucccaacccuuguaccagug

SEQ ID NO: 2809 - RNA, 22 nt, Homo sapiens
cacugguacaaggguugggaga

SEQ ID NO: 2810 - RNA, 22 nt, Homo sapiens
acggguuaggcucuugggagcu

SEQ ID NO: 2811 - RNA, 22 nt, Homo sapiens
agcucccaagagccuaacccgu

SEQ ID NO: 2812 - RNA, 22 nt, Homo sapiens
ucacaagucaggcucuugggac

SEQ ID NO: 2813 - RNA, 22 nt, Homo sapiens
gucccaagagccugacuuguga

SEQ ID NO: 2814 - RNA, 22 nt, Homo sapiens
aacccguagauccgaacuugug

SEQ ID NO: 2815 - RNA, 22 nt, Homo sapiens
cacaaguucggaucuacggguu

SEQ ID NO: 2816 - RNA, 21 nt, Homo sapiens
cuguacaggccacugccuugc

SEQ ID NO: 2817 - RNA, 21 nt, Homo sapiens
gcaaggcaguggccuguacag

SEQ ID NO: 2818 - RNA, 22 nt, Homo sapiens
ugagguaguaguuuguacaguu

SEQ ID NO: 2819 - RNA, 22 nt, Homo sapiens
aacuguacaaacuacuaccuca

SEQ ID NO: 2820 - RNA, 22 nt, Homo sapiens
ucccugagacccuaacuuguga

SEQ ID NO: 2821 - RNA, 22 nt, Homo sapiens
ucacaaguuagggucucaggga

SEQ ID NO: 2822 - RNA, 22 nt, Homo sapiens
caagcuuguaucuauagguaug

SEQ ID NO: 2823 - RNA, 22 nt, Homo sapiens
cauaccuauagauacaagcuug

SEQ ID NO: 2824 - RNA, 23 nt, Homo sapiens
aaagugcugcgacauuugagcgu

SEQ ID NO: 2825 - RNA, 23 nt, Homo sapiens
acgcucaaaugucgcagcacuuu

SEQ ID NO: 2826 - RNA, 22 nt, Homo sapiens
uuuagagacggggucuugcucu

SEQ ID NO: 2827 - RNA, 22 nt, Homo sapiens
agagcaagaccccgucucuaaa

SEQ ID NO: 2828 - RNA, 24 nt, Homo sapiens
uggcccugacugaagaccagcagu

SEQ ID NO: 2829 - RNA, 24 nt, Homo sapiens
acugcuggucuucagucagggcca

SEQ ID NO: 2830 - RNA, 21 nt, Homo sapiens
gcgacccauacuugguuucag

SEQ ID NO: 2831 - RNA, 21 nt, Homo sapiens
cugaaaccaaguaugggucgc

SEQ ID NO: 2832 - RNA, 22 nt, Homo sapiens
gaaaucaagcgugggugagacc

SEQ ID NO: 2833 - RNA, 22 nt, Homo sapiens
ggucucacccacgcuugauuuc

SEQ ID NO: 2834 - RNA, 21 nt, Homo sapiens
cccugggccucugcuccccag

SEQ ID NO: 2835 - RNA, 21 nt, Homo sapiens
cuggggagcagaggcccaggg

SEQ ID NO: 2836 - RNA, 24 nt, Homo sapiens
uggggagcugaggcucugggggug

SEQ ID NO: 2837 - RNA, 24 nt, Homo sapiens
cacccccagagccucagcucccca

SEQ ID NO: 2838 - RNA, 20 nt, Homo sapiens
ggggagcuguggaagcagua

SEQ ID NO: 2839 - RNA, 20 nt, Homo sapiens
uacugcuuccacagcucccc

SEQ ID NO: 2840 - RNA, 25 nt, Homo sapiens
cuagugagggacagaaccaggauuc

SEQ ID NO: 2841 - RNA, 25 nt, Homo sapiens
gaauccugguucugucccucacuag

SEQ ID NO: 2842 - RNA, 20 nt, Homo sapiens
agagucuugugaugucuugc

SEQ ID NO: 2843 - RNA, 20 nt, Homo sapiens
gcaagacaucacaagacucu

SEQ ID NO: 2844 - RNA, 23 nt, Homo sapiens
gcagcagagaauaggacuacguc

SEQ ID NO: 2845 - RNA, 23 nt, Homo sapiens
gacguaguccuauucucugcugc

SEQ ID NO: 2846 - RNA, 23 nt, Homo sapiens
ugagcgccucgacgacagagccg

SEQ ID NO: 2847 - RNA, 23 nt, Homo sapiens
cggcucugucgucgaggcgcuca

SEQ ID NO: 2848 - RNA, 23 nt, Homo sapiens
ucccuguccuccaggagcucacg

SEQ ID NO: 2849 - RNA, 23 nt, Homo sapiens
cgugagcuccuggaggacaggga

SEQ ID NO: 2850 - RNA, 22 nt, Homo sapiens
cuauacggccuccuagcuuucc

SEQ ID NO: 2851 - RNA, 22 nt, Homo sapiens
ggaaagcuaggaggccguauag

SEQ ID NO: 2852 - RNA, 22 nt, Homo sapiens
ugagguaggagguuguauaguu

SEQ ID NO: 2853 - RNA, 22 nt, Homo sapiens
aacuauacaaccuccuaccuca

SEQ ID NO: 2854 - RNA, 22 nt, Homo sapiens
cugcgcaagcuacugccuugcu

SEQ ID NO: 2855 - RNA, 22 nt, Homo sapiens
agcaaggcaguagcuugcgcag

SEQ ID NO: 2856 - RNA, 22 nt, Homo sapiens
ugagguaguaguuugugcuguu

SEQ ID NO: 2857 - RNA, 22 nt, Homo sapiens
aacagcacaaacuacuaccuca

SEQ ID NO: 2858 - RNA, 22 nt, Homo sapiens
ugcccuguggacucaguucugg

SEQ ID NO: 2859 - RNA, 22 nt, Homo sapiens
ccagaacugaguccacagggca

SEQ ID NO: 2860 - RNA, 21 nt, Homo sapiens
ugguucuagacuugccaacua

SEQ ID NO: 2861 - RNA, 21 nt, Homo sapiens
uaguuggcaagucuagaacca

SEQ ID NO: 2862 - RNA, 23 nt, Homo sapiens
ugucugcccgcaugccugccucu

SEQ ID NO: 2863 - RNA, 23 nt, Homo sapiens
agaggcaggcaugcgggcagaca

SEQ ID NO: 2864 - RNA, 22 nt, Homo sapiens
aaaaguaauugcggucuuuggu

SEQ ID NO: 2865 - RNA, 22 nt, Homo sapiens
accaaagaccgcaauuacuuuu

SEQ ID NO: 2866 - RNA, 18 nt, Homo sapiens
ucgaggagcucacagucu

SEQ ID NO: 2867 - RNA, 18 nt, Homo sapiens
agacugugagcuccucga

SEQ ID NO: 2868 - RNA, 22 nt, Homo sapiens
cuauacaaucuauugccuuccc

SEQ ID NO: 2869 - RNA, 22 nt, Homo sapiens
gggaaggcaauagauuguauag

SEQ ID NO: 2870 - RNA, 22 nt, Homo sapiens
cuauacagucuacugucuuucc

SEQ ID NO: 2871 - RNA, 22 nt, Homo sapiens
ggaaagacaguagacuguauag

SEQ ID NO: 2872 - RNA, 22 nt, Homo sapiens
ugagguaguagauuguauaguu

SEQ ID NO: 2873 - RNA, 22 nt, Homo sapiens
aacuauacaaucuacuaccuca

SEQ ID NO: 2874 - RNA, 22 nt, Homo sapiens
aaaaguaauugugguuuuggcc

SEQ ID NO: 2875 - RNA, 22 nt, Homo sapiens
ggccaaaaccacaauuacuuuu

SEQ ID NO: 2876 - RNA, 22 nt, Homo sapiens
aaaaguaauugcgguuuuugcc

SEQ ID NO: 2877 - RNA, 22 nt, Homo sapiens
ggcaaaaaccgcaauuacuuuu

SEQ ID NO: 2878 - RNA, 22 nt, Homo sapiens
ccucugaaauucaguucuucag

SEQ ID NO: 2879 - RNA, 22 nt, Homo sapiens
cugaagaacugaauuucagagg

SEQ ID NO: 2880 - RNA, 22 nt, Homo sapiens
ugagaacugaauuccauggguu

SEQ ID NO: 2881 - RNA, 22 nt, Homo sapiens
aacccauggaauucaguucuca

SEQ ID NO: 2882 - RNA, 22 nt, Homo sapiens
acagcaggcacagacaggcagu

SEQ ID NO: 2883 - RNA, 22 nt, Homo sapiens
acugccugucugugccugcugu

SEQ ID NO: 2884 - RNA, 22 nt, Homo sapiens
ugccugucuacacuugcugugc

SEQ ID NO: 2885 - RNA, 22 nt, Homo sapiens
gcacagcaaguguagacaggca

SEQ ID NO: 2886 - RNA, 22 nt, Homo sapiens
uagcaccaucugaaaucgguua

SEQ ID NO: 2887 - RNA, 22 nt, Homo sapiens
uaaccgauuucagauggugcua

SEQ ID NO: 2888 - RNA, 22 nt, Homo sapiens
acugauuucuuuugguguucag

SEQ ID NO: 2889 - RNA, 22 nt, Homo sapiens
cugaacaccaaaagaaaucagu

SEQ ID NO: 2890 - RNA, 24 nt, Homo sapiens
gcugguuucauauggugguuuaga

SEQ ID NO: 2891 - RNA, 24 nt, Homo sapiens
ucuaaaccaccauaugaaaccagc

SEQ ID NO: 2892 - RNA, 22 nt, Homo sapiens
cugguuucacaugguggcuuag

SEQ ID NO: 2893 - RNA, 22 nt, Homo sapiens
cuaagccaccaugugaaaccag

SEQ ID NO: 2894 - RNA, 23 nt, Homo sapiens
uagcaccauuugaaaucaguguu

SEQ ID NO: 2895 - RNA, 23 nt, Homo sapiens
aacacugauuucaaauggugcua

SEQ ID NO: 2896 - RNA, 22 nt, Homo sapiens
uagcaccauuugaaaucgguua

SEQ ID NO: 2897 - RNA, 22 nt, Homo sapiens
uaaccgauuucaaauggugcua

SEQ ID NO: 2898 - RNA, 22 nt, Homo sapiens
ugaccgauuucuccugguguuc

SEQ ID NO: 2899 - RNA, 22 nt, Homo sapiens
gaacaccaggagaaaucgguca

SEQ ID NO: 2900 - RNA, 23 nt, Homo sapiens
ugucacucggcucggcccacuac

SEQ ID NO: 2901 - RNA, 23 nt, Homo sapiens
guagugggccgagccgagugaca

SEQ ID NO: 2902 - RNA, 22 nt, Homo sapiens
cugccaauuccauaggucacag

SEQ ID NO: 2903 - RNA, 22 nt, Homo sapiens
cugugaccuauggaauuggcag

SEQ ID NO: 2904 - RNA, 21 nt, Homo sapiens
cugaccuaugaauugacagcc

SEQ ID NO: 2905 - RNA, 21 nt, Homo sapiens
ggcugucaauucauaggucag

SEQ ID NO: 2906 - RNA, 20 nt, Homo sapiens
acugccccaggugcugcugg

SEQ ID NO: 2907 - RNA, 20 nt, Homo sapiens
ccagcagcaccuggggcagu

SEQ ID NO: 2908 - RNA, 22 nt, Homo sapiens
aacgccauuaucacacuaaaua

SEQ ID NO: 2909 - RNA, 22 nt, Homo sapiens
uauuuagugugauaauggcguu

SEQ ID NO: 2910 - RNA, 22 nt, Homo sapiens
cuuucagucggauguuugcagc

SEQ ID NO: 2911 - RNA, 22 nt, Homo sapiens
gcugcaaacauccgacugaaag

SEQ ID NO: 2912 - RNA, 22 nt, Homo sapiens
aauugcacgguauccaucugua

SEQ ID NO: 2913 - RNA, 22 nt, Homo sapiens
uacagauggauaccgugcaauu

SEQ ID NO: 2914 - RNA, 22 nt, Homo sapiens
cggguggaucacgaugcaauuu

SEQ ID NO: 2915 - RNA, 22 nt, Homo sapiens
aaauugcaucgugauccacccg

SEQ ID NO: 2916 - RNA, 22 nt, Homo sapiens
cugggagguggauguuuacuuc

SEQ ID NO: 2917 - RNA, 22 nt, Homo sapiens
gaaguaaacauccaccucccag

SEQ ID NO: 2918 - RNA, 22 nt, Homo sapiens
uguaaacauccuacacucagcu

SEQ ID NO: 2919 - RNA, 22 nt, Homo sapiens
agcugaguguaggauguuuaca

SEQ ID NO: 2920 - RNA, 22 nt, Homo sapiens
cugggagaggguuguuuacucc

SEQ ID NO: 2921 - RNA, 22 nt, Homo sapiens
ggaguaaacaacccucucccag

SEQ ID NO: 2922 - RNA, 22 nt, Homo sapiens
cugggagaaggcuguuuacucu

SEQ ID NO: 2923 - RNA, 22 nt, Homo sapiens
agaguaaacagccuucucccag

SEQ ID NO: 2924 - RNA, 23 nt, Homo sapiens
uguaaacauccuacacucucagc

SEQ ID NO: 2925 - RNA, 23 nt, Homo sapiens
gcugagaguguaggauguuuaca

SEQ ID NO: 2926 - RNA, 22 nt, Homo sapiens
uuuuucauuauugcuccugacc

SEQ ID NO: 2927 - RNA, 22 nt, Homo sapiens
ggucaggagcaauaaugaaaaa

SEQ ID NO: 2928 - RNA, 23 nt, Homo sapiens
ucaagagcaauaacgaaaaaugu

SEQ ID NO: 2929 - RNA, 23 nt, Homo sapiens
acauuuuucguuauugcucuuga

SEQ ID NO: 2930 - RNA, 23 nt, Homo sapiens
caaagugcuuacagugcagguag

SEQ ID NO: 2931 - RNA, 23 nt, Homo sapiens
cuaccugcacuguaagcacuuug

SEQ ID NO: 2932 - RNA, 22 nt, Homo sapiens
ggauuccuggaaauacuguucu

SEQ ID NO: 2933 - RNA, 22 nt, Homo sapiens
agaacaguauuuccaggaaucc

SEQ ID NO: 2934 - RNA, 23 nt, Homo sapiens
guccaguuuucccaggaaucccu

SEQ ID NO: 2935 - RNA, 23 nt, Homo sapiens
agggauuccugggaaaacuggac

SEQ ID NO: 2936 - RNA, 22 nt, Homo sapiens
acugcauuaugagcacuuaaag

SEQ ID NO: 2937 - RNA, 22 nt, Homo sapiens
cuuuaagugcucauaaugcagu

SEQ ID NO: 2938 - RNA, 23 nt, Homo sapiens
uaaagugcuuauagugcagguag

SEQ ID NO: 2939 - RNA, 23 nt, Homo sapiens
cuaccugcacuauaagcacuuua

SEQ ID NO: 2940 - RNA, 22 nt, Homo sapiens
gaggguuggguggaggcucucc

SEQ ID NO: 2941 - RNA, 22 nt, Homo sapiens
ggagagccuccacccaacccuc

SEQ ID NO: 2942 - RNA, 22 nt, Homo sapiens
cugugcgugugacagcggcuga

SEQ ID NO: 2943 - RNA, 22 nt, Homo sapiens
ucagccgcugucacacgcacag

SEQ ID NO: 2944 - RNA, 22 nt, Homo sapiens
ccaguggggcugcuguuaucug

SEQ ID NO: 2945 - RNA, 22 nt, Homo sapiens
cagauaacagcagccccacugg

SEQ ID NO: 2946 - RNA, 22 nt, Homo sapiens
uguaacagcaacuccaugugga

SEQ ID NO: 2947 - RNA, 22 nt, Homo sapiens
uccacauggaguugcuguuaca

SEQ ID NO: 2948 - RNA, 22 nt, Homo sapiens
ucacaguggucucugggauuau

SEQ ID NO: 2949 - RNA, 22 nt, Homo sapiens
auaaucccagagaccacuguga

SEQ ID NO: 2950 - RNA, 22 nt, Homo sapiens
uaaucucagcuggcaacuguga

SEQ ID NO: 2951 - RNA, 22 nt, Homo sapiens
ucacaguugccagcugagauua

SEQ ID NO: 2952 - RNA, 22 nt, Homo sapiens
cagugccucggcagugcagccc

SEQ ID NO: 2953 - RNA, 22 nt, Homo sapiens
gggcugcacugccgaggcacug

SEQ ID NO: 2954 - RNA, 20 nt, Homo sapiens
gugcauugcuguugcauugc

SEQ ID NO: 2955 - RNA, 20 nt, Homo sapiens
gcaaugcaacagcaaugcac

SEQ ID NO: 2956 - RNA, 19 nt, Homo sapiens
acuggacuuggaggcagaa

SEQ ID NO: 2957 - RNA, 19 nt, Homo sapiens
uucugccuccaaguccagu

SEQ ID NO: 2958 - RNA, 25 nt, Homo sapiens
acuggacuuggagucagaagagugg

SEQ ID NO: 2959 - RNA, 25 nt, Homo sapiens
ccacucuucugacuccaaguccagu

SEQ ID NO: 2960 - RNA, 20 nt, Homo sapiens
acuggacuuggagucagaaa

SEQ ID NO: 2961 - RNA, 20 nt, Homo sapiens
uuucugacuccaaguccagu

SEQ ID NO: 2962 - RNA, 19 nt, Homo sapiens
acuggacuuggagucagga

SEQ ID NO: 2963 - RNA, 19 nt, Homo sapiens
uccugacuccaaguccagu

SEQ ID NO: 2964 - RNA, 20 nt, Homo sapiens
acuggacuuggagccagaag

SEQ ID NO: 2965 - RNA, 20 nt, Homo sapiens
cuucuggcuccaaguccagu

SEQ ID NO: 2966 - RNA, 20 nt, Homo sapiens
acugggcuuggagucagaag

SEQ ID NO: 2967 - RNA, 20 nt, Homo sapiens
cuucugacuccaagcccagu

SEQ ID NO: 2968 - RNA, 21 nt, Homo sapiens
acuggacuuggugucagaugg

SEQ ID NO: 2969 - RNA, 21 nt, Homo sapiens
ccaucugacaccaaguccagu

SEQ ID NO: 2970 - RNA, 21 nt, Homo sapiens
acuggacuaggagucagaagg

SEQ ID NO: 2971 - RNA, 21 nt, Homo sapiens
ccuucugacuccuaguccagu

SEQ ID NO: 2972 - RNA, 19 nt, Homo sapiens
acuggauuuggagccagaa

SEQ ID NO: 2973 - RNA, 19 nt, Homo sapiens
uucuggcuccaaauccagu

SEQ ID NO: 2974 - RNA, 20 nt, Homo sapiens
aggaauguuccuucuuugcc

SEQ ID NO: 2975 - RNA, 20 nt, Homo sapiens
ggcaaagaaggaacauuccu

SEQ ID NO: 2976 - RNA, 21 nt, Homo sapiens
ucagugcaugacagaacuugg

SEQ ID NO: 2977 - RNA, 21 nt, Homo sapiens
ccaaguucugucaugcacuga

SEQ ID NO: 2978 - RNA, 20 nt, Homo sapiens
ucacaccugccucgcccccc

SEQ ID NO: 2979 - RNA, 20 nt, Homo sapiens
ggggggcgaggcagguguga

SEQ ID NO: 2980 - RNA, 21 nt, Homo sapiens
gugggcgggggcaggugugug

SEQ ID NO: 2981 - RNA, 21 nt, Homo sapiens
cacacaccugcccccgcccac

SEQ ID NO: 2982 - RNA, 22 nt, Homo sapiens
acgcccuucccccccuucuuca

SEQ ID NO: 2983 - RNA, 22 nt, Homo sapiens
ugaagaagggggggaagggcgu

SEQ ID NO: 2984 - RNA, 22 nt, Homo sapiens
uugcauauguaggaugucccau

SEQ ID NO: 2985 - RNA, 22 nt, Homo sapiens
augggacauccuacauaugcaa

SEQ ID NO: 2986 - RNA, 23 nt, Homo sapiens
guuugcacgggugggccuugucu

SEQ ID NO: 2987 - RNA, 23 nt, Homo sapiens
agacaaggcccacccgugcaaac

SEQ ID NO: 2988 - RNA, 22 nt, Homo sapiens
gacuauagaacuuucccccuca

SEQ ID NO: 2989 - RNA, 22 nt, Homo sapiens
ugagggggaaaguucuauaguc

SEQ ID NO: 2990 - RNA, 21 nt, Homo sapiens
agggggaaaguucuauagucc

SEQ ID NO: 2991 - RNA, 21 nt, Homo sapiens
ggacuauagaacuuucccccu

SEQ ID NO: 2992 - RNA, 21 nt, Homo sapiens
cuuuuugcggucugggcuugc

SEQ ID NO: 2993 - RNA, 21 nt, Homo sapiens
gcaagcccagaccgcaaaaag

SEQ ID NO: 2994 - RNA, 21 nt, Homo sapiens
ucuuguguucucuagaucagu

SEQ ID NO: 2995 - RNA, 21 nt, Homo sapiens
acugaucuagagaacacaaga

SEQ ID NO: 2996 - RNA, 23 nt, Homo sapiens
cccaguguucagacuaccuguuc

SEQ ID NO: 2997 - RNA, 23 nt, Homo sapiens
gaacagguagucugaacacuggg

SEQ ID NO: 2998 - RNA, 22 nt, Homo sapiens
acaguagucugcacauugguua

SEQ ID NO: 2999 - RNA, 22 nt, Homo sapiens
uaaccaaugugcagacuacugu

SEQ ID NO: 3000 - RNA, 22 nt, Homo sapiens
acaguagucugcacauugguua

SEQ ID NO: 3001 - RNA, 22 nt, Homo sapiens
uaaccaaugugcagacuacugu

SEQ ID NO: 3002 - RNA, 23 nt, Homo sapiens
cccaguguuuagacuaucuguuc

SEQ ID NO: 3003 - RNA, 23 nt, Homo sapiens
gaacagauagucuaaacacuggg

SEQ ID NO: 3004 - RNA, 22 nt, Homo sapiens
uggagugugacaaugguguuug

SEQ ID NO: 3005 - RNA, 22 nt, Homo sapiens
caaacaccauugucacacucca

SEQ ID NO: 3006 - RNA, 22 nt, Homo sapiens
ugcccuaaaugccccuucuggc

SEQ ID NO: 3007 - RNA, 22 nt, Homo sapiens
gccagaaggggcauuuagggca

SEQ ID NO: 3008 - RNA, 23 nt, Homo sapiens
uaaggugcaucuagugcaguuag

SEQ ID NO: 3009 - RNA, 23 nt, Homo sapiens
cuaacugcacuagaugcaccuua

SEQ ID NO: 3010 - RNA, 22 nt, Homo sapiens
cuccuauaugaugccuuucuuc

SEQ ID NO: 3011 - RNA, 22 nt, Homo sapiens
gaagaaaggcaucauauaggag

SEQ ID NO: 3012 - RNA, 21 nt, Homo sapiens
gaacggcuucauacaggaguu

SEQ ID NO: 3013 - RNA, 21 nt, Homo sapiens
aacuccuguaugaagccguuc

SEQ ID NO: 3014 - RNA, 22 nt, Homo sapiens
ugugacugguugaccagagggg

SEQ ID NO: 3015 - RNA, 22 nt, Homo sapiens
ccccucuggucaaccagucaca

SEQ ID NO: 3016 - RNA, 23 nt, Homo sapiens
acugcccuaagugcuccuucugg

SEQ ID NO: 3017 - RNA, 23 nt, Homo sapiens
ccagaaggagcacuuagggcagu

SEQ ID NO: 3018 - RNA, 23 nt, Homo sapiens
uaaggugcaucuagugcagauag

SEQ ID NO: 3019 - RNA, 23 nt, Homo sapiens
cuaucugcacuagaugcaccuua

SEQ ID NO: 3020 - RNA, 22 nt, Homo sapiens
cagugcaaugaugaaagggcau

SEQ ID NO: 3021 - RNA, 22 nt, Homo sapiens
augcccuuucaucauugcacug

SEQ ID NO: 3022 - RNA, 21 nt, Homo sapiens
acucuuucccuguugcacuac

SEQ ID NO: 3023 - RNA, 21 nt, Homo sapiens
guagugcaacagggaaagagu

SEQ ID NO: 3024 - RNA, 24 nt, Homo sapiens
uuuggcaaugguagaacucacacu

SEQ ID NO: 3025 - RNA, 24 nt, Homo sapiens
agugugaguucuaccauugccaaa

SEQ ID NO: 3026 - RNA, 21 nt, Homo sapiens
agggcccccccucaauccugu

SEQ ID NO: 3027 - RNA, 21 nt, Homo sapiens
acaggauugagggggggcccu

SEQ ID NO: 3028 - RNA, 22 nt, Homo sapiens
cagugcaauguuaaaagggcau

SEQ ID NO: 3029 - RNA, 22 nt, Homo sapiens
augcccuuuuaacauugcacug

SEQ ID NO: 3030 - RNA, 22 nt, Homo sapiens
uucacauugugcuacugucugc

SEQ ID NO: 3031 - RNA, 22 nt, Homo sapiens
gcagacaguagcacaaugugaa

SEQ ID NO: 3032 - RNA, 22 nt, Homo sapiens
ucggauccgucugagcuuggcu

SEQ ID NO: 3033 - RNA, 22 nt, Homo sapiens
agccaagcucagacggauccga

SEQ ID NO: 3034 - RNA, 22 nt, Homo sapiens
cugaagcucagagggcucugau

SEQ ID NO: 3035 - RNA, 22 nt, Homo sapiens
aucagagcccucugagcuucag

SEQ ID NO: 3036 - RNA, 22 nt, Homo sapiens
ccucuuccccuugucucuccag

SEQ ID NO: 3037 - RNA, 22 nt, Homo sapiens
cuggagagacaaggggaagagg

SEQ ID NO: 3038 - RNA, 22 nt, Homo sapiens
ugagugacaggggaaaugggga

SEQ ID NO: 3039 - RNA, 22 nt, Homo sapiens
uccccauuuccccugucacuca

SEQ ID NO: 3040 - RNA, 22 nt, Homo sapiens
ucaggacacuucugaacuugga

SEQ ID NO: 3041 - RNA, 22 nt, Homo sapiens
uccaaguucagaaguguccuga

SEQ ID NO: 3042 - RNA, 22 nt, Homo sapiens
caguucagaaguguuccugagu

SEQ ID NO: 3043 - RNA, 22 nt, Homo sapiens
acucaggaacacuucugaacug

SEQ ID NO: 3044 - RNA, 21 nt, Homo sapiens
uuucccuuuccauccuggcag

SEQ ID NO: 3045 - RNA, 21 nt, Homo sapiens
cugccaggauggaaagggaaa

SEQ ID NO: 3046 - RNA, 21 nt, Homo sapiens
uugccagggcaggagguggaa

SEQ ID NO: 3047 - RNA, 21 nt, Homo sapiens
uuccaccuccugcccuggcaa

SEQ ID NO: 3048 - RNA, 21 nt, Homo sapiens
agagauugguagaaaucaggu

SEQ ID NO: 3049 - RNA, 21 nt, Homo sapiens
accugauuucuaccaaucucu

SEQ ID NO: 3050 - RNA, 23 nt, Homo sapiens
aaucggacccauuuaaaccggag

SEQ ID NO: 3051 - RNA, 23 nt, Homo sapiens
cuccgguuuaaauggguccgauu

SEQ ID NO: 3052 - RNA, 24 nt, Homo sapiens
ucugggcacaggcggauggacagg

SEQ ID NO: 3053 - RNA, 24 nt, Homo sapiens
ccuguccauccgccugugcccaga

SEQ ID NO: 3054 - RNA, 21 nt, Homo sapiens
ccagugacugagcuggagcca

SEQ ID NO: 3055 - RNA, 21 nt, Homo sapiens
uggcuccagcucagucacugg

SEQ ID NO: 3056 - RNA, 22 nt, Homo sapiens
aggauaggaagaaugaagugcu

SEQ ID NO: 3057 - RNA, 22 nt, Homo sapiens
agcacuucauucuuccuauccu

SEQ ID NO: 3058 - RNA, 22 nt, Homo sapiens
aggagaguggauuccagguggu

SEQ ID NO: 3059 - RNA, 22 nt, Homo sapiens
accaccuggaauccacucuccu

SEQ ID NO: 3060 - RNA, 22 nt, Homo sapiens
uccuccucuaccucaucccagu

SEQ ID NO: 3061 - RNA, 22 nt, Homo sapiens
acugggaugagguagaggagga

SEQ ID NO: 3062 - RNA, 22 nt, Homo sapiens
ugagggguuuggaaugggaugg

SEQ ID NO: 3063 - RNA, 22 nt, Homo sapiens
ccaucccauuccaaaccccuca

SEQ ID NO: 3064 - RNA, 21 nt, Homo sapiens
auccaguucucugagggggcu

SEQ ID NO: 3065 - RNA, 21 nt, Homo sapiens
agcccccucagagaacuggau

SEQ ID NO: 3066 - RNA, 22 nt, Homo sapiens
aaccccuaaggcaacuggaugg

SEQ ID NO: 3067 - RNA, 22 nt, Homo sapiens
ccauccaguugccuuagggguu

SEQ ID NO: 3068 - RNA, 21 nt, Homo sapiens
ucauccucgucucccucccag

SEQ ID NO: 3069 - RNA, 21 nt, Homo sapiens
cugggagggagacgaggauga

SEQ ID NO: 3070 - RNA, 22 nt, Homo sapiens
agggaaggggacgaggguuggg

SEQ ID NO: 3071 - RNA, 22 nt, Homo sapiens
cccaacccucguccccuucccu

SEQ ID NO: 3072 - RNA, 23 nt, Homo sapiens
aagaagagacugagucaucgaau

SEQ ID NO: 3073 - RNA, 23 nt, Homo sapiens
auucgaugacucagucucuucuu

SEQ ID NO: 3074 - RNA, 23 nt, Homo sapiens
caauggcacaaacucauucuuga

SEQ ID NO: 3075 - RNA, 23 nt, Homo sapiens
ucaagaaugaguuugugccauug

SEQ ID NO: 3076 - RNA, 21 nt, Homo sapiens
acugaauccucuuuuccucag

SEQ ID NO: 3077 - RNA, 21 nt, Homo sapiens
cugaggaaaagaggauucagu

SEQ ID NO: 3078 - RNA, 22 nt, Homo sapiens
ugggaugagggauugaagugga

SEQ ID NO: 3079 - RNA, 22 nt, Homo sapiens
uccacuucaaucccucauccca

SEQ ID NO: 3080 - RNA, 22 nt, Homo sapiens
caggccauauugugcugccuca

SEQ ID NO: 3081 - RNA, 22 nt, Homo sapiens
ugaggcagcacaauauggccug

SEQ ID NO: 3082 - RNA, 22 nt, Homo sapiens
uagcagcacauaaugguuugug

SEQ ID NO: 3083 - RNA, 22 nt, Homo sapiens
cacaaaccauuaugugcugcua

SEQ ID NO: 3084 - RNA, 22 nt, Homo sapiens
cgaaucauuauuugcugcucua

SEQ ID NO: 3085 - RNA, 22 nt, Homo sapiens
uagagcagcaaauaaugauucg

SEQ ID NO: 3086 - RNA, 22 nt, Homo sapiens
uagcagcacaucaugguuuaca

SEQ ID NO: 3087 - RNA, 22 nt, Homo sapiens
uguaaaccaugaugugcugcua

SEQ ID NO: 3088 - RNA, 22 nt, Homo sapiens
ccaauauuacugugcugcuuua

SEQ ID NO: 3089 - RNA, 22 nt, Homo sapiens
uaaagcagcacaguaauauugg

SEQ ID NO: 3090 - RNA, 22 nt, Homo sapiens
cuagguauggucccagggaucc

SEQ ID NO: 3091 - RNA, 22 nt, Homo sapiens
ggaucccugggaccauaccuag

SEQ ID NO: 3092 - RNA, 20 nt, Homo sapiens
guguguggaaaugcuucugc

SEQ ID NO: 3093 - RNA, 20 nt, Homo sapiens
gcagaagcauuuccacacac

SEQ ID NO: 3094 - RNA, 22 nt, Homo sapiens
gugugcggaaaugcuucugcua

SEQ ID NO: 3095 - RNA, 22 nt, Homo sapiens
uagcagaagcauuuccgcacac

SEQ ID NO: 3096 - RNA, 23 nt, Homo sapiens
agcagcauuguacagggcuauca

SEQ ID NO: 3097 - RNA, 23 nt, Homo sapiens
ugauagcccuguacaaugcugcu

SEQ ID NO: 3098 - RNA, 22 nt, Homo sapiens
aacuggcccucaaagucccgcu

SEQ ID NO: 3099 - RNA, 22 nt, Homo sapiens
agcgggacuuugagggccaguu

SEQ ID NO: 3100 - RNA, 22 nt, Homo sapiens
cgggguuuugagggcgagauga

SEQ ID NO: 3101 - RNA, 22 nt, Homo sapiens
ucaucucgcccucaaaaccccg

SEQ ID NO: 3102 - RNA, 21 nt, Homo sapiens
gcagggacagcaaaggggugc

SEQ ID NO: 3103 - RNA, 21 nt, Homo sapiens
gcaccccuuugcugucccugc

SEQ ID NO: 3104 - RNA, 22 nt, Homo sapiens
uucccuuugucauccuucgccu

SEQ ID NO: 3105 - RNA, 22 nt, Homo sapiens
aggcgaaggaugacaaagggaa

SEQ ID NO: 3106 - RNA, 23 nt, Homo sapiens
auggccaaaacugcaguuauuuu

SEQ ID NO: 3107 - RNA, 23 nt, Homo sapiens
aaaauaacugcaguuuuggccau

SEQ ID NO: 3108 - RNA, 25 nt, Homo sapiens
aaaaaccacaauuacuuuugcacca

SEQ ID NO: 3109 - RNA, 25 nt, Homo sapiens
uggugcaaaaguaauugugguuuuu

SEQ ID NO: 3110 - RNA, 21 nt, Homo sapiens
caaaagugaucgugguuuuug

SEQ ID NO: 3111 - RNA, 21 nt, Homo sapiens
caaaaaccacgaucacuuuug

SEQ ID NO: 3112 - RNA, 23 nt, Homo sapiens
caaagacugcaauuacuuuugcg

SEQ ID NO: 3113 - RNA, 23 nt, Homo sapiens
cgcaaaaguaauugcagucuuug

SEQ ID NO: 3114 - RNA, 23 nt, Homo sapiens
aaaaguaacugcgguuuuugccu

SEQ ID NO: 3115 - RNA, 23 nt, Homo sapiens
aggcaaaaaccgcaguuacuuuu

SEQ ID NO: 3116 - RNA, 22 nt, Homo sapiens
ugccuggaacauaguagggacu

SEQ ID NO: 3117 - RNA, 22 nt, Homo sapiens
agucccuacuauguuccaggca

SEQ ID NO: 3118 - RNA, 21 nt, Homo sapiens
auaggacucauauagugccag

SEQ ID NO: 3119 - RNA, 21 nt, Homo sapiens
cuggcacuauaugaguccuau

SEQ ID NO: 3120 - RNA, 20 nt, Homo sapiens
agacacuauacgagucauau

SEQ ID NO: 3121 - RNA, 20 nt, Homo sapiens
auaugacucguauagugucu

SEQ ID NO: 3122 - RNA, 23 nt, Homo sapiens
ugugacugcauuaugaaaauucu

SEQ ID NO: 3123 - RNA, 23 nt, Homo sapiens
agaauuuucauaaugcagucaca

SEQ ID NO: 3124 - RNA, 20 nt, Homo sapiens
uggcuuuuaacuuugauggc

SEQ ID NO: 3125 - RNA, 20 nt, Homo sapiens
gccaucaaaguuaaaagcca

SEQ ID NO: 3126 - RNA, 21 nt, Homo sapiens
cacagcaaguguagacaggca

SEQ ID NO: 3127 - RNA, 21 nt, Homo sapiens
ugccugucuacacuugcugug

SEQ ID NO: 3128 - RNA, 21 nt, Homo sapiens
ccugucugugccugcuguaca

SEQ ID NO: 3129 - RNA, 21 nt, Homo sapiens
uguacagcaggcacagacagg

SEQ ID NO: 3130 - RNA, 22 nt, Homo sapiens
uaaauagaguaggcaaaggaca

SEQ ID NO: 3131 - RNA, 22 nt, Homo sapiens
uguccuuugccuacucuauuua

SEQ ID NO: 3132 - RNA, 22 nt, Homo sapiens
uccuuugccuauucuauuuaag

SEQ ID NO: 3133 - RNA, 22 nt, Homo sapiens
cuuaaauagaauaggcaaagga

SEQ ID NO: 3134 - RNA, 22 nt, Homo sapiens
guugggacaagaggacggucuu

SEQ ID NO: 3135 - RNA, 22 nt, Homo sapiens
aagaccguccucuugucccaac

SEQ ID NO: 3136 - RNA, 17 nt, Homo sapiens
cagagaauuguuuaauc

SEQ ID NO: 3137 - RNA, 17 nt, Homo sapiens
gauuaaacaauucucug

SEQ ID NO: 3138 - RNA, 20 nt, Homo sapiens
uagaggaagcuguggagaga

SEQ ID NO: 3139 - RNA, 20 nt, Homo sapiens
ucucuccacagcuuccucua

SEQ ID NO: 3140 - RNA, 22 nt, Homo sapiens
uccccuucugcaggccugcugg

SEQ ID NO: 3141 - RNA, 22 nt, Homo sapiens
ccagcaggccugcagaagggga

SEQ ID NO: 3142 - RNA, 23 nt, Homo sapiens
aucagggcuuguggaaugggaag

SEQ ID NO: 3143 - RNA, 23 nt, Homo sapiens
cuucccauuccacaagcccugau

SEQ ID NO: 3144 - RNA, 23 nt, Homo sapiens
ucuggcaaguaaaaaacucucau

SEQ ID NO: 3145 - RNA, 23 nt, Homo sapiens
augagaguuuuuuacuugccaga

SEQ ID NO: 3146 - RNA, 23 nt, Homo sapiens
ucgaggacugguggaagggccuu

SEQ ID NO: 3147 - RNA, 23 nt, Homo sapiens
aaggcccuuccaccaguccucga

SEQ ID NO: 3148 - RNA, 24 nt, Homo sapiens
uggguagagaaggagcucagagga

SEQ ID NO: 3149 - RNA, 24 nt, Homo sapiens
uccucugagcuccuucucuaccca

SEQ ID NO: 3150 - RNA, 22 nt, Homo sapiens
uaaagaacucuuaaaacccaau

SEQ ID NO: 3151 - RNA, 22 nt, Homo sapiens
auuggguuuuaagaguucuuua

SEQ ID NO: 3152 - RNA, 23 nt, Homo sapiens
ugauggauaaaagacuacauauu

SEQ ID NO: 3153 - RNA, 23 nt, Homo sapiens
aauauguagucuuuuauccauca

SEQ ID NO: 3154 - RNA, 22 nt, Homo sapiens
ugccuaggcugagacugcagug

SEQ ID NO: 3155 - RNA, 22 nt, Homo sapiens
cacugcagucucagccuaggca

SEQ ID NO: 3156 - RNA, 22 nt, Homo sapiens
uggcccaaccuauucaguuagu

SEQ ID NO: 3157 - RNA, 22 nt, Homo sapiens
acuaacugaauagguugggcca

SEQ ID NO: 3158 - RNA, 23 nt, Homo sapiens
cugacugaauagguagggucauu

SEQ ID NO: 3159 - RNA, 23 nt, Homo sapiens
aaugacccuaccuauucagucag

SEQ ID NO: 3160 - RNA, 24 nt, Homo sapiens
ucuguagccugggagcaauggggu

SEQ ID NO: 3161 - RNA, 24 nt, Homo sapiens
accccauugcucccaggcuacaga

SEQ ID NO: 3162 - RNA, 23 nt, Homo sapiens
uaggagcucaacagaugccuguu

SEQ ID NO: 3163 - RNA, 23 nt, Homo sapiens
aacaggcaucuguugagcuccua

SEQ ID NO: 3164 - RNA, 19 nt, Homo sapiens
gagggcggguggaggagga

SEQ ID NO: 3165 - RNA, 19 nt, Homo sapiens
uccuccuccacccgcccuc

SEQ ID NO: 3166 - RNA, 25 nt, Homo sapiens
auaacauuguaaagcgcuucuuucg

SEQ ID NO: 3167 - RNA, 25 nt, Homo sapiens
cgaaagaagcgcuuuacaauguuau

SEQ ID NO: 3168 - RNA, 24 nt, Homo sapiens
agauauuuugaguguuuggaauug

SEQ ID NO: 3169 - RNA, 24 nt, Homo sapiens
caauuccaaacacucaaaauaucu

SEQ ID NO: 3170 - RNA, 22 nt, Homo sapiens
aacuccaaacacucaaaacuca

SEQ ID NO: 3171 - RNA, 22 nt, Homo sapiens
ugaguuuugaguguuuggaguu

SEQ ID NO: 3172 - RNA, 22 nt, Homo sapiens
caugcuaggauagaaagaaugg

SEQ ID NO: 3173 - RNA, 22 nt, Homo sapiens
ccauucuuucuauccuagcaug

SEQ ID NO: 3174 - RNA, 24 nt, Homo sapiens
gguugggcagugaggaggguguga

SEQ ID NO: 3175 - RNA, 24 nt, Homo sapiens
ucacacccuccucacugcccaacc

SEQ ID NO: 3176 - RNA, 22 nt, Homo sapiens
uggaaaaaacuggugugugcuu

SEQ ID NO: 3177 - RNA, 22 nt, Homo sapiens
aagcacacaccaguuuuuucca

SEQ ID NO: 3178 - RNA, 22 nt, Homo sapiens
cuggggagauccucgagguugg

SEQ ID NO: 3179 - RNA, 22 nt, Homo sapiens
ccaaccucgaggaucuccccag

SEQ ID NO: 3180 - RNA, 22 nt, Homo sapiens
caaccucgacgaucuccucagc

SEQ ID NO: 3181 - RNA, 22 nt, Homo sapiens
gcugaggagaucgucgagguug

SEQ ID NO: 3182 - RNA, 21 nt, Homo sapiens
ugaggagaucgucgagguugg

SEQ ID NO: 3183 - RNA, 21 nt, Homo sapiens
ccaaccucgacgaucuccuca

SEQ ID NO: 3184 - RNA, 22 nt, Homo sapiens
caaccucgaggaucuccccagc

SEQ ID NO: 3185 - RNA, 22 nt, Homo sapiens
gcuggggagauccucgagguug

SEQ ID NO: 3186 - RNA, 21 nt, Homo sapiens
gguggggcaaugggaucaggu

SEQ ID NO: 3187 - RNA, 21 nt, Homo sapiens
accugaucccauugccccacc

SEQ ID NO: 3188 - RNA, 23 nt, Homo sapiens
ggggaaagcgaguagggacauuu

SEQ ID NO: 3189 - RNA, 23 nt, Homo sapiens
aaaugucccuacucgcuuucccc

SEQ ID NO: 3190 - RNA, 22 nt, Homo sapiens
cagaaggggaguugggagcaga

SEQ ID NO: 3191 - RNA, 22 nt, Homo sapiens
ucugcucccaacuccccuucug

SEQ ID NO: 3192 - RNA, 21 nt, Homo sapiens
ccaggcucugcagugggaacu

SEQ ID NO: 3193 - RNA, 21 nt, Homo sapiens
aguucccacugcagagccugg

SEQ ID NO: 3194 - RNA, 21 nt, Homo sapiens
cucccacuuccagaucuuucu

SEQ ID NO: 3195 - RNA, 21 nt, Homo sapiens
agaaagaucuggaagugggag

SEQ ID NO: 3196 - RNA, 22 nt, Homo sapiens
aaagaucuggaagugggagaca

SEQ ID NO: 3197 - RNA, 22 nt, Homo sapiens
ugucucccacuuccagaucuuu

SEQ ID NO: 3198 - RNA, 22 nt, Homo sapiens
cugcccuagucuagcugaagcu

SEQ ID NO: 3199 - RNA, 22 nt, Homo sapiens
agcuucagcuagacuagggcag

SEQ ID NO: 3200 - RNA, 22 nt, Homo sapiens
uucagccaggcuagugcagucu

SEQ ID NO: 3201 - RNA, 22 nt, Homo sapiens
agacugcacuagccuggcugaa

SEQ ID NO: 3202 - RNA, 22 nt, Homo sapiens
uaggauuacaagugucggccac

SEQ ID NO: 3203 - RNA, 22 nt, Homo sapiens
guggccgacacuuguaauccua

SEQ ID NO: 3204 - RNA, 22 nt, Homo sapiens
agagcugagacuagaaagccca

SEQ ID NO: 3205 - RNA, 22 nt, Homo sapiens
ugggcuuucuagucucagcucu

SEQ ID NO: 3206 - RNA, 22 nt, Homo sapiens
ggcuuucuagucucagcucucc

SEQ ID NO: 3207 - RNA, 22 nt, Homo sapiens
ggagagcugagacuagaaagcc

SEQ ID NO: 3208 - RNA, 23 nt, Homo sapiens
cugauaagaacagaggcccagau

SEQ ID NO: 3209 - RNA, 23 nt, Homo sapiens
aucugggccucuguucuuaucag

SEQ ID NO: 3210 - RNA, 21 nt, Homo sapiens
ucccuaccccuccacucccca

SEQ ID NO: 3211 - RNA, 21 nt, Homo sapiens
uggggaguggagggguaggga

SEQ ID NO: 3212 - RNA, 23 nt, Homo sapiens
uuagggaguagaaggguggggag

SEQ ID NO: 3213 - RNA, 23 nt, Homo sapiens
cuccccacccuucuacucccuaa

SEQ ID NO: 3214 - RNA, 22 nt, Homo sapiens
uauaaaaugagggcaguaagac

SEQ ID NO: 3215 - RNA, 22 nt, Homo sapiens
gucuuacugcccucauuuuaua

SEQ ID NO: 3216 - RNA, 22 nt, Homo sapiens
ugugacuuuaagggaaauggcg

SEQ ID NO: 3217 - RNA, 22 nt, Homo sapiens
cgccauuucccuuaaagucaca

SEQ ID NO: 3218 - RNA, 22 nt, Homo sapiens
agguggaugcaaugugaccuca

SEQ ID NO: 3219 - RNA, 22 nt, Homo sapiens
ugaggucacauugcauccaccu

SEQ ID NO: 3220 - RNA, 23 nt, Homo sapiens
cgcagacaaugccuacuggccua

SEQ ID NO: 3221 - RNA, 23 nt, Homo sapiens
uaggccaguaggcauugucugcg

SEQ ID NO: 3222 - RNA, 17 nt, Homo sapiens
gaguucuacagucagac

SEQ ID NO: 3223 - RNA, 17 nt, Homo sapiens
gucugacuguagaacuc

SEQ ID NO: 3224 - RNA, 22 nt, Homo sapiens
uaggacugugcuuggcacauag

SEQ ID NO: 3225 - RNA, 22 nt, Homo sapiens
cuaugugccaagcacaguccua

SEQ ID NO: 3226 - RNA, 22 nt, Homo sapiens
cugggguucugagacagacagu

SEQ ID NO: 3227 - RNA, 22 nt, Homo sapiens
acugucugucucagaaccccag

SEQ ID NO: 3228 - RNA, 22 nt, Homo sapiens
aaaggaggaaauaggcaggcca

SEQ ID NO: 3229 - RNA, 22 nt, Homo sapiens
uggccugccuauuuccuccuuu

SEQ ID NO: 3230 - RNA, 22 nt, Homo sapiens
ugcccugccuguuuucuccuuu

SEQ ID NO: 3231 - RNA, 22 nt, Homo sapiens
aaaggagaaaacaggcagggca

SEQ ID NO: 3232 - RNA, 23 nt, Homo sapiens
uagugaguuagagaugcagagcc

SEQ ID NO: 3233 - RNA, 23 nt, Homo sapiens
ggcucugcaucucuaacucacua

SEQ ID NO: 3234 - RNA, 19 nt, Homo sapiens
acuggccugggacuaccgg

SEQ ID NO: 3235 - RNA, 19 nt, Homo sapiens
ccgguagucccaggccagu

SEQ ID NO: 3236 - RNA, 21 nt, Homo sapiens
ugcacggcacuggggacacgu

SEQ ID NO: 3237 - RNA, 21 nt, Homo sapiens
acguguccccagugccgugca

SEQ ID NO: 3238 - RNA, 23 nt, Homo sapiens
uguguacacacgugccaggcgcu

SEQ ID NO: 3239 - RNA, 23 nt, Homo sapiens
agcgccuggcacguguguacaca

SEQ ID NO: 3240 - RNA, 17 nt, Homo sapiens
ggggcgcggccggaucg

SEQ ID NO: 3241 - RNA, 17 nt, Homo sapiens
cgauccggccgcgcccc

SEQ ID NO: 3242 - RNA, 22 nt, Homo sapiens
agaaggggugaaauuuaaacgu

SEQ ID NO: 3243 - RNA, 22 nt, Homo sapiens
acguuuaaauuucaccccuucu

SEQ ID NO: 3244 - RNA, 19 nt, Homo sapiens
aucgggcccucggcgccgg

SEQ ID NO: 3245 - RNA, 19 nt, Homo sapiens
ccggcgccgagggcccgau

SEQ ID NO: 3246 - RNA, 17 nt, Homo sapiens
gcuucuguaguguaguc

SEQ ID NO: 3247 - RNA, 17 nt, Homo sapiens
gacuacacuacagaagc

SEQ ID NO: 3248 - RNA, 22 nt, Homo sapiens
gccucucucggagucgcucgga

SEQ ID NO: 3249 - RNA, 22 nt, Homo sapiens
uccgagcgacuccgagagaggc

SEQ ID NO: 3250 - RNA, 23 nt, Homo sapiens
aaagucucgcucucugccccuca

SEQ ID NO: 3251 - RNA, 23 nt, Homo sapiens
ugaggggcagagagcgagacuuu

SEQ ID NO: 3252 - RNA, 24 nt, Homo sapiens
ugaggggccucagaccgagcuuuu

SEQ ID NO: 3253 - RNA, 24 nt, Homo sapiens
aaaagcucggucugaggccccuca

SEQ ID NO: 3254 - RNA, 23 nt, Homo sapiens
agaagaaggcggucggucugcgg

SEQ ID NO: 3255 - RNA, 23 nt, Homo sapiens
ccgcagaccgaccgccuucuucu

SEQ ID NO: 3256 - RNA, 20 nt, Homo sapiens
uuggccauggggcugcgcgg

SEQ ID NO: 3257 - RNA, 20 nt, Homo sapiens
ccgcgcagccccauggccaa

SEQ ID NO: 3258 - RNA, 23 nt, Homo sapiens
ccugggcagcguguggcugaagg

SEQ ID NO: 3259 - RNA, 23 nt, Homo sapiens
ccuucagccacacgcugcccagg

SEQ ID NO: 3260 - RNA, 23 nt, Homo sapiens
agaggcuuugugcggauacgggg

SEQ ID NO: 3261 - RNA, 23 nt, Homo sapiens
ccccguauccgcacaaagccucu

SEQ ID NO: 3262 - RNA, 21 nt, Homo sapiens
cccuugggucugaugggguag

SEQ ID NO: 3263 - RNA, 21 nt, Homo sapiens
cuaccccaucagacccaaggg

SEQ ID NO: 3264 - RNA, 25 nt, Homo sapiens
ugccccaucugugcccuggguagga

SEQ ID NO: 3265 - RNA, 25 nt, Homo sapiens
uccuacccagggcacagauggggca

SEQ ID NO: 3266 - RNA, 23 nt, Homo sapiens
uguggaagguagacggccagaga

SEQ ID NO: 3267 - RNA, 23 nt, Homo sapiens
ucucuggccgucuaccuuccaca

SEQ ID NO: 3268 - RNA, 20 nt, Homo sapiens
ucuggccagcuacgucccca

SEQ ID NO: 3269 - RNA, 20 nt, Homo sapiens
uggggacguagcuggccaga

SEQ ID NO: 3270 - RNA, 23 nt, Homo sapiens
uggggacguagcuggccagacag

SEQ ID NO: 3271 - RNA, 23 nt, Homo sapiens
cugucuggccagcuacgucccca

SEQ ID NO: 3272 - RNA, 22 nt, Homo sapiens
cucucuggccgucuaccuucca

SEQ ID NO: 3273 - RNA, 22 nt, Homo sapiens
uggaagguagacggccagagag

SEQ ID NO: 3274 - RNA, 23 nt, Homo sapiens
ucugggagguuguagcaguggaa

SEQ ID NO: 3275 - RNA, 23 nt, Homo sapiens
uuccacugcuacaaccucccaga

SEQ ID NO: 3276 - RNA, 22 nt, Homo sapiens
uccugcguaggaucugaggagu

SEQ ID NO: 3277 - RNA, 22 nt, Homo sapiens
acuccucagauccuacgcagga

SEQ ID NO: 3278 - RNA, 22 nt, Homo sapiens
agcucugcugcucacuggcagu

SEQ ID NO: 3279 - RNA, 22 nt, Homo sapiens
acugccagugagcagcagagcu

SEQ ID NO: 3280 - RNA, 21 nt, Homo sapiens
ggccagccaccaggagggcug

SEQ ID NO: 3281 - RNA, 21 nt, Homo sapiens
cagcccuccugguggcuggcc

SEQ ID NO: 3282 - RNA, 17 nt, Homo sapiens
cgcgccgggcccggguu

SEQ ID NO: 3283 - RNA, 17 nt, Homo sapiens
aacccgggcccggcgcg

SEQ ID NO: 3284 - RNA, 23 nt, Homo sapiens
ggaggcgcaggcucggaaaggcg

SEQ ID NO: 3285 - RNA, 23 nt, Homo sapiens
cgccuuuccgagccugcgccucc

SEQ ID NO: 3286 - RNA, 22 nt, Homo sapiens
guggaguccuggggaauggaga

SEQ ID NO: 3287 - RNA, 22 nt, Homo sapiens
ucuccauuccccaggacuccac

SEQ ID NO: 3288 - RNA, 23 nt, Homo sapiens
agggacugccuuaggagaaaguu

SEQ ID NO: 3289 - RNA, 23 nt, Homo sapiens
aacuuucuccuaaggcagucccu

SEQ ID NO: 3290 - RNA, 17 nt, Homo sapiens
gggauaugaagaaaaau

SEQ ID NO: 3291 - RNA, 17 nt, Homo sapiens
auuuuucuucauauccc

SEQ ID NO: 3292 - RNA, 22 nt, Homo sapiens
uggaagggagaagagcuuuaau

SEQ ID NO: 3293 - RNA, 22 nt, Homo sapiens
auuaaagcucuucucccuucca

SEQ ID NO: 3294 - RNA, 22 nt, Homo sapiens
acuuuccucacucccgugaagu

SEQ ID NO: 3295 - RNA, 22 nt, Homo sapiens
acuucacgggagugaggaaagu

SEQ ID NO: 3296 - RNA, 21 nt, Homo sapiens
uucgcgggcgaaggcaaaguc

SEQ ID NO: 3297 - RNA, 21 nt, Homo sapiens
gacuuugccuucgcccgcgaa

SEQ ID NO: 3298 - RNA, 22 nt, Homo sapiens
caucuggcauccgucacacaga

SEQ ID NO: 3299 - RNA, 22 nt, Homo sapiens
ucugugugacggaugccagaug

SEQ ID NO: 3300 - RNA, 22 nt, Homo sapiens
ugagggacagaugccagaagca

SEQ ID NO: 3301 - RNA, 22 nt, Homo sapiens
ugcuucuggcaucugucccuca

SEQ ID NO: 3302 - RNA, 22 nt, Homo sapiens
aaacuaaucucuacacugcugc

SEQ ID NO: 3303 - RNA, 22 nt, Homo sapiens
gcagcaguguagagauuaguuu

SEQ ID NO: 3304 - RNA, 22 nt, Homo sapiens
gcaguaguguagagauugguuu

SEQ ID NO: 3305 - RNA, 22 nt, Homo sapiens
aaaccaaucucuacacuacugc

SEQ ID NO: 3306 - RNA, 21 nt, Homo sapiens
gcugcaccggagacuggguaa

SEQ ID NO: 3307 - RNA, 21 nt, Homo sapiens
uuacccagucuccggugcagc

SEQ ID NO: 3308 - RNA, 21 nt, Homo sapiens
uacccagucuccggugcagcc

SEQ ID NO: 3309 - RNA, 21 nt, Homo sapiens
ggcugcaccggagacugggua

SEQ ID NO: 3310 - RNA, 24 nt, Homo sapiens
uguggacagugagguagagggagu

SEQ ID NO: 3311 - RNA, 24 nt, Homo sapiens
acucccucuaccucacuguccaca

SEQ ID NO: 3312 - RNA, 22 nt, Homo sapiens
agcuuuugggaauucagguagu

SEQ ID NO: 3313 - RNA, 22 nt, Homo sapiens
acuaccugaauucccaaaagcu

SEQ ID NO: 3314 - RNA, 21 nt, Homo sapiens
accugaauuaccaaaagcuuu

SEQ ID NO: 3315 - RNA, 21 nt, Homo sapiens
aaagcuuuugguaauucaggu

SEQ ID NO: 3316 - RNA, 22 nt, Homo sapiens
auauaccuguucggucucuuua

SEQ ID NO: 3317 - RNA, 22 nt, Homo sapiens
uaaagagaccgaacagguauau

SEQ ID NO: 3318 - RNA, 22 nt, Homo sapiens
aggggaccaaagagauauauag

SEQ ID NO: 3319 - RNA, 22 nt, Homo sapiens
cuauauaucucuuugguccccu

SEQ ID NO: 3320 - RNA, 23 nt, Homo sapiens
uuuguauggauauguguguguau

SEQ ID NO: 3321 - RNA, 23 nt, Homo sapiens
auacacacacauauccauacaaa

SEQ ID NO: 3322 - RNA, 22 nt, Homo sapiens
uguguuagaauaggggcaauaa

SEQ ID NO: 3323 - RNA, 22 nt, Homo sapiens
uuauugccccuauucuaacaca

SEQ ID NO: 3324 - RNA, 22 nt, Homo sapiens
auugccucuguucuaacacaag

SEQ ID NO: 3325 - RNA, 22 nt, Homo sapiens
cuuguguuagaacagaggcaau

SEQ ID NO: 3326 - RNA, 22 nt, Homo sapiens
aagggcuuccucucugcaggac

SEQ ID NO: 3327 - RNA, 22 nt, Homo sapiens
guccugcagagaggaagcccuu

SEQ ID NO: 3328 - RNA, 21 nt, Homo sapiens
ccugcagagaggaagcccuuc

SEQ ID NO: 3329 - RNA, 21 nt, Homo sapiens
gaagggcuuccucucugcagg

SEQ ID NO: 3330 - RNA, 22 nt, Homo sapiens
aggauuucagaaauacuggugu

SEQ ID NO: 3331 - RNA, 22 nt, Homo sapiens
acaccaguauuucugaaauccu

SEQ ID NO: 3332 - RNA, 24 nt, Homo sapiens
agauguauggaaucuguauauauc

SEQ ID NO: 3333 - RNA, 24 nt, Homo sapiens
gauauauacagauuccauacaucu

SEQ ID NO: 3334 - RNA, 22 nt, Homo sapiens
cggggagagaacgcagugacgu

SEQ ID NO: 3335 - RNA, 22 nt, Homo sapiens
acgucacugcguucucuccccg

SEQ ID NO: 3336 - RNA, 19 nt, Homo sapiens
uggggcggagcuuccggag

SEQ ID NO: 3337 - RNA, 19 nt, Homo sapiens
cuccggaagcuccgcccca

SEQ ID NO: 3338 - RNA, 21 nt, Homo sapiens
ucacgcggagagauggcuuug

SEQ ID NO: 3339 - RNA, 21 nt, Homo sapiens
caaagccaucucuccgcguga

SEQ ID NO: 3340 - RNA, 22 nt, Homo sapiens
caggcgucugucuacguggcuu

SEQ ID NO: 3341 - RNA, 22 nt, Homo sapiens
aagccacguagacagacgccug

SEQ ID NO: 3342 - RNA, 22 nt, Homo sapiens
caccuugcgcuacucaggucug

SEQ ID NO: 3343 - RNA, 22 nt, Homo sapiens
cagaccugaguagcgcaaggug

SEQ ID NO: 3344 - RNA, 22 nt, Homo sapiens
aaucugagaaggcgcacaaggu

SEQ ID NO: 3345 - RNA, 22 nt, Homo sapiens
accuugugcgccuucucagauu

SEQ ID NO: 3346 - RNA, 22 nt, Homo sapiens
aaggccuuucugaaccuucaga

SEQ ID NO: 3347 - RNA, 22 nt, Homo sapiens
ucugaagguucagaaaggccuu

SEQ ID NO: 3348 - RNA, 22 nt, Homo sapiens
gugacaucacauauacggcagc

SEQ ID NO: 3349 - RNA, 22 nt, Homo sapiens
gcugccguauaugugaugucac

SEQ ID NO: 3350 - RNA, 24 nt, Homo sapiens
ucagaacaaaugccgguucccaga

SEQ ID NO: 3351 - RNA, 24 nt, Homo sapiens
ucugggaaccggcauuuguucuga

SEQ ID NO: 3352 - RNA, 22 nt, Homo sapiens
ugagaaccacgucugcucugag

SEQ ID NO: 3353 - RNA, 22 nt, Homo sapiens
cucagagcagacgugguucuca

SEQ ID NO: 3354 - RNA, 17 nt, Homo sapiens
ucauauugcuucuuucu

SEQ ID NO: 3355 - RNA, 17 nt, Homo sapiens
agaaagaagcaauauga

SEQ ID NO: 3356 - RNA, 22 nt, Homo sapiens
ugugacagauugauaacugaaa

SEQ ID NO: 3357 - RNA, 22 nt, Homo sapiens
uuucaguuaucaaucugucaca

SEQ ID NO: 3358 - RNA, 23 nt, Homo sapiens
uggaguccaggaaucugcauuuu

SEQ ID NO: 3359 - RNA, 23 nt, Homo sapiens
aaaaugcagauuccuggacucca

SEQ ID NO: 3360 - RNA, 22 nt, Homo sapiens
aagcccuuaccccaaaaaguau

SEQ ID NO: 3361 - RNA, 22 nt, Homo sapiens
auacuuuuugggguaagggcuu

SEQ ID NO: 3362 - RNA, 22 nt, Homo sapiens
aagcccuuaccccaaaaagcau

SEQ ID NO: 3363 - RNA, 22 nt, Homo sapiens
augcuuuuugggguaagggcuu

SEQ ID NO: 3364 - RNA, 22 nt, Homo sapiens
uggaauguaaggaagugugugg

SEQ ID NO: 3365 - RNA, 22 nt, Homo sapiens
ccacacacuuccuuacauucca

SEQ ID NO: 3366 - RNA, 22 nt, Homo sapiens
cuuaucagauuguauuguaauu

SEQ ID NO: 3367 - RNA, 22 nt, Homo sapiens
aauuacaauacaaucugauaag

SEQ ID NO: 3368 - RNA, 22 nt, Homo sapiens
uuauaauacaaccugauaagug

SEQ ID NO: 3369 - RNA, 22 nt, Homo sapiens
cacuuaucagguuguauuauaa

SEQ ID NO: 3370 - RNA, 22 nt, Homo sapiens
cuuagcagguuguauuaucauu

SEQ ID NO: 3371 - RNA, 22 nt, Homo sapiens
aaugauaauacaaccugcuaag

SEQ ID NO: 3372 - RNA, 22 nt, Homo sapiens
auauaauacaaccugcuaagug

SEQ ID NO: 3373 - RNA, 22 nt, Homo sapiens
cacuuagcagguuguauuauau

SEQ ID NO: 3374 - RNA, 22 nt, Homo sapiens
cacuuagcagguuguauuauau

SEQ ID NO: 3375 - RNA, 22 nt, Homo sapiens
auauaauacaaccugcuaagug

SEQ ID NO: 3376 - RNA, 22 nt, Homo sapiens
auaauacaaccugcuaagugcu

SEQ ID NO: 3377 - RNA, 22 nt, Homo sapiens
agcacuuagcagguuguauuau

SEQ ID NO: 3378 - RNA, 22 nt, Homo sapiens
uuugguccccuucaaccagcug

SEQ ID NO: 3379 - RNA, 22 nt, Homo sapiens
cagcugguugaaggggaccaaa

SEQ ID NO: 3380 - RNA, 22 nt, Homo sapiens
uuugguccccuucaaccagcua

SEQ ID NO: 3381 - RNA, 22 nt, Homo sapiens
uagcugguugaaggggaccaaa

SEQ ID NO: 3382 - RNA, 22 nt, Homo sapiens
uguaaacauccuugacuggaag

SEQ ID NO: 3383 - RNA, 22 nt, Homo sapiens
cuuccagucaaggauguuuaca

SEQ ID NO: 3384 - RNA, 22 nt, Homo sapiens
ugucaguuugucaaauacccca

SEQ ID NO: 3385 - RNA, 22 nt, Homo sapiens
ugggguauuugacaaacugaca

SEQ ID NO: 3386 - RNA, 22 nt, Homo sapiens
cguguauuugacaagcugaguu

SEQ ID NO: 3387 - RNA, 22 nt, Homo sapiens
aacucagcuugucaaauacacg

SEQ ID NO: 3388 - RNA, 21 nt, Homo sapiens
uucacaguggcuaaguuccgc

SEQ ID NO: 3389 - RNA, 21 nt, Homo sapiens
gcggaacuuagccacugugaa

SEQ ID NO: 3390 - RNA, 22 nt, Homo sapiens
agggcuuagcugcuugugagca

SEQ ID NO: 3391 - RNA, 22 nt, Homo sapiens
ugcucacaagcagcuaagcccu

SEQ ID NO: 3392 - RNA, 21 nt, Homo sapiens
aucacauugccagggauuacc

SEQ ID NO: 3393 - RNA, 21 nt, Homo sapiens
gguaaucccuggcaaugugau

SEQ ID NO: 3394 - RNA, 22 nt, Homo sapiens
uggguuccuggcaugcugauuu

SEQ ID NO: 3395 - RNA, 22 nt, Homo sapiens
aaaucagcaugccaggaaccca

SEQ ID NO: 3396 - RNA, 22 nt, Homo sapiens
cuuucagucggauguuuacagc

SEQ ID NO: 3397 - RNA, 22 nt, Homo sapiens
gcuguaaacauccgacugaaag

SEQ ID NO: 3398 - RNA, 22 nt, Homo sapiens
ugccuacugagcugauaucagu

SEQ ID NO: 3399 - RNA, 22 nt, Homo sapiens
acugauaucagcucaguaggca

SEQ ID NO: 3400 - RNA, 22 nt, Homo sapiens
ugccuacugagcugaaacacag

SEQ ID NO: 3401 - RNA, 22 nt, Homo sapiens
cuguguuucagcucaguaggca

SEQ ID NO: 3402 - RNA, 22 nt, Homo sapiens
uggcucaguucagcaggaacag

SEQ ID NO: 3403 - RNA, 22 nt, Homo sapiens
cuguuccugcugaacugagcca

SEQ ID NO: 3404 - RNA, 21 nt, Homo sapiens
uucacaguggcuaaguucugc

SEQ ID NO: 3405 - RNA, 21 nt, Homo sapiens
gcagaacuuagccacugugaa

SEQ ID NO: 3406 - RNA, 22 nt, Homo sapiens
agagcuuagcugauuggugaac

SEQ ID NO: 3407 - RNA, 22 nt, Homo sapiens
guucaccaaucagcuaagcucu

SEQ ID NO: 3408 - RNA, 23 nt, Homo sapiens
uguaguguuuccuacuuuaugga

SEQ ID NO: 3409 - RNA, 23 nt, Homo sapiens
uccauaaaguaggaaacacuaca

SEQ ID NO: 3410 - RNA, 21 nt, Homo sapiens
cauaaaguagaaagcacuacu

SEQ ID NO: 3411 - RNA, 21 nt, Homo sapiens
aguagugcuuucuacuuuaug

SEQ ID NO: 3412 - RNA, 22 nt, Homo sapiens
ugaaggucuacugugugccagg

SEQ ID NO: 3413 - RNA, 22 nt, Homo sapiens
ccuggcacacaguagaccuuca

SEQ ID NO: 3414 - RNA, 22 nt, Homo sapiens
uuguacaugguaggcuuucauu

SEQ ID NO: 3415 - RNA, 22 nt, Homo sapiens
aaugaaagccuaccauguacaa

SEQ ID NO: 3416 - RNA, 21 nt, Homo sapiens
cuggauggcuccuccaugucu

SEQ ID NO: 3417 - RNA, 21 nt, Homo sapiens
agacauggaggagccauccag

SEQ ID NO: 3418 - RNA, 23 nt, Homo sapiens
ucuuggaguaggucauugggugg

SEQ ID NO: 3419 - RNA, 23 nt, Homo sapiens
ccacccaaugaccuacuccaaga

SEQ ID NO: 3420 - RNA, 22 nt, Homo sapiens
cucaucugcaaagaaguaagug

SEQ ID NO: 3421 - RNA, 22 nt, Homo sapiens
cacuuacuucuuugcagaugag

SEQ ID NO: 3422 - RNA, 22 nt, Homo sapiens
aacuguuugcagaggaaacuga

SEQ ID NO: 3423 - RNA, 22 nt, Homo sapiens
ucaguuuccucugcaaacaguu

SEQ ID NO: 3424 - RNA, 22 nt, Homo sapiens
cuugguucagggagggucccca

SEQ ID NO: 3425 - RNA, 22 nt, Homo sapiens
uggggacccucccugaaccaag

SEQ ID NO: 3426 - RNA, 22 nt, Homo sapiens
aggaccuucccugaaccaagga

SEQ ID NO: 3427 - RNA, 22 nt, Homo sapiens
uccuugguucagggaagguccu

SEQ ID NO: 3428 - RNA, 21 nt, Homo sapiens
accuccugugugcauggauua

SEQ ID NO: 3429 - RNA, 21 nt, Homo sapiens
uaauccaugcacacaggaggu

SEQ ID NO: 3430 - RNA, 22 nt, Homo sapiens
uacccauugcauaucggaguug

SEQ ID NO: 3431 - RNA, 22 nt, Homo sapiens
caacuccgauaugcaaugggua

SEQ ID NO: 3432 - RNA, 18 nt, Homo sapiens
aaagcuggguugagaagg

SEQ ID NO: 3433 - RNA, 18 nt, Homo sapiens
ccuucucaacccagcuuu

SEQ ID NO: 3434 - RNA, 20 nt, Homo sapiens
gguauccguuuggggauggu

SEQ ID NO: 3435 - RNA, 20 nt, Homo sapiens
accauccccaaacggauacc

SEQ ID NO: 3436 - RNA, 22 nt, Homo sapiens
gaaggcagcagugcuccccugu

SEQ ID NO: 3437 - RNA, 22 nt, Homo sapiens
acaggggagcacugcugccuuc

SEQ ID NO: 3438 - RNA, 22 nt, Homo sapiens
ucagugcaucacagaacuuugu

SEQ ID NO: 3439 - RNA, 22 nt, Homo sapiens
acaaaguucugugaugcacuga

SEQ ID NO: 3440 - RNA, 22 nt, Homo sapiens
aaguucuguuauacacucaggc

SEQ ID NO: 3441 - RNA, 22 nt, Homo sapiens
gccugaguguauaacagaacuu

SEQ ID NO: 3442 - RNA, 22 nt, Homo sapiens
cuggcccucucugcccuuccgu

SEQ ID NO: 3443 - RNA, 22 nt, Homo sapiens
acggaagggcagagagggccag

SEQ ID NO: 3444 - RNA, 21 nt, Homo sapiens
cuagacugaagcuccuugagg

SEQ ID NO: 3445 - RNA, 21 nt, Homo sapiens
ccucaaggagcuucagucuag

SEQ ID NO: 3446 - RNA, 21 nt, Homo sapiens
ucgaggagcucacagucuagu

SEQ ID NO: 3447 - RNA, 21 nt, Homo sapiens
acuagacugugagcuccucga

SEQ ID NO: 3448 - RNA, 21 nt, Homo sapiens
cacauuacacggucgaccucu

SEQ ID NO: 3449 - RNA, 21 nt, Homo sapiens
agaggucgaccguguaaugug

SEQ ID NO: 3450 - RNA, 22 nt, Homo sapiens
aggugguccguggcgcguucgc

SEQ ID NO: 3451 - RNA, 22 nt, Homo sapiens
gcgaacgcgccacggaccaccu

SEQ ID NO: 3452 - RNA, 23 nt, Homo sapiens
cgcauccccuagggcauuggugu

SEQ ID NO: 3453 - RNA, 23 nt, Homo sapiens
acaccaaugcccuaggggaugcg

SEQ ID NO: 3454 - RNA, 20 nt, Homo sapiens
ccucugggcccuuccuccag

SEQ ID NO: 3455 - RNA, 20 nt, Homo sapiens
cuggaggaagggcccagagg

SEQ ID NO: 3456 - RNA, 23 nt, Homo sapiens
ccuaguagguguccaguaagugu

SEQ ID NO: 3457 - RNA, 23 nt, Homo sapiens
acacuuacuggacaccuacuagg

SEQ ID NO: 3458 - RNA, 21 nt, Homo sapiens
acggugcuggauguggccuuu

SEQ ID NO: 3459 - RNA, 21 nt, Homo sapiens
aaaggccacauccagcaccgu

SEQ ID NO: 3460 - RNA, 23 nt, Homo sapiens
ucagcaccaggauauuguuggag

SEQ ID NO: 3461 - RNA, 23 nt, Homo sapiens
cuccaacaauauccuggugcuga

SEQ ID NO: 3462 - RNA, 23 nt, Homo sapiens
ucaacaaaaucacugaugcugga

SEQ ID NO: 3463 - RNA, 23 nt, Homo sapiens
uccagcaucagugauuuuguuga

SEQ ID NO: 3464 - RNA, 22 nt, Homo sapiens
aacaauauccuggugcugagug

SEQ ID NO: 3465 - RNA, 22 nt, Homo sapiens
cacucagcaccaggauauuguu

SEQ ID NO: 3466 - RNA, 23 nt, Homo sapiens
ggcagguucucacccucucuagg

SEQ ID NO: 3467 - RNA, 23 nt, Homo sapiens
ccuagagagggugagaaccugcc

SEQ ID NO: 3468 - RNA, 23 nt, Homo sapiens
gacacgggcgacagcugcggccc

SEQ ID NO: 3469 - RNA, 23 nt, Homo sapiens
gggccgcagcugucgcccguguc

SEQ ID NO: 3470 - RNA, 21 nt, Homo sapiens
auguaugugugcaugugcaug

SEQ ID NO: 3471 - RNA, 21 nt, Homo sapiens
caugcacaugcacacauacau

SEQ ID NO: 3472 - RNA, 22 nt, Homo sapiens
uauacaagggcagacucucucu

SEQ ID NO: 3473 - RNA, 22 nt, Homo sapiens
agagagagucugcccuuguaua

SEQ ID NO: 3474 - RNA, 20 nt, Homo sapiens
ggcggcggcggaggcggggg

SEQ ID NO: 3475 - RNA, 20 nt, Homo sapiens
cccccgccuccgccgccgcc

SEQ ID NO: 3476 - RNA, 22 nt, Homo sapiens
gcaggugcucacuuguccuccu

SEQ ID NO: 3477 - RNA, 22 nt, Homo sapiens
aggaggacaagugagcaccugc

SEQ ID NO: 3478 - RNA, 19 nt, Homo sapiens
ggggccuggcggugggcgg

SEQ ID NO: 3479 - RNA, 19 nt, Homo sapiens
ccgcccaccgccaggcccc

SEQ ID NO: 3480 - RNA, 22 nt, Homo sapiens
gcccaaaggugaauuuuuuggg

SEQ ID NO: 3481 - RNA, 22 nt, Homo sapiens
cccaaaaaauucaccuuugggc

SEQ ID NO: 3482 - RNA, 22 nt, Homo sapiens
caaagaauucuccuuuugggcu

SEQ ID NO: 3483 - RNA, 22 nt, Homo sapiens
agcccaaaaggagaauucuuug

SEQ ID NO: 3484 - RNA, 22 nt, Homo sapiens
cugcaauguaagcacuucuuac

SEQ ID NO: 3485 - RNA, 22 nt, Homo sapiens
guaagaagugcuuacauugcag

SEQ ID NO: 3486 - RNA, 23 nt, Homo sapiens
aaaagugcuuacagugcagguag

SEQ ID NO: 3487 - RNA, 23 nt, Homo sapiens
cuaccugcacuguaagcacuuuu

SEQ ID NO: 3488 - RNA, 22 nt, Homo sapiens
acuguaguaugggcacuuccag

SEQ ID NO: 3489 - RNA, 22 nt, Homo sapiens
cuggaagugcccauacuacagu

SEQ ID NO: 3490 - RNA, 23 nt, Homo sapiens
caaagugcucauagugcagguag

SEQ ID NO: 3491 - RNA, 23 nt, Homo sapiens
cuaccugcacuaugagcacuuug

SEQ ID NO: 3492 - RNA, 23 nt, Homo sapiens
gggguauuguuuccgcugccagg

SEQ ID NO: 3493 - RNA, 23 nt, Homo sapiens
ccuggcagcggaaacaauacccc

SEQ ID NO: 3494 - RNA, 23 nt, Homo sapiens
uagcagcgggaacaguucugcag

SEQ ID NO: 3495 - RNA, 23 nt, Homo sapiens
cugcagaacuguucccgcugcua

SEQ ID NO: 3496 - RNA, 21 nt, Homo sapiens
cgagccucaagcaagggacuu

SEQ ID NO: 3497 - RNA, 21 nt, Homo sapiens
aagucccuugcuugaggcucg

SEQ ID NO: 3498 - RNA, 22 nt, Homo sapiens
uagucccuuccuugaagcgguc

SEQ ID NO: 3499 - RNA, 22 nt, Homo sapiens
gaccgcuucaaggaagggacua

SEQ ID NO: 3500 - RNA, 21 nt, Homo sapiens
acuggacuuggagucagaagg

SEQ ID NO: 3501 - RNA, 21 nt, Homo sapiens
ccuucugacuccaaguccagu

SEQ ID NO: 3502 - RNA, 22 nt, Homo sapiens
cuccugacuccagguccugugu

SEQ ID NO: 3503 - RNA, 22 nt, Homo sapiens
acacaggaccuggagucaggag

SEQ ID NO: 3504 - RNA, 22 nt, Homo sapiens
uuuguucguucggcucgcguga

SEQ ID NO: 3505 - RNA, 22 nt, Homo sapiens
ucacgcgagccgaacgaacaaa

SEQ ID NO: 3506 - RNA, 22 nt, Homo sapiens
acggauguuugagcaugugcua

SEQ ID NO: 3507 - RNA, 22 nt, Homo sapiens
uagcacaugcucaaacauccgu

SEQ ID NO: 3508 - RNA, 23 nt, Homo sapiens
ucaaaugcucagacuccuguggu

SEQ ID NO: 3509 - RNA, 23 nt, Homo sapiens
accacaggagucugagcauuuga

SEQ ID NO: 3510 - RNA, 22 nt, Homo sapiens
cggcaacaagaaacugccugag

SEQ ID NO: 3511 - RNA, 22 nt, Homo sapiens
cucaggcaguuucuuguugccg

SEQ ID NO: 3512 - RNA, 22 nt, Homo sapiens
uagguaguuucauguuguuggg

SEQ ID NO: 3513 - RNA, 22 nt, Homo sapiens
cccaacaacaugaaacuaccua

SEQ ID NO: 3514 - RNA, 22 nt, Homo sapiens
caauguuuccacagugcaucac

SEQ ID NO: 3515 - RNA, 22 nt, Homo sapiens
gugaugcacuguggaaacauug

SEQ ID NO: 3516 - RNA, 21 nt, Homo sapiens
gugcauuguaguugcauugca

SEQ ID NO: 3517 - RNA, 21 nt, Homo sapiens
ugcaaugcaacuacaaugcac

SEQ ID NO: 3518 - RNA, 18 nt, Homo sapiens
aucccaccucugccacca

SEQ ID NO: 3519 - RNA, 18 nt, Homo sapiens
ugguggcagaggugggau

SEQ ID NO: 3520 - RNA, 19 nt, Homo sapiens
aucccaccacugccaccau

SEQ ID NO: 3521 - RNA, 19 nt, Homo sapiens
augguggcaguggugggau

SEQ ID NO: 3522 - RNA, 22 nt, Homo sapiens
accuuccucuccaugggucuuu

SEQ ID NO: 3523 - RNA, 22 nt, Homo sapiens
aaagacccauggagaggaaggu

SEQ ID NO: 3524 - RNA, 22 nt, Homo sapiens
aaagacccauugaggagaaggu

SEQ ID NO: 3525 - RNA, 22 nt, Homo sapiens
accuucuccucaaugggucuuu

SEQ ID NO: 3526 - RNA, 21 nt, Homo sapiens
aauguagagauugaucaaaau

SEQ ID NO: 3527 - RNA, 21 nt, Homo sapiens
auuuugaucaaucucuacauu

SEQ ID NO: 3528 - RNA, 23 nt, Homo sapiens
acggaauauguauacggaauaua

SEQ ID NO: 3529 - RNA, 23 nt, Homo sapiens
uauauuccguauacauauuccgu

SEQ ID NO: 3530 - RNA, 24 nt, Homo sapiens
agagcucacagcuguccuucucua

SEQ ID NO: 3531 - RNA, 24 nt, Homo sapiens
uagagaaggacagcugugagcucu

SEQ ID NO: 3532 - RNA, 22 nt, Homo sapiens
aucaaauaaggacuagucugca

SEQ ID NO: 3533 - RNA, 22 nt, Homo sapiens
ugcagacuaguccuuauuugau

SEQ ID NO: 3534 - RNA, 23 nt, Homo sapiens
augagacucauguaaaacaucuu

SEQ ID NO: 3535 - RNA, 23 nt, Homo sapiens
aagauguuuuacaugagucucau

SEQ ID NO: 3536 - RNA, 21 nt, Homo sapiens
auggaauguauauacggaaua

SEQ ID NO: 3537 - RNA, 21 nt, Homo sapiens
uauuccguauauacauuccau

SEQ ID NO: 3538 - RNA, 22 nt, Homo sapiens
auuguagaaccuaagauuggcc

SEQ ID NO: 3539 - RNA, 22 nt, Homo sapiens
ggccaaucuuagguucuacaau

SEQ ID NO: 3540 - RNA, 22 nt, Homo sapiens
caucucuaaggaacucccccaa

SEQ ID NO: 3541 - RNA, 22 nt, Homo sapiens
uugggggaguuccuuagagaug

SEQ ID NO: 3542 - RNA, 23 nt, Homo sapiens
uauggggcuucuguagagauuuc

SEQ ID NO: 3543 - RNA, 23 nt, Homo sapiens
gaaaucucuacagaagccccaua

SEQ ID NO: 3544 - RNA, 20 nt, Homo sapiens
ccguguuucccccacgcuuu

SEQ ID NO: 3545 - RNA, 20 nt, Homo sapiens
aaagcgugggggaaacacgg

SEQ ID NO: 3546 - RNA, 15 nt, Homo sapiens
aggagauccuggguu

SEQ ID NO: 3547 - RNA, 15 nt, Homo sapiens
aacccaggaucuccu

SEQ ID NO: 3548 - RNA, 22 nt, Homo sapiens
cucgugggcucuggccacggcc

SEQ ID NO: 3549 - RNA, 22 nt, Homo sapiens
ggccguggccagagcccacgag

SEQ ID NO: 3550 - RNA, 22 nt, Homo sapiens
caguggccagagcccugcagug

SEQ ID NO: 3551 - RNA, 22 nt, Homo sapiens
cacugcagggcucuggccacug

SEQ ID NO: 3552 - RNA, 22 nt, Homo sapiens
cugcagaguuuguacggaccgg

SEQ ID NO: 3553 - RNA, 22 nt, Homo sapiens
ccgguccguacaaacucugcag

SEQ ID NO: 3554 - RNA, 20 nt, Homo sapiens
uccguacaaacucugcugug

SEQ ID NO: 3555 - RNA, 20 nt, Homo sapiens
cacagcagaguuuguacgga

SEQ ID NO: 3556 - RNA, 22 nt, Homo sapiens
cuuccccccaguaaucuucauc

SEQ ID NO: 3557 - RNA, 22 nt, Homo sapiens
gaugaagauuacuggggggaag

SEQ ID NO: 3558 - RNA, 23 nt, Homo sapiens
ugaggauauggcagggaagggga

SEQ ID NO: 3559 - RNA, 23 nt, Homo sapiens
uccccuucccugccauauccuca

SEQ ID NO: 3560 - RNA, 23 nt, Homo sapiens
uuuugcaugacccugggaguagg

SEQ ID NO: 3561 - RNA, 23 nt, Homo sapiens
ccuacucccagggucaugcaaaa

SEQ ID NO: 3562 - RNA, 22 nt, Homo sapiens
gacucacucacaggauugugca

SEQ ID NO: 3563 - RNA, 22 nt, Homo sapiens
ugcacaauccugugagugaguc

SEQ ID NO: 3564 - RNA, 22 nt, Homo sapiens
acacagugcuucauccacuacu

SEQ ID NO: 3565 - RNA, 22 nt, Homo sapiens
aguaguggaugaagcacugugu

SEQ ID NO: 3566 - RNA, 22 nt, Homo sapiens
uaguggaugaugcacucugugc

SEQ ID NO: 3567 - RNA, 22 nt, Homo sapiens
gcacagagugcaucauccacua

SEQ ID NO: 3568 - RNA, 21 nt, Homo sapiens
ugaugauacagguggagguag

SEQ ID NO: 3569 - RNA, 21 nt, Homo sapiens
cuaccuccaccuguaucauca

SEQ ID NO: 3570 - RNA, 22 nt, Homo sapiens
cuacuucuaccuguguuaucau

SEQ ID NO: 3571 - RNA, 22 nt, Homo sapiens
augauaacacagguagaaguag

SEQ ID NO: 3572 - RNA, 22 nt, Homo sapiens
ugcgacauuggaaguaguauca

SEQ ID NO: 3573 - RNA, 22 nt, Homo sapiens
ugauacuacuuccaaugucgca

SEQ ID NO: 3574 - RNA, 21 nt, Homo sapiens
uuagaccuaguacacguccuu

SEQ ID NO: 3575 - RNA, 21 nt, Homo sapiens
aaggacguguacuaggucuaa

SEQ ID NO: 3576 - RNA, 22 nt, Homo sapiens
uuuccuacccuaccugaagacu

SEQ ID NO: 3577 - RNA, 22 nt, Homo sapiens
agucuucagguaggguaggaaa

SEQ ID NO: 3578 - RNA, 22 nt, Homo sapiens
aucuguaagagaaaguaaauga

SEQ ID NO: 3579 - RNA, 22 nt, Homo sapiens
ucauuuacuuucucuuacagau

SEQ ID NO: 3580 - RNA, 24 nt, Homo sapiens
cccggacaggcguucgugcgacgu

SEQ ID NO: 3581 - RNA, 24 nt, Homo sapiens
acgucgcacgaacgccuguccggg

SEQ ID NO: 3582 - RNA, 23 nt, Homo sapiens
accuggacccagcguagacaaag

SEQ ID NO: 3583 - RNA, 23 nt, Homo sapiens
cuuugucuacgcuggguccaggu

SEQ ID NO: 3584 - RNA, 22 nt, Homo sapiens
accaagucugcgucauccucuc

SEQ ID NO: 3585 - RNA, 22 nt, Homo sapiens
gagaggaugacgcagacuuggu

SEQ ID NO: 3586 - RNA, 23 nt, Homo sapiens
aguggaugauggagacucgguac

SEQ ID NO: 3587 - RNA, 23 nt, Homo sapiens
guaccgagucuccaucauccacu

SEQ ID NO: 3588 - RNA, 24 nt, Homo sapiens
guuccacacugacacugcagaagu

SEQ ID NO: 3589 - RNA, 24 nt, Homo sapiens
acuucugcagugucaguguggaac

SEQ ID NO: 3590 - RNA, 24 nt, Homo sapiens
ccugcuggucaggaguggauacug

SEQ ID NO: 3591 - RNA, 24 nt, Homo sapiens
caguauccacuccugaccagcagg

SEQ ID NO: 3592 - RNA, 23 nt, Homo sapiens
gagggucuugggagggaugugac

SEQ ID NO: 3593 - RNA, 23 nt, Homo sapiens
gucacaucccucccaagacccuc

SEQ ID NO: 3594 - RNA, 22 nt, Homo sapiens
auauacagggggagacucuuau

SEQ ID NO: 3595 - RNA, 22 nt, Homo sapiens
auaagagucucccccuguauau

SEQ ID NO: 3596 - RNA, 22 nt, Homo sapiens
auauacagggggagacucucau

SEQ ID NO: 3597 - RNA, 22 nt, Homo sapiens
augagagucucccccuguauau

SEQ ID NO: 3598 - RNA, 21 nt, Homo sapiens
agaggauacccuuuguauguu

SEQ ID NO: 3599 - RNA, 21 nt, Homo sapiens
aacauacaaaggguauccucu

SEQ ID NO: 3600 - RNA, 22 nt, Homo sapiens
ucuacaaaggaaagcgcuuucu

SEQ ID NO: 3601 - RNA, 22 nt, Homo sapiens
agaaagcgcuuuccuuuguaga

SEQ ID NO: 3602 - RNA, 22 nt, Homo sapiens
ucaaaacugaggggcauuuucu

SEQ ID NO: 3603 - RNA, 22 nt, Homo sapiens
agaaaaugccccucaguuuuga

SEQ ID NO: 3604 - RNA, 24 nt, Homo sapiens
uucuccaaaagaaagcacuuucug

SEQ ID NO: 3605 - RNA, 24 nt, Homo sapiens
cagaaagugcuuucuuuuggagaa

SEQ ID NO: 3606 - RNA, 23 nt, Homo sapiens
uucucgaggaaagaagcacuuuc

SEQ ID NO: 3607 - RNA, 23 nt, Homo sapiens
gaaagugcuucuuuccucgagaa

SEQ ID NO: 3608 - RNA, 22 nt, Homo sapiens
ccucuagauggaagcacugucu

SEQ ID NO: 3609 - RNA, 22 nt, Homo sapiens
agacagugcuuccaucuagagg

SEQ ID NO: 3610 - RNA, 22 nt, Homo sapiens
aucgugcaucccuuuagagugu

SEQ ID NO: 3611 - RNA, 22 nt, Homo sapiens
acacucuaaagggaugcacgau

SEQ ID NO: 3612 - RNA, 22 nt, Homo sapiens
aucgugcaucccuuuagagugu

SEQ ID NO: 3613 - RNA, 22 nt, Homo sapiens
acacucuaaagggaugcacgau

SEQ ID NO: 3614 - RNA, 22 nt, Homo sapiens
aucgugcauccuuuuagagugu

SEQ ID NO: 3615 - RNA, 22 nt, Homo sapiens
acacucuaaaaggaugcacgau

SEQ ID NO: 3616 - RNA, 22 nt, Homo sapiens
caaagcgcuccccuuuagaggu

SEQ ID NO: 3617 - RNA, 22 nt, Homo sapiens
accucuaaaggggagcgcuuug

SEQ ID NO: 3618 - RNA, 23 nt, Homo sapiens
caaagcgcuucucuuuagagugu

SEQ ID NO: 3619 - RNA, 23 nt, Homo sapiens
acacucuaaagagaagcgcuuug

SEQ ID NO: 3620 - RNA, 23 nt, Homo sapiens
ucucuggagggaagcacuuucug

SEQ ID NO: 3621 - RNA, 23 nt, Homo sapiens
cagaaagugcuucccuccagaga

SEQ ID NO: 3622 - RNA, 21 nt, Homo sapiens
gaaagcgcuucucuuuagagg

SEQ ID NO: 3623 - RNA, 21 nt, Homo sapiens
ccucuaaagagaagcgcuuuc

SEQ ID NO: 3624 - RNA, 22 nt, Homo sapiens
cucuagagggaagcacuuucuc

SEQ ID NO: 3625 - RNA, 22 nt, Homo sapiens
gagaaagugcuucccucuagag

SEQ ID NO: 3626 - RNA, 22 nt, Homo sapiens
aaagugcauccuuuuagagugu

SEQ ID NO: 3627 - RNA, 22 nt, Homo sapiens
acacucuaaaaggaugcacuuu

SEQ ID NO: 3628 - RNA, 22 nt, Homo sapiens
cucuagagggaagcgcuuucug

SEQ ID NO: 3629 - RNA, 22 nt, Homo sapiens
cagaaagcgcuucccucuagag

SEQ ID NO: 3630 - RNA, 22 nt, Homo sapiens
caaagugccucccuuuagagug

SEQ ID NO: 3631 - RNA, 22 nt, Homo sapiens
cacucuaaagggaggcacuuug

SEQ ID NO: 3632 - RNA, 22 nt, Homo sapiens
aagugccuccuuuuagaguguu

SEQ ID NO: 3633 - RNA, 22 nt, Homo sapiens
aacacucuaaaaggaggcacuu

SEQ ID NO: 3634 - RNA, 22 nt, Homo sapiens
uucuccaaaagggagcacuuuc

SEQ ID NO: 3635 - RNA, 22 nt, Homo sapiens
gaaagugcucccuuuuggagaa

SEQ ID NO: 3636 - RNA, 22 nt, Homo sapiens
aaagugcuucccuuuggacugu

SEQ ID NO: 3637 - RNA, 22 nt, Homo sapiens
acaguccaaagggaagcacuuu

SEQ ID NO: 3638 - RNA, 21 nt, Homo sapiens
cuccagagggaaguacuuucu

SEQ ID NO: 3639 - RNA, 21 nt, Homo sapiens
agaaaguacuucccucuggag

SEQ ID NO: 3640 - RNA, 22 nt, Homo sapiens
acaaagugcuucccuuuagagu

SEQ ID NO: 3641 - RNA, 22 nt, Homo sapiens
acucuaaagggaagcacuuugu

SEQ ID NO: 3642 - RNA, 22 nt, Homo sapiens
cuacaaagggaagcacuuucuc

SEQ ID NO: 3643 - RNA, 22 nt, Homo sapiens
gagaaagugcuucccuuuguag

SEQ ID NO: 3644 - RNA, 22 nt, Homo sapiens
gaaggcgcuucccuuuagagcg

SEQ ID NO: 3645 - RNA, 22 nt, Homo sapiens
cgcucuaaagggaagcgccuuc

SEQ ID NO: 3646 - RNA, 21 nt, Homo sapiens
cuccagagggaugcacuuucu

SEQ ID NO: 3647 - RNA, 21 nt, Homo sapiens
agaaagugcaucccucuggag

SEQ ID NO: 3648 - RNA, 22 nt, Homo sapiens
cucuagagggaagcacuuucug

SEQ ID NO: 3649 - RNA, 22 nt, Homo sapiens
cagaaagugcuucccucuagag

SEQ ID NO: 3650 - RNA, 22 nt, Homo sapiens
gaaagugcuuccuuuuagaggc

SEQ ID NO: 3651 - RNA, 22 nt, Homo sapiens
gccucuaaaaggaagcacuuuc

SEQ ID NO: 3652 - RNA, 23 nt, Homo sapiens
cucuugagggaagcacuuucugu

SEQ ID NO: 3653 - RNA, 23 nt, Homo sapiens
acagaaagugcuucccucaagag

SEQ ID NO: 3654 - RNA, 22 nt, Homo sapiens
acuggacuuagggucagaaggc

SEQ ID NO: 3655 - RNA, 22 nt, Homo sapiens
gccuucugacccuaaguccagu

SEQ ID NO: 3656 - RNA, 22 nt, Homo sapiens
aaacaaacauggugcacuucuu

SEQ ID NO: 3657 - RNA, 22 nt, Homo sapiens
aagaagugcaccauguuuguuu

SEQ ID NO: 3658 - RNA, 22 nt, Homo sapiens
gaaguugcccauguuauuuucg

SEQ ID NO: 3659 - RNA, 22 nt, Homo sapiens
cgaaaauaacaugggcaacuuc

SEQ ID NO: 3660 - RNA, 21 nt, Homo sapiens
aaucauucacggacaacacuu

SEQ ID NO: 3661 - RNA, 21 nt, Homo sapiens
aaguguuguccgugaaugauu

SEQ ID NO: 3662 - RNA, 22 nt, Homo sapiens
gaaguuguucgugguggauucg

SEQ ID NO: 3663 - RNA, 22 nt, Homo sapiens
cgaauccaccacgaacaacuuc

SEQ ID NO: 3664 - RNA, 23 nt, Homo sapiens
ccuccguguuaccuguccucuag

SEQ ID NO: 3665 - RNA, 23 nt, Homo sapiens
cuagaggacagguaacacggagg

SEQ ID NO: 3666 - RNA, 23 nt, Homo sapiens
ugaggauggauagcaaggaagcc

SEQ ID NO: 3667 - RNA, 23 nt, Homo sapiens
ggcuuccuugcuauccauccuca

SEQ ID NO: 3668 - RNA, 22 nt, Homo sapiens
uucagaucccagcggugccucu

SEQ ID NO: 3669 - RNA, 22 nt, Homo sapiens
agaggcaccgcugggaucugaa

SEQ ID NO: 3670 - RNA, 19 nt, Homo sapiens
guccuaggaggcuccucug

SEQ ID NO: 3671 - RNA, 19 nt, Homo sapiens
cagaggagccuccuaggac

SEQ ID NO: 3672 - RNA, 21 nt, Homo sapiens
caauucucaaaggagccuccc

SEQ ID NO: 3673 - RNA, 21 nt, Homo sapiens
gggaggcuccuuugagaauug

SEQ ID NO: 3674 - RNA, 21 nt, Homo sapiens
guuggggugcaggggucugcu

SEQ ID NO: 3675 - RNA, 21 nt, Homo sapiens
agcagaccccugcaccccaac

SEQ ID NO: 3676 - RNA, 22 nt, Homo sapiens
uuuccggcucgcgugggugugu

SEQ ID NO: 3677 - RNA, 22 nt, Homo sapiens
acacacccacgcgagccggaaa

SEQ ID NO: 3678 - RNA, 23 nt, Homo sapiens
ugagugugugugugugagugugu

SEQ ID NO: 3679 - RNA, 23 nt, Homo sapiens
acacacucacacacacacacuca

SEQ ID NO: 3680 - RNA, 22 nt, Homo sapiens
agugggaggccagggcacggca

SEQ ID NO: 3681 - RNA, 22 nt, Homo sapiens
ugccgugcccuggccucccacu

SEQ ID NO: 3682 - RNA, 20 nt, Homo sapiens
ugagcccuguccucccgcag

SEQ ID NO: 3683 - RNA, 20 nt, Homo sapiens
cugcgggaggacagggcuca

SEQ ID NO: 3684 - RNA, 23 nt, Homo sapiens
aagugccgccaucuuuugagugu

SEQ ID NO: 3685 - RNA, 23 nt, Homo sapiens
acacucaaaagauggcggcacuu

SEQ ID NO: 3686 - RNA, 20 nt, Homo sapiens
acucaaacugugggggcacu

SEQ ID NO: 3687 - RNA, 20 nt, Homo sapiens
agugcccccacaguuugagu

SEQ ID NO: 3688 - RNA, 23 nt, Homo sapiens
aagugcccccacaguuugagugc

SEQ ID NO: 3689 - RNA, 23 nt, Homo sapiens
gcacucaaacugugggggcacuu

SEQ ID NO: 3690 - RNA, 22 nt, Homo sapiens
acucaaaagauggcggcacuuu

SEQ ID NO: 3691 - RNA, 22 nt, Homo sapiens
aaagugccgccaucuuuugagu

SEQ ID NO: 3692 - RNA, 22 nt, Homo sapiens
aaaccuguguuguucaagaguc

SEQ ID NO: 3693 - RNA, 22 nt, Homo sapiens
gacucuugaacaacacagguuu

SEQ ID NO: 3694 - RNA, 22 nt, Homo sapiens
acaguagagggaggaaucgcag

SEQ ID NO: 3695 - RNA, 22 nt, Homo sapiens
cugcgauuccucccucuacugu

SEQ ID NO: 3696 - RNA, 22 nt, Homo sapiens
gugaaauguuuaggaccacuag

SEQ ID NO: 3697 - RNA, 22 nt, Homo sapiens
cuagugguccuaaacauuucac

SEQ ID NO: 3698 - RNA, 23 nt, Homo sapiens
uugaacuguuaagaaccacugga

SEQ ID NO: 3699 - RNA, 23 nt, Homo sapiens
uccagugguucuuaacaguucaa

SEQ ID NO: 3700 - RNA, 22 nt, Homo sapiens
uagugguccuaaacauuucaca

SEQ ID NO: 3701 - RNA, 22 nt, Homo sapiens
ugugaaauguuuaggaccacua

SEQ ID NO: 3702 - RNA, 21 nt, Homo sapiens
ugcaggaccaagaugagcccu

SEQ ID NO: 3703 - RNA, 21 nt, Homo sapiens
agggcucaucuugguccugca

SEQ ID NO: 3704 - RNA, 21 nt, Homo sapiens
cucccacaugcaggguuugca

SEQ ID NO: 3705 - RNA, 21 nt, Homo sapiens
ugcaaacccugcaugugggag

SEQ ID NO: 3706 - RNA, 21 nt, Homo sapiens
caucccuugcaugguggaggg

SEQ ID NO: 3707 - RNA, 21 nt, Homo sapiens
cccuccaccaugcaagggaug

SEQ ID NO: 3708 - RNA, 22 nt, Homo sapiens
aaaaugaaaugagcccagccca

SEQ ID NO: 3709 - RNA, 22 nt, Homo sapiens
ugggcugggcucauuucauuuu

SEQ ID NO: 3710 - RNA, 21 nt, Homo sapiens
agccgcggggaucgccgaggg

SEQ ID NO: 3711 - RNA, 21 nt, Homo sapiens
cccucggcgauccccgcggcu

SEQ ID NO: 3712 - RNA, 19 nt, Homo sapiens
agggaccugagugucuaag

SEQ ID NO: 3713 - RNA, 19 nt, Homo sapiens
cuuagacacucaggucccu

SEQ ID NO: 3714 - RNA, 19 nt, Homo sapiens
aggugugucuguagagucc

SEQ ID NO: 3715 - RNA, 19 nt, Homo sapiens
ggacucuacagacacaccu

SEQ ID NO: 3716 - RNA, 24 nt, Homo sapiens
cauagcccggucgcugguacauga

SEQ ID NO: 3717 - RNA, 24 nt, Homo sapiens
ucauguaccagcgaccgggcuaug

SEQ ID NO: 3718 - RNA, 18 nt, Homo sapiens
cggcuggaggugugagga

SEQ ID NO: 3719 - RNA, 18 nt, Homo sapiens
uccucacaccuccagccg

SEQ ID NO: 3720 - RNA, 18 nt, Homo sapiens
cuaagaaguugacugaag

SEQ ID NO: 3721 - RNA, 18 nt, Homo sapiens
cuucagucaacuucuuag

SEQ ID NO: 3722 - RNA, 19 nt, Homo sapiens
gacuggacaagcugaggaa

SEQ ID NO: 3723 - RNA, 19 nt, Homo sapiens
uuccucagcuuguccaguc

SEQ ID NO: 3724 - RNA, 21 nt, Homo sapiens
gcuugucgcugcgguguugcu

SEQ ID NO: 3725 - RNA, 21 nt, Homo sapiens
agcaacaccgcagcgacaagc

SEQ ID NO: 3726 - RNA, 17 nt, Homo sapiens
ggcgggugcgggggugg

SEQ ID NO: 3727 - RNA, 17 nt, Homo sapiens
ccacccccgcacccgcc

SEQ ID NO: 3728 - RNA, 21 nt, Homo sapiens
ugugucccauuauuggugauu

SEQ ID NO: 3729 - RNA, 21 nt, Homo sapiens
aaucaccaauaaugggacaca

SEQ ID NO: 3730 - RNA, 22 nt, Homo sapiens
uuuaagaaaacaccauggagau

SEQ ID NO: 3731 - RNA, 22 nt, Homo sapiens
aucuccaugguguuuucuuaaa

SEQ ID NO: 3732 - RNA, 22 nt, Homo sapiens
gcuauuucacgacaccaggguu

SEQ ID NO: 3733 - RNA, 22 nt, Homo sapiens
aacccuggugucgugaaauagc

SEQ ID NO: 3734 - RNA, 23 nt, Homo sapiens
agcugguguugugaaucaggccg

SEQ ID NO: 3735 - RNA, 23 nt, Homo sapiens
cggccugauucacaacaccagcu

SEQ ID NO: 3736 - RNA, 21 nt, Homo sapiens
aauaauacaugguugaucuuu

SEQ ID NO: 3737 - RNA, 21 nt, Homo sapiens
aaagaucaaccauguauuauu

SEQ ID NO: 3738 - RNA, 22 nt, Homo sapiens
agaucgaccguguuauauucgc

SEQ ID NO: 3739 - RNA, 22 nt, Homo sapiens
gcgaauauaacacggucgaucu

SEQ ID NO: 3740 - RNA, 22 nt, Homo sapiens
aaucaugugcagugccaauaug

SEQ ID NO: 3741 - RNA, 22 nt, Homo sapiens
cauauuggcacugcacaugauu

SEQ ID NO: 3742 - RNA, 23 nt, Homo sapiens
uuuggcacuagcacauuuuugcu

SEQ ID NO: 3743 - RNA, 23 nt, Homo sapiens
agcaaaaaugugcuagugccaaa

SEQ ID NO: 3744 - RNA, 22 nt, Homo sapiens
uccuguacugagcugccccgag

SEQ ID NO: 3745 - RNA, 22 nt, Homo sapiens
cucggggcagcucaguacagga

SEQ ID NO: 3746 - RNA, 22 nt, Homo sapiens
gcuacuucacaacaccagggcc

SEQ ID NO: 3747 - RNA, 22 nt, Homo sapiens
ggcccugguguugugaaguagc

SEQ ID NO: 3748 - RNA, 22 nt, Homo sapiens
caucaucgucucaaaugagucu

SEQ ID NO: 3749 - RNA, 22 nt, Homo sapiens
agacucauuugagacgaugaug

SEQ ID NO: 3750 - RNA, 23 nt, Homo sapiens
acuccauuuguuuugaugaugga

SEQ ID NO: 3751 - RNA, 23 nt, Homo sapiens
uccaucaucaaaacaaauggagu

SEQ ID NO: 3752 - RNA, 22 nt, Homo sapiens
cuccuacauauuagcauuaaca

SEQ ID NO: 3753 - RNA, 22 nt, Homo sapiens
uguuaaugcuaauauguaggag

SEQ ID NO: 3754 - RNA, 23 nt, Homo sapiens
uuaaugcuaaucgugauaggggu

SEQ ID NO: 3755 - RNA, 23 nt, Homo sapiens
accccuaucacgauuagcauuaa

SEQ ID NO: 3756 - RNA, 22 nt, Homo sapiens
agaucagaaggugauuguggcu

SEQ ID NO: 3757 - RNA, 22 nt, Homo sapiens
agccacaaucaccuucugaucu

SEQ ID NO: 3758 - RNA, 22 nt, Homo sapiens
uacugcagacguggcaaucaug

SEQ ID NO: 3759 - RNA, 22 nt, Homo sapiens
caugauugccacgucugcagua

SEQ ID NO: 3760 - RNA, 21 nt, Homo sapiens
guuagggccaacaucucuugg

SEQ ID NO: 3761 - RNA, 21 nt, Homo sapiens
ccaagagauguuggcccuaac

SEQ ID NO: 3762 - RNA, 21 nt, Homo sapiens
aacauagaggaaauuccacgu

SEQ ID NO: 3763 - RNA, 21 nt, Homo sapiens
acguggaauuuccucuauguu

SEQ ID NO: 3764 - RNA, 21 nt, Homo sapiens
gguggauauuccuucuauguu

SEQ ID NO: 3765 - RNA, 21 nt, Homo sapiens
aacauagaaggaauauccacc

SEQ ID NO: 3766 - RNA, 23 nt, Homo sapiens
ucauagcccuguacaaugcugcu

SEQ ID NO: 3767 - RNA, 23 nt, Homo sapiens
agcagcauuguacagggcuauga

SEQ ID NO: 3768 - RNA, 22 nt, Homo sapiens
uaacacugucugguaaagaugg

SEQ ID NO: 3769 - RNA, 22 nt, Homo sapiens
ccaucuuuaccagacaguguua

SEQ ID NO: 3770 - RNA, 22 nt, Homo sapiens
caucuuccaguacaguguugga

SEQ ID NO: 3771 - RNA, 22 nt, Homo sapiens
uccaacacuguacuggaagaug

SEQ ID NO: 3772 - RNA, 22 nt, Homo sapiens
aacuggccuacaaagucccagu

SEQ ID NO: 3773 - RNA, 22 nt, Homo sapiens
acugggacuuuguaggccaguu

SEQ ID NO: 3774 - RNA, 22 nt, Homo sapiens
ugggucuuugcgggcgagauga

SEQ ID NO: 3775 - RNA, 22 nt, Homo sapiens
ucaucucgcccgcaaagaccca

SEQ ID NO: 3776 - RNA, 21 nt, Homo sapiens
augaccuaugaauugacagac

SEQ ID NO: 3777 - RNA, 21 nt, Homo sapiens
gucugucaauucauaggucau

SEQ ID NO: 3778 - RNA, 22 nt, Homo sapiens
aagcugccaguugaagaacugu

SEQ ID NO: 3779 - RNA, 22 nt, Homo sapiens
acaguucuucaacuggcagcuu

SEQ ID NO: 3780 - RNA, 22 nt, Homo sapiens
aguucuucaguggcaagcuuua

SEQ ID NO: 3781 - RNA, 22 nt, Homo sapiens
uaaagcuugccacugaagaacu

SEQ ID NO: 3782 - RNA, 22 nt, Homo sapiens
acagauucgauucuaggggaau

SEQ ID NO: 3783 - RNA, 22 nt, Homo sapiens
auuccccuagaaucgaaucugu

SEQ ID NO: 3784 - RNA, 23 nt, Homo sapiens
uacccuguagaaccgaauuugug

SEQ ID NO: 3785 - RNA, 23 nt, Homo sapiens
cacaaauucgguucuacagggua

SEQ ID NO: 3786 - RNA, 22 nt, Homo sapiens
uagcagcacguaaauauuggcg

SEQ ID NO: 3787 - RNA, 22 nt, Homo sapiens
cgccaauauuuacgugcugcua

SEQ ID NO: 3788 - RNA, 21 nt, Homo sapiens
ugagaugaagcacuguagcuc

SEQ ID NO: 3789 - RNA, 21 nt, Homo sapiens
gagcuacagugcuucaucuca

SEQ ID NO: 3790 - RNA, 22 nt, Homo sapiens
ggugcagugcugcaucucuggu

SEQ ID NO: 3791 - RNA, 22 nt, Homo sapiens
accagagaugcagcacugcacc

SEQ ID NO: 3792 - RNA, 21 nt, Homo sapiens
uugcucacuguucuucccuag

SEQ ID NO: 3793 - RNA, 21 nt, Homo sapiens
cuagggaagaacagugagcaa

SEQ ID NO: 3794 - RNA, 18 nt, Homo sapiens
cagggucagcugagcaug

SEQ ID NO: 3795 - RNA, 18 nt, Homo sapiens
caugcucagcugacccug

SEQ ID NO: 3796 - RNA, 21 nt, Homo sapiens
aagcauucuuucauugguugg

SEQ ID NO: 3797 - RNA, 21 nt, Homo sapiens
ccaaccaaugaaagaaugcuu

SEQ ID NO: 3798 - RNA, 21 nt, Homo sapiens
ccgucgccgccacccgagccg

SEQ ID NO: 3799 - RNA, 21 nt, Homo sapiens
cggcucggguggcggcgacgg

SEQ ID NO: 3800 - RNA, 27 nt, Homo sapiens
cacuguaggugauggugagagugggca

SEQ ID NO: 3801 - RNA, 27 nt, Homo sapiens
ugcccacucucaccaucaccuacagug

SEQ ID NO: 3802 - RNA, 23 nt, Homo sapiens
gggaugguagaccggugacgugc

SEQ ID NO: 3803 - RNA, 23 nt, Homo sapiens
gcacgucaccggucuaccauccc

SEQ ID NO: 3804 - RNA, 21 nt, Homo sapiens
uaggacacauggucuacuucu

SEQ ID NO: 3805 - RNA, 21 nt, Homo sapiens
agaaguagaccauguguccua

SEQ ID NO: 3806 - RNA, 22 nt, Homo sapiens
cuccugagccauucugagccuc

SEQ ID NO: 3807 - RNA, 22 nt, Homo sapiens
gaggcucagaauggcucaggag

SEQ ID NO: 3808 - RNA, 21 nt, Homo sapiens
gugccagcugcagugggggag

SEQ ID NO: 3809 - RNA, 21 nt, Homo sapiens
cucccccacugcagcuggcac

SEQ ID NO: 3810 - RNA, 21 nt, Homo sapiens
cccggagccaggaugcagcuc

SEQ ID NO: 3811 - RNA, 21 nt, Homo sapiens
gagcugcauccuggcuccggg

SEQ ID NO: 3812 - RNA, 21 nt, Homo sapiens
ucguggccuggucuccauuau

SEQ ID NO: 3813 - RNA, 21 nt, Homo sapiens
auaauggagaccaggccacga

SEQ ID NO: 3814 - RNA, 20 nt, Homo sapiens
ucugcaggguuugcuuugag

SEQ ID NO: 3815 - RNA, 20 nt, Homo sapiens
cucaaagcaaacccugcaga

SEQ ID NO: 3816 - RNA, 21 nt, Homo sapiens
uguucauguagauguuuaagc

SEQ ID NO: 3817 - RNA, 21 nt, Homo sapiens
gcuuaaacaucuacaugaaca

SEQ ID NO: 3818 - RNA, 18 nt, Homo sapiens
ucagcuggcccucauuuc

SEQ ID NO: 3819 - RNA, 18 nt, Homo sapiens
gaaaugagggccagcuga

SEQ ID NO: 3820 - RNA, 21 nt, Homo sapiens
uggcagggaggcugggagggg

SEQ ID NO: 3821 - RNA, 21 nt, Homo sapiens
ccccucccagccucccugcca

SEQ ID NO: 3822 - RNA, 20 nt, Homo sapiens
ucacuguucagacaggcgga

SEQ ID NO: 3823 - RNA, 20 nt, Homo sapiens
uccgccugucugaacaguga

SEQ ID NO: 3824 - RNA, 21 nt, Homo sapiens
ccccaccuccucucuccucag

SEQ ID NO: 3825 - RNA, 21 nt, Homo sapiens
cugaggagagaggaggugggg

SEQ ID NO: 3826 - RNA, 19 nt, Homo sapiens
gugaggacucgggaggugg

SEQ ID NO: 3827 - RNA, 19 nt, Homo sapiens
ccaccucccgaguccucac

SEQ ID NO: 3828 - RNA, 22 nt, Homo sapiens
ugagccccugugccgcccccag

SEQ ID NO: 3829 - RNA, 22 nt, Homo sapiens
cugggggcggcacaggggcuca

SEQ ID NO: 3830 - RNA, 22 nt, Homo sapiens
guggguacggcccagugggggg

SEQ ID NO: 3831 - RNA, 22 nt, Homo sapiens
ccccccacugggccguacccac

SEQ ID NO: 3832 - RNA, 22 nt, Homo sapiens
ucaccagcccuguguucccuag

SEQ ID NO: 3833 - RNA, 22 nt, Homo sapiens
cuagggaacacagggcugguga

SEQ ID NO: 3834 - RNA, 26 nt, Homo sapiens
gugagggcaugcaggccuggaugggg

SEQ ID NO: 3835 - RNA, 26 nt, Homo sapiens
ccccauccaggccugcaugcccucac

SEQ ID NO: 3836 - RNA, 23 nt, Homo sapiens
cucucaccacugcccucccacag

SEQ ID NO: 3837 - RNA, 23 nt, Homo sapiens
cugugggagggcaguggugagag

SEQ ID NO: 3838 - RNA, 24 nt, Homo sapiens
guggguaggguuugggggagagcg

SEQ ID NO: 3839 - RNA, 24 nt, Homo sapiens
cgcucucccccaaacccuacccac

SEQ ID NO: 3840 - RNA, 20 nt, Homo sapiens
gugucugggcggacagcugc

SEQ ID NO: 3841 - RNA, 20 nt, Homo sapiens
gcagcuguccgcccagacac

SEQ ID NO: 3842 - RNA, 20 nt, Homo sapiens
cuuccucgucugucugcccc

SEQ ID NO: 3843 - RNA, 20 nt, Homo sapiens
ggggcagacagacgaggaag

SEQ ID NO: 3844 - RNA, 23 nt, Homo sapiens
gugagugggagccccagugugug

SEQ ID NO: 3845 - RNA, 23 nt, Homo sapiens
cacacacuggggcucccacucac

SEQ ID NO: 3846 - RNA, 27 nt, Homo sapiens
accuucuuguauaagcacugugcuaaa

SEQ ID NO: 3847 - RNA, 27 nt, Homo sapiens
uuuagcacagugcuuauacaagaaggu

SEQ ID NO: 3848 - RNA, 22 nt, Homo sapiens
ggcgacaaaacgagacccuguc

SEQ ID NO: 3849 - RNA, 22 nt, Homo sapiens
gacagggucucguuuugucgcc

SEQ ID NO: 3850 - RNA, 22 nt, Homo sapiens
uugcuugaacccaggaagugga

SEQ ID NO: 3851 - RNA, 22 nt, Homo sapiens
uccacuuccuggguucaagcaa

SEQ ID NO: 3852 - RNA, 19 nt, Homo sapiens
ggagauggagguugcagug

SEQ ID NO: 3853 - RNA, 19 nt, Homo sapiens
cacugcaaccuccaucucc

SEQ ID NO: 3854 - RNA, 21 nt, Homo sapiens
accacugcacuccagccugag

SEQ ID NO: 3855 - RNA, 21 nt, Homo sapiens
cucaggcuggagugcaguggu

SEQ ID NO: 3856 - RNA, 22 nt, Homo sapiens
ggugguugaggcugcaguaagu

SEQ ID NO: 3857 - RNA, 22 nt, Homo sapiens
acuuacugcagccucaaccacc

SEQ ID NO: 3858 - RNA, 17 nt, Homo sapiens
ucgccuccuccucuccc

SEQ ID NO: 3859 - RNA, 17 nt, Homo sapiens
gggagaggaggaggcga

SEQ ID NO: 3860 - RNA, 22 nt, Homo sapiens
ucuauacagacccuggcuuuuc

SEQ ID NO: 3861 - RNA, 22 nt, Homo sapiens
gaaaagccagggucuguauaga

SEQ ID NO: 3862 - RNA, 22 nt, Homo sapiens
ucugggcaacaaagugagaccu

SEQ ID NO: 3863 - RNA, 22 nt, Homo sapiens
aggucucacuuuguugcccaga

SEQ ID NO: 3864 - RNA, 21 nt, Homo sapiens
gaucucacuuuguugcccagg

SEQ ID NO: 3865 - RNA, 21 nt, Homo sapiens
ccugggcaacaaagugagauc

SEQ ID NO: 3866 - RNA, 20 nt, Homo sapiens
ucgcgccccggcucccguuc

SEQ ID NO: 3867 - RNA, 20 nt, Homo sapiens
gaacgggagccggggcgcga

SEQ ID NO: 3868 - RNA, 25 nt, Homo sapiens
ugggaacggguuccggcagacgcug

SEQ ID NO: 3869 - RNA, 25 nt, Homo sapiens
cagcgucugccggaacccguuccca

SEQ ID NO: 3870 - RNA, 21 nt, Homo sapiens
uuaggccgcagaucuggguga

SEQ ID NO: 3871 - RNA, 21 nt, Homo sapiens
ucacccagaucugcggccuaa

SEQ ID NO: 3872 - RNA, 22 nt, Homo sapiens
aauaggccacggaucugggcaa

SEQ ID NO: 3873 - RNA, 22 nt, Homo sapiens
uugcccagauccguggccuauu

SEQ ID NO: 3874 - RNA, 21 nt, Homo sapiens
cacccagaucugcggccuaau

SEQ ID NO: 3875 - RNA, 21 nt, Homo sapiens
auuaggccgcagaucugggug

SEQ ID NO: 3876 - RNA, 22 nt, Homo sapiens
uuagggcccuggcuccaucucc

SEQ ID NO: 3877 - RNA, 22 nt, Homo sapiens
ggagauggagccagggcccuaa

SEQ ID NO: 3878 - RNA, 22 nt, Homo sapiens
uucauucggcuguccagaugua

SEQ ID NO: 3879 - RNA, 22 nt, Homo sapiens
uacaucuggacagccgaaugaa

SEQ ID NO: 3880 - RNA, 24 nt, Homo sapiens
uugcagcugccugggagugacuuc

SEQ ID NO: 3881 - RNA, 24 nt, Homo sapiens
gaagucacucccaggcagcugcaa

SEQ ID NO: 3882 - RNA, 21 nt, Homo sapiens
uugggacauacuuaugcuaaa

SEQ ID NO: 3883 - RNA, 21 nt, Homo sapiens
uuuagcauaaguaugucccaa

SEQ ID NO: 3884 - RNA, 22 nt, Homo sapiens
ucucacuguagccucgaacccc

SEQ ID NO: 3885 - RNA, 22 nt, Homo sapiens
gggguucgaggcuacagugaga

SEQ ID NO: 3886 - RNA, 22 nt, Homo sapiens
uuugaggcuacagugagaugug

SEQ ID NO: 3887 - RNA, 22 nt, Homo sapiens
cacaucucacuguagccucaaa

SEQ ID NO: 3888 - RNA, 18 nt, Homo sapiens
cagggaggugaaugugau

SEQ ID NO: 3889 - RNA, 18 nt, Homo sapiens
aucacauucaccucccug

SEQ ID NO: 3890 - RNA, 19 nt, Homo sapiens
gaugaugcugcugaugcug

SEQ ID NO: 3891 - RNA, 19 nt, Homo sapiens
cagcaucagcagcaucauc

SEQ ID NO: 3892 - RNA, 24 nt, Homo sapiens
ccagacagaauucuaugcacuuuc

SEQ ID NO: 3893 - RNA, 24 nt, Homo sapiens
gaaagugcauagaauucugucugg

SEQ ID NO: 3894 - RNA, 22 nt, Homo sapiens
cuccuggggcccgcacucucgc

SEQ ID NO: 3895 - RNA, 22 nt, Homo sapiens
gcgagagugcgggccccaggag

SEQ ID NO: 3896 - RNA, 21 nt, Homo sapiens
cuccguuugccuguuucgcug

SEQ ID NO: 3897 - RNA, 21 nt, Homo sapiens
cagcgaaacaggcaaacggag

SEQ ID NO: 3898 - RNA, 22 nt, Homo sapiens
cucggcgcggggcgcgggcucc

SEQ ID NO: 3899 - RNA, 22 nt, Homo sapiens
ggagcccgcgccccgcgccgag

SEQ ID NO: 3900 - RNA, 21 nt, Homo sapiens
gcccuccgcccgugcaccccg

SEQ ID NO: 3901 - RNA, 21 nt, Homo sapiens
cggggugcacgggcggagggc

SEQ ID NO: 3902 - RNA, 22 nt, Homo sapiens
gcccgcguguggagccaggugu

SEQ ID NO: 3903 - RNA, 22 nt, Homo sapiens
acaccuggcuccacacgcgggc

SEQ ID NO: 3904 - RNA, 22 nt, Homo sapiens
aaaaccgucuaguuacaguugu

SEQ ID NO: 3905 - RNA, 22 nt, Homo sapiens
acaacuguaacuagacgguuuu

SEQ ID NO: 3906 - RNA, 18 nt, Homo sapiens
uccagugcccuccucucc

SEQ ID NO: 3907 - RNA, 18 nt, Homo sapiens
ggagaggagggcacugga

SEQ ID NO: 3908 - RNA, 18 nt, Homo sapiens
ugaggcaguagauugaau

SEQ ID NO: 3909 - RNA, 18 nt, Homo sapiens
auucaaucuacugccuca

SEQ ID NO: 3910 - RNA, 22 nt, Homo sapiens
aggggcuggcuuuccucugguc

SEQ ID NO: 3911 - RNA, 22 nt, Homo sapiens
gaccagaggaaagccagccccu

SEQ ID NO: 3912 - RNA, 22 nt, Homo sapiens
uggagagaaaggcaguuccuga

SEQ ID NO: 3913 - RNA, 22 nt, Homo sapiens
ucaggaacugccuuucucucca

SEQ ID NO: 3914 - RNA, 22 nt, Homo sapiens
ucgugucuuguguugcagccgg

SEQ ID NO: 3915 - RNA, 22 nt, Homo sapiens
ccggcugcaacacaagacacga

SEQ ID NO: 3916 - RNA, 22 nt, Homo sapiens
ggcuacaacacaggacccgggc

SEQ ID NO: 3917 - RNA, 22 nt, Homo sapiens
gcccggguccuguguuguagcc

SEQ ID NO: 3918 - RNA, 21 nt, Homo sapiens
cggcggggacggcgauugguc

SEQ ID NO: 3919 - RNA, 21 nt, Homo sapiens
gaccaaucgccguccccgccg

SEQ ID NO: 3920 - RNA, 22 nt, Homo sapiens
cgcaggggccgggugcucaccg

SEQ ID NO: 3921 - RNA, 22 nt, Homo sapiens
cggugagcacccggccccugcg

SEQ ID NO: 3922 - RNA, 21 nt, Homo sapiens
ugagugccggugccugcccug

SEQ ID NO: 3923 - RNA, 21 nt, Homo sapiens
cagggcaggcaccggcacuca

SEQ ID NO: 3924 - RNA, 22 nt, Homo sapiens
gcugcgcuuggauuucgucccc

SEQ ID NO: 3925 - RNA, 22 nt, Homo sapiens
ggggacgaaauccaagcgcagc

SEQ ID NO: 3926 - RNA, 23 nt, Homo sapiens
caacggaaucccaaaagcagcug

SEQ ID NO: 3927 - RNA, 23 nt, Homo sapiens
cagcugcuuuugggauuccguug

SEQ ID NO: 3928 - RNA, 22 nt, Homo sapiens
ucaggccaggcacaguggcuca

SEQ ID NO: 3929 - RNA, 22 nt, Homo sapiens
ugagccacugugccuggccuga

SEQ ID NO: 3930 - RNA, 19 nt, Homo sapiens
accgugcaaagguagcaua

SEQ ID NO: 3931 - RNA, 19 nt, Homo sapiens
uaugcuaccuuugcacggu

SEQ ID NO: 3932 - RNA, 20 nt, Homo sapiens
ccuccugcccuccuugcugu

SEQ ID NO: 3933 - RNA, 20 nt, Homo sapiens
acagcaaggagggcaggagg

SEQ ID NO: 3934 - RNA, 20 nt, Homo sapiens
uguuuugauaacaguaaugu

SEQ ID NO: 3935 - RNA, 20 nt, Homo sapiens
acauuacuguuaucaaaaca

SEQ ID NO: 3936 - RNA, 23 nt, Homo sapiens
guguuaauuaaaccucuauuuac

SEQ ID NO: 3937 - RNA, 23 nt, Homo sapiens
guaaauagagguuuaauuaacac

SEQ ID NO: 3938 - RNA, 23 nt, Homo sapiens
cuguaauauaaauuuaauuuauu

SEQ ID NO: 3939 - RNA, 23 nt, Homo sapiens
aauaaauuaaauuuauauuacag

SEQ ID NO: 3940 - RNA, 22 nt, Homo sapiens
uuggggaaacggccgcugagug

SEQ ID NO: 3941 - RNA, 22 nt, Homo sapiens
cacucagcggccguuuccccaa

SEQ ID NO: 3942 - RNA, 21 nt, Homo sapiens
ccucccaugccaagaacuccc

SEQ ID NO: 3943 - RNA, 21 nt, Homo sapiens
gggaguucuuggcaugggagg

SEQ ID NO: 3944 - RNA, 21 nt, Homo sapiens
gguucuuagcauaggaggucu

SEQ ID NO: 3945 - RNA, 21 nt, Homo sapiens
agaccuccuaugcuaagaacc

SEQ ID NO: 3946 - RNA, 21 nt, Homo sapiens
uguucucuuugccaaggacag

SEQ ID NO: 3947 - RNA, 21 nt, Homo sapiens
cuguccuuggcaaagagaaca

SEQ ID NO: 3948 - RNA, 22 nt, Homo sapiens
aaaucucugcaggcaaauguga

SEQ ID NO: 3949 - RNA, 22 nt, Homo sapiens
ucacauuugccugcagagauuu

SEQ ID NO: 3950 - RNA, 22 nt, Homo sapiens
caugguucugucaagcaccgcg

SEQ ID NO: 3951 - RNA, 22 nt, Homo sapiens
cgcggugcuugacagaaccaug

SEQ ID NO: 3952 - RNA, 21 nt, Homo sapiens
uugugcuugaucuaaccaugu

SEQ ID NO: 3953 - RNA, 21 nt, Homo sapiens
acaugguuagaucaagcacaa

SEQ ID NO: 3954 - RNA, 22 nt, Homo sapiens
ucugcaagugucagaggcgagg

SEQ ID NO: 3955 - RNA, 22 nt, Homo sapiens
ccucgccucugacacuugcaga

SEQ ID NO: 3956 - RNA, 22 nt, Homo sapiens
gagagcaguguguguugccugg

SEQ ID NO: 3957 - RNA, 22 nt, Homo sapiens
ccaggcaacacacacugcucuc

SEQ ID NO: 3958 - RNA, 22 nt, Homo sapiens
aucacauugccagugauuaccc

SEQ ID NO: 3959 - RNA, 22 nt, Homo sapiens
ggguaaucacuggcaaugugau

SEQ ID NO: 3960 - RNA, 22 nt, Homo sapiens
agcagaggcagagaggcucagg

SEQ ID NO: 3961 - RNA, 22 nt, Homo sapiens
ccugagccucucugccucugcu

SEQ ID NO: 3962 - RNA, 23 nt, Homo sapiens
ugaggcucuguuagccuuggcuc

SEQ ID NO: 3963 - RNA, 23 nt, Homo sapiens
gagccaaggcuaacagagccuca

SEQ ID NO: 3964 - RNA, 22 nt, Homo sapiens
uaucauggaguugguaaagcac

SEQ ID NO: 3965 - RNA, 22 nt, Homo sapiens
gugcuuuaccaacuccaugaua

SEQ ID NO: 3966 - RNA, 22 nt, Homo sapiens
guuuuaccaccuccaggagacu

SEQ ID NO: 3967 - RNA, 22 nt, Homo sapiens
agucuccuggaggugguaaaac

SEQ ID NO: 3968 - RNA, 22 nt, Homo sapiens
cgccucuucagcgcugucuucc

SEQ ID NO: 3969 - RNA, 22 nt, Homo sapiens
ggaagacagcgcugaagaggcg

SEQ ID NO: 3970 - RNA, 23 nt, Homo sapiens
caggcagugacuguucagacguc

SEQ ID NO: 3971 - RNA, 23 nt, Homo sapiens
gacgucugaacagucacugccug

SEQ ID NO: 3972 - RNA, 23 nt, Homo sapiens
agaauugcguuuggacaaucagu

SEQ ID NO: 3973 - RNA, 23 nt, Homo sapiens
acugauuguccaaacgcaauucu

SEQ ID NO: 3974 - RNA, 22 nt, Homo sapiens
agauguccagccacaauucucg

SEQ ID NO: 3975 - RNA, 22 nt, Homo sapiens
cgagaauuguggcuggacaucu

SEQ ID NO: 3976 - RNA, 24 nt, Homo sapiens
agcagaagcagggagguucuccca

SEQ ID NO: 3977 - RNA, 24 nt, Homo sapiens
ugggagaaccucccugcuucugcu

SEQ ID NO: 3978 - RNA, 22 nt, Homo sapiens
uaugugggaugguaaaccgcuu

SEQ ID NO: 3979 - RNA, 22 nt, Homo sapiens
aagcgguuuaccaucccacaua

SEQ ID NO: 3980 - RNA, 22 nt, Homo sapiens
ugguuuaccgucccacauacau

SEQ ID NO: 3981 - RNA, 22 nt, Homo sapiens
auguaugugggacgguaaacca

SEQ ID NO: 3982 - RNA, 23 nt, Homo sapiens
cagugcaaugauauugucaaagc

SEQ ID NO: 3983 - RNA, 23 nt, Homo sapiens
gcuuugacaauaucauugcacug

SEQ ID NO: 3984 - RNA, 17 nt, Homo sapiens
uaauugcuuccauguuu

SEQ ID NO: 3985 - RNA, 17 nt, Homo sapiens
aaacauggaagcaauua

SEQ ID NO: 3986 - RNA, 23 nt, Homo sapiens
uugccacacugcaacaccuuaca

SEQ ID NO: 3987 - RNA, 23 nt, Homo sapiens
uguaagguguugcaguguggcaa

SEQ ID NO: 3988 - RNA, 21 nt, Homo sapiens
ucuggcuguuguggugugcaa

SEQ ID NO: 3989 - RNA, 21 nt, Homo sapiens
uugcacaccacaacagccaga

SEQ ID NO: 3990 - RNA, 22 nt, Homo sapiens
gauaucagcucaguaggcaccg

SEQ ID NO: 3991 - RNA, 22 nt, Homo sapiens
cggugccuacugagcugauauc

SEQ ID NO: 3992 - RNA, 21 nt, Homo sapiens
guuccugcugaacugagccag

SEQ ID NO: 3993 - RNA, 21 nt, Homo sapiens
cuggcucaguucagcaggaac

SEQ ID NO: 3994 - RNA, 20 nt, Homo sapiens
auauggguuuacuaguuggu

SEQ ID NO: 3995 - RNA, 20 nt, Homo sapiens
accaacuaguaaacccauau

SEQ ID NO: 3996 - RNA, 22 nt, Homo sapiens
ugcuaugccaacauauugccau

SEQ ID NO: 3997 - RNA, 22 nt, Homo sapiens
auggcaauauguuggcauagca

SEQ ID NO: 3998 - RNA, 21 nt, Homo sapiens
aggcaagaugcuggcauagcu

SEQ ID NO: 3999 - RNA, 21 nt, Homo sapiens
agcuaugccagcaucuugccu

SEQ ID NO: 4000 - RNA, 18 nt, Homo sapiens
cggggcggcaggggccuc

SEQ ID NO: 4001 - RNA, 18 nt, Homo sapiens
gaggccccugccgccccg

SEQ ID NO: 4002 - RNA, 19 nt, Homo sapiens
aaaagcuggguugagagga

SEQ ID NO: 4003 - RNA, 19 nt, Homo sapiens
uccucucaacccagcuuuu

SEQ ID NO: 4004 - RNA, 22 nt, Homo sapiens
cccaauacacggucgaccucuu

SEQ ID NO: 4005 - RNA, 22 nt, Homo sapiens
aagaggucgaccguguauuggg

SEQ ID NO: 4006 - RNA, 23 nt, Homo sapiens
agguuguccguggugaguucgca

SEQ ID NO: 4007 - RNA, 23 nt, Homo sapiens
ugcgaacucaccacggacaaccu

SEQ ID NO: 4008 - RNA, 23 nt, Homo sapiens
gcaaagcacacggccugcagaga

SEQ ID NO: 4009 - RNA, 23 nt, Homo sapiens
ucucugcaggccgugugcuuugc

SEQ ID NO: 4010 - RNA, 22 nt, Homo sapiens
ucucugggccugugucuuaggc

SEQ ID NO: 4011 - RNA, 22 nt, Homo sapiens
gccuaagacacaggcccagaga

SEQ ID NO: 4012 - RNA, 21 nt, Homo sapiens
gccccugggccuauccuagaa

SEQ ID NO: 4013 - RNA, 21 nt, Homo sapiens
uucuaggauaggcccaggggc

SEQ ID NO: 4014 - RNA, 22 nt, Homo sapiens
uccgucucaguuacuuuauagc

SEQ ID NO: 4015 - RNA, 22 nt, Homo sapiens
gcuauaaaguaacugagacgga

SEQ ID NO: 4016 - RNA, 22 nt, Homo sapiens
aacacaccuauucaaggauuca

SEQ ID NO: 4017 - RNA, 22 nt, Homo sapiens
ugaauccuugaauagguguguu

SEQ ID NO: 4018 - RNA, 24 nt, Homo sapiens
aauccuuggaaccuaggugugagu

SEQ ID NO: 4019 - RNA, 24 nt, Homo sapiens
acucacaccuagguuccaaggauu

SEQ ID NO: 4020 - RNA, 22 nt, Homo sapiens
uaaugccccuaaaaauccuuau

SEQ ID NO: 4021 - RNA, 22 nt, Homo sapiens
auaaggauuuuuaggggcauua

SEQ ID NO: 4022 - RNA, 23 nt, Homo sapiens
agggacuuuugggggcagaugug

SEQ ID NO: 4023 - RNA, 23 nt, Homo sapiens
cacaucugcccccaaaagucccu

SEQ ID NO: 4024 - RNA, 22 nt, Homo sapiens
uaaugccccuaaaaauccuuau

SEQ ID NO: 4025 - RNA, 22 nt, Homo sapiens
auaaggauuuuuaggggcauua

SEQ ID NO: 4026 - RNA, 22 nt, Homo sapiens
agggacuuucaggggcagcugu

SEQ ID NO: 4027 - RNA, 22 nt, Homo sapiens
acagcugccccugaaagucccu

SEQ ID NO: 4028 - RNA, 24 nt, Homo sapiens
gaaaaugaugaguagugacugaug

SEQ ID NO: 4029 - RNA, 24 nt, Homo sapiens
caucagucacuacucaucauuuuc

SEQ ID NO: 4030 - RNA, 23 nt, Homo sapiens
ugagcaccacacaggccgggcgc

SEQ ID NO: 4031 - RNA, 23 nt, Homo sapiens
gcgcccggccuguguggugcuca

SEQ ID NO: 4032 - RNA, 21 nt, Homo sapiens
gcuggucugcguggugcucgg

SEQ ID NO: 4033 - RNA, 21 nt, Homo sapiens
ccgagcaccacgcagaccagc

SEQ ID NO: 4034 - RNA, 22 nt, Homo sapiens
gccugcugggguggaaccuggu

SEQ ID NO: 4035 - RNA, 22 nt, Homo sapiens
accagguuccaccccagcaggc

SEQ ID NO: 4036 - RNA, 23 nt, Homo sapiens
gaagugcuucgauuuuggggugu

SEQ ID NO: 4037 - RNA, 23 nt, Homo sapiens
acaccccaaaaucgaagcacuuc

SEQ ID NO: 4038 - RNA, 22 nt, Homo sapiens
acucaaaaugggggcgcuuucc

SEQ ID NO: 4039 - RNA, 22 nt, Homo sapiens
ggaaagcgcccccauuuugagu

SEQ ID NO: 4040 - RNA, 22 nt, Homo sapiens
uauguaacaugguccacuaacu

SEQ ID NO: 4041 - RNA, 22 nt, Homo sapiens
aguuaguggaccauguuacaua

SEQ ID NO: 4042 - RNA, 21 nt, Homo sapiens
ugguagacuauggaacguagg

SEQ ID NO: 4043 - RNA, 21 nt, Homo sapiens
ccuacguuccauagucuacca

SEQ ID NO: 4044 - RNA, 22 nt, Homo sapiens
uguagauacgagcaccagccac

SEQ ID NO: 4045 - RNA, 22 nt, Homo sapiens
guggcuggugcucguaucuaca

SEQ ID NO: 4046 - RNA, 23 nt, Homo sapiens
acaggcggcuguagcaauggggg

SEQ ID NO: 4047 - RNA, 23 nt, Homo sapiens
cccccauugcuacagccgccugu

SEQ ID NO: 4048 - RNA, 22 nt, Homo sapiens
aauucccuuguagauaacccgg

SEQ ID NO: 4049 - RNA, 22 nt, Homo sapiens
ccggguuaucuacaagggaauu

SEQ ID NO: 4050 - RNA, 22 nt, Homo sapiens
uacgcgcagaccacaggauguc

SEQ ID NO: 4051 - RNA, 22 nt, Homo sapiens
gacauccuguggucugcgcgua

SEQ ID NO: 4052 - RNA, 22 nt, Homo sapiens
uuacacacaacugaggaucaua

SEQ ID NO: 4053 - RNA, 22 nt, Homo sapiens
uaugauccucaguuguguguaa

SEQ ID NO: 4054 - RNA, 23 nt, Homo sapiens
uagcccccaggcuucacuuggcg

SEQ ID NO: 4055 - RNA, 23 nt, Homo sapiens
cgccaagugaagccugggggcua

SEQ ID NO: 4056 - RNA, 23 nt, Homo sapiens
agggcauaggagaggguugauau

SEQ ID NO: 4057 - RNA, 23 nt, Homo sapiens
auaucaacccucuccuaugcccu

SEQ ID NO: 4058 - RNA, 22 nt, Homo sapiens
gaauguugcucggugaaccccu

SEQ ID NO: 4059 - RNA, 22 nt, Homo sapiens
agggguucaccgagcaacauuc

SEQ ID NO: 4060 - RNA, 23 nt, Homo sapiens
agguuacccgagcaacuuugcau

SEQ ID NO: 4061 - RNA, 23 nt, Homo sapiens
augcaaaguugcucggguaaccu

SEQ ID NO: 4062 - RNA, 22 nt, Homo sapiens
uauguaacacgguccacuaacc

SEQ ID NO: 4063 - RNA, 22 nt, Homo sapiens
gguuaguggaccguguuacaua

SEQ ID NO: 4064 - RNA, 21 nt, Homo sapiens
uaguagaccguauagcguacg

SEQ ID NO: 4065 - RNA, 21 nt, Homo sapiens
cguacgcuauacggucuacua

SEQ ID NO: 4066 - RNA, 23 nt, Homo sapiens
acuucaccugguccacuagccgu

SEQ ID NO: 4067 - RNA, 23 nt, Homo sapiens
acggcuaguggaccaggugaagu

SEQ ID NO: 4068 - RNA, 18 nt, Homo sapiens
guguucucugauggacag

SEQ ID NO: 4069 - RNA, 18 nt, Homo sapiens
cuguccaucagagaacac

SEQ ID NO: 4070 - RNA, 22 nt, Homo sapiens
caggucgucuugcagggcuucu

SEQ ID NO: 4071 - RNA, 22 nt, Homo sapiens
agaagcccugcaagacgaccug

SEQ ID NO: 4072 - RNA, 21 nt, Homo sapiens
ugucuugcaggccgucaugca

SEQ ID NO: 4073 - RNA, 21 nt, Homo sapiens
ugcaugacggccugcaagaca

SEQ ID NO: 4074 - RNA, 22 nt, Homo sapiens
aucaugaugggcuccucggugu

SEQ ID NO: 4075 - RNA, 22 nt, Homo sapiens
acaccgaggagcccaucaugau

SEQ ID NO: 4076 - RNA, 23 nt, Homo sapiens
uugcuaguugcacuccucucugu

SEQ ID NO: 4077 - RNA, 23 nt, Homo sapiens
acagagaggagugcaacuagcaa

SEQ ID NO: 4078 - RNA, 25 nt, Homo sapiens
uaggcaguguauugcuagcggcugu

SEQ ID NO: 4079 - RNA, 25 nt, Homo sapiens
acagccgcuagcaauacacugccua

SEQ ID NO: 4080 - RNA, 22 nt, Homo sapiens
auuggggacauuuugcauucau

SEQ ID NO: 4081 - RNA, 22 nt, Homo sapiens
augaaugcaaaauguccccaau

SEQ ID NO: 4082 - RNA, 22 nt, Homo sapiens
uuuugcgauguguuccuaauau

SEQ ID NO: 4083 - RNA, 22 nt, Homo sapiens
auauuaggaacacaucgcaaaa

SEQ ID NO: 4084 - RNA, 22 nt, Homo sapiens
uugggaucauuuugcauccaua

SEQ ID NO: 4085 - RNA, 22 nt, Homo sapiens
uauggaugcaaaaugaucccaa

SEQ ID NO: 4086 - RNA, 22 nt, Homo sapiens
uuuugcaauauguuccugaaua

SEQ ID NO: 4087 - RNA, 22 nt, Homo sapiens
uauucaggaacauauugcaaaa

SEQ ID NO: 4088 - RNA, 21 nt, Homo sapiens
gcaguccaugggcauauacac

SEQ ID NO: 4089 - RNA, 21 nt, Homo sapiens
guguauaugcccauggacugc

SEQ ID NO: 4090 - RNA, 22 nt, Homo sapiens
uaugugccuuuggacuacaucg

SEQ ID NO: 4091 - RNA, 22 nt, Homo sapiens
cgauguaguccaaaggcacaua

SEQ ID NO: 4092 - RNA, 23 nt, Homo sapiens
auacacauacacgcaacacacau

SEQ ID NO: 4093 - RNA, 23 nt, Homo sapiens
auguguguugcguguauguguau

SEQ ID NO: 4094 - RNA, 23 nt, Homo sapiens
uugcaugucagauuguaauuccc

SEQ ID NO: 4095 - RNA, 23 nt, Homo sapiens
gggaauuacaaucugacaugcaa

SEQ ID NO: 4096 - RNA, 21 nt, Homo sapiens
ucacuccucuccucccgucuu

SEQ ID NO: 4097 - RNA, 21 nt, Homo sapiens
aagacgggaggagaggaguga

SEQ ID NO: 4098 - RNA, 22 nt, Homo sapiens
ucaggcucaguccccucccgau

SEQ ID NO: 4099 - RNA, 22 nt, Homo sapiens
aucgggaggggacugagccuga

SEQ ID NO: 4100 - RNA, 22 nt, Homo sapiens
gucauacacggcucuccucucu

SEQ ID NO: 4101 - RNA, 22 nt, Homo sapiens
agagaggagagccguguaugac

SEQ ID NO: 4102 - RNA, 22 nt, Homo sapiens
agaggcuggccgugaugaauuc

SEQ ID NO: 4103 - RNA, 22 nt, Homo sapiens
gaauucaucacggccagccucu

SEQ ID NO: 4104 - RNA, 22 nt, Homo sapiens
aaucauacagggacauccaguu

SEQ ID NO: 4105 - RNA, 22 nt, Homo sapiens
aacuggaugucccuguaugauu

SEQ ID NO: 4106 - RNA, 22 nt, Homo sapiens
aaucguacagggucauccacuu

SEQ ID NO: 4107 - RNA, 22 nt, Homo sapiens
aaguggaugacccuguacgauu

SEQ ID NO: 4108 - RNA, 21 nt, Homo sapiens
uugaaaggcuauuucuugguc

SEQ ID NO: 4109 - RNA, 21 nt, Homo sapiens
gaccaagaaauagccuuucaa

SEQ ID NO: 4110 - RNA, 21 nt, Homo sapiens
cccagauaauggcacucucaa

SEQ ID NO: 4111 - RNA, 21 nt, Homo sapiens
uugagagugccauuaucuggg

SEQ ID NO: 4112 - RNA, 22 nt, Homo sapiens
caaccuggaggacuccaugcug

SEQ ID NO: 4113 - RNA, 22 nt, Homo sapiens
cagcauggaguccuccagguug

SEQ ID NO: 4114 - RNA, 20 nt, Homo sapiens
ccauggaucuccaggugggu

SEQ ID NO: 4115 - RNA, 20 nt, Homo sapiens
acccaccuggagauccaugg

SEQ ID NO: 4116 - RNA, 22 nt, Homo sapiens
cuuaugcaagauucccuucuac

SEQ ID NO: 4117 - RNA, 22 nt, Homo sapiens
guagaagggaaucuugcauaag

SEQ ID NO: 4118 - RNA, 22 nt, Homo sapiens
aguggggaacccuuccaugagg

SEQ ID NO: 4119 - RNA, 22 nt, Homo sapiens
ccucauggaaggguuccccacu

SEQ ID NO: 4120 - RNA, 23 nt, Homo sapiens
aggaccugcgggacaagauucuu

SEQ ID NO: 4121 - RNA, 23 nt, Homo sapiens
aagaaucuugucccgcagguccu

SEQ ID NO: 4122 - RNA, 22 nt, Homo sapiens
caaaccacacugugguguuaga

SEQ ID NO: 4123 - RNA, 22 nt, Homo sapiens
ucuaacaccacagugugguuug

SEQ ID NO: 4124 - RNA, 21 nt, Homo sapiens
cagcagcacacugugguuugu

SEQ ID NO: 4125 - RNA, 21 nt, Homo sapiens
acaaaccacagugugcugcug

SEQ ID NO: 4126 - RNA, 23 nt, Homo sapiens
uuucaagccagggggcguuuuuc

SEQ ID NO: 4127 - RNA, 23 nt, Homo sapiens
gaaaaacgcccccuggcuugaaa

SEQ ID NO: 4128 - RNA, 20 nt, Homo sapiens
ucacuaccugacaauacagu

SEQ ID NO: 4129 - RNA, 20 nt, Homo sapiens
acuguauugucagguaguga

SEQ ID NO: 4130 - RNA, 21 nt, Homo sapiens
ugcuguauugucagguaguga

SEQ ID NO: 4131 - RNA, 21 nt, Homo sapiens
ucacuaccugacaauacagca

SEQ ID NO: 4132 - RNA, 22 nt, Homo sapiens
uucugccucuguccagguccuu

SEQ ID NO: 4133 - RNA, 22 nt, Homo sapiens
aaggaccuggacagaggcagaa

SEQ ID NO: 4134 - RNA, 24 nt, Homo sapiens
agggcuggacucagcggcggagcu

SEQ ID NO: 4135 - RNA, 24 nt, Homo sapiens
agcuccgccgcugaguccagcccu

SEQ ID NO: 4136 - RNA, 21 nt, Homo sapiens
ugacugccucacugaccacuu

SEQ ID NO: 4137 - RNA, 21 nt, Homo sapiens
aaguggucagugaggcaguca

SEQ ID NO: 4138 - RNA, 24 nt, Homo sapiens
aauuugguuucugaggcacuuagu

SEQ ID NO: 4139 - RNA, 24 nt, Homo sapiens
acuaagugccucagaaaccaaauu

SEQ ID NO: 4140 - RNA, 21 nt, Homo sapiens
uacuuuucuagguuguugggg

SEQ ID NO: 4141 - RNA, 21 nt, Homo sapiens
ccccaacaaccuagaaaagua

SEQ ID NO: 4142 - RNA, 23 nt, Homo sapiens
ucacaacaaccuugcaggguaga

SEQ ID NO: 4143 - RNA, 23 nt, Homo sapiens
ucuacccugcaagguuguuguga

SEQ ID NO: 4144 - RNA, 22 nt, Homo sapiens
cuuggauuuuccugggccucag

SEQ ID NO: 4145 - RNA, 22 nt, Homo sapiens
cugaggcccaggaaaauccaag

SEQ ID NO: 4146 - RNA, 22 nt, Homo sapiens
ugaggacagggcaaauucacga

SEQ ID NO: 4147 - RNA, 22 nt, Homo sapiens
ucgugaauuugcccuguccuca

SEQ ID NO: 4148 - RNA, 22 nt, Homo sapiens
aucauaugaaccaaacucuaau

SEQ ID NO: 4149 - RNA, 22 nt, Homo sapiens
auuagaguuugguucauaugau

SEQ ID NO: 4150 - RNA, 22 nt, Homo sapiens
uagagucuggcugauaugguuu

SEQ ID NO: 4151 - RNA, 22 nt, Homo sapiens
aaaccauaucagccagacucua

SEQ ID NO: 4152 - RNA, 21 nt, Homo sapiens
ccugugcucccagggccucgc

SEQ ID NO: 4153 - RNA, 21 nt, Homo sapiens
gcgaggcccugggagcacagg

SEQ ID NO: 4154 - RNA, 22 nt, Homo sapiens
ugaggcccuuggggcacagugg

SEQ ID NO: 4155 - RNA, 22 nt, Homo sapiens
ccacugugccccaagggccuca

SEQ ID NO: 4156 - RNA, 22 nt, Homo sapiens
uccuaaaucugaaaguccaaaa

SEQ ID NO: 4157 - RNA, 22 nt, Homo sapiens
uuuuggacuuucagauuuagga

SEQ ID NO: 4158 - RNA, 24 nt, Homo sapiens
uuggacuuuuucagauuuggggau

SEQ ID NO: 4159 - RNA, 24 nt, Homo sapiens
auccccaaaucugaaaaaguccaa

SEQ ID NO: 4160 - RNA, 22 nt, Homo sapiens
augcaccugggcaaggauucug

SEQ ID NO: 4161 - RNA, 22 nt, Homo sapiens
cagaauccuugcccaggugcau

SEQ ID NO: 4162 - RNA, 23 nt, Homo sapiens
uaauccuugcuaccugggugaga

SEQ ID NO: 4163 - RNA, 23 nt, Homo sapiens
ucucacccagguagcaaggauua

SEQ ID NO: 4164 - RNA, 22 nt, Homo sapiens
uuuugugucucccauuccccag

SEQ ID NO: 4165 - RNA, 22 nt, Homo sapiens
cuggggaaugggagacacaaaa

SEQ ID NO: 4166 - RNA, 22 nt, Homo sapiens
agggggauggcagagcaaaauu

SEQ ID NO: 4167 - RNA, 22 nt, Homo sapiens
aauuuugcucugccaucccccu

SEQ ID NO: 4168 - RNA, 22 nt, Homo sapiens
gugcauggcuguauauauaaca

SEQ ID NO: 4169 - RNA, 22 nt, Homo sapiens
uguuauauauacagccaugcac

SEQ ID NO: 4170 - RNA, 21 nt, Homo sapiens
uauauauacagccaugcacuc

SEQ ID NO: 4171 - RNA, 21 nt, Homo sapiens
gagugcauggcuguauauaua

SEQ ID NO: 4172 - RNA, 22 nt, Homo sapiens
aaugcacccgggcaaggauucu

SEQ ID NO: 4173 - RNA, 22 nt, Homo sapiens
agaauccuugcccgggugcauu

SEQ ID NO: 4174 - RNA, 22 nt, Homo sapiens
aauccuuugucccugggugaga

SEQ ID NO: 4175 - RNA, 22 nt, Homo sapiens
ucucacccagggacaaaggauu

SEQ ID NO: 4176 - RNA, 22 nt, Homo sapiens
aaugcaccugggcaaggauuca

SEQ ID NO: 4177 - RNA, 22 nt, Homo sapiens
ugaauccuugcccaggugcauu

SEQ ID NO: 4178 - RNA, 21 nt, Homo sapiens
auccuugcuaucugggugcua

SEQ ID NO: 4179 - RNA, 21 nt, Homo sapiens
uagcacccagauagcaaggau

SEQ ID NO: 4180 - RNA, 22 nt, Homo sapiens
agacccuggucugcacucuauc

SEQ ID NO: 4181 - RNA, 22 nt, Homo sapiens
gauagagugcagaccagggucu

SEQ ID NO: 4182 - RNA, 21 nt, Homo sapiens
uugcagcugcgguuguaaggu

SEQ ID NO: 4183 - RNA, 21 nt, Homo sapiens
accuuacaaccgcagcugcaa

SEQ ID NO: 4184 - RNA, 22 nt, Homo sapiens
cgucaacacuugcugguuuccu

SEQ ID NO: 4185 - RNA, 22 nt, Homo sapiens
aggaaaccagcaaguguugacg

SEQ ID NO: 4186 - RNA, 22 nt, Homo sapiens
gggagccaggaaguauugaugu

SEQ ID NO: 4187 - RNA, 22 nt, Homo sapiens
acaucaauacuuccuggcuccc

SEQ ID NO: 4188 - RNA, 21 nt, Homo sapiens
uaaggcacccuucugaguaga

SEQ ID NO: 4189 - RNA, 21 nt, Homo sapiens
ucuacucagaagggugccuua

SEQ ID NO: 4190 - RNA, 22 nt, Homo sapiens
uauucaggaagguguuacuuaa

SEQ ID NO: 4191 - RNA, 22 nt, Homo sapiens
uuaaguaacaccuuccugaaua

SEQ ID NO: 4192 - RNA, 21 nt, Homo sapiens
uuuugcaccuuuuggagugaa

SEQ ID NO: 4193 - RNA, 21 nt, Homo sapiens
uucacuccaaaaggugcaaaa

SEQ ID NO: 4194 - RNA, 23 nt, Homo sapiens
ugauuguagccuuuuggaguaga

SEQ ID NO: 4195 - RNA, 23 nt, Homo sapiens
ucuacuccaaaaggcuacaauca

SEQ ID NO: 4196 - RNA, 23 nt, Homo sapiens
ggguuuguagcuuugcuggcaug

SEQ ID NO: 4197 - RNA, 23 nt, Homo sapiens
caugccagcaaagcuacaaaccc

SEQ ID NO: 4198 - RNA, 23 nt, Homo sapiens
cagggcucagggauuggauggag

SEQ ID NO: 4199 - RNA, 23 nt, Homo sapiens
cuccauccaaucccugagcccug

SEQ ID NO: 4200 - RNA, 23 nt, Homo sapiens
augcuacucggaaaucccacuga

SEQ ID NO: 4201 - RNA, 23 nt, Homo sapiens
ucagugggauuuccgaguagcau

SEQ ID NO: 4202 - RNA, 21 nt, Homo sapiens
gugggauuucugaguagcauc

SEQ ID NO: 4203 - RNA, 21 nt, Homo sapiens
gaugcuacucagaaaucccac

SEQ ID NO: 4204 - RNA, 23 nt, Homo sapiens
ccggggcagauugguguagggug

SEQ ID NO: 4205 - RNA, 23 nt, Homo sapiens
cacccuacaccaaucugccccgg

SEQ ID NO: 4206 - RNA, 23 nt, Homo sapiens
acggagacgacaagacugugcug

SEQ ID NO: 4207 - RNA, 23 nt, Homo sapiens
cagcacagucuugucgucuccgu

SEQ ID NO: 4208 - RNA, 22 nt, Homo sapiens
aauccacgcugagcuuggcauc

SEQ ID NO: 4209 - RNA, 22 nt, Homo sapiens
gaugccaagcucagcguggauu

SEQ ID NO: 4210 - RNA, 23 nt, Homo sapiens
aggaaaugaggcuggcuaggagc

SEQ ID NO: 4211 - RNA, 23 nt, Homo sapiens
gcuccuagccagccucauuuccu

SEQ ID NO: 4212 - RNA, 22 nt, Homo sapiens
ugauugguacgucuguggguag

SEQ ID NO: 4213 - RNA, 22 nt, Homo sapiens
cuacccacagacguaccaauca

SEQ ID NO: 4214 - RNA, 22 nt, Homo sapiens
aaucagugaaugccuugaaccu

SEQ ID NO: 4215 - RNA, 22 nt, Homo sapiens
agguucaaggcauucacugauu

SEQ ID NO: 4216 - RNA, 21 nt, Homo sapiens
uuacaggcgugaaccaccgcg

SEQ ID NO: 4217 - RNA, 21 nt, Homo sapiens
cgcggugguucacgccuguaa

SEQ ID NO: 4218 - RNA, 21 nt, Homo sapiens
uacugcagacaguggcaauca

SEQ ID NO: 4219 - RNA, 21 nt, Homo sapiens
ugauugccacugucugcagua

SEQ ID NO: 4220 - RNA, 21 nt, Homo sapiens
guuucaccauguuggucaggc

SEQ ID NO: 4221 - RNA, 21 nt, Homo sapiens
gccugaccaacauggugaaac

SEQ ID NO: 4222 - RNA, 23 nt, Homo sapiens
uaaauuucaccuuucugagaagg

SEQ ID NO: 4223 - RNA, 23 nt, Homo sapiens
ccuucucagaaaggugaaauuua

SEQ ID NO: 4224 - RNA, 22 nt, Homo sapiens
uucacaaggaggugucauuuau

SEQ ID NO: 4225 - RNA, 22 nt, Homo sapiens
auaaaugacaccuccuugugaa

SEQ ID NO: 4226 - RNA, 23 nt, Homo sapiens
uaaauuucaccuuucugagaaga

SEQ ID NO: 4227 - RNA, 23 nt, Homo sapiens
ucuucucagaaaggugaaauuua

SEQ ID NO: 4228 - RNA, 22 nt, Homo sapiens
uucucaaggaggugucguuuau

SEQ ID NO: 4229 - RNA, 22 nt, Homo sapiens
auaaacgacaccuccuugagaa

SEQ ID NO: 4230 - RNA, 21 nt, Homo sapiens
auugacacuucugugaguaga

SEQ ID NO: 4231 - RNA, 21 nt, Homo sapiens
ucuacucacagaagugucaau

SEQ ID NO: 4232 - RNA, 23 nt, Homo sapiens
uacucuggagagugacaaucaug

SEQ ID NO: 4233 - RNA, 23 nt, Homo sapiens
caugauugucacucuccagagua

SEQ ID NO: 4234 - RNA, 21 nt, Homo sapiens
auugacaccucugugagugga

SEQ ID NO: 4235 - RNA, 21 nt, Homo sapiens
uccacucacagaggugucaau

SEQ ID NO: 4236 - RNA, 22 nt, Homo sapiens
uucucaagagggaggcaaucau

SEQ ID NO: 4237 - RNA, 22 nt, Homo sapiens
augauugccucccucuugagaa

SEQ ID NO: 4238 - RNA, 22 nt, Homo sapiens
gagugccuucuuuuggagcguu

SEQ ID NO: 4239 - RNA, 22 nt, Homo sapiens
aacgcuccaaaagaaggcacuc

SEQ ID NO: 4240 - RNA, 18 nt, Homo sapiens
ugcuuccuuucagagggu

SEQ ID NO: 4241 - RNA, 18 nt, Homo sapiens
acccucugaaaggaagca

SEQ ID NO: 4242 - RNA, 22 nt, Homo sapiens
aucuggagguaagaagcacuuu

SEQ ID NO: 4243 - RNA, 22 nt, Homo sapiens
aaagugcuucuuaccuccagau

SEQ ID NO: 4244 - RNA, 22 nt, Homo sapiens
gaaagcgcuucccuuugcugga

SEQ ID NO: 4245 - RNA, 22 nt, Homo sapiens
uccagcaaagggaagcgcuuuc

SEQ ID NO: 4246 - RNA, 20 nt, Homo sapiens
cugcaaagggaagcccuuuc

SEQ ID NO: 4247 - RNA, 20 nt, Homo sapiens
gaaagggcuucccuuugcag

SEQ ID NO: 4248 - RNA, 21 nt, Homo sapiens
caaagcgcuucccuuuggagc

SEQ ID NO: 4249 - RNA, 21 nt, Homo sapiens
gcuccaaagggaagcgcuuug

SEQ ID NO: 4250 - RNA, 22 nt, Homo sapiens
cucuagagggaagcacuuucug

SEQ ID NO: 4251 - RNA, 22 nt, Homo sapiens
cagaaagugcuucccucuagag

SEQ ID NO: 4252 - RNA, 21 nt, Homo sapiens
aaagcgcuucccuucagagug

SEQ ID NO: 4253 - RNA, 21 nt, Homo sapiens
cacucugaagggaagcgcuuu

SEQ ID NO: 4254 - RNA, 22 nt, Homo sapiens
cucuagagggaagcgcuuucug

SEQ ID NO: 4255 - RNA, 22 nt, Homo sapiens
cagaaagcgcuucccucuagag

SEQ ID NO: 4256 - RNA, 22 nt, Homo sapiens
aaagugcauccuuuuagagguu

SEQ ID NO: 4257 - RNA, 22 nt, Homo sapiens
aaccucuaaaaggaugcacuuu

SEQ ID NO: 4258 - RNA, 22 nt, Homo sapiens
cucuagagggaagcgcuuucug

SEQ ID NO: 4259 - RNA, 22 nt, Homo sapiens
cagaaagcgcuucccucuagag

SEQ ID NO: 4260 - RNA, 22 nt, Homo sapiens
aaagugcaucuuuuuagaggau

SEQ ID NO: 4261 - RNA, 22 nt, Homo sapiens
auccucuaaaaagaugcacuuu

SEQ ID NO: 4262 - RNA, 22 nt, Homo sapiens
cucuagagggaagcgcuuucug

SEQ ID NO: 4263 - RNA, 22 nt, Homo sapiens
cagaaagcgcuucccucuagag

SEQ ID NO: 4264 - RNA, 21 nt, Homo sapiens
aaagugcuuccuuuuagaggg

SEQ ID NO: 4265 - RNA, 21 nt, Homo sapiens
cccucuaaaaggaagcacuuu

SEQ ID NO: 4266 - RNA, 22 nt, Homo sapiens
aaagugcuuccuuuuagagggu

SEQ ID NO: 4267 - RNA, 22 nt, Homo sapiens
acccucuaaaaggaagcacuuu

SEQ ID NO: 4268 - RNA, 22 nt, Homo sapiens
cucuagagggaagcacuuucug

SEQ ID NO: 4269 - RNA, 22 nt, Homo sapiens
cagaaagugcuucccucuagag

SEQ ID NO: 4270 - RNA, 22 nt, Homo sapiens
aaagugcuucucuuuggugggu

SEQ ID NO: 4271 - RNA, 22 nt, Homo sapiens
acccaccaaagagaagcacuuu

SEQ ID NO: 4272 - RNA, 20 nt, Homo sapiens
cuacaaagggaagcccuuuc

SEQ ID NO: 4273 - RNA, 20 nt, Homo sapiens
gaaagggcuucccuuuguag

SEQ ID NO: 4274 - RNA, 21 nt, Homo sapiens
aaagugcuuccuuuuugaggg

SEQ ID NO: 4275 - RNA, 21 nt, Homo sapiens
cccucaaaaaggaagcacuuu

SEQ ID NO: 4276 - RNA, 22 nt, Homo sapiens
aagugcuuccuuuuagaggguu

SEQ ID NO: 4277 - RNA, 22 nt, Homo sapiens
aacccucuaaaaggaagcacuu

SEQ ID NO: 4278 - RNA, 24 nt, Homo sapiens
acaaagugcuucccuuuagagugu

SEQ ID NO: 4279 - RNA, 24 nt, Homo sapiens
acacucuaaagggaagcacuuugu

SEQ ID NO: 4280 - RNA, 22 nt, Homo sapiens
aacgcacuucccuuuagagugu

SEQ ID NO: 4281 - RNA, 22 nt, Homo sapiens
acacucuaaagggaagugcguu

SEQ ID NO: 4282 - RNA, 22 nt, Homo sapiens
aaaaugguucccuuuagagugu

SEQ ID NO: 4283 - RNA, 22 nt, Homo sapiens
acacucuaaagggaaccauuuu

SEQ ID NO: 4284 - RNA, 22 nt, Homo sapiens
cucuagagggaagcgcuuucug

SEQ ID NO: 4285 - RNA, 22 nt, Homo sapiens
cagaaagcgcuucccucuagag

SEQ ID NO: 4286 - RNA, 23 nt, Homo sapiens
gaacgcgcuucccuauagagggu

SEQ ID NO: 4287 - RNA, 23 nt, Homo sapiens
acccucuauagggaagcgcguuc

SEQ ID NO: 4288 - RNA, 22 nt, Homo sapiens
cucuagagggaagcgcuuucug

SEQ ID NO: 4289 - RNA, 22 nt, Homo sapiens
cagaaagcgcuucccucuagag

SEQ ID NO: 4290 - RNA, 21 nt, Homo sapiens
gaaggcgcuucccuuuggagu

SEQ ID NO: 4291 - RNA, 21 nt, Homo sapiens
acuccaaagggaagcgccuuc

SEQ ID NO: 4292 - RNA, 20 nt, Homo sapiens
cugcaaagggaagcccuuuc

SEQ ID NO: 4293 - RNA, 20 nt, Homo sapiens
gaaagggcuucccuuugcag

SEQ ID NO: 4294 - RNA, 22 nt, Homo sapiens
ccucccacacccaaggcuugca

SEQ ID NO: 4295 - RNA, 22 nt, Homo sapiens
ugcaagccuugggugugggagg

SEQ ID NO: 4296 - RNA, 22 nt, Homo sapiens
caugccuugaguguaggaccgu

SEQ ID NO: 4297 - RNA, 22 nt, Homo sapiens
acgguccuacacucaaggcaug

SEQ ID NO: 4298 - RNA, 22 nt, Homo sapiens
aucauacaaggacaauuucuuu

SEQ ID NO: 4299 - RNA, 22 nt, Homo sapiens
aaagaaauuguccuuguaugau

SEQ ID NO: 4300 - RNA, 22 nt, Homo sapiens
ggagaaauuauccuuggugugu

SEQ ID NO: 4301 - RNA, 22 nt, Homo sapiens
acacaccaaggauaauuucucc

SEQ ID NO: 4302 - RNA, 22 nt, Homo sapiens
uggugggcacagaaucuggacu

SEQ ID NO: 4303 - RNA, 22 nt, Homo sapiens
aguccagauucugugcccacca

SEQ ID NO: 4304 - RNA, 25 nt, Homo sapiens
aaaggauucugcugucggucccacu

SEQ ID NO: 4305 - RNA, 25 nt, Homo sapiens
agugggaccgacagcagaauccuuu

SEQ ID NO: 4306 - RNA, 23 nt, Homo sapiens
ucggggaucaucaugucacgaga

SEQ ID NO: 4307 - RNA, 23 nt, Homo sapiens
ucucgugacaugaugauccccga

SEQ ID NO: 4308 - RNA, 22 nt, Homo sapiens
aaacauucgcggugcacuucuu

SEQ ID NO: 4309 - RNA, 22 nt, Homo sapiens
aagaagugcaccgcgaauguuu

SEQ ID NO: 4310 - RNA, 22 nt, Homo sapiens
auucugcauuuuuagcaaguuc

SEQ ID NO: 4311 - RNA, 22 nt, Homo sapiens
gaacuugcuaaaaaugcagaau

SEQ ID NO: 4312 - RNA, 22 nt, Homo sapiens
accugagguugugcauuucuaa

SEQ ID NO: 4313 - RNA, 22 nt, Homo sapiens
uuagaaaugcacaaccucaggu

SEQ ID NO: 4314 - RNA, 22 nt, Homo sapiens
ucagcaaacauuuauugugugc

SEQ ID NO: 4315 - RNA, 22 nt, Homo sapiens
gcacacaauaaauguuugcuga

SEQ ID NO: 4316 - RNA, 22 nt, Homo sapiens
ucaguaaauguuuauuagauga

SEQ ID NO: 4317 - RNA, 22 nt, Homo sapiens
ucaucuaauaaacauuuacuga

SEQ ID NO: 4318 - RNA, 22 nt, Homo sapiens
agcuacaguuacuuuugcacca

SEQ ID NO: 4319 - RNA, 22 nt, Homo sapiens
uggugcaaaaguaacuguagcu

SEQ ID NO: 4320 - RNA, 20 nt, Homo sapiens
uaaaaacugcaauuacuuuc

SEQ ID NO: 4321 - RNA, 20 nt, Homo sapiens
gaaaguaauugcaguuuuua

SEQ ID NO: 4322 - RNA, 23 nt, Homo sapiens
ugcaaaaguaauugcaguuuuug

SEQ ID NO: 4323 - RNA, 23 nt, Homo sapiens
caaaaacugcaauuacuuuugca

SEQ ID NO: 4324 - RNA, 22 nt, Homo sapiens
aaagaccgugacuacuuuugca

SEQ ID NO: 4325 - RNA, 22 nt, Homo sapiens
ugcaaaaguagucacggucuuu

SEQ ID NO: 4326 - RNA, 22 nt, Homo sapiens
agaaguaacuacgguuuuugca

SEQ ID NO: 4327 - RNA, 22 nt, Homo sapiens
ugcaaaaaccguaguuacuucu

SEQ ID NO: 4328 - RNA, 19 nt, Homo sapiens
aaaaaccacaauuacuuuu

SEQ ID NO: 4329 - RNA, 19 nt, Homo sapiens
aaaaguaauugugguuuuu

SEQ ID NO: 4330 - RNA, 19 nt, Homo sapiens
aaaaguaauugcggucuuu

SEQ ID NO: 4331 - RNA, 19 nt, Homo sapiens
aaagaccgcaauuacuuuu

SEQ ID NO: 4332 - RNA, 22 nt, Homo sapiens
caaaaacugcaauuacuuuugc

SEQ ID NO: 4333 - RNA, 22 nt, Homo sapiens
gcaaaaguaauugcaguuuuug

SEQ ID NO: 4334 - RNA, 22 nt, Homo sapiens
gaaaguaauugcuguuuuugcc

SEQ ID NO: 4335 - RNA, 22 nt, Homo sapiens
ggcaaaaacagcaauuacuuuc

SEQ ID NO: 4336 - RNA, 21 nt, Homo sapiens
uaaaacugcaguuauuuuugc

SEQ ID NO: 4337 - RNA, 21 nt, Homo sapiens
gcaaaaauaacugcaguuuua

SEQ ID NO: 4338 - RNA, 21 nt, Homo sapiens
aaaaguaauugcaguuuuugc

SEQ ID NO: 4339 - RNA, 21 nt, Homo sapiens
gcaaaaacugcaauuacuuuu

SEQ ID NO: 4340 - RNA, 22 nt, Homo sapiens
uaaaacccacaauuauguuugu

SEQ ID NO: 4341 - RNA, 22 nt, Homo sapiens
acaaacauaauuguggguuuua

SEQ ID NO: 4342 - RNA, 22 nt, Homo sapiens
aaaaguaauugcggguuuugcc

SEQ ID NO: 4343 - RNA, 22 nt, Homo sapiens
ggcaaaacccgcaauuacuuuu

SEQ ID NO: 4344 - RNA, 21 nt, Homo sapiens
caaaaccgcaguaacuuuugu

SEQ ID NO: 4345 - RNA, 21 nt, Homo sapiens
acaaaaguuacugcgguuuug

SEQ ID NO: 4346 - RNA, 22 nt, Homo sapiens
aaaaguuauugcgguuuuggcu

SEQ ID NO: 4347 - RNA, 22 nt, Homo sapiens
agccaaaaccgcaauaacuuuu

SEQ ID NO: 4348 - RNA, 21 nt, Homo sapiens
uggcaguuacuuuugcaccag

SEQ ID NO: 4349 - RNA, 21 nt, Homo sapiens
cuggugcaaaaguaacugcca

SEQ ID NO: 4350 - RNA, 21 nt, Homo sapiens
aaaaguaauugcgguuuuugc

SEQ ID NO: 4351 - RNA, 21 nt, Homo sapiens
gcaaaaaccgcaauuacuuuu

SEQ ID NO: 4352 - RNA, 20 nt, Homo sapiens
aaaacugcaguuacuuuugc

SEQ ID NO: 4353 - RNA, 20 nt, Homo sapiens
gcaaaaguaacugcaguuuu

SEQ ID NO: 4354 - RNA, 18 nt, Homo sapiens
aaaaguacuugcggauuu

SEQ ID NO: 4355 - RNA, 18 nt, Homo sapiens
aaauccgcaaguacuuuu

SEQ ID NO: 4356 - RNA, 20 nt, Homo sapiens
gugcaaaagucaucacgguu

SEQ ID NO: 4357 - RNA, 20 nt, Homo sapiens
aaccgugaugacuuuugcac

SEQ ID NO: 4358 - RNA, 22 nt, Homo sapiens
gcuggugcaaaaguaauggcgg

SEQ ID NO: 4359 - RNA, 22 nt, Homo sapiens
ccgccauuacuuuugcaccagc

SEQ ID NO: 4360 - RNA, 22 nt, Homo sapiens
aaaaguaaucacuguuuuugcc

SEQ ID NO: 4361 - RNA, 22 nt, Homo sapiens
ggcaaaaacagugauuacuuuu

SEQ ID NO: 4362 - RNA, 20 nt, Homo sapiens
agugccugagggaguaagag

SEQ ID NO: 4363 - RNA, 20 nt, Homo sapiens
cucuuacucccucaggcacu

SEQ ID NO: 4364 - RNA, 22 nt, Homo sapiens
ugucuuacucccucaggcacau

SEQ ID NO: 4365 - RNA, 22 nt, Homo sapiens
augugccugagggaguaagaca

SEQ ID NO: 4366 - RNA, 23 nt, Homo sapiens
agugccugagggaguaagagccc

SEQ ID NO: 4367 - RNA, 23 nt, Homo sapiens
gggcucuuacucccucaggcacu

SEQ ID NO: 4368 - RNA, 21 nt, Homo sapiens
gcgacccacucuugguuucca

SEQ ID NO: 4369 - RNA, 21 nt, Homo sapiens
uggaaaccaagagugggucgc

SEQ ID NO: 4370 - RNA, 22 nt, Homo sapiens
uuagcuuaaggaguaccagauc

SEQ ID NO: 4371 - RNA, 22 nt, Homo sapiens
gaucugguacuccuuaagcuaa

SEQ ID NO: 4372 - RNA, 21 nt, Homo sapiens
uaugguacuccuuaagcuaac

SEQ ID NO: 4373 - RNA, 21 nt, Homo sapiens
guuagcuuaaggaguaccaua

SEQ ID NO: 4374 - RNA, 19 nt, Homo sapiens
ugagcugcuguaccaaaau

SEQ ID NO: 4375 - RNA, 19 nt, Homo sapiens
auuuugguacagcagcuca

SEQ ID NO: 4376 - RNA, 22 nt, Homo sapiens
cacauaugaagugagccagcac

SEQ ID NO: 4377 - RNA, 22 nt, Homo sapiens
gugcuggcucacuucauaugug

SEQ ID NO: 4378 - RNA, 22 nt, Homo sapiens
ugcuggcucauuucauaugugu

SEQ ID NO: 4379 - RNA, 22 nt, Homo sapiens
acacauaugaaaugagccagca

SEQ ID NO: 4380 - RNA, 22 nt, Homo sapiens
uuccaugccuccuagaaguucc

SEQ ID NO: 4381 - RNA, 22 nt, Homo sapiens
ggaacuucuaggaggcauggaa

SEQ ID NO: 4382 - RNA, 22 nt, Homo sapiens
agccuuccaggagaaauggaga

SEQ ID NO: 4383 - RNA, 22 nt, Homo sapiens
ucuccauuucuccuggaaggcu

SEQ ID NO: 4384 - RNA, 22 nt, Homo sapiens
uaaaacuuuaagugugccuagg

SEQ ID NO: 4385 - RNA, 22 nt, Homo sapiens
ccuaggcacacuuaaaguuuua

SEQ ID NO: 4386 - RNA, 22 nt, Homo sapiens
uaggcacacuuaaaguuauagc

SEQ ID NO: 4387 - RNA, 22 nt, Homo sapiens
gcuauaacuuuaagugugccua

SEQ ID NO: 4388 - RNA, 22 nt, Homo sapiens
gaauauggguauauuaguuugg

SEQ ID NO: 4389 - RNA, 22 nt, Homo sapiens
ccaaacuaauauacccauauuc

SEQ ID NO: 4390 - RNA, 22 nt, Homo sapiens
aaacuaauauacccauauucug

SEQ ID NO: 4391 - RNA, 22 nt, Homo sapiens
cagaauauggguauauuaguuu

SEQ ID NO: 4392 - RNA, 22 nt, Homo sapiens
uaguucuucccuuugcccaauu

SEQ ID NO: 4393 - RNA, 22 nt, Homo sapiens
aauugggcaaagggaagaacua

SEQ ID NO: 4394 - RNA, 22 nt, Homo sapiens
cagggaaaugggaagaacuaga

SEQ ID NO: 4395 - RNA, 22 nt, Homo sapiens
ucuaguucuucccauuucccug

SEQ ID NO: 4396 - RNA, 22 nt, Homo sapiens
cugaauagcugggacuacaggu

SEQ ID NO: 4397 - RNA, 22 nt, Homo sapiens
accuguagucccagcuauucag

SEQ ID NO: 4398 - RNA, 22 nt, Homo sapiens
ugaaguaccagcuacucgagag

SEQ ID NO: 4399 - RNA, 22 nt, Homo sapiens
cucucgaguagcugguacuuca

SEQ ID NO: 4400 - RNA, 22 nt, Homo sapiens
cagagugacaagcugguuaaag

SEQ ID NO: 4401 - RNA, 22 nt, Homo sapiens
cuuuaaccagcuugucacucug

SEQ ID NO: 4402 - RNA, 22 nt, Homo sapiens
uauccagcuuguuacuauaugc

SEQ ID NO: 4403 - RNA, 22 nt, Homo sapiens
gcauauaguaacaagcuggaua

SEQ ID NO: 4404 - RNA, 21 nt, Homo sapiens
gccccgggcagugugaucauc

SEQ ID NO: 4405 - RNA, 21 nt, Homo sapiens
gaugaucacacugcccggggc

SEQ ID NO: 4406 - RNA, 18 nt, Homo sapiens
auggucaccuccgggacu

SEQ ID NO: 4407 - RNA, 18 nt, Homo sapiens
agucccggaggugaccau

SEQ ID NO: 4408 - RNA, 19 nt, Homo sapiens
aagucccacuaaugccagc

SEQ ID NO: 4409 - RNA, 19 nt, Homo sapiens
gcuggcauuagugggacuu

SEQ ID NO: 4410 - RNA, 21 nt, Homo sapiens
acuggcauuagugggacuuuu

SEQ ID NO: 4411 - RNA, 21 nt, Homo sapiens
aaaagucccacuaaugccagu

SEQ ID NO: 4412 - RNA, 23 nt, Homo sapiens
ugcacauggcaaccuagcuccca

SEQ ID NO: 4413 - RNA, 23 nt, Homo sapiens
ugggagcuagguugccaugugca

SEQ ID NO: 4414 - RNA, 21 nt, Homo sapiens
ggcugggugcucuugugcagu

SEQ ID NO: 4415 - RNA, 21 nt, Homo sapiens
acugcacaagagcacccagcc

SEQ ID NO: 4416 - RNA, 21 nt, Homo sapiens
uaaaguaaauaugcaccaaaa

SEQ ID NO: 4417 - RNA, 21 nt, Homo sapiens
uuuuggugcauauuuacuuua

SEQ ID NO: 4418 - RNA, 21 nt, Homo sapiens
aauaaaguucauguauggcaa

SEQ ID NO: 4419 - RNA, 21 nt, Homo sapiens
uugccauacaugaacuuuauu

SEQ ID NO: 4420 - RNA, 21 nt, Homo sapiens
uugccauacauagacuuuauu

SEQ ID NO: 4421 - RNA, 21 nt, Homo sapiens
aauaaagucuauguauggcaa

SEQ ID NO: 4422 - RNA, 21 nt, Homo sapiens
auacccauagcuuagcuccca

SEQ ID NO: 4423 - RNA, 21 nt, Homo sapiens
ugggagcuaagcuauggguau

SEQ ID NO: 4424 - RNA, 21 nt, Homo sapiens
ugggagcuaagcuauggguau

SEQ ID NO: 4425 - RNA, 21 nt, Homo sapiens
auacccauagcuuagcuccca

SEQ ID NO: 4426 - RNA, 22 nt, Homo sapiens
caaaguuuaagauccuugaagu

SEQ ID NO: 4427 - RNA, 22 nt, Homo sapiens
acuucaaggaucuuaaacuuug

SEQ ID NO: 4428 - RNA, 22 nt, Homo sapiens
aucaaggaucuuaaacuuugcc

SEQ ID NO: 4429 - RNA, 22 nt, Homo sapiens
ggcaaaguuuaagauccuugau

SEQ ID NO: 4430 - RNA, 20 nt, Homo sapiens
aaaguagcuguaccauuugc

SEQ ID NO: 4431 - RNA, 20 nt, Homo sapiens
gcaaaugguacagcuacuuu

SEQ ID NO: 4432 - RNA, 19 nt, Homo sapiens
aggcacggugucagcaggc

SEQ ID NO: 4433 - RNA, 19 nt, Homo sapiens
gccugcugacaccgugccu

SEQ ID NO: 4434 - RNA, 19 nt, Homo sapiens
gggcgccugugaucccaac

SEQ ID NO: 4435 - RNA, 19 nt, Homo sapiens
guugggaucacaggcgccc

SEQ ID NO: 4436 - RNA, 23 nt, Homo sapiens
aguauguucuuccaggacagaac

SEQ ID NO: 4437 - RNA, 23 nt, Homo sapiens
guucuguccuggaagaacauacu

SEQ ID NO: 4438 - RNA, 22 nt, Homo sapiens
gagaaaugcuggacuaaucugc

SEQ ID NO: 4439 - RNA, 22 nt, Homo sapiens
gcagauuaguccagcauuucuc

SEQ ID NO: 4440 - RNA, 22 nt, Homo sapiens
agaaaggguggcaauaccucuu

SEQ ID NO: 4441 - RNA, 22 nt, Homo sapiens
aagagguauugccacccuuucu

SEQ ID NO: 4442 - RNA, 22 nt, Homo sapiens
agguauugccacccuuucuagu

SEQ ID NO: 4443 - RNA, 22 nt, Homo sapiens
acuagaaaggguggcaauaccu

SEQ ID NO: 4444 - RNA, 22 nt, Homo sapiens
guagcaccuugcaggauaaggu

SEQ ID NO: 4445 - RNA, 22 nt, Homo sapiens
accuuauccugcaaggugcuac

SEQ ID NO: 4446 - RNA, 24 nt, Homo sapiens
uacagaugcagauucucugacuuc

SEQ ID NO: 4447 - RNA, 24 nt, Homo sapiens
gaagucagagaaucugcaucugua

SEQ ID NO: 4448 - RNA, 20 nt, Homo sapiens
aacucuagccugagcaacag

SEQ ID NO: 4449 - RNA, 20 nt, Homo sapiens
cuguugcucaggcuagaguu

SEQ ID NO: 4450 - RNA, 22 nt, Homo sapiens
acagcccagcaguuaucacggg

SEQ ID NO: 4451 - RNA, 22 nt, Homo sapiens
cccgugauaacugcugggcugu

SEQ ID NO: 4452 - RNA, 21 nt, Homo sapiens
uaucguaucguauuguauugu

SEQ ID NO: 4453 - RNA, 21 nt, Homo sapiens
acaauacaauacgauacgaua

SEQ ID NO: 4454 - RNA, 22 nt, Homo sapiens
uuagaacguuuuagggucaaau

SEQ ID NO: 4455 - RNA, 22 nt, Homo sapiens
auuugacccuaaaacguucuaa

SEQ ID NO: 4456 - RNA, 22 nt, Homo sapiens
uaacaaacaccuguaaaacagc

SEQ ID NO: 4457 - RNA, 22 nt, Homo sapiens
gcuguuuuacagguguuuguua

SEQ ID NO: 4458 - RNA, 22 nt, Homo sapiens
agcauacaccuguaguccuaga

SEQ ID NO: 4459 - RNA, 22 nt, Homo sapiens
ucuaggacuacagguguaugcu

SEQ ID NO: 4460 - RNA, 21 nt, Homo sapiens
aguuaaugaauccuggaaagu

SEQ ID NO: 4461 - RNA, 21 nt, Homo sapiens
acuuuccaggauucauuaacu

SEQ ID NO: 4462 - RNA, 21 nt, Homo sapiens
ucagcuacuaccucuauuagg

SEQ ID NO: 4463 - RNA, 21 nt, Homo sapiens
ccuaauagagguaguagcuga

SEQ ID NO: 4464 - RNA, 22 nt, Homo sapiens
uugcucugagcuccgagaaagc

SEQ ID NO: 4465 - RNA, 22 nt, Homo sapiens
gcuuucucggagcucagagcaa

SEQ ID NO: 4466 - RNA, 22 nt, Homo sapiens
caaauaauaccacagugggugu

SEQ ID NO: 4467 - RNA, 22 nt, Homo sapiens
acacccacugugguauuauuug

SEQ ID NO: 4468 - RNA, 20 nt, Homo sapiens
aauaauaucacaguaggugu

SEQ ID NO: 4469 - RNA, 20 nt, Homo sapiens
acaccuacugugauauuauu

SEQ ID NO: 4470 - RNA, 22 nt, Homo sapiens
aauaauaucacaguagguguac

SEQ ID NO: 4471 - RNA, 22 nt, Homo sapiens
guacaccuacugugauauuauu

SEQ ID NO: 4472 - RNA, 22 nt, Homo sapiens
gcaguggcucugaaaugaacuc

SEQ ID NO: 4473 - RNA, 22 nt, Homo sapiens
gaguucauuucagagccacugc

SEQ ID NO: 4474 - RNA, 21 nt, Homo sapiens
cagaucaugggacugucucag

SEQ ID NO: 4475 - RNA, 21 nt, Homo sapiens
cugagacagucccaugaucug

SEQ ID NO: 4476 - RNA, 22 nt, Homo sapiens
acuccaagaagaaucuagacag

SEQ ID NO: 4477 - RNA, 22 nt, Homo sapiens
cugucuagauucuucuuggagu

SEQ ID NO: 4478 - RNA, 22 nt, Homo sapiens
cucauuuaaguagucugaugcc

SEQ ID NO: 4479 - RNA, 22 nt, Homo sapiens
ggcaucagacuacuuaaaugag

SEQ ID NO: 4480 - RNA, 22 nt, Homo sapiens
ucaaguaguuucaugauaaagg

SEQ ID NO: 4481 - RNA, 22 nt, Homo sapiens
ccuuuaucaugaaacuacuuga

SEQ ID NO: 4482 - RNA, 22 nt, Homo sapiens
ugggggagugcagugauugugg

SEQ ID NO: 4483 - RNA, 22 nt, Homo sapiens
ccacaaucacugcacuccccca

SEQ ID NO: 4484 - RNA, 22 nt, Homo sapiens
uccugucuuuccuuguuggagc

SEQ ID NO: 4485 - RNA, 22 nt, Homo sapiens
gcuccaacaaggaaagacagga

SEQ ID NO: 4486 - RNA, 22 nt, Homo sapiens
uaaugcauuaaauuauugaagg

SEQ ID NO: 4487 - RNA, 22 nt, Homo sapiens
ccuucaauaauuuaaugcauua

SEQ ID NO: 4488 - RNA, 19 nt, Homo sapiens
uuauugucacguucugauu

SEQ ID NO: 4489 - RNA, 19 nt, Homo sapiens
aaucagaacgugacaauaa

SEQ ID NO: 4490 - RNA, 22 nt, Homo sapiens
ugagucagcaacauaucccaug

SEQ ID NO: 4491 - RNA, 22 nt, Homo sapiens
caugggauauguugcugacuca

SEQ ID NO: 4492 - RNA, 18 nt, Homo sapiens
aggagaagucgggaaggu

SEQ ID NO: 4493 - RNA, 18 nt, Homo sapiens
accuucccgacuucuccu

SEQ ID NO: 4494 - RNA, 22 nt, Homo sapiens
cgaaaacagcaauuaccuuugc

SEQ ID NO: 4495 - RNA, 22 nt, Homo sapiens
gcaaagguaauugcuguuuucg

SEQ ID NO: 4496 - RNA, 22 nt, Homo sapiens
uuaggccaucaucccauuaugc

SEQ ID NO: 4497 - RNA, 22 nt, Homo sapiens
gcauaaugggaugauggccuaa

SEQ ID NO: 4498 - RNA, 23 nt, Homo sapiens
uguuucggggcucauggccugug

SEQ ID NO: 4499 - RNA, 23 nt, Homo sapiens
cacaggccaugagccccgaaaca

SEQ ID NO: 4500 - RNA, 22 nt, Homo sapiens
aaagguaauugcaguuuuuccc

SEQ ID NO: 4501 - RNA, 22 nt, Homo sapiens
gggaaaaacugcaauuaccuuu

SEQ ID NO: 4502 - RNA, 22 nt, Homo sapiens
uucuggauaacaugcugaagcu

SEQ ID NO: 4503 - RNA, 22 nt, Homo sapiens
agcuucagcauguuauccagaa

SEQ ID NO: 4504 - RNA, 22 nt, Homo sapiens
acguuugaaugcuguacaaggc

SEQ ID NO: 4505 - RNA, 22 nt, Homo sapiens
gccuuguacagcauucaaacgu

SEQ ID NO: 4506 - RNA, 20 nt, Homo sapiens
augagcgacugugccugacc

SEQ ID NO: 4507 - RNA, 20 nt, Homo sapiens
ggucaggcacagucgcucau

SEQ ID NO: 4508 - RNA, 19 nt, Homo sapiens
gagccaguuggacaggagc

SEQ ID NO: 4509 - RNA, 19 nt, Homo sapiens
gcuccuguccaacuggcuc

SEQ ID NO: 4510 - RNA, 23 nt, Homo sapiens
uucauuugguauaaaccgcgauu

SEQ ID NO: 4511 - RNA, 23 nt, Homo sapiens
aaucgcgguuuauaccaaaugaa

SEQ ID NO: 4512 - RNA, 22 nt, Homo sapiens
uugagaaugaugaaucauuagg

SEQ ID NO: 4513 - RNA, 22 nt, Homo sapiens
ccuaaugauucaucauucucaa

SEQ ID NO: 4514 - RNA, 23 nt, Homo sapiens
uuacaguuguucaaccaguuacu

SEQ ID NO: 4515 - RNA, 23 nt, Homo sapiens
aguaacugguugaacaacuguaa

SEQ ID NO: 4516 - RNA, 21 nt, Homo sapiens
caaagaggaaggucccauuac

SEQ ID NO: 4517 - RNA, 21 nt, Homo sapiens
guaaugggaccuuccucuuug

SEQ ID NO: 4518 - RNA, 22 nt, Homo sapiens
ucaguuccaggccaaccaggcu

SEQ ID NO: 4519 - RNA, 22 nt, Homo sapiens
agccugguuggccuggaacuga

SEQ ID NO: 4520 - RNA, 22 nt, Homo sapiens
uuaugguuugccugggacugag

SEQ ID NO: 4521 - RNA, 22 nt, Homo sapiens
cucagucccaggcaaaccauaa

SEQ ID NO: 4522 - RNA, 19 nt, Homo sapiens
ugggcguaucuguaugcua

SEQ ID NO: 4523 - RNA, 19 nt, Homo sapiens
uagcauacagauacgccca

SEQ ID NO: 4524 - RNA, 20 nt, Homo sapiens
agaccauggguucucauugu

SEQ ID NO: 4525 - RNA, 20 nt, Homo sapiens
acaaugagaacccauggucu

SEQ ID NO: 4526 - RNA, 22 nt, Homo sapiens
uugugucaauaugcgaugaugu

SEQ ID NO: 4527 - RNA, 22 nt, Homo sapiens
acaucaucgcauauugacacaa

SEQ ID NO: 4528 - RNA, 19 nt, Homo sapiens
ugucucugcugggguuucu

SEQ ID NO: 4529 - RNA, 19 nt, Homo sapiens
agaaaccccagcagagaca

SEQ ID NO: 4530 - RNA, 25 nt, Homo sapiens
aggcaccagccaggcauugcucagc

SEQ ID NO: 4531 - RNA, 25 nt, Homo sapiens
gcugagcaaugccuggcuggugccu

SEQ ID NO: 4532 - RNA, 21 nt, Homo sapiens
gaagugugccguggugugucu

SEQ ID NO: 4533 - RNA, 21 nt, Homo sapiens
agacacaccacggcacacuuc

SEQ ID NO: 4534 - RNA, 21 nt, Homo sapiens
aagccugcccggcuccucggg

SEQ ID NO: 4535 - RNA, 21 nt, Homo sapiens
cccgaggagccgggcaggcuu

SEQ ID NO: 4536 - RNA, 20 nt, Homo sapiens
guugugucaguuuaucaaac

SEQ ID NO: 4537 - RNA, 20 nt, Homo sapiens
guuugauaaacugacacaac

SEQ ID NO: 4538 - RNA, 22 nt, Homo sapiens
uggucuaggauuguuggaggag

SEQ ID NO: 4539 - RNA, 22 nt, Homo sapiens
cuccuccaacaauccuagacca

SEQ ID NO: 4540 - RNA, 22 nt, Homo sapiens
cacacacugcaauuacuuuugc

SEQ ID NO: 4541 - RNA, 22 nt, Homo sapiens
gcaaaaguaauugcagugugug

SEQ ID NO: 4542 - RNA, 25 nt, Homo sapiens
aggggugguguugggacagcuccgu

SEQ ID NO: 4543 - RNA, 25 nt, Homo sapiens
acggagcugucccaacaccaccccu

SEQ ID NO: 4544 - RNA, 21 nt, Homo sapiens
ugagcuaaaugugugcuggga

SEQ ID NO: 4545 - RNA, 21 nt, Homo sapiens
ucccagcacacauuuagcuca

SEQ ID NO: 4546 - RNA, 23 nt, Homo sapiens
gcgaggaccccucggggucugac

SEQ ID NO: 4547 - RNA, 23 nt, Homo sapiens
gucagaccccgagggguccucgc

SEQ ID NO: 4548 - RNA, 25 nt, Homo sapiens
gcugggcagggcuucugagcuccuu

SEQ ID NO: 4549 - RNA, 25 nt, Homo sapiens
aaggagcucagaagcccugcccagc

SEQ ID NO: 4550 - RNA, 20 nt, Homo sapiens
gggaaaaggaagggggagga

SEQ ID NO: 4551 - RNA, 20 nt, Homo sapiens
uccucccccuuccuuuuccc

SEQ ID NO: 4552 - RNA, 20 nt, Homo sapiens
gcggaaggcggagcggcgga

SEQ ID NO: 4553 - RNA, 20 nt, Homo sapiens
uccgccgcuccgccuuccgc

SEQ ID NO: 4554 - RNA, 18 nt, Homo sapiens
gugaaggcccggcggaga

SEQ ID NO: 4555 - RNA, 18 nt, Homo sapiens
ucuccgccgggccuucac

SEQ ID NO: 4556 - RNA, 19 nt, Homo sapiens
ugagggagugggugggagg

SEQ ID NO: 4557 - RNA, 19 nt, Homo sapiens
ccucccacccacucccuca

SEQ ID NO: 4558 - RNA, 19 nt, Homo sapiens
acuggaauuggagucaaaa

SEQ ID NO: 4559 - RNA, 19 nt, Homo sapiens
uuuugacuccaauuccagu

SEQ ID NO: 4560 - RNA, 19 nt, Homo sapiens
ugagggaguuggguguaua

SEQ ID NO: 4561 - RNA, 19 nt, Homo sapiens
uauacacccaacucccuca

SEQ ID NO: 4562 - RNA, 19 nt, Homo sapiens
ugagggaguggauuguaug

SEQ ID NO: 4563 - RNA, 19 nt, Homo sapiens
cauacaauccacucccuca

SEQ ID NO: 4564 - RNA, 19 nt, Homo sapiens
ggcuggucagaugggagug

SEQ ID NO: 4565 - RNA, 19 nt, Homo sapiens
cacucccaucugaccagcc

SEQ ID NO: 4566 - RNA, 19 nt, Homo sapiens
agcagggcuggggauugca

SEQ ID NO: 4567 - RNA, 19 nt, Homo sapiens
ugcaauccccagcccugcu

SEQ ID NO: 4568 - RNA, 19 nt, Homo sapiens
ugagggaggagguugggua

SEQ ID NO: 4569 - RNA, 19 nt, Homo sapiens
uacccaaccuccucccuca

SEQ ID NO: 4570 - RNA, 19 nt, Homo sapiens
ugaggugguaggauguaga

SEQ ID NO: 4571 - RNA, 19 nt, Homo sapiens
ucuacauccuaccaccuca

SEQ ID NO: 4572 - RNA, 22 nt, Homo sapiens
uccgagccugggucucccucuu

SEQ ID NO: 4573 - RNA, 22 nt, Homo sapiens
aagagggagacccaggcucgga

SEQ ID NO: 4574 - RNA, 22 nt, Homo sapiens
ggggguccccggugcucggauc

SEQ ID NO: 4575 - RNA, 22 nt, Homo sapiens
gauccgagcaccggggaccccc

SEQ ID NO: 4576 - RNA, 22 nt, Homo sapiens
agucauuggaggguuugagcag

SEQ ID NO: 4577 - RNA, 22 nt, Homo sapiens
cugcucaaacccuccaaugacu

SEQ ID NO: 4578 - RNA, 19 nt, Homo sapiens
cagcaggaggugaggggag

SEQ ID NO: 4579 - RNA, 19 nt, Homo sapiens
cuccccucaccuccugcug

SEQ ID NO: 4580 - RNA, 22 nt, Homo sapiens
acucaaaacccuucagugacuu

SEQ ID NO: 4581 - RNA, 22 nt, Homo sapiens
aagucacugaaggguuuugagu

SEQ ID NO: 4582 - RNA, 22 nt, Homo sapiens
agacuucccauuugaagguggc

SEQ ID NO: 4583 - RNA, 22 nt, Homo sapiens
gccaccuucaaaugggaagucu

SEQ ID NO: 4584 - RNA, 23 nt, Homo sapiens
aaacucuacuuguccuucugagu

SEQ ID NO: 4585 - RNA, 23 nt, Homo sapiens
acucagaaggacaaguagaguuu

SEQ ID NO: 4586 - RNA, 21 nt, Homo sapiens
ggcuagcaacagcgcuuaccu

SEQ ID NO: 4587 - RNA, 21 nt, Homo sapiens
agguaagcgcuguugcuagcc

SEQ ID NO: 4588 - RNA, 21 nt, Homo sapiens
acagucugcugagguuggagc

SEQ ID NO: 4589 - RNA, 21 nt, Homo sapiens
gcuccaaccucagcagacugu

SEQ ID NO: 4590 - RNA, 23 nt, Homo sapiens
aucccuugcaggggcuguugggu

SEQ ID NO: 4591 - RNA, 23 nt, Homo sapiens
acccaacagccccugcaagggau

SEQ ID NO: 4592 - RNA, 22 nt, Homo sapiens
gugagucucuaagaaaagagga

SEQ ID NO: 4593 - RNA, 22 nt, Homo sapiens
uccucuuuucuuagagacucac

SEQ ID NO: 4594 - RNA, 21 nt, Homo sapiens
ucuaguaagaguggcagucga

SEQ ID NO: 4595 - RNA, 21 nt, Homo sapiens
ucgacugccacucuuacuaga

SEQ ID NO: 4596 - RNA, 22 nt, Homo sapiens
augcugacauauuuacuagagg

SEQ ID NO: 4597 - RNA, 22 nt, Homo sapiens
ccucuaguaaauaugucagcau

SEQ ID NO: 4598 - RNA, 22 nt, Homo sapiens
guucucccaacguaagcccagc

SEQ ID NO: 4599 - RNA, 22 nt, Homo sapiens
gcugggcuuacguugggagaac

SEQ ID NO: 4600 - RNA, 21 nt, Homo sapiens
uggguuuacguugggagaacu

SEQ ID NO: 4601 - RNA, 21 nt, Homo sapiens
aguucucccaacguaaaccca

SEQ ID NO: 4602 - RNA, 19 nt, Homo sapiens
gugucugcuuccuguggga

SEQ ID NO: 4603 - RNA, 19 nt, Homo sapiens
ucccacaggaagcagacac

SEQ ID NO: 4604 - RNA, 23 nt, Homo sapiens
cuaauaguaucuaccacaauaaa

SEQ ID NO: 4605 - RNA, 23 nt, Homo sapiens
uuuauugugguagauacuauuag

SEQ ID NO: 4606 - RNA, 23 nt, Homo sapiens
ugugcuugcucgucccgcccgca

SEQ ID NO: 4607 - RNA, 23 nt, Homo sapiens
ugcgggcgggacgagcaagcaca

SEQ ID NO: 4608 - RNA, 25 nt, Homo sapiens
agggaucgcgggcggguggcggccu

SEQ ID NO: 4609 - RNA, 25 nt, Homo sapiens
aggccgccacccgcccgcgaucccu

SEQ ID NO: 4610 - RNA, 21 nt, Homo sapiens
augauccaggaaccugccucu

SEQ ID NO: 4611 - RNA, 21 nt, Homo sapiens
agaggcagguuccuggaucau

SEQ ID NO: 4612 - RNA, 19 nt, Homo sapiens
aguguggcuuucuuagagc

SEQ ID NO: 4613 - RNA, 19 nt, Homo sapiens
gcucuaagaaagccacacu

SEQ ID NO: 4614 - RNA, 19 nt, Homo sapiens
ucuaggcugguacugcuga

SEQ ID NO: 4615 - RNA, 19 nt, Homo sapiens
ucagcaguaccagccuaga

SEQ ID NO: 4616 - RNA, 19 nt, Homo sapiens
aagcagcugccucugaggc

SEQ ID NO: 4617 - RNA, 19 nt, Homo sapiens
gccucagaggcagcugcuu

SEQ ID NO: 4618 - RNA, 21 nt, Homo sapiens
guggcugcacucacuuccuuc

SEQ ID NO: 4619 - RNA, 21 nt, Homo sapiens
gaaggaagugagugcagccac

SEQ ID NO: 4620 - RNA, 21 nt, Homo sapiens
aggaggcagcgcucucaggac

SEQ ID NO: 4621 - RNA, 21 nt, Homo sapiens
guccugagagcgcugccuccu

SEQ ID NO: 4622 - RNA, 21 nt, Homo sapiens
aauggcgccacuaggguugug

SEQ ID NO: 4623 - RNA, 21 nt, Homo sapiens
cacaacccuaguggcgccauu

SEQ ID NO: 4624 - RNA, 25 nt, Homo sapiens
caacccuaggagagggugccauuca

SEQ ID NO: 4625 - RNA, 25 nt, Homo sapiens
ugaauggcacccucuccuaggguug

SEQ ID NO: 4626 - RNA, 22 nt, Homo sapiens
auaauacaugguuaaccucuuu

SEQ ID NO: 4627 - RNA, 22 nt, Homo sapiens
aaagagguuaaccauguauuau

SEQ ID NO: 4628 - RNA, 21 nt, Homo sapiens
aauauuauacagucaaccucu

SEQ ID NO: 4629 - RNA, 21 nt, Homo sapiens
agagguugacuguauaauauu

SEQ ID NO: 4630 - RNA, 25 nt, Homo sapiens
ggcggagggaaguagguccguuggu

SEQ ID NO: 4631 - RNA, 25 nt, Homo sapiens
accaacggaccuacuucccuccgcc

SEQ ID NO: 4632 - RNA, 24 nt, Homo sapiens
ugccugggucucuggccugcgcgu

SEQ ID NO: 4633 - RNA, 24 nt, Homo sapiens
acgcgcaggccagagacccaggca

SEQ ID NO: 4634 - RNA, 22 nt, Homo sapiens
aggcggggcgccgcgggaccgc

SEQ ID NO: 4635 - RNA, 22 nt, Homo sapiens
gcggucccgcggcgccccgccu

SEQ ID NO: 4636 - RNA, 22 nt, Homo sapiens
gguggcccggccgugccugagg

SEQ ID NO: 4637 - RNA, 22 nt, Homo sapiens
ccucaggcacggccgggccacc

SEQ ID NO: 4638 - RNA, 20 nt, Homo sapiens
accaggaggcugaggccccu

SEQ ID NO: 4639 - RNA, 20 nt, Homo sapiens
aggggccucagccuccuggu

SEQ ID NO: 4640 - RNA, 20 nt, Homo sapiens
gucccugaguguauguggug

SEQ ID NO: 4641 - RNA, 20 nt, Homo sapiens
caccacauacacucagggac

SEQ ID NO: 4642 - RNA, 21 nt, Homo sapiens
uccgguucucagggcuccacc

SEQ ID NO: 4643 - RNA, 21 nt, Homo sapiens
gguggagcccugagaaccgga

SEQ ID NO: 4644 - RNA, 23 nt, Homo sapiens
aggaagcccuggaggggcuggag

SEQ ID NO: 4645 - RNA, 23 nt, Homo sapiens
cuccagccccuccagggcuuccu

SEQ ID NO: 4646 - RNA, 20 nt, Homo sapiens
cuguaugcccucaccgcuca

SEQ ID NO: 4647 - RNA, 20 nt, Homo sapiens
ugagcggugagggcauacag

SEQ ID NO: 4648 - RNA, 23 nt, Homo sapiens
uggugcggagagggcccacagug

SEQ ID NO: 4649 - RNA, 23 nt, Homo sapiens
cacugugggcccucuccgcacca

SEQ ID NO: 4650 - RNA, 22 nt, Homo sapiens
caacuagacugugagcuucuag

SEQ ID NO: 4651 - RNA, 22 nt, Homo sapiens
cuagaagcucacagucuaguug

SEQ ID NO: 4652 - RNA, 23 nt, Homo sapiens
aaggagcuuacaaucuagcuggg

SEQ ID NO: 4653 - RNA, 23 nt, Homo sapiens
cccagcuagauuguaagcuccuu

SEQ ID NO: 4654 - RNA, 22 nt, Homo sapiens
gggacccagggagagacguaag

SEQ ID NO: 4655 - RNA, 22 nt, Homo sapiens
cuuacgucucucccuggguccc

SEQ ID NO: 4656 - RNA, 22 nt, Homo sapiens
gcagagugcaaacaauuuugac

SEQ ID NO: 4657 - RNA, 22 nt, Homo sapiens
gucaaaauuguuugcacucugc

SEQ ID NO: 4658 - RNA, 20 nt, Homo sapiens
cggcucugggucugugggga

SEQ ID NO: 4659 - RNA, 20 nt, Homo sapiens
uccccacagacccagagccg

SEQ ID NO: 4660 - RNA, 22 nt, Homo sapiens
gcagcagggugaaacugacaca

SEQ ID NO: 4661 - RNA, 22 nt, Homo sapiens
ugugucaguuucacccugcugc

SEQ ID NO: 4662 - RNA, 21 nt, Homo sapiens
uggaggagaaggaaggugaug

SEQ ID NO: 4663 - RNA, 21 nt, Homo sapiens
caucaccuuccuucuccucca

SEQ ID NO: 4664 - RNA, 23 nt, Homo sapiens
ucugcucauaccccaugguuucu

SEQ ID NO: 4665 - RNA, 23 nt, Homo sapiens
agaaaccaugggguaugagcaga

SEQ ID NO: 4666 - RNA, 23 nt, Homo sapiens
ugcaccaugguugucugagcaug

SEQ ID NO: 4667 - RNA, 23 nt, Homo sapiens
caugcucagacaaccauggugca

SEQ ID NO: 4668 - RNA, 23 nt, Homo sapiens
cugggaucuccggggucuugguu

SEQ ID NO: 4669 - RNA, 23 nt, Homo sapiens
aaccaagaccccggagaucccag

SEQ ID NO: 4670 - RNA, 22 nt, Homo sapiens
ugagaccucuggguucugagcu

SEQ ID NO: 4671 - RNA, 22 nt, Homo sapiens
agcucagaacccagaggucuca

SEQ ID NO: 4672 - RNA, 23 nt, Homo sapiens
uccaguaccacgugucagggcca

SEQ ID NO: 4673 - RNA, 23 nt, Homo sapiens
uggcccugacacgugguacugga

SEQ ID NO: 4674 - RNA, 22 nt, Homo sapiens
ggagacugaugaguucccggga

SEQ ID NO: 4675 - RNA, 22 nt, Homo sapiens
ucccgggaacucaucagucucc

SEQ ID NO: 4676 - RNA, 21 nt, Homo sapiens
gcaggaacuugugagucuccu

SEQ ID NO: 4677 - RNA, 21 nt, Homo sapiens
aggagacucacaaguuccugc

SEQ ID NO: 4678 - RNA, 22 nt, Homo sapiens
cugcccuggcccgagggaccga

SEQ ID NO: 4679 - RNA, 22 nt, Homo sapiens
ucggucccucgggccagggcag

SEQ ID NO: 4680 - RNA, 21 nt, Homo sapiens
ccuggaaacacugagguugug

SEQ ID NO: 4681 - RNA, 21 nt, Homo sapiens
cacaaccucaguguuuccagg

SEQ ID NO: 4682 - RNA, 22 nt, Homo sapiens
uauaccucaguuuuaucaggug

SEQ ID NO: 4683 - RNA, 22 nt, Homo sapiens
caccugauaaaacugagguaua

SEQ ID NO: 4684 - RNA, 22 nt, Homo sapiens
uggugguuuacaaaguaauuca

SEQ ID NO: 4685 - RNA, 22 nt, Homo sapiens
ugaauuacuuuguaaaccacca

SEQ ID NO: 4686 - RNA, 22 nt, Homo sapiens
uggauuucuuugugaaucacca

SEQ ID NO: 4687 - RNA, 22 nt, Homo sapiens
uggugauucacaaagaaaucca

SEQ ID NO: 4688 - RNA, 21 nt, Homo sapiens
uccucuucucccuccucccag

SEQ ID NO: 4689 - RNA, 21 nt, Homo sapiens
cugggaggagggagaagagga

SEQ ID NO: 4690 - RNA, 20 nt, Homo sapiens
guagaggagauggcgcaggg

SEQ ID NO: 4691 - RNA, 20 nt, Homo sapiens
cccugcgccaucuccucuac

SEQ ID NO: 4692 - RNA, 22 nt, Homo sapiens
gugaacgggcgccaucccgagg

SEQ ID NO: 4693 - RNA, 22 nt, Homo sapiens
ccucgggauggcgcccguucac

SEQ ID NO: 4694 - RNA, 22 nt, Homo sapiens
gacugacaccucuuugggugaa

SEQ ID NO: 4695 - RNA, 22 nt, Homo sapiens
uucacccaaagaggugucaguc

SEQ ID NO: 4696 - RNA, 21 nt, Homo sapiens
uacucaaaaagcugucaguca

SEQ ID NO: 4697 - RNA, 21 nt, Homo sapiens
ugacugacagcuuuuugagua

SEQ ID NO: 4698 - RNA, 21 nt, Homo sapiens
uuaauaucggacaaccauugu

SEQ ID NO: 4699 - RNA, 21 nt, Homo sapiens
acaaugguuguccgauauuaa

SEQ ID NO: 4700 - RNA, 22 nt, Homo sapiens
auccgcgcucugacucucugcc

SEQ ID NO: 4701 - RNA, 22 nt, Homo sapiens
ggcagagagucagagcgcggau

SEQ ID NO: 4702 - RNA, 20 nt, Homo sapiens
gugagucaggguggggcugg

SEQ ID NO: 4703 - RNA, 20 nt, Homo sapiens
ccagccccacccugacucac

SEQ ID NO: 4704 - RNA, 22 nt, Homo sapiens
ugcccuuaaaggugaacccagu

SEQ ID NO: 4705 - RNA, 22 nt, Homo sapiens
acuggguucaccuuuaagggca

SEQ ID NO: 4706 - RNA, 22 nt, Homo sapiens
ucuucucuguuuuggccaugug

SEQ ID NO: 4707 - RNA, 22 nt, Homo sapiens
cacauggccaaaacagagaaga

SEQ ID NO: 4708 - RNA, 22 nt, Homo sapiens
aaauuauuguacaucggaugag

SEQ ID NO: 4709 - RNA, 22 nt, Homo sapiens
cucauccgauguacaauaauuu

SEQ ID NO: 4710 - RNA, 22 nt, Homo sapiens
uucaacggguauuuauugagca

SEQ ID NO: 4711 - RNA, 22 nt, Homo sapiens
ugcucaauaaauacccguugaa

SEQ ID NO: 4712 - RNA, 22 nt, Homo sapiens
cuauacaacuuacuacuuuccc

SEQ ID NO: 4713 - RNA, 22 nt, Homo sapiens
gggaaaguaguaaguuguauag

SEQ ID NO: 4714 - RNA, 22 nt, Homo sapiens
ugagguaguaaguuguauuguu

SEQ ID NO: 4715 - RNA, 22 nt, Homo sapiens
aacaauacaacuuacuaccuca

SEQ ID NO: 4716-4733 - skipped (18 entries)

SEQ ID NO: 4734 - DNA, 3131 bp, Adeno-associated virus
gcggccgcgaattcgcccttggctgcgtcaactggaccaatgagaactttcccttcaatgattgcgtcgacaagatggtgatctggtgggaggagggcaagatgacggccaaggtcgtggagtccgccaaggccattctcggcggcagcaaggtgcgcgtggaccaaaagtgcaagtcgtccgcccagatcgaccccacccccgtgatcgtcacctccaacaccaacatgtgcgccgtgattgacgggaacagcaccaccttcgagcaccagcagcctctccaggaccggatgtttaagttcgaactcacccgccgtctggagcacgactttggcaaggtgacaaagcaggaagtcaaagagttcttccgctgggccagtgatcacgtgaccgaggtggcgcatgagttttacgtcagaaagggcggagccagcaaaagacccgcccccgatgacgcggataaaagcgagcccaagcgggcctgcccctcagtcgcggatccatcgacgtcagacgcggaaggagctccggtggactttgccgacaggtaccaaaacaaatgttctcgtcacgcgggcatgcttcagatgctgtttccctgcaaaacgtgcgagagaatgaatcggaatttcaacatttgcttcacacacggggtcagagactgctcagagtgtttccccggcgtgtcagaatctcaaccggtcgtcagaaagaggacgtatcggaaactccgtgcgattcatcatctgctggggcgggctcccgagattgcttgctcggcctgcgatctggtcaacgtggacctggatgactgtgtttctgagcaataaatgacttaaaccaggtatggctgccgatggttatcttccagattggctcgaggacaacctctctgagggcattcgcgagtggtgggcgctgaaacctggagccccgaagcccaaagccaaccagcaaaagcaggacgacggccggggtctggtgcttcctggctacaagtacctcggacccttcaacggactcgacaagggggagcccgtcaacgcggcggacgcagcggccctcgagcacgacaaggcttacgaccagcagctgcaggcgggtgacaatccgtacctgcggtataaccacgccgacgccgagtttcaggagcgtctgcaagaagatacgtcttttgggggcaacctcgggcgagcagtcttccaggccaagaagcgggttctcgaacctctcggtctggttgaggaaggcgctaagacggctcctggaaagaagagaccggtagagccatcaccccagcgttctccagactcctctacgggcatcggcaagaaaggccaacagcccgccagaaaaagactcaattttggtcagactggcgactcagagtcagttccagaccctcaacctctcggagaacctccagcagcgccctctggtgtgggacctaatacaatggctgcaggcggtggcgcaccaatggcagacaataacgaaggcgccgacggagtgggtagttcctcgggaaattggcattgcgattccacatggctgggcgacagagtcatcaccaccagcacccgaacctgggccctgcccacctacaacaaccacctctacaagcaaatctccaacgggacatcgggaggagccaccaacgacaacacctacttcggctacagcaccccctgggggtattttgactttaacagattccactgccacctttcaccacgtgactggcagcgactcatcaacaacaactggggattccgacccaagagactcagcttcaagctcttcaacatccaggtcaaggaggtcacgcagaatgaaggcaccaagaccatcgccaataacctcaccagcaccatccaggtgtttacggactcggagtaccagctgccgtacgttctcggctctgtccaccagggctgcctgcctccgttcccggcggacgtgttcatgattccccagtacggctacctaacactcaacaacggtagtcaggccgtgggacgctcctccttctactgcctggaatactttccttcgcagatgctgagaaccggcaacaacttccagtttacttacaccttcgaggacgtgcctttccacagcagctacgcccacagctagagcttggaccggctgatgaatcctctgattgaccagtacctgtactacttgtctcggactcaaacaacaggaggcacggcaaatacgcagactctgggcttcagccaaggtgggcctaatacaatggccaatcaggcaaagaactggctgccaggaccctgttaccgccaacaacgcgtctcaacgacaaccgggcaaaacaacaatagcaactttgcctggactgctgggaccaaataccatctgaatggaagaaattcattggctaatcctggcatcgctatggcaacacacaaagacgacgaggagcgtttttttcccagtaacgggatcctgatttttggcaaacaaaatgctgccagagacaatgcggattacagcgatgtcatgctcaccagcgaggaagaaatcaaaaccactaaccctgtggctacagaggaatacggtatcgtggcagataacttgcagcagcaaaacacggctcctcaaattggaactgtcaacagccagggggccttacccggtatggtctggcagaaccgggacgtgtacctgcagggtcccatctgggccaagattcctcacacggacggcaacttccacccgtctccgctgatgggcggctttggcctgaaacatcctccgcctcagatcctgatcaagaacacgcctgtacctgcggatcctccgaccaccttcaaccagtcaaagctgaactctttcatcacgcaatacagcaccggacaggtcagcgtggaaattgaatgggagctgcagaaggaaaacagcaagcgctggaaccccgagatccagtacacctccaactactacaaatctataagtgtggactttgctgttaatacagaaggcgtgtactctgaaccccgccccattggcacccgttacctcacccgtaatctgtaattgcctgttaatcaataaaccggttgattcgtttcagttgaactttggtctctgcgaagggcgaattc

SEQ ID NO: 4735 - protein, 728 aa, Adeno-associated virus
MAADGYLPDWLEDNLSEGIREWWDLKPGAPKPKANQQKQDDGRGLVLPGYKYLGPFNGLDKGEPVNEADAAALEHDKAYDKQLEQGDNPYLKYNHADAEFQERLQEDTSFGGNLGRAVFQAKKRVLEPLGLVEEGAKTAPGKKRPIESPDSSTGIGKKGQQPAKKKLNFGQTGDSESVPDPQPLGEPPAAPSGLGSGTMAAGGGAPMADNNEGADGVGNASGNWHCDSTWLGDRVITTSTRTWALPTYNNHLYKQISSQSGATNDNHFFGYSTPWGYFDFNRFHCHFSPRDWQRLINNNWGFRPRKLRFKLFNIQVKEVTTNDGVTTIANNLTSTIQVFSDSEYQLPYVLGSAHQGCLPPFPADVFMIPQYGYLTLNNGSQSMGRSSFYCLEYFPSQMLRTGNNFEFSYTFEEVPFHSSYAHSQSLDRLMNPLIDQYLYYLARTQSTTGSTRELQFHQAGPNTMAEQSKNWLPGPCYRQQRLSKNIDSNNNSNFAWTGATKYHLNGRNSLTNPGVAMATNKDDEGQFFPINGVLVFGKTGAANKTTLENVLMTSEEEIKTTNPVATEEYGVVSSNLQSSTAGPQTQTVNSQGALPGMVWQNRDVYLQGPIWAKIPHTDGNFHPSPLMGGFGLKHPPPQILIKNTPVPANPPGVFTPALFASFITQYSTGQVSVEIEWELQKENSKRWNPEIQYTSNYAKSNNVEFAVNNEGVYTEPRPIGTRYLTRNL

SEQ ID NO: 4736 - protein, 644 aa, Adeno-associated virus
  MOD_RES (434)..(434): Any amino acid
KAYDQQLKAGDNPYLRYNHADAEFQERLQEDTSFGGNLGRAVFQAKKRVLEPLGLVETPAKTAPGKKRPVDSPDSTSGIGKKGQQPAKKRLNFGQTGDSESVPDPQPIGEPPAGPSGLGSGTMAAGGGAPMADNNEGADGVGNASGNWHCDSTWLGDRVITTSTRTWALPTYNNHLYKQISSQSAGSTNDNVYFGYSTPWGYFDFNRFHCHFSPRDWQRLINNNWGFRPKKLNFKLFNIQVKEVTTNDGVTTIANNLTSTVQVFSDSEYQLPYVLGSAHQGCLPPFPADVFMIPQYGYLTLNNGSQSVGRSSFYCLEYFPSQMLRTGNNFTFSYTFEDVPFHSSYAHSQSLDRLMNPLIDQYLYYLARTQSNAGGTAGNRELQFYQGGPTTMAEQAKNWLPGPCFRQQRVSKTLDQNNNSNFAWTGATKYHLNXRNSLVNPGVAMATHKDDEERFFPSSGVLIFGKTGAANKTTLENVLMTNEEEIRPTNPVATEEYGIVSSNLQAASTAAQTQVVNNQGALPGMVWQNRDVYLQGPIWAKIPHTDGNFHPSPLMGGFGLKHPPPQILIKNTPVPANPPEVFTPAKFASFITQYSTGQVSVEIEWELQKENSKRWNPEIQYTSNFDKQTGVDFAVDSQGVYSEP

SEQ ID NO: 4737 - DNA, 1933 bp, Adeno-associated virus
caaggcctacgaccagcagctcaaagcgggtgacaatccgtacctgcggtataaccacgccgacgccgagtttcaggagtgtcttcaagaagatacgtcttttgggggcaacctcgggcgagcagtcttccaggccaaaaagcgggttctcgaacctcttggtctggttgagacgccagctaagacggcacctggaaagaagcgaccggtagactcgccagactccacctcgggcatcggcaagaaaggccagcagcccgcgaaaaagagactcaactttgggcagactggcgactcagagtcagtccccgaccctcaaccaatcggagaaccaccagcaggcccctctggtctgggatctggtacaatggttgcaggcggtggcgcaccaatggctgacaataacgagggcgccgacggagtgggtaatgcctcaggaaattggcattgcgattccacatggctgggcgacagagtcatcaccaccagcacccgaacctgggccctgcccacctacaacaaccacctctacaagcaaatctccagtcagtcagcagggagcaccaacgataacgtctatttcggctacagcaccccctgggggtattttgacttcaacagattccattgccacttctcaccacgtgactggcagcgacttatcaacaacaactggggattccggcccaagaagctcaacttcaagctcttcaacatccaggtcaaggaggtcacgacgaatgacggtgtcacaaccatcgctaataaccttaccagcacggttcaggtcttttcggactcggaatatcaactgccgtacgtcctcggctccgcgcaccagggctgcctgcctccgttcccggcagacgtgttcatgattccgcagtacggatacctgactctgaacaatggcagccaatcggtaggccgttcctccttctactgcctggagtactttccttctcagatgctgagaacgggcaacaacttcacctttagctacaccttcgaggacgtgcctttccacagcagctacgcgcacagccagagtctggaccggctgatgaatcccctcatcgaccagtacctgtactacttggccagaacacagagcaacgcaggaggtactgctggcaatcgggaactgcagttttatcagggcggacctaccaccatggccgaacaagcaaagaactggctgcccggaccttgcttccggcaacagagagtatccaagacgctggatcaaaataacaacagcaactttgcctggactggtgccacaaaataccatttaaatggaagaaattcattggttaatcccggtgtcgccatggcaacccacaaggacgacgaggaacgcttctccccttcgagcggagttctaatttttggcaaaactggagcagctaataaaactacattagaaaacgtgctcatgacaaatgaagaagaaattcgtcctaccaacccggtagctaccgaggaatacgggattgtaagcagcaacttgcaggcggctagcaccgcagcccagacacaagttgttaacaaccagggagccttacctggcatggtctggcagaaccgggacgtgtacctgcaaggtcccatttgggccaagattcctcacacggacggcaactttcacccgtctcctctaatgggtggctttggactgaaacacccgcctccccagatcctgatcaaaaacacgccggtacctgctaatcctccagaagtgtttactcctgccaagtttgcttccttcatcacgcagtacagcaccgggcaagtcagcgttgagatcgagtgggagctgcagaaagagaacagcaagcgctggaacccagagattcagtacacctccaactttgacaaacagactggagtggactttgctgttgacagccagggtgtttactctgagcct

SEQ ID NO: 4738 - protein, 644 aa, Adeno-associated virus
KAYDQQLKAGDNPYLRYNHADAEFQECLQEDTSFGGNLGRAVFQAKKRVLEPLGLVETPAKTAPGKKRPVDSPDSTSGIGKKGQQPAKKRLNFGQTGDSESVPDPQPIGEPPAGPSGLGSGTMVAGGGAPMADNNEGADGVGNASGNWHCDSTWLGDRVITTSTRTWALPTYNNHLYKQISSQSAGSTNDNVYFGYSTPWGYFDFNRFHCHFSPRDWQRLINNNWGFRPKKLNFKLFNIQVKEVTTNDGVTTIANNLTSTVQVFSDSEYQLPYVLGSAHQGCLPPFPADVFMIPQYGYLTLNNGSQSVGRSSFYCLEYFPSQMLRTGNNFTFSYTFEDVPFHSSYAHSQSLDRLMNPLIDQYLYYLARTQSNAGGTAGNRELQFYQGGPTTMAEQAKNWLPGPCFRQQRVSKTLDQNNNSNFAWTGATKYHLNGRNSLVNPGVAMATHKDDEERFSPSSGVLIFGKTGAANKTTLENVLMTNEEEIRPTNPVATEEYGIVSSNLQAASTAAQTQVVNNQGALPGMVWQNRDVYLQGPIWAKIPHTDGNFHPSPLMGGFGLKHPPPQILIKNTPVPANPPEVFTPAKFASFITQYSTGQVSVEIEWELQKENSKRWNPEIQYTSNFDKQTGVDFAVDSQGVYSEP

SEQ ID NO: 4739 - DNA, 1933 bp, Adeno-associated virus
caaggcctacgaccagcagctcaaagcgggtgacaatccgtacctgcggtataaccacgccgacgccgagtttcaggagcgtcttcaagaagatacgtcttttgggggcaacctcgggcgagcagtcttccaggccaaaaagcgggttctcgaacctcttggtctggttgagacgccagctaagacggcacctggaaagaagcgaccggtagactcgccagactccacctcgggcatcggcaagaaaggccagcagcccgcgaaaaagagactcaactttgggcagactggcgactcagagccagtccccgaccctcaaccaatcggagaaccaccagcaggcccctctggtctgggatctggtacaatggctgcaggcggtggcgcaccaatggctgacaataacgagggcgccgacggagtgggtaatgcctcaggaaattggcattgcgattccacacggctgggcgacagagtcatcaccaccagcacccgaacctgggccctgcccacctacaacaaccacctctacaagcaaatctccagtcagtcagcagggagcaccaacgataacgtctatttcggctacagcaccccctgggggtattttgacttcaacagattccattgccacttctcaccacgtgactggcagcgacttatcaacaacaactggggattccggcccaagaagctcaacttcaagctcttcaacatccaggtcaaggaggtcacgacgaatgacggcgtcacaaccatcgctaataaccttaccagcacggttcaggtcttttcggactcggaatatcaactgccgtacgtcctcggctccgcgcaccagggctgcctgcctccgttcccggcagacgtgttcatgattccgcagtacggatacctgactctgaacaatggcagccaatcggtaggccgttcctccttctactgcctggagtactttccttctcagatgctgagaacgggcaacaacttcacctttagctacaccttcgaggacgtgcctttccacagcagctacgcgcacagccagagtctgggccggctgatgaatcccctcatcgaccagtacctgtactacttggccagaacacagagcaacgcaggaggtactgctggcaatcgggaactgcagttttatcagggcggacctaccaccatggccgaacaagcaaagaactggctgcccggaccttgcttccggcaacagagagtatccaagacgctggatcaaaataacaacagcaactttgcctggactggtgccacaaaataccatttaaatggaagaaattcattggttaatcccggtgtcgccatggcaacccacaaggacgacgaggaacgcttcttcccttcgagcggagttctaatttttggcaaaactggagcagctaataaaactacattagaaaacgtgctcatgacaaatgaagaagaaattcgtcctaccaacccggtagctaccgaggaatacgggattgtaagcagcaacttgcaggcggctagcaccgcagcccagacacaagttgttaacaaccagggagccttacctggcatggtctggcagaaccgggacgtgtacctgcaaggtcccatttgggccaagattcctcacacggacggcaactttcacccgtctcctctaatgggtggctttggactgaaacacccgcctccccagatcctgatcaaaaacacaccggtacctgctaatcctccagaagtgtttactcctgccaagtttgcttccttcatcacgcagtacagcaccgggcaagtcagcgttgagatcgaatgggagctgcagaaagagaacagcaagcgctggaacccagagattcagtacacctccaactttgacaaacagactggagtggactttgctgttgacagccagggtgtttactctgagcct

SEQ ID NO: 4740 - protein, 644 aa, Adeno-associated virus
KAYDQQLKAGDNPYLRYNHADAEFQERLQEDTSFGGNLGRAVFQAKKRVLEPLGLVETPAKTAPGKKRPVDSPDSTSGIGKKGQQPAKKRLNFGQTGDSEPVPDPQPIGEPPAGPSGLGSGTMAAGGGAPMADNNEGADGVGNASGNWHCDSTRLGDRVITTSTRTWALPTYNNHLYKQISSQSAGSTNDNVYFGYSTPWGYFDFNRFHCHFSPRDWQRLINNNWGFRPKKLNFKLFNIQVKEVTTNDGVTTIANNLTSTVQVFSDSEYQLPYVLGSAHQGCLPPFPADVFMIPQYGYLTLNNGSQSVGRSSFYCLEYFPSQMLRTGNNFTFSYTFEDVPFHSSYAHSQSLGRLMNPLIDQYLYYLARTQSNAGGTAGNRELQFYQGGPTTMAEQAKNWLPGPCFRQQRVSKTLDQNNNSNFAWTGATKYHLNGRNSLVNPGVAMATHKDDEERFFPSSGVLIFGKTGAANKTTLENVLMTNEEEIRPTNPVATEEYGIVSSNLQAASTAAQTQVVNNQGALPGMVWQNRDVYLQGPIWAKIPHTDGNFHPSPLMGGFGLKHPPPQILIKNTPVPANPPEVFTPAKFASFITQYSTGQVSVEIEWELQKENSKRWNPEIQYTSNFDKQTGVDFAVDSQGVYSEP

SEQ ID NO: 4741 - DNA, 1933 bp, Adeno-associated virus; identical to SEQ ID NO: 4739

SEQ ID NO: 4742 - protein, 644 aa, Adeno-associated virus; identical to SEQ ID NO: 4740

SEQ ID NO: 4743 - DNA, 1933 bp, Adeno-associated virus
caaggcctacgaccagcagctcaaagcgggtgacaatccgtacctgcggtataaccacgccgacgccgagtttcaggagcgtcttcaagaagatacgtcttttgggggcaacctcgggcgagcagtcttccaggccaaaaagcgggttctcgaacctcttggtctggttgagacgccagctaagacggcacctggaaagaagcgaccggtagactcgccagactccacctcgggcatcggcaagaaaggccagcagcccgcgaaaaagagactcaactttgggcagactggcgactcagagtcagtccccgaccctcaaccaatcggagaaccaccagcaggcccctctggtctgggatctggtacaatggctgcaggcggtggcgcaccaatggctgacaatagcgagggcgccgacggagtgggtaatgcctcaggaaattggcattgcgattccacatggctgggcgacagagtcatcaccaccagcacccgaacctgggccctgcccacctacaacaaccacctctacaagcaaatctccagtcagtcagcagggagcaccaacgataacgtctatttcggctacagcaccccctgggggtattttgacttcaacagattccattgccacttctcaccacgtgactggcagcgacttatcaacaacaactggggattccggcccaagaagctcaacttcaagctcttcaacatccaggtcaaggaggtcacgacgaatgacggtgtcacaaccatcgctaataaccttaccagcacggttcaggtcttttcggactcggaatatcaactgccgtacgtcctcggctccgcgcaccagggctgcctgcctccgttcccggcagacgtgttcatgattccgcagtacggatacctgactctgaacaatggcagccaatcggtaggccgttcctccttctactgcctggagtactttccttctcagatgctgagaacgggcaacaacttcacctttagctacaccttcgaggacgtgcctttccacagcagctacgcgcacagccagagtctggaccggctgatgaatcccctcatcgaccagtacctgtactacttggccagaacacagagcaacgcaggaggtactgctggcaatcgggaactgcagttttatcagggcggacctaccaccatggccgaacaagcaaagaactggctgcccggaccttgcttccggcaacagagagtatccaagacgctggatcaaaataacaacagcaactttgcctggactggtgccacaaaataccatttaaatggaagaaattcattggttaatcccggtgtcgccatggcaacccacaaggacgacgaggaacgcttcttcccttcgagcggagttctaatttttggcaaaactggagcagctaataaaactacattagaaaacgtgctcatgacaaatgaagaagaaattcgtcctaccaacccggtagctaccgaggaatacgggattgtaagcagcaacttgcaggcggctagcaccgcagcccagacacaagttgttaacaaccagggagccttacctggcatggtctggcagaaccgggacgtgtacctgcaaggtcccatttgggccaagattcctcacacggacggcaactttcacccgtctcctctaatgggtggctttggactgaaacacccgcctccccagatcctgatcaaaaacacaccggtacctgctaatcctccagaagtgtttactcctgccaagcttgcttccttcatcacgcagtacagcaccgggcaagtcagcgttgagatcgagtgggagctgcagaaagagaacagcaagcgctggaacccagagattcagtacacctccaactttgacaaacagactggagtggactttgctgttgacagccagggtgtttactctgagcct

SEQ ID NO: 4744 - protein, 644 aa, Adeno-associated virus
KAYDQQLKAGDNPYLRYNHADAEFQERLQEDTSFGGNLGRAVFQAKKRVLEPLGLVETPAKTAPGKKRPVDSPDSTSGIGKKGQQPAKKRLNFGQTGDSESVPDPQPIGEPPAGPSGLGSGTMAAGGGAPMADNSEGADGVGNASGNWHCDSTWLGDRVITTSTRTWALPTYNNHLYKQISSQSAGSTNDNVYFGYSTPWGYFDFNRFHCHFSPRDWQRLINNNWGFRPKKLNFKLFNIQVKEVTTNDGVTTIANNLTSTVQVFSDSEYQLPYVLGSAHQGCLPPFPADVFMIPQYGYLTLNNGSQSVGRSSFYCLEYFPSQMLRTGNNFTFSYTFEDVPFHSSYAHSQSLDRLMNPLIDQYLYYLARTQSNAGGTAGNRELQFYQGGPTTMAEQAKNWLPGPCFRQQRVSKTLDQNNNSNFAWTGATKYHLNGRNSLVNPGVAMATHKDDEERFFPSSGVLIFGKTGAANKTTLENVLMTNEEEIRPTNPVATEEYGIVSSNLQAASTAAQTQVVNNQGALPGMVWQNRDVYLQGPIWAKIPHTDGNFHPSPLMGGFGLKHPPPQILIKNTPVPANPPEVFTPAKLASFITQYSTGQVSVEIEWELQKENSKRWNPEIQYTSNFDKQTGVDFAVDSQGVYSEP

SEQ ID NO: 4745 - DNA, 1933 bp, Adeno-associated virus
caaggcctacgaccagcagctcaaagcgggtgacaatccgtacctgcggtataaccacgccgacgccgagtttcaggagcgtcttcaagaagatacgtcttttgggggcaacctcgggcgagcagtcttccaggccaaaaagcgggttctcgaacctcttggtctggttgagacgccagctaagacggcacctggaaagaagcgaccggtagactcgccagactccacctcgggcatcggcaagaaaggccagcagcccgcgaaaaagagactcaactttgggcagactggcgactcagagtcagtccccgaccctcaaccaatcggagaaccaccagcaggcccctctggtctgggatctggtacaatggctgcaggcggtggcgcaccaatggctgacaataacgagggcgccgacggagtgggtaatgcctcaggaaattggcattgcgattccacatggctgggcgacagagtcatcaccaccagcacccgaacctgggccctgcccacctacaacaaccacctctacaagcaaatctccagtcagtcagcagggagcaccaacgataacgtctatttcggctacagcaccccctgggggtattttgacttcaacagattccattgccacttctcaccacgtgactggcagcgacttatcaacaacaactggggattccggcccaagaagctcaacttcaagctcttcaacatccaggtcaaggaggtcacgacgaatgacggcgtcacaaccatcgctaataaccttaccagcacggttcaggtcttttcggacccggaatatcaactgccgtacgtcctcggctccgcgcaccagggctgcctgcctccgttcccggcagacgtgttcatgattccgcagtacggatacctgactctgaacaatggcagccaatcggtaggccgttcctccttctactgcctggagtactttccttctcagatgctgagaacgggcaacaacttcacctttagctacaccttcgaggacgtgcctttccacagcagctacgcgcacagccagagtctggaccggctgatgaatcccctcatcgaccagtacctgtactacttggccagaacacagagcaacgcaggaggtactgctggcaatcgggaactgcagttttatcagggcggacctaccaccatggccgaacaagcaaagaactggctgcccggaccttgcttccggcaacagagagtatccaagacgctggatcaaaataacaacagcaactttgcctggactggtgccacaaaataccatttaaatggaagaaattcattggttaatcccggtgtcgccatggcaacccacaaggacgacgaggaacgcttcttcccttcgagcggagttctaatttttggcaaaactggagcagctaataaaactacattagaaaacgtgctcatgacaaatgaagaagaaattcgtcctaccaacccggtagctaccgaggaatacgggattgtaagcagcaacttgcaggcggctagcaccgcagcccagacacaagttgttaacaaccagggagccttacctggcatggtctggcagaaccgggacgtgtacctgcaaggtcccatttgggccaagattcctcacacggacggcaactttcacccgtctcctctaatgggtggctttggactgaaacacccgcctccccagatcctgatcaaaaacacaccggtacctgctaatcctccagaagtgtttactcctgccaagattgcttccttcatcacgcagtacagcaccgggcaagtcagcgttgagatcgagtgggagctgcagaaagagaacagcaagcgctggaacccagagattcagtacacctccaactttgacaaacagactggagtggactttgctgttgacagccagggtgtttactctgagcct

SEQ ID NO: 4746 - protein, 644 aa, Adeno-associated virus
KAYDQQLKAGDNPYLRYNHADAEFQERLQEDTSFGGNLGRAVFQAKKRVLEPLGLVETPAKTAPGKKRPVDSPDSTSGIGKKGQQPAKKRLNFGQTGDSESVPDPQPIGEPPAGPSGLGSGTMAAGGGAPMADNNEGADGVGNASGNWHCDSTWLGDRVITTSTRTWALPTYNNHLYKQISSQSAGSTNDNVYFGYSTPWGYFDFNRFHCHFSPRDWQRLINNNWGFRPKKLNFKLFNIQVKEVTTNDGVTTIANNLTSTVQVFSDPEYQLPYVLGSAHQGCLPPFPADVFMIPQYGYLTLNNGSQSVGRSSFYCLEYFPSQMLRTGNNFTFSYTFEDVPFHSSYAHSQSLDRLMNPLIDQYLYYLARTQSNAGGTAGNRELQFYQGGPTTMAEQAKNWLPGPCFRQQRVSKTLDQNNNSNFAWTGATKYHLNGRNSLVNPGVAMATHKDDEERFFPSSGVLIFGKTGAANKTTLENVLMTNEEEIRPTNPVATEEYGIVSSNLQAASTAAQTQVVNNQGALPGMVWQNRDVYLQGPIWAKIPHTDGNFHPSPLMGGFGLKHPPPQILIKNTPVPANPPEVFTPAKIASFITQYSTGQVSVEIEWELQKENSKRWNPEIQYTSNFDKQTGVDFAVDSQGVYSEP

SEQ ID NO: 4747 - protein, 728 aa, Adeno-associated virus
MAADGYLPDWLEDNLSEGIREWWDLKPGAPKPKANQQKQDDGRGLVLPGYKYLRPFNGLDKGEPVNEADAAALEHDKAYDKQLEQGDNPYLKYNHADAEFQERLQEDTSFGGNLGRAVFQAKKRVLEPLGLVEEVAKTAPGKKRPIESPDSSTGIGKKGQQPAKKKLNFGQTGDSESVPDPQPLGEPPAAPSGLGSGTMAAGGGAPMADNNEGADGVGNASGNWHCDSTWLGDRVITTSTRTWALPTYNNHLYKQISSQSGATNDNHFFSYSTPWGYFDFNRFHCHFSPRDWQRLINNNWGFRPRKLRFKLFNIQVKEVTTNDGVTTIANNLTSTIQVFSDSEYQLPYVLGSAHQGCLPPFPADVFMIPQYGYLTLNNGSQSVGRSSFYCLEYFPSQMLRTGNNFEFSYTFEEVPFHSSYVHSQSLDRLMNPLIDQYLYYLARTQSTTGSTRELQFHQAGPNTMAEQSKNWLPGPCYRQQRLSKNIDSNNNSNFAWTGATKYHLNGRNSLTNPGVAMATNKDDEDQFFPINGVLVFGKTGAANKTTLENVLMTSEEEIKTTNPVATEEYGVVSSNLQSSTAGPQTQTVNSQGALPGMVWQNRDVCLQGPIWAKIPHTDGNFHPSPLMGGFGLKHPPPQILIKNTPVPANPPEVFTPAKFASFITQYSTGQVSVEIEWELQKENSKRWNPEIQYTSNYAKSNNVEFAVNNEGVYTEPRPIGTRYLTRNL

SEQ ID NO: 4748 - protein, 728 aa, Adeno-associated virus
MAADGYLPDWLEDNLSEGIREWWDLKPGAPKPKANQQKQDDGRGLVLPGYKYLGPFNGLDKGEPVNEADAAALEHDKAYDKQLEQGDNPYLKYNHADAEFQERLQEDTSFGGNLGRAVFQAKKRVLEPLGLVEEGAKTASGKKRPIESPDSSTGIGKKGQQPAKKKLNFGQTGDSESVPDPQPLGEPPAAPSGLGSGTMAAGGGAPMADNNEGADGVGNASGNWHCDSTWLGDRVITTSTRTWALPTYNNHLYKQISSQSGATNDNHFFGYSTPWGYFDFNRFHCHFSPRDWQRLINNNWGFRPRKLRFKLFNIQVKEVTTNDGVTTIANNLTSTIQVFSDSEYQLPYVLGSAHQGCLPPFPADVFMIPQYGYLTLNNGSQSVGRSSFCCLEYFPSQMLRTGNNFEFSYTFEEVPFHSSYAHSQSLDRLMNPLIDQYLYYLARTQSTTGSTRELQFHQAGPNTVAEQSKNWLPGPCYRQQRLSKNIDSNNNSNFAWTGATKYHLNGRNSLTNPGVAMATNKDDEDQFLPINGVLVFGKTGAANKTTLENVLMTSEEEIKTTNPVATEEYGVVSSNLQSSTAGPRTQTVNSQGALPGMVWQNRDVYLQGPIWAEIPHTDGNFHPSPLMGGFGLKHPPPQILIKNTPVPANPPEVFTPAKFASFITQYSTGQVSVEIEWELQKENSKRWNPEIQYTSNYAKSNNVEFAVNNEGVYTEPRPIGTRYLTRNL

SEQ ID NO: 4749 - protein, 738 aa, Adeno-associated virus
MAADGYLPDWLEDNLSEGIREWWALKPGAPKPKANQQKQDDGRGLVLPGYKYLGPFNGLDKGEPVNAADAAALEHDKAYDQQLKAGDNPYLRYNHADAEFQERLQEDTSFGGNLGRAVFQAKKRVLEPLGLVEEGAKTAPGKKRPVEPSPQRSPDSTTGIGKKGQQPAKKRLNFGQTGDSESVPDPQPIGEPPAGPSGLGSGTMAAGGGAPMADNNEGADGVGSSSGNWHCDSTWLGDRVITTSTRTWALPTYNNHLYKQISNGTSGGSTNDNTYFGYSTPWGYFDFNRFHCHFSPRDWQRLINNNWGFRPKRLNFKLFNIQVKEVTQNEGTKTIANNLTSTIQVFTDSEYQLPYVLGSARQGCLPPFPADVFMIPQYGYLTLNNGSQAVGRSSFYCLEYFPSQMLRTGNNFEFSYQFEDVPFHSSYAHSQSLDRLMNPLIDQYLYYLSRTQSTGGTAGTQQLLFSQAGPNNMSAQAKNWLPGPCYRQQRVSTTLSQNNNSNFAWTGATKYHLNGRDSLVNPGVAMATHKDDEERFFPSSGVLMFGKQGAGKGNVDYSSVMLTSEEEIKTTNPVATEQYGVVADNLQQQNAAPIVGAVNSQGALPGMVWQNRDVYLQGPIWAKIPHTDGNFHPSPLMGGFGLKHPPPQILIKNTPVPADPPTTFSQAKLASFITQYSTGQVSVEIEWELQKENSKRWNPEIQYTSNYYKSTNVDFAVNTDGTYSEPRPIGTRYLTRNL

SEQ ID NO: 4750 - DNA, 3121 bp, Adeno-associated virus
gaattcgcccttcgcagagaccaaagttcaactgaaacgaatcaaccggtttattgattaacaagcaattacagattacgggtgaggtaacgggtgccgatggggcgaggctcagaataagtgccatctgtgttaacagcaaagtccacatttgtagatttgtagtagttggaagtgtattgaatctctgggttccagcgtttgctgttttctttctgcagctcccattcaatttccacgctgacctgtccggtgctgtactgcgtgatgaacgacgccagcttagcttgactgaaggtagttggaggatccgcgggaacaggtgtattcttaatcaggatctgaggaggcgggtgtttcagtccaaagccccccatcagcggcgagggatgaaagtttccgtccgtgtgaggaatcttggcccagataggaccctgcaggtacacgtcccggttctgccagaccatgccaggtaaggctccttgactgttgacggcccctacaataggagcggcgttttgctgttgcaggttatcggccaccacgccgtactgttctgtggccactgggttggtggttttaatttcttcctcactggttagcataacgctgctatagtccacgttgccttttccagctccctgtttcccaaacattaagactccgctggacggaaaaaatcgctcttcgtcgtccttgtgggttgccatagcgacaccgggatttaccagagagtctctgccattcagatgatacttggtggcaccggtccaggcaaagttgctgttgttattttgcgacagtgtcgtggagacgcgttgctgccggtagcagggcccgggtagccagtttttggcctgagccgacatgttattaggcccggcctgagaaaatagcaactgctgagttcctgcggtacctcccgtggactgagtccgagacaggtagtacaggtactggtcgatgagggggttcatcagccggtccaggctttggctgtgcgcgtagctgctgtgaaaaggcacgtcctcaaactggtagctgaactcaaagttgttgcccgttctcagcatttgagaaggaaagtactccaggcagtagaaggaggaacggcccacggcctgactgccattgttcagagtcaggtacccgtactgaggaatcatgaagacgtccgccgggaacggaggcaggcagccctggcgcgcagagccgaggacgtacgggagctggtattccgagtccgtaaagacctgaatcgtgctggtaaggttattggcgatggtcttggtgccttcattctgcgtgacctccttgacctggatgttgaagagcttgaagttgagtctcttgggccggaatccccagttgttgttgatgagtcgctgccagtcacgtggtgagaagtggcagtggaatctgttaaagtcaaaatacccccagggggtgctgtagccgaagtaggtgttgtcgttggtgcttcctcccgaagtcccgttggagatttgcttgtagaggtggttgttgtaggtggggagggcccaggttcgggtgctggtggtgatgactctgtcgcccagccatgtggaatcgcaatgccaatttcctgaggaactacccactccgtcggcgccttcgttattgtctgccattggagcgccaccgcctgcagccattgtaccagatcccagaccagaggggcctgcggggggttctccgattggttgagggtcgggcactgactctgagtcgccagtctgcccaaagttgagtctctttttcgcgggctgctggcctttcttgccgatgcccgtagtggagtctggagaacgctggggtgatggctctaccggtctcttctttccaggagccgtcttagcgccttcctcaaccagaccgagaggttcgagaacccgcttcttggcctggaagactgctcgtccgaggttgcccccaaaagacgtatcttcttgcagacgctcctgaaactcggcgtcggcgtggttataccgcaggtacggattgtcacccgctttgagctgctggtcgtaggccttgtcgtgctcgagggccgctgcgtccgccgcgttgacgggctcccccttgtcgagtccgttgaagggtccgaggtacttgtagccaggaagcaccagaccccggccgtcgtcctgcttttgctggttggctttgggcttcggggctccaggtttcagcgcccaccactcgcgaatgccctcagagaggttgtcctcgagccaatctggaagataaccatcggcagccatacctgatctaaatcatttattgttcaaagatgcagtcatccaaatccacattgaccagatcgcaggcagtgcaagcgtctggcacctttcccatgatatgatgaatgtagcacagtttctgatacgcctttttgacgacagaaacgggttgagattctgacacgggaaagcactctaaacagtctttctgtccgtgagtgaagcagatatttgaattctgattcattctctcgcattgtctgcagggaaacagcatcagattcatgcccacgtgacgagaacatttgttttggtacctgtccgcgtagttgatcgaagcttccgcgtctgacgtcgatggctgcgcaactgactcgcgcacccgtttgggctcacttatatctgcgtcactgggggcgggtcttttcttggctccaccctttttgacgtagaattcatgctccacctcaaccacgtgatcctttgcccaccggaaaaagtctttgacttcctgcttggtgaccttcccaaagtcatgatccagacggcgggtgagttcaaatttgaacatccggtcttgcaacggctgctggtgttcgaaggtcgttgagttcccgtcaatcacggcgcacatgttggtgttggaggtgacgatcacgggagtcgggtctatctgggccgaggacttgcatttctggtccacgcgcaccttgcttcctccgagaatggctttggccgactccacgaccttggcggtcatcttcccctcctcccaccagatcaccatcttgtcgacacagtcgttgaagggaaagttctcattggtccagttgacgcagccgtagaagggcgaattc

SEQ ID NO: 4751 - DNA, 3121 bp, Adeno-associated virus
gaattcgcccttctacggctgcgtcaactggaccaatgagaactttcccttcaacgactgtgtcgacaagatggtgatctggtgggaggaggggaagatgaccgccaaggtcgtggagtcggccaaagccattctcggaggaagcaaggtgcgcgtggaccagaaatgcaagtcctcggcccagatagacccgactcccgtgatcgtcacctccaacaccaacatgtgcgccgtgattgacgggaactcaacgaccttcgaacaccagcagccgttgcaagaccggatgttcaaatttgaactcacccgccgtctggatcatgactttgggaaggtcaccaagcaggaagtcaaagactttttccggtgggcaaaggatcacgtggttgaggtggagcacgaattctacgtcaaaaagggtggagccaagaaaagacccgcccccagtgacgcagatataagtgagcccaaacgggtgcgcgagtcagttgcgcagccatcgacgtcagacgcggaagcttcgatcaactacgcagacaggtaccaaaacaaatgttctcgtcacgcgggcatgaatctgatgctgtttccctgcagacaatgcgagagaatgaatcagaattcaaatatctgcttcactcacggacagaaagactgtttagagtgctttcccgtgtcagaatctcaacccgtttctgtcgtcaaaaaggcgtatcagaaactgtgctacattcatcatatcatgggaaaggtgccagacgcttgcactgcctgcgatctggtcgatgtggatttggatgactgcatctttgaacaataaatgatttaaatcaggtatggctgccgatggttatcttccagattggctcgaggacaacctctctgagggcattcgcgagtggtgggcgctgaaacctggagccccgaagcccaaagccaaccagcaaaagcaggacggcggccggggtctggtgcttcctggctacaagtacctcggacccttcaacggactcgacaagggggagcccgtcaacgcggcggacgcagcggccctcgagcacgacaaggcctacgaccagcagctcaaagcgggtgacaatccgtacctgcggtataaccacgccgacgccgagtttcaggagcgtctgcaagaagatacgtcttttgggggcaacctcgggcgagcagtcttccaggccaagaagcgggttctcgaacctctcggtctggttgaggaaggcgctaagacggctcctggaaagaagagaccggtagagccatcaccccagcgttctccagactcctctacgggcatcggcaagaaaggccagcagcccgcgaaaaagagactcaactttgggcagactggcgactcagagtcagtgcccgaccctcaaccaatcggagaaccccccgcaggcccctctggtctgggatctggtacaatggctgcaggcggtggcgctccaatggcagacaataacgaaggcgccgacggagtgggtagttcctcaggaaattggcattgcgattccacatggctgggcgactgagtcatcaccaccagcacccgaacctgggccctccccacctacaacaaccacctctacaagcaaatctccaacgggacttcgggaggaagcaccaacgacaacacctacttcggctacagcaccccctgggggtattttgactttaacagattccactgccacttctcaccacgtgactggcagcgactcatcaacaacaactggggattccggcccaagagactcaacttcaagctcttcaacatccaggtcaaggaggtcacgcagaatgaaggcaccaagaccatcgccaataaccttaccagcacgattcaggtctttacggactcggaataccagctcccgtacgtcctcggctctgcgcaccagggctgcctgcctccgttcccggcggacgtcttcatgattcctcagtacgggtacctgactctgaacaatggcagtcaggccgtgggccgttcctccttctactgcctggagtactttccttctcaaatgctgagaacgggcaacaactttgagttcagctaccagtttgaggacgtgccttttcacagcagctacgcgcacagccaaagcctggaccggctgatgaaccccctcatcgaccagtacctgtactacctgtctcggactcagtccacgggaggtaccgcaggaactcagcagttgctattttctcaggccgggcctaataacatgtcggctcaggccaaaaactggctacccgggccctgctaccggcagtaacgcgtctccacgacactgtcgcaaaataacaacagcaactttgtctggaccggtgccaccaagtatcatctgaatggcagagactctctggtagatcccggtgtcgctatggcaacccacaaggacgacgaagagcgattttttccgtccagcggagtcataatgtttgggaaacagggagctggaaaagacaacgtggactatagcagcgtcatgctaaccagtgaggaagaaattaaaaccaccaacccagtggccacagaacagtacggcgtggtggccgataacctgcaacagcaaaacgccgctcctattgtaggggccgtcaacagtcaaggagccttacctggcatggtctggcagaaccgggacgtgtacctgcagggtcctacctgggccaagattcctcacacggacggaaactttcatccctcgccgctgatgggaggctttggactgaaacacccgcctcctcagatcctgattaagaatacacctgttcccgcggatcctccaactaccttcagtcaagctaagctggcgtcgttcatcacgcagtacagcaccggacaggtcagcgtggaaattgaatgggagctgcaggaagaaaacagcaaacgctggaacccagagattcaatacacttccaactactacaaatctacaaatgtggactttgctgttaacacagatggcacttattctgagcctcgccccatcggcacccgttacctcacccgtaatctgtaattgcttgttaatcaataaaccggttgattcgtttcagttgaactttggtctctgcgaagggcgaattc

SEQ ID NO: 4752 - protein, 738 aa, Adeno-associated virus
MAADGYLPDWLEDNLSEGIREWWALKPGAPKPKANQQKQDDGRGLVLPGYKYLGPFNGLDKGEPVNAADAAALEHDKAYDQQLKAGDNPYLRYNHADAEFQERLQEDTSFGGNLGRAVFQAKKRVLEPLGLVEEGAKTAPGKKRPVEPSPQRSPDSSTGIGKKGQQPAKKRLNFGQTGDSESVPDPQPIGEPPAGPSGLGSGTMAAGGGAPMADNNEGADGVGSSSGNWHCDSTWLGDGVITTSTRTWALPTYNNHLYKQISNGTSGGSTNDNTYFGYSTPWGYFDFNRFHCHFSPRDWQRLINNNWGFRPKSLNFKLFNIQVKEVTQNEGTKTIANNLTSTIQVFTDSEYQLPYVLGSAHQGCLPPFPADVFMIPQYGYLTLNNGSQAVGRSSFYCLEYFPSQMLRTGNNFEFSYQFEDVPFHSSYAHSQSLDRLMNPLIDQYLYYLSRTQSTGGTAGTQQLLFSQAGPNNMSAQAKNWLPGPCYRQQRVSTTLSQNDNSNFAWTGATKYHLNGRDSLVNPGVAMATHKDDEERFFPSSGVLMFGKQGAGKDNVDYSSVMLTSEEEIKTTNPVATEQYGVVADNLQQQNAAPIVGAVNSQGALPGMVWQNRDVYLQGPIWAKIPHTDGNFHPSPLMGGFGLKHPPPQILIKNTPVPADPPTTFSQAKLASFITQYSTGQVSVEIEWELQKENSKRWNPEIQYTSNYYKSTNVDFAVNTDGTYSEPRPIGTRYLTRNL

SEQ ID NO: 4753 - DNA, 3121 bp, Adeno-associated virus
gaattcgcccttcgcgagaccaaagttcaactgaaacgaatcaaccggtttattgattaacaagcaattacagattacgggtgaggtaacgggtgccgatggggcgaggctcagaataagtgccatctgtgttaacagcaaagtccacatttgtagatttgtagtagttggaagtgtattgaatctctgggttccagcgtttgctgttttctttctgcagctcccattcaatttccacgctgacctgtccggtgctgtactgcgtgatgaacgacgccagcttagcttgactgaaggtagttggaggatccgcgggaacaggtgtattcttaatcaggatctgaggaggcgggtgtttcagtccaaagcctcccatcagcggcgagggatgaaagtttccgtccgtgtgaggaatcttggcccagataggaccctgcaggtacacgtcccggttctgccagaccatgccaggtaaggctccttgactgttgacggcccctacaataggagcggcgttttgctgttgcaggttatcggccaccacgccgtactgttctgtggccactgggttggtggttttaatttcttcctcactggttagcataacgctgctatagtccacgttgtcttttccagctccctgtttcccaaacattaagactccgctggacggaaaaaatcgctcttcgtcgtccttgtgggttgccatagcgacaccgggatttaccagagagtctctgccattcagatgatacttggtggcaccggtccaggcaaagttgctgttgtcattttgcgacagtgtcgtggagacgcgttgctgccggtagcagggcccgggtagccagtttttggcctgagccgacatgttattaggcccggcctgagaaaatagcaactgctgagttcctgcggtacctcccgtggactgagtccgagacaggtagtacaggtactggtcgatgagggggttcatcagccggtccaggctttggctgtgcgcgtagctgctgtgaaaaggcacgtcctcaaactggtagctgaactcaaagttgttgcccgttctcagcatttgagaaggaaagtactccaggcagtagaaggaggaacggcccacggcctgactgccattgttcagagtcaggtacccgtactgaggaatcatgaagacgtccgccgggaacggaggcaggcagccctggtgcgcagagccgaggacgtacgggagctggtattccgagtccgtaaagacctgaatcgtgctggtaaggttattggcgatggtcttggtgccttcattctgcgtgacctccttgacctggatgttgaagagcttgaagttgaggctcttgggccggaatccccagttgttgttgatgagtcgctgccagtcacgtggtgagaagtggcagtggaatctgttaaagtcaaaatacccccagggggtgctgtagccgaagtaggtgttgtcgttggtgcttcctcccgaagtcccgttggagatttgcttgtagaggtggttgttgtaggtggggagggcccaggttcgggtgctggtggtgatgactccgtcgcccagccatgtggaatcgcaatgccaatttcctgaggaactacccactccgtcggcgccttcgttattgtctgccattggagcgccaccgcctgcagccattgtaccagatcccagaccagaggggcctgcggggggttctccgattggttgagggtcgggcactgactctgagtcgccagtctgcccaaagttgagtctctttttcgcgggctgctggcctttcttgccgatgcccgtagaggagtctggagaacgctggggtgatggctctaccggtctcttctttccaggagccgtcttagcgccttcctcaaccagaccgagaggttcgagaacccgcttcttggcctggaagactgctcgcccgaggttgcccccaaaagacgtatcttcttgcagacgctcctgaaactcggcgtcggcgtggttataccgcaggtacggattgtcacccgctttgagctgctggtcgtaggccttgtcgtgctcgagggccgctgcgtccgccgcgttgacgggctcccccttgtcgagtccgttgaagggtccgaggtacttgtagccaggaagcaccagaccccggccgtcgtcctgcttttgctggttggctttgggcttcggggctccaggtttcagcgcccaccactcgcgaatgccctcagagaggttgtcctcgagccaatctggaagataaccatcggcagccatacctgatttaaatcatttattgttcaaagatgcagtcatccaaatccacattgaccagatcgcaggcagtgcaagcgtctggcacctttcccatgatatgatgaatgtagcacagtttctgatacgcctttttgacgacagaaacgggttgagattctgacacgggaaagcactctaaacagtctttctgtccgtgagtgaagcagatatttgaattctgattcattctctcgcattgtctgcagggaaacagcatcagattcatgcccacgtgacgagaacatttgttttggtacctgtctgcgtagttgatcgaagcttccgcgtctgacgtcgatggctgcgcaactgactcgcgcacccgtttgggctcacttatatctgcgtcactgggggcgggtcttttcttggctccaccctttttgacgtagaattcatgctccacctcaaccacgtgatcctttgcccaccggaaaaagtctttgacttcctgcttggtgaccttcccaaagtcatgatccagacggcgggtgagttcaaatttgaacatccggtcttgcaacggctgctggtgttcgaaggtcgttgagttcccgtcaatcacggcgcacatgttggtgttggaggtgacgatcacgggagtcgggtctatctgggccgaggacttgcatttctggtccacgcgcaccttgcttcctccgagaatggctttggccgactccacgaccttggcggtcatcttcccctcctcccaccagatcaccatcttgtcgacacagtcgttgaagggaaagttctcattggtccagttgacgcagccgtagaaagggcgaattc

SEQ ID NO: 4754 - DNA, 2211 bp, Adeno-associated virus
atggctgctgacggttatcttccagattggctcgaggacaacctttctgaaggcattcgtgagtggtgggctctgaaacctggagtccctcaacccaaagcgaaccaacaacaccaggacaaccgtcggggtcttgtgcttccgggttacaaatacctcggacccggtaacggactcgacaaaggagagccggtcaacgaggcggacgcggcagccctcgaacacgacaaagcttacgaccagcagctcaaggccggtgacaacccgtacctcaagtacaaccacgccgacgccgagtttcaggagcgtcttcaagaagatacgtcttttgggggcaaccttggcagagcagtcttccaggccaaaaagaggatccttgagcctcttggtctggttgaggaagcagctaaaacggctcctggaaagaagggggctgtagatcagtctcctcaggaaccggactcatcatctggtgttggcaaatcgggcaaacagcctgccagaaaaagactaaatttcggtcagactggagactcagagtcagtcccagaccctcaacctctcggagaaccaccagcagcccccacaagtttgggatctaatacaatggcttcaggcggtggcgcaccaatggcagacaataacgagggtgccgatggagtgggtaattcctcaggaaattggcattgcgattcccaatggctgggcgacagagtcatcaccaccagcaccagaacctgggccctgcccacttacaacaaccatctctacaagcaaatctccagccaatcaggagcttcaaacgacaaccactactttggctacagcaccccttgggggtattttgactttaacagattccactgccacttctcaccacgtgactggcagcgactcattaacaacaactggggattccggcccaagaaactcagcttcaagctcttcaacatccaagttagaggggtcacgcagaacgatggcacgacgactattgccaataaccttaccagcacggttcaagtgtttacggactcggagtatcagctcccgtacgtgctcgggtcggcgcaccaaggctgtctcccgccgtttccagcggacgtcttcatggtccctcagtatggatacctcaccctgaacaacggaagtcaagcggtgggacgctcatccttttactgcctggagtacttcccttcgcagatgctaaggactggaaataacttccaattcagctataccttcgaggatgtaccttttcacagcagctacgctcacagccagagtttggatcgcttgatgaatcctcttattgatcagtatctgtactacctgaacagaacgcaaggaacaacctctggaacaaccaaccaatcacggctgctttttagccaggctgggcctcagtctatgtctttgcaggccagaaattggctacctgggccctgctaccggcaacagagactttcaaagactgctaacgacaacaacaacagtaactttccttggacagcggccagcaaatatcatctcaatggccgcgactcgctggtgaatccaggaccagctatggccagtcacaaggacgatgaagaaaaatttttccctatgcacggcaatctaatatttggcaaagaagggacaacggcaagtaacgcagaattagataatgtaatgattacggatgaagaagagattcgtaccaccaatcctgtggcaacagagcagtatggaactgtggcaaataacttgcagagctcaaatacagctcccacgactggaactgtcaatcatcagggggccttacctggcatggtgtggcaagatcgtgacgtgtaccttcaaggacctatctgggcaaagattcctcacacggatggacactttcatccttctcctctgatgggaggctttggactgaaacatccgcctcctcaaatcatgatcaaaaatactccggtaccggcaaatcctccgacgactttcagcccggccaagtttgcttcatttatcactcagtactccactggacaggtcagcgtggaaattgagtgggagctacagaaagaaaacagcaaacgttggaatccagagattcagtacacttccaactacaacaagtctgttaatgtggactttactgtagacactaatggtgtttatagtgaacctcgccctattggaacccggtatctcacacgaaacttgtga

SEQ ID NO: 4755 - protein, 737 aa, Adeno-associated virus
MAADGYLPDWLEDNLSEGIREWWDLKPGAPKPKANQQKQDNGRGLVLPGYKYLGPFNGLDKGEPVNAADAAALEHDKAYDQQLNAGDNPYLRYNHADAEFQERLQEDTSFGGNLGRAVFQAKKRVLEPLGLVEEGAKTAPAKKRPVEPSPQRSPDSSTGIGKKGQQPARKRLNFGQTGDSESVPDPQPLGEPPAAPSSVGSGTVAAGGGAPMADNNEGADGVGNASGNWHCDSTWLGDRVITTSTRTWALPTYNNHLYEQISSETAGSTNDNTYFGYSTPWGYFDFNRFHCHFSPRDWQRLINNNWGFRPKKLRFKLFNIQVKEVTTNDGVTTIANNLTSTIQVFSDSEYQLPYVLGSAHQGCLPPFPADVFMIPQYGYLTLNNGSQSVGRSSFYCLEYFPSQMLRTGNNFEFSYSFEDVPFHSSYAHSQSLDRLMNPLIDQYLYYLARTQSDPGGTAGNRELQFYQGGPSTMAEQAKNWLPGPCFRQQRVSKTLDQNNNSNFAWTGATKYHLNGRNSLVNPGVAMATHKDDEDRFFPSSGVLIFGKTGATNKTTLENVLMTNEEEIRPTNPVATEEYGIVSSNLQAANTAAQTQVVNNQGALPGMVWQNRDVYLQGPIWAKIPHTDGNFHPSPLMGGFGLKHPPPQILIKNTPVPANPPEVFTPAKFASFITQYSTGQVSVEIEWELQKENSKRWDPEIQYTSNFEKQTGVDFAVDSQGVYSEPRPIGTRYLTRNL

SEQ ID NO: 4756 - DNA, 2211 bp, Adeno-associated virus
atggctgctgacggttatcttccagattggctcgaggacaacctttctgaaggcattcgtgagtggtgggctctgaaacctggagtccctcaacccaaagcgaaccaacaacaccaggacaaccgtcggggtcttgtgcttccgggttacaaatacctcggacccggtaacggactcgacaaaggagagccggtcaacgaggcggacgcggcagccctcgaacacgacaaagcttacgaccagcagctcaaggccggtgacaacccgtacctcaagtacaaccacgccgacgccgagtttcaggagcgtcttcaagaagatacgtcttttgggggcaaccttggcagagcagtcttccaggccaaaaagaggatccttgagcctcttggtctggttgaggaagcagctaaaacggctcctggaaagaagggggctgtagatcagtctcctcaggaaccggactcatcatctggtgttggcaaatcgggcaaacagcctgccagaaaaagactaaatttcggtcagactggagactcagagtcagtcccagaccctcaacctctcggagaaccaccagcagcccccacaagtttgggatctaatacaatggcttcaggcggtggcgcaccaatggcagacaataacgagggtgccgatggagtgggtaattcctcaggaaattggcattgcgattcccaatggctgggcgacagagtcatcaccaccagcaccagaacctgggccctgcccacttacaacaaccatctctacaagcaaatctccagccaatcaggagcttcaaacgacaaccactactttggctacagcaccccttgggggtattttgactttaacagattccactgccacttctcaccacgtgactggcagcgactcattaacaacaactggggattccggcccaagaaactcagcttcaagctcttcaacatccaagttagaggggtcacgcagaacgatggcacgacgactattgccaataaccttaccagcacggttcaagtgtttacggactcggagtatcagctcccgtacgtgctcgggtcggcgcaccaaggctgtctcccgccgtttccagcggacgtcttcatggtccctcagtatggatacctcaccctgaacaacggaagtcaagcggtgggacgctcatccttttactgcctggagtacttcccttcgcagatgctaaggactggaaataacttccaattcagctataccttcgaggatgtaccttttcacagcagctacgctcacagccagagtttggatcgcttgatgaatcctcttattgatcagtatctgtactacctgaacagaacgcaaggaacaacctctggaacaaccaaccaatcacggctgctttttagccaggctgggcctcagtctatgtctttgcaggccagaaattggctacctgggccctgctaccggcaacagagactttcaaagactgctaacgacaacaacaacagtaactttccttggacagcggccagcaaatatcatctcaatggccgcgactcgctggtgaatccaggaccagctatggccagtcacaaggacgatgaagaaaaatttttccctatgcacggcaatctaatatttggcaaagaagggacaacggcaagtaacgcagaattagataatgtaatgattacggatgaagaagagattcgtaccaccaatcctgtggcaacagagcagtatggaactgtggcaaataacttgcagagctcaaatacagctcccacgactggaactgtcaatcatcagggggccttacctggcatggtgtggcaagatcgtgacgtgtaccttcaaggacctatctgggcaaagattcctcacacggatggacactttcatccttctcctctgatgggaggctttggactgaaacatccgcctcctcaaatcatgatcaaaaatactccggtaccggcaaatcctccgacgactttcagcccggccaagtttgcttcatttatcactcagtactccactggacaggtcagcgtggaaattgagtgggagctacagaaagaaaacagcaaacgttggaatccagagattcagtacacttccaactacaacaagtctgttaatgtggactttactgtagacactaatggtgtttatagtgaacctcgccctattggaacccggtatctcacacgaaacttgtaa

SEQ ID NO: 4757 - protein, 736 aa, Adeno-associated virus
MAADGYLPDWLEDNLSEGIREWWALKPGVPQPKANQQHQDNRRGLVLPGYKYLGPGNGLDKGEPVNEADAAALEHDKAYDQQLKAGDNPYLKYNHADAEFQERLQEDTSFGGNLGRAVFQAKKRILEPLGLVEEAAKTAPGKKGAVDQSPQEPDSSSGVGKSGKQPARKRLNFGQTGDSESVPDPQPLGEPPAAPTSLGSNTMASGGGAPMADNNEGADGVGNSSGNWHCDSQWLGDRVITTSTRTWALPTYNNHLYKQISSQSGASNDNHYFGYSTPWGYFDFNRFHCHFSPRDWQRLINNNWGFRPKKLSFKLFNIQVRGVTQNDGTTTIANNLTSTVQVFTDSEYQLPYVLGSAHQGCLPPFPADVFMVPQYGYLTLNNGSQAVGRSSFYCLEYFPSQMLRTGNNFQFSYTFEDVPFHSSYAHSQSLDRLMNPLIDQYLYYLNRTQGTTSGTTNQSRLLFSQAGPQSMSLQARNWLPGPCYRQQRLSKTANDNNNSNFPWTAASKYHLNGRDSLVNPGPAMASHKDDEEKFFPMHGNLIFGKEGTTASNAELDNVMITDEEEIRTTNPVATEQYGTVANNLQSSNTAPTTGTVNHQGALPGMVWQDRDVYLQGPIWAKIPHTDGHFHPSPLMGGFGLKHPPPQIMIKNTPVPANPPTTFSPAKFASFITQYSTGQVSVEIEWELQKENSKRWNPEIQYTSNYNKSVNVDFTVDTNGVYSEPRPIGTRYLTRNL

SEQ ID NO: 4758 - protein, 728 aa, Adeno-associated virus
MAADGYLPDWLEDNLSEGIREWWDLKPGAPKPKANQQKQDDGRGLVLPGYKYLGPFNGLDKGEPVNEADAAALEHDKAYDKQLEQGDNPYLKYNHADAEFQERLQEDTSFGGNLGRAVFQAKKRVLEPLGLVEEGAKTAPGKKRPIESPDSSTGIGRKGQQPAKKKLNFGQTGDSESVPDPQPIGEPPAGPSGLGSGTMAAGGGAPMADNNEGADGVGNASGNWHCDSTWLGDRVITTSTRTWALPTYNNHLYKQISSQSGATNDNHFFGYSTPWGYFDFNRFHCHFSPRDWQRLINNNWGFRPRKLRFKLFNIQVKEVTTNDGVTTIANNLTSTIQVFSDSEYQLPYVLGSAHQGCLPPFPADVFMIPQYGYLTLNNGSQSVGRSSFYCLEYFPSQMLRTGNNFEFSYTFEEVPFHSSYAHSQSLDRLMNPLIDQYLYYLARTQSTTGSTRELQFHQAGPNTMAEQSKNWLPGPCYRQQRLSKNIDSNNNSNFAWTGATKYHLNGRNSLTNPGVAMATNKDDEDQFFPINGVLVFGKTGAANKTTLENVLMTSEEEIKTTNPVATEEYGVVSSNLQSSTAGPQTQTVNSQGALPGMVWQNRDVYLQGPIWAKIPHTDGNFHPSPLMGGFGLKHPPPQILIKNTPVPANPPEVFTPAKFASFITQYSTGQVSVEIEWELQKENSKRWNPEIQYTSNYAKSNNVEFAVNNEGVYTEPRPIGTRYLTRNL

SEQ ID NO: 4759 - protein, 728 aa, Adeno-associated virus
MAADGYLPDWLEDNLSEGIREWWDLKPGAPKPKANQQKQDDGRGLVLPGYKYLGPFNGLDKGEPVNAADAAALEHDKAYDQQLKAGDNPYLRYNHADAEFQERLQEDTSFGGNLGRAVFQAKKRVLEPLGLVEEGAKTAPGKKRPIESPDSSTGIGKKGQQPAKKKLNFGQTGDSESVPDPQPIGEPPAGPSGLGSGTMAAGGGAPMADNNEGADGVGNASGNWHCDSTWLGDRVITTSTRTWALPTYNNHLYKQISSQSGATNDNHFFGYSTPWGYFDFNRFHCHFSPRDWQRLINNNWGFRPRKLRFKLFNIQVKEVTTNDGVTTIANNLTSTIQVFSDSEYQLPYVLGSAHQGCLPPFPADVFMIPQYGYLTLNNGSQSVGRSSFYCLEYFPSQMLRTGNNFEFSYTFEEVPFHSSYAHSQSLDRLMNPLIDQYLYYLARTQSTTGSTRELQFHQAGPNTMAEQSKNWLPGPCYRRQRLSKDIDSNNNSNFAWTGATKYHLNGRNSLTNPGVAMATNKDDEDQFFPINGVLVFGKTGAANKTTLENVLMTSEEEIKTTNPVATEEYGVVSSNLQSSTAGPQTQTVNSQGALPGMVWQNRDVYLQGPIWAKIPHTDGNFHPSPLMGGFGLKHPPPQILIKNTPVPANPPEVFTPAKFASFITQYSTGQVSVEIEWELQKENSKRWNPEIQYTSNYAKSNNVEFAVNNEGVYTEPRPIGTRYLTRNL

SEQ ID NO: 4760 - protein, 685 aa, Adeno-associated virus
MAADGYLPDWLEDNLSEGIREWWDLKPGAPKPKANQQKQDDGRGLVLPGYKYLGPFNGLDKGEPVNEADAAALEHDKAYDKQLEQGDNPYLKYNHADAEFQERLQEDTSFGGNLGRAVFQAKKRVLEPLGLVEEGAKTAPGKKRPVEPSPQRSPDSSTGIGKTGQQPAKKRLNFGQTGDSESVPDPQPIGEPPAGPSGLGSGTMAAGGGAPMADNNEGADGVGSSSGNWHCDSTWLGDRVITTSTRTWALPTYNNHLYKQISNGTSGGSTNDNTYFGYSTPWGYFDFNRFHCHFSPRDWQRLINNNWGFRPKRLNFKLFNIQVKEVTQNEGTKTIANNLTSTIQVFTDSEYQLPYVLGSAHQGCLPPFPADVFMIPQYGYLTLNNGSQAVGRSSFYCLEYFPSQMLRTGNNFEFSYQFEDVPFHSSYAHSQSLDRLTNPLIDQYLYYLARTQSTTGSTRGLQFHQAGPNTMAEQSKNWLPGPCYRQQRLSKNIDSNNNSNFAWTGATKYHLNGRNSLTNPGVAMATNKDDEDQFFPINGVLVFGKTGAANKTTLENVLMTSEEEIKTTNPVATEEYGVVSSNLQSSTAGPQTQTVNSQGALPGMVWQNRDVYLQGPIWAKIPHTDGNFHPSPLMGGFGLKHPPPQILIKYTSNYYKSTNVDFAVNTEGTYSEPRPIGTRYLTRNL

SEQ ID NO: 4761 - protein, 733 aa, Adeno-associated virus
MAADGYLPDWLEDNLSEGIREWWDLKPGAPKPKANQQKQDDGRGLVLPGYKYLGPFNGLDKGEPVNAADAAALEHDKAYDQQLKAGDNPYLRYNHADAEFQERLQEDTSFGGNLGRAVFQAKKRVLEPLGLVEEGAKTAPGKKRPIESPDSSTGIGKKGQQPAKKKLNFGQTGDSESVPDPQPIGEPPAGPSGLGSGTMAAGGGAPMADNNEGADGVGSSSGNWHCDSTWLGDRVITTSTRTWALPTYNNHLYKQISNGTSGGSTNDNTYFGYSTPWGYFDFNRFHCHFSPRDWQRLINNNWGFRPKRLNFKLFNIQVKEVTQNEGTKTIANNLTSTIQVFTDSEYQLPYVLGSAHQGCLPPFPADVFMIPQYGYLTLNNGSQAVGRSSFYCLEYFPSQMLRTGNNFEFSYQFEDVPFHSSYAHSQSLDRLMNPLIDQYLYYLSRTQSTGGTAGTQQLLFSQAGPNNMSAQAKNWLPGPCYRQQRVSTTVSQNNNSNFAWTGATKYHLNGRDSLVNPGVAMATHKGDEERFFPSSGVLMFGKQGAGKDNVDYSSVMLTSEEEIKTTNPVATEQYGVVADNLQQQNAAPIVGAVNSQGALPGMVWQNRDVYLQGPIWAKIPHTDGNFHPSPLMGGFGLKHPPPQILIKNTPVPADPPTTFSQAKLASFITQYSTGQVSVEIEWELQKENSKRWNPEIQYTSNYYKSTNVDFAVNTEGTYSEPRPIGTRYLTRSL

SEQ ID NO: 4762 - protein, 738 aa, Adeno-associated virus
MAADGYLPDWLEDNLSEGIREWWDLKPGAPKPKANQQKQDDGRGLVLPGYKYLGPFNGLDKGEPVNAADAAALEHDKAYDQQLKAGDNPYLRYNHADAEFQERLQEDTSFGGNLGRAVFQAKKRVLEPLGLVEEGAKTAPGKKRPVEPSPQRSPDSSTGIGKTGQQPAKKRLNFGQTGDSESVPDPQPIGEPPAGPSGLGSGTMAAGGGAPMADNNEGADGVGSSSGNWHCDSTWLGDRVITTSTRTWALPTYNNHLYKQISNGTSGGSTNDNTYFGYSTPWGYFDFNRFHCHFSPRDWQRLINNNWGFRPKRLNFKLFNIQVKEVTQNEGTKTIANNLTSTIQVFTDSEYQLPYVLGSAHQGCPPPFPADVFMIPQYGYLTLNNGSQAVGRSSFYCLEYFPSQMRRTGNNFEFSYQFEDVPFHSSYAHSQSLDRLMNPLIDQYLYYLSRTQSTGGTAGTQQLLFSQAGPNNMSAQAKNWLPGPCYRQQRVSTTLSQNNNSNFAWTGATKYHLNGRDSLVNPGVAMATHKDDEERFFPSSGVLMFGKQGAGKDNVDYSSVMLTSEEEIKTTNPVATEQYGVVADNLQQQNAAPIVGAVNSQGALPGMVWQNRDVYLQGPIWAKIPHTDGNFHPSPLMGGFGLKHPPPQILIKNTPVPADPPTTFSQAKLASFITQYSTGQVSVEIEWELQKENSKRWNPEIQYTSNYYKSTNVDFAVNTEGTYSEPRPIGTRYLTRNL

SEQ ID NO: 4763 - protein, 733 aa, Adeno-associated virus
MAADGYLPDWLEDNLSEGIREWWDLRPGAPKPKANQQKQDDGRGLVLPGYKYLGPFNGLDKGEPVNEADAAALEHDKAYDKQLEQGDNPYLKYNHADAEFQERLQEDTSFGGNLGRAVFQAKKRVLEPLGLVEEGAKTAPGKKRPIESPDSSTGIGKKGQQPAKKRLNFGQTGDSESVPDPQPIGEPPAGPSGLGSGTMAAGGGAPMADNNEGADGVGSSSGNWHCDSTWLGDRVITTSTRTWALPTYNNHLYKQISNGTSGGSTNDNTYFGYSTPWGYFDFNRFHCHFSPRDWQRLINNNWGFRPKRLNFKLFNIQVKEVTQNEGTKTIANNLTSTIQVFTDSEYQLPYVLGSAHQGCLPPFPADVFMIPQYGYLTLNNGSQAVGRSSFYCLEYFPSQMLRTGNNFEFSYQFEDVPFHSSYAHSQSLDRLMNPLIDQYLYYLSRTQSTGGTAGTQQLLFSQAGPNNMSAQAKNWLPGPCYRQQRVSTTVSQNNNSNFAWTGATKYHLNGRDSLVNPGVAMATHKGDEERFFPSSGVLMFGKQGAGKDNVDYSSVMLTSEEEIKTTNPVATEQYGVVADNLQQQNAAPIVGAVNSQGALPGMVWQNRDVYLQGPIWAKIPHTDGNFHPSPLMGGFGLKHPPPQILIKNTPVPADPPTTFSQAKLASFITQYSTGQVSVEIEWELQKENSKRWNPEIQYTSNYYKSTNVDFAVNTEGTYSEPRPIGTRYLTRNL

SEQ ID NO: 4764 - DNA, 3098 bp, Adeno-associated virus
gaattcgccctttctacggctgcgtcaactggaccaatgagaactttcccttcaacgattgcgtcgacaagatggtgatctggtgggaggagggcaagatgacggccaaggtcgtggagtccgccaaggccattctcggcggcagcaaggtgcgcgtggaccaaaagtgcaagtcttccgcccagatcgatcccacccccgtgatcgtcacttccaacaccaacatgtgcgctgtgattgacgggaacagcaccaccttcgagcaccagcagccgttacaagaccggatgttcaaatttgaactcacccgccgtctggagcacgactttggcaaggtgacaaagcaggaagtcaaagagttcttccgctgggcgcaggatcacgtgaccgaggtggcgcatgagttctacgtcagaaagggtggagccaacaagagacccgcccccgatgacgcggataaaagcgagcccaagcgggcctgcccctcagtcgcggatccatcgacgtcagacgcggaaggagctccggtggactttgccgacaggtaccaaaacaaatgttctcgtcacgcgggcatgcttcagatgctgtttccctgcaagacatgcgagagaatgaatcagaatttcaacatttgcttcacgcacgggaccagagactgttcagaatgtttccccggcgtgtcagaatctcaaccggtcgtcagaaagaggacgtatcggaaactctgtgccattcatcatctgctggggcgggctcccgagattgcttgctcggcctgcgatctggtcaacgtggacctggatgaccgtgtttctgagcaataaatgacttaaaccaggtatggctgccgatggttatcttccagattggctcgaggacaacctctctgagggcattcgcgagtggtgggacttgaaacctggagccccgaaacccaaagccaaccagcaaaagcaggacgacggccggggtctggtgcttcctggctacaagtacctcggacccttcaacggactcgacaagggagagccggtcaacgaggcagacgccgcggccctcgagcacgacaaggcctacgacaagcagctcgagcagggggacaacccgtacctcaagtacaaccacgccgacgccgagtttcaggagcgtcttcaagaagatacgtcttttgggggcaacctcgggcgagcagtcttccaggccaagaagcgggttctcgaacctctcggtctggttgaggaaggcgctaagacggctcctggaaagaagagacccatagaatcccccgactcctccacgggcatcggcaagaaaggccagcagcccgctaaaaagaagctcaactttgggcagactggcgactcagagtcagtgcccgacccccaacctctcggagaacctcccgccgcgccctcaggtctgggatctggtacaatggctgcaggcggtggcgcaccaatggcagacaataacgaaggcgccgacggagtgggtaatgcctccggaaattggcattgcgattccacatggctgggcgacagagtcatcaccaccagcacccgcacctgggccctgcccacctacaacaaccacctctacaagcagatatcaagtcagagcggggctaccaacgacaaccacttcttcggctacagcaccccctggggctattttgacttcaacagattccactgccacttctcaccacgtgactggcagcgactcatcaacaacaactggggattccggcccagaaagctgcggttcaagttgttcaacatccaggtcaaggaggtcacgacgaacgacggcgttacgaccatcgctaataaccttaccagcacgattcaggtcttctcggactcggagtaccaactgccgtacgtcctcggctctgcgcaccagggctgcctccctccgttccctgcggacgtgttcatgattcctcagtacggatatctgactctaaacaacggcagtcagtctgtgggacgttcctccttctactgcctggagtactttccttctcagatgctgagaacgggcaataactttgaattcagctacacctttgaggaagtgcctttccacagcagctatgcgcacagccagagcctggaccggctgatgaatcccctcatcgaccagtacctgtactacctggcccggacccagagcactacggggtccacaagggagctgcagttccatcaggctgggcccaacaccatggccgagcaatcaaagaactggctgcccggaccctgttatcggcagcagagactgtcaaaaaacatagacagcaacaacaacagtaactttgcctggaccggggccactaaataccatctgaatggtagaaattcattaaccaacccgggcgtagccatggccaccaacaaggacgacgaggaccagttctttcccatcaacggagtgctggtttttggcgaaacgggggctgccaacaagacaacgctggaaaacgtgctaatgaccagcgaggaggagatcaaaaccaccaatcccgtggctacagaagaatacggtgtggtctccagcaacctgcaatcgtctacggccggaccccagacacagactgtcaacagccagggggctctgcccggcatggtctggcagaaccgggacgtgtacctgcagggtcccatctgggccaaaattcctcacacggacggcaactttcacccgtctcccctgatgggcggatttggactcaaacacccgcctcctcaaattctcatcaaaaacaccccggtacctgctaatcctccagaggtgtttactcctgccaagtttgcctcatttatcacgcagtacagcaccggccaggtcagcgtggagatcgagtgggaactgcagaaagaaaacagcaaacgctggaatccagagattcagtacacctcaaattatgccaagtctaataatgtggaatttgctgtcaacaacgaaggggtttatactgagcctcgccccattggcacccgttacctcacccgtaacctgtaattgcctgttaatcaataaaccggttaattcgtttcagttgaactttggtctctgcgaagggcgaattc

SEQ ID NO: 4765 - protein, 728 aa, Adeno-associated virus
MAADGYLPDWLEDNLSEGIREWWDLKPGAPKPKANQQKQDDGRGLVLPGYKYLGPFNGLDKGEPVNEADAAALEHDKAYDKQLEQGDNPYLKYNHADAEFQERLQEDTSFGGNLGRAVFQAKKRVLEPLGLVEEGAKTAPGKKRPIESPDSSTGIGKKGQQPAKKKLNFGQTGDSESVPDPQPLGEPPAAPSGLGSGTMAAGGGAPMADNNEGADGVGNASGNWHCDSTWLGDRVITTSTRTWALPTYNNHLYKQISSQSGATNDNHFFGYSTPWGYFDFNRFHCHFSPRDWQRLINNNWGFRPRKLRFKLFNIQVKEVTTNDGVTTIANNLTSTIQVFSDSEYQLPYVLGSAHQGCLPPFPADVFMIPQYGYLTLNNGSQSVGRSSFYCLEYFPSQMLRTGNNFEFSYTFEEVPFHSSYAHSQSLDRLMNPLIDQYLYYLARTQSTTGSTRELQFHQAGPNTMAEQSKNWLPGPCYRQQRLSKNIDSNNNSNFAWTGATKYHLNGRNSLTNPGVAMATNKDDEDQFFPINGVLVFGETGAANKTTLENVLMTSEEEIKTTNPVATEEYGVVSSNLQSSTAGPQTQTVNSQGALPGMVWQNRDVYLQGPIWAKIPHTDGNFHPSPLMGGFGLKHPPPQILIKNTPVPANPPEVFTPAKFASFITQYSTGQVSVEIEWELQKENSKRWNPEIQYTSNYAKSNNVEFAVNNEGVYTEPRPIGTRYLTRNL

SEQ ID NO: 4766 - protein, 733 aa, Adeno-associated virus
MAADGHLPDWLEDNLSEGIREWWDLKPGAPKPKANQQKQDDGRGLVLPGYKYLGPFNGLDKGEPVNAADAAALEHDKAYDQQLKAGDNPYLRYNHADAEFQERLQEDTSFGGNLGRAVFQAKKRVLEPLGLVEEGAKTAPGKKRPIESPDSSTGIGKKGQQPAKKKLNFGQTGDSESVPDPQPIGEPPAGPSGLGSGTMAAGGGAPMADNNEGADGVGSSSGNWHCDSTWLGDRVITTSTRTWALPTYNNHLYKQISNGTSGGSTNDNTYFGYSTPWGYFDFNRFHCHFSPRDWQRLINNSWGFRPKRLNFKLFNIQVKEVTQNEGTKTIANNLTSTIQVFTDSEYQLPYVLGSAHQGCLPPFPADVFMIPQYGYLTLNNGSQAVGRSSFYCLEYFPSQMLRTGNNFEFSYQFEDVPFHSSYAHSQSLDRLMNPLIDQYLYYLSRTQSTGGTAGTQQLLFSQAGPNNMSAQAKNWLPGPCYRQQRVSTTLSQNNNSNFAWTGATKYHLNGRDSLVNPGVAMATHKDDEERFFPSSGVLMFGKQGAGKDNVDYSSVMLTSEEEIKTTNPVATEQYGVVADNLQQQNAAPIVGAVNSQGALPGMVWQNRDVYLQGPIWAKIPHTDGNFHPSPLMGGFGLKHPPPQILIKNTPVPADPPTTFSQAKLASFITQYSTGQVSVEIEWELQKENSKRWNPEIQYTSNYYKSTNVDFAVNTEGTYSEPRPIGTRYLTRNL

SEQ ID NO: 4767 - DNA, 2495 bp, Adeno-associated virus
gaattcgccctttctacggctgcgtcaactagaccaatgagaactttcccttcaacgattgcgtcgacaagatggtgatctggtgggaggagggcaagatgacggccaaggtcgtggagtccgccaaggccattcatcatctgctggggcgggctcccgagattgcttgctcggcctgcgatctggtcaacgtggacctggatgactgtgtttctgagcaataaatgacttaaaccaggtatggctgccgatggttatcttccagattggctcgaggacaacctctctgagggcattcgcgagtggtgggacttgaaacctggagccccgaaacccaaagccaaccagcaaaagcaggacgacggccggggtctggtgcttcctggctacaagtacctcggacccttcaacggactcgacaagggagagccggtcaacgaggcagacgccgcggccctcgagcacgacaaggcctacgacaagcagctcgagcagggggacaacccgtacctcaagtacaaccacgccgacgccgagtttcaggagcgtcttcaagaagatacgtcttttgggggcaacctcgggcgagcagtcttccaggccaagaagcgggttctcgaacctctcggtctggttgaggaaggcgctaagacggctcctggaaagaagagacccatagaatcccccgactcctccacgggcatcggcaagaaaggccagcagcccgctaaaaagaagctcaactttgggcagactggcgactcagagtcagtgcccgaccctcaaccaatcggagaaccccccgcaggcccctctggtctgggatctggtacaatggctgcaggcggtggcgctccaatggcagacaataacgaaggcgccgacggagtgggtaatgcctccggaaattggcattgcgattccacatggctgggcgacagagtcatcaccaccagcacccgcacctgggccctgcccacctacaacaaccacctctacaagcagatatcaagtcagagcggggctaccaacgacaaccacttcttcggctacagcaccccctggggctattttgacttcaacagattccactgccacttctcaccacgtgactggcagcgactcatcaacaacaactggggattccggcccagaaagctgcggttcaagttgttcaacatccaggtcaaggaggtcacgacgaacgacggcgttacgaccatcgctaataaccttaccagcacgattcaggtcttctcggactcggagtaccaactgccgtacgtcctcggctctgcgcaccagggctgcctccctccgttccctgcggacgtgttcatgattcctcagtacggatatctgactctaaacaacggcagtcagtctgtgggacgttcctccttctactgcctggagtactttccttctcagatgctgagaacgggcaataactttgaattcagctacacctttgaggaagtgcctttccacagcagctatgcgcacagccagagcctggaccggctgatgaatcccctcatcgaccagtacctgtactacctggcccggacccagagcactacggggtccacaagggagctgcagttccatcaggctgggcccaacaccatggccgagcaatcaaagaactggctgcccggaccctgttatcggcagcagagactgtcaaaaaacatagacagcaacaacaccagtaactttgcctggaccggggccactaaataccatctgaatggtagaaattcattaaccaacccgggcgtagccatggccaccaacaaggacgacgaggaccagttctttcccatcaacggagtgctggtttttggcaaaacgggggctgccaacaagacaacgctggaaaacgtgctaatgaccagcgaggaggagatcaaaaccaccaatcccgtggctacagaacagtacggtgtggtctccagcaacctgcaatcgtctacggccggaccccagacacagactgtcaacagccagggggctctgcccggcatggtctggcagaaccgggacgtgtacctgcagggtcccatctgggccaaaattcctcacacggacggcaactttcacccgtctcccctgatgggcggatttggactcaaacacccgcctcctcaaattctcatcaaaaacaccccggtacctgctaatcctccagaggtgtttactcctgccaagtttgcctcatttatcacgcagtacagcaccggccaggtcagcgtggagatcgagtgggaactgcagaaagaaaacagcaaacgctggaatccagagattcagtacacctcaaattatgccaagtctaataatgtggaatttgctgtcaacaacgaaggggtttatactgagcctcgccccattggcacccgttacctcacccgtaacctgtaattgcctgttaatcaataaaccggttaattcgtttcagttgaactttggtctctgcgaagggcgaattc

SEQ ID NO: 4768 - protein, 728 aa, Adeno-associated virus
MAADGYLPDWLEDNLSEGIREWWDLKPGAPKPKANQQKQDDGRGLVLPGYKYLGPFNGLDKGEPVNEADAAALEHDKAYDKQLEQGDNPYLKYNHADAEFQERLQEDTSFGGNLGRAVFQAKKRVLEPLGLVEEGAKTAPGKKRPIESPDSSTGIGKKGQQPAKKKLNFGQTGDSESVPDPQPIGEPPAGPSGLGSGTMAAGGGAPMADNNEGADGVGNASGNWHCDSTWLGDRVITTSTRTWALPTYNNHLYKQISSQSGATNDNHFFGYSTPWGYFDFNRFHCHFSPRDWQRLINNNWGFRPRKLRFKLFNIQVKEVTTNDGVTTIANNLTSTIQVFSDSEYQLPYVLGSAHQGCLPPFPADVFMIPQYGYLTLNNGSQSVGRSSFYCLEYFPSQMLRTGNNFEFSYTFEEVPFHSSYAHSQSLDRLMNPLIDQYLYYLARTQSTTGSTRELQFHQAGPNTMAEQSKNWLPGPCYRQQRLSKNIDSNNTSNFAWTGATKYHLNGRNSLTNPGVAMATNKDDEDQFFPINGVLVFGKTGAANKTTLENVLMTSEEEIKTTNPVATEQYGVVSSNLQSSTAGPQTQTVNSQGALPGMVWQNRDVYLQGPIWAKIPHTDGNFHPSPLMGGFGLKHPPPQILIKNTPVPANPPEVFTPAKFASFITQYSTGQVSVEIEWELQKENSKRWNPEIQYTSNYAKSNNVEFAVNNEGVYTEPRPIGTRYLTRNL

SEQ ID NO: 4769 - DNA, 2504 bp, Adeno-associated virus
gaattcgccctttctacggctgcgtcaactggaccaatgagaactttcccttcaacgattgcgtcgacaagatggtgatctggtgggaggagggcaagatgacggccaaggtcgtggagtccgccaaggccattcatcatctgctggggcgggctcccgagattgcttgctcggcctgcgatctggtcaacgtggacctggatgactgtgtttctgagcaataaatgacttaaaccaggtatggctgccgatggttatcttccagattggctcgaggacaacctctctgagggcattcgcgagtggtgggacttgaaacctggagccccgaaacccaaagccaaccagcaaaagcaggacgacggccggggtctggtgcttcctggctacaagtacctcggacccttcaacggactcgacaagggagagccggtcaacgaggcagacgccgcggccctcgagcacgacaaggcctacgacaagcagctcgagcagggggacaacccgtacctcaagtacaaccacgccgacgccgagtttcaggagcgtcttcaagaagatacgtcttttgggggcaacctcgggcgagcagtcttccaggccaagaagcgggttctcgaacctctcggtctggttgaggaaggcgctaagacggctcctggaaagaagagacccatagaatcccccgactcctccacgggcatcggcaagaaaggccagcagcccgctaaaaagaagctcaactttgggcagactggcgactcagagtcagtgcccgaccctcaaccaatcggagaaccccccgcaggcccctctggtctgggatctggtacaatggctgcaggcggtggcgctccaatggcagacaataacgaaggcgccgacggagtgggtaatgcctccggaaattggcattgcgattccacatggctgggcgacagagtcatcaccaccagcacccgcacctgggccctgcccacctacaacaaccacctctacaagcagatatcaagtcagagcggggctaccaacgacaaccacttcttcggctacagcaccccctggggctattttgacttcaacagattccactgccacttctcatcacgtgactggcagcgactcatcaacaacaactggggattccggcccaagagactcaacttcaagctcttcaacatccaggtcaaggaggtcacgcagaatgaaggcaccaagaccatcgccaataaccttaccagcacgattcaggtctttacggactcggaataccggctcccgtacgtcctcggctctgcgcaccagggctgcctgcctccgttcccggcggacgtcttcatgattcctcagtacgggtacctgactctgaacaacggcagtcaggccgtgggccgttcctccttctactgcctggagtactttccttctcaaatgctgagaacgggcaacaactttgagttcagctaccagtttgaggacgtgccttttcacagcagctacgcgcacagccaaagcctggaccggctgatgaaccccctcatcgaccagtacctgtactacctgtctcggactcagtccacgggaggtaccgcaggaactcagcagttgctattttctcaggccgggcctaataacatgtcggctcaggccaaaaactggctacccgggccctgctaccggcagcaacgcgtctccacgacactgtcgcaaaataacaacagcaactttgcttggaccggtgccaccaagtatcatctgaatggcagagactctctggtaaatcccggtgtcgctatggcaacgcacaaggacgacgaagagcgattttttccatccagcggagtcttgatgtttgggaaacagggagctggaaaagacaacgtggactatagcagcgttatgctaaccagtgaggaagaaatcaaaaccaccaacccagtggccacagaacagtacggcgtggtggccgataacctgcaacagcaaaacgccgctcctattgtaggggccgtcaacagtcaaggagccttacctggcatggtctggcagaaccgggacgtgtacctgcagggtcctatctgggccaagattcctcacacggacggcaactttcatccttcgccgctgatgggaggctttggactgaaacacccgcctcctcagatcctgattaagaatacacctgttcccgcggatcctccaactaccttcagtcaagccaagccggcgtcgttcatcacgcagtacagcaccggacaggtcagcgtggaaattgaatgggagctgcagaaagagaacagcaagcgctggaacccagagattcagtatacttccaactactacaaatctacaaatgtggactttgctgtcaatactgagggtacttattcagagcctcgccccattggcacccgttacctcacccgtaacctgtaattgcctgttaatcaataaaccggttaattcgtttcagttgaactttggtctctgcgaagggcgaattc

SEQ ID NO: 4770 - protein, 731 aa, Adeno-associated virus
MAADGYLPDWLEDNLSEGIREWWDLKPGAPKPKANQQKQDDGRGLVLPGYKYLGPFNGLDKGEPVNEADAAALEHDKAYDKQLEQGDNPYLKYNHADAEFQERLQEDTSFGGNLGRAVFQAKKRVLEPLGLVEEGAKTAPGKKRPIESPDSSTGIGKKGQQPAKKKLNFGQTGDSESVPDPQPIGEPPAGPSGLGSGTMAAGGGAPMADNNEGADGVGNASGNWHCDSTWLGDRVITTSTRTWALPTYNNHLYKQISSQSGATNDNHFFGYSTPWGYFDFNRFHCHFSSRDWQRLINNNWGFRPKRLNFKLFNIQVKEVTQNEGTKTIANNLTSTIQVFTDSEYRLPYVLGSAHQGCLPPFPADVFMIPQYGYLTLNNGSQAVGRSSFYCLEYFPSQMLRTGNNFEFSYQFEDVPFHSSYAHSQSLDRLMNPLIDQYLYYLSRTQSTGGTAGTQQLLFSQAGPNNMSAQAKNWLPGPCYRQQRVSTTLSQNNNSNFAWTGATKYHLNGRDSLVNPGVAMATHKDDEERFFPSSGVLMFGKQGAGKDNVDYSSVMLTSEEEIKTTNPVATEQYGVVADNLQQQNAAPIVGAVNSQGALPGMVWQNRDVYLQGPIWAKIPHTDGNFHPSPLMGGFGLKHPPPQILIKNTPVPADPPTTFSQAKPASFITQYSTGQVSVEIEWELQKENSKRWNPEIQYTSNYYKSTNVDFAVNTEGTYSEPRPIGTRYLTRNL

SEQ ID NO: 4771 - protein, 731 aa, Adeno-associated virus
MAADGYLPDWLEDNLSEGIREWWDLKPGAPKPKANQQKQDDGRGLVLPGYKYLGPFNGLDKGEPVNEADAAALEHDKAYDKQLEQGDNPYLKYNHADAEFQERLQEDTSFGGNLGRAVFRAKKRVLEPLGLVEEGAKTAPGKKRPIESPDSSTGIGKKGQQPAKKKLNFGQTGDSESVPDPQPLGEPPAAPSGLGSGTMAAGGGAPMADNNEGADGVGNASGNWHCDSTWLGDRVITTSTRTWALPTYNNHLYKQISSQSGATNDNHFFGYSTPWGYFDFNRFHCHFSPRDWQRLINNNRGFRPRKLRFKLFNIQVKEVTTNDGVTTIANNLTSTIQVFSDSEYQLPYVLGSAHQGCLPPFPADVFMIPQYGYLTLNNGSQSVGRSSFYCLEYFPSQMLRTGNNFEFSYQFEDVPFHSSYAHSQSLDRLMNPLIDQYLYYLSRTQSTGGTAGTQQLLFSQAGPNNMSAQAKNWLPGPCYRQQRVSTTLSQNNNSNFAWTGATKYHLNGRDSLVNPGVAMATHKDDEERFFPSSGVLMFGKQGAGKDNVDYSSVMLTSEEEIKTTNPVATEQYGVVADNLQQQNAAPIVGAVNSQGALPGMAWQNRDVYLQGPIWAKIPHTDGNFHPSPLMGGFGLKHPPPQILIKNTPVPADPPTTFSQAKLASFITQYSTGQVSVEIEWELQKENSKRWNPEIQYTSNYYKSTNVDFAVNTEGTYSEPRPIGTRYLTRNL

SEQ ID NO: 4772 - protein, 738 aa, Adeno-associated virus
MAADGYLPDWLEDNLSEGIREWWDLKPGAPKPKANQQKQDDGRGLVLPGYKYLGPFNGLDKGEPVNEADAAALEHDKAYDKQLEQGDNPYLKYNHADAEFQERLQEDTSFGGNLGRAVFQAKKRVLEPLGLVEEGAKTAPGKKRPVEPSPQRSPDSSTGIGKTGQQPAKKRLNFGQTGDSESVPDPQPIGEPPAGPSGLGSGTMAAGGGAPMADNNEGADGVGSSSGNWHCDSTWLGDRVITTSTRTWALPTYNNHLYKQISNGTSGGSTNDNTYFGYSTPWGYFDFNRFHCHFSPRDWQRLINNNWGFRPKRLNFKLFNIQVKEVTQNEGTKTIANNLTSTIQVFTDSEYQLPYVLGSAHQGCLPPFPADVFMIPQYGYLTLNNGSQAVGRSSFYCLEYFPSQMLRTGNNFEFSYQFEDVPFHSSYAHSQSLDRLMNPLIDQYLYYLSRTQSTGGTAGTQQLLFSQAGPNNMSAQAKNWLPGPCYRQQRVSTTLSQNNNSNFAWTGATKYHLNGRDSLVNPGVAMATHKDDEERFFPSSGVLMFGKQGAGKDNVDYSSVMLTSEEEIKTTNPVATEQYGVVADNLQQQNAAPIVGAVNSQGALPGMVWQNRDVYLQGPIWAKIPHTDGNFHPSPLMGGFGLKHPPPQILIKNTPVPADPPTTFSQAKLASFITQYSTGQVSVEIEWELQKENSKRWNPEIQYTSNYYKSTNVDFAVNTEGTYSEPRPIGTRYLTRNL

SEQ ID NO: 4773 - protein, 735 aa, Adeno-associated virus
MAADGYLPDWLEDNLSEGIREWWDLKPGAPKPKANQQKQDDGRGLVLPGYKYLGPFNGLDKGEPVNEADAAALEHDKAYDKQLEQGDNPYLKYNHADAEFQERLQEDTSFGGNLGRAVFQAKKRVLEPLGLVEEGAKTAPGKKRPVEPSPQRSPDSSTGIGKTGQQPAKKRLNFGQTGDSESVPDPQPIGEPPAGPSGLGSGTMAAGGGAPMADNNEGADGVGSSSGNWHCDSTWLGDRVITTSTRTWALPTYNNHLYKQISNGTSGGSTNDNTYFGYSTPWGYFDFNRFHCHFSPRDWQRLINNNWGFRPRKLRFKLFNIQVKEVTTDDGVTTIANNLTSTIQVFSDSEYQLPYVLGSAHQGCLPPFPADVFMIPQYGYLTLNNGSQSVGRSSFYCLEYFPSQMLRTGNNFEFSYTFEEVPFHSSYAHSQSLDRLMNPLIDQYLYYLARTQSTTGSTRELQFHQAGPNTMAEQSKNWLPGPCYRQQRLSKNIDSNNNSNFAWTGATKYHLNGRNSLTNPGVAMATNKDDEDQFFPINGVLVFGKTGAANKTTLENVLMTSEEEIKTTNPVATEEYGVVSSNLQSSTAGPQTQTVNSQGALPGMVWQNRDVYLQGPIWAKIPHTDGNFHPSPLMDGFGLKHPPPQILIKNTPVPANPPEVFTPAKFASFITQYSTGQVSVEIEWELQKENSKRWNPEIQYTSNYAKSNNVEFAVNNEGVYTEPRPIGTRYLTRNL

SEQ ID NO: 4774 - DNA, 3128 bp, Adeno-associated virus
gaattcgccctttctacggctgcgtcaactggaccaatgagaactttcccttcaacgattgcgtcgacaagatggtgatctggtgggaggagggcaagatgacggccaaggtcgtggagtccgccaaggccattctcggcggcagcaaggtgcgcgtggaccaaaagtgcaagtcttccgcccagatcgatcccacccccgtgatcgtcacttccaacaccaacatgtgcgccgtgattgacgggaacagcaccaccttcgagcaccagcagccgttacaagaccggatgttcaaatttgaactcacccgccgtctggagcacgactttggcaaggtgacaaagcaggaagtcaaagagttcttccgctgggcgcaggatcacgtgaccgaggtggcgcatgagttctacgtcagaaagggtggagccaacaagagacccgcccccgatgacgcggataaaagcgagcccaagcgggcctgcccctcagtcgcggatccatcgacgtcagacgcggaaggagctccggtggactttgccgacaggtaccaaaacaaatgttctcgtcacgcgggcatgcttcagatgctgtttccctgcaagacatgcgagagaatgaatcagaatttcaacatttgcttcacgcacgggaccagagactgttcagaatgtttccccggcgtgtcagaatctcaaccggtcgtcagaaagaggacgtatcggaaactctgtgccattcatcatctgctagggcgggctcccgagattgcttgctcggcctgcgatctggtcaacgtggacctggatgactgtgtttctgagcaataaatgacttaaaccaggtatggctgccgatggttatcttccagattggctcgaggacaacctctctgagggcattcgcgagtggtgggacttgaaacctggagccccgaaacccaaagccaaccagcaaaagcaggacgacggccggggtctggtgcttcctggctacaagtacctcggacccttcaacggactcgacaagggggagcccgtcaacgcggcggacgcagcggccctcgagcacgacaaggcctacgaccagcagctcaaagcgggtgacaatccgtacctgcggtataaccacgccgacgccgagtttcaggagcgtctgcaagaagatacgtcttttgggggcaacctcgggcgagcagtcttccaggccaagaagcgggttctcgaacctctcggtctggttgaggaaggcgctaagacggctcctggaaagaagagaccggtagagccatcaccccagcgttctccagactcctctacgggcatcggcaagacaggccagcagcccgcgaaaaagagactcaactttgggcagactggcgactcagagtcagtgcccgaccctcaaccaatcggagaaccccccgcaggcccctctggtctgggatctggtacaatggctgcaggcggtggcgctccaatggcagacaataacgaaggcgccgacggagtgggtagttcctcaggaaattggcattgcgattccacatggctgggcgacagagtcatcaccaccagcacccgaacctgggccctccccacctacaacaaccacctctacaagcaaatctccaacgggacatcgggaggaagcaccaacgacaacacctacttcggctacagcaccccctgggggtattttgactttaacagattccactgccacttctcaccacgtgactggcagcgactcatcaacaacaactggggattccggcccaagagactcaacttcaagctcttcaacatccaggtcaaggaggtcacgcagaatgaaggcaccaagaccatcgccaataaccttaccagcacgattcaggtctttacggactcggaataccagctcccgtacgtcctcggctctgcgcaccagggctgcctgcctccgttcccggcggacgtcttcatgattcctcagtacgggtacctgactctgaacaacggcagtcaggccgtgggccgttcctccttctactgcctggagtactttccttctcaaatgctgagaacgggcaacaactttgagttcagctaccagtttgaggacgtgccttttcacagcagctacgcgcacagccaaagcctggaccggctgatgaaccccctcatcgaccagtacctgtactacctgtctcggactcagtccacgggaggtaccgcaggaactcagcagttgctattttctcaggccgggcctaataacatgtcggctcaggccaaaaactggctacccgggccctgctaccggcagcaacgcgtctccacgacactgtcgcaaaataacaacagcaactttgcttggaccggtgccaccaagtatcatctgaatggcagagactctctggtaaatcccggtgtcgctatggcaacgcacaaggacgacgaagagcgattttttccatccagcggagtcttgatgtttgggaaacagggagctggaaaagacaacgtggactatagcagcgttatgctaaccagtgaggaagaaatcaaaaccaccaacccagtggccacagaacagtacggcgtggtggccgataacctgcaacagcaaaacgccgctcctattgtaggggccgtcaacagtcaaggagccttacctggcatggtctggcagaaccgggacgtgtacctgcagggtcctatctgggccaagattcctcacacggacggcaactttcatccttcgccgctgatgggaggctttggactgaaacacccgcctcctcagatcctgattaagaatacacctgttcccgcggatcctccaactaccttcagtcaagccaagctggcgtcgttcatcacgcagtacagcaccggacaggtcagcgtggaaattgaatgggagctgcagaaagagaacagcaagcgctggaacccagagattcagtatacttccaactactacaaatctacaaatgtggactttgctgtcaatactgagggtacttattcagagcctcgccccattggcacccgttacctcacccgtaacctgtaattgcctgttaatcaataaaccggctaattcgtttcagttgaactttggtctctgcgaagggcgaattc

SEQ ID NO: 4775 - protein, 738 aa, Adeno-associated virus
MAADGYLPDWLEDNLSEGIREWWDLKPGAPKPKANQQKQDDGRGLVLPGYKYLGPFNGLDKGEPVNAADAAALEHDKAYDQQLKAGDNPYLRYNHADAEFQERLQEDTSFGGNLGRAVFQAKKRVLEPLGLVEEGAKTAPGKKRPVEPSPQRSPDSSTGIGKTGQQPAKKRLNFGQTGDSESVPDPQPIGEPPAGPSGLGSGTMAAGGGAPMADNNEGADGVGSSSGNWHCDSTWLGDRVITTSTRTWALPTYNNHLYKQISNGTSGGSTNDNTYFGYSTPWGYFDFNRFHCHFSPRDWQRLINNNWGFRPKRLNFKLFNIQVKEVTQNEGTKTIANNLTSTIQVFTDSEYQLPYVLGSAHQGCLPPFPADVFMIPQYGYLTLNNGSQAVGRSSFYCLEYFPSQMLRTGNNFEFSYQFEDVPFHSSYAHSQSLDRLMNPLIDQYLYYLSRTQSTGGTAGTQQLLFSQAGPNNMSAQAKNWLPGPCYRQQRVSTTLSQNNNSNFAWTGATKYHLNGRDSLVNPGVAMATHKDDEERFFPSSGVLMFGKQGAGKDNVDYSSVMLTSEEEIKTTNPVATEQYGVVADNLQQQNAAPIVGAVNSQGALPGMVWQNRDVYLQGPIWAKIPHTDGNFHPSPLMGGFGLKHPPPQILIKNTPVPADPPTTFSQAKLASFITQYSTGQVSVEIEWELQKENSKRWNPEIQYTSNYYKSTNVDFAVNTEGTYSEPRPIGTRYLTRNL

SEQ ID NO: 4776 - DNA, 3084 bp, Adeno-associated virus
gaattcgccctttctacggctgcatcaactggaccaatgagaactttcccttcaacgattgcgtcgacaagatggtgatctggtgggaggagggcaagatgacggccaaggtcgtggagtccgccaaggccattctcggcggcagcaaggtgcgcgtggaccaaaagtgcaagtcgtccgcccagatcgaccccacccccgtgatcgtcacctccaacaccaacatgtgcgccgtgattgacgggaacagcaccaccttcgagcaccagcagccgttgcaggaccggatgttcaagttcgaactcacccgccgtctggagcacgactttggcaaggtgaccaagcaggaagtcaaagagttcttccgctgggcgcaggatcacgtgaccgaggtggcgcatgagttctacgtcagaaagggcggagccagcaaaagacccgcccccgatgacgcggatataagcgagcccaagcgggcctgcccctcagtcgcggatccatcgacgtcagacgcggaaggagctccggtggactttgccgacaggtaccaaaacaaatgttctcgtcacgcgggcatgcttcagatgctgtttccctgcaaaacgtgcgagaaaatgaatcagaatttcaacatttgcttcacgcacggggtcagagactgctcagaatgtttccccggtgcatcagaatctcaaccggtcgtcagaaaaaaaacgtatcagaaactgtgtgccattcatcatctgctggggcgggcacccgagattgcttgctcggcctgcgatctggtcaacgtggacctggacgactgtgtttctgagcaataaatgacttaaaccaggtatggctgccgatggttatcttccagattggcttgaggacaacctctctgagggcattcgcgagtggtgggacctgaaacctggagccccgaaacccaaagccaaccagcaaaagcaggacgacggccggggtctggtgcttcctggctacaagtacctcggacccttcaacggactcgacaagggggagcccgtcaacgcggcggacgcagcggccctcgagcacgacaaggcctacgaccagcagctcaaagcgggtgacaatccgtacctgcggtataaccacgccgacgccgagtttcaggagcgtctgcaagaagatacgtcttttgggggcaacctcgggcgagcagtcttccaggccaagaagcgggttctcgaacctctcggtctggttgaggaaggcgctaagacggctcctggaaagaagagaccggtagagccatcacctcagcgttcccccgactcctccacgggcatcggcaagaaaggccaccagcccgcgagaaagagactgaactttgggcagactggcgactcggagtcagtccccgaccctcaaccaatcggagaaccaccagcaggcccctctggtctgggatctggtacaatggctgcaggcggtggcgctccaatggcagacaataacgaaggcgccgacggagtgggtagttcctcaggaaattggcattgcgattccacatggctgggcgacagagtcatcaccaccagcacccgaacctgggccctgcccacctacaacaaccatctctacaagcaaatctccaacgggacatcgggaggaagcactaacgacaacacctactttggctacagcaccccctgggggtattttgacttcaacagattccactgccacttctcaccacgtgactggcagcgactcatcaacaataactggggattccggcccaagagactcaacttcaagctcttcaacatccaggtcaaggaggtcacgcagaatgaaggcaccaagaccatcgccaataaccttaccagcacgattcaggtgtttacggactcggaataccagctcccgtacgtccccggctctgcgcaccagggctgcctccctccgttcccggcggacgtcttcatgattcctcagtacgggtatctgaccctaaacaatggcagtcaggctgtgggccgttcctccttctactgcctggaatacttcccttctcaaatgctgaggacgggcaacaactttgaattcagctacaccttcgaggacgtgcctttccacagcagctacgcgcacagccagagcctggaccggctgatgaaccctctcatcgaccagtacctgtattacttatccagaactcagtccacaggaggaactcaaggtactcagcaattgttattttctcaagccgggcccgcaaacatgtcggctcaggccaagaactggctacctggaccgtgttaccgtcagcaacgagtttccacgacactgtcgcaaaacaacaacagcaattttgcttggaccggtgccaccaagtatcacctgaatggcagagactccctggttaatcccggcgttgccatggctacccacaaggacgacgaggagcgcttcttcccgtcaagcggagttctaatgtttggcaagcagggggctggaaaagacaatgtggactacagcagcgtgatgctcaccagcgaagaagaaattaaaactactaacccagtggctacagagcagtatggtgtggtggcagacaacctgcagcagaccaacggagctcccattgtgggaactgtcaacagccagggggccttacctggtatggtctggcaaaaccgggacgtgtacctgcagggccccatctgggccaaaattcctcacacggacggcaactttcatccttcgccgctgatgggaggctttggactgaaacacccgcctcctcagatcctggtgaaaaacactcctgttcctgcggatcctccgaccaccttcagccaggccaagctggcttcttttatcacgcagtacagcaccggacaggtcagcgtggaaatcgaatgggagctgcagaaagaaaacagcaagcgctggaacccagagattcagtatacttccaactactacaaatctacaaatgtggactttgctgtcaatactgagggtacttattcagagcctcgccccattggcactcgttatctcacccgtaatctgtaattgcttgttaatcaataaaccggt

SEQ ID NO: 4777 - protein, 738 aa, Adeno-associated virus
MAADGYLPDWLEDNLSEGIREWWDLKPGAPKPKANQQKQDDGRGLVLPGYKYLGPFNGLDKGEPVNAADAAALEHDKAYDQQLKAGDNPYLRYNHADAEFQERLQEDTSFGGNLGRAVFQAKKRVLEPLGLVEEGAKTAPGKKRPVEPSPQRSPDSSTGIGKKGHQPARKRLNFGQTGDSESVPDPQPIGEPPAGPSGLGSGTMAAGGGAPMADNNEGADGVGSSSGNWHCDSTWLGDRVITTSTRTWALPTYNNHLYKQISNGTSGGSTNDNTYFGYSTPWGYFDFNRFHCHFSPRDWQRLINNNWGFRPKRLNFKLFNIQVKEVTQNEGTKTIANNLTSTIQVFTDSEYQLPYVPGSAHQGCLPPFPADVFMIPQYGYLTLNNGSQAVGRSSFYCLEYFPSQMLRTGNNFEFSYTFEDVPFHSSYAHSQSLDRLMNPLIDQYLYYLSRTQSTGGTQGTQQLLFSQAGPANMSAQAKNWLPGPCYRQQRVSTTLSQNNNSNFAWTGATKYHLNGRDSLVNPGVAMATHKDDEERFFPSSGVLMFGKQGAGKDNVDYSSVMLTSEEEIKTTNPVATEQYGVVADNLQQTNGAPIVGTVNSQGALPGMVWQNRDVYLQGPIWAKIPHTDGNFHPSPLMGGFGLKHPPPQILVKNTPVPADPPTTFSQAKLASFITQYSTGQVSVEIEWELQKENSKRWNPEIQYTSNYYKSTNVDFAVNTEGTYSEPRPIGTRYLTRNL

SEQ ID NO: 4778 - DNA, 3123 bp, Adeno-associated virus
gaattcgcccttggctgcgtcaactggaccaatgagaactttcccttcaacgattgcgtcgacaagatggtgatctggtgggaggagggcaagatgacggccaaggtcgtggagtccgccaaggccattctcggcggcagcaaggtgcgcgtggaccaaaagtgcaagtcgtccgcccagatcgaccccacccccgtgatcgtcacctccaacaccaacatgtgcgccgtgattgacgggaacagcaccaccttcgagcaccagcagccgttgcaggaccggatgttcaagttcgaactcacccgccgtctggagcacgactttggcaaggtgaccaagcaggaagtcaaagagttcttccgctgggcgcaggatcacgtgaccgaggtggcgcatgagttctacgtcagaaagggcggagccagcaaaagacccgcccccgatgacgcggatataagcgagcccaagcgggcctgcccctcagtcgcggatccatcgacgtcagacgcggaaggagctccggtggactttgccgacaggtaccaaaacaaatgttctcgtcacgcgggcatgctccagatgctgtttccctgcaaaacgtgcgagagaatgaatcagaatttcaacatttgcttcacgcacggggtcagagactgctcagaatgtttccccggtgcatcagaatctcaaccggtcgtcagaaaaaaaacgtatcagaaactgtgtgccattcatcatctgctggggcgggcacccgagattgcttgctcggcctgcgatctggtcaacgtggacctggacgactgtgtttctgagcaataaatgacttaaaccaggtatggctgccgatggttatcttccagattggcttgaggacaacctctctgagggcattcgcgagtggtgggacctgaaacctggagccccgaaacccaaagccaaccagcaaaagcaggacgacggccggggtctggtgcttcctggctacaagtacctcggacccttcaacggactcgacaagggggagcccgtcaacgcggcggacgcagcggccctcgagcacgacaaggcctacgaccagcagctcaaagcgggtgacaatccgtacctgcggtataaccacgccgacgccgagtttcaggagcgtctgcaagaagatacgtcttttgggggcaacctcgggcgagcagtcttccaggccaagaagcgggttctcgaacctctcggtctggttgaggaaggcgctaagacggctcctggaaagaagagaccggtagagccatcacctcagcgttcccccgactcctccacgggcatcggcaagaaaggccaccagcccgcgagaaagagactgaactttgggcagactggcgactcggagtcagtccccgaccctcaaccaatcggagaaccaccagcaggcccctctggtctgggatctggtacaatggctgcaggcggtggcgctccaatggcagacaataacgaaggcgccgacggagtgggtagttcctcaggaaattggcattgcgattccacatggctgggcgacagagtcatcaccaccagcacccgaacctgggccctgcccacctacaacaaccatctctacaagcaaatctccaacgggacatcgggaggaagcactaacgacaacacctactttggctacagcaccccctgggggtattttgacttcaacagattccactgccacttctcaccacgtgactggcagcgactcatcaacaataactggggattccggcccaagagactcaacttcaagctcttcaacatccaggtcaaggaggtcacgcagaatgaaggcaccaagaccatcgccaataaccttaccagcacgattcaggtgtttacggactcggaataccagctcccgtacgtcctcggctctgcgcaccagggctgcctccctccgttcccggcggacgtcttcatgattcctcagtacgggtatctgaccctaaacaatggcagtcaggctgtgggccgttcctccttctactgcctggaatacttcccttctcaaatgctgaggacgggcaacaactttgaattcagctacaccttcgaggacgtgcctttccacagcagctacgcgcacagccagagcctggaccggctgatgaaccctctcatcgaccagtacctgtattacttatccagaactcagtccacaggaggaactcaaggtactcagcaattgttattttctcaagccgggcccgcaaacatgtcggctcaggccaagaactggctacctggaccgtgttaccgtcagcaacgagtttccacgacactgtcgcaaaacaacaacagcaattttgcttggaccggtgccaccaagtatcacctgaatggcagagactccctggttaatcccggcgttgccatggctacccacaaggacgacgaggagcgcttcttcccgtcaagcggagttctaatgtttggcaagcagggggctggaaaagacaatgtggactacagcagcgtgatgctcaccagcgaagaagaaattaaaactactaacccagtggctacagagcagtatggtgtggtggcagacaacctgcagcagaccaacggagctcccattgtgggaactgtcaacagccagggggccttacctggtatggtctggcaaaaccgggacgtgtacctgcagggccccatctgggccaaaattcctcacacggacggcaactttcatccttcgccgctgatgggaggctttggactgaaacacccgcctcctcagatcctggtgaaaaacactcctgttcctgcggatcctccgaccaccttcagccaggccaagctggcttcttttatcacgcagtacagcaccggacaggtcagcgtggaaatcgaatgggagctgcagaaagaaaacagcaagcgctggaacccagagattcagtatacttccaactactacaaatctacaaatgtggactttgctgtcaatactgagggtacttattcagagcctcgccccattggcactcgttatctcacccgtaatctgtaattgcttgttaatcaataaaccggttaattcgtttcagttgaactttggtctctgcgaagggcgaattc

SEQ ID NO: 4779 - protein, 738 aa, Adeno-associated virus
MAADGYLPDWLEDNLSEGIREWWDLKPGAPKPKANQQKQDDGRGLVLPGYKYLGPFNGLDKGEPVNAADAAALEHDKAYDQQLKAGDNPYLRYNHADAEFQERLQEDTSFGGNLGRAVFQAKKRVLEPLGLVEEGAKTAPGKKRPVEPSPQRSPDSSTGIGKKGHQPARKRLNFGQTGDSESVPDPQPIGEPPAGPSGLGSGTMAAGGGAPMADNNEGADGVGSSSGNWHCDSTWLGDRVITTSTRTWALPTYNNHLYKQISNGTSGGSTNDNTYFGYSTPWGYFDFNRFHCHFSPRDWQRLINNNWGFRPKRLNFKLFNIQVKEVTQNEGTKTIANNLTSTIQVFTDSEYQLPYVLGSAHQGCLPPFPADVFMIPQYGYLTLNNGSQAVGRSSFYCLEYFPSQMLRTGNNFEFSYTFEDVPFHSSYAHSQSLDRLMNPLIDQYLYYLSRTQSTGGTQGTQQLLFSQAGPANMSAQAKNWLPGPCYRQQRVSTTLSQNNNSNFAWTGATKYHLNGRDSLVNPGVAMATHKDDEERFFPSSGVLMFGKQGAGKDNVDYSSVMLTSEEEIKTTNPVATEQYGVVADNLQQTNGAPIVGTVNSQGALPGMVWQNRDVYLQGPIWAKIPHTDGNFHPSPLMGGFGLKHPPPQILVKNTPVPADPPTTFSQAKLASFITQYSTGQVSVEIEWELQKENSKRWNPEIQYTSNYYKSTNVDFAVNTEGTYSEPRPIGTRYLTRNL

SEQ ID NO: 4780 - DNA, 3122 bp, Adeno-associated virus
gaattcgccctttctacggctgcgtcaactggaccaatgagaactttcccttcaacgattgcgtcgacaagatggtgatctggtgggaggagggcaagatgacggccaaggtcgtggagtccgccaaggccattctcggcggcagcaaggtgcgtgtggaccaaaagtgcaagtcttccgcccagatcgatcccacccccgtgatcgtcacctccaacaccaacatgtgcgccgtgattgacgggaacagcgccaccttcgagcaccagcagccgttgcaggaccggatgttcaaatttgaactcacccgccgtctggagcatgactttggcaaggtgacgaagcaggaagtcaaagagttcttccgctgggcgcaggatcacgtgaccgaggtggcgcatgagttccacgtcagaaagggtggagccaacaagagacccgcccccgatgacgcggatataagcgagcccaagcgggcctgcccctcagtcgcggatccatcgacgtcagacgcggaaggagctccggtggactttgccgacaggtaccaaaacaaatgttctcgtcacgcgggcatgcttcagatgctgtttccctgcaagacatgcgagagaatgaatcagaatttcaacatttgcttcacgcacgggaccagagactgttcagaatgtttccccggcgtgtcagaatctcaaccggtcgtcagaaagaggacgtatcggaaactctgtgcgattcatcatctgctggggcgggctcccgagattgcttgctcggcctgcgatctggtcaacgtggacctggatgactgtgtttctgagcaataaatgacttaaaccaggtatggctgccgatggttatcttccagattggctcgaggacaacctctctgagggcattcgcgagtggtgggacttgaaacctggagccccgaaacccaaagccaaccagcaaaagcaggacgacggccggggtctggtgcttcctggctacaagtacctcggacccttcaacggactcgacaagggggagcccgtcaacgcggcggacgcagcggccctcgagcacgacaaagcctacgaccagcagctcaaagcgggtgacaatccgtacctgcggtataatcacgccgacgccgagtttcaggagcgtctgcaagaagatacgtcttttgggggcaacctcgggcgagcagtcttccaggccaagaagcgggttctcgaacctctcggtctggttgaggaaggcgctaagacggctcctggaaagaagagactggtagagcagtcgccacaagagccagactcctcctcgggcatcggcaagacaggccagcagcccgctaaaaagagactcaattttggtcagactggcgactcagagtcagtccccgacccacaacctctcggagaacctccagcagccccctcaggtctgggacctaatacaatggcttcaggcggtggcgctccaatggcagacaataacgaaggcgccgacggagtgggtaattcctcgggaaattggcattgcgattccacatggctgggggacagagtcatcaccaccagcacccgaacctgggccctgcccacctacaacaaccacctctacaagcaaatctccaacggcacctcgggaggaagcaccaacgacaacacctattttggctacagcaccccctgggggtattttgacttcaacagattccactgtcacttttcaccacgtgactggcaacgactcatcaacaacaattggggattccggcccaaaagactcaacttcaagctgttcaacatccaggtcaaggaagtcacgacgaacgaaggcaccaagaccatcgccaataatctcaccagcaccgtgcaggtctttacggactcggagtaccagttaccgtacgtgctaggatccgctcaccagggatgtctgcctccgttcccggcggacgtcttcacggttcctcagtacggctatttaactttaaacaatggaagccaagccctgggacgttcctccttctactgtctggagtatttcccatcgcagatgctgagaaccggcaacaactttcagttcagctacaccttcgaggacgtgcctttccacagcagctacgcgcacagccagagcctggacaggctgatgaatcccctcatcgaccagtacctgtactacctggtcagaacgcaaacgactggaactggagggacgcagactctggcattcagccaagcgggtcctagctcaatggccaaccaggctagaaattgggtgcccggaccttgctaccggcagcagcgcgtctccacgacaaccaaccagaacaacaacagcaactttgcctggacgggagctgccaagtttaagctgaacggccgagactctctaatgaatccgggcgtggcaatggcttcccacaaggatgacgacgaccgcttcttcccttcgagcggggtcctgatttttggcaagcaaggagccgggaacgatggagtggattacagccaagtgctgattacagatgaggaagaaatcaaggctaccaaccccgtggccacagaagaatatggagcagtggccatcaacaaccaggccgccaatacgcaggcgcagaccggactcgtgcacaaccagggggtgattcccggcatggtgtggcagaatagagacgtgtacctgcagggtcccatctgggccaaaattcctcacacggacggcaactttcacccgtctcccctgatgggcggctttggactgaagcacccgcctcctcaaattctcatcaagaacacaccggttccagcggacccgccgcttaccttcaaccaggccaagctgaactctttcatcacgcagtacagcaccggacaggtcagcgtggaaatcgagtgggagctgcagaaagaaaacagcaaacgctggaatccagagattcaatacacttccaactactacaaatctacaaatgtggactttgctgtcaacacggaaggagtttatagcgagcctcgccccattggcacccgttacctcacccgcaacctgtaattacatgttaatcaataaaccggttaattcgtttcagttgaactttggtctctgcgaagggcgaattc

SEQ ID NO: 4781 - protein, 736 aa, Adeno-associated virus
MAADGYLPDWLEDNLSEGIREWWDLKPGAPKPKANQQKQDDGRGLVLPGYKYLGPFNGLDKGEPVNAADAAALEHDKAYDQQLKAGDNPYLRYNHADAEFQERLQEDTSFGGNLGRAVFQAKKRVLEPLGLVEEGAKTAPGKKRLVEQSPQEPDSSSGIGKTGQQPAKKRLNFGQTGDSESVPDPQPLGEPPAAPSGLGPNTMASGGGAPMADNNEGADGVGNSSGNWHCDSTWLGDRVITTSTRTWALPTYNNHLYKQISNGTSGGSTNDNTYFGYSTPWGYFDFNRFHCHFSPRDWQRLINNNWGFRPKRLNFKLFNIQVKEVTTNEGTKTIANNLTSTVQVFTDSEYQLPYVLGSAHQGCLPPFPADVFTVPQYGYLTLNNGSQALGRSSFYCLEYFPSQMLRTGNNFQFSYTFEDVPFHSSYAHSQSLDRLMNPLIDQYLYYLVRTQTTGTGGTQTLAFSQAGPSSMANQARNWVPGPCYRQQRVSTTTNQNNNSNFAWTGAAKFKLNGRDSLMNPGVAMASHKDDDDRFFPSSGVLIFGKQGAGNDGVDYSQVLITDEEEIKATNPVATEEYGAVAINNQAANTQAQTGLVHNQGVIPGMVWQNRDVYLQGPIWAKIPHTDGNFHPSPLMGGFGLKHPPPQILIKNTPVPADPPLTFNQAKLNSFITQYSTGQVSVEIEWELQKENSKRWNPEIQYTSNYYKSTNVDFAVNTEGVYSEPRPIGTRYLTRNL

SEQ ID NO: 4782 - DNA, 3117 bp, Adeno-associated virus
gaattcgcccttggctgcgtcaactggaccaatgagaactttcccttcaacgattgcgtcgacaagatggtgatctggtgggaggagggcaagatgacggccaaggtcgtggagtccgccaaggccattctcggcggcagcaaggtgcgtgtggaccaaaagtgcaagtcttccgcccagatcgatcccacccccgtgatcgtcacctccaacaccaacatgtgcgccgtgattgacgggaacagcaccaccttcgagcaccagcagccgttgcaggaccggatgttcaaatttgaactcacccgccgtctggagcatgactttggcaaggtgacgaagcaggaagtcaaagagttcttccgctgggcgcaggatcacgtgaccgaggtggcgcatgagttccacgtcagaaagggtggagccaacaagagacccgcccccgatgacgcggatataagcgagcccaagcgggcctgcccctcagtcgcggatccatcgacgtcagacgcggaaggagctccggtggactttgccgacaggtaccaaaacaaatgttctcgtcacgcgggcatgcttcagatgctgtttccctgcaagacatgcgagagaatgaatcagaatttcaacatttgcttcacgcacgggaccagagactgttcagaatgtttccccggcgtgtcagaatctcaaccggtcgtcagaaagaggacgtatcggaaactctgtgcgattcatcatctgctggggcgggctcccgagattgcttgctcggcctgcgatctggtcaacgtggacctggatgactgtgtttctgagcaataaatgacttaaaccaggtatggctgccgatggttatcttccagattggctcgaggacaacctctctgagggcattcgcgagtggtgggacttgaaacctggagccccgaaacccaaagccaaccagcaaaagcaggacgacggccggggtctggtgcttcctggctacaagtacctcggacccttcaacggactcgacaagggggagcccgtcaacgcggcggacgcagcggccctcgagcacgacaaagcctacgaccagcagctcaaagcgggtgacaatccgtacctgcggtataatcacgccgacgccgagtttcaggagcgtctgcaagaagatacgtcttttgggggcaacctcgggcgagcagtcttccaggccaagaagcgggttctcgaacctctcggtctggttgaggaaggcgctaagacggctcctggaaagaagagaccggtagagcagtcgccacaagagccagactcctcctcgggcatcggcaagacaggccagcagcccgctaaaaagagactcaattttggtcagactggcgactcagagtcagtccccgacccacaacctctcggagaacctccagcagccccctcaggtctgggacctaatacaatggcttcaggcggtggcgctccaatggcagacaataacgaaggcgccgacggagtgggtaattcctcgggaaattggcattgcgattccacatggctgggggacagagtcatcaccaccagcacccgaacctgggccctgcccacctacaacaaccacctctacaagcaaatctccaacggcacctcgggaggaagcaccaacgacaacacctattttggctacagcaccccctgggggtattttgacttcaacagattccactgtcacttttcaccacgtgactggcaacgactcatcaacaacaattggggattccggcccaaaagactcaacttcaagctgttcaacatccaggtcaaggaagtcacgacgaacgaaggcaccaagaccatcgccaataatctcaccagcaccgtgcgggtctttacggactcggagtaccagttaccgtacgtgctaggatccgctcaccagggatgtctgcctccgttcccggcggacgtcttcatggttcctcagtacggctatttaactttaaacaatggaagccaagccctgggacgttcctccttctactgtctggagtatttcccatcgcagatgctgagaaccggcaacaactttcagttcagctacaccttcgaggacgtgcctttccacagcagctacgcgcacagccagagcctggacaggctgatgaatcccctcatcgaccagtacctgtactacctggtcagaacgcaaacgactggaactggagggacgcagactctggcattcagccaagcgggtcctagctcaatggccaaccaggctagaaattgggtgcccggaccttgctaccggcagcagcgcgtctccacgacaaccaaccagagcaacaacagcaactttgcctggacgggagctgccaagtttaagctgaacggccgagactctctaatgaatccgggcgtggcaatggcttcccacaaggatgacgacgaccgcttcttcccttcgagcggggtcctgatttttggcaagcaaggagccgggaacgatggagtggattacagccaagtgctgattacagatgaggaagaaatcaaggctaccaaccccgtggccacagaagaatatggagcagtggccatcaacaaccaggccgccaatacgcaggcgcagaccggactcgtgcacaaccagggggtgattcccggcatggtgtggcagaatagagacgtgtacctgcagggtcccatctgggccaaaattcctcacacggacggcaactttcacccgtctcccctgatgggcggctttggactgaagcacccgcctcctcaaattctcatcaagaacacaccggttccagcggacccgccgcttaccttcaaccaggccaagctgaactctttcatcacgcagtacagcaccggacaggtcagcgtggaaatcgagtgggagctgcagaaagaaaacagcaaacgctggaatccagagattcaatacacttccaactactacaaatctacaaatgtggactttgctgtcaacacggaaggagtttatagcgagcctcgccccattggcacccgttacctcacccgcaacctgtaattacatgttaatcaataaaccggttaattcgtttcagttgaactttggtctctgcgaagggcgaattc

SEQ ID NO: 4783 - protein, 736 aa, Adeno-associated virus
MAADGYLPDWLEDNLSEGIREWWDLKPGAPKPKANQQKQDDGRGLVLPGYKYLGPFNGLDKGEPVNAADAAALEHDKAYDQQLKAGDNPYLRYNHADAEFQERLQEDTSFGGNLGRAVFQAKKRVLEPLGLVEEGAKTAPGKKRPVEQSPQEPDSSSGIGKTGQQPAKKRLNFGQTGDSESVPDPQPLGEPPAAPSGLGPNTMASGGGAPMADNNEGADGVGNSSGNWHCDSTWLGDRVITTSTRTWALPTYNNHLYKQISNGTSGGSTNDNTYFGYSTPWGYFDFNRFHCHFSPRDWQRLINNNWGFRPKRLNFKLFNIQVKEVTTNEGTKTIANNLTSTVRVFTDSEYQLPYVLGSAHQGCLPPFPADVFMVPQYGYLTLNNGSQALGRSSFYCLEYFPSQMLRTGNNFQFSYTFEDVPFHSSYAHSQSLDRLMNPLIDQYLYYLVRTQTTGTGGTQTLAFSQAGPSSMANQARNWVPGPCYRQQRVSTTTNQSNNSNFAWTGAAKFKLNGRDSLMNPGVAMASHKDDDDRFFPSSGVLIFGKQGAGNDGVDYSQVLITDEEEIKATNPVATEEYGAVAINNQAANTQAQTGLVHNQGVIPGMVWQNRDVYLQGPIWAKIPHTDGNFHPSPLMGGFGLKHPPPQILIKNTPVPADPPLTFNQAKLNSFITQYSTGQVSVEIEWELQKENSKRWNPEIQYTSNYYKSTNVDFAVNTEGVYSEPRPIGTRYLTRNL

SEQ ID NO: 4784 - DNA, 3121 bp, Adeno-associated virus
gaattcgcccttctacggctgcgtcaactggaccaatgagaactttcccttcaacgattgcgtcgacaagatggtgatctggtgggaggagggcaagatgacggccaaggtcgtggagtccgccaaggccattctcggcggcagcaaggtgcgtgtggaccaaaagtgcaagtcttccgcccagatcgatcccacccccgtgatcgtcacctccaacaccaacatgtgcgccgtgattgacgggaacagcaccaccttcgagcaccagcagccgttgcaggaccggatgttcaaatttgaactcacccgccgtctggagcatgactttggcaaggtgacgaagcaggaagtcaaagagttcttccgctgggcgcaggatcacgtgaccgaggtggcgcatgagttccacgtcagaaagggtggcgccaacaagagacccgcccccgatgacgcggatataagcgagcccaagcgggcctgcccctcagtcgcggatccatcgacgtcagacgcggaaggagctccggtggactttgccgacaggtaccaaaacaaatgttctcgtcacgcgggcatgcttcagatgctgtttccctgcaagacatgcgagagaatgaatcagaatttcaacatttgcttcacgcacgggaccagagactgttcagaatgtttccccggcgtgtcagaatctcaaccggtcgtcagaaagaggacgtatcggaaactctgtgcgattcatcatctgctggggcgggctcccgagattgcttgctcggcctgcgatctggtcaacgtggacctggatgactgtgtttctgagcaataaatgacttaaaccaggtatggctgccgatggttatcttccagattggctcgaggacaacctctctgagggcattcgcgagtggtgggacttgaaacctggagccccgaaacccaaagccaaccagcaaaagcaggacgacggccggggtctggtgcttcctggctacaagtacctcggacccttcaacggactcgacaagggggagcccgtcaacgcggcggacgcagcggccctcgagcacgacaaagcctacgaccagcagctcaaagcgggtgacaatccgtacctgcggtataatcacgccgacgccgagtttcaggagcgtctgcaagaagatacgtcctttgggggcaacctcgggcgagcagtcttccaggccaagaagcgggttctcgaacctctcggtctggttgaggaaggcgctaagacggctcctggaaagaagagaccggtagagcagtcgccacaagagccagactcctcctcgggcatcggcaagacaggccagcagcccgctaaaaagagactcaattttggtcagactggcgactcagagtcagtccccgacccacaacctctcggagaacctccagcagccccctcaggtctgggacctaatacaatggcttcaggcggtggcgctccaatggcagacaataacgaaggcgccgacggagtgggtaattcctcgggaaattggcattgcgattccacatggctgggggacagagtcatcaccaccagcacccgaacctgggccctgcccacctacaacaaccacctctacaagcaaatctccaacggcacctcgggaggaagcaccaacgacaacacctattttggctacagcaccccctgggggtattttgacttcaacagattccactgtcacttttcaccacgtgactggcaacgactcatcaacaacaattggggattccggcccaaaagactcaacttcaagctgttcaacatccaggtcaaggaagtcacgacgaacgaaggcaccaagaccatcgccaataatctcaccagcaccgtgcaggtctttacggacttggagtaccagttaccgtacgtgctaggatccgctcaccagggatgtctgcctccgttcccggcggacgtcttcatggttcctcagtacggctatttaactttaaacaatggaagccaagccctgggacgttcctccttctactgtctggagtatttcccatcgcagatgccgagaaccggcaacaactttcagttcagctacaccttcgaggacgtgcctttccacagcagctacgcgcacagccagagcctggacaggctgatgaatcccctcatcgaccagtacctgtactacctggtcagaacgcaaacgactggaactggagggacgcagactctggcattcagccaagcgggtcctagctcaatggccaaccaggctagaaattgggtgcccggaccttgctaccggcagcagcgcgtctccacgacaaccaaccagaacaacaacagcaactttgcctggacgggagctgccaagtttaagctgaacggccgagactctctaatgaatccgggcgtggcaatggcttcccacaaggatgacgacgaccgcttcttcccttcgagcggggtcctgatttttggcaagcaaggagccgggaacgatggagtggattacagccaagtgctgattacagatgaggaagaaatcaaggctaccaaccccgtggccacagaagaatatggagcagtggccatcaacaaccaggccgccaatacgcaggcgcagaccggactcgtgcacaaccagggggtgattcccggcatggtgtggcagaatagagacgtgtacctgcagggtcccatctgggccaaaattcctcacacggacggcaactttcacccgtctcccctgatgggcggctttggactgaagcacccgcctcctcaaattctcatcaagaacacaccggttccagcggacccgccgcttaccttcaaccaggccaagctgaactctttcatcacgcagtacagcaccggacaggtcagcgtggaaatcgagtgggagctgcagaaagaaaacagcaaacgctggaatccagagattcaatacacttccaactactacaaatctacaaatgtggactttgctgtcaacacggaaggagtttatagcgagcctcgccccattggcacccgttacctcacccgcaacctgtaattacatgttaatcaataaaccggttaattcgtttcagttgaactttggtctctgcgaagggcgaattc

SEQ ID NO: 4785 - protein, 736 aa, Adeno-associated virus
MAADGYLPDWLEDNLSEGIREWWDLKPGAPKPKANQQKQDDGRGLVLPGYKYLGPFNGLDKGEPVNAADAAALEHDKAYDQQLKAGDNPYLRYNHADAEFQERLQEDTSFGGNLGRAVFQAKKRVLEPLGLVEEGAKTAPGKKRPVEQSPQEPDSSSGIGKTGQQPAKKRLNFGQTGDSESVPDPQPLGEPPAAPSGLGPNTMASGGGAPMADNNEGADGVGNSSGNWHCDSTWLGDRVITTSTRTWALPTYNNHLYKQISNGTSGGSTNDNTYFGYSTPWGYFDFNRFHCHFSPRDWQRLINNNWGFRPKRLNFKLFNIQVKEVTTNEGTKTIANNLTSTVQVFTDLEYQLPYVLGSAHQGCLPPFPADVFMVPQYGYLTLNNGSQALGRSSFYCLEYFPSQMPRTGNNFQFSYTFEDVPFHSSYAHSQSLDRLMNPLIDQYLYYLVRTQTTGTGGTQTLAFSQAGPSSMANQARNWVPGPCYRQQRVSTTTNQNNNSNFAWTGAAKFKLNGRDSLMNPGVAMASHKDDDDRFFPSSGVLIFGKQGAGNDGVDYSQVLITDEEEIKATNPVATEEYGAVAINNQAANTQAQTGLVHNQGVIPGMVWQNRDVYLQGPIWAKIPHTDGNFHPSPLMGGFGLKHPPPQILIKNTPVPADPPLTFNQAKLNSFITQYSTGQVSVEIEWELQKENSKRWNPEIQYTSNYYKSTNVDFAVNTEGVYSEPRPIGTRYLTRNL

SEQ ID NO: 4786 - DNA, 3122 bp, Adeno-associated virus
gaattcgccctttctacggctgcgtcaactggaccaatgagaactttcccttcaacgattgcgtcgacaagatggtgatctggtgggaggagggcaagatgacggccaaggtcgtggagtccgccaaggccattctcggcggcagcaaggtgcgtgtggaccaaaagtgcaagtcttccgcccagatcgatcccacccccgtgatcgtcacctccaacaccaacatgtgcgccgtgattgacgggaacagcaccaccttcgagcaccagcagccgttgcaggaccggatgttcaaatttgaactcacccgccgtctggagcatgactttggcaaggtgacgaagcaggaagtcaaagggttcttccgctgggcgcaggatcacgtgaccgaggtggcgcatgagttccacgtgcgagcccaagcgggcctgcccctcagtcgcggatccatcgacgtcagaccagaaagggtggagccaacaagagacccgcccccgatgacgcggatataagcggaaggagctccggtggactttgccgacaggtaccaaaacaaatgttctcgtcacgcgggcatgcttcagatgctgtttccctgcaagacatgcgagagaatgaatcagaatttcaacatttgcttcacgcacgggaccagagactgttcagaatgtttccccggcgtgtcagaatctcaaccggtcgtcagaaagaggacgtatcggaaactctgtgcgattcatcatctgctggggcgggctcccgagattgcttgctcggcctgcgatctggtcaacgtggacctggatgactgtgtttctgagcaataaatgacttaaaccaggtatggctgccgatggttatcttccagattggctcgaggacaacctctctgagggcattcgcgagtggtgggacttgaaacctggagccccgaaacccaaagccaaccagcaaaagcaggacgacggccggggtctggtgcttcctggctacaagtacctcggacccttcaacggactcgacaagggggagcccgtcaacgcggcggacgcagcggccctcgagcacgacaaagcctacgaccagcagctcaaagcgggtgacaatccgtacctgcggtataatcacgccgacgccgagtttcaggagcgtctgcaagaagatacgtcttttgggggcaacctcgggcgagcagtcttccaggccaagaagcgggttctcgaacctctcggtctggttgaggaaggcgctaagacggctcctggaaagaagagaccggtagagcagtcgccacaagagccagactcctcctcgggcatcggcaagacaggccagcagcccgctaaaaagagactcaattttggtcagactggcgactcagagtcagtccccgacccacaacctctcggagaacctccagcagccccctcaggtctgggacctaatacaatggcttcaggcggtggcgctccaatggcagacaataacgaaggcgccgacggagtgggtaattcctcgggaaattggcattgcgattccacatggctgggggacagagtcatcaccaccagcacccgaacctgggccctgcccacctacaacaaccacctctacaagcaaatctccaacggcacctcgggaggaagcaccaacgacaacacctattttggctacagcaccccctgggggtattttgacttcaacagattccactgtcacttttcaccacgtgactggcaacgactcatcaacaacaattggggattccggcccaaaagactcaacttcaagctgttcaacatccaggtcaaggaagtcacgacgaacgaaggcaccaagaccatcgccaataatctcaccagcaccgtgcaggtctttacggactcggagtaccagttaccgtacgtgctaggatccgctcaccagggatgtctgcctccgttcccggcggacgtcttcatggttcctcagtacggctatttaactttaaacaatggaagccaagccctgggacgttcctccttctactgtctggagtatttcccatcgcagatgctgagaaccggcaacaactttcagttcagctacaccttcgaggacgtgcctttccacagcagctacgcgcacagccagagcctggacaggctgatgaatcccctcatcgaccagtacctgtactacctggtcagaacgcaaacgactggaactggagggacgcagactctggcattcagccaagcgggtcctagctcaatggccaaccaggctagaaattgggtgcccggaccttgctaccggcagcagcgcgtctccacgacaaccaaccagaacaacaacagcaactttgcctggacgggagctgccaagtttaagctgaacggccgagactctctaatgaatccgggcgtggcaatggcttcccacaaggatgacgacgaccgcttcttcccttcgagcggggtcctgatttttggcaagcaaggagccgggaacgatggagtggattacagccaagtgctgattacagatgaggaagaaatcaaggctaccaaccccgtggccacagaagaatatggagcagtggccatcaacaaccaggccgccaatacgcaggcgcagaccggactcgtgcacaaccagggggtgattcccggcatggtgtggcagaatagagacgtgtacctgcagggtcccatctgggccaaaattcctcacacggacggcaactttcacccgtctcccctgatgggcggctttggactgaagcacccgcctcctcaaattctcatcaagaacacaccggttccagcggacccgccgcttaccttcaaccaggccaagctgaactctttcatcacgcagtacagcaccggacaggtcagcgtggaaatcgagtgggagctgcagaaagaaaacagcaaacgctggaatccagagattcaatacacttccaactactacaaatctacaaatgtggactttgctgtcaacacggagggggtttatagcgagcctcgccccattggcacccgttacctcacccgcaacctgtaattacatgttaatcaataaaccggttaattcgtttcagttgaactttggtctctgcgaagggcgaattc

SEQ ID NO: 4787 - protein, 736 aa, Adeno-associated virus
MAADGYLPDWLEDNLSEGIREWWDLKPGAPKPKANQQKQDDGRGLVLPGYKYLGPFNGLDKGEPVNAADAAALEHDKAYDQQLKAGDNPYLRYNHADAEFQERLQEDTSFGGNLGRAVFQAKKRVLEPLGLVEEGAKTAPGKKRPVEQSPQEPDSSSGIGKTGQQPAKKRLNFGQTGDSESVPDPQPLGEPPAAPSGLGPNTMASGGGAPMADNNEGADGVGNSSGNWHCDSTWLGDRVITTSTRTWALPTYNNHLYKQISNGTSGGSTNDNTYFGYSTPWGYFDFNRFHCHFSPRDWQRLINNNWGFRPKRLNFKLFNIQVKEVTTNEGTKTIANNLTSTVQVFTDSEYQLPYVLGSAHQGCLPPFPADVFMVPQYGYLTLNNGSQALGRSSFYCLEYFPSQMLRTGNNFQFSYTFEDVPFHSSYAHSQSLDRLMNPLIDQYLYYLVRTQTTGTGGTQTLAFSQAGPSSMANQARNWVPGPCYRQQRVSTTTNQNNNSNFAWTGAAKFKLNGRDSLMNPGVAMASHKDDDDRFFPSSGVLIFGKQGAGNDGVDYSQVLITDEEEIKATNPVATEEYGAVAINNQAANTQAQTGLVHNQGVIPGMVWQNRDVYLQGPIWAKIPHTDGNFHPSPLMGGFGLKHPPPQILIKNTPVPADPPLTFNQAKLNSFITQYSTGQVSVEIEWELQKENSKRWNPEIQYTSNYYKSTNVDFAVNTEGVYSEPRPIGTRYLTRNL

SEQ ID NO: 4788 - DNA, 2370 bp, Adeno-associated virus
gaattcgccctttctacggctgcgtcaactggaccaatgagaactttcccttcaacgattgcgtcgacaagatggtgatctggtgggaggagggcaagatgacggccaaggtcgtggagtccgccaaggccattctcggcggcagcaaggtgcgcgtggaccaaaagtgcaagtcgtccgcccagatcgaccccacccccgtgatcgtcacctccaacaccaacatgtgcgccgtgattgacgggaacagcaccaccttcgagcaccagcagccgttgcaggaccggatgttcaagttcgaactcacccgccgtctggagcacgactttggcaaggtgaccaagcaggaagtcaaagagttcttccgctgggcgcaggatcacgtgaccgaggtggcgcatgagttctacgtcagaaagggcggagccagcaaaagacccgcccccgatgacgcggatataagcgagcccaagcgggcctgcccctcagtcgcggatccatcgacgtcagacgcggaaggagctccggtggactttgccgacaggtaccaaaacaaatgttctcgtcacgcgggcatgcttcagacgctgtttccctgcaaaacgtgcgagagaatgaatcagaatttcaacatttgcttcacgcacggggtcagagactgctcagaatgtttccccggtgcatcagaatctcaaccggtcgtcagaaaaaaaacgtatcagaaactgtgtgccattcatcatctgctggggcgggcacccgagattgcttgctcggcctgcgatctggtcaacgtggacctggacgactgtgtttctgagcaataaatgacttaaaccaggtatggctgccgatggttatcttccagattggcttgaggacaacctctctgagggcattcgcgagtggtgggacctgaaacctggagccccgaaacccaaagccaaccagcaaaagcaggacgacggccggggtctggtgcttcctggctacaagtacctcggacccttcaacggactcgacaagggggagcccgtcaacgcggcggacgcagcggccctcgagcacgacaaggcctacgaccagcagctcaaagcgggtgacaatccgtacctgcggtataaccacgccgacgccgagtttcaggagcgtctgcaagaagatacgtcttttgggggcaacctcgggcgagcagtcttccaggccaagaagcgggttctcgaacctctcggtctggttgaggaaggcgctaagacggctcctggaaagaagagaccggtagagccatcacctcagcgttcccccgactcctccacgggcatcggcaagaaaggccaccagcccgcgagaaagagactgaactttgggcagactggcgactcggagtcagtccccgaccctcaaccaatcggagaaccaccagcaggcccctctggtctgggatctggtacaatggctgcaggcggtggcgctccaatggcagacaataacgaaggcgccgacggagtgggtagttcctcaggaaattggcattgcgattccacatggctgggcgacagagtcatcaccaccagcacccgaacctgggccctgcccacctacaacaaccatctctacaagcaaatctccaacgggacatcgggaggaagcactaacgacaacacctactttggctacagcaccccctgggggtattttgacttcaacagattccactgccacttctcaccacgtgactggcagcgactcatcaacaataactggggattccggcccaagagactcaacttcaagctcttcaacatccaggtcaaggaggtcacgcagaatgaaggcaccaagaccatcgccaataaccttaccagcacgattcaggtgtttacggactcggaataccagctcccgtacgtcctcggctctgcgcaccagggctgcctccctccgttcccggcggacgtcttcatgattcctcagtacgggtatctgaccctaaacaatggcagtcaggctgtgggccgttcctccttctactgcctggaatacttcccttctcaaatgctgaggacgggcaacaactttgaattcagctacaccttcgaggacgtgcctttccacagcagctacgcgcacagccagagcctggaccggctgatgaaccctctcatcgaccagtacctgtattacttatccagaactcagtccacaggaggaactcaaggtactcagcaattgttattttctcaagccgggcccgcaaacatgtyggctcaggccaagaactggctacctggaccgtgttaccgtcagcaacgagtttccacgacactgtcgcaaaacaacaacagcaattttgctggaccggtgccacca

SEQ ID NO: 4789 - protein, 738 aa, Adeno-associated virus; identical to SEQ ID NO: 4779

SEQ ID NO: 4790 - DNA, 2205 bp, Adeno-associated virus
atgactgacggttaccttccagattggctagaggacaacctctctgaaggcgttcgagagtggtgggcgctgcaacctggagcccctaaacccaaggcaaatcaacaacatcaggacaacgctcggggtcttgtgcttccgggttacaaatacctcggacccggcaacggactcgacaagggggaacccgtcaacgcagcggacgcggcagccctcgagcacgacaaggcctacgaccagcagctcaaggccggtgacaacccctacctcaagtacaaccacgccgacgcggagttccagcagcggcttcagggcgacacatcgtttgggggcaacctcggcagagcagtcttccaggccaaaaagagggttcttgaacctcttggtctggttgagcaagcgggtgagacggctcctggaaagaagagaccgttgattgaatccccccagcagcccgactcctccacgggtatcggcaaaaaaggcaagcagccggctaaaaagaagctcgttttcgaagacgaaactggagcaggcgacggaccccctgagggatcaacttccggagccatgtctgatgacagtgagatgcgtgcagcagctggcggagctgcagtcgagggcggacaaggtgccgatggagtgggtaatgcctcgggtgattggcattgcgattccacctggtctgagggccacgtcacgaccaccagcaccagaacctgggtcttgcccacctacaacaaccacctctacaagcgactcggagagagcctgcagtccaacacctacaacggattctccaccccctggggatactttgacttcaaccgcttccactgccacttctcaccacgtgactggcagcgactcatcaacaacaactggggcatgcgacccaaagccatgcgggtcaaaatcttcaacatccaggtcaaggaggtcacgacgtcgaacggcgagacaacggtggctaataaccttaccagcacggttcagatctttgcggactcgtcgtacgaactgccgtacgtgatggatgcgggtcaagagggcagcctgcctccttttcccaacgacgtctttatggtgccccagtacggctactgtggactggtgaccggcaacacttcgcagcaacagactgacagaaatgccttctactgcctggagtactttccttcgcagatgctgcggactggcaacaactttgaaattacgtacagttttgagaaggtgcctttccactcgatgtacgcgcacagccagagcctggaccggctgatgaaccctctcatcgaccagtacctgtggggactgcaatcgaccaccaccggaaccaccctgaatgccgggactgccaccaccaactttaccaagctgcggcctaccaacttttccaactttaaaaagaactggctgcccgggccttcaatcaagcagcagggcttctcaaagactgccaatcaaaactacaagatccctgccaccgggtcagacagtctcatcaaatacgagacgcacagcactctggacggaagatggagtgccctgacccccggacctccaatggccacggctggacctgcggacagcaagttcagcaacagccagctcatctttgcggggcctaaacagaacggcaacacggccaccgtacccgggactctgatcttcacctctgaggaggagctggcagccaccaacgccaccgatacggacatgtggggcaacctacctggcggtgaccagagcaacagcaacctgccgaccgtggacagactgacagccttgggagccgtgcctggaatggtctggcaaaacagagacatttactaccagggtcccatttgggccaagattcctcataccgatggacactttcacccctcaccgctgattggtgggtttgggctgaaacacccgcctcctcaaatttttatcaagaacaccccggtacctgcgaatcctgcaacgaccttcagctctactccggtaaactccttcattactcagtacagcactggccaggtgtcggtgcagattgactgggagatccagaaggagcggtccaaacgctggaaccccgaggtccagtttacctccaactacggacagcaaaactctctgttgtgggctcccgatgcggctgggaaatacactgagcctagggctatcggtacccgctacctcacccaccacctgtaa

SEQ ID NO: 4791 - protein, 734 aa, Adeno-associated virus
MTDGYLPDWLEDNLSEGVREWWALQPGAPKPKANQQHQDNARGLVLPGYKYLGPGNGLDKGEPVNAADAAALEHDKAYDQQLKAGDNPYLKYNHADAEFQQRLQGDTSFGGNLGRAVFQAKKRVLEPLGLVEQAGETAPGKKRPLIESPQQPDSSTGIGKKGKQPAKKKLVFEDETGAGDGPPEGSTSGAMSDDSEMRAAAGGAAVEGGQGADGVGNASGDWHCDSTWSEGHVTTTSTRTWVLPTYNNHLYKRLGESLQSNTYNGFSTPWGYFDFNRFHCHFSPRDWQRLINNNWGMRPKAMRVKIFNIQVKEVTTSNGETTVANNLTSTVQIFADSSYELPYVMDAGQEGSLPPFPNDVFMVPQYGYCGLVTGNTSQQQTDRNAFYCLEYFPSQMLRTGNNFEITYSFEKVPFHSMYAHSQSLDRLMNPLIDQYLWGLQSTTTGTTLNAGTATTNFTKLRPTNFSNFKKNWLPGPSIKQQGFSKTANQNYKIPATGSDSLIKYETHSTLDGRWSALTPGPPMATAGPADSKFSNSQLIFAGPKQNGNTATVPGTLIFTSEEELAATNATDTDMWGNLPGGDQSNSNLPTVDRLTALGAVPGMVWQNRDIYYQGPIWAKIPHTDGHFHPSPLIGGFGLKHPPPQIFIKNTPVPANPATTFSSTPVNSFITQYSTGQVSVQIDWEIQKERSKRWNPEVQFTSNYGQQNSLLWAPDAAGKYTEPRAIGTRYLTHHL

SEQ ID NO: 4792 - DNA, 3128 bp, Adeno-associated virus
gaattcgccctttctacggctgcgtcaactggaccaatgagaactttcccttcaacgattgcgtcgacaagatgttgatctggtgggaggagggcaagatgacggccaaggtcgtggagtccgccaaggccattctcggcggcagcaaagtgcgcgtggaccaaaagtgcaagccgtccgcccagatcgaccccacccccgtgatcgtcacctccaacaccaacatgtgcgccgtgattgacgggaacagcaccaccttcgagcaccagcagccgttgcgggaccggatgttcaagtttgaactcacccgccgtctggagcacgactttggcaaggtgacaaagcaggaagtcagagagttcttccgctgggcgcaggatcacgtgaccgaggtggcgcacgagttctacgtcagaaagggtggagccaacaagagacccgcccccgatgacgcggataaaagcgagcccaagcgggcctgcccctcagtcgcggatccatcgacgtcagacgcggaaggagctccggtggactttgccgacaggtaccaaaacaaatgttctcgtcacgcgggcatgcttcagatgctgtttccctgcaaaacatgcgagagaatgaatcagaatttcaacatttgcttcacgcacgggaccagagactgttcagaatgtttccccggcgtgtcagaatctcaaccggtcgtcagaaaaaagacgtatcggaaactctgtgcgattcatcatctgctggggcgggcacccgagattgcttgctcggcctgcgatctggtcaacgtggacctagatgactgtgtttctgagcaataaatgacttaaaccaggtatggctgccgatggttatcttccagattggctcgaggacaacctctctgagggcattcgcgagtggtgggacttgaaacctggagccccgaaacccaaagccaaccagcaaaagcaggacgacggccggggtctggtgcttcctggctacaagtacctcggacccttcaacggactcgacaagggggagcccgtcaacgcggcggacgcagcggccctcgagcacgacaaggcctacgaccagcagctcaaagcgggtgacaatccgtacctgcggtataaccacgccgacgccgagtttcaggagcgtctgcaagaagatacgtcttttgggggcaacctcgggcgagcagtcttccaggccaagaagcgggttctcgaacctctcggtctggttgaggaaggcgctaagacggctcctggaaagaagagaccggtagagccatcaccccagcgttctccagactcctctacgggcatcggcaagaaaggccagcagcccgcgaaaaagagactcaactttgggcagactggcgactcagagtcagtgcccgaccctcaaccaatcggagaaccccccgcaggcccctctggtctgggatctggtacaatggctgcaggcggtggcgctccaatggcagacaataacgaaggcgccgacggagtgggtagttcctcaggaaattggcattgcgattccacatggctgggcgacagagtcatcaccaccagcacccgaacctgggccctccccacctacaacaaccacctctacaagcaaatctccaacgggacttcgggaggaagcaccaacgacaacacctacttcggctacagcaccccctgggggtattttgactttaacagattccactgccacttctcaccacgtgactggcagcgactcatcaacaacaactggggattccggcccaagagactcaacttcaagctcttcaacatccaggtcaaggaggtcacgcagaatgaaggcaccaagaccatcgccaataaccttaccagcacgattcaggtctttacggactcggaataccagctcccgtacgtcctcggctctgcgcaccagggctgcctgcctccgttcccggcggacgtcttcatgattcctcagtacgggtacctgactctgaacaatggcagtcaggccgtgggccgttcctccttctactgcctggagtactttccttctcaaatgctgagaacgggcaacaactttgagttcagctaccagtttgaggacgtgccttttcacagcagctacgcgcacagccaaagcctggaccggctgatgaaccccctcatcgaccagtacctgtactacctgtctcggactcagtccacgggaggtaccgcaggaactcagcagttgctattttctcaggccgggcctaataacatgtcggctcaggccaaaaactggctacccgggccctgctaccggcagcaacgcgtctccacgacactgtcgcaaaataacaacagcaactgtaaatcccggtgtcgctatggcaacccacaaggacgacgaagagcgattttgcctggaccggtgccaccaagtatcatctgaatggcagagactctctgttttccgtccagcggagtcttaatgtttgggaaacagggagctggaaaagacaacgtggactatagcagcgttatgctaaccagtgaggaagaaattaaaaccaccaacccagtggccacggaacagtacggcgtggtggccgataacctgcaacagcaaaacgccgctcctattgtaggggccgtcaacagtcaaggagccttacctggcatggtctggcagaaccgggacgtgtacctgcagggtcctatctgggccaagattcctcacacggacggaaactttcatccctcgccgctgatgggaggctttggactgaaacacccgcctcctcagatcctgattaagaatacacctgttcccgcggatcctccaactaccttcagtcaagctaagctggcgtcgttcatcacgcagtacagcaccggacaggtcagcgtggaaattgaatgggagctgcagaaagaaaacagcaaacgctggaacccagagattcaatacacttccaactactacaaatctacaaatgtggacttcgctgttaacacagatggcacttattctgagcctcgccccattggcacccgttacctcacccgtaatctgtaattgctcgttaatcaataaaccggttgattcgtttcagttgaactttggtctctgcgaagggcgaattc

SEQ ID NO: 4793 - protein, 738 aa, Adeno-associated virus
MAADGYLPDWLEDNLSEGIREWWDLKPGAPKPKANQQKQDDGRGLVLPGYKYLGPFNGLDKGEPVNAADAAALEHDKAYDQQLKAGDNPYLRYNHADAEFQERLQEDTSFGGNLGRAVFQAKKRVLEPLGLVEEGAKTAPGKKRPVEPSPQRSPDSSTGIGKKGQQPAKKRLNFGQTGDSESVPDPQPIGEPPAGPSGLGSGTMAAGGGAPMADNNEGADGVGSSSGNWHCDSTWLGDRVITTSTRTWALPTYNNHLYKQISNGTSGGSTNDNTYFGYSTPWGYFDFNRFHCHFSPRDWQRLINNNWGFRPKRLNFKLFNIQVKEVTQNEGTKTIANNLTSTIQVFTDSEYQLPYVLGSAHQGCLPPFPADVFMIPQYGYLTLNNGSQAVGRSSFYCLEYFPSQMLRTGNNFEFSYQFEDVPFHSSYAHSQSLDRLMNPLIDQYLYYLSRTQSTGGTAGTQQLLFSQAGPNNMSAQAKNWLPGPCYRQQRVSTTLSQNNNSNFAWTGATKYHLNGRDSLVNPGVAMATHKDDEERFFPSSGVLMFGKQGAGKDNVDYSSVMLTSEEEIKTTNPVATEQYGVVADNLQQQNAAPIVGAVNSQGALPGMVWQNRDVYLQGPIWAKIPHTDGNFHPSPLMGGFGLKHPPPQILIKNTPVPADPPTTFSQAKLASFITQYSTGQVSVEIEWELQKENSKRWNPEIQYTSNYYKSTNVDFAVNTDGTYSEPRPIGTRYLTRNL

SEQ ID NO: 4794 - DNA, 3129 bp, Adeno-associated virus
gaattcgccctttctacggctgcgtcaactggaccaatgagaactttcccttcaacgattgcgtcgacaagatggtgatctggtgggaggagggcaagatgacggccaaggtcgtggagtccgccaaggccattctcggcggcagcaaagtgcgcgtggaccaaaagtgcaagtcgtccgcccagatcgaccccacccccgtgatcgtcacctccaacaccaacatgtgcgccgtgattgacgggaacagcaccaccttcgagcaccagcagccgttgcaggaccggatgttcaagtttgaactcacccgccgtctggagcacgactttggcaaggtgacaaagcaggaagtcagagagttcttccgctgggcgcaggatcacgtgaccgaggtggcgcacgagttctacgtcagaaagggtggagccaacaagagacccgcccccgatgacgcggataaaagcgagcccaagcgggcctgcccctcagtcgcggatccatcgacgtcagacgcggaaggagctccggtggactttgccgacaggtaccaaaacaaatgttctcgtcacgcgggcatgcttcagatgctgtttccctgcaaaacatgcgagagaatgaatcagaatttcaacatttgcttcacgcacgggaccagagactgttcagaatgtttccccggcgtgtcagaatctcaaccggtcgtcagaaaaaagacgtatcggaaactctgtgcgattcatcatctgctgggggcgggcacccgagattgcttgctcggcctgcgatctggtcaacgtggacctagatgactgtgtttctgagcaataaatgacttaaaccaggtatggctgccgatggttatcttccagattggctcgaggacaacctctctgagggcattcgcgagtggtgggacttgaaacctggagccccgaaacccaaagccaaccagcaaaagcaggacgacggccggggtctggtgcttcctggctacaagtacctcggacccttcaacggactcgacaagggggagcccgtcaacgcggcggacgcagcggccctcgagcacgacaaggcctacgaccagcagctcaaagcgggtgacaatccgtacctgcggtataaccacgccgacgccgagtttcaggagcgtctgcaagaagatacgtcttttgggggcaacctcgggcgagcagtcttccaggccaagaagcgggttctcgaacctctcggtctggttgaggaaggcgctaagacggctcctggaaagaagagaccggtagagccatcaccccagcgttctccagactcctctacgggcatcggcaagaaaggccagcagcccgcgaaaaagagactcaactttgggcagactggcgactcagagtcagtgcccgaccctcaaccaatcggagaaccccccgcaggcccctctggtctgggatctggtacaatggctgcaggcggtggcgctccaatggcagacaataacgaaggcgccgacggagtgggtagttcctcaggaaattggcattgcgattccacatggctgggcgacagagtcatcaccaccagcacccgaacctgggccctccccacctacaacaaccacctctacaagcaaatctccaacgggacttcgggaggaagcaccaacgacaacacctacttcggctacagcaccccctgggggtattttgactttaacagattccactgccacttctcaccacgtgactggcagcgactcatcaacaacaactggggattccggcccaagagactcaacttcaagctcttcaacatccaggtcaaggaggtcacgcagaatgaaggcaccaagaccatcgccaataaccttaccagcacgattcaggtctttacggactcggaataccagctcccgtacgtcctcggctctgcgcaccagggctgcctgcctccgttcccggcggacgtcttcatgattcctcagtacgggtacctgactctgaacaatggcagtcaggccgtgggccgttcctccttctactgcctggagtactttccttctcaaatgctgagaacgggcaacaactttgagttcagctaccagtttgaggacgtgccttttcacagcagctacgcgcacagccaaagcctggaccggctgatgaaccccctcatcgaccagtacctgtactacctgtctcggactcagtccacgggaggtaccgcaggaactcagcagttgctattttctcaggccgggcctaataacatgtcggctcaggccaaaaactggctacccgggccctgctaccggcagcaacgcgtctccacgacactgtcgcaaaataacaacagcaactttgcctggaccggtgccaccaagtatcatctgaatggcagagactctctggtaaatcccggtgtcgctatggcaacccacaaggacgacgaagagcgattttttccgtccagcggagtcttaatgtttgggaaacagggagctggaaaagacaacgtggactatagcagcgttatgctaaccagtgaggaagaaattaaaaccaccaacccagtggccacagaacagtacggcgtggtggccgataacctgcaacagcaaaacgccgctcctattgtaggggccgtcaacagtcaaggagccttacctggcatggtctggcagaaccgggacgtgtacctgcagggtcctatctgggccaagattcctcacacggacggaaactttcatccctcgccgctgatgggaggctttggactgaaacacccgcctcctcagatcctgattaagaatacacctgttcccgcggatcctccaactaccttcagtcaagctaagctggcgtcgttcatcacgcagtacagcaccggacaggtcagcgtggaaattgaatgggagctgcagaaagaaaacagcaaacgctggaacccagagattcaatacacttccaactactacaaatctacaaatgtggactttgctgttaacacagatggcacttattctgagcctcgccccatcggcacccgttacctcacccgtaatctgtaattgcttgttaatcaataaaccggttgattcgtttcagttgaactttggtctctgcgaagggcgaattc

SEQ ID NO: 4795 - DNA, 3128 bp, Adeno-associated virus
gaattcgccctttctacggctgcgtcaactggaccaatgagaactttcccttcaacgattgcgtcgacaagatggtgatctggtgggaggagggcaagatgacggccaaggtcgtggagtccgccaaggccattctcggcggcagcaaagtgcgcgtggaccaaaagtgcaagtcgtccgcccagatcgaccccacccccgtgatcgtcacctccaacaccaacatgtgcgccgtgattgacgggaacagcaccaccttcgagcaccagcagccgttgcaggaccggatgttcaagtttgaactcacccgccgtctggagcacgactttggcaaggtgacaaagcaggaagtcagagagttcttccgctgggcgcaggatcacgtgaccgaggtggcgcacgagttctacgtcagaaagggtggagccaacaagagacccgcccccgatgacgcggataaaagcgagcccaagcgggcctgcccctcagtcgcggatccatcgacgtcagacgcggaaggagctccggtggactttgccgacaggtaccaaaacaaatgttctcgtcacgcgggcatgcttcagatgctgtttccctgcaaaacatgcgagagaatgaatcagaatttcaacatttgcttcacgcacgggaccagagactgttcagaatgtttccccggcgtgtcagaatctcaaccggttgtcagaaaaaagacgtatcggaaactctgtgcgattcatcatctgctggggcgggcacccgagattgcttgctcggcctgcgatctggtcaacgtggacctagatgactgtgtttctgagcaataaatgacttaaaccaggtatggctgccgatggttatcttccagattggctcgaggacaacctctctgagggcattcgcgagtggtgggacttgaaacctggagccccgaaacccaaagccaaccagcaaaagcaggacgacggccggggtctggtgcttcctggctacaagtacctcggacccttcaacggactcgacaagggggagcccgtcaacgcggcggacgcagcggccctcgagcacgacaaggcctacgaccagcagctcaaagcgggtgacaatccgtacctgcggtataaccacgccgacgccgagtttcaggagcgtctgcaagaagatacgtcttttgggggcaacctcgggcgagcagtcttccaggccaagaagcgggttctcgaacctctcggtctggttgaggaaggcgctaagacggctcctggaaagaagagaccggtagagccatcaccccagcgttctccagactcctctacgggcatcggcaagaaaggccagcagcccgcgaaaaagagactcaactttgggcagactggcgactcagagtcagtgcccgaccctcaaccaatcggagaaccccccgcaggcccctctggtctgggatctggtacaatggctgcaggcggtggcgctccaatggcagacaataacgaaggcgccgacggagtgggtagttcctcaggaaattggcattgcgattccacatggctgggcgacagagtcatcaccaccagcacccgaacctgggccctccccacctacaacaaccacctctacaagcaaatctccaacgggacttcgggaggaagcaccaacgacaacacctacttcggctacagcaccccctgggggtattttgactttaacagattccactgccacttctcaccacgtgactggcagcgactcatcaacaacaactggggattccggcccaagagacccaacttcaagctcttcaacatccaggtcaaggaggtcacgcagaatgaaggcaccaagaccatcgccaataaccttaccagcacgattcaggtctttacggactcggaataccagctcccgtacgtcctcggctctgcgcaccagggctgcctgcctccgttcccggcggacgtcttcatgattcctcagtacgggtacctgactctgaacaatggcagtcaggccgtgggccgttcctccttctactgcctggagtactttccttctcaaatgctgagaacgggcaacaactttgagttcagctaccagtttgaggacgtgccttttcacagcagctacgcgcacagccaaagcctggaccggctgatgaaccccctcatcgaccagtacctgtactacctgtctcggactcagtccacgggaggtaccgcaggaactcagcagttgctattttctcaggccgggcctaataacatgtcggctcaggccaaaaactggctacccgggccctgctaccggcagcaacgcgtctccacgacactgtcgcaaaataacaacagcaactttgcctggaccggtgccaccaagtatcatctgaatggcagagactctctggtaaatcccggtgtcgctatggcaacccacaaggacgacgaagagcgattttttccgtccagcggagtcttaatgtttgggaaacagggagctggaaaagacaacgtggactatagcagcgttatgctaaccagtgaggaagaaattaaaaccaccaacccagtggccacagaacagtacggcgtggtggccgataacctgcaacagcaaaacgccgctcctattgtaggggccgtcaacagtcaaggagccttacctggcatggtctggcagaaccgggacgtgtacctgcagggtcctatctgggccaagattcctcacacggacggaaactttcatccctcgccgctgatgggaggctttggactgaaacacccgcctcctcagatcctgattaagaatacacctgttcccgcggatcctccaactaccttcagtcaagctaagctggcgtcgttcatcacgcagtacagcaccggacaggtcagcgtggaaattgaatgggagctgcagaaagaaaacagcaaacgctggaacccagagattcaatacacttccaactactacaaatctacaaatgtggactttgctgttaacacagatggcacttattctgagcctcgccccattggcacccgttacctcacccgtaatctgtaattgcttgttaatcaataaaccggttgattcgtttcagttgaactttggtctctgcgaagggcgaattc

SEQ ID NO: 4796 - protein, 738 aa, Adeno-associated virus
MAADGYLPDWLEDNLSEGIREWWDLKPGAPKPKANQQKQDDGRGLVLPGYKYLGPFNGLDKGEPVNAADAAALEHDKAYDQQLKAGDNPYLRYNHADAEFQERLQEDTSFGGNLGRAVFQAKKRVLEPLGLVEEGAKTAPGKKRPVEPSPQRSPDSSTGIGKKGQQPAKKRLNFGQTGDSESVPDPQPIGEPPAGPSGLGSGTMAAGGGAPMADNNEGADGVGSSSGNWHCDSTWLGDRVITTSTRTWALPTYNNHLYKQISNGTSGGSTNDNTYFGYSTPWGYFDFNRFHCHFSPRDWQRLINNNWGFRPKRPNFKLFNIQVKEVTQNEGTKTIANNLTSTIQVFTDSEYQLPYVLGSAHQGCLPPFPADVFMIPQYGYLTLNNGSQAVGRSSFYCLEYFPSQMLRTGNNFEFSYQFEDVPFHSSYAHSQSLDRLMNPLIDQYLYYLSRTQSTGGTAGTQQLLFSQAGPNNMSAQAKNWLPGPCYRQQRVSTTLSQNNNSNFAWTGATKYHLNGRDSLVNPGVAMATHKDDEERFFPSSGVLMFGKQGAGKDNVDYSSVMLTSEEEIKTTNPVATEQYGVVADNLQQQNAAPIVGAVNSQGALPGMVWQNRDVYLQGPIWAKIPHTDGNFHPSPLMGGFGLKHPPPQILIKNTPVPADPPTTFSQAKLASFITQYSTGQVSVEIEWELQKENSKRWNPEIQYTSNYYKSTNVDFAVNTDGTYSEPRPIGTRYLTRNL

SEQ ID NO: 4797 - protein, 738 aa, Adeno-associated virus
MAADGYLPDWLEDNLSEGIREWWDLKPGAPKPKANQQKQDDGRGLVLPGYKYLGPFNGLDKGEPVNAADAAALEHDKAYDQQLKAGDNPYLRYNHADAEFQERLQEDTSFGGNLGRAVFQAKKRVLEPLGLVEEAAKTAPGKKRPVEPSPQRSPDSSTGIGKKGQQPAKKRLNFGQTGDSESVPDPQPIGEPPAGPSGLGSGTMAAGGGAPMADNNEGADGVGSSSGNWHCDSTWLGDRVITTSTRTWALPTYNNHLYKQISNGTSGGSTNDNTYFGYSTPWGYFDFNRFHCHFSPRDWQRLINNNWGFRPKRLSFKLFNIQVKEVTQNEGTKTIANNLTSTIQVFTDSEYQLPYVLGSAHQGCLPPFPADVFMIPQYGYLTLNNGSQAVGRSSFYCLEYFPSQMLRTGNNFEFSYTFEDVPFHSSYAHSQSLDRLMNPLIDQYLYYLSRTQSTGGTQGTQQLLFSQAGPANMSAQAKNWLPGPCYRQQRVSTTLSQNNNSNFAWTGATKYHLNGRDSLVNPGVAMATHKDDEERFFPSSGVLMFGKQGAGRDNVDYSSVMLTSEEEIKTTNPVATEQYGVVADNLQQTNTGPIVGNVNSQGALPGMVWQNRDVYLQGPIWAKIPHTDGNFHPSPLMGGFGLKHPPPQILIKNTPVPADPPTTFSQAKLASFITQYSTGQVSVEIEWELQKENSKRWNPEIQYTSNYYKSTNVDFAVNTEGTYSEPRPIGTRYLTRNL

SEQ ID NO: 4798 - protein, 720 aa, Adeno-associated virus
MSFVDHPPDWLEEVGEGLREFLGLEAGPPKPKPNQQHQDQARGLVLPGYNYLGPGNGLDRGEPVNRADEVAREHDISYNEQLEAGDNPYLKYNHADAEFQEKLADDTSFGGNLGKAVFQAKKRVLEPFGLVEEGAKTAPTGKRIDDHFPKRKKARTEEDSKPSTSSDAEAGPSGSQQLQIPAQPASSLGADTMSAGGGGPLGDNNQGADGVGNASGDWHCDSTWMGDRVVTKSTRTWVLPSYNNHQYREIKSGSVDGSNANAYFGYSTPWGYFDFNRFHSHWSPRDWQRLINNYWGFRPRSLRVKIFNIQVKEVTVQDSTTTIANNLTSTVQVFTDDDYQLPYVVGNGTEGCLPAFPPQVFTLPQYGYATLNRDNTENPTERSSFFCLEYFPSKMLRTGNNFEFTYNFEEVPFHSSFAPSQNLFKLANPLVDQYLYRFVSTNNTGGVQFNKNLAGRYANTYKNWFPGPMGRTQGWNLGSGVNRASVSAFATTNRMELEGASYQVPPQPNGMTNNLQGSNTYALENTMIFNSQPANPGTTATYLEGNMLITSESETQPVNRVAYNVGGQMATNNQSSTTAPATGTYNLQEIVPGSVWMERDVYLQGPIWAKIPETGAHFHPSPAMGGFGLKHPPPMMLIKNTPVPGNITSFSDVPVSSFITQYSTGQVTVEMEWELKKENSKRWNPEIQYTNNYNDPQFVDFAPDSTGEYRTTRPIGTRYL

SEQ ID NO: 4799 - protein, 736 aa, Adeno-associated virus
MAADGYLPDWLEDNLSEGIREWWDLKPGAPKPKANQQKQDDGRGLVLPGYKYLGPFNGLDKGEPVNAADAAALEHDKAYDQQLKAGDNPYLRYNHADAEFQERLQEDTSFGGNLGRAVFQAKKRVLEPFGLVEEGAKTAPGKKRPVEQSPQEPDSSSGIGKTGQQPAKKRLNFGQTGDSESVPDPQPLGEPPATPAAVGPTTMASGGGAPMADNNEGADGVGNASGNWHCDSTWLGDRVITTSTRTWALPTYNNHLYKQISSASTGASNDNHYFGYSTPWGYFDFNRFHCHFSPRDWQRLINNNWGFRPKRLNFKLFNIQVKEVTTNDGVTTIANNLTSTVQVFSDSEYQLPYVLGSAHQGCLPPFPADVFMIPQYGYLTLNNGSQAVGRSSFYCLEYFPSQMLRTGNNFTFSYTFEDVPFHSSYAHSQSLDRLMNPLIDQYLYYLNRTQNQSGSAQNKDLLFSRGSPAGMSVQPKNWLPGPCYRQQRVSKTKTDNNNSNFTWTGASKYNLNGRESIINPGTAMASHKDDKDKFFPMSGVMIFGKESAGASNTALDNVMITDEEEIKATNPVATERFGTVAVNLQSSSTDPATGDVHVMGALPGMVWQDRDVYLQGPIWAKIPHTDGHFHPSPLMGGFGLKHPPPQILIKNTPVPANPPAEFSATKFASFITQYSTGQVSVEIEWELQKENSKRWNPEVQYTSNYAKSANVDFTVDNNGLYTEPRPIGTRYLTRPL

SEQ ID NO: 4800 - protein, 736 aa, Adeno-associated virus
MAADGYLPDWLEDNLSEGIREWWDLKPGAPKPKANQQKQDDGRGLVLPGYKYLGPFNGLDKGEPVNAADAAALEHDKAYDQQLKAGDNPYLRYNHADAEFQERLQEDTSFGGNLGRAVFQAKKRVLEPFGLVEEGAKTAPGKKRPVEQSPQEPDSSSGIGKTGQQPAKKRLNFGQTGDSESVPDPQPLGEPPATPAAVGPTTMASGGGAPMADNNEGADGVGNASGNWHCDSTWLGDRVITTSTRTWALPTYNNHLYKQISSASTGASNDNHYFGYSTPWGYFDFNRFHCHFSPRDWQRLINNNWGFRPKRLNFKLFNIQVKEVTTNDGVTTIANNLTSTVQVFSDSEYQLPYVLGSAHQGCLPPFPADVFMIPQYGYLTLNNGSQAVGRSSFYCLEYFPSQMLRTGNNFTFSYTFEDVPFHSSYAHSQSLDRLMNPLIDQYLYYLNRTQNQSGSAQNKDLLFSRGSPAGMSVQPKNWLPGPCYRQQRVSKTKTDNNNSNFTWTGASKYNLNGRESIINPGTAMASHKDDEDKFFPMSGVMIFGKESAGASNTALDNVMITDEEEIKATNPVATERFGTVAVNLQSSSTDPATGDVHVMGALPGMVWQDRDVYLQGPIWAKIPHTDGHFHPSPLMGGFGLKHPPPQILIKNTPVPANPPAEFSATKFASFITQYSTGQVSVEIEWELQKENSKRWNPEVQYTSNYAKSANVDFTVDNNGLYTEPRPIGTRYLTRPL

SEQ ID NO: 4801 - protein, 736 aa, Adeno-associated virus
MAADGYLPDWLEDNLSEGIREWWDLKPGAPKPKANQQKQDDGRGLVLPGYKYLGPFNGLDKGEPVNAADAAALEHDKAYDQQLKAGDNPYLRYNHADAEFQERLQEDTSFGGNLGRAVFQAKKRVLEPLGLVEEGAKTAPGKKRPVEQSPQEPDSSSGIGKTGQQPAKKRLNFGQTGDSESVPDPQPLGEPPATPAAVGPTTMASGGGAPMADNNEGADGVGNASGNWHCDSTWLGDRVITTSTRTWALPTYNNHLYKQISSASTGASNDNHYFGYSTPWGYFDFNRFHCHFSPRDWQRLINNNWGFRPKRLNFKLFNIQVKEVTTNDGVTTIANNLTSTVQVFSDSEYQLPYVLGSAHQGCLPPFPADVFMIPQYGYLTLNNGSQAVGRSSFYCLEYFPSQMLRTGNNFTFSYTFEDVPFHSSYAHSQSLDRLMNPLIDQYLYYLNRTQNQSGSAQNKDLLFSRGSPAGMSVQPKNWLPGPCYRQQRVSKTKTDNNNSNFTWTGASKYNLNGRESIINPGTAMASHKDDEDKFFPMSGVMIFGKESAGASNTALDNVMITDEEEIKATNPVATERFGTVAVNLQSSSTDPATGDVHVMGALPGMVWQDRDVYLQGPIWAKIPHTDGHFHPSPLMGGFGLKHPPPQILIKNTPVPANPPAEFSATKFASFITQYSTGQVSVEIEWELQKENSKRWNPEVQYTSNYAKSANVDFTVDNNGLYTEPRPIGTRYLTRPL

SEQ ID NO: 4802 - protein, 736 aa, Adeno-associated virus
MAADGYLPDWLEDNLSEGIREWWDLKPGAPKPKANQQKQDDGRGLVLPGYKYLGPFNGLDKGEPVNAADAAALEHDKAYDQQLKAGDNPYLRYNHADAEFQERLQEDTSFGGNLGRAVFQAKKRVLEPLGLVEEGAKTAPGKKRPVEQSPQEPDSSSGIGKTGQQPAKKRLNFGQTGDSESVPDPQPLGEPPATPAAVGPTTMASGGGAPMADNNEGADGVGNASGNWHCDSTWLGDRVITTSTRTWALPTYNNHLYKQISSASTGASNDNHYFGYSTPWGYFDFNRFHCHFSPRDWQRLINNNWGFRPKRLNFKLFNIQVKEVTTNDGVTTIANNLTSTVQVFSDSEYQLPYVLGSAHQGCLPPFPADVFMIPQYGYLTLNNGSQAVGRSSFYCLEYFPSQMLRTGNNFTFSYTFEDVPFHSSYAHSQSLDRLMNPLIDQYLYYLNRTQNQSGSAQNKDLLFSRGSPAGMSVQPKNWLPGPCYRQQRVSKTKTDNNNSNFTWTGASKYNLNGRESIINPGTAMASHKDDKDKFFPMSGVMIFGKESAGASNTALDNVMITDEEEIKATNPVATERFGTVAVNLQSSSTDPATGDVHVMGALPGMVWQDRDVYLQGPIWAKIPHTDGHFHPSPLMGGFGLKHPPPQILIKNTPVPANPPAEFSATKFASFITQYSTGQVSVEIEWELQKENSKRWNPEVQYTSNYAKSANVDFTVDNNGLYTEPRPIGTRYLTRPL

SEQ ID NO: 4803 - protein, 728 aa, Adeno-associated virus
MAADGYLPDWLEGNLSEGIREWWDLKPGAPKPKANQQKQDDGRGLVLPGYRYLGPFNGLDKGEPVNEADAAALEHDKAYDKQLEQGDNPYLKYNHADAEFQERLQEDTSFGGNLGRAVFQAKKRVLEPLGLVEEGAKTAPGKKRPIESPDSSTGIGKNGQPPAKKKLNFGQTGDSESVPDPQPLGEPPAAPSGLGSGTMAAGGGAPMADNNEGADGVGNASGNWHCDSTWLGDRVITTSTRTWALPTYNNHLYKQISSQSGATNDNHFFGYSTPWGYFDFNRFHCHFSPRDWQRLINNNWGFRPRKLRFKLFNIQVKEVTTNDGVTTIANNLTSTIQVFSDSEYQLPYVLGSAHQGCLPPFPADVFMIPQYGYLTLNNGSQSVGRSSFYCLEYFPSQMLRTGDNFEFSYTFEEVPFHSSYAHSQSLDRLMNPLIDQYLYYLARTQSTTGSTRELQFHQAGPNTMAEQSKNWLPGPCYRQQRLSKNIDSNNNSNFAWTGATKYHLNGRNSLTNPGVAMATNKDDEDQFFPINGVLVFGKTGAANKTTLENVLMTSEEEIKTTNPVATEEYGVVSSNLQSSTAGPQTQTVNSQGALPGMVWQNRDVYLQGPIWAKIPHTDGNFHPSPLMGGFGLKHPPPQILIKNTPVPANPPEVFTPAKFASFITQYSTGQVSVEIEWELQKENSKRWNPEIQYTSNYAKSNNVEFAVNNEGVYTEPRPIGTRYLTRNL

SEQ ID NO: 4804 - DNA, 2211 bp, Adeno-associated virus
atggctgccgatggttatcttccagattggctcgaggacaaccttagtgaaggaattcgcgagtggtgggctttgaaacctggagcccctcaacccaaggcaaatcaacaacatcaagacaacgctcgaggtcttgtgcttccgggttacaaataccttggacccggcaacggactcgacaagggggagccggtcaacgcagcagacgcggcggccctcgagcacgacaaggcctacgaccagcagctcaaggccggagacaacccgtacctcaagtacaaccacgccgacgccgagttccaggagcggctcaaagaagatacgtcttttgggggcaacctcgggcgagcagtcttccaggccaaaaagaggcttcttgaacctcttggtctggttgaggaagcggctaagacggctcctggaaagaagaggcctgtagagcagtctcctcaggaaccggactcctccgcgggtattggcaaatcgggtgcacagcccgctaaaaagagactcaatttcggtcagactggcgacacagagtcagtcccagaccctcaaccaatcggagaacctcccgcagccccctcaggtgtgggatctcttacaatggcttcaggtggtggcgcaccagtggcagacaataacgaaggtgccgatggagtgggtagttcctcgggaaattggcattgcgattcccaatggctgggggacagagtcatcaccaccagcacccgaacctgggccctgcccacctacaacaatcacctctacaagcaaatctccaacagcacatctggaggatcttcaaatgacaacgcctacttcggctacagcaccccctgggggtattttgacttcaacagattccactgccacttctcaccacgtgactggcagcgactcatcaacaacaactggggattccggcctaagcgactcaacttcaagctcttcaacattcaggtcaaagaggttacggacaacaatggagtcaagaccatcgccaataaccttaccagcacggtccaggtcttcacggactcagactatcagctcccgtacgtgctcgggtcggctcacgagggctgcctcccgccgttcccagcggacgttttcatgattcctcagtacgggtatctgacgcttaatgatggaagccaggccgtgggtcgttcgtccttttactgcctggaatatttcccgtcgcaaatgctaagaacgggtaacaacttccagttcagctacgagtttgagaacgtacctttccatagcagctacgctcacagccaaagcctggaccgactaatgaatccactcatcgaccaatacttgtactatctctcaaagactattaacggttctggacagaatcaacaaacgctaaaattcagtgtggccggacccagcaacatggctgtccagggaagaaactacatacctggacccagctaccgacaacaacgtgtctcaaccactgtgactcaaaacaacaacagcgaatttgcttggcctggagcttcttcttgggctctcaatggacgtaatagcttgatgaatcctggacctgctatggccagccacaaagaaggagaggaccgtttctttcctttgtctggatctttaatttttggcaaacaaggaactggaagagacaacgtggatgcggacaaagtcatgataaccaacgaagaagaaattaaaactactaacccggtagcaacggagtcctatggacaagtggccacaaaccaccagagtgcccaagcacaggcgcagaccggctgggttcaaaaccaaggaatacttccgggtatggtttggcaggacagagatgtgtacctgcaaggacccatttgggccaaaattcctcacacggacggcaactttcacccttctccgctgatgggagggtttggaatgaagcacccgcctcctcagatcctcatcaaaaacacacctgtacctgcggatcctccaacggccttcaacaaggacaagctgaactctttcatcacccagtattctactggccaagtcagcgtggagatcgagtgggagctgcagaaggaaaacagcaagcgctggaacccggagatccagtacacttccaactattacaagtctaataatgttgaatttgctgttaatactgaaggtgtatatagtgaaccccgccccattggcaccagatacctgactcgtaatctgtaa

SEQ ID NO: 4805 - protein, 736 aa, Adeno-associated virus
MAADGYLPDWLEDNLSEGIREWWALKPGAPQPKANQQHQDNARGLVLPGYKYLGPGNGLDKGEPVNAADAAALEHDKAYDQQLKAGDNPYLKYNHADAEFQERLKEDTSFGGNLGRAVFQAKKRLLEPLGLVEEAAKTAPGKKRPVEQSPQEPDSSAGIGKSGAQPAKKRLNFGQTGDTESVPDPQPIGEPPAAPSGVGSLTMASGGGAPVADNNEGADGVGSSSGNWHCDSQWLGDRVITTSTRTWALPTYNNHLYKQISNSTSGGSSNDNAYFGYSTPWGYFDFNRFHCHFSPRDWQRLINNNWGFRPKRLNFKLFNIQVKEVTDNNGVKTIANNLTSTVQVFTDSDYQLPYVLGSAHEGCLPPFPADVFMIPQYGYLTLNDGSQAVGRSSFYCLEYFPSQMLRTGNNFQFSYEFENVPFHSSYAHSQSLDRLMNPLIDQYLYYLSKTINGSGQNQQTLKFSVAGPSNMAVQGRNYIPGPSYRQQRVSTTVTQNNNSEFAWPGASSWALNGRNSLMNPGPAMASHKEGEDRFFPLSGSLIFGKQGTGRDNVDADKVMITNEEEIKTTNPVATESYGQVATNHQSAQAQAQTGWVQNQGILPGMVWQDRDVYLQGPIWAKIPHTDGNFHPSPLMGGFGMKHPPPQILIKNTPVPADPPTAFNKDKLNSFITQYSTGQVSVEIEWELQKENSKRWNPEIQYTSNYYKSNNVEFAVNTEGVYSEPRPIGTRYLTRNL

SEQ ID NO: 4806 - DNA, 2460 bp, Adeno-associated virus
ggtaattcctccggaaattggcattgcgattccacatggctgggcgaccgagtcattaccaccagcacccggacttgggccctgcccacctacaacaaccacctctacaagcaaatctccagccaatcgggtgccaccaacgacaaccactacttcggctacagcaccccttgggggtattttgatttcaacagattccactgccatttctcaccacgtgactggcagcgactcatcaacaacaactggggattcatggctgccgatggttatcttccagattggctcgaggacactctctctgaaggaatcagacagtggtggaagctcaaacctggcccaccaccgccgaaacctaaccaacaacaccgggacgacagtaggggtcttgtgcttcctgggtacaagtacctcggacccttcaacggactcgacaaaggagagccggtcaacgaggcagacgccgcggccctcgagcacgacaaagcctacgaccaccagctcaagcaaggggacaacccgtacctcaaatacaaccacgcggacgctgaatttcaggagcgtcttcaagaagatacgtctttcgggggcaacctcgggcgagcagtcttccaggccaaaaagagggtactcgagcctcttggtctggttgaggaagctgttaagacggctcctggaaaaaagagacctatagagcagtctcctgcagaaccggactcttcctcgggcatcggcaaatcaggccagcagcccgctaagaaaagactcaattttggtcagactggcgacacagagtcagtcccagaccctcaaccaatcggagaaccccccgcagccccctctggtgtgggatctaatacaatggcttcaggcggtggggcaccaatggcagacaataacgaaggcgccgacggagtgggtaattcctcgggaaattggcattgcgattccacatggatgggcgacagagttatcaccaccagcacaagaacctgggccctccccacctacaataatcacctctacaagcaaatctccagcgaatcgggagccaccaacgacaaccactacttcggctacagcaccccctgggggtattttgactttaacagattccactgtcacttctcaccacgtgactggcagcgactcatcaacaacaactggggatttagacccaagaaactcaatttcaagctcttcaacatccaagtcaaggaggtcacgcagaatgatggaaccacgaccatcgccaataaccttaccagcacggtgcaggtcttcacagactctgagtaccagctgccctacgtcctcggttcggctcaccagggctgccttccgccgttcccagcagacgtcttcatgattcctcagtacggctacttgactctgaacaatggcagccaagcggtaggacgttcttcattctactgtctagagtattttccctctcagatgctgaggacgggaaacaacttcaccttcagctacacttttgaagacgtgcctttccacagcagctacgcgcacagccagagtctggatcggctgatgaatcctctcattgaccagtacctgtattacctgagcaaaactcagggtacaagtggaacaacgcagcaatcgagactgcagttcagccaagctgggcctagctccatggctcagcaggccaaaaactggctaccgggacccagctaccgacagcagcgaatgtctaagacggctaatgacaacaacaacagtgaatttgcttggactgcagccaccaaatattacctgaatggaagaaattctctggtcaatcccgggcccccaatggccagtcacaaggacgatgaggaaaagtatttccccatgcacggaaatctcatctttggaaaacaaggcacaggaactaccaatgtggacattgaatcagtgcttattacagacgaagaagaaatcagaacaactaatcctgtggctacagaacaatacggacaggttgccaccaaccatcagagtcagaacaccacagcttcctatggaagtgtggacagccagggaatcttacctggaatggtgtggcaggaccgcgatgtctatcttcaaggtcccatttgggccaaaactcctcacacggacggacactttcatccttctccgctcatgggaggctttggactgaaacaccctcctccccagatcctgatcaaaaacacacctgtgccagcgaatcccgcgaccactttcactcctggaaagtttgcttcgttcattacccagtattccaccggacaggtcagcgtggaaatagagtgggagctgcagaaagaaaacagcaaacgctggaacccagaaattcagtacacctccaactacaacaagtcggtgaatgtggagtttaccgtggacgcaaacggtgtttattctgaaccccgccctattggcactcgttaccttacccggaacttg

SEQ ID NO: 4807 - DNA, 3123 bp, Adeno-associated virus
gaattcgccctttctacggctgcgtcaactggaccaatgaaaactttcccttcaacgattgcgtcgacaagatggtgatctggtgggaggagggaaagatgaccgccaaggtcgtggaatctgccaaagccattctgggtggaggcaaggttcgtgtggaccagaaatgcaagtcttcggcccagatcgacccgactccggtgattgtcacctctaacaccaacatgtgcgccgtgattgacggaaactcgaccaccttcgagcaccagcagccgttgcaagaccggatgttcaaatttgaacttacccgccgtttggatcatgactttgggaaggtcaccaagcaggaagtcaaagactttttccggtgggctcaagatcacgtgactgaggtggagcatgagttctacgtcaaaaagggtggagccaagaaaaggcccgcccccgatgatgtatatataaatgagcccaagcgggcgcgcgagtcagttgcgcagccatcgacgtcagacgcggaagcttcgataaactacgcggacaggtaccaaaacaaatgttctcgtcacgtgggcatgaatctgatgctgtttccctgtcgacaatgcgaaagaatgaatcagaattcaaatatctgcttcacacacgggcaaaaagactgtttggaatgctttcccgtgtcagaatctcaacccgtttctgtcgtcagaaaaacgtatcagaaactttgttacattcatcatatcatgggaaaagtaccagacgcctgcactgcctgcgacctggtaaatgtggacttggatgactgtatttctgagcaataaatgacttaaatcaggtatggctgctgacggttatcttccagattggctcgaggacactctctctgaaggaatcagacagtggtggaagctcaaacctggcccaccaccgccgaaacctaaccaacaacaccgggacgacagtaggggtcttgtgcttcctgggtacaagtacctcggacccttcaacggactcgacaaaggagagccggtcaacgaggcagacgccgcggccctcgagcacgacaaagcctacgaccaccagctcaagcaaggggacaacccgtacctcaaatacaaccacgcggacgctgaatttcaggagcgtcttcaagaagatacgtctttcgggggcaacctcgggcgagcagtcttccaggccaaaaagagggtactcgagcctcttggtctggttgaggaagctgttaagacggctcctggaaaaaagagacctatagagcagtctcctgcagaaccggactcttcctcgggcatcggcaaatcaggccagcagcccgctaagaaaagactcaattttggtcagactggcgacacagagtcagtcccaggccctcaaccaatcggagaaccccccgcagccccctctggtgtgggatctaatacaatggcttcaggcggtggggcaccaatggcagacaataacgaaggcgccgacggagtgggtaattcctcgggaaattggcattgcgattccacatggatgggcgacagagttatcaccaccagcacaagaacctgggccctccccacctacaataatcacctctacaagcaaatctccagcgaatcgggagccaccaacgacaaccactacttcggctacagcaccccctgggggtattttgactttaacagattccactgtcacttctcaccacgtgactggcagcgactcatcaacaacaactggggatttagacccaagaaactcaatttcaagctcttcaacatccaagtcaaggaggtcacgcagaatgatggaaccacgaccatcgccaataaccttaccagcgcggtgcaggtcttcacagactctgagtaccagctgccctacgtcctcggttcggctcaccagggctgccttccgccgttcccagcagacgtcttcatgattcctcagtacggctacttgactctgaacaatggcagccaagcggtaggacgttcttcattctactgtctagagtattttccctctcagatgctgaggacgggaaacaacttcaccttcagctacacttttgaagacgtgcctttccacagcagctacgcgcacagccagagtctggatcggctgatgaatcctctcattgaccagtacctgtattacctgagcaaaactcagggtacaagtggaacaacgcagcaatcgagactgcagttcagccaagctgggcctagctccatggctcagcaggccaaaaactggctaccgggacccagctaccgacagcagcgaatgtctaagacggctaatgacaacaacaacagtgaatttgcttggactgcagccaccaaatattacctgaatggaagaaattctctggtcaatcccgggcccccagtggccagtcacaaggacgatgaggaaaagtatttccccatgcacggaaatctcatctttggaaaacaaggcacaggaactaccaatgtggacattgaatcagtgcttattacagacgaagaagaaatcagaacaactaatcctgtggctacagaacaatacggacaggttgccaccaaccatcagagtcagaacaccacagcttcctatggaagtgtggacagccagggaatcttacctggaatggtgtggcaggaccgcgatgtctatcttcaaggtcccatttgggccaaaactcctcacacggacggacactttcatccttctccgctcatgggaggctttggactgaaacaccctcctccccagatcctgatcaaaaacacacctgtgccagcgaatcccgcgaccactttcactcctggaaagtttgcttcgttcattacccagtattccacctgacaggtcagcgtggaaatagagtgggagctgcagaaagaaaacagcaaacgctggaacccagaaattcagtacacctccaactacaacaagtcggtgaatgtggagtttaccgtggacgcaaacggtgtttattctgaaccccgccctattggcactcgttaccttacccggaacttgtaatttcctgttaatgaataagccgatttatgcgtttcagttgaactttggtctctgcgaagggcgaattcgtttaaacct

SEQ ID NO: 4808 - protein, 735 aa, Adeno-associated virus
MAADGYLPDWLEDTLSEGIRQWWKLKPGPPPPKPNQQHRDDSRGLVLPGYKYLGPFNGLDKGEPVNEADAAALEHDKAYDHQLKQGDNPYLKYNHADAEFQERLQEDTSFGGNLGRAVFQAKKRVLEPLGLVEEAVKTAPGKKRPIEQSPAEPDSSSGIGKSGQQPAKKRLNFGQTGDTESVPGPQPIGEPPAAPSGVGSNTMASGGGAPMADNNEGADGVGNSSGNWHCDSTWMGDRVITTSTRTWALPTYNNHLYKQISSESGATNDNHYFGYSTPWGYFDFNRFHCHFSPRDWQRLINNNWGFRPKKLNFKLFNIQVKEVTQNDGTTTIANNLTSAVQVFTDSEYQLPYVLGSAHQGCLPPFPADVFMIPQYGYLTLNNGSQAVGRSSFYCLEYFPSQMLRTGNNFTFSYTFEDVPFHSSYAHSQSLDRLMNPLIDQYLYYLSKTQGTSGTTQQSRLQFSQAGPSSMAQQAKNWLPGPSYRQQRMSKTANDNNNSEFAWTAATKYYLNGRNSLVNPGPPVASHKDDEEKYFPMHGNLIFGKQGTGTTNVDIESVLITDEEEIRTTNPVATEQYGQVATNHQSQNTTASYGSVDSQGILPGMVWQDRDVYLQGPIWAKTPHTDGHFHPSPLMGGFGLKHPPPQILIKNTPVPANPATTFTPGKFASFITQYSTGQVSVEIEWELQKENSKRWNPEIQYTSNYNKSVNVEFTVDANGVYSEPRPIGTRYLTRNL

SEQ ID NO: 4809 - DNA, 3123 bp, Adeno-associated virus
gaattcgccctttctacggctgcgtcaactggaccaatgaaaactttcccttcaacgattgcgtcgacaagatggtgatctggtgggaggagggaaagatgaccgccaaggtcgtggaatctgccaaagccattctgggtggaagcaaggttcgtgtggaccagaaatgcaagtcttcggcccagatcgacccgactccggtgattgtcacctctaacaccaacatgtgcgccgtgattgacggaaactcgaccaccttcgagcaccagcagccgttgcaagaccggatgttcaaatttgaacttacccgccgtttggatcatgactttgggaaggtcaccaagcaggaagtcaaagactttttccggtgggctcaagatcacgtgactgaggtggagcatgagttctacgtcaaaaagggtggagccaagaaaaggcccgcccccgatgatgtatatataaatgagcccaagcgggcgcgcgagtcagttgcgcagccatcgacgtcagacgcggaagcttcgataaactacgcgggcaggtaccaaaacaaatgttctcgtcacgtgggcatgaatctgatgctgtttccctgtcgacaatgcgaaagaatgaatcagaattcaaatatctgcttcacacacgggcaaaaagactgtttggaatgctttcccgtgtcagaatctcaacccgtttctgtcgtcagaaaaacgtatcagaaactttgttacattcatcatatcatgggaaaagaaccagacgcctgcactgcctgcgacctggtaaatgtggacttggatgactgtatttctgagcaataaatgacttaaatcaggtatggctgctgacggttatcttccagattggctcgaggacactctctctgaaggaatcagacagtggtggaagctcaaacctggcccaccaccgccgaaacctaaccaacaacaccgggacgacagtaggggtcttgtgcttcctgggtacaagtacctcggacccttcaacggactcgacaaaggagagccggtcaacgaggcagacgccgcggccctcgagcacgacaaagcctacgaccaccagctcaagcaaggggacaacccgtacctcaaatacaaccacgcggacgctgaatttcaggagcgtcttcaagaagatacgtctttcgggggcaacctcgggcgagcagtcttccaggccaaaaagagggtactcgagcctcttggtctggttgaggaagctgttaagacggctcctggaaaaaagagacctatagagcagtctcctgcagaaccggactcttcctcgggcatcggcgaatcaggccagcagcccgctaagaaaagactcaattttggtcagactggcgacacagagtcagtcccagaccctcaaccaatcggagaaccccccgcagccccctctggtgtgggatctaatacaatggcttcaggcggtggggcaccaatggcagacgataacgaaggcgccgacggagtgggtaattcctcgggaaattggcattgcgattccacatggatgggcgacagagttatcaccaccagcacaagaacctgggccctccccacctacaataatcacctctacaagcaaatctccagcgaatcgggagccaccaacgacaaccactacttcggctacagcaccccctgggggtattttgactttaacagattccactgtcacttctcaccacgtgactggcagcgactcatcaacaacaactggggatttagacccaagaaactcaatttcaagctcttcaacatccaagtcaaggaggtcacgcagaatgatggaaccacgaccatcgccaataaccttaccagcacggtgcaggtcttcacagactctgagtaccagctgccctacgtcctcggttcggctcaccagggctgccttccgccgttcccagcagacgtcttcatgattcctcagtacggctacttgactctgaacaatggcagccaagcggtaggacgttcttcattctactgtctagagtattttccctctcagatgctgaggacgggaaacaacttcaccttcagctacacttttgaagacgtgcctttccacagcagctacgcgcacagccagagtctggatcggctgatgaatcctctcattgaccagtacctgtattacctgagcaaaactcagggtacaagtggaacaacgcagcaatcgagactgcagttcagccaagctgggcctagctccatggctcagcaggccaaaaactggctaccgggacccagctaccgacagcagcgaatgtctaagacggctaatgacaacaacaacagtgaatttgcttggactgcagccaccaaatattacctgaatggaagaaattctctggtcaatcccgggcccccaatggccagtcacaaggacgatgaggaaaagtatttccccatgcacggaaatctcatctttggaaaacaaggcacaggaactaccaatgtggacattgaatcagtgcttattacagacgaagaagaaatcagaacaactaatcctgtggctacagaacaatacggacaggttgccaccaaccatcagagtcaggacaccacagcttcctatggaagtgtggacagccagggaatcttacctggaatggtgtggcaggaccgcgatgtctatcttcaaggtcccatttgggccaaaactcctcacacggacggacactttcatccttctccgctcatgggaggctttggactgaaacaccctcctccccagatcctgatcaaaaacacacctgtgccagcgaatcccgcgaccactttcactcctggaaagtttgcttcgttcattacccagtattccaccggacaggtcagcgtggaaatagagtgggagctgcagaaagaaaacagcaaacgctggaacccagaaattcagtacacctccaactacaacaagtcggtgaatgtggagtttaccgtggacgcaaacggtgtttattctgaaccccgccctattggcactcgttaccttacccggaacttgtaatttcctgttaatgaataaaccgatttatgcgtttcagttgaactttggtctctgcgaagggcgaattcgcggccgcta

SEQ ID NO: 4810 - protein, 735 aa, Adeno-associated virus
MAADGYLPDWLEDTLSEGIRQWWKLKPGPPPPKPNQQHRDDSRGLVLPGYKYLGPFNGLDKGEPVNEADAAALEHDKAYDHQLKQGDNPYLKYNHADAEFQERLQEDTSFGGNLGRAVFQAKKRVLEPLGLVEEAVKTAPGKKRPIEQSPAEPDSSSGIGESGQQPAKKRLNFGQTGDTESVPDPQPIGEPPAAPSGVGSNTMASGGGAPMADDNEGADGVGNSSGNWHCDSTWMGDRVITTSTRTWALPTYNNHLYKQISSESGATNDNHYFGYSTPWGYFDFNRFHCHFSPRDWQRLINNNWGFRPKKLNFKLFNIQVKEVTQNDGTTTIANNLTSTVQVFTDSEYQLPYVLGSAHQGCLPPFPADVFMIPQYGYLTLNNGSQAVGRSSFYCLEYFPSQMLRTGNNFTFSYTFEDVPFHSSYAHSQSLDRLMNPLIDQYLYYLSKTQGTSGTTQQSRLQFSQAGPSSMAQQAKNWLPGPSYRQQRMSKTANDNNNSEFAWTAATKYYLNGRNSLVNPGPPMASHKDDEEKYFPMHGNLIFGKQGTGTTNVDIESVLITDEEEIRTTNPVATEQYGQVATNHQSQDTTASYGSVDSQGILPGMVWQDRDVYLQGPIWAKTPHTDGHFHPSPLMGGFGLKHPPPQILIKNTPVPANPATTFTPGKFASFITQYSTGQVSVEIEWELQKENSKRWNPEIQYTSNYNKSVNVEFTVDANGVYSEPRPIGTRYLTRNL

SEQ ID NO: 4811 - DNA, 3113 bp, Adeno-associated virus
gaattcgccctttctacggctgcgtcaactggaccaatgaaaactttcccttcaacgattgcgtcgacaagatggtgatctggtgggaggagggaaagatgaccgccaaggtcgtggaatctgccaaagccattctgggtggaagcaaggttcgtgtggaccagaaatgcaagtcttcggcccagatcgacccgactccggtgattgtcacctctaacaccaacatgtgcgccgtgattgacggaaactcgaccaccttcgagcaccagcagccgttgcaagaccggatgttcaaatttgaacttacccgccgtttggatcatgactttgggaaggtcaccaagcaggaagtcaaagactttttccggtgggctcaagatcacgtgactgaggtggagcatgagttctacgtcaaaaagggtggagccaagaaaaggcccgcccccgatgatgtatatataaatgagcccaagcgggcgcgcgagtcagttgcgcagccatcgacgtcagacgcggaagcttcgataaactacgcggacaggtaccaaaacaaatgttctcgtcacgtgggcatgaatctgatgctgtttccctgtcgacaatgcgaaagaatgaatcagaattcaaatatctgcttcacacacgggcaaaaagactgtttggaatgctttcccgtgtcagaatctcaacccgttcctgtcgtcagaaaaacgtatcagaaactttgttacattcatcatatcatgggaaaagtaccagacgcctgcactgcctgcgacctggtaaatgtggacttggatgactgtatttctgagcaataaatgacttaaatcaggtatggctgctgacggttatcttccagattggctcgaggacactctctctgaaggaatcagacagtggtggaagctcaaacctggcccaccaccgccgaaacctaaccaacaacaccgggacgacagtaggggtcttgtgcttcctgggtacaagtacctcggacccttcaacggactcgacaaaggagagccggtcaacgaggcagacgccgcggccctcgagcacgacaaagcctacgaccaccagctcaagcaaggggacaacccgtacctcaaatacaaccacgcggacgctgaatttcaggagcgtcttcaagaagatacgtctttcgggggcaacctcgggcgagcagtcttccaggccaaaaagagggtactcgagcctcttggtctggttgaggaagctgttaagacggctcctggaaaaaagagacctatagagcagtctcctgcagaaccggactcttcctcgggcatcggcaaatcaggccagcagcccgctaagaaaagactcaattttggtcagactggcgacacagagtcagtcccagaccctcaaccaatcggagaaccccccgcagccccctctggtgtgggatctaatacaatggcttcaggcggtggggcaccaatggcagacaataacgaaggcgccgacggagtgggtaattcctcgggaaattggcattgcgattccacatggatgggcgacagagttatcaccaccagcacaagaacctgggccctccccacctacaataatcacctctacaagcaaatctccagcgaatcgggagccaccaacgacaaccactacttcggctacagcaccccctgggggtattttgactttaacagattccactgtcacttctcaccacgtgactggcagcgactcatcaataacaactggggatttagacccaagaaactcaatttcaagctcttcaacatccaagtcaaggaggtcacgcagaatgatggaaccacgaccatcgccaataaccttaccagcacggtgcaggtcttcacagactctgagtaccagctgccctacgtcctcggttcggctcaccagggctgccttccgccgttcccagcagacgtcttcatgattcctcagtacggctacttgactctgaacaatggcagccaagcggtaggacgttcttcattctactgtctagagtattttccctctcagatgctgaggacgggaaacaacttcaccttcagctacacttttgaagacgtgcctttccacagcagctacgcgcacagccagagtctggatcggctgatgaatcctctcattgaccagtacctgtattacctgagcaaaactcagggtacaagtggaacaacgcagcaatcgagactgcagttcaaccaagctgggcctagctccatggctcagcaggccaaaaactggctaccgggacccagctaccgacagcagcgaatgtctaagacggctaatgacaacaacaacagtgaatttgcttggactgcagccaccaaatattacccgaatggaagaaattctctggtcaatcccgggcccccaatggccagtcacaaggacgatgaggaaaagtatttccccatgcacggaaatctcatctttggaaaacaaggcacaggaactaccaatgtggacattgaatcagtgcttattacagacgaagaagaaatcagaacgactaatcctgtggctacagaacaatacggacaggttgccaccaaccgtcagagtcagaacaccacagcttcctatggaagtgtggacagccagggaatcttacctggaatggtgtggcaggaccgcgatgtctatcttcaaggtcccatttgggccaaaactcctcacacggacggacactttcatccttctccgctcatgggaggctttggactgaaacaccctcctccccagatcctgatcaaaaacacacctgtgccagcgaatcccgcgaccactttcactcctggaaagtttgcttcgttcattacccagtattccaccggacaggtcagcgtggaaatagagtgggagctgcagaaagaaaacagcaaacgctggaacccggaaattcagtacacctccaactacaacaagtcggtgaatgtggagtttaccgtggacgcaaacggtgtttattctgaaccccgccctattggcactcgttaccttacccggaacttgtaatttcctgttaatgaataaaccgatttatgcgtttcagttgaactttggtctctgcgaagggcgaattc

SEQ ID NO: 4812 - protein, 735 aa, Adeno-associated virus
MAADGYLPDWLEDTLSEGIRQWWKLKPGPPPPKPNQQHRDDSRGLVLPGYKYLGPFNGLDKGEPVNEADAAALEHDKAYDHQLKQGDNPYLKYNHADAEFQERLQEDTSFGGNLGRAVFQAKKRVLEPLGLVEEAVKTAPGKKRPIEQSPAEPDSSSGIGKSGQQPAKKRLNFGQTGDTESVPDPQPIGEPPAAPSGVGSNTMASGGGAPMADNNEGADGVGNSSGNWHCDSTWMGDRVITTSTRTWALPTYNNHLYKQISSESGATNDNHYFGYSTPWGYFDFNRFHCHFSPRDWQRLINNNWGFRPKKLNFKLFNIQVKEVTQNDGTTTIANNLTSTVQVFTDSEYQLPYVLGSAHQGCLPPFPADVFMIPQYGYLTLNNGSQAVGRSSFYCLEYFPSQMLRTGNNFTFSYTFEDVPFHSSYAHSQSLDRLMNPLIDQYLYYLSKTQGTSGTTQQSRLQFNQAGPSSMAQQAKNWLPGPSYRQQRMSKTANDNNNSEFAWTAATKYYPNGRNSLVNPGPPMASHKDDEEKYFPMHGNLIFGKQGTGTTNVDIESVLITDEEEIRTTNPVATEQYGQVATNRQSQNTTASYGSVDSQGILPGMVWQDRDVYLQGPIWAKTPHTDGHFHPSPLMGGFGLKHPPPQILIKNTPVPANPATTFTPGKFASFITQYSTGQVSVEIEWELQKENSKRWNPEIQYTSNYNKSVNVEFTVDANGVYSEPRPIGTRYLTRNL

SEQ ID NO: 4813 - DNA, 3122 bp, Adeno-associated virus
agcggccgcgaattcgccctttctacggctgcgtcaactggaccaatgaaaactttcccttcaacgattgcgtcgacaagatggtgatctggtgggaggagggaaagatgaccgccaaggtcgtggaatctgccaaagccattctgggtggaagcaaggttcgtgtggaccagaaatgcaggtcttcggcccagatcgacccgactccggtgattgtcacctctaacaccaacatgtgcgccgtgattgacggaaactcgaccaccttcgagcaccagcagccgttgcaagaccggatgttcaaatttgaacttacccgccgtttggatcatgactttgggaaggtcaccaagcaggaagtcaaagactttttccggtgggctcaagatcacgtgactgaggtggagcatgagttctacgtcaaaaagggtggagccaagaaaaggcccgcccccgatgatgtatatataaatgagcccaagcgggcgcgcgagtcagttgcgcagccatcgacgtcagacgcggaagcttcgataaactacgcggacaggtaccaaaacaaatgttctcgtcacgtgggcatgaatctgatgctgtttccctgtcgacaatgcgaaagaatgaatcagaattcaaatatctgcttcacacacgggcaaaaagactgtttggaatgctttcccgtgtcagaatctcaacccgtttctgtcgtcagaaaaacgtatcagaaactttgttacattcatcatatcatgggaaaagtaccagacgcctgcactgcctgcgacctggtaaatgtggacttggatgactgtatttctgagcaataaatgacttaaatcaggtatggctgctgacggttatcttccagattggctcgaggacactctctctgaaggaatcagacagtggtggaagctcaaacctggcccaccaccgccgaaacctaaccaacaacaccgggacgacagtaggggtcttgtgcttcctgggtacaagtacctcggacccttcaacggactcgacaaaggagagccggtcaacgaggcagacgccgcggccctcgagcacgacaaagcctacgaccaccagctcaagcaaggggacaacccgtacctcaaatacaaccacgcggacgctgaatttcaggagcgtcttcaagaagatacgtctttcgggggcaacctcgggcgagcagtcttccaggccaaaaagagggtactcgagcctcttggtctggttgaggaagctgttaagacggctcctggaaaaaagagacctatagagcagtctcctgcagaaccggactcttcctcgggcatcggcaaatcaggccagcagcccgctaagaaaagactcaattttggtcagactggcgacacagagtcagtcccagaccctcaaccaatcggagaaccccccgcagccccctctggtgtgggatctaatacaatggcttcaggcggtggggcaccaatggcagacaataacgaaggcgccgacggagtgggtaattcctcgggaaattggcattgcgattccacatggatgggcgacagagttatcaccaccagcacaagaacctgggccctccccacctacaataatcgcctctacaagcaaatctccagcgaatcgggagccaccaacgacaaccactacttcggctacagcaccccctgggggtattttgactttaacagattccactgtcacttctcaccacgtgactggcagcgactcatcaacaacaactggggatttagacccaagaaactcaatttcaagctcttcaacatccaagtcaaggaggtcacgcagaatgatggaaccacgaccatcgccaataaccttaccagcacggtgcaggtcttcacagactctgagtaccagctgccctacgtcctcggttcggctcaccagggctgccttccgccgttcccagcagacgtcttcatgattcctcagtacggctacttgactctgaacaatggcagccaagcggtaggacgttcttcattctactgtctagagtattttccctctcagatgctgaggacgggaaacaacttcaccttcagctacacttttgaagacgtgcctttccacagcagctacgcgcacagccagagtctggatcggctgatgaatcctctcattgaccagtacctgtattacctgagcaaaactcagggtacaagtggaacaacgcagcaatcgagactgcagttcagccaagctgggcctagctccatggctcagcaggccaaaaactggctaccgggacccagctaccgacagcagcgaatgtctaagacggctaatgacaacaacaacagtgaatttgcttggactgcagccaccaaatattacctgaatggaagaaattctctggtcaatcccgggcccccaatggccagtcacaaggacgatgaggaaaagtatttccccatgcacggaaatctcatctttggaaaacaaggcacaggaactaccaatgtggacattgaatcagtgcttattacagacgaagaagaaatcagaacaactaatcctgtggctacagaacaatacggacaggttgccaccaaccatcagagtcagaacaccacagcttcctatggaagtgtggacagccagggaatcttacctggaatggtgtggcaggaccgcgatgtctatcttcaaggtcccatttgggccaaaactcctcacacggacggacactttcatccttctccgctcatgggaggctttggactgaaacaccctcctccccagatcctgatcaaaaacacacctgtgccagcgaatcccgcgaccactttcactcctggaaagtttgcttcgttcattacccagtattccaccggacaggtcagcgtggaaatagagtgggagctgcagaaagaaaacagcaaacgctggaacccagaaattcagtacacctccaactacaacaagtcggtgaatgtggagtttaccgtggacgcaaacggtgtttattctgaaccccgccctattggcactcgttaccttacccggaacttgtaatttcctgttaatgaataaaccgatttatgcgtttcagttgaactttggtctctgcgaagggcgaattc

SEQ ID NO: 4814 - protein, 735 aa, Adeno-associated virus
MAADGYLPDWLEDTLSEGIRQWWKLKPGPPPPKPNQQHRDDSRGLVLPGYKYLGPFNGLDKGEPVNEADAAALEHDKAYDHQLKQGDNPYLKYNHADAEFQERLQEDTSFGGNLGRAVFQAKKRVLEPLGLVEEAVKTAPGKKRPIEQSPAEPDSSSGIGKSGQQPAKKRLNFGQTGDTESVPDPQPIGEPPAAPSGVGSNTMASGGGAPMADNNEGADGVGNSSGNWHCDSTWMGDRVITTSTRTWALPTYNNRLYKQISSESGATNDNHYFGYSTPWGYFDFNRFHCHFSPRDWQRLINNNWGFRPKKLNFKLFNIQVKEVTQNDGTTTIANNLTSTVQVFTDSEYQLPYVLGSAHQGCLPPFPADVFMIPQYGYLTLNNGSQAVGRSSFYCLEYFPSQMLRTGNNFTFSYTFEDVPFHSSYAHSQSLDRLMNPLIDQYLYYLSKTQGTSGTTQQSRLQFSQAGPSSMAQQAKNWLPGPSYRQQRMSKTANDNNNSEFAWTAATKYYLNGRNSLVNPGPPMASHKDDEEKYFPMHGNLIFGKQGTGTTNVDIESVLITDEEEIRTTNPVATEQYGQVATNHQSQNTTASYGSVDSQGILPGMVWQDRDVYLQGPIWAKTPHTDGHFHPSPLMGGFGLKHPPPQILIKNTPVPANPATTFTPGKFASFITQYSTGQVSVEIEWELQKENSKRWNPEIQYTSNYNKSVNVEFTVDANGVYSEPRPIGTRYLTRNL

SEQ ID NO: 4815 - protein, 733 aa, Adeno-associated virus
MAADGYLPDWLEDNLSEGIREWWDLKPGAPKPKANQQKQDDGRGLVLPGYKYLGPFNGLDKGEPVNAADAAALEHDKAYDQQLKAGDNPYLRYNHADAEFQERLQEDTSFGGNLGRAVFQAKKRVLEPLGLVEEGAKTAPGKKRPLESPQEPDSSSGIGKKGKQPAKKRLNFEEDTGAGDGPPEGSDTSAMSSDIEMRAAPGGNAVDAGQGSDGVGNASGDWHCDSTWSEGKVTTTSTRTWVLPTYNNHLYLRLGTTSNSNTYNGFSTPWGYFDFNRFHCHFSPRDWQRLINNNWGLRPKAMRVKIFNIQVKEVTTSNGETTVANNLTSTVQIFADSSYELPYVMDAGQEGSLSPFPNDVFMVPQYGYCGIVTGENQNQTDRNAFYCLEYFPSQMLRTGNNFEMAYNFGKVPFHSMYAYSQSPDRLMNPLLDQYLWHLQSTTSGETLNQGNAATTFGKIRSGDFAFYRKNWLPGPCVKQQRLSKTASQNYKIPASGGNALLKYDTHYTLNNRWSNIAPGPPMATAGPSDGDFSNAQLIFPGPSVTGNTTTSANNLLFTSEEEIAATNPRDTDMFGQIADNNQNATTAPITGNVTAMGVLPGMVWQNRDIYYQGPIWAKIPHADGHFHPSPLIGGFGLKHPPPQIFIKNTPVPANPATTFTAARVDSFITQYSTGQVAVQIEWEIEKERSKRWNPEVQFTSNYGNQSSMLWAPDTTGKYTEPRVIGSRYLTNHL

SEQ ID NO: 4816 - protein, 733 aa, Adeno-associated virus
MAADGYLPDWLEDNLSEGIREWWDLKPGAPKLKANQQKQDDGRGLVLPGYKYLGPFHGLDKGEPVNAADAAALEHDKAYDQQLKAGDNPYLRYNHADAEFQERLQEDTSFGGNLGRAVFQAKKRVLEPLGLVEEGAKTAPGKKRPLESPQEPDSSSGIGKKGKQPAKKRLNFEEDTGAGDGPPEGSDTSAMSSDIEMRAAPGGNAVDAGQGSDGVGNASGDWHCDSTWSEGKVTTTSTRTWVLPTYNNHLYLRLGTTSNSNTYNGFSTPWGYFDFNRFHCHFSPRDWQRLINNNWGLRPKAMRVKIFNIQVKEVTTSNGETTVANNLTSTVQIFADSSYELPYVMDAGQEGSLPPFPNDVFMVPQYGYCGIVTGENQNQTDRNAFYCLEYFPSQMLRTGNNFEMAYNFEKVPFHSMYAHSQSLDRLMNPLLDQYLWHLQSTTSGETLNQGNAATTFGKIRSGDFAFYRKNWLPGPCVKQQRFSKTASQNYKIPASGGNALLKYDTHYTLNNRWSNIAPGPPMATAGPSDGDFSNAQLIFPGPSVTGNTTTSANNLLFTSEGEIAATNPRDTDMFGQIADNNQNATTAPITGNVTAMGVLPGMVWQNRDIYYQGPIWAKIPHADGHFHPSPLIGGFGLKHPPPQIFIKNTPVPANPATTFTAARVDSFITQYSTGQVAVQIEWEIEKERSKRRNPEVQFTSNYGNQSSMLWAPDTTGKYTEPRVIGSRYLTNHL

SEQ ID NO: 4817 - protein, 733 aa, Adeno-associated virus
MAADGYLPDWLEDNLSEGIREWWDLKPGAPKPKANQQKQDDGRGLVLPGYEYLGPFNGLDKGEPVNAADAAALEHDKAYDQQLKAGDNPYLRYNHADAEFQERLQEDTSFGGNLGRAVFQAKKRVLEPLGLVEEGAKTAPGKKRPLESPQEPDSSSGIGKKGKQPAKKRLNFEEDTGAGDGPPEGSDTSAMSSDIEMRAAPGGNAVDAGQGSDGVGNASGDWHCDSTWSEGKVTTTSTRTWVLPTYNNHLYLRLGTTSNSNTYNGFSTPWGYFDFNRFHCHFSPRDWQRLINNNWGLRPKAMRVKIFNIQVKEVTTSNGETTVANNLTSTVQIFADSSYELPYVMDAGQEGSLPPFPNDVFMVPQYGYCGIVTGENQNQTDRNAFYCLEYFPSQMLRTGNNFETAYNFEKVPFHSMYAHSQSLDGLMNPLLDQYLWHLQSTTSGETLNQGNAATTFGKIRSGDFAFYRKNWLPGPCVKQQRFSKTASQNYKIPASGGNALLKYDTHYTLNNRWSNIAPGPPMATAGPSDGDFSNAQLIFPGPSVTGNTTTSANNLLFTSEEEIAATNPRDTDMFGQIADNNQNATTAPITGNVTAMGVLPGMVWQNRDIYYQGPIWAKIPHADGHFHPSPLIGGFGLKHPPPQIFIKNTPVPAYPATTFTAARVDSFITQYSTGQVAVQIEWEIEKERSKRWNPEVQFTSNCGNQSSMLWAPDTTGKYTEPRVIGSRYLTNHL

SEQ ID NO: 4818 - protein, 735 aa, Adeno-associated virus
MAADGYLPDWLEDTLSEGIRQWWKLKPGPPPPKPNQQHRDDSRGLVLPGYKYLGPFNGLDKGEPVNEADAAALEHDKAYDHQLKQGDNPYLKYNHADAEFQERLQEDTSFGGNLGRAVFQAKKRVLEPLGLVEEAVKTAPGKKRPIEQSPAEPDSSSGIGKSGQQPAKKRLNFGQTGDTESVPDPQPIGEPPAAPSGVGSNTMASGGGAPMADNNEGADGVGNSSGNWHCDSTWMGDRVITTSTRTWALPTYNNHLYKQISSESGATNDNHYFGYSTPWGYFDFNRFHCHFSPRDWQRLINNNWGFRPKKLNFKLFNIQVKEVTQNDGTTTIANNLTSTVQVFTDSEYQLPYVLGSAHQGCLPPFPADVFMIPQYGYLTLNNGSQAVGRSSFYCLEYFPSQMLRTGNNFTFSYTFEDVPFHSSYAHSQSLDRLMNPLIDQYLYYLSKTQGTSGTTQQSRLQFSQAGPSSMAQQAKNWLPGPSYRQQRMSKTANDNNNSEFAWTAATKYYLNGRNSLVNPGPPMASHKDDEEKYFPMHGNLIFGKQGTGTTNVDIESVLITDEEEIRTTNPVATEQYGQVATNHQSQNTTASYGSVDSQGILPGMVWQDRDVYLQGPIWAKIPHTDGHFHPSPLMGGFGLKHPPPQILIKNTPVPANPATTFTPGKFASFITQYSTGQVSVEIEWELQKENSKRWNPEIQYTSNYNKSVNVEFTVDANGVYSEPRPIGTRYLTRNL

SEQ ID NO: 4819 - DNA, 3127 bp, Adeno-associated virus
gcggccgcgaattcgcccttcgcagagaccaaagttcaactgaaacgaatcaaccggtttattgattaacatgcaattacagattacgggtgaggtaacgagtgccaatagggcgaggctcagagtaaacaccctggctgtcaacggcaaagtccacaccagtctgcttttcaaagttggaggtgtactgaatctccgggtcccagcgcttgctgttttccttctgcagctcccactcgatttccacgctgacttgtccggtgctgtactgtgtgatgaacgaagcaaacttggcaggagtaaacacctccggaggattagcgggaacgggagtgttcttgatcaggatctgaggaggcggatgtttaagtccaaagccgcccatcaaaggagacgggtgaaagttgccatccgtgtgaggaatcttggcccagatgggaccctgcaggtacacgtcccggttctgccagaccatgccaggtaaggctccctggttgttgacaacttgtgtctgggctgcagtattagccgcttgtaagttgctgctgactatcccgtattcttccgtggctacaggattagtaggacgaatttcttcttcatttgtcattaacacattttccaatgtagttttgttagttgctccagtttttccaaaaatcaggactccgctggatgggaaaaagcggtcctcgtcgtccttgtgagttgccatggcgacgccgggattaaccaacgagtttctgccgttcaggtgatatttggtggcaccagtccaagcaaagttgctgttgttgttttgatccagcgttttggagaccctttgttgccggaagcagggtccaggtaaccaattcttggcttgttcggccatagttgaaggcccgccctggtaaaactgcagttcccgattgccagctgtgcctcctgggtcactctgtgttctggccaggtagtacaagtactggtcgatgaggggattcatcagccggtccaggctctggctgtgtgcgtagctgctgtggaaaggcacgtcctcgaagctgtagctgaactcaaagttgttgcccgttctcagcatctgagaggggaagtactccaggcagtagaaggaggaacgtcccacagactgactgccattgttgagagtcaggtagccgtactgaggaatcatgaagacgtccgccgggaacggaggcaggcagccctggtgcgcagagccgaggacgtacggcagctggtattccgagtccgagaatacctgaatcgtgctggtaaggttattagcgatggtcgtaacgccgtcattcgtcgtgacctccttgacctggatgttgaagagcttgaaccgcagcttcttgggccggaatccccagttgttgttgatgagtcgctgccagtcacgtggtgagaagtggcagtggaatctgttaaagtcaaaatacccccagggggtgctgtagccgaagtaggtgttgtcgttggtactacctgcagtttcactggagatttgctcgtagaggtggttgttgtaggtgggcagggcccaggttcgggtgctggtggtaatgactctgtcgcccagccatgtggaatcgcaatgccaatttcctgaggcattacccactccgtcggcaccttcgttattgtctgccattggtgcgccaccgcctgcagccactgtaccagatcccacactagagggcgctgctggaggttctccgagaggttgagggtcggggactgactctgagtcgccagtctgaccgaaattgagtctctttctggcgggctgctggcccttcttgccgatgcccgtggaggagtcgggggaacgctgaggtgacggctctaccggtctcttctttgcaggagccgtcttagcgccttcctcaaccagaccgagaggttcgagaacccgcttcttggcctggaagactgctcgcccgaggttgcccccaaatgacgtatcttcttgcagacgctcctgaaactcggcgtcggcgtggttataccgcaggtacgggttgtcacccgcattgagctgctggtcgtaggccttgtcgtgctcgagggccgctgcgtccgccgcgttgacgggctcccccttgtcgagtccgttgaagggtccgaggtacttgtagccaggaagcaccagaccccggccgttgtcctgcttttgctggttggctttgggtttcggggctccaggtttcaggtcccaccactcgcgaatgccctcagagaggttgtcctcgagccaatctggaagataaccatcggcagccatacctgatttaaatcatttattgttcaaagatgcagtcatccaaatccacattgaccagatcgcaggcagtgcaagcgtctggcacctttcccatgatatgatgaatgtagcacagtttctgatacgcctttttgacgacagaaacgggtttagattctgacacgggaaagcactctaaacagtctttctgtccgtgagtgaagcagatatttgaattctgattcattctctcgcattgtctgcagggaaacagcatcagattcatgcccacgtgacgagaacatttgttttggtacctgtctgcgtagttgatcgaagcttccgcgtctgacgtcgatggctgcgcaactgactcgcgcacccgtttgggctcacttatatctgcgtcactgggggcgggtcttttcttggctccaccctttttgacgtagaattcatgctccacctcaaccacgtaatcctttgcccaccggaaaaagtctttgacttcctgcttggtgaccttcccaaagtcatgatccagacggcgggtgagttcaaatttgaacatccggtcttgcaacggctgctggtgttcgaaggtcgttgagttcccgtcgatcacggcgcacatgttggtgttggagatgacgatcgcgggagtcgggtctatctgggccgaggacttgcatttctggtccacgcgcaccttgcttcctccgagaatggctttggccgactccacgaccttggcggtcatcttcccctcctcccaccagatcaccatcttgtcgacacagtcgttgaagggaaagttctcattggtccagttgacgcagccgtagaaagggcgaattc

SEQ ID NO: 4820 - DNA, 3106 bp, Adeno-associated virus
gcggccgcgaattcgcccttcgcagagaccaaagttcaactgaaacgaatcaaccggtttattgattaacaagtaattacaggttacgggtgaggtaacgggtgccaatggggcgaggctcagtataaaccccttcgttgttgacagcaaattccacattattagacttggcataatttgaggtgtactgaatctctggattccagcgtttgctgttttctttctgcagttcccactcgatctccacgctgacctggccggtgctgtactgcgtgataaatgaggcaaacttggcaggagtaaacacctctggaggattagcaggtaccggggtgtttttgatgagaatttgaggaggcgggtgtttgagtccaaatccgcccatcaggggagacgggtgaaagttgccgtccgtgtgaggaattttggcccagatgggaccctgcaggcacacgtcccggttctgccagaccatgccgggcagagccccctggctgttgacagtctgtgtctggggtccggccgtagacgattgcaggttgctggagaccacaccgtattcttctgtagccacgggattggtggttttgatctcctcctcgctggtcattagcacgttttccagcgttgtcttgttggcagcccccgttttgccaaaaaccagcactccgttgatgggaaagaactggtcctcgtcgtccttgttggtggccatggctacgcccgggttggttaatgaatttctaccattcagatggtatttagtggccccggtccaggcaaagttactgttgttgttgctgtctatgttttttgacagtctctgctgccgataacagggtccgggcagccagttctttgattgctcggccatggtgttgggcccagcctgatggaactgcagctcccttgtggaccccgtagtgctctgggtccgggccaggtagtacaggtactggtcgatgaggggattcatcagccggtctaggctctggctgtgcacatagctgctgtggaaaggcacttcctcaaaggtgtagctgaattcaaagttattgcccgttctcagcatctgagaaggaaagtactccaggcagtagaaggaggaacgtcccacagactgactgccgttgtttagagtcagatatccgtactgaggaatcatgaacacgtccgcagggaacggagggaggcagccctggtgcgcagagccgaggacgtacggcagttggtactccgagtccgagaagacctgaatcgtgctggtaaggttattagcgatggtcgtaacgccgtcgttcgtcgtgacctccttgacctggatgttgaacaacttgaaccgcagctttctgggccggaatccccagttgttgttgatgagtcgctgccagtcacgtggtgagaagtggcagtggaatctgttgaagtcaaaatagccccagggggtgctgtagctgaagaagtggttgtcgttggtagccccgctctgacttgatatctgcttgtagaggtggttgttgtaggtgggcagggcccaggtgcgggtgctggtggtgatgactctgtcgcccagccatgtggaatcgcaatgccaatttccggaggcattacccactccgtcggcgccttcgttattgtctgccattggtgcgccaccgcctgcagccattgtaccagatcccagacctgagggcgcggcgggaggttctccgagaggttgggggtcgggcactgactctgagtcgccagtctgcccaaagttgagcttctttttagcgggctgctggcctttcttgccgatgcccgtggaggagtcgggggattctatgggtctcttctttccaggagccgtcttagcgacttcctcaaccagaccgagaggttcgagaacccgcttcttggcctggaagactgctcgcccgaggttgcccccaaaagacgtatcttcttgaagacgctcctgaaactcggcgtcggcgtggttgtacttgaggtacgggttgtccccctgctcgagctgcttgtcgtaggccttgtcgtgctcgagggccgcggcgtctgcctcgttgaccggctctcccttgtcgagtccgttgaagggtctgaggtacttgtagccaggaagcaccagaccccggccgtcgtcctgcttttgctggttggctttgggtttcggggctccaggtttcaagtcccaccactcgcgaatgccctcagagaggttgtcctcgagccaatctggaagataaccatcggcagccatacctggtttaagtcatttattgctcagaaacacagtcatccaggtccacgttgaccagatcgcaggccgagcaagcaatctcgggagcccgccccagcagatgatgaatggcacagagtttccgatacgtcctctttctgacgaccggttgagattctgacacgccggggaaacattctgaacagtctctggtcccgtgcgtgaagcaaatgttgaaattctgattcactctctcgcatgtcttgcagggaaacagcatctgaagcatgcccgcgtgacgagaacatttgttttggtacctgtcggcaaagtccaccggagctccttccgcgtctgacgtcgatggattcgcgactgaggggcaggcccgcttgggctcgcttttatccgcgtcatcgggggcgggtctcttgttggccccaccctttctgacgtagaacccatgcgccacctcggtcacgtgatcctgcgcccagcggaagaaccttttgacttcctgctttgtcaccttgccaaagttatgctccagacggcgggtgggttcaaatttgaacatccggtcctgcaacggctgctggtgctcgaaggtggcgctgttcccgtcaatcacggcgcacatgttggtgttggaggtgacggtcacgggggtggggtcgatctgggcggacgacttgcacttttggtccacgcgcaccttgctgccgccgagaatggccttggcggactccacgaccttggccgtcatcttgccctcctcccaccagatcaccatcttgtcggcgcaatcgttgaagggaaagttctcattggtccagttgacgcagccgtagaaagggcgaattc

SEQ ID NO: 4821 - DNA, 3102 bp, Adeno-associated virus
gcggccgcgaattcgcccttcgcagagaccaaagttcaactgaaacgaatcaaccggtttattgattaacaagtaattacaggttacgggtgaggtaacgggtgccaatggggcgaggctcagtataaaccccttcgttgttgacagcaaattccacattattagacttggcataatttgaggtgtactgaatctctggattccagcgtttgctgttttctttctgcagttcccactcgatctccacgctgacctggccggtgctgtactgcgtgataaatgaggcaaacttggcaggagtaaacacctctggaggattagcaggtaccggggtgtttttgatgagaatttgaggaggcgggtgtttgagtccaaatccgcccatcaggggagacgggtgaaagttgccgtccgtgtgaggaatttcggcccagatgggaccctgcaggtacacgtcccggttctgccagaccatgccgggcagagccccctggctgttgacagtctgtgtccggggtccggccgtagacgattgcaggttgctggagaccacaccgtattcttctgtagccacgggattggtggttttgatctcctcctcgctggtcattagcacgttttccagcgttgtcttgttggcagcccccgttttgccaaaaaccagcactccgttgatgggaaggaactggtcctcgtcgtccttgttggtggccatggctacgcccgggttggttaatgaatttctaccattcagatggtatttagtggccccggtccaggcaaagttactgttgttgttgctgtctatgttttttgacagtctctgctgccgataacagggtccgggcagccagttctttgattgctcggccacggtgttgggcccagcctgatggaactgcagctcccttgtggaccccgtagtgctctgggtccgggccaggtagtacaggtactggtcgatgaggggattcatcagccggtccaggctctggctgtgcgcatagctgctgtggaaaggcacttcctcaaaggtgtagctgaattcaaagttattgcccgttctcagcatctgagaaggaaagtactccaggcagcagaaggaggaacgtcccacagactgactgccgttgtttagagtcagatatccgtactgaggaatcatgaacacgtccgcagggaacggagggaggcagccctggtgcgcagagccgaggacgtacggcagttggtactccgagtccgagaagacctgaatcgtgctggtaaggttattagcgatggtcgtaacgccgtcgttcgtcgtgacctccttgacctggatgttgaacaacttgaaccgcagctttctgggccggaatccccagttgttgttgatgagtcgctgccagtcacgtggtgagaagtggcagtggaatctgttgaagtcaaaatagccccagggggtgctgtagccgaagaagtggttgtcgttggtagccccgctctgacttgatatctgcttgtagaggtggttgttgtaggtgggcagggcccaggtgcgggtgctggtggtgatgactctgtcgcccagccatgtggaatcgcaatgccaatttccggaggcattacccactccgtcggcgccttcgttattgtctgccattggtgcgccaccgcctgcagccattgtaccagatcccagacctgagggcgcggcgggaggttctccgagaggttgggggtcgggcactgactctgagtcgccagtctgcccaaagttgagcttctttttagcgggctgctggcctttcttgccgatgcccgtggaggagtcgggggattctatgggtctcttctttccggaagccgtcttagcgccttcctcaaccagaccgagaggttcgagaacccgcttcttggcctggaagactgctcgcccgaggttgcccccaaaagacgtatcttcttgaagacgctcctgaaactcggcgtcggcgtggttgtacttgaggtacgggttgtccccctgctcgagctgcttgtcgtaggccttgtcgtgctcgagggccgcggcgtctgcctcgttgaccggctctcccttgtcgagtccgttgaagggtccgaggtacttgtagccaggaagcaccagaccccggccgtcgtcctgcttttgctggttggctttgggtttcggggctccaggtttcaagtcccaccactcgcgaatgccctcagagaggttgtcctcgagccaatctggaagataaccatcggcagccatacctggtttaagtcatttattgctcagaaacacagtcatccaggtccacgttgaccagatcgcaggccgagcaagcaatctcgggagcccgccccagcagatgatgaatggcacagagtttccgatacgtcctctttctgacgaccggttgagattctgacacgccggggaaacattctgaacagtctctggtcccgtgcgtgaagcaaatgttgaaattctgattcattctctcgcatgtcttgcagggaaacagcatctgaagcatgcccgcgtgacgagaacatttgttttggtacctgtcggcaaagtccaccggagctccttccgcgtctgacgtcgatggatccgcgactgaggggcaagcccgcttgggctcgcttttatccgcgtcatcgggggcgggtctcttgttggctccaccctttctgacgtagaactcatgcgccacctcggtcacgtgatcctgcgcccagcggaagaactctttgacttcctgctttgtcaccttgccaaagtcatgctccagacggcgggtgagttcaaatttgaacatccggtcttgtaacggctgctggtgctcgaaggtggtgctgttcccgtcaatcacggcgcacatgttggtgttggaagtgacgatcacgggggtgggatcgatctgggcggacgacttgcacttttggtccacgcgcaccttgctgccgccgagaatggccttggcggactccacgaccttggccgtcatcttgccctcctcccaccagatcaccatcttgtcgacgcaatcgttgaagggaaagttctcattggtccagttgacgcagccgaagggcgaattc

SEQ ID NO: 4822 - protein, 728 aa, Adeno-associated virus
MAADGYLPDWLEDNLSEGIREWWDLKPGAPKPKANQQKQDDGRGLVLPGYRYLGPFNGLDKGEPVNEADAAALEHDKAYDKQLEQGDNPYLKYNHADAEFQERLQEDTSFGGNLGRAVFQAKKRVLEPLGLVEEGAKTAPGKKRPIESPDSSTGIGKNGQPPAKKKLNFGQTGDSESVPDPQPLGEPPAAPSGLGSGTMAAGGGAPMADNNEGADGVGNASGNWHCDSTWLGDRVITTSTRTWALPTYNNHLYKQISSQSGATNDNHFFGYSTPWGYFDFNRFHCHFSPRDWQRLINNNWGFRPRKLRFKLFNIQVKEVTTNDGVTTIANNLTSTIQVFSDSEYQLPYVLGSAHQGCLPPFPADVFMIPQYGYLTLNNGSQSVGRSSFYCLEYFPSQMLRTGNNFEFSYTFEEVPFHSSYAHSQSLDRLMNPLIDQYLYYLARTQSTTGSTRELQFHQAGPNTMAEQSKNWLPGPCYRQQRLSKNIDSNNNSNFAWTGATKYHLNGRNSLTNPGVAMATNKDDEDQFFPINGVLVFGKTGAANKTTLENVLMTSEEEIKTTNPVATEEYGVVSSNLQSSTAGPQTQTVNSQGALPGMVWQNRDVYLQGPIWAKIPHTDGNFHPSPLMGGFGLKHPPPQILIKNTPVPANPPEVFTPAKFASFITQYSTGQVSVEIEWELQKENSKRWNPEIQYTSNYAKSNNVEFAVNNEGVYTEPRPIGTRYLTRNL

SEQ ID NO: 4823 - DNA, 2187 bp, Adeno-associated virus
atggctgccgatggttatcttccagattggctcgagggcaacctctctgagggcattcgcgagtggtgggacttgaaacctggagccccgaaacccaaagccaaccagcaaaagcaggacgacggccggggtctggtgcttcctggctacaggtacctcggacccttcaacggactcgacaagggagagccggtcaacgaggcagacgccgcggccctcgagcacgacaaggcctacgacaagcagctcgagcagggggacaacccgtacctcaagtacaaccacgccgacgccgagtttcaggagcgtcttcaagaagatacgtcttttgggggcaacctcgggcgagcagtcttccaggccaagaagcgggttctcgaacctctcggtctggttgaggaaggcgctaagacggctcctggaaagaagagacccatagaatcccccgactcctccacgggcatcggcaagaacggccagccgcccgctaaaaagaagctcaactttgggcagactggcgactcagagtcagtgcccgacccccaacctctcggagaacctcccgccgcgccctcaggtctgggatctggtacaatggctgcaggcggtggcgcaccaatggcagacaataacgaaggcgccgacggagtgggtaatgcctccggaaattggcattgcgattccacatggctgggcgacagagtcatcaccaccagcacccgcacctgggccctgcccacctacaacaaccacctctacaagcagatatcaagtcagagcggggctaccaacgacaaccacttcttcggctacagcaccccctggggctattttgacttcaacagattccactgccacttctcaccacgtgactggcagcgactcatcaacaacaactggggattccggcccagaaagctgcggttcaagttgttcaacatccaggtcaaggaggtcacgacgaacgacggcgttacgaccatcgctaataaccttaccagcacgattcaggtcttctcggactcggagtaccaactgccgtacgtcctcggctctgcgcaccagggctgcctccctccgttccctgcggacgtgttcatgattcctcagtacggatatctgactctaaacaacggcagtcagtctgtgggacgttcctccttctactgcctggagtactttccttctcagatgctgagaacgggcgataactttgaattcagctacacctttgaggaagtgcctttccacagcagctatgcgcacagccagagcctggaccggctgatgaatcccctcatcgaccagtacctgtactacctggcccggacccagagcactacggggtccacaagggagctgcagttccatcaggctgggcccaacaccatggccgagcaatcaaagaactggctgcccggaccctgttatcggcagcagagactgtcaaaaaacatagacagcaacaacaacagtaactttgcctggaccggggccactaaataccatctgaatggtagaaattcattaaccaacccgggcgtagccatggccaccaacaaggacgacgaggaccagttctttcccatcaacggagtgctggtttttggcaaaacgggggctgccaacaagacaacgctggaaaacgtgctaatgaccagcgaggaggagatcaaaaccaccaatcccgtggctacagaagaatacggtgtggtctccagcaacctgcaatcgtctacggccggaccccagacacagactgtcaacagccagggggctctgcccggcatggtctggcagaaccgggacgtgtacctgcagggtcccatctgggccaaaattcctcacacggacggcaactttcacccgtctcccctgatgggcggatttggactcaaacacccgcctcctcaaattctcatcaaaaacaccccggtacctgctaatcctccagaggtgtttactcctgccaagtttgcctcatttatcacgcagtacagcaccggccaggtcagcgtggagatcgagtgggaactgcagaaagaaaacagcaaacgctggaatccagagattcagtacacctcaaattatgccaagtctaataatgtggaatttgctgtcaacaacgaaggggtttatactgagcctcgccccattggcacccgttacctcacccgtaacctgtaa

SEQ ID NO: 4824 - protein, 728 aa, Adeno-associated virus; identical to SEQ ID NO: 4803

SEQ ID NO: 4825 - DNA, 3106 bp, Adeno-associated virus
gcggccgcgaattcgcccttcgcagagaccaaagttcaactgaaacgaatcagccggtttattgattaacaagtaattacaggttacgggtgaggtaacgggtgccaatggggcgaggctcagtataaaccccttcgttgttgacagcaaattccacattattagacttggcataatttgaggtgtactgaatctctggattccagcgtttgctgttttctttctgcagttcccactcgatctccacgctgacctggccggtgctgtactgcgtgataaatgaggcaaacttggcaggagtaaacacctctggaggattagcaggtaccggggtgtttttgatgagaatttgaggaggcgggtgtttgagtccaaatccgcccatcaggggagacgggtgaaagttgccgtccgtgtgaggaattttggcccagatgggaccctgcaggtacacgtcccggttctgccagaccatgccgggcagagccccctggctgttgacagtctgtgtctggggtccggccgtagacgattgcaggttgctggagaccacaccgtattcttctgtagccacgggattggtggttttgatctcctcctcgctggtcattagcacgttttccagcgttgtcttgttggcagcccccgttttgccaaaaaccagcactccgttgatgggaaagaactggtcctcgtcgtccttgttggtggccatggctacgcccgggttggttaatgaatttctaccattcagatggtatttagtggccccggtccaggcaaagttactgttgttgttgctgtctatgttttttgacagtctctgctgccgataacagggtccgggcagccagttctttgattgctcggccatggtgttgggcccagcctgatggaactgcagctcccttgtggaccccgtagtgctctgggtccgggccaggtagtacaggtactggtcgatgaggggattcatcagccggtccaggctctggctgtgcgcatagctgctgtggaaaggcacttcctcaaaggtgtagctgaattcaaagttatcgcccgttctcagcatctgagaaggaaagtactccaggcagtagaaggaggaacgtcccacagactgactgccgttgtttagagtcagatatccgtactgaggaatcatgaacacgtccgcagggaacggagggaggcagccctggtgcgcagagccgaggacgtacggcagttggtactccgagtccgagaagacctgaatcgtgctggtaaggttattagcgatggtcgtaacgccgtcgttcgtcgtgacctccttgacctggatgttgaacaacttgaaccgcagctttctgggccggaatccccagttgttgttgatgagtcgctgccagtcacgtggtgagaagtggcagtggaatctgttgaagtcaaaatagccccagggggtgctgtagccgaagaagtggttgtcgttggtagccccgctctgacttgatatctgcttgtagaggtggttgttgtaggtgggcagggcccaggtgcgggtgctggtggtgatgactctgtcgcccagccatgtggaatcgcaatgccaatttccggaggcattacccactccgtcggcgccttcgttattgtctgccattggtgcgccaccgcctgcagccattgtaccagatcccagacctgagggcgcggcgggaggttctccgagaggttgggggtcgggcactgactctgagtcgccagtctgcccaaagttgagcttctttttagcgggcggctggccgttcttgccgatgcccgtggaggagtcgggggattctatgggtctcttctttccaggagccgtcttagcgccttcctcaaccagaccgagaggttcgagaacccgcttcttggcctggaagactgctcgcccgaggttgcccccaaaagacgtatcttcttgaagacgctcctgaaactcggcgtcggcgtggttgtacttgaggtacgggttgtccccctgctcgagctgcttgtcgtaggccttgtcgtgctcgagggccgcggcgtctgcctcgttgaccggctctcccttgtcgagtccgttgaagggtccgaggtacctgtagccaggaagcaccagaccccggccgtcgtcctgcttttgctggttggctttgggtttcggggctccaggtttcaagtcccaccactcgcgaatgccctcagagaggttgccctcgagccaatctggaagataaccatcggcagccatacctggtttaagtcatttattgctcagaaacacagtcatccaggtccacgttggccagatcgcaggccgagcaagcaatctcgggagcccgccccagcagatgatgaatggcacagagtttccgatacgtcctctttctgacgaccggttgagattctgacacgccggggaaacattctgaacagtctctggtcccgtgcgtgaagcaaatgttgaaattctgattcattctctcgcatgtcttgcaggggaacagcatctgaagcatgcccgcgtgacgagaacatttgttttggtacctgtcggcaaagtccaccggagctccttccgcgtctgacgtcgatggatccgcgactgaggggcaggcccgcttgggctcgcttttatccgcgtcatcgggggcgggtctcttgttggctccaccctttctgacgtagaactcatacgccacctcggtcacgtgatcctgcgcccagcggaagaactctttgacttcctgctttgtcaccttgccaaagtcatgctccagacggcgggtgagttcaaatttgaacatccggtcttgtaacggctgctggtgctcgaaggtggtgctgttcccgtcaatcacggcgcacatgttggtgttggaagtgacgatcacgggggtgggatcgatctgggcggacgacttgcacttttggtccacgcgcaccttgctgccgccgagaatggccttggcggactccacgaccttggccgtcatcctgccctcctcccaccagatcaccatcttgtcgacgcaatcgttgaagggaaagttctcattggtccagttgacgcagccgtagaaagggcgaattc

SEQ ID NO: 4826 - protein, 728 aa, Adeno-associated virus
MAADGYLPDWLEDNLSEGIREWWDLKPGAPKPKANQQKQDDGRGLVLPGYRYLGPFNGLDKGEPVNEADAAALEHDKAYDKQLEQGDNPYLKYNHADAEFQERLQEDTSFGGNLGRAVFQAKKRVLEPLGLVEEGAKTAPGKKRPIESPDSSTGIGKNGQPPAKKKLNFGQTGDSESVPDPQPLGEPPAAPSGLGSGTMAAGGGAPMADNNEGADGVGNASGNWHCDSTWLGDRVITTSTRTWALPTYNNHLYKQISSQSGATNDNHFFGYSTPWGYFDFNRFHCHFSPRDWQRLINNNWGFRPRKLRFKLFNIQVKEVTTNDGVTTIANNLTSTIQVFSDSEYQLPYVLGSAHQGCLPPFPADVFMIPQYGYLTLNNGSQSVGRSSFYCLEYFPSQMLRTGDNFEFSYTFEEVPFHSSYAHSQSLDRLMNPLIDQYLYYLARTQSTTGSTRELQFHQAGPNTMAEQSKNWLPGPCYRQQRLSKNIDSNNNSNFAWTGATKYHLNGRNSLTNPGVAMATNKDDEDQFFPINGVLVFGKTGAANKTTLENVLMTSEEEIKTTNPVATEEYGVVSSNLQSSTAGPQTQTVNSQGALPGMVWQNRDVYLQGPIWAKIPHTDGNFHPSPLMGGFGLKHPPPQILIKNTPVPANPPEVFTPAKFASFITQYSTGQVSVEIEWELQKENSKRWNPEIQYTSNYAKSNNVEFAVNNEGVYTEPRPIGTRYLTRNL

SEQ ID NO: 4827 - protein, 728 aa, Adeno-associated virus; identical to SEQ ID NO: 4822

SEQ ID NO: 4828 - protein, 728 aa, Adeno-associated virus
MAADGYLPDWLEDNLSEGIREWWDLKPGAPKPKANQQKQDDGRGLVLPGYKYLGPFNGLDKGEPVNEADAAALEHDKAYDKQLEQGDNPYLKYNHADAEFQERLQEDTSFGGNLGRAVFQAKKRVLEPLGLVEEGAKTAPGKKRPIESPDSSTGIGKNGQPPAKKKLNFGQTGDSESVPDPQPLGEPPAAPSGLGSGTMAAGGGAPMADNNEGADGVGNASGNWHCDSTWLGDRVITTSTRTWALPTYNNHLYKQISSQSGATNDNHFFGYSTPWGYFDFNRFHCHFSPRDWQRLINNNWGFRPRKLRFKLFNIQVKEVTTNDGVTTIANNLTSTIQVFSDSEYQLPYVLGSAHQGCLPPFPADVFMIPQYGYLTLNNGSQSVGRSSFYCLEYFPSQMLRTGNNFEFSYTFEEVPFHSSYAHSQSLDRLMNPLIDQYLYYLARTQSTTGSTRELQFHQAGPNTMAEQSKNWLPGPCYRQQRLSKNIDSNNNSNFAWTGATKYHLNGRNSLTNPGVAMATNKDDEDQFFPINGVLVFGKTGAANKTTLENVLMTSEEEIKTTNPVATEEYGVVSSNLQSSTAGPQTQTVNSQGALPGMVWQNRDVYLQGPIWAKIPHTDGNFHPSPLMGGFGLKHPPPQILIKNTPVPANPPEVFTPAKFASFITQYSTGQVSVEIEWELQKENSKRWNPEIQYTSNYAKSNNVEFAVNNEGVYTEPRPIGTRYLTRNL

SEQ ID NO: 4829 - protein, 728 aa, Adeno-associated virus
MAADGYLPDWLEDNLSEGIREWWDLKPGAPKPKANQQKQDDGRGLVLPGYKYLGPFNGLDKGEPVNEADAAALEHDKAYDKQLEQGDNPYLKYNHADAEFQERLQEDTSFGGNLGRAVFQAKKRVLEPLGLVEEGAKTAPGKKRPIESPDSSTGIGKKGQQPAKKKLNFGQTGDSESVPDPQPLGEPPAAPSGLGSGTMAAGGGAPMADNNEGADGVGNASGNWHCDSTWLGDRVITTSTRTWALPTYNNHLYKQISSQSGATNDNHFFGYSTPWGYFDFNRFHCHFSPRDWQRLINNNWGFRPRKLRFKLFNIQVKEVTTNDGVTTIANNLTSTIQVFSDSEYQLPYVLGSAHQGCLPPFPADVFMIPQYGYLTLNNGSQSVGRSSFYCLEYFPSQMLRTGNNFEFSYTFEEVPFHSSYAHSQSLDRLMNPLIDQYLYYLARTQSTTGSTRELQFHQAGPNTMAEQSKNWLPGPCYRQQRLSKNIDSNNNSNFAWTGATKYHLNGRNSLTNPGVAMATNKDDEDQFFPINGVLVFGKTGAANKTTLENVLMTSEEEIKTTNPVATEEYGVVSSNLQSSTAGPQTQTVNSQGALPGMVWQNRDVYLQGPIWAKIPHTDGNFHPSPLMGGFGLKHPPPQILIKNTPVPANPPEVFTPAKFASFITQYSTGQVSVEIEWELQKENSKRWNPEIQYTSNYAKSNNVEFAVNNEGVYTEPRPIGTRYLTRNL

SEQ ID NO: 4830 - DNA, 3098 bp, Adeno-associated virus
gaattcgcccttcgcagagaccaaagttcaactgaaacgaatcaaccggtttattgattaacaagtaattacaggttacgggtgaggtaacgggtgccaatggggcgaggctcagtataaaccccttcgttgttgacagcaaattccacattattagacttggcataatttgaggtgtactgaatctctggattccagcgtttgctgttttctttctgcagttcccactcgatctccacgctgacctggccggtgctgtactgcgtgataaatgaggcaaactaggcaggagtaaacacccctggaggattagcaggtaccggggtgtttttgatgagaatttgaggaggcgggtgtttgagtccaaatccgcccatcaggggagacgggtgaaagttgccgtccgtgtgaggaattttggcccagatgggaccctgcaggtacacgtcccggttctgccagaccatgccgggcagagccccctggctgttgacagtctgtgtctggggtccggccgtagacgattgcaggttgctggagaccacaccgtattcttctgtagccacgggattggtggttttgatctcctcctcgctggtcattagcacgttttccagcgttgtcttgttggcagcccccgttttgccaaaaaccagcactccgttgatgggaaagaactggccctcgtcgtccttgttggtggccatggctacgcccgggttggttaatgaatttctaccattcagatggtatttagtggccccggtccaggcaaagttactgttgttgttgctgtctatgttttttgacagtctctgctgccgataacagggtccgggcagccagttctttgattgctcggccatggtgttgggcccagcctgatggaactgcagctcccttgtggaccccgtagtgctctgggtccgggccaggtagtacaggtactggtcgatgaggggattcatcagccggtccaggctctggctgtgcgcatagctgctgtggaaaggcacttcctcaaaggtgtagctgaattcaaagttattgcccgttctcagcatctgagaaggaaagtactccaggcagtagaaggaggaacgtcccatagactgactgccgttgtttagagtcagatatccgtactgaggaatcatgaacacgtccgcagggaacggagggaggcagccctggtgcgcagagccgaggacgtacggcagttggtactccgagtccgagaagacctgaatcgtgctggtaaggttattagcgatggtcgtaacgccgtcgttcgtcgtgacctccttgacctggatgttgaacaacttgaaccgcagctttctgggccggaatccccagttgttgttgatgagtcgctgccagtcacgtggtgagaagtggcagtggaatctgttgaagtcaaaatagccccagggggtgctgtagccgaagaagtggttgtcgttggtagccccgctctgacttgatatctgcttgtagaggtggttgttgtaggtgggcagggcccaggtgcgggtgctggtggtgatgactctgtcgcccagccatgtggaatcgcaatgccaatttccggaggcattacccactccgtcggcgccttcgttattgtctgccattggtgcgccaccgcctgcagccattgtaccagatcccagacctgagggcgcggcgggaggttctccgagaggttgggggtcgggcactgactctgagtcgccagtctgcccaaagttgagcttctttttagcgggctgctggcctttcttgccgatgcccgtggaggagtcgggggattctatgggtctcttctttccaggagccgtcttagcgccttcctcaaccagaccgagaggttcgagaacccgcttcttggcctggaagactgctcgcccgaggttgcccccaaaagacgtatcttcttgaagacgctcctgaaactcagcgtcggcgtggttgtacttgaggtacgggttgtccccctgctcgagctgcttgtcgtaggccttgtcgtgctcgagggccgcggcgtctgcctcgttgaccggctctcccttgtcgagtccgttgaagggtccgaggtacttgtagccaggaagcaccagaccccggccgtcgtcctgcttttgctggttggctttgggtttcggggctccaggtttcaagtcccaccactcgcgaatgccctcagagaggttgtcctcgagccaatctggaagataaccatcggcagccatacctggtttaagtcatttattgctcagaaacacagtcatccaggtccacgttgaccagatcgcaggccgagcaagcaatctcgggagcccgccccagcagatgatgaatggcacagagtttccgatacgtcctctttctgacgaccggttgagattctgacacgccggggaaacattctgaacagtctctggtcccgtgcgtgaagcaaatgttgaaattctgattcattctctcgcatgtcttgcagggaaacagcatctgaagcatgcccgcgtgacgagaacatttgttttggtacctgtcggcaaagtccaccggagctccttccgcgtctgacgtcgatggatccgcgactgaggggcaggcccgcttgggctcgcttttatccgcgtcatcgggggcgggcctcttgttggctccaccctttctgacgtagaactcatgcgccacctcggtcacgtgatcctgcgcccagcggaagaactctttgacttcctgctttgtcaccttgccaaagtcctgctccagacggcgggtgagttcaaatttgaacatccggtcttgtaacggctgctggtgctcgaaggtggtgctgttcccgtcaatcacggcgcacatgttggtgttggaagtgacgatcacgggggtgggatcgatctgggcggacgacttgcacttttggtccacgcgcaccttgctgccgccgagaatggccttggcggactccacgaccttggccgtcatcttgccctcctcccaccagatcaccatcttgtcgacgcaatcgttgaagggaaagttctcattggtccagttgacgcagccgtagaaagggcgaattc

SEQ ID NO: 4831 - protein, 729 aa, Adeno-associated virus
MAADGYLPDWLEDNLSEGIREWWDLKPGAPKPKANQQKQDDGRGLVLPGYKYLGPFNGLDKGEPVNAADAAALEHDKAYDQQLKAGDNPYLRYNHADAEFQERLQEDTSFGGNLGRAVFQAKKRVLEPLGLVEEGAKTAPGKKRPIDSPDSSTGIGKKGQQPAKKKLNFGQTGDSESVPDPQPLGEPPAAPSSVGSGTMAAGGGAPMADNNEGADGVGNASGNWHCDSTWLGDRVITTSTRTWALPTYNNHLYKQISSSSSGATNDNHYFGYSTPWGYFDFNRFHCHFSPRDWQRLINNNWGFRPKKLRFKLFNIQVKEVTTNDGVTTIANNLTSTVQVFSDSEYQLPYVLGSAHQGCLPPFPADVFMIPQYGYLTLNNGSQSVGRSSFYCLEYFPSQMLRTGNNFEFSYSFEDVPFHSSYAHSQSLDRLMNPLIDQYLYYLARTQSTTGSTRELQFHQAGPNTMAEQSKNWLPGPCYRQQGLSKNLDFNNNSNFAWTAATKYHLNGRNSLTNPGIPMATNKDDEDQFFPINGVLVFGKTGAANKTTLENVLMTSEEEIKTTNPVATEEYGVVSSNLQPSTAGPQSQTINSQGALPGMVWQNRDVYLQGPIWAKIPHTDGNFHPSPLMGGFGLKHPPPQILIKNTPVPANPPEVFTPAKFASFITQYSTGQVSVEIEWELQKENSKRWNPEIQYTSNYAKSNNVEFAVNPDGVYTEPRPIGTRYLPRNL

SEQ ID NO: 4832 - protein, 1458 aa, Adeno-associated virus
MAADGYLPDWLEDNLSEGIREWWDLKPGAPKPKANQQKQDDGRGLVLPGYKYLGPFNGLDKGEPVNAADAAALEHDKAYDQQLKAGDNPYLRYNHADAEFQERLQEDTSFGGNLGRAVFQAKKRVLEPLGLVEEGAKTAPGKKRPIDSPDSSTGIGKKGQQPAKKKLNFGQTGDSESVPDPQPLGEPPAAPSSVGSGTMAAGGGAPTADNNEGADGVGNASGNWHCDSTWLGDRVITTSTRTWALPTYNNHLYKQISSSSSGATNDNHYFGYSTPWGYFDFNRFHCHFSPRDWQRLINNNWGFRPKKLRFKLFNIQVKEVTTNDGVTTIANNLTSTVQVFSDSEYQLPYVLGSAHQGCLPPFPADVFMIPQYGYLTLNNGSQSVGRSSFYCLEYFPSQMLRTGNNFEFSYSFEDVPFHSSYAHSQSLDRLMNPLIDQYLYYLARTQSTTGSTRELQFHQAGPNTMAEQSKNWLPGPCYRQQRLSKNLDFNNNSNFAWTAATKYHLNGRNSLTNPGIPMATNKDDEDQFFPINGVLVFGKTGAANKTTLENVLMTSEEEIKTTNPVATEEYGVVSSNLQSSTAGPQSQTINSQGALPGMVWQNRDVYLQGPIWAKIPHTDGNFHPSPLMGGFGLEHPPPQILIKNTPVPANPPEVFTPAKFASFITQYSTGQVSVEIEWELQKENSKRWNPEIQYTSNYAKSNNVEFAVNPDGVYTEPRPIGTRYLTRNLMAADGYLPDWLEDNLSEGIREWWDLKPGAPKPKANQQKQDDGRGLVLPGYKYLGPFNGLDKGEPVNAADAAALEHDKAYDQQLKAGDNPYLRYNHADAEFQERLQEDTSFGGNLGRAVFQAKKRVLEPLGLVEEGAKTAPGKKRPIGSPDSSTGIGKKGQQPAKKKLNFGQTGDSESVPDPQPLGEPPAAPSSVGSGTMAAGGGAPMADNNEGADGVGNASGNWHCDSTWLGDRVITTSTRTWALPTYNNHLYKQISSSSSGATNDNHYFGYSTPWGYFDFNRFHCHFSPRDWQRLINNNWGFRPKKLRFKLLNIQVKEVTTNDGVTTIANNLTSTVQVFSDSEYQLPYVLGSAHQGCLPPFPADVFMIPQYGYLTLDNGSQSVGRSSFYCLEYFPSQMLRTGNNFEFSYSFEDVPFHSSYAHSQSLDRLMNPLIDQYLYYLARTQSTTGSTRELQFHQAGPNTMAEQSKNWLPGPCYRQQRLSKNLDFNNNSNFAWTAATKYHLNGRNSLTNPGIPMATNKDDEDQFFPINGVLVFGKTGAANKTTLENVLMTSEEEIKTTNPVATEEYGVVSSNLQSSTAGPQSQTINSQGALPGMVWQNRDVYLQGPIWAKIPHTDGNFHPSPLMGGFGLKHPPPQILIKNTPVPANPPEVFTPAKFASFITQYSTGQVSVEIEWELQKENSKRWNPEIQYTSNYAKSNNVEFAVNPDGVYTEPRPIGTRYLTRNL

SEQ ID NO: 4833 - protein, 729 aa, Adeno-associated virus
MAADGYLPDWLEDNLSEGIREWWDLKPGAPKPKANQQKQDDGRGLVLPGYKYLGPFNGLDKGEPVNAADAAALEHDKAYDQQLKAGDNPYLRYNHADAEFQERLQEDTSFGGNLGRAVFQAKKRVLEPLGLVEEGAKTAPGKKRPIDSPDSSTGIGKKGQQPAKKKLNFGQTGDSESVPDPQPLGEPPAAPSSVGSGTMAAGGGAPTADNNEGADGVGNASGNWHCDSTWLGDRVITTSTRTWALPTYNNHLYKQISSSSSGATNDNHYFGYSTPWGYFDFNRFHCHFSPRDWQRLINNNWGFRPKKLRFKLFNIQVKEVTTNDGVTTIANNLTSTVQVFSDSEYQLPYVLGSAHQGCLPPFPADVFMIPQYGYLTLNNGSQSVGRSSFYCLEYFPSQMLRTGNNFEFSYSFEDVPFHSSYAHSQSLDRLMNPLIDQYLYYLARTQSTTGSTRELQFHQAGPNTMAEQSKNWLPGPCYRQQRLSKNLDFNNNSNFAWTAATKYHLNGRNSLTNPGIPMATNKDDEDQFFPINGVLVFGKTGAANKTTLENVLMTSEEEIKTTNPVATEEYGVVSSNLQSSTAGPQSQTINSQGALPGMVWQNRDVYLQGPIWAKIPHTDGNFHPSPLMGGFGLEHPPPQILIKNTPVPANPPEVFTPAKFASFITQYSTGQVSVEIEWELQKENSKRWNPEIQYTSNYAKSNNVEFAVNPDGVYTEPRPIGTRYLTRNL

SEQ ID NO: 4834 - DNA, 3075 bp, Adeno-associated virus
tgagaactttcctttcaacgattgcgtcggacaagatggtgatctggtgggaggaggggaagatgaccgccaaggtcgtggagtcggccaaagccattcttggaggaagcaaggtgcgtgtggaccagaaatgcaagtcctcggcccagatagacccgactcccgtgatcgtcacctccaacaccaacatgtgcgccgtgattgacgggaactcaacgaccttcgagcaccagcagccgttgcaagaccggatgttcaaatttgaacttacccgccgtctggatcatgactttggaaaggtcaccaagcaggaagtgaaagactttttccggtgggcaaaggatcacgtggttgaggtggagcatgaattctacgtcaaaaagggtggagctaagaaaagacccgcccccagtgacgcagatataagtgagcccaaacgggcgcgcgagtcagttgcgcagccatcaacgtcagacgcggaagcttcgatcaactacgcggacaggtaccaaaaacaaatgttctcgtcacgtgggcatgaatctgatgctgtttccctgcagacaatgcgagagaatgaatcagaattcaaatatctgcttcactcacggacagaaagactgtttagagtgctttcccgtgtcagaatctcaacccgtttctgtcgtcaaaaaggcgtatcagaaactgtgctacattcatcatatcatgggaaaggtgccagacgcttgcactgcctgcgatctggtcaatgtggatttggatgactgcatctctgaacaataaatgatttaaatcaggtatggctgccgatggttatcctccagattggctcgaggacactctctctgaagggataagacagtggtggaagctcaaacctggcccaccaccaccaaagcccgcagagcggcataaggacgacagcaggggtcttgtgcttcctgggtacaagtacctcggacccttcaacggactcgacaagggggagccggtcaacgaggcagacgccgcggccctcgagcacgacaaggcctacgaccggcagctcgacagcggagacaacccgtacctcaagtacaaccacgccgacgcagagtttcaggagcgccttaaagaagatacgtcttttgggggcaacctcggacgagcagtcttccaggcgaaaaagagggttcttgaacctctgggcctggttgaggaacctgttaagacggctccgggaaaaaagaggccggtagagcactctcctgtggagccagactcctcctcgggaaccggaaaagcgggccagcggcctgcaagaaaaagattaaattttggtcagactggagacgcagactccgtacctgacccccagcctctcggacagccaccagcagccccctctggtctgggatctactacaatggctacaggcagtggcgcaccaatggcagacaataacgagggtgccgatggagtgggtaattcctcaggaaattggcattgcgattcccaatggctgggcgacagagtcatcaccaccagcacccgaacctgggccctgcccacatacaacaaccacctctacaagcaaatctccagccaatcaggagccagcaacgacaaccactactttggctacagcaccccctgggggtattttgacttcaacagattccactgccacttttcaccacgtgactggcaaagactcatcaacaacaactggggattccggcccaaaagactcaacttcaagctctttaatattcaagtcaaagaggtcacgcagaatgacggtacgacgacgattgccaataaccttaccagcacggttcaggtgtttactgactcggagtaccagctcccgtacgtcctgggctcggcgcatcaaggatgcctcccgccgtttccagcggacgtcttcatggtcccacagtatggatacctcaccctgaacaacgggagtcaggcggtaggacgctcttccttttactgcctggagtactttccttctcagatgctgcgtactggaaacaactttcagttcagctacacttttgaagacgtgcctttccacagcagctacgctcacagccagagtctggatcggctgatgaatcctctgatcgaccagtacctgtattatctgaacaagacacaaacaaatagtggaactcttcagcagtctcggctactgtttagccaagctggaccaaccaacatgtctcttcaagctaaaaactggctgcctggaccttgctacagacagcagcgtctgtcaaaacaggcaaacgacaacaacaacagcaactttccctggactgcagctacaaagtatcatctaaatggccgggactcgttggttaatccaggaccagctatggccagtcacaaggatgacgaagaaaagtttttccccatgcatggaaccctgatatttggtaaacaaggaacaaatgccaacgacgcggatttggaaaatgtcatgattacagatgaagaagaaatcagggccaccaatcccgtggctacggagcagtacgggactgtgtcaaataatttgcaaaactcaaacactggtccaactactggaactgtcaatcgccaaggagcgttacctggtatggtgtggcaggatcgagacgtgtacctgcagggacccatttgggccaagattcctcacaccgatggacactttcatccttctccactgatgggaggttttggactcaaacacccgcctcctcagatcatgatcaaaaacactcccgttccagccaatcctcccacaaacttcagttctgccaagtttgcttctttcatcacacagtattccacgggacaggtcagcgtggagatcgagtgggagctgcagaaggagaacagcaaacgctggaatcccgaaattcagtacacttccaactacaacaagtctgttaatgtggactttactgtggacactaatggtgtgtattcagagcctcgccccattggcaccagatacctgactcgtaatctgtaattgcttgttaatcaataaaccgtttaattcgtttcagttgaactttggtctctgcgaagggcgaa

SEQ ID NO: 4835 - DNA, 3142 bp, Adeno-associated virus
aaaacgacgggccagtgattgtaatacgactcactatagggcgaaattgaaattagcggccgcgaattcgcctttcgcagagaccaaagttcaactgaaacgaattaaacggtttattgattaacaagcaattacagattacgagtcaggtatctggtgccaatggggcgaggctctgaatacacaccattagtgtccacagtaaagtccacattaacagacttgttgtagttggaagtgtactgaatttcgggattccagcgtttgctgttctccttctgcagctcccactcgatctccacgctgacctgtcccgtggaatactgtgtgatgaaagaagcaaacttggcagaactgaagtttgtgggaggattggctggaacgggagtgtttttgatcatgatctgaggaggcgggtgtttgagtccaaaacctcccatcagtggagaaggatgaaagtgtccatcggtgtgaggaatcttggcccaaatgggtccctgcaggtacacgtctcgatcctgccacaccataccaggtaacgctccttggtgattgacagttccagtagttggaccagtgtttgagttttgcaaattatttgacacagtcccgtactgctccgtagccacgggattggtggccctgatttcttcttcatctgtaatcatgacattttccaaatccgcgtcgttggcatttgttccttgtttaccaaatatcagggttccatgcatggggaaaaacttttcttcgtcatccttgtgactggccatagctggtcctggattaaccaacgagtcccggccatttagatgatactttgtagctgcagtccagggaaagttgctgttgttgttgtcgtttgcctgttttgacagacgctgctgtctgtagcaaggtccaggcagccagtttttagcttgaagagacatgttggttggtccagcttggctaaacagtagccgagactgctgaagagttccactatttgtttgtgtcttgttcagataatacaggtactggtcgatcagaggattcatcagccgatccagactctggctgtgagcgtagctgctgtggaaaggcacgtcttcaaaagtgtagctgaactgaaagttgtttccagtacgcagcatctgagaaggaaagtactccaggcagtaaaaggaagagcgtcctaccgcctgactcccgttgttcagggtgaggtatccatactgtgggaccatgaagacgtccgctggaaacggcgggaggcatccttgatgcgccgagcccaggacgtacgggagctggtactccgagtcagtaaacacctgaaccgtgctggtaaggttattggcaatcgtcgtcgtaccgtcattctgcgtgacctctttgacttgaatattaaagagcttgaagttgagtcttttgggccggaatccccggttgttgttgacgagtctttgccagtcacgtggtgaaaagtggcagtggaatctgttgaagtcaaaatacccccagggggtgctgtagccaaagtagtggttgtcgttgctggctcctgattggctggagatttgcttgtagaggtggttgttgtatgtgggcagggcccaggttcgggtgctggtggtgatgactctgtcgcccagccattgggaatcgcaatgccaatttcctgaggaattacccactccatcggcaccctcgttattgtctgccattggtgcgccactgcctgtagccattgtagtagatcccagaccagagggggctgctggtggctgtccgagaggctgggggtcaggtacggagtctgcgtctccagtctgaccaaaatttaatctttttcttgcaggctgctggcccgcttttccggttcccgaggaggagtctggctccacaggagagtgctctaccggcctcttttttcccggagccgtcttaacaggctcctcaaccaggcccagaggttcaagaaccctctttttcgcctggaagactgctcgtccgaggttgcccccaaaagacgtatcttctttaaggcgctcctgaaactctgcgtcggcgtggttgtacttgaggtacgggttgtctccgctgtcgagctgccggtcgtaggccttgtcgtgctcgagggccgcggcgtctgcctcgttgaccggctcccccttgtcgagtccgttgaagggtccgaggtacttgtacccaggaagcacaagacccctgctgtcgtccttatgccgctctgcgggctttggtggtggtgggccaggtttgagcttccaccactgtcttattccttcagagagagtgtcctcgagccaatctggaagataaccatcggcagccatacctgatttaaatcatttattgttcagagatgcagtcatccaaatccacattgaccagatcgcaggcagtgcaagcgtctggcacctttcccatgatatgatgaatgtagcacagtttctgatacgcctttttgacgacagaaacgggttgagattctgacacgggaaagcactctaaacagtctttctgtccgtgagtgaagcagatatttgaattctgattcattctctcgcattgtctgcagggaaacagcatcagattcatgcccacgtgacgagaacatttgttttggtacctgtccgcgtagttgatcgaagcttccgcgtctgacgtcgatggctgcgcaactgactcgcgcgcccgtttgggctcacttatatctgcgtcactgggggcgggtcttttcttagctccaccctttttgacgtagaattcatgctccacctcaaccacgtgatcctttgcccaccggaaaaagtctttcacttcctgcttggtgacctttccaaagtcatgatccagacggcgggtaagttcaaatttgaacatccggtcttgcaacggctgctggtgctcgaaggtcgttgagttcccgtcaatcacggcgcacatgttggtgttggaggtgacgatcacgggagtcgggtctatctgggccgaggacttgcatttctggtccacacgcaccttgcttcctccaagaatggctttggccgactccacgaccttggcggtcatcttcccctcctcccaccagatcaccatcttgtcgacgcaatggtaaaaggaaagttctcattgg

SEQ ID NO: 4836 - DNA, 2208 bp, Adeno-associated virus
atggctgccgatggttatcttccagattggctcgaggacactctctctgaaggaataagacagtggtggaagctcaaacctggcccaccaccaccaaagcccgcagagcggcataaggacgacagcaggggtcttgtgcttcctgggtacaagtacctcggacccttcaacggactcgacaagggggagccggtcaacgaggcagacgccgcggccctcgagcacgacaaggcctacgaccggcagctcgacagcggagacaacccgtacctcaagtacaaccacgccgacgcagagtttcaggagcgccttaaagaagatacgtcttttgggggcaacctcggacgagcagtcttccaggcgaaaaagagggttcttgaacctctgggcctggttgaggaacctgttaagacggctccgggaaaaaagaggccggtagagcactctcctgtggagccagactcctcctcgggaaccggaaaagcgggccagcagcctgcaagaaaaagattaaattttggtcagactggagacgcagactccgtacctgacccccagcctctcggacagccaccagcagccccctctggtctgggatctactacaatggctacaggcagtggcgcaccaatggcagacaataacgagggtgccgatggagtgggtaattcctcaggaaattggcattgcgattcccaatggctgggcgacagagtcatcaccaccagcacccgaacctgggccctgcccacatacaacaaccacctctacaagcaaatctccagccaatcaggagccagcaacgacaaccactactttggctacagcaccccctgggggtattttgacttcaacagattccactgccacttttcaccacgtgactggcaaagactcatcaacaacaactggggattccggcccaaaagactcaacttcaagctctttaatattcaagtcaaagaggtcacgcagaatggcggtacgacgacgattgccaataaccttaccagcacggttcaggtgtttactgactcggagtaccagctcccgtacgtcctgggctcggcgcatcaaggatgcctcccgccgtttccagcggacgtcttcatggtcccacagtatggatacctcaccctgaacaacgggagtcaggcggtaggacgctcttccttttactgcctggagtactttccttctcagatgctgcgtactggaaacaactttcagttcagctacacttttgaagacgtgcctttccacagcagctacgctcacagccagagtctggatcggctgatgaatcctctgatcgaccagtacctgtattatctgaacaagacacaaacaaatagtggaactcttcagcagtctcggctactgtttagccaagctggaccaaccaacatgtctcttcaagctaaaaactggctgcctggaccttgctacagacagcagcgtctgtcaaaacaggcaaacggcaacaacaacagcaactttccctggactgcagctacaaagtatcatctaaatggccgggactcgttggttaatccaggaccagctatggccagtcacaaggatgacgaagaaaagtttttccccatgcatggaaccctgatatttggtaaacaaggaacaaatgccaacgacgcggatttggaaaatgtcatgattacagatgaagaagaaatcagggccaccaatcccgtggctacggagcagtacgggactgtgtcaaataatttgcaaaactcaaacactggtccaactactggaactgtcaatcaccaaggagcgttacctggtatggtgtggcaggatcgagacgtgtacctgcagggacccatttgggccaagattcctcacaccgatggacactttcatccttctccactgacgggaggttttggactcaaacacccgcctcctcagatcatgatcaaaaacactcccgttccagccaatcctcccacaaacttcagttctgccaagtttgcttctttcatcacacagtattccacgggacaggtcagcgtggagatcgagtgggagctgcagaaggagaacagcaaacgctggaatcccgaaattcagtacacttccaactacaacaagtctgttaatgtggactttactgtggacactaatggtgtgtattcagagcctcgccccattggcaccagatacctgactcgtaatctgtaa

SEQ ID NO: 4837 - protein, 735 aa, Adeno-associated virus
MAADGYLPDWLEDTLSEGIRQWWKLKPGPPPPKPAERHKDDSRGLVLPGYKYLGPFNGLDKGEPVNEADAAALEHDKAYDRQLDSGDNPYLKYNHADAEFQERLKEDTSFGGNLGRAVFQAKKRVLEPLGLVEEPVKTAPGKKRPVEHSPVEPDSSSGTGKAGQQPARKRLNFGQTGDADSVPDPQPLGQPPAAPSGLGSTTMATGSGAPMADNNEGADGVGNSSGNWHCDSQWLGDRVITTSTRTWALPTYNNHLYKQISSQSGASNDNHYFGYSTPWGYFDFNRFHCHFSPRDWQRLINNNWGFRPKRLNFKLFNIQVKEVTQNGGTTTIANNLTSTVQVFTDSEYQLPYVLGSAHQGCLPPFPADVFMVPQYGYLTLNNGSQAVGRSSFYCLEYFPSQMLRTGNNFQFSYTFEDVPFHSSYAHSQSLDRLMNPLIDQYLYYLNKTQTNSGTLQQSRLLFSQAGPTNMSLQAKNWLPGPCYRQQRLSKQANGNNNSNFPWTAATKYHLNGRDSLVNPGPAMASHKDDEEKFFPMHGTLIFGKQGTNANDADLENVMITDEEEIRATNPVATEQYGTVSNNLQNSNTGPTTGTVNHQGALPGMVWQDRDVYLQGPIWAKIPHTDGHFHPSPLTGGFGLKHPPPQIMIKNTPVPANPPTNFSSAKFASFITQYSTGQVSVEIEWELQKENSKRWNPEIQYTSNYNKSVNVDFTVDTNGVYSEPRPIGTRYLTRNL

SEQ ID NO: 4838 - DNA, 2208 bp, Adeno-associated virus
atggctgccgatggttatcttccagattggctcgaggacactctctctgaaggaataagacagtggtggaagctcaaacctggcccaccaccaccaaagctcgcagagcggcatcaggacgacagcaggggtcttgtgcttcctgggtacaagtacctcggacccttcaacggactcgacaaaggagagccggtcaacgaggcagacgccgcggccctcgagcacgacaaggcctacgaccggcagctcgacagcggagacaacccgtacctcaagtacaaccacgccgacgcggagtttcaggagcgtcttaaagaagatacgtcttttgggggcaacctcggacgagcagtcttccaggcgaaaaagagggttcttgaacctctgggcctggttgaggaacctgttaagacggctccgggaaaaaagaggccggtagagcactctcctgtggagccagactcctcctcgggaaccggaaaggcgggccatcagcctgcgagaaagagattgaattttggtcagactggagacgcagactccgtacctgacccccagcctctcggacagccaccagcagcccccacaagtctgggatctactacaatggctacaggcagtggcgcaccaatggcagacaataacgagggtgccgatggagtgggtaattcctcaggaaattggcattgcgattcccaatggctgggcgacagagtcatcaccaccagcacccgaacctgggccctgcccacctacaacaaccacctctacaagcaaatctccagccaatcaggagcctcgaacgacaaccactactttggctacagcaccccctgggggtattttgacttcaacagattccactgtcacttctccccacgtgattggcaaagactcatcaacaacaactggggattccgacccaagagactcaacttcaagctctttaacattcaagtcaaagaggtcacgcagaatgacggtacgacgacgattgccaataaccttaccagcacggttcaggtgtttactgactcggagtaccagctcccgtacgtcctcggctcggcgcatcaaggatgcctcccgccgtttccagcggacgtcttcacggtcccacagtatggatacctcaccctgaacaacgggagtcaggcggtaggacgctcttccttttactgcctggagtactttccttctcagatgctgcgtactggaaacaaccttaccttcagctacacctttgaggacgttcctttccacagcagctacgctcacagccagagtttggaccggctgatgaatcctctgatcgaccagtatctatattatctgaacaggacacaatcaaatagtggaactcttcagcagtctaggctactgtttagccaagctggacccaccagcatgtctcttcaagctaaaaactggctgcctggaccttgctacagacagcagcgtctttcaaagcaggcaaacgacaacaacaacagcaactttccctggactgcggctacaaagtatcatctaaatggccgggactcgttggttaatccaggaccagctatggccagccacaaagacgatgaagaaaagtttttccccatgcatggaaccctgatatttggtaaacaaggaacaaatgctaacgacgcggatttggagcatgttatgattacagatgaagaagaaatcaggaccaccaatcctgtggctacagagcagtacggaaacgtgtcaaataatttgcaaaactcaaatactggtccaactacagaaaatgtcaatcaccagggagcgttacctggtatggtgtggcaggatcgagacgtgtacctgcagggacccatttgggccaagattcctcacaccgacggacactttcacccttctccactgatgggaggttttggactcaaacacccgcctcctcaaatcatgatcaaaaacactcccgttccagccaatcctcccacaaactacagttctgccaagtttgcttctttcatcacacagtattccacgggccaggtcagcgtggagattgagtgggagctgcggaaggagaacagcaaacgctggaaccccgagatccagtatacttccaactacaacaaatctgttaatgtggactttactgtggacactaatggtgtgtattcagagcctcgccccattggcaccagatacctgactcgtaatctgtaa

SEQ ID NO: 4839 - protein, 735 aa, Adeno-associated virus
MAADGYLPDWLEDTLSEGIRQWWKLKPGPPPPKLAERHQDDSRGLVLPGYKYLGPFNGLDKGEPVNEADAAALEHDKAYDRQLDSGDNPYLKYNHADAEFQERLKEDTSFGGNLGRAVFQAKKRVLEPLGLVEEPVKTAPGKKRPVEHSPVEPDSSSGTGKAGHQPARKRLNFGQTGDADSVPDPQPLGQPPAAPTSLGSTTMATGSGAPMADNNEGADGVGNSSGNWHCDSQWLGDRVITTSTRTWALPTYNNHLYKQISSQSGASNDNHYFGYSTPWGYFDFNRFHCHFSPRDWQRLINNNWGFRPKRLNFKLFNIQVKEVTQNDGTTTIANNLTSTVQVFTDSEYQLPYVLGSAHQGCLPPFPADVFTVPQYGYLTLNNGSQAVGRSSFYCLEYFPSQMLRTGNNLTFSYTFEDVPFHSSYAHSQSLDRLMNPLIDQYLYYLNRTQSNSGTLQQSRLLFSQAGPTSMSLQAKNWLPGPCYRQQRLSKQANDNNNSNFPWTAATKYHLNGRDSLVNPGPAMASHKDDEEKFFPMHGTLIFGKQGTNANDADLEHVMITDEEEIRTTNPVATEQYGNVSNNLQNSNTGPTTENVNHQGALPGMVWQDRDVYLQGPIWAKIPHTDGHFHPSPLMGGFGLKHPPPQIMIKNTPVPANPPTNYSSAKFASFITQYSTGQVSVEIEWELRKENSKRWNPEIQYTSNYNKSVNVDFTVDTNGVYSEPRPIGTRYLTRNL

SEQ ID NO: 4840 - DNA, 2208 bp, Adeno-associated virus
atggctgccgatggttatcttccagattggctcgaggacactctctctgaaggaataagacagtggtggaagctcaaacctggcccaccaccaccaaagcccgcagagcggcatcaggacgacagcaggggtcttgtgcttcctgggtacaagtacctcggacccttcaacggactcgacaaaggagagccggtcaacgaggcagacgccgcggccctcgagcacgacaaggcctacgaccggcagctcgacagcggagacaacccgtacctcaagtacaaccacgccgacgcggagtttcaggagcgtcttaaagaagatacgtcttttgggggcaacctcggacgagcagtcttccaggcgaaaaagagggttcttgaacctctgggcctggttgaggaacctgttaagacggctccgggaaaaaagaggccggtagagcactctcctgtggagccagactcctcctcgggaaccggaaaagcgggccatcagcctgcgagaaagagattgaattttggtcagactggagacgcagactccgtacctgacccccagcctctcggacagccaccagcagcccccacaagtttgggatctactacaatggctacaggcagtggcgcaccaatggcagacaataacgagggtgccgatggagtgggtaattcctcaggaaattggcattgcgattcccaatggctgggcgacagagtcatcaccaccagcacccgaacctgggccctgcccacctacaacaaccacctctacaagcaaatctccagccaatcaggagcctcgaacgacaaccactactttggctacagcaccccctgggggtattttgacttcaacagattccactgtcacttctccccacgtgattggcaaagactcatcaacaacaactggggattccgacccaagagactcaacttcaagctctttaacattcaagtcaaggaggtcacgcagaatgacggtacgacgacgattgccaataaccttaccagcacggttcaggtgtttactgactcggagtaccagctcccgtacgtcctcggctcggcgcatcaaggatgcctcccgccgtttccagcggacgtcttcatggtcccacagtatggatacctcaccctgaacaacgggagtcaggcggtaggacgctcttccttttactgcctggagtactttccttctcagatgctgcgtactggaaacaactttaccttcagctacacctttgaggacgttcctttccacagcagctacgctcacagccagagtttggaccggctgatgaatcctctgatcgaccagtatctatattatctgaacaggacacaatcaaatagtggaactcttcagcagtctaggctactgtttagccaagctggacccaccagcatgtctcttcaagctaaaaactggctgcctggaccttgctacagacagcagcgtctttcaaagcaggcaaacgacaacaacaacagcaactttccctggactgcggctacaaagtatcgtctaaatggccgggactcgttggttaatccaggaccagctatggccagccacaaagacgatgaagaaaagtttttccccatgcatggaaccctgatatttggtaaacaaggaacaaatgctaacgacgcggatttggagcatgttatgattacagatgaagaagaaatcaggaccaccaatcctgtggctacagagcagtacggaaacgtgtcaaataatttgcaaaactcaaatactggtccaactacagaaaatgtcaatcaccagggagcgttacctggtatggtgtggcaggatcgagacgtgtacctgcagggacccatttgggccaagattcctcacaccgacggacactttcacccttctccactgatgggaggttttggactcaaacacccgcctcctcaaatcatgatcaaaaacactcccgttccagccaatcctcccacaaacttcagttctgccaagtttgcttctttcatcacacagtattccacgggccaggtcagcgtggagattgagtgggagctgcagaaggagaacagcaaacgctggaaccccgagatccagtatacttccaactacaacaaatctgttaatgtggactttactgtggacactaatggtgtgtattcagagcctcgccccattggcaccagatacctgactcgtaatctgtaa

SEQ ID NO: 4841 - protein, 735 aa, Adeno-associated virus
MAADGYLPDWLEDTLSEGIRQWWKLKPGPPPPKPAERHQDDSRGLVLPGYKYLGPFNGLDKGEPVNEADAAALEHDKAYDRQLDSGDNPYLKYNHADAEFQERLKEDTSFGGNLGRAVFQAKKRVLEPLGLVEEPVKTAPGKKRPVEHSPVEPDSSSGTGKAGHQPARKRLNFGQTGDADSVPDPQPLGQPPAAPTSLGSTTMATGSGAPMADNNEGADGVGNSSGNWHCDSQWLGDRVITTSTRTWALPTYNNHLYKQISSQSGASNDNHYFGYSTPWGYFDFNRFHCHFSPRDWQRLINNNWGFRPKRLNFKLFNIQVKEVTQNDGTTTIANNLTSTVQVFTDSEYQLPYVLGSAHQGCLPPFPADVFMVPQYGYLTLNNGSQAVGRSSFYCLEYFPSQMLRTGNNFTFSYTFEDVPFHSSYAHSQSLDRLMNPLIDQYLYYLNRTQSNSGTLQQSRLLFSQAGPTSMSLQAKNWLPGPCYRQQRLSKQANDNNNSNFPWTAATKYRLNGRDSLVNPGPAMASHKDDEEKFFPMHGTLIFGKQGTNANDADLEHVMITDEEEIRTTNPVATEQYGNVSNNLQNSNTGPTTENVNHQGALPGMVWQDRDVYLQGPIWAKIPHTDGHFHPSPLMGGFGLKHPPPQIMIKNTPVPANPPTNFSSAKFASFITQYSTGQVSVEIEWELQKENSKRWNPEIQYTSNYNKSVNVDFTVDTNGVYSEPRPIGTRYLTRNL

SEQ ID NO: 4842 - DNA, 2208 bp, Adeno-associated virus
atggctgccgatggttatcttccagattggctcgaggacactctctctgaaggaataagacagtggtggaagctcaaacctggcccaccaccaccaaagcccgcagagcggcatcaggacgacagcaggggtcttgtgcttcctgggtacaagtacctcggacccttcaacggactcgacaaaggagagccggtcaacgaggcagacgccgcggccctcgagcacgacaaggcctacgaccggcagctcgacagcggagacaacccgtacctcaagtacaaccacgccgacgcggagtttcaggagcgtcttaaagaagatacgtcttttgggggcaacctcggacgagcagtcttccaggcgaaaaagagggttcttgaacctctgggcctggttgaggaacctgttaagacggctccgggaaaaaagaggccggtagagcactctcctgtggagccagactcctcctcgggaaccggaaaagcgggccatcagcctgcgagaaagagattgaattttggtcagactggagacgcagactccgtacctgacccccagcctctcggacagccaccagcagcccccacaagtttgggatctactacaatggctacaggcagtggcgcaccaatggcagacaataacgagggtgccgatggagtgggtaattcctcaggaaattggcattgcgattcccaatggctgggcgacagagtcatcaccaccagcacccgaacctgggccctgcccacctacaacaaccacctctacaagcaaatctccagccaatcaggagcctcgaacgacaaccactactttggctacagcaccccctgggggtattttgacttcaacagattccactgtcacttctccccacgtgattggcaaagactcatcaacaacaactggggattccgacccaagagactcaacttcaagctctttaacattcaagtcaaagaggtcacgcagaatgacggtacgacgacgattgccaataaccttaccagcacggttcaggtgtttactgactcggagtaccagctcccgtacgtcctcggctcggcgcatcaaggatgcctcccgccgtttccagcggacgtcttcatggtcccacagtatggatacctcaccctgaacaacgggagtcaggcggtaggacgcccttccttttactgcctggagtactttccttctcagatgctgcgtactggaaacaactttaccttcagctacacctttgaggacgttcctttccacagcagctacgctcacagccagagtttggaccggctgatgaatcctctgatcgaccagtatctatattatctgaacaggacacaatcaaatagtggaactcttcagcagtctaggctactgtttagccaagctggacccaccagcatgtctcttcaagctaaaaactggctgcctggaccttgctacagacagcagcgtctttcaaagcaggcaaacgacaacaacaacagcaactttccctggactgcggctacaaagtatcatctaaatggccgggactcgttggttaatccaggaccagctatggccagccacaaagacgatgaagaaaagtttttccccatgcatgggaccctgatatttggtaaacaaggaacaaatgctaacgacgcggatttggagcatgttatgattacagatgaagaagaaatcaggaccaccaatcctgtggctacagagcagtacggaaacgtgtcaaataatttgcaaaactcaaatactggtccaactacagaaaatgtcaatcaccagggagcgttacctggtatggtgtggcaggatcgagacgtgtacctgcagggacccatttgggccaagattcctcacaccgacggacactttcacccttctccactgatgggaggttttggactcaaacacccgcctcctcaaatcatgatcaaaaacactcccgttccagccaatcctcccacaaacttcagttctgccaagtttgcttctttcatcacacagtattccacgggccaggtcagcgtggagattgagtgggagctgcagaaggagaacagcaaacgctggaaccccgagatccagtatacttccaactacaacaaatctgttaatgtggactttactgtggacactaatggtgtgtattcagagcctcgccccattggcaccagatacctgactcgtaatctgtaa

SEQ ID NO: 4843 - protein, 735 aa, Adeno-associated virus
MAADGYLPDWLEDTLSEGIRQWWKLKPGPPPPKPAERHQDDSRGLVLPGYKYLGPFNGLDKGEPVNEADAAALEHDKAYDRQLDSGDNPYLKYNHADAEFQERLKEDTSFGGNLGRAVFQAKKRVLEPLGLVEEPVKTAPGKKRPVEHSPVEPDSSSGTGKAGHQPARKRLNFGQTGDADSVPDPQPLGQPPAAPTSLGSTTMATGSGAPMADNNEGADGVGNSSGNWHCDSQWLGDRVITTSTRTWALPTYNNHLYKQISSQSGASNDNHYFGYSTPWGYFDFNRFHCHFSPRDWQRLINNNWGFRPKRLNFKLFNIQVKEVTQNDGTTTIANNLTSTVQVFTDSEYQLPYVLGSAHQGCLPPFPADVFMVPQYGYLTLNNGSQAVGRPSFYCLEYFPSQMLRTGNNFTFSYTFEDVPFHSSYAHSQSLDRLMNPLIDQYLYYLNRTQSNSGTLQQSRLLFSQAGPTSMSLQAKNWLPGPCYRQQRLSKQANDNNNSNFPWTAATKYHLNGRDSLVNPGPAMASHKDDEEKFFPMHGTLIFGKQGTNANDADLEHVMITDEEEIRTTNPVATEQYGNVSNNLQNSNTGPTTENVNHQGALPGMVWQDRDVYLQGPIWAKIPHTDGHFHPSPLMGGFGLKHPPPQIMIKNTPVPANPPTNFSSAKFASFITQYSTGQVSVEIEWELQKENSKRWNPEIQYTSNYNKSVNVDFTVDTNGVYSEPRPIGTRYLTRNL

SEQ ID NO: 4844 - DNA, 2208 bp, Adeno-associated virus
atggctgccgatggttatcttccagattggctcgaggacactctctctgaaggaataagacagtggtggaagctcaaacctggcccaccaccaccaaagcccgcagagcggcataaggacgacagcaggggtcttgtgcttcctgggtacaagtacctcggacccttcaacggactcgacaagggagagccggtcaacgaggcagacgccgcggccctcgagcacgacaaggcctacgaccggcagctcgacagcggagacaacccgtacctcaagtacaaccacgccgacgcggagtttcaggagcgccttaaagaagatacgtcttttgggggcaacctcggacgagcagtcttccaggcaaaaaagagggttcttgaacctctgggcctggttgaggagcctgttaaaacggctccgggaaaaaagaggccggtagagcactctcctgcggagccagactcctcctcgggaaccggaaaagcgggccagcagcctgcaagaaaaagattgaatttcggtcagactggagacgcagactccgtacctgacccccagcctctcggacagccaccagcagccccctctggtctgggaactaatacgatggcttcaggcagtggcgcaccaatggcagacaataacgagggcgccgacggagtgggtaattcctcgggaaattggcattgcgattccacatggatgggcgacagagtcatcaccaccagcacccgaacttgggccctgcccacctacaacaaccatctctacaagcaaatctccagccaatcaggagccagcaacgacaaccactactttggctacagcaccccttgggggtattttgacttcaacagattccactgccacttttcaccacgtgactggcaaagactcatcaacaacaactggggattccggcccaagagactcaacttcaagctctttaacattcaagtcaaagaggtcacgcagaatgacggtacgacgacgattgccaataaccttaccagcacggttcaggtgtttactgactcggagtaccagctcccgtacgtcctcggctcggcgcatcaaggatgcctcccgccgttcccagcagacgtcttcatggtgccacagtatggatacctcaccctgaacaacgggagtcaggcagtaggacgctcttcattttactgcctggagtactttccttctcagatgctgcgtaccggaaacaactttaccttcagctacacctttgaggacgttcctttccacagcagctacgctcacagccagagtttggaccgtctcatgaatcctctcatcgaccagtacctgtattacttgagcagaacaaacactccaagcggaaccaccacgcagtccaggcttcagttttctcaggccggagcaagtgacattcgggaccagtctaggaactggcttcctggaccctgttaccgccagcagcgagtatcaaagacatctgcggataacaacaacagtgaatactcgtggactggagctaccaagtaccacctcaatggcagagactctctggtgaatccgggcccggccatggccagccacaaggacgatgaagaaaagttttttcctcagagcggggttctcatctttgggaagcaaggctcagagaaaacaaatgtggacattgaaaaggtcatgattacagacgaagaggaaatcaggaccaccaatcccgtggctacggagcagtatggttctgtatctaccaacctgcagggcggcaacacacaagcagctaccgcagatgtcaacacacaaggcgttcttccaggcatggtctggcaggacagagacgtgtacctgcaggggcccatctgggcaaagattccacacacggacggacattttcacccctctcccctcatgggcggattcggacttaaacaccctcctccacagattctcatcaagaacaccccggtacctgcgaatccttcgaccaccttcagtgcggcaaagtttgcttctttcatcacacagtattccacggggcaggtcagcgtggagatcgagtgggagctgcagaaggagaacagcaaacgctggaatcccgagatccagtacacttccaactacaacaaatctgttaatgtggactttactgttgacactaatggcgtgtattcagagcctcgccccattggcaccagatacctgactcgtaatctgtaa

SEQ ID NO: 4845 - protein, 735 aa, Adeno-associated virus
MAADGYLPDWLEDTLSEGIRQWWKLKPGPPPPKPAERHKDDSRGLVLPGYKYLGPFNGLDKGEPVNEADAAALEHDKAYDRQLDSGDNPYLKYNHADAEFQERLKEDTSFGGNLGRAVFQAKKRVLEPLGLVEEPVKTAPGKKRPVEHSPAEPDSSSGTGKAGQQPARKRLNFGQTGDADSVPDPQPLGQPPAAPSGLGTNTMASGSGAPMADNNEGADGVGNSSGNWHCDSTWMGDRVITTSTRTWALPTYNNHLYKQISSQSGASNDNHYFGYSTPWGYFDFNRFHCHFSPRDWQRLINNNWGFRPKRLNFKLFNIQVKEVTQNDGTTTIANNLTSTVQVFTDSEYQLPYVLGSAHQGCLPPFPADVFMVPQYGYLTLNNGSQAVGRSSFYCLEYFPSQMLRTGNNFTFSYTFEDVPFHSSYAHSQSLDRLMNPLIDQYLYYLSRTNTPSGTTTQSRLQFSQAGASDIRDQSRNWLPGPCYRQQRVSKTSADNNNSEYSWTGATKYHLNGRDSLVNPGPAMASHKDDEEKFFPQSGVLIFGKQGSEKTNVDIEKVMITDEEEIRTTNPVATEQYGSVSTNLQGGNTQAATADVNTQGVLPGMVWQDRDVYLQGPIWAKIPHTDGHFHPSPLMGGFGLKHPPPQILIKNTPVPANPSTTFSAAKFASFITQYSTGQVSVEIEWELQKENSKRWNPEIQYTSNYNKSVNVDFTVDTNGVYSEPRPIGTRYLTRNL

SEQ ID NO: 4846 - DNA, 3161 bp, Adeno-associated virus
gattgaatttagcggccgcgaattcgcccttgctgcgtcaactggaccaatgagaactttccattcaatgattgcgtcgacaagatggtgatctggtgggaggagggaaagatgaccgccaaggtcatggagtcggccaaagccattctcggaggaagcaaggtgcgcgtggaccagaaatgtaagtcctcggcccagatagacccgactcccgtgattgtcacctccaacaccaacatgtgcgccgtgattgacgggaactcaacgaccttcgagcaccagcagccgttgcaagaccggatgttcaaatttgaactcacccgccgtctggatcatgactttgggaaggtcaccaagcaggaagtcaaagactttttccggtgggcaaaggatcacgtggttgaggtggagcatgaattctacgtcaaaaagggtggagccaagaaaagacccgcccccagtgacgcagatataagtgagcccaaacgggcgcgcgggtcagttgcgcagccatcgacgtcagacgcggaagcttcgatcaactacgcggacaggtaccaaaacaaatgttctcgtcacgtgggcatgaatctgatgctgtttccctgcagacaatgcgagagaatgaatcaaaattcaaatatctgcttcactcacggacagaaggactgtttagagtgctttcccgtgtcagaatctcaacccgtttctgtcgtcaaaaaggcgtatcagaaactttgctacattcatcatatcatgggaaaggtgccagacgcttgcactgcctgcgatctggtcaatgtggatttggatgactgcatctctgaacaataaatgatttaaatcaggtatggctgccgatggttatcttccagattggctcaaggacactctctctgaaggaataagacagtggtggaagctcaaacctggcccaccaccaccaaagcccgcagagcggcataaggacgacagcgggggtcttgtgcttcctgggtacaagtacctcggacccttcaacggactcgacaagggagagccggtcaacgaggcagacgccgcggccctcgagtacgacaaggcctacgaccggcagctcgacagcggagacaacccgtacctcaagtacaaccacgccgacgcggagtttcaggagcgccttaaagaagatacgtcttttgggggcaacctcggacgagcagtcttccaggcgaaaaagagggttcttgaacctctgggcctggttgaggaacctgttaagacggctccgggaaaaaagaggccggtagagcactctcctgtggagccagactcctcctcgggaacaggaaaagcgggccagcagcctgcgagaaagagattgaattttggtcagactggagacgcagactccgtacctgacccccagcctctcggacagccaccagcagccccctctggtctgggaactaatacgatggctacaggcagtggcgcaccaatggcagacaataacgagggcgccgacggagtgggtaattcctcgggaagttggcattgcgattccacatggatgggcgacagagtcatcaccaccagcacccgaacctgggctctgcccacctacaacaaccatctgtacaagcagatctccagccaatcaggagccagcaacgacaaccactactttggctacagcaccccttgggggtattttgacttcaacagattccactgccacttttcaccacgtgactggcaaagactcatcaacaacaactggggattccggcccaagagactcaacttcaagctctttaacattcaagtcaaggaggtcacgcagaatgacggtacgacgacgattgccaataaccttaccagcacggttcaggtgtttactgactcggagtaccagctcccgtacgtccccggctcggcgcatcaaggatgcctcccgccgttcccagcagacgtcttcatggtgccacagtatggatacctcaccctgaacaacgggagtcaggcagtaggacgctcttcattttactgcctggagtactttccttctcagatgcttcgtaccggaaacaactttaccttcagctacacctttgaggatgttcctttccacagcagctacgctcacagccagagtttggaccgtctcatgaatcctctcatcgaccagtacctgtattacttgagcagaacaaacactccaagcggaaccaccacgcagtccaggcttcagttttctcaggccggagcaagtgacattcgggaccagtctaggaactggcttcctggaccctgttaccgccagcagcgagtatcaaagacagctgcggacaacaacaacagtgaatactcgtggactggagctaccaagtaccacctcaatggcagagactctctggtgaatccgggcccggccatggccagccacaaggacgatgaagaaaagttttttcctcaaagcggggttctcatctttgggaagcaaggctcagagaaaacaaatgtggacattgaaaaggtcatgattacagacgaagaggaaatcagaaccaccaatcccgtggccacggagcagtatggttctgtatctaccaacctccagagcggcaacacacaagcagctactgcagatgtcaacacacaaggcgttcttccaggcatggtctggcaggacagagacgtgcacctgcaggggcctatctgggcaaagattccacacacggacggacattttcacccctctcccctcatgggcggatttggacttaaacaccctcctccacagattctcatcaagaacaccccggtacctgcaaatccttcgaccaccttcagtgcggcaaagtttgcttccttcatcacacagtattccacagggcaggtcagcgtggagatcgagtgggagctgcagaaggagaacagcaaacgctggaaccccgagatccagtacacttccaactacaacaaatctgttaatgtggactttactgtggacactaatggtgtgtattcagagcctcgccccattggcaccagatacctgactcgtaatctgtaattgcttgttaatcaataaaccgtttaattcgtttcagttgaactttggtctctgcgaagggcgaattcgtttaaaccctgcaggactagtccctttagtgagg

SEQ ID NO: 4847 - DNA, 3162 bp, Adeno-associated virus
gaattgaatttagcggccgcgaattcgcccttcgcagagaccaaagttcaactgaaacgaattaaacggtttattgattaacaagcaattacagattacgagtcaggtatctggtgccaatggggcgaggctctgaatacacgccattagtgtccacagtaaagtccacattaacagacttgttgtagttggaagtgtactgaatttcgggattccagcgtttgctgttttccttctgcagctcccactcgatctccacgctgacctgtcccgtggagtactgtgtgatgaaggaagcaaactttgccgcactgaaggtggtcgaaggattcgcaggtaccggggtgttcttgatgagaatctgtggaggagggtgtttaagtccgaatccacccatgaggggagaggggtgaaaatgtccgtccgtgtgtggaatctttgcccagatgggcccctgaaggtacacatctctgtcctgccagaccatgcctggaagaacgccttgtgtgttgacatctgcggtagctgcttgtctgttgcctctctggaggttggtagatacagaaccgtactgctccgtagccacgggattggttgtcctgatttcctcttcgtctgtaatcatgaccttttcaatgtccacatttgttttctctgagccttgcttcccaaagatgagaaccccgctctgaggaaaaaacttttcttcattgtccttgtggcttgccatggccgggcccggattcaccagagagtctctgccattgaggtggtacttggtagctccagtccacgagtattcactgttgttgttatccgcagatgtctttgatactcgctgctggcggtaacagggtccaggaagccagttcctagactggtcccgaatgtcactcgctccggcctgagaaaactgaagccttgactgcgtggtggttccacttggagtgtttgttgtgctcaagtaatacaggtactggtcgatgagaggattcatgagacggtccagactctggctgtgagcgtagccgctgtggaaaggaacgtcctcaaaagtgtagctgaaggtaaagttgtttccggtacgcagcatctgagaaggaaagtactccaggcagtaaaatgaagagcgtcctactgcctgactcccgttgttcagggtgaggtatccatactgtggcaccatgaagacgtctgctgggaacggcgggaggcatccttgatgcgccgagccgaggacgtacgggagctggtactccgagtcagtaaacacctgaaccgtgctggtaaggttattggcaatcgtcgtcgtaccgtcattctgcgtgacctctttgacttgaatgttaaagagcttgaagttgagtctcttgggtcggaatccccagttgttgttgatgagtctttgccagtcacgtggtgaaaagtggcagtggaatctgttgaagtcaaaatacccccaaggggtgctgtagccaaagtagtgattgtcgttcgaggctcctgattggctggaaatttgtttgtagaggtggttgttgtaggtgggcagggcccaggttcgggtgctggtggtgatgactctgtcgcccatccatgtggaatcgcaatgccaatttcccgaggaattacccactccgtcggcgccctcgttattgtctgccattggtgcgccactgcctgtagccatcgtattagttcccagaccagagggggctgctggtggctgtccgagaggctgggggtcaggtactgagtctgcgtctccagtctgaccaaaattcaatctttttcttgcaggctgctggcccgcctttccggttcccgaggaggagtctggctccacaggagagtgctctaccggcctcttttttcctggagccgtcttgacaggttccccaaccaggcccagaggttcaagaaccctctttttcgcctggaagactgctcgtccgaggttgcccccaaaagacgtatcttctttaaggcgctcctgaaactccgcgtcggcgtggttgtacttgaggtacgggttgtctccgctgtcgagctgccggtcgtaggctttgtcgtgctcgagggccgcggcgtctgcctcgttgaccggctctcccttgtcgagtccgttgaagggtccgaggtacttgtacccaggaagcacaagacccctgctgtcgtccttatgccgctctgcgggctttggtggtggtgggccaggtttgagcttccaccactgtcttattccttcagagagagtgtcctcgagccaatctggaagataaccatcggcagccatacctgatttaaatcatttattgttcaaagatgcagtcatccaaatccacattgaccagatcgcaggcagtgcaagcgtctggcacctttcccatgatatgatgaatgtagcacagtttctgatacgcctttttgacgacagaaacgggttgagattctgacacgggaaagcactctaaacagtctttctgtccgtgagtgaagcagatatttgaattctgattcattctctcgcattgtctgcagggaaacagcatcagattcatgcccacgtgacgagaacatttgttttggtacctgtctgcgtagttgatcgaagcttccgcgtctgacgtcgatggctgcgcaactgactcgcgcacccgtttgggctcacttatatctgcgtcactgggggcgggtcttttcttggctccaccctttttgacgtagaattcatgctccacctcaaccacgtgatcctttgcccaccggaaaaagtctttgacttcctgcttggtgaccttcccaaagtcatgatccagacggcgggtgagttcaaatttgaacatccggtcttgcaacggctgctggtgttcgaaggtcgttgagttcccgtcaatcacggcgcacatgttggtgttggaggtgacgatcacgggagtcgggtctatctgggccgaggacttgcatttctggtccacgcgcaccttgcttcctccgagaatggctttggccgactccacgaccttggcggtcatcttcccctcctcccaccagatcaccatcttgtcgacacagtcgttgaagggaaagttctcattggtccagttgacgcagcaagggcgaattcgtttaaacctgcaggactagtccctttagtgaggg

SEQ ID NO: 4848 - DNA, 3164 bp, Adeno-associated virus
gcgaattgaatttagcggccgcgaattcgcccttcgcagagaccaaagttcaactgaaacgaattaaacggtttattgattaacaagcaattacaaattacgagtcaggtatctggtgccaatggggcgaggctctgaatacacgccattagtgtccacagtaaagtccacattaacagacttgttgtagttggaagtgtactgaatttcgggattccagcgtttgctgttttccttctgcagctcccactcgatctccacgctgacctgtcccgtggagtactgtgtgatgaaggaagcaaactttgccgcactgaaggtggtcgaaggattcgcaggtaccggggtgttcttgatgagaatctgtggaggagggtgtttaggtccgaatccacccatgaggggagaggggtgaaaatgtccgtccgtgtgtggaatctttgcccagatgggcccctgaaggtacacatctctgtcctgccagaccatgcctggaagaacgccttgtgtgttgacatctgcggtagctgcttgtctgttgcctctctggaggttggtagatacagaaccatactgctccgtagccacgggattggttgtcctgatttcctcttcgtctgtaatcatgaccttttcaatgtccacatttgttttctctgagccttgcttcccaaagatgagaaccccgctctgaggaaaaaacttttcttcattgtccttgtggcttgccatggccgggcccggattcaccagagagtctctgccattgaggtggtacttggtagctccagtccacgagtattcactgttgttgttatccgcagatgtctttgatactcgctgctggcggtaacagggtccaggaagccagttcctagactggtcccgaatgtcactcgctccggcctgagaaaactgaagccttgactgcgtggtggttccacttggagtgtttgttgtgctcaagtaatacaggtactggtcgatgagaggattcatgagacggtccagactctggctgtgagcgtagctgctgtggaaaggaacgtcctcaaaagtgtagctgaaggtaaagttgtttccggtacgcagcatctgagaaggaaagtactccgggcagtaaaatgaagagcgtcctactgcctgactcccgttgctcagggtgaggtatccatactgtggcaccatgaagacgtctgctgggaacggcgggaggcatccttgatgcgccgagccgaggacgtacgggagctggtactccgagtcagtaaacacctgaaccgtgctggtaaggttattggcaatcgtcgtcgtaccgtcattctgcgtgacctctttgacttgaatgttaaagagcttgaagttgagtctcttgggtcggaatccccagttgttgttgatgagtctttgccagtcacgtggtgaaaagtggcagtggaatctgttgaagtcaaaatacccccaaggggtgctgtagccaaagtagtgattgtcgttcgaggctcctgattggctggaaatttgtctgtagaggtggttgttgtaggtgggcagggcccaggttcgggtgctggtggtgatgactctgtcgcccatccatgtggaatcgcaatgccgatttcccgaggaattacccactccgtcggcgccctcgttattgtctgccattggtgcgccactgcctgtagccatcgtattagttcccagaccagagggggctgctggtggctgtccgagaggctgggggtcaggtactgagtctgcgtctccagtctgaccaaaattcaatctttttcttgcaggctgctggcccgcctttccggttcccgaggaggagtctggctccacaggagagtgctctaccggcctcttttttcccggagccgtcttaacaggttccccaaccaggcccagaggttcaagaaccctctttttcgcctggaagactgctcgtccgaggttgcccccaaaagacgtatcttctttaaggcgctcctgaaactccgcgtcggcgtggttgtacttgaggtacgggttgtctccgctgtcgagctgccggtcgtaggctttgtcgtgctcgagggccgcggcgtctgcctcgttgaccggctctcccttgtcgagtccgttgaagggtccgaggtacttgtacccaggaagcacaagacccctgctgtcgtccttatgccgctctgcgggctttggtggtggtgggccaggtttgagcttccaccactgtcttattccttcagagagagtgtcctcgagccaatctggaagataaccatcggcagccatacctgatttaaatcatttattgttcaaagatgcagtcatccaaatccacattgaccagatcgcaggcagtgcaagcgtctggcacctttcccatgatatgatgaatgtagcacagtttctgatacgcctttttgacgacagaaacgggttgagattctgacacgggaaagcactctaaacagtctttctgtccgtgagtgaagcagatatttgaattctgattcattctctcgcattgtctgcagggaaacagcatcagattcatgcccacgtgacgagaacatttgttttggtacctgtctgcgtagttgatcgaagcttccgcgtctgacgtcgatggctgcgcaactgactcgcgcacccgtttgggcccacttatatctgcgtcactgggggcgggtcttttcttggctccaccctttttgacgtagaattcatgctccacctcaaccacgtgatcctttgcccaccggaaaaagtctttgacttcctgcttggtgaccttcccaaagtcatgatccagacggcgggtgagttcaaatttgaacatccggtcttgcaacggctgctggtgttcgaaggtcgttgagttcccgtcaatcacggcgcacatgttggtgttggaggtgacgatcacgggagtcgggtctatctgggccgaggacttgcatttctggtccacgcgcaccttgcttcctccgagaatggctttggccgactccacgaccttggcggtcatcttcccctcctcccaccagatcaccatcttgtcgacacagtcgttgaagggaaagttctcattggtccagttgacgcagcaagggcgaattcgtttaaacctgcaggactagtccctttagtgaggg

SEQ ID NO: 4849 - DNA, 3163 bp, Adeno-associated virus
accctcactaaagggactagtcctgcaggtttaaacgaattcgcccttgctgcgtcaactggagcaatgagaactttcccttcaacgactgtgtcgacaagatggtgatttggtgggaggaggggaagatgaccgccaaggtcgtggagtcggccaaagccattctcggaggaagcaaggtgcgcgtggaccagaaatgcaagtcctcggcccagatagatccgactcccgtgatcgtcacctccaacaccaacatgtgcgccgtgattgacgggaactcaacgaccttcgaacaccagcagccgttgcaagaccggatgttcaaatttgaactcacccgccgtctggatcatgactttgggaaggtcaccaagcaggaagtcaaagactttttccggtgggcaaaggatcacgtggttgaggtggagcatggattctacgtcaaaaagggtggagccaagaaaagacccgcccctagtgacgcagatataagtgagcccaaacgggtgcgcgagtcagttgcgcagccatcgacgtcggacgcggaagcttcgatcaactacgcggacaggtaccaaaacaaatgttctcgtcacgtgggcatgaatctgatgctgtttccctgcagacaatgcgagagaatgaatcaaaattcaaatatctgcttcactcacggacagaaagactgtttagagtgctttcccgtgtcagaatctcaacctgtttctgtcgtcaaaaaggcgtatcagaaactgcgctacattcatcatatcatgggaaaggtgccagacgcttgcactgcctgcgatctggtcaatgtggatttggatgactgcatctctgaacaataaatgatttaaatcaggtatggctgccgatggttatcttccagattggctcgaggacactctctctgaaggaataagacagtggtggaagctcaaacctggcccaccaccaccaaagcccgcagagcggcataaggacgacagcaggggtcttgtgcttcctgggtacaagtacctcggacccttcaacggactcgacaagggagagccggtcaacgaggcagacgccgcggccctcgagcacgacaaggcctacgaccggcagctcgacagcggagacaacccgtacctcaagtacaaccacgccgacgcggagtttcaggagcgtcttaaagaagatacgtcttttgggggcaacctcggacgagcagtcttccaggcgaaaaagagggttcttgaacctctgggcctggttgaggaacctgttaagacggctccgggaaaaaagaggccggtagagcactctcctgcggagccagactcctcctcgggaaccggaaaagcgggccagcagcctgcaagaaaaagactgaatttcggtcagactggagacgcagactccgtacctgacccccagcctctcggacagccaccagcagcccccacaagtttgggatctactacaatggctacaggcagtggcgcaccaatggcagacaataacgagggtgccgatggagtgggtaattcctcaggaaattggcattgcgattcccaatggctgggcgacagagtcatcaccaccagcacccgaacctgggccctgcccacctacaacaaccacctttacaagcaaatctccagccaatcaggagcctcaaacgacaaccactactttggctacagcaccccctgggggtattttgacttcaacagattccactgccacttttcaccacgtgactggcaaagactcatcaacaacaactggggattccgacccaagagactcaacttcaagctctttaacattcaagtcaaagaggtcacgcagaatgacggtacgacgacgattgccaataaccttaccagcacggttcaggtgtttactgactcggagtaccagctcccgtacgtcctcggctcggcgcatcaaggatgcctcccgccgtttccagcggacgtcttcatggtcccacagtatggatacctcaccctgaacaacgggagtcaggcggtaggacgctcttccttttactgcctggagtgctttccttctcagatgctgcgtactggaaacaactttcagttcagctacacttttgaagacgtgcctttccacagcagctacgctcacagccagagtttggatcggctgatgaatcctctgatcgaccagtacctgtattatctaaacagaacacaaacagctagtggaactcagcagtctcggctactgtttagccaagctggacccacaagcatgtctcttcaagctaaaaactggctgcctggaccgtgttatcgccagcagcgtttgtcaaagcaggcaaacgacaacaacaacagcaactttccctggactggagctaccaagtaccacctcaatggcagagactctttggtgaacccgggcccggccatggccagccacaaggacgatgaagaaaagtttttccccatgcatggaaccctaatatttggtaaagaaggaacaaatgctaccaacgcggaattggaaaatgtcatgattacagatgaagaggaaatcaggaccaccaatcccgtggctacagagcagtacggatatgtgtcaaataatttgcaaaactcaaatactgctgcaagtactgaaactgtgaatcaccaaggagcattacctggtatggtgtggcaggatcgagacgtgtacctgcagggacccatttgggccaagattcctcacaccgatggacactttcatccttctccactgatgggaggttttggactcaaacacccgcctcctcagattatgatcaaaaacactcccgttccagccaatcctcccacaaacttcagttctgccaagtttgcttccttcatcacacagtattccacgggacaggtcagcgtggagatcgagtgggagctgcagaaggagaacagcaaacgctggaatcccgaaattcagtacacttccaactacaacaaatctgttaatgtggactttactgtggacactaatggtgtgtattcagagcctcgccccattggcaccagatacctgactcgtaatctgtaattgcttgttaatcaataaaccgtttaattcgtttcagttgaactttggtctctgcgaagggcgaattcgcggccgctaaattcaattcgcc

SEQ ID NO: 4850 - protein, 735 aa, Adeno-associated virus
MAADGYLPDWLEDTLSEGIRQWWKLKPGPPPPKPAERHKDDSRGLVLPGYKYLGPFNGLYKGEPVDEADAAALEHDKAYDRQLDSGDNPYLKYNHADAEFQERLKEDTSFGGNLGRAVFQAKKRVLEPLGLVGEPVKTAPGKKRPVEHSPVEPDSSSGTGKAGNQPARKRLNFGQTGDADSVPDPQPLGQPPAAPSGLGSTTMATGSGAPVADNNEGADGVGNSSGNWHCDSQWLGDRVITTSTRTWALPTYNNHLYKQISSQSGASNDNHYFGYSTPWGYFDFNRFHCHFSPRDRQRLINNNWGFRPKRLNFKLFNIQVKEVTQNDGTTTIANNLTSTVQVFTDSGYQLPYVLGLAHQGCLPPFPADVFMVPQYGYLTLNNGSQAVGRSSFYCLEYFPSQMLRTGNNFQFSYTFEDVPFHSSYAHSQSLDRLMNPLIDQYLYYLNKTQSNSGTLQQSRLLFSQAGPTSMSLQAKNWLPGPCYRQQRLSKQANDNNNSNFPWTAATKYHLNGRDSLVNPGPAMASHKDDEEKFFPMHGTLIFGKQGTNANDADLDNVMITDEEEIRTTNPVATEQYGYVSNNLQNSNTGPTTGTVNHQGALPGMVWQDRDVYLQGPIWAKIPHTDGHFHPSPLMGGFGLKHPPPQIMIKNTPVPANPPTNFSSAKFASFITQYSTGQVSVEIEWELQKEDSKRWNPEIQYTSNYNKPVNVDFTVDTNGVYSEPRPIGTRYLTRNL

SEQ ID NO: 4851 - DNA, 2208 bp, Adeno-associated virus
atggctgccgatggttatcttccagattggctcgaggacactctctctgaaggaataagacagtggtggaagctcaaacctggcccaccaccaccaaagcccgcagagcggcataaggacgacagcaggggtcttgtgcttcctgggtacaagtacctcggacccttcaacggactctacaagggagagccggtcgacgaggcagacgccgcggccctcgagcacgacaaggcctacgaccggcagctcgacagcggagacaacccgtacctcaagtacaaccacgccgacgcggagtttcaggagcgccttaaagaagatacgtcttttgggggcaacctcggacgagcagtcttccaggccaaaaagagggttcttgaacctctgggcttggttggggagcctgttaaaacggctccgggaaaaaagaggccggtagagcactctcctgtggagccagactcctcctcgggaaccggaaaagcgggcaaccagcctgcaagaaaaagattgaattttggtcagactggagacgcagactccgtacctgacccccagcctctcggacagccaccagcagccccctctggtctgggatctactacaatggctacaggcagtggcgcaccagtggcagacaataacgagggtgccgatggagtgggtaattcctcaggaaattggcattgcgattcccaatggctgggcgacagagtcatcaccaccagcacccgaacctgggctctgcccacctacaataaccacctctacaagcaaatctccagccaatcaggagcctcaaacgacaaccactactttggctacagcaccccctgggggtattttgacttcaacagattccactgccacttttcaccacgtgaccggcaaagactcatcaacaacaactggggattccgaccaaaaagactcaacttcaagctctttaacattcaagtcaaagaggtcacgcagaatgacggtacgacgacgattgccaataaccttaccagcacggttcaggtgtttactgactcggggtaccagctcccgtacgtcctcggcttggcgcatcaaggatgcctcccgccgttcccagcagacgtcttcatggtgccacagtatggatacctcaccctgaacaacgggagtcaggcggtaggacgctcttccttttactgcctggagtactttccttctcagatgctgcgtactggaaacaactttcagttcagctacacctttgaagacgttcctttccacagcagctacgctcacagccagagtctggatcggctgatgaatcctctgatcgaccagtacctgtattatctgaacaagacacaatcaaatagtggaactcttcagcagtctcggctactgtttagccaagctggacccaccagcatgtctcttcaagctaaaaactggctgcctggaccttgctacagacagcagcgtctgtcaaagcaggcaaacgacaacaacaacagcaactttccctggactgcggctacaaagtatcatctaaatggccgggactcgttggttaatccaggaccagctatggccagccacaaagacgatgaagaaaagtttttccccatgcatggaaccctgatatttggtaaacaaggaacaaatgctaacgacgcggatttggacaatgtcatgattacagatgaagaagaaatccgcaccaccaatcccgtggctacggagcagtacggatatgtgtcaaataatttgcaaaactcaaatactggtccaactactggaactgtcaatcaccaaggagcgttacctggtatggtgtggcaggatcgagacgtgtacctgcagggacccatttgggccaagattcctcacaccgatggacactttcatccttctccacttatgggaggttttggactcaaacacccacctcctcagatcatgattaaaaacactcccgttccagccaatcctcccacaaacttcagttctgccaagtttgcttctttcatcacacagtattccacgggacaagtcagcgtggagatcgagtgggagctgcagaaggaggacagcaaacgctggaaccccgagatccagtacacttccaactataacaaacctgttaatgtggactttactgtggacactaatggtgtgtattcagagcctcgccccattggcaccagatacctgactcgtaatctgtaa

SEQ ID NO: 4852 - DNA, 3161 bp, Adeno-associated virus
cgaattgatttagcggccgcgaattcgcccttcgcagagaccaaagttcaactgaaacgaattaaacggtttattgattaacaagcaattacagattacgagtcaggtatctggtgccaatggggcgaggctctgaatacacaccattagtgtccacagtaaagtccacattaacagatttgttgtagttggaagtgtactggatctcgggattccagcgtttgctgttctccttctgtagctcccactcgatctccacgctgacccgccccgtggaatactgtgtgatgaaggaagcaaactttgccgcactgaaggtggtcgaaggattcgcaggtaccggggtgtttttgatgagaatctgtggaggagggtgtttaagtccgaatccgcccatgaggggagaggggtgaaaatgtccgtccgtgtgcggaatctttgcccagataggcccctgcaggtacacgtctctgtcctgccagaccatgcctggaagaacgccttgtgtgttgacatctgcagtagatgcttgtgtgttgccgctctggaggttggtagatacagaaccatactgctccgtggccacgggattggtggttctgatttcctcttcgtctgtaatcatgaccttttcaatgtccacatttgttttctctgatccttgttttccaaagatgagaaccccgctctgaggaaaaaacttttcttcatcgtccttgtggctggccattgccgggcccggattcaccagagagtctctgccattgaggtggtacttggtagctccaatccacgagtattcactgttgttgttgtccgcagatgtctttgatactcgctgctggcggtaacagggtccaggaagccagttcctagactgatcccgaatgtcactcgctccggcctgagaaaactgaagcctggactgcgtggtggttccgcttggagtgtttgttctgctcaagtaatacaggtactggtcgatgagaggattcatgagacggtccaaactctggctgtgagcgtagctgctgtggaaaggaacatcctcaaaggtgtagctgaaggtaaagttgtttccggtacgcagcatctgagaagggaagtactccaggcagtaaaatgaagagcgtcctactgcctgactcccgttgttcagggtgaggtatccatactgtggcaccatgaagacgtctgctgggaacggcgggaggcatccttgatgcgccgagccgaggacgtacgggagctggtactccgagtcagtaaacacctgaaccgtgctggtaaggttattggcaatcgtcgtcgtaccatcattctgcgtgacctctctgacttgaatgttaaagagcttgaagttgagtctcttgggccggaatccccagttgttgttgatgagtctttgccagtcacgtggtgaaaagtggcagtggaatctgttgaagtcaaaatacccccaaggggtgctgtagccaaagtagtggttgtcgttgctggctcctgattggctggaaatctgcttgtacagatggttgttgtaggtgggcagagcccaggttcgggtgctggtggtgatgactctgtcgcccatccatgtggaatcgcaatgccaatttcccgaggaattacccactccgtcggcgccatcgttattgtctgccattggtgcgccactgcctgtagccatcgtattagttcccagaccagagggggctgctggtggctgtccgagaggctgggggtcaggtacggagtctgcgtctccagtctgaccgaaattcaatctctttcttgcaggctggttgcccgcttttccggttcccgaggaggagtctggctccacaggagagtgctctaccggcctcttttttcccggagccgtcttaacaggctcctcaaccaggcccagaggttcaagaaccctcttttttgcctggaagactgctcgtccgaggttgcccccaaaagacgtatcttctttaaggcgctcctgaaactccgcgtcggcgtggtcgtacttgaggtacgggttgtctccgctgtcgagctgccggtcgtaggccttgtcgtgctcgagggccgcggcgtctgcctcgttgaccggctctcccttgtcgagtccgttgaagggtccgaggtacttgtacccaggaagcacaagacccctgctgtcgtccttatgccgctctgcgggctttggtggtggtgggccaggtttgagcttccaccactgtcttattccttcagagagagtgtcctcgagccaatctggaagataaccatcggcagccatacctgatttaaatcatttattgttcagagatgcagtcatccaaatccacattgaccagatcgcaggcagtgcaagcgtctggcacctttcccatgatatgatgaatgtagcaaagtttctgatacgcctttttgacgacagaaacgggttgagattctgacacgggaaagcactctaaacagtctttctgtccgtgagtgaagcagatatttgaattctgattcattctctcgcattgtctgcagggaaacagcatcagattcatgcccacgtgacgagaacatttgttttggtacctgtccgcgtagttgatcgaagcttccgcgtctgacgtcgatggctgcgcaactgactcgcgcgcccgtttgggctcacttatatctgcgtcactgggggcgggtcttttcttggctccaccctttttgacgtagaattcatgctccacctcaaccacgtgatcctttgcccaccggaaaaagtctttcacttcctgcttggtgaccttcccaaagtcatgatccagacggcgggttagttcaaatttgaacatccggtcttgcaacggctgctggtgttcgaaggtcgttgagttcccgtcaatcacggcgcacatgttggtgttggaggtggcgatcacgggagtcgggtctatctgggccgaggacttgcacttttggtccacgcgcaccttgcttcctccgagaatggcttcggccgattccacgaccttggcggtcatctttccctcctcccaccagatcaccatcttgtcgacacagtcgttgaagggaaagttctcattggtccagttgacgcagcaagggcgaattcgtttaaacctgcaggaactagtcccttagtgagg

SEQ ID NO: 4853 - protein, 735 aa, Adeno-associated virus
MAADGYLPDWLEDTLSEGIRQWWKLKPGPPPPKPAERHKDDSRGLVLPGYKYLGPFNGLYKGEPVNEADAAALEHDKAYDRQLDSGDNPYLKYNHAGAEFQERLKEDTSFGGNLGRAVFQAKKRVLEPLGLVEEPVKTAPGKKRPVEHSPVEPDSSSGTGKAGNQPARKRLNFGQTGDADSVPDPQPLGQPPAAPSGLGSTTMATGSGAPVADNNEGADGVGNSSGNWHCDSQWLGDRVITTSTRTWALPTYNNHLYKQISSQSGASNDNHYFGYSTPWGYFDFNRFHCHFSPRDWQRLINNNWGFRPKRLNFKLFNIQVKEVTQNDGTTTIANNLTSTVQVFTDSEYQLPYVLGSAHQGCLPPFPADVFMVPQYGYLTLNNGSQAVGRSSFYCLEYFPSQMLRTGNNFQFSYTFEDVPFHSSYAHSQSLDRLMNPLIDQYLYYLNKTQSNSGTLQQSRLLFSQAGPTSMSLQAKNWLPGPCYRQQRLSKQANDNNNSNFPWTAATKYHLNGRDSLVNPGPAMASHKDDEEKFFPMHGTLIFGKQGTNANDADLDNVMITDEEEIRTTNPVATEQYGYVSNNLQDSNTGPTTGTVNHQGALPGMVWQDRDVYLQGPIWAKIPHTDGHFHPSPLMGGFGLKHPPPQIMIKNTPVPANPPTNFSSAKFASFITQYSTGQVSVEIEWELQKENSKRWNPEIQYTSNYNKSVNVDFTVDTNGVYSEPRPIGTRYLTRNL

SEQ ID NO: 4854 - DNA, 2208 bp, Adeno-associated virus
atggctgccgatggttatcttccagattggctcgaggacactctctctgaaggaataagacagtggtggaagctcaaacctggcccaccaccgccaaagcccgcagagcggcataaggacgacagcaggggtcttgtgcttcctgggtacaagtacctcggacccttcaacggactctacaagggagagccggtcaacgaggcagacgccgcggccctcgagcacgacaaggcctacgaccggcagctcgacagcggagacaacccgtacctcaagtacaaccacgccggcgcggagtttcaggagcgccttaaagaagatacgtcttttgggggcaacctcggacgagcagtcttccaggccaaaaagagggttcttgaacctctgggcttggttgaggagcctgttaaaacggctccgggaaaaaagaggccggtagagcactctcctgtggagccagactcctcctcgggaaccggaaaagcgggcaaccagcctgcaagaaaaagattgaattttggtcagactggagacgcagactccgtacctgacccccagcctctcggacagccaccagcagccccctctggtctgggatctactacaatggctacaggcagtggcgcaccagtggcagacaataacgagggtgccgatggagtgggtaattcctcaggaaattggcattgcgattcccaatggctgggcgacagagtcatcaccaccagcacccgaacctgggctctgcccacctacaacaaccacctctacaagcaaatctccagccaatcaggagcctcaaacgacaaccactactttggctacagcaccccctgggggtattttgacttcaacagattccactgccacttttcaccacgtgactggcaaagactcatcaacaacaactggggattccgaccaaagagactcaacttcaagctctttaacattcaagtcaaagaggtcacgcagaatgacggtacgacgacgattgccaataaccttaccagcacggttcaggtgtttactgactcggagtaccagctcccgtacgtcctcggctcggcgcatcaaggatgcctcccgccgttcccagcagacgtcttcatggtgccacagtatggatacctcaccctgaacaacgggagtcaggcggtaggacgctcttccttttactgcctggagtactttccttctcagatgctgcgtactggaaacaactttcagttcagctacacctttgaagacgttcctttccacagcagctacgctcacagccagagtctggatcggctgatgaatcctctgatcgaccagtacctgtattatctgaacaagacacaatcaaatagtggaacccttcagcagtctcggctactgtttagccaagctggacccaccagcatgtctcttcaagctaaaaactggctgcctggaccttgctacagacagcagcgtctgtcaaagcaggcaaacgacaacaacaacagcaactttccctggactgcggctacaaagtatcatctaaatggccgggactcgttggttaatccaggaccagctatggccagccacaaagacgatgaagaaaagtttttccccatgcatggaaccctgatatttggtaaacaaggaacaaatgctaacgacgcggatttggacaatgtcatgattacagatgaagaagaaatccgcaccaccaatcccgtggctacggagcagtacggatatgtgtcaaataatttgcaagactcaaatactggtccaactactggaactgtcaatcaccaaggagcgttacctggtatggtgtggcaggatcgagacgtgtacctgcagggacccatttgggccaagattcctcacaccgatggacactttcatccttctccacttatgggaggttttggactcaaacacccacctcctcagatcatgattaaaaacactcccgttccagccaatcctcccacaaacttcagttctgccaagtttgcttctttcatcacacagtattccacgggacaagtcagcgtagagatcgagtgggagctgcagaaggagaacagcaaacgctggaaccccgagatccagtacacttccaactataacaaatctgttaatgtggactttactgtggacactaatggtgtgtattcagagcctcgccccattggcaccagatacctgactcgtaatctgtaa

SEQ ID NO: 4855 - protein, 738 aa, Adeno-associated virus
MAADGYLPDWLEDNLSEGIREWWDLKPGAPKPKANQQKQDDGRGLVLPGCKYLGPFNGLDKGEPVNAADAAALEHDKAYDQQLKAGDNPYLRYNHADAEFQERLQEDTSFGGNLGRAVFQAKKRVLEPLGLVEEGAKTAPGKKRPVEPSPQRSPDSSTGIGKTGQQPAKKRLNFGQTGDSESVPDPQPIGEPPAGPSGLGSGTMAAGGGAPMADNNEGADGVGSSSGNWHCDSTWLGDRVITTSTRTWALPTYNNHLYKQISNGTSGGSTNDNTYFGYSTPWGYFDFNRFHCHFSPRDWQRLINNNWGFRPKRLNFKLFNIQVKEVTQNEGTKTIANNLTSTIQVFTDSEYQLPYVLGSAHQGCPPPFPADVFMIPQYGYLTLNNGSQAVGRSSFYCLEYFPSQMRRTGNNFEFSYQFEDVPFHSSYAHSQSLDRLMNPLIDQYLYYLSRTQSTGGTAGTQQLLFSQAGPNNMSAQAKNWLPGPCYRQQRVSTTLSQNNNSNFAWTGATKYHLNGRDSLVNPGVAMATHKDDEERFFPSSGVLMFGKQGAGKDNVDYSSVMLTSEEEIKTTNPVATEQYGVVADNLQQQNAAPIVGAVNSQGALPGMVWQNRDVYLQGPIWAKIPHTDGNFHPSPLMGGFGLKHPPPQILIKNTPVPADPPTTFSQAKLASFITQYSTGQVSVEIEWELQKENSKRWNPEIQYTSNYNKSVNVDFTVDTNGVYSEPRPIGTRYLTRNL

SEQ ID NO: 4856 - DNA, 2217 bp, Adeno-associated virus
atggctgccgatggttatcttccagattggctcgaggacaacctctctgagggcattcgcgagtggtgggacttgaaacctggagccccgaaacccaaagccaaccagcaaaagcaggacgacggccggggtctggtgcttcctggctgcaagtacctcggacccttcaacggactcgacaagggggagcccgtcaacgcggcggacgcagcggccctcgagcacgacaaggcctacgaccagcagctcaaagcgggtgacaatccgtacctgcggtataaccacgccgacgccgagtttcaggagcgtctgcaagaagatacgtcttttgggggcaacctcgggcgagcagtcttccaggccaagaagcgggttctcgaacctctcggtctggttgaggaaggcgctaagacggctcctggaaagaagagaccggtagagccatcaccccagcgttctccagactcctctacgggcatcggcaagacaggccagcagcccgcgaaaaagagactcaactttgggcagactggcgactcagagtcagtgcccgaccctcaaccaatcggagaaccccccgcaggcccctctggtctgggatctggtacaatggctgcaggcggtggcgctccaatggcagacaataacgaaggcgccgacggagtgggtagttcctcaggaaattggcattgcgattccacatggctgggcgacagagtcatcaccaccagcacccgaacctgggccctccccacctacaacaaccacctctacaagcaaatctccaacgggacatcgggaggaagcaccaacgacaacacctacttcggctacagcaccccctgggggtattttgactttaacagattccactgccacttctcaccacgtgactggcagcgactcatcaacaacaactggggattccggcccaagagactcaacttcaagctcttcaacatccaggtcaaggaggtcacgcagaatgaaggcaccaagaccatcgccaataaccttaccagcacgattcaggtctttacggactcggaataccagctcccgtacgtcctcggctctgcgcaccagggctgcccgcctccgttcccggcggacgtcttcatgattcctcagtacgggtacctgactctgaacaacggcagtcaggccgtgggccgttcctccttctactgcctggagtactttccttctcaaatgcggagaacgggcaacaactttgagttcagctaccagtttgaggacgtgccttttcacagcagctacgcgcatagccaaagcctggaccggctgatgaaccccctcatcgaccagtacctgtactacctgtctcggactcagtccacgggaggtaccgcaggaactcagcagttgctattttctcaggccgggcctaataacatgtcggctcaggccaaaaactggctacccgggccctgctaccggcagcaacgcgtctccacgacactgtcgcaaaataacaacagcaactttgcttggaccggtgccaccaagtatcatctgaatggcagagactctctggtaaatcccggtgtcgctatggcaacgcacaaggacgacgaagagcgattttttccatccagcggagtcttgatgtttgggaaacagggagctggaaaagacaacgtggactatagcagcgttatgctaaccagtgaggaagaaatcaaaaccaccaacccagtggccacagaacagtacggcgtggtggccgataacctgcaacagcaaaacgccgctcctattgtaggggccgtcaacagtcaaggagccttacctggcatggtctggcagaaccgggacgtgtacctgcagggtcctatctgggccaagattcctcacacggacggcaactttcatccttcgccgctgatgggaggctttggactgaaacacccgcctcctcagatcctgattaagaatacacctgttcccgcggatcctccaactaccttcagtcaagccaagctggcgtcgttcatcacgcagtacagcaccggacaggtcagcgtggaaattgaatgggagctgcagaaagagaacagcaagcgctggaacccagagattcagtatacttccaactataacaaatctgttaatgtggactttactgtggacactaatggtgtgtattcagagcctcgccccattggcaccagatacctgactcgtaatctgtaa

SEQ ID NO: 4857 - DNA, 3167 bp, Adeno-associated virus
attgaatttagcggccgcgaattcgcccttcgcagagaccaaagttcaactgaaacgaattaaacggtttattgattaacaagcaattacagattacgagtcaggtacctggtgccaatggggcgaggctctgaatacacaccattagtgtccacagtaaagtccacattaacagatttgttgtagttggaagtgtactgaatctcgggattccagcgtttgctgttctccttctgcagctcccactcgatctccacgctgacctgccccgtggagtactgtgtaatgaaggaagcaaactttgccgcactgaaggtagtcgaaggattcgcaggtaccggggtgttcttgatgagaatctgcgggggagggtgtttaagtccgaatccgcccatgaggggagaggggtgaaaatgtccgtccgtgtgtggaatctttgcccagatgggcccctgcaggtacacgtctctgtcctgccacaccatgcctggaagaacgccttgtgtgttgacatctgaggtagctgcttgtgtgttgccgctctggaggttggtagatacagaaccatactgctccgtagccacgggattggtggtcctgatttcctcttcgtctgtaatcatgaccttttcaatgtccacattagtttttcccgagtcttgttttccaaagatgagaaccccgctctgaggaaaaaacttttcttcatcgtccttgtggctggccatggccgggcccggattcaccagagagtctcttccattaaggtggtacttggtagctccagtccacgagtattcactgttgttgttatccgcagatgtctttgatactcgctgctggcggtaacagggtccaggaagccagttcctagactggtcccgaatgtcacttgctccggcctgagaaaactgaagccttgactgcgtggtggttccgcttggagtgtttgttctgctcaagtaatacaggtactggtcgatgagaggattcatgagacggtccaaactctggctgtgggcgtagctgctgtggaaaggaacgtcctcaaaggtgtagctgaaggtaaagttgtttccggtacgcagcatctgagaaggaaagtactccaggcagtaaaatgaagagcgtcctactgcctgactcccgttgttcagggtgaggtatccatactgtggcaccatgaagacgtctgctgggaacggcgggaggcatccttgatgcgccgagccgaggacgtacgggagctggtactccgagtcagtaaacacctgaaccgtgctggtaaggttattggcaatcgtcgtcgtaccgtcattctgcgtgacctccttgacttgaatgttaaagagcttgaagttgagtcttttgggccggaatccccaattgttgttgatgagtctttgccagtcacgtggcgaaaagtggcagtggaatctgttgaagtcaaaatacccccaaggggtgctgtagccaaagtagtggttgtcgtttgaggctcctgattggctggaaatctgcttgtagaggtggttgttgtaggtgggcagagcccaggtgcgggtgctggtggtgatgactctgtcgcccatccatgtggaatcgcaatgccaatttcccgaggaattacccactccgtcggcgccctcgttattgtctgccattggtgcgccactgcctgtagccatcgtattagttcccagaccagagggggctgctggtggctgtccgagaggctgggggtcaggtacggagtctgcgtctccagtctgaccgaaattcaatctctttcttgcaggctgctggcccgcttttccggttcccgaggaggagtctggctccgcaggagagtgctctaccggcctcttttttcccggagccgtcttaacaggttcctcaaccaggcccagaggttcaagaaccctctttttcgcctggaagactgctcgtccgaggttgcccccaaaagacgtatcttctttaagacgctcctggaactccgcgtcggcgtggttgtacttggggtacgggttgtctccgctgtcgagctgccggtcgtaggccttgtcgtgctcgagggccgcggcgtctgcctcgttgaccggctctcccttgtcgagtccgttgaagggtccaaggtacttgtacccaggaagcacaagacccctgctgtcgtccttatgccgctctgcgggctttggtggtggtgggccaggtttgagcttccaccactgtcttattccttcagagagagtgtcctcgagccaatctggaagataaccatcggcagccatacctgatttaaatcatttattgttcagagatgcagtcatccaaatccacattgaccagatcgcaagcagtgcaagcgtctggcacctttcccatgatatgatgaatgtagcacagtttctgatacgcctttttgacgacagaaacgggttgagattctgacacgggaaagcactctaaacagtctttctgtccgtgagtgaagcagatatttgaattctgattcattctctcgcattgtctgcagggaaacagcatcagattcatgcccacgtgacgagaacatttgttttggtacctgtccgcgtagttgattgaagcttccgcgtctgacgtcgatggctgcgcaactgactcgcgcgcccgtttgggctcacttatatctgcgtcactgggggcgggtctttttttggctccaccctttttgacgtagaattcatgctctacctcaaccacgtgatcctttgcccaccggaaaaagtctttgacttcctgcttggtgaccttcccaaagtcatgatccagacggcgggtgagttcaaatttgaacatccggtcttgcaacggctgctggtgttcgaaggtcgttgagttcccgtcaatcactgcgcacatgttggtgttggaggtgacaatcacgggagtcgggtctatctgggccgaggacttgcatttctggtccacgcgcaccttgcttcctccgagaatggctttggccgactccacgaccttggcggtcatcttcccctcctcccaccagatcaccatcttgtcgacgcaatcattgaaaggaaagttctcattggtccagttgacgcagccgtagaaagggcgaattcgtttaaacctgcaggactagtccctttagtgagggt

SEQ ID NO: 4858 - DNA, 3161 bp, Adeno-associated virus
aattgaatttagcggccgcgaattcgcccttcgcagagaccaaagttcaactgaaacgaattaaacggtttattgattaacaagcaattacagattacgagtcaggtatctggtgccaatggggcgaggctctgaatacacaccattagtgtccacagtaaagtccacattaacagatttgttgtagttggaagtgtactgaatctcgggattccagcgtttgctgttctccttctgcagctcccactcgatctccacgctgacctgccccgtggagtactgtgtaatgaaggaagcaaactttgccgcactgaaggtagtcgaaggattcgcaggtaccggggtgttcttgatgagaatctgcgggggagggtgtttaagtccgaatccgcccatgaggggagaggggtgaaaatgtccgtccgtgtgtggaatctttgcccagatgggcccctgcaggtacacgtctctgtcctgccacaccatgcctggaagaacgccttgtgtgttgacatctgaggtagctgcttgtgtgttgccgctctggaggttggtagatacagaaccatactgctccgtagccacgggattggtggtcctgatttcctcttcgtctgtaatcatgaccttttcaatgtccacattagtttttcccgagtcttgttttccaaagatgagaaccccgctctgaggaaaaaacttttcttcatcgtccttgtggctggccatggccgggcccggattcaccagagagtctcttccattaaggtggtacttggtagctccagtccacgagtattcactgttgttgttatccgcagatgtctttgatactcgctgctggcggtaacagggtccaggaagccagttcctagactggtcccgaatgtcacttgctccggcctgagaaaactgaagccttgactgcgtggtggttccgcttggagtgtttgttctgctcaagtaatacaggtactggtcgacgagaggattcatgagacggtccaaactctggctgtgggcgtagctgctgtggaaaggaacgtcctcaaaggtgtagctgaaggtaaagttgtttccggtacgcagcatctgagaaggaaagtactccaggcagtaaaatgaagagcgtcctactgcctgactcccgttgttcagggtgaggtatccatactgtggcaccatgaagacgtctgctgggaacggcgggaggcatccttgatgcgccgagccgaggacgtacgggagctggtactccgagtcagtaaacacctgaaccgtgctggtaaggttattggcaatcgtcgtcgtaccgtcattctgcgtgacctccttgacttgaatgttaaagagcttgaagttgagtcttttgggccgggatccccaattgttgttgatgagtctttgccagtcacgtggcgaaaagtggcagtggaatctgttgaagtcaaaatacccccaaggggtgctgtagccaaagtagtggttgtcgtttgaggctcctgattggctggaaatctgcctgtagaggtggttgttgtaggtgggcagagcccaggtgcgggtgctggtggtgatgactctgtcgcccatccatgtggaatcgcaatgccaatttcccgaggaattacccactccgtcggcgccctcgttattgtctgccattggtgcgccactgcctgtagccatcgtattagttcccagaccagagggggctgctggtggctgtccgagaggctgggggtcaggtacggagtctgcgtctccagtctgaccgaaattcaatctccttcttgcaggctgctggcccgcttttccggttcccgaggaggagtctggctccgcaagagagtgctctaccggcctcttttttcccggagccgtcttaacaggttcctcaaccaggcccagaggttcaagaaccctctttttcgcctggaagactgctcgtccgaggttgcccccaaaagacgtatcttctttaagacgctcctggaactccgcgtcggcgtggttgtacttgaggtacgggttgtctccgccgtcgagctgccggtcgtaggccttgtcgtgctcgagggccgcggcgtctgcctcgttgaccggctctcccttgtcgagtccgttgaagggtccaaggtacttgtacccaggaagcacaagacccctgctgtcgtccttatgccgctctgcgggctttggtggtggtgggccaggtttgagcttccaccactgtcttattccttcagagagagtgtcctcgagccaatctggaagataaccatcggcagccatacctgatttaaatcatttattgttcagagatgcagtcatccaaatccacattgaccagatcgcaagcagtgcaagcgtctggcacctttcccatgatatgatgaatgtagcacagtttctgatacgcctttttgacgacagaaacgggttgagattctgacacgggaaagcactctaaacagtctttctgtccgtgagtgaagcagatatttgaattctgattcattctctcgcattgtctgcagggaaacagcatcagattcatgcccacgtgacgagaacatttgttttggtacctgtccgcgtagttgattgaagcttccgcgtctgacgtcgatggctgcgcaactgactcgcgcgcccgtttgggctcacttatatctgcgtcactgggggcgggtctttttttggctccaccctttttgacgtagaattcatgctctacctcaaccacgtgatcctttgcccaccggaaaaagtctttgacttcctgcttggtgaccttcccaaagtcatgatccagacggcgggtgagttcaaatttgaacatccggtcttgcaacggctgctggtgttcgaaggtcgttgagttcccgtcaatcactgcgcacatgttggtgttggaggtgacaatcacgggagtcgggtctatctgggccgaggacttgcatttctggtccacgcgcaccttgcttcctccgagaatggctttggccgactccacgaccttggcggtcatcttcccctcctcccaccagatcaccatcttgtcgacgcaatcattgaaaggaaagttctcattggtccagttgacgcagcaagggcgaattcgtttaaacctgcaggactagtccctttagtgaggg

SEQ ID NO: 4859 - DNA, 3172 bp, Adeno-associated virus
gattgaatttagcggccgcgaattcgcccttgctgcgtcaactggaccaatgagaactttcccttcaacgattgcgtcgacaagatggtgatctggtgggaggagggcaagatgaccgccaaggtcgtggagtccgccaaggccattctgggtggaagcaaggtgcgcgtggaccaaaagtgcaagtcatcggcccagatcgaccccacgcccgtgatcgtcacctccaacaccaacatgtgcgccgtgatcgacgggaacagcaccaccttcgagcaccagcagcccctgcaggaccgcatgttcaagttcgagctcacccgccgtctggagcacgactttggcaaggtgaccaagcaggaagtcaaagagttcttccgctgggctcaggatcacgtgactgaggtggcgcatgagttctacgtcagaaagggcggagccaccaaaagacccgcccccagtgacgcggatataagcgagcccaagcgggcctgcccctcagttgcggagccatcgacgtcagacgcggaagcaccggtggactttgcggacaggtaccaaaacaaatgttctcgtcacgcgggcatgcttcagatgctgtttccctgcaagacatgcgagagaatgaatcagaatttcaacgtctgcttcacgcacggggtcagagactgctcagagtgcttccccggcgcgtcggaatctcaacccgtcgtcagaaaaaagacgtatcagaaactgtgcgcgattcatcatctgctggggcgggcacccgagattgcgtgttcggcctgcgatctcgtcaacgtggacttggatgactgtgtttctgagcaataaatgacttaaaccaggtatggctgctgacggttatcttccagattggctcgaggacaacctctctgagggcattcgcgagtggtgggacctgaaacctggagcccccaagcccaaggccaaccagcagaagcaggacgacggccggggtctggtgcttcctggctacaagtacctcggacccttcaacggactcgacaagggggagcccgtcaacgcggcggacgcagcggccctcgagcacgacaaggcctacgaccagcagctcaaagcgggtgacaatccgtacctgcggtataaccacgccgacgccgagtttcaggagcgtctgcaagaagatacgtcttttgggggcaacctcgggcgagcagtcttccaggccaagaagcgggttctcgaacctctcggtctggttgaggaagctgctaagacggctcctggaaagaagagaccggtagaaccgtcacctcagcgttcccccgactcctccgcgggcatcggcaagaaaggccagcagcccgctaaaaagagactgaactttggtcagactggcgactcagagtcagtccccgaccctcaaccaatcggagaaccaccagcaggcccctctggtctgggatctggtacaatggctgcaggcggtggcgctccaatggcagacaataacgaaggcgccgacggagtgggtagttcctcaggaaattggcattgcgattccacatggctgggcgacagagtcatcaccaccagcacccgaacctgggccctgcccacctacaacaaccacctctacaagcaaatatccaatgggacatcgggaggaagcaccaacgacaacacctacttcggctacagcaccccctgggggtattttgacttcaacagattccactgccacttctcaccacgtgactggcagcgactcatcaacaacaactggggattccggccaaaaagactcagcttcaagctcttcaacatccaggtcaaggaggtcacgcagaatgaaggcaccgagaccatcgccaataaccttaccagcacgattcaggtatttacggactcggaataccagctgccgtacgtcctcggctccgcgcaccagggctgcctgcctccgttcccggcggacgtcttcatgattccccagtacggctaccttacactgaacaatggaagtcaagccgtaggccgttcctccttctactgcctggaatattttccatctcaaatgctgcgaactggaaacaattttgaattcagctacaccttcgaggacgtgcctttccacagcagctgcgcacacagccagagctcggaccgactgatgaatcctctcatcgaccagtacctgtactacttatccagaactcggtccacaggaggaactcaaggtacccagcaattgttattttctcaagctgggcctgcaaacatgtcggctcaggctaagaactggctacctggaccttgctaccggcagcagcgagtctctacgacactgtcgcaaaacaacaacagcaactttgcttggactggtgccaccaaatatcacctgaacggaagagactctttggtaaatcccggtgtcgccatggcaacccacaaggacgacgaggaacgcttcttcccgtcgagtggagtcctgatgtttggaaaacagggtgctggaagagacaatgtggactacagcagcgttatgctaaccagcgaagaagaaattaaaaccactaaccctgtagccacagaacaatacggtgtggtggctgacaacttgcagcaaaccaatacagggcctattgtgggaaatgtcaacagccaaggagccttacctggcatggtctggcagaaccgagacgtgtacctgcagggtcccatctgggccaagattcctcacacggacggcaacttccacccttcaccgctaatgggaggatttggactgaagcacccacctcctcagatcctgatcaagaacacgccggtacctgcggatcctccaacaacgttcagccaggcgaaattggcttccttcattacgcagtacagcaccggacaggtcagcgtggaaatcgagtgggagctgcagaaggagaacagcaaacgctggaacccagagattcagtacacttcaaactactacaaatctacaaatgtggactttgctgtcaatacagagggaacttattctgagcctcgccccattggtactcgttacctcacccgtaatctgtaattgctggttaatcaataaaccgtttgattcgtttcagttgaactttggtctctgcgaagggcgaattcgtttaaacctgcaggactagtccctttagtgagg

SEQ ID NO: 4860 - DNA, 3172 bp, Adeno-associated virus
gattgaatttagcggccgcgaattcgcccttgctgcgtcaactggaccaatgagaactttcccttcaacgattgcgtcgacaagatggtgatctggtgggaggagggcaagatgaccgccaaggtcgtggagtccgccaaggccattctgggtggaagcaaggtgcgcgtggaccaaaagtgcaagtcatcggcccagatcgaccccacgcccgtgatcgtcacctccaacaccaacatgtgcgccgtgatcggcgggaacagcaccaccttcgagcaccagcagcccctgcaggaccgcatgttcaagttcgagctcacccgccgtctggagcacgactttggcaaggtgaccaagcaggaagtcaaagagttcttccgctgggctcaggatcacgtgactgaggtggcgcatgagttctacgtcagaaagggcggagccaccaaaagacccgcccccagtgacgcggatataagcgagcccaagcgggcctgcccctcagttgcggagccatcgacgtcagacgcggaagcaccggtggactttgcggacaggtaccaaaacaaatgttctcgtcacgcgggcatgcttcagatgctgtttccctgcaagacatgcgagagaatgaatcagaatttcaacgtctgcttcacgcacggggtcagagactgctcagagtgcctccccggcgcgtcagaatctcaacccgtcgtcagaaaaaagacgtatcagaaactgtgcgcgattcatcatctgctggggcgggcacccgagattgcgtgttcggcctgcgatctcgtcaacgtggacttggatgactgtgtttctgagcaataaatgacttaaaccaggtatggctgctgacggttatcttccagattggctcgaggacaacctctctgagggcattcgcgagtggtgggacctgaaacctggagcccccaagcccaaggccaaccagcagaagcaggacgacggccggggtctggtgcttcttggctacaagtacctcggacccttcaacggactcgacaagggggagcccgtcaatgcggcggacgcagcggccctcgagcacgacaaggcctacgaccagcagctcaaagcgggtgacaatccgtacctgcggtataaccacgccgacgccgagtttcaggagcgtctgcaagaagatacgtcttttgggggcaacctcgggcgagcagtcttccaggccaagaagcgggttctcgaacctctcggtctggttgaggaagctgctaagacggctcctggaaagaagagaccggtagaaccgtcacctcagcgttcccccgactcctccacgggcatcggcaagaaaggccagcagcccgctaaaaagagactgaactttggtcagactggcgactcagagtcagtccccgaccctcaaccaatcggagaaccaccagcaggcccctctggtctgggatctggtacaatggctgcaggcggtggcgctccaatggcagacaataacgaaggcgccgacggagtgggtagttcctcaggaaattggcattgcgattccacatggctgggcgacagagtcatcaccaccagcacccgaacctgggccctgcccacctacaacaaccacctctacaagcaaatatccaatgggacatcgggaggaagcaccaacgacaacacctacttcggctacagcaccccctgggggtattttgacttcaacagattccactgccacttctcaccacgtgactggcagcgactcatcaacaacaactggggattccggccaaaaagactcagcttcaagctcttcaacatccaggtcaaggaggtcacgcagaatgaaggcaccaagaccatcgccaataaccttaccagcacgattcaggtatttacggactcggaataccagctgccgtacgtcctcggctccgcgcaccagggctgcctgcctccgttcccggcggacgtcttcatgattccccagtacggctaccttacactgaacaatggaagtcaagccgtaggccgttcctccttctactgcctggaatattttccatctcaaatgctgcgaactggaaacaattttgaattcagctacaccttcgaggacgtgcctttccacagcggctacgcacacagccagagcttggaccgactgatgaatcctctcatcgaccagtacctgtactacttatccagaactcagtccacaggaggaactcaaggtacccagcaattgttattttctcaagctgggcctgcaaacatgtcggctcaggctaagaactggctacctggaccttgctaccggcagcagcgagtctctacgacactgtcgcaaaacaacaacagcaactttgcttggactggtgccaccaaatatcacctgaacggaagagactctttggtaaatcccggtgtcgccatggcaacccacaaggacgacgaggaacgcttcttcccgtcgagtggagtcctgatgtttggaaaacagggtgctggaagagacaatgtggactacagcagcgttatgctaaccagcgaagaagaaattaaaaccactaaccctgtagccacagaacaatacggtgtggtggctgacaacttgcagcaaaccaatacagggcctattgtgggaaatgtcaacagccaaggagccttacctggcatggtctggcagaaccgagacgtgtacctgcagggtcccatctgggccaagattcctcacacggacggcaacttccacccttcaccgctaatgggaggatttggactgaagcacccacctcctcagatcctgatcaagaacacgccggtacctgcggatcctccaacgacgttcagccaggcgaaattggcttccttcattacgcagtacagcaccggacaggtcagcgtggaaatcgagtgggagctgcagaaggagaacagcaaacgctggaacccagagattcagtacacttcaaactactacaaatctacaaatgtggactttgctgtcaatacagagggaacttattctgagcctcgccccattggtactcgttacctcacccgtaatctgtaattgctggttaatcaataaaccgtttgattcgtttcagttgaactttggtctctgcgaagggcgaattcgtttaaacctgcaggactagtccctttagtgagg

SEQ ID NO: 4861 - DNA, 2208 bp, Adeno-associated virus
atggctgccgatggttatcttccagattggctcgaggacactctctctgaaggaataagacagtggtggaagctcaaacctggcccaccaccaccaaagcccgcagagcggcataaggacgacagcaggggtcttgtgcttcctgggtacaagtacctcggacccttcaacggactcgacaagggagagccggtcaacgaggcagacgccgcggccctcgagcacgacaaggcctacgaccggcagctcgaaagcggagacaacccgtacctcaagtacaaccacgccgacgcggagtttcaggagcgtcttaaagaagatacgtcttttgggggcaacctcggacgagcagtcttccaggcgaaaaagagggttcttgaacctctgggcctggttgaggagcctgttaaaacggctccgggaaaaaagaggccggtagagcactctcctgtggagccagactcctcctcgggaaccggaaaagcgggccagcagcctgcgagaaaaagattgaattttggtcagactggagacgcagactccgtacctgacccccagcctctcggacagccaccagcagccccctctggtctgggatctactacaatggcttcaggcagtggcgcaccagtggcagacaataacgagggtgccgatggagtgggtaattcctcaggaaattggcattgcgattcccaatggctgggcgacagagtcatcaccaccagcacccgaacctgggccctgcccacctacaacaaccacctctacaagcaaatctccagccaatcaggagcctcaaacgacaaccactactttggctacagcaccccctgggggtattttgacttcaacagattccactgccacttttcaccacgtgactggcaaagactcatcaacaacagctggggattccgacccaaaagactcaacttcaagctctttaacattcaagtcaaagaggtcacgcagaatgacggtacgacgacgattgccaataaccttaccagcacggttcaagtgtttaccgactcggagtaccagctcccgtacgtcctcggctcggcgcatcaaggatgcctcccgccgttcccagcagacgtctttatggtcccacagtatggatacctcaccctgaacaacgggagtcaggcggtaggacgctcttccttttactgcctggagtactttccttctcagatgctgcgtactggaaacaactttcagttcagctacacctttgaagacgttcccttccacagcagctacgctcacagccagagtctggatcggctgctgaatcctctgatcgaccagtacctatattatctgaacaagacacaatcaaatagtggaactcttcagcagtctcggctactgtttagccaagctggacccaccagcatgtctcttcaagctaaaaactggctgcctggaccttgctacagacagcagcgtctgtcaaagcaggcaaacgacaacaacaacagcaactttccctggactgcggctacaaagtatcatctaaatggccgggactcgttggttaatccaggaccagctatggccagccacaaagacgatgaagaaaagtttttccccatgcatggaaccctgatatttggtaaacaaggaacaaatgctaacgacgcggatttggacaatgtcatgattacagatgaagaagaaatccgcaccaccaatcccgtggctacggagcagtacggatatgtgtcaaataatttgcaaaactcaaatactggtccaactactggaactgtcaatcaccaaggagcgttacctggtatggtgtggcaggatcgagacgtgtacctgcagggacccatttgggccaagattcctcacacggacgggcactttcatccttctccactaatgggaggttttgggctcaaacacccgcctcctcagatcatgatcaaaaacactcccgttccagccaatcctcctacaaacttcagttcttccaagtttgcttctttcatcacacagtattccacggggcaggtcagcgtggagatcgagtgggagctgcagaaggagaacagcaaacgctggaatcccgaaattcagtatacttccaactacaacaaatctgttaatgtggactttactgtggacactaatggtgtgtattcagagcctcgccccattggcaccagatacccgactcgtaatctgtaa

SEQ ID NO: 4862 - protein, 735 aa, Adeno-associated virus
MAADGYLPDWLEDTLSEGIRQWWKLKPGPPPPKPAERHKDDSRGLVLPGYKYLGPFNGLDKGEPVNEADAAALEHDKAYDRQLESGDNPYLKYNHADAEFQERLKEDTSFGGNLGRAVFQAKKRVLEPLGLVEEPVKTAPGKKRPVEHSPVEPDSSSGTGKAGQQPARKRLNFGQTGDADSVPDPQPLGQPPAAPSGLGSTTMASGSGAPVADNNEGADGVGNSSGNWHCDSQWLGDRVITTSTRTWALPTYNNHLYKQISSQSGASNDNHYFGYSTPWGYFDFNRFHCHFSPRDWQRLINNSWGFRPKRLNFKLFNIQVKEVTQNDGTTTIANNLTSTVQVFTDSEYQLPYVLGSAHQGCLPPFPADVFMVPQYGYLTLNNGSQAVGRSSFYCLEYFPSQMLRTGNNFQFSYTFEDVPFHSSYAHSQSLDRLLNPLIDQYLYYLNKTQSNSGTLQQSRLLFSQAGPTSMSLQAKNWLPGPCYRQQRLSKQANDNNNSNFPWTAATKYHLNGRDSLVNPGPAMASHKDDEEKFFPMHGTLIFGKQGTNANDADLDNVMITDEEEIRTTNPVATEQYGYVSNNLQNSNTGPTTGTVNHQGALPGMVWQDRDVYLQGPIWAKIPHTDGHFHPSPLMGGFGLKHPPPQIMIKNTPVPANPPTNFSSSKFASFITQYSTGQVSVEIEWELQKENSKRWNPEIQYTSNYNKSVNVDFTVDTNGVYSEPRPIGTRYPTRNL

SEQ ID NO: 4863 - DNA, 2208 bp, Adeno-associated virus
atggctgccgatggttatcttccagattggctcgaggacactctctctgaaggaataagacagtggtggaagctcaaacctggcccaccaccaccaaagcccgcagagcggcataaggacgacagcaggggtcttgtgcttcctgggtacaagtacctcggacccttcaacggactcgacaagggagagccggtcaacgaggcagacgccgcggccctcgagcacgacaaggcctacgaccggcagctcgacagcggagacaacccgtacctcaagtacaaccacgccgacgcggagtttcaggagcgtcttaaagaagatacgtcttttgggggcaacctcggacgagcagtcttccaggccaaaaagaggattcttgaacctctgggcctggttgaggaacctgttaagacggctccgggagaaaagaggccggtagagcactctcctgcggagccagactcctcctcgggaaccggaaaagcgggccagcagcctgcaagaaagagattgaattttggccagactggagacgcagactcagtacctgacccccagcctctcggacagccaccagcagccccctctggtctgggaactaatacgatggcttcaggcagtggcgcaccaatggcagacaataacgagggcgccgacggagtgggtaattcctcgggaaattggtattgcgattccacatggatgggcgacagagtcatcaccaccagcacccgcacctgggccctgcccacctacaacaaccatctgtacaagcaaatctccagccagtctggagccagcaacgacaaccactactttggctacagcaccccctgggggtattttgacttcaacagattccactgccacttctccccacgtgactggcaaagactcatcaacaacaactggggattccggcccaagagactcagcttcaagctctttaacattcaagtcaaagaggtcacgcagaatgacggtacgacgacgattgccaataaccttaccagcacggttcaggtgtttactgactcggagtaccagctcccgtacgtcctcggctcggcgcatcaaggatgcctcccgccgttcccagcagacgtcttcatggtgccacagtatggatacctcaccctgaacaacggcagtcaggcggtaggacgctcttccttttactgcctggagtactttccttctcagatgcttcgtaccggaaacaactttaccttcagctacacctttgaagacgttcctttccatagcagctacgctcacagccaaagtctggaccgtctcatgaatcctctcatcgaccagtacctgtattacttgagcagaacaaacactccaagcggaaccaccacgatgtccaggcttcagttttctcaggccggagcaagtgacattcgggaccagtctagaaactggcttcctggaccctgttaccgccagcagcgagtatcaaagacagctgcggacaacaacaacagtgattactcgtggactggagctaccaagtaccacctcaatggaagagactctctggtgaatccgggcccagctatggccagccacaaggacgatgaagaaaaatattttcctcagagcggggttctcatctttggaaaacaagactcgggaaaaactaatgtggacattgaaaaggttatgattacagacgaagaggaaatcaggaccaccaatcccgtggctacggagcagtatggttctgtatctaccaacctccagagcggcaacacacaagcagctacctcagatgtcaacacacaaggcgttcttccaggcatggtctggcaggacagagacgtgtacctgcaggggcccatctgggcaaagattccacacacggacggacattttcacccctctcccctcgtgggcggattcggacttaaacaccctcctccacaaattctcatcaagaacaccccggtacctgcgaatccttcgaccactttcagtgcggcaaagtttgcttccttcatcacacagtactccacggggcaggtcagcgtggagatcgagtgggagctgcagaaggagaacagcaaacgctggaatcccgaaattcagtacacttccaactacaacaaatctgttaatgtggactttactgtggacactaatggtgtgtattcagagcctcgccccattggcaccagatacctgactcgtaatctgtaa

SEQ ID NO: 4864 - protein, 735 aa, Adeno-associated virus
MAADGYLPDWLEDTLSEGIRQWWKLKPGPPPPKPAERHKDDSRGLVLPGYKYLGPFNGLDKGEPVNEADAAALEHDKAYDRQLDSGDNPYLKYNHADAEFQERLKEDTSFGGNLGRAVFQAKKRILEPLGLVEEPVKTAPGEKRPVEHSPAEPDSSSGTGKAGQQPARKRLNFGQTGDADSVPDPQPLGQPPAAPSGLGTNTMASGSGAPMADNNEGADGVGNSSGNWYCDSTWMGDRVITTSTRTWALPTYNNHLYKQISSQSGASNDNHYFGYSTPWGYFDFNRFHCHFSPRDWQRLINNNWGFRPKRLSFKLFNIQVKEVTQNDGTTTIANNLTSTVQVFTDSEYQLPYVLGSAHQGCLPPFPADVFMVPQYGYLTLNNGSQAVGRSSFYCLEYFPSQMLRTGNNFTFSYTFEDVPFHSSYAHSQSLDRLMNPLIDQYLYYLSRTNTPSGTTTMSRLQFSQAGASDIRDQSRNWLPGPCYRQQRVSKTAADNNNSDYSWTGATKYHLNGRDSLVNPGPAMASHKDDEEKYFPQSGVLIFGKQDSGKTNVDIEKVMITDEEEIRTTNPVATEQYGSVSTNLQSGNTQAATSDVNTQGVLPGMVWQDRDVYLQGPIWAKIPHTDGHFHPSPLVGGFGLKHPPPQILIKNTPVPANPSTTFSAAKFASFITQYSTGQVSVEIEWELQKENSKRWNPEIQYTSNYNKSVNVDFTVDTNGVYSEPRPIGTRYLTRNL

SEQ ID NO: 4865 - DNA, 2209 bp, Adeno-associated virus
atggctgccgatggttatcctccagattggctcgaggacactctctctgaagggataagacagtggtggaagctcaaacctggcccaccaccaccaaagcccgcagagcggcataaggacgacagcaggggtcttgtgcttcctgggtacaagtacctcggacccttcaacggactcgacaagggggagccggtcaacgaggcagacgccgcggccctcgagcacgacaaggcctacgaccggcagctcgacagcggagacaacccgtacctcaagtacaaccacgccgacgcagagtttcaggagcgccttaaagaagatacgtcttttgggggcaacctcggacgagcagtcttccaggcgaaaaagagggttcttgaacctctgggcctggttgaggaacctgttaagacggctccgggaaaaaagaggccggtagagcactctcctgtggagccagactcctcctcgggaaccggaaaagcgggccagcggcctgcaagaaaaagattaaattttggtcagactggagacgcagactccgtacctgacccccagcctctcggacagccaccagcagccccctctggtctgggatctactacaatggctacaggcagtggcgcaccaatggcagacaataacgagggtgccgatggagtgggtaattcctcaggaaattggcattgcgattcccaatggctgggcgacagagtcatcaccaccagcacccgaacctgggccctgcccacatacaacaaccacctctacaagcaaatctccagccaatcaggagccagcaacgacaaccactactttggctacagcaccccctgggggtattttgacttcaacagattccactgccacttttcaccacgtgactggcaaagactcatcaacaacaactggggattccggcccaaaagactcaacttcaagctctttaatattcaagtcaaagaggtcacgcagaatgacggtacgacgacgattgccaataaccttaccagcacggttcaggtgtttactgactcggagtaccagctcccgtacgtcctgggctcggcgcatcaaggatgcctcccgccgtttccagcggacgtcttcatggtcccacagtatggatacctcaccctgaacaacgggagtcaggcggtaggacgctcttccttttactgcctggagtactttccttctcagatgctgcgtactggaaacaactttcagttcagctacacttttgaagacgtgcctttccacagcagctacgctcacagccagagtctggatcggctgatgaatcctctgatcgaccagtacctgtattatctgaacaagacacaaacaaatagtggaactcttcagcagtctcggctactgtttagccaagctggaccaaccaacatgtctcttcaagctaaaaactggctgcctggaccttgctacagacagcagcgtctgtcaaaacaggcaaacgacaacaacaacagcaactttccctggactgcagctacaaagtatcatctaaatggccgggactcgttggttaatccaggaccagctatggccagtcacaaggatgacgaagaaaagtttttccccatgcatggaaccctgatatttggtaaacaaggaacaaatgccaacgacgcggatttggaaaatgtcatgattacagatgaagaagaaatcagggccaccaatcccgtggctacggagcagtacgggactgtgtcaaataatttgcaaaactcaaacactggtccaactactggaactgtcaatcgccaaggagcgttacctggtatggtgtggcaggatcgagacgtgtacctgcagggacccatttgggccaagattcctcacaccgatggacactttcatccttctccactgatgggaggttttggactcaaacacccgcctcctcagatcatgatcaaaaacactcccgttccagccaatcctcccacaaacttcagttctgccaagtttgcttctttcatcacacagtattccacgggacaggtcagcgtggagatcgagtgggagctgcagaaggagaacagcaaacgctggaatcccgaaattcagtacacttccaactacaacaagtctgttaatgtggactttactgtggacactaatggtgtgtattcagagcctcgccccattggcaccagatacctgactcgtaatctgtaat

SEQ ID NO: 4866 - protein, 735 aa, Adeno-associated virus
MAADGYPPDWLEDTLSEGIRQWWKLKPGPPPPKPAERHKDDSRGLVLPGYKYLGPFNGLDKGEPVNEADAAALEHDKAYDRQLDSGDNPYLKYNHADAEFQERLKEDTSFGGNLGRAVFQAKKRVLEPLGLVEEPVKTAPGKKRPVEHSPVEPDSSSGTGKAGQRPARKRLNFGQTGDADSVPDPQPLGQPPAAPSGLGSTTMATGSGAPMADNNEGADGVGNSSGNWHCDSQWLGDRVITTSTRTWALPTYNNHLYKQISSQSGASNDNHYFGYSTPWGYFDFNRFHCHFSPRDWQRLINNNWGFRPKRLNFKLFNIQVKEVTQNDGTTTIANNLTSTVQVFTDSEYQLPYVLGSAHQGCLPPFPADVFMVPQYGYLTLNNGSQAVGRSSFYCLEYFPSQMLRTGNNFQFSYTFEDVPFHSSYAHSQSLDRLMNPLIDQYLYYLNKTQTNSGTLQQSRLLFSQAGPTNMSLQAKNWLPGPCYRQQRLSKQANDNNNSNFPWTAATKYHLNGRDSLVNPGPAMASHKDDEEKFFPMHGTLIFGKQGTNANDADLENVMITDEEEIRATNPVATEQYGTVSNNLQNSNTGPTTGTVNRQGALPGMVWQDRDVYLQGPIWAKIPHTDGHFHPSPLMGGFGLKHPPPQIMIKNTPVPANPPTNFSSAKFASFITQYSTGQVSVEIEWELQKENSKRWNPEIQYTSNYNKSVNVDFTVDTNGVYSEPRPIGTRYLTRNL

SEQ ID NO: 4867 - DNA, 2208 bp, Adeno-associated virus
atggctgccgatggttatcttccagattggctcgaggacactctctctgaaggaataagacagtggtggaagctcaaacctggcccaccaccaccaaagcccgcagagcggcataaggacgacagcaggggtcttgtgcttcctgggtacaggtacctcggacccttcaacggactcgacaagggagagccggtcaacgaggcagacgccgcggccctcgagcacgacaaggcctacgaccggcagctcgacagcggagacaacccgtacctcaagtacaaccacgtcgacgcggagtttcaggagcgtcttaaagaagatacgtcttttgggggcaacctcggacgagcagtcttccaggccaaaaagaggattcttgaacctctgggcctggttgaggaacctgttaaggcggctccgggagaaaagaggccggtagagcactctcctgcggagccagactcctcctcgggaaccggaaaagcgggccagcagcctgcaagaaagagattgaattttggtcagactggagacgcagactcagtacctgacccccagcctctcggacagccaccagcagccccctctggtctgggaactaatacgatggcttcaggcagtggcgcaccaatggcagacaataacgagggcgccgacggagtgggtaattcctcgggaaattggcattgcgattccacatggatgggcgacagagtcatcaccaccagcacccgcacctgggccctgcccacctacaacaaccatctgtacaagcaaatctccagccagtctggagccagcaacgacaaccactactttggctacagcaccccctgggggcattttgacttcaacagattccactgccacttctccccacgtgactggcaaagactcatcaacaacaactggggattccggcccaagagactcagcttcaagctctttaacattcaagtcaaagaggtcacgcagaatgacggtacgacgacgattgccaataaccttaccagcacggttcaggtgtttactgactcggagtaccagctcccgtacgtcctcggctcggcgcatcaaggatgcctcccgccgttcccagcagacgtcttcatggtgccacagtatggatacctcaccctgaacaacggcagtcaggcggtaggacgctcttccttttactgcctggagtactttccttctcagatgcttcgtaccggaaacaactttaccttcagctacacctttgaagacgttcctttccatagcagctacgctcacagccaaagtctggaccgtctcatgaatcctctcatcgaccagtacctgtattacttgagcagaacaaacactccaagcggaaccaccacgatgtccaggcttcagttttctcaggccggagcaagtgacattcgggaccagtctagaaactggcttcctggaccctgttaccgccagcagcgagtatcaaagacagctgcggacaacaacaacagtgattactcgtggactggagctaccaagtaccacctcaatggaagagactctctggtgaatccgggcccagctatggccagccacaaggacgatgaagaaaaatattttcctcagagcggggttctcatctttggaaaacaagactcgggaaaaactaatgtggacattgaaaaggttatgattacagacgaagaggaaatcaggaccaccaatcccgtggctacggagcagtatggttctgtatctaccaacctccagagcggcaacacacaagcagctacctcagatgtcaacacacaaggcgttcttccaggcatggtctggcaggacagagacgtgtacctgcaggggcccatctgggcaaagattccacacacggacggacattttcacccctctccccccatgggcggattcggacttaaacaccctcctccacaaattctcatcaagaacaccccggtacctgcgaatccttcgaccactttcagtgcggcaaagtttgcttccttcatcacacagtactccacggggcaggtcagcgtggagatcgagtgggagctgcagaaggagaacagcaaacgctggaatcccgaaattcagtacacttccaactacaacaaatctgttaatgtggactttactgtggacactaatggtgtgtattcagagcctcgccccattggcgccagatacctgactcgtaatctgtaa

SEQ ID NO: 4868 - protein, 735 aa, Adeno-associated virus
MAADGYLPDWLEDTLSEGIRQWWKLKPGPPPPKPAERHKDDSRGLVLPGYRYLGPFNGLDKGEPVNEADAAALEHDKAYDRQLDSGDNPYLKYNHVDAEFQERLKEDTSFGGNLGRAVFQAKKRILEPLGLVEEPVKAAPGEKRPVEHSPAEPDSSSGTGKAGQQPARKRLNFGQTGDADSVPDPQPLGQPPAAPSGLGTNTMASGSGAPMADNNEGADGVGNSSGNWHCDSTWMGDRVITTSTRTWALPTYNNHLYKQISSQSGASNDNHYFGYSTPWGHFDFNRFHCHFSPRDWQRLINNNWGFRPKRLSFKLFNIQVKEVTQNDGTTTIANNLTSTVQVFTDSEYQLPYVLGSAHQGCLPPFPADVFMVPQYGYLTLNNGSQAVGRSSFYCLEYFPSQMLRTGNNFTFSYTFEDVPFHSSYAHSQSLDRLMNPLIDQYLYYLSRTNTPSGTTTMSRLQFSQAGASDIRDQSRNWLPGPCYRQQRVSKTAADNNNSDYSWTGATKYHLNGRDSLVNPGPAMASHKDDEEKYFPQSGVLIFGKQDSGKTNVDIEKVMITDEEEIRTTNPVATEQYGSVSTNLQSGNTQAATSDVNTQGVLPGMVWQDRDVYLQGPIWAKIPHTDGHFHPSPPMGGFGLKHPPPQILIKNTPVPANPSTTFSAAKFASFITQYSTGQVSVEIEWELQKENSKRWNPEIQYTSNYNKSVNVDFTVDTNGVYSEPRPIGARYLTRNL

SEQ ID NO: 4869 - DNA, 2208 bp, Adeno-associated virus
atggctgccgatggttatcttccagattggctcgaggacaccctctctgaaggaataagacagtggtggaagctcaaacctggcccaccaccaccaaagcccgcagagcggcataaggacgacagcaggggtcttgtgcttcctgggtacaagtacctcggacccttcaacggactcgacaagggagagccggtcaacgaggcagacgccgcggccctcgagcacgacaaggcctacgaccggcagctcgacagcggagataacccgtacctcaagtacaaccacgccgacgcggagtttcaggagcgccttaaagaggatacgtcttttgggggcaacctcggacgagcagtcttccaggccaaaaagaggattcttgaacctctgggcctggttgaggaacctgttaagacggctccgggaaaaaagaggccggtagagcactctcctgcggagccagactcctcctcgggaaccggaaaagcgggccagcagcctgcaagaaagagattgaattttggtcagactggagacgcagactcagtacctgacccccggcctctcggacagccaccagcagccccctctggtctgggaactaatacgatggcttcaggcagtggcgcaccaatggcagacaataacgagggcgccgacggagtgggtaattcctcgggaaattggcattgcgattccacatggatgggcgacagagtcatcaccaccagcacccgcacctgggccctgcccacctacaacaaccatctgtacaagcaaatctccagccagtctggagccagcaacgacaaccactactttggctacagcaccccctgggggtattttgacttcaacagattccactgccacttctccccacgtgactggcaaagactcatcaacaacaactggggattccggcccaagagactcagcttcaagctctttaacattcaagtcaaagaggtcacgcagaatgacggtacgacgacgattgccaataaccttaccagcacggttcaggtgtttactgactcggagtaccagctcccgtacgtcctcggctcggcgcatcaaggatgcctcccgccgttcccagcagacgtcttcatggtgccacagtatggatacctcaccctgaacaacggcagtcaggcggtaggacgctcttccttttactgcctggagtactttccttctcagatgcttcgtaccggaaacaactttaccttcagctacacctttgaagacgttcctttccatagcagctacgctcacagccaaagtctggaccgtctcatgaatcctctcatcgaccagtacctgtattacttgagcagaacaaacactccaagcggaaccaccacgatgtccaggcttcagttttctcaggccggagcaagtgacattcgggaccagtctagaaactggcttcctggaccctgttaccgccagcagcgagtatcaaagacagctgcggacaacaacaacagtgattactcgtggactggagctaccaagtaccacctcaatggaagagactctctggtgaatccgggcccagctatggccagccacaaggacgatgaagaaaaatattttcctcagagcggggttctcatctttggaaaacaagactcgggaaaaactaatgtggacattgaaaaggttatgattacagacgaagaggaaatcaggaccaccaatcccgtggctacggagcagtatggttctgtatctaccaacctccagagcggcaacacacaagcagctacctcagatgtcaacacacaaggcgttcttccaggcatggtctggcaggacagagacgtgtacctgcaggggcccatctgggcaaagattccacacacggacggacattttcacccctctcccctcatgggcggattcggacttaaacaccctcctccacaaattctcatcaagaacaccccggtacctgcgaatccttcgaccactttcagtgcggcaaagtttgcttccttcatcacacagtactccacggggcaggtcagcgtggagatcgagtgggagctgcagaaggagaacagcaaacgctggaatcccgaaattcagtacacttccaactacaacaaatctgttaatgtggactttactgtggacactaatggtgtgtattcagagcctcgccccattggcaccagatacctgactcgtaatctgtaa

SEQ ID NO: 4870 - protein, 735 aa, Adeno-associated virus
MAADGYLPDWLEDTLSEGIRQWWKLKPGPPPPKPAERHKDDSRGLVLPGYKYLGPFNGLDKGEPVNEADAAALEHDKAYDRQLDSGDNPYLKYNHADAEFQERLKEDTSFGGNLGRAVFQAKKRILEPLGLVEEPVKTAPGKKRPVEHSPAEPDSSSGTGKAGQQPARKRLNFGQTGDADSVPDPRPLGQPPAAPSGLGTNTMASGSGAPMADNNEGADGVGNSSGNWHCDSTWMGDRVITTSTRTWALPTYNNHLYKQISSQSGASNDNHYFGYSTPWGYFDFNRFHCHFSPRDWQRLINNNWGFRPKRLSFKLFNIQVKEVTQNDGTTTIANNLTSTVQVFTDSEYQLPYVLGSAHQGCLPPFPADVFMVPQYGYLTLNNGSQAVGRSSFYCLEYFPSQMLRTGNNFTFSYTFEDVPFHSSYAHSQSLDRLMNPLIDQYLYYLSRTNTPSGTTTMSRLQFSQAGASDIRDQSRNWLPGPCYRQQRVSKTAADNNNSDYSWTGATKYHLNGRDSLVNPGPAMASHKDDEEKYFPQSGVLIFGKQDSGKTNVDIEKVMITDEEEIRTTNPVATEQYGSVSTNLQSGNTQAATSDVNTQGVLPGMVWQDRDVYLQGPIWAKIPHTDGHFHPSPLMGGFGLKHPPPQILIKNTPVPANPSTTFSAAKFASFITQYSTGQVSVEIEWELQKENSKRWNPEIQYTSNYNKSVNVDFTVDTNGVYSEPRPIGTRYLTRNL

SEQ ID NO: 4871 - DNA, 2208 bp, Adeno-associated virus
atggctgccgatggttatcttccagattggctcgaggacactctctctgaaggaataagacagtggtggaagctcaaacctggcccaccaccaccaaagcccgcagagcggcataaggacgacagcaggggtcttgtgcttcctgggtacaagtacctcggacccttcaacggactcgacaagggagagccggtcaacgaggcagacgccgcggccctcgagcacgacaaggcctacgaccggcagctcgacagcggagacaacccgtacctcaagtacaaccacgccgacgcggagtttcaggagcgccttaaaggagatacgtcttttgggggcaacctcggacgagcagtcttccaggccaaaaagaggattcttgaacctctgggcctggttgaggaacctgttaagacggctccgggaaaaaagaggccggtagagcactctcctgcggagccagactcctcctcgggaaccggaaaagcgggccagcagcctgcaagaaagagattgaattttggtcagactggagacgcagactcagtacctgacccccagcctctcggacagccaccagcagccccctctggtctgggaactaatacgatggcttcaggcagtggcgcaccaatggcagacaataacgagggcgccgacggagtgggtaattcctcgggaaattggcattgcgattccacatggatgggcggcagagtcatcaccaccagcacccgcacctgggccctgcccacctacaacaaccatctgtacaagcaaatctccagccagtctggagccagcaacgacaaccactactttggctacagcaccccctgggggtattttgacttcaacagattccactgccacttctccccacgtgactggcaaagactcatcaacaacaactggggattccggcccaagagactcagcttcaagctctttaacattcaagtcaaagaggtcacgcagaatgacggtacgacgacgattgccaataaccttaccagcacggttcaggtgtttactgactcggagtaccagctcccgtacgtcctcggctcggcgcatcaaggatgcctcccgccgttcccagcagacgtcttcatggtgccacagtatggatacctcaccctgaacaacggcagtcaggcggtaggacgctcttccttttactgcctggagtactttccttctcagacgcttcgtaccggaaacaactttaccttcagctacacctttgaagacgttcctttccatagcagctacgctcacagccaaagtctggaccgtctcatgaatcctctcatcgaccagtacctgtattacttgagcagaacaaacactccaagcggaaccaccacgatgtccaggcttcagttttctcaggccggagcaagtgacattcgggaccagtctagaaactggcttcctggaccctgttaccgccagcagcgagtatcaaagacagctgcggacaacaacaacagtgattactcgtggactggagctaccaagtaccacctcaatggaagagactctctggtgaatccgggcccagctatggccagccacaaggacgatgaagaaaaatattttcctcagagcggggttctcatctttggaaaacaagactcgggaaaaactaatgtggacattgaaaaggttatgattacagacgaagaggaaatcaggaccaccaatcccgtggctacggagcagtatggttctgtatctaccaacctccagagcggcaacacacaagcagctacctcagatgtcaacacacaaggcgttcttccaggcatggtctggcaggacagagacgtgtacctgcaggggcccatctgggcaaagattccacacacggacggacattttcacccctctcccctcatgggcggattcggacttaaacaccctcctccacaaattctcatcaagaacaccccggtacctgcgaatccttcgaccactttcagtgcggcaaagtttgcttccttcatcacacagtactccacggggcaggtcagcgtggagatcgagtgggagctgcagaaggagaacagcaaacgctggaatcccgaaattcagtacacttccaactacaacaaatctgttaatgtggactttactgtggacactaatggtgtgtattcagagcctcgccccattggcaccagatacctgactcgtaatctgtaa

SEQ ID NO: 4872 - protein, 735 aa, Adeno-associated virus
MAADGYLPDWLEDTLSEGIRQWWKLKPGPPPPKPAERHKDDSRGLVLPGYKYLGPFNGLDKGEPVNEADAAALEHDKAYDRQLDSGDNPYLKYNHADAEFQERLKGDTSFGGNLGRAVFQAKKRILEPLGLVEEPVKTAPGKKRPVEHSPAEPDSSSGTGKAGQQPARKRLNFGQTGDADSVPDPQPLGQPPAAPSGLGTNTMASGSGAPMADNNEGADGVGNSSGNWHCDSTWMGGRVITTSTRTWALPTYNNHLYKQISSQSGASNDNHYFGYSTPWGYFDFNRFHCHFSPRDWQRLINNNWGFRPKRLSFKLFNIQVKEVTQNDGTTTIANNLTSTVQVFTDSEYQLPYVLGSAHQGCLPPFPADVFMVPQYGYLTLNNGSQAVGRSSFYCLEYFPSQTLRTGNNFTFSYTFEDVPFHSSYAHSQSLDRLMNPLIDQYLYYLSRTNTPSGTTTMSRLQFSQAGASDIRDQSRNWLPGPCYRQQRVSKTAADNNNSDYSWTGATKYHLNGRDSLVNPGPAMASHKDDEEKYFPQSGVLIFGKQDSGKTNVDIEKVMITDEEEIRTTNPVATEQYGSVSTNLQSGNTQAATSDVNTQGVLPGMVWQDRDVYLQGPIWAKIPHTDGHFHPSPLMGGFGLKHPPPQILIKNTPVPANPSTTFSAAKFASFITQYSTGQVSVEIEWELQKENSKRWNPEIQYTSNYNKSVNVDFTVDTNGVYSEPRPIGTRYLTRNL

SEQ ID NO: 4873 - DNA, 2208 bp, Adeno-associated virus
atggctgccgatggttatcttccagattggctcgaggacactctctctgaaggaataagacagtggtggaagctcaaacctggcccaccaccaccaaagcccgcagagcggcataaggacgacagcaggggtcttgtgcttcctgggtacaagtacctcggacccttcaacggactcgacaagggagagccggtcaacgaggcagacgccgcggccctcgagcacgacaaggcctacgaccggcagctcgacagcggagacaacccgtacctcaagtacaaccacgccgacgcggagtttcaggagcgtcttaaagaagatacgtcttttgggggcaacctcggacgagcagtcttccaggccaaaaagaggattcttgaacctctgggcctggttgaggaacctgttaagacggctccgggaaaaaagaggccggtagagcactctcctgcggagccagactcctcctcgggaaccggaaaagcgggccagcagcctgcaagaaagagattgaattttggtcagactggagacgcagactcagtacctgacccccagcctctcggacagccaccagcagccccctctggtctgggaactaatacgatggcttcaggcagtggcgcaccaatggcagacaataacgagggcgccgacggagtgggtaattcctcgggaaattggcattgcgattccacatggatgggcgacagagtcatcaccaccagcacccgcacctgggccctgcccacctgcaacaaccatctgtacaagcaaatctccagccagtctggagccagcaacgacaaccactactttggctacagcaccccctgggggtattttgacttcaacagattccactgccacttctccccacgtgactggcaaagactcatcaacaacaactggggattccggcccaagagactcagcttcaagctctttaacattcaagtcaaagaggtcacgcagaatgacggtacgacgacgattgccaataaccttaccagcacggttcaggtgtttactgactcggagtaccagctcccgtacgtcctcggctcggcgcatcaaggatgcctcccgccgttcccagcagacgtcttcatggtgccacagtatggatacctcaccctgaacaacggcagtcaggcggtaggacgctcttccttttactgcctggagtattttccttctcagatgcttcgtaccggaaacaactttaccttcagctacacctttgaagacgttcctttccatagcagctacgctcacagccaaagtctggaccgtctcatgaatcctctcatcgaccagtacctgtattacttgagcagaacaaacactccaagcggaaccaccacgatgtccaggcttcagttttctcaggccggagcaagtgacattcgggaccagtctagaaactggcttcctggaccctgttaccgccagcagcgagtatcaaagacagctgcggacaacaacaacagtgattactcgtggactggagctaccaagtaccacctcaatggaagagactctctggtgaatccgggcccagctatggccagccacaaggacgatgaagaaaaatattttcctcagagcggggttctcatctttggaaaacaagactcgggaaaaactaatgtggacattgaaaaggttatgattacagacgaagaggaaatcaggaccaccaatcccgtggctacggagcagtatggttctgtatctacctacctccagagcggcaacacacaagcagctacctcagatgtcaacacacaaggcgttcttccaggcatggtctggcaggacagagacgtgtacctgcgggggcccatctgggcaaagattccacacacggacggacattttcacccctctcccctcatgggcggatttggacttaaacaccctcctccacaaattctcatcaagaacaccccggtacctgcgaatccttcgaccactttcagtgcggcaaagtttgcttccttcatcacacagtactccacggggcaggtcagcgtggagatcgagtgggagctgcagaaggagaacagcaaacgctggaatcccgaaattcagtacacttccaactacaacaaatctgttaatgtggactttactgtggacactaatggtgtgtattcagagcctcgccccattggcaccagatacctgactcgtaatctgtaa

SEQ ID NO: 4874 - protein, 735 aa, Adeno-associated virus
MAADGYLPDWLEDTLSEGIRQWWKLKPGPPPPKPAERHKDDSRGLVLPGYKYLGPFNGLDKGEPVNEADAAALEHDKAYDRQLDSGDNPYLKYNHADAEFQERLKEDTSFGGNLGRAVFQAKKRILEPLGLVEEPVKTAPGKKRPVEHSPAEPDSSSGTGKAGQQPARKRLNFGQTGDADSVPDPQPLGQPPAAPSGLGTNTMASGSGAPMADNNEGADGVGNSSGNWHCDSTWMGDRVITTSTRTWALPTCNNHLYKQISSQSGASNDNHYFGYSTPWGYFDFNRFHCHFSPRDWQRLINNNWGFRPKRLSFKLFNIQVKEVTQNDGTTTIANNLTSTVQVFTDSEYQLPYVLGSAHQGCLPPFPADVFMVPQYGYLTLNNGSQAVGRSSFYCLEYFPSQMLRTGNNFTFSYTFEDVPFHSSYAHSQSLDRLMNPLIDQYLYYLSRTNTPSGTTTMSRLQFSQAGASDIRDQSRNWLPGPCYRQQRVSKTAADNNNSDYSWTGATKYHLNGRDSLVNPGPAMASHKDDEEKYFPQSGVLIFGKQDSGKTNVDIEKVMITDEEEIRTTNPVATEQYGSVSTYLQSGNTQAATSDVNTQGVLPGMVWQDRDVYLRGPIWAKIPHTDGHFHPSPLMGGFGLKHPPPQILIKNTPVPANPSTTFSAAKFASFITQYSTGQVSVEIEWELQKENSKRWNPEIQYTSNYNKSVNVDFTVDTNGVYSEPRPIGTRYLTRNL

SEQ ID NO: 4875 - DNA, 2208 bp, Adeno-associated virus; identical to SEQ ID NO: 4869

SEQ ID NO: 4876 - protein, 735 aa, Adeno-associated virus; identical to SEQ ID NO: 4870

SEQ ID NO: 4877 - DNA, 2208 bp, Adeno-associated virus
atggctgccgatggttatcttccagattggctcgaggacactctctctgaaggaataagacagtggtggaagctcaaacctggcccaccaccaccaaagcccgcagagcggcataaggacggcagcaggggtcttgtgcttcctgggtacaagtacctcggacccttcaacggactcgacaagggagagccggtcaacgaggcagacgccgcggccctcgagcacgacaaggcctacgaccggcagctcaacagcggagacaacccgtacctcaagtacaaccacgccgacgcggagtttcaggagcgccttaaagaagatacgtcttttgggggcaacctcggacgagcagtcttccaggcaaaaaagagggttcttgaacctctgggcctggttgaggagcctgttaaaacggctccgggaaaaaagagaccggtagagcactctcctgcggagccagactcctcctcgggaaccggaaaagcgggccagcagcctgcaagaaagagattgaattttggtcagactggagacgcagactccgtacctgacccccagcctctcggacagccaccagcagccccctctggtctgggatctactacaatggctacaggcagtggcgcaccaatggcagacaataacgagggtgccgatggagtgggtaattcctcaggaaattggcattgcgattcccaatggctgggcgacagagtcatcaccacaagcactcgaacctgggccctgcccacctacaacaaccacctctacaagcaaatctccagccaatcaggagcctcaaacgacaaccactattttggctacagcaccccttgggggtattttgacttcaacagattccactgccacttttcaccacgtgactggcaaagactcatcaacaacaactggggattccgacccaagagactcaacttcaagctctttaacattcaagtcaaagaggtcacgcagaatgacggtacgacgacgattgccaataaccttaccagcacggttcaggtgtttactgactcggagtaccagctcccgtacgtcctcggctcggcgcatcaaggatgcctcccgccgttcccagcggacgtcttcatggtcccacagtatggatacctcaccctgaacaacgggagtcaggcggtaggacgctctcccttttactgcctggagtactttccttctcagatgctgcgtactggaaacaactttcagttcagctacacttttgaagacgtgcctttccacagcagctacgctcacagccagagtctggatcggctgatgaatcctctgatcgaccagtacctgtattatctgaacaagacacaaacaaatagtggaactcttcagcagtctcggctactgtttagccaagctggacccaccaacatgtctcttcaagctaaaaactggctgcctggaccttgctacagacagcagcgtctgtcaaagcaggcaaacgacaacaacaacagcaactttccctggactgcagctacaaagtatcatctaaatggccgggactcgttggttaatccaggaccagctatggccagtcacaaggatgacgaagaaaagtttttccccatgcatggaaccctgatatttggtaaacaaggaacaaatgccaacgacgcggatttggaaaatgtcatgattacagatgaagaagaaatcaggaccaccaatcccgtggctacggagcagtacgggactgtgtcaaataatttgcaaaactcaaacactggtccaactactggaactgtcaatcaccaaggagcgttacctggtatggtgtggcaggatcgagatgtgtaccttcagggacccatttgggccaagattcctcacaccgatggacactttcatccttctccactgatgggaggttttggactcaaacacccgcctcctcagattatgatcaaaaacactcccgttccagccaatcctcctacaaacttcagttctgccaagtttgcttctttcatcacacagtattccacggggcaggtcagcgtggagatcgagtgggagctgcagaaggagaacagcaaacgctggaatcccgaaattcagtacacttccaactacaacaaatctgttaatgtggactttactgtggacaataatggcgtgtactcagagcctcgccccattggcaccagatacctgactcgtaatctgtaa

SEQ ID NO: 4878 - protein, 735 aa, Adeno-associated virus
MAADGYLPDWLEDTLSEGIRQWWKLKPGPPPPKPAERHKDGSRGLVLPGYKYLGPFNGLDKGEPVNEADAAALEHDKAYDRQLNSGDNPYLKYNHADAEFQERLKEDTSFGGNLGRAVFQAKKRVLEPLGLVEEPVKTAPGKKRPVEHSPAEPDSSSGTGKAGQQPARKRLNFGQTGDADSVPDPQPLGQPPAAPSGLGSTTMATGSGAPMADNNEGADGVGNSSGNWHCDSQWLGDRVITTSTRTWALPTYNNHLYKQISSQSGASNDNHYFGYSTPWGYFDFNRFHCHFSPRDWQRLINNNWGFRPKRLNFKLFNIQVKEVTQNDGTTTIANNLTSTVQVFTDSEYQLPYVLGSAHQGCLPPFPADVFMVPQYGYLTLNNGSQAVGRSPFYCLEYFPSQMLRTGNNFQFSYTFEDVPFHSSYAHSQSLDRLMNPLIDQYLYYLNKTQTNSGTLQQSRLLFSQAGPTNMSLQAKNWLPGPCYRQQRLSKQANDNNNSNFPWTAATKYHLNGRDSLVNPGPAMASHKDDEEKFFPMHGTLIFGKQGTNANDADLENVMITDEEEIRTTNPVATEQYGTVSNNLQNSNTGPTTGTVNHQGALPGMVWQDRDVYLQGPIWAKIPHTDGHFHPSPLMGGFGLKHPPPQIMIKNTPVPANPPTNFSSAKFASFITQYSTGQVSVEIEWELQKENSKRWNPEIQYTSNYNKSVNVDFTVDNNGVYSEPRPIGTRYLTRNL

SEQ ID NO: 4879 - DNA, 2208 bp, Adeno-associated virus
atggctgccgatggttatcttccagattggctcgaggacactctctctgaaggaataagacagtggtggaagctcaaacctggcccaccaccaccaaagcccgcagagcggcataaggacgacagcaggggtcttgtgcttcctgggtacaagtacctcggacccttcaacggactcgacaagggagagccggtcaacgaggcagacgccgcggccctcgagcacgacaaggcctacgaccggcagctcgacagcggagacaacccgtacctcaagtacaaccacgccgacgcggagtttcaggagcgtcttaaagaagatacgtcttttgggggcaacctcggacgagcagtcttccaggccaaaaagaggattcttgaacctctgggcctggttgaggaacctgttaagacggctccgggaaaaaagaggccggtagagcactctcctgcggagccagactcctcctcgggaaccggaaaagcgggccagcagcctgcaagaaagagattgaattttggtcagactggagacgcagactcagtacctgacccccagcctctcggacagccaccagcagccccctctggtctgggaactaatacgatggcttcaggcagtggcgcaccaatggcagacaataacgagggcgccgacggagtgggtaattcctcgggaaattggcattgcgattccacatggatgggcgacagagtcatcaccaccagcacccgcacctgggccctgcccacctacaacaaccatctgtacaagcaaatctccagccagtctggagccagcaacgacaaccactactttggctacagcaccccctgggggtattttgacttcaacagattccactgccacttctccccacgtgactggcaaagactcatcaacaacaactggggattccggcccaagagactcagcttcaagctctttaacattcaagtcaaagaggtcacgcagaatgacggtacgacgacgattgccaataaccttaccagcacggttcaggtgtttactgactcggagtaccagctcccgtacgtcctcggctcggcgcatcaaggatgcctcccgccgttcccagcagacgtcttcatggtgccacagtatggatacctcaccctgaacaacggcagtcaggcggtaggacgctcttccttttactgcctggagtactttccttctcagatgcttcgtaccggaaacaactttaccttcagctacacctttgaagacgttcctttccatagcagctacgctcacagccaaagtctggaccgtctcatgaatcctctcatcgaccagtacctgtattacttgagcagaacaaacactccaagcggaaccaccacgatgtccaggcttcagttttctcaggccggagcaagtgacattcgggaccagtctagaaactggcttcctggaccctgttaccgccagcagcgagtatcaaagacagctgcggacaacaacaacagtgattactcgtggactggagctaccaagtaccacctcaatggaagagactctctggtgaatccgggcccagctatggccagccacaaggacgatgaagaaaaatattttcctcagagcggggttctcatctttggaaaacaagactcgggaaaaactaatgtggacattgaaaaggttatgattacagacgaagaggaaatcaggaccaccaatcccgtggctacggagcagtatggttctgtatctaccaacctccagagcggcaacacacaagcagctacctcagatgtcaacacacaaggcgttcttccaggcatggtctggcaggacagagacgtgtacctgcaggggcccatctgggcaaagattccacacacggacggacattttcacccctctcccctcatgggcggattcggacttaaacaccctcctccacaaattctcatcaagaacaccccggtacctgcgaatccttcgaccactttcagtgcggcaaagtttgcttccttcatcacacagtactccacggggcaggtcagcgtggagatcgagtgggagctgcagaaggagaacagcaaacgctggaatcccgaaattcagtacacttccaactacaacaaatctgttaatgtggactttactgtggacactaatggtgtgtattcagagcctcgccccattggcaccagatacctgactcgtaatctgtaa

SEQ ID NO: 4880 - protein, 735 aa, Adeno-associated virus
MAADGYLPDWLEDTLSEGIRQWWKLKPGPPPPKPAERHKDDSRGLVLPGYKYLGPFNGLDKGEPVNEADAAALEHDKAYDRQLDSGDNPYLKYNHADAEFQERLKEDTSFGGNLGRAVFQAKKRILEPLGLVEEPVKTAPGKKRPVEHSPAEPDSSSGTGKAGQQPARKRLNFGQTGDADSVPDPQPLGQPPAAPSGLGTNTMASGSGAPMADNNEGADGVGNSSGNWHCDSTWMGDRVITTSTRTWALPTYNNHLYKQISSQSGASNDNHYFGYSTPWGYFDFNRFHCHFSPRDWQRLINNNWGFRPKRLSFKLFNIQVKEVTQNDGTTTIANNLTSTVQVFTDSEYQLPYVLGSAHQGCLPPFPADVFMVPQYGYLTLNNGSQAVGRSSFYCLEYFPSQMLRTGNNFTFSYTFEDVPFHSSYAHSQSLDRLMNPLIDQYLYYLSRTNTPSGTTTMSRLQFSQAGASDIRDQSRNWLPGPCYRQQRVSKTAADNNNSDYSWTGATKYHLNGRDSLVNPGPAMASHKDDEEKYFPQSGVLIFGKQDSGKTNVDIEKVMITDEEEIRTTNPVATEQYGSVSTNLQSGNTQAATSDVNTQGVLPGMVWQDRDVYLQGPIWAKIPHTDGHFHPSPLMGGFGLKHPPPQILIKNTPVPANPSTTFSAAKFASFITQYSTGQVSVEIEWELQKENSKRWNPEIQYTSNYNKSVNVDFTVDTNGVYSEPRPIGTRYLTRNL

SEQ ID NO: 4881 - DNA, 2208 bp, Adeno-associated virus
atggctgccgatggttatcttccagattggctcgaggacactctctctgaaggaataagacagtggtggaagctcaaacctggcccaccaccaccaaagcccgcagagcggcataaggacgacagcaggggtcttgtgcttcctgggtacaagtacctcggacccttcaacggactcgacaagggagagccggtcaacgaggcagacgccgcggccctcgagcacgacaaggcctacgaccggcagctcgacagcggagacaacccgtacctcaagtacaaccacgccgacgcggagtttcaggagcgtcttaaagaagatacgtcttttgggggcaacctcggacgagcagtcttccaggccaaaaagaggattcttgaacctctgggcctggttgaggaacctgttaagacggctccgggaaaaaagaggccggtagagcactctcctgcggagccagactcctcctcgggaaccggaaaagcgggccagcagcctgcaagaaagagattgaattttggtcagactggagacgcagactcagtacctgacccccagcctctcggacagccaccagcagccccctctggtctgggaactaatacgatggcttcaggcagtggcgcaccaatggcagacaataacgagggcgccgacggagtgggtaattcctcgggaaattggcattgcgattccacatggatgggcgacagagtcatcaccaccagcacccgcacctgggccctgcccacctacaacaaccatctgtacaagcaaatctccagccagtctggagccagcaacgacaaccactactttggctacagcaccccctgggggtatttcgacttcaacagattccactgccacttctccccacgtgactggcaaagactcatcaacaacaactggggattccggcccaagagactcagcttcaagctctttaacattcaagtcaaagaggtcacgcagaatgacggtacgacgacgattgccaataaccttaccagcacggttcaggtgtttactgactcggggtaccagctcccgtacgtcctcggctcggcgcatcaaggatgccttccgccgttcccagcagacgtcttcatggtgccacagtatggatacctcaccctgaacaacggcagtcaggcggtaggacgctcttccttttactgcctggagtactttccttctcagatgcttcgtaccggaaacaactttaccttcagctacacctttgaagacgttcctttccatagcagctacgctcacggccaaagtctggaccgtctcatgaatcctctcatcgaccagtacctgtattacttgagcagaacaaacactccaagcggaaccaccacgatgtccaggcttcagttttctcaggccggagcaagtgacgttcgggaccagtctagaaactggcttcctggaccctgttaccgccagcagcgagtatcaaagacagctgcggacaacaacaacagtgattactcgtggactggagctaccaagtaccacctcaatggaagagactctctggtgaatccgggcccagctatggccagccacaaggacgatgaagaaaaatattttcctcagagcggggttctcgtctttggaaaacaagactcgggaaaaactaatgtggacattgaaaaggttatgattacagacgaagaggaaatcaggaccaccaatcccgcggctacggagcagtatggttctgtatctaccaacctccagagcggcaacacacaagcagctacctcagatgtcaacacacaaggcgttcttccaggcatggtctggcaggacagagacgtgtacctgcaggggcccatctgggcaaagattccacacacggacggacattttcacccctctcccctcatgggcggattcggacttaaacaccctcctccacaaattctcatcaagaacaccccggtacctgcgaatccttcgaccactttcagtgcggcaaagtttgtttccttcatcacacagtactccacggggcaggtcagcgtggagatcgagtgggagctgcagaaggagaacagcaaacgctggaatcccgaaattcagtacacttccaactacaacaaatctgttaatgtggactttactgtggacactaatggtgtgtattcagagcctcgccccattggcaccagatacctgactcgtaatctgtaa

SEQ ID NO: 4882 - protein, 735 aa, Adeno-associated virus
MAADGYLPDWLEDTLSEGIRQWWKLKPGPPPPKPAERHKDDSRGLVLPGYKYLGPFNGLDKGEPVNEADAAALEHDKAYDRQLDSGDNPYLKYNHADAEFQERLKEDTSFGGNLGRAVFQAKKRILEPLGLVEEPVKTAPGKKRPVEHSPAEPDSSSGTGKAGQQPARKRLNFGQTGDADSVPDPQPLGQPPAAPSGLGTNTMASGSGAPMADNNEGADGVGNSSGNWHCDSTWMGDRVITTSTRTWALPTYNNHLYKQISSQSGASNDNHYFGYSTPWGYFDFNRFHCHFSPRDWQRLINNNWGFRPKRLSFKLFNIQVKEVTQNDGTTTIANNLTSTVQVFTDSGYQLPYVLGSAHQGCLPPFPADVFMVPQYGYLTLNNGSQAVGRSSFYCLEYFPSQMLRTGNNFTFSYTFEDVPFHSSYAHGQSLDRLMNPLIDQYLYYLSRTNTPSGTTTMSRLQFSQAGASDVRDQSRNWLPGPCYRQQRVSKTAADNNNSDYSWTGATKYHLNGRDSLVNPGPAMASHKDDEEKYFPQSGVLVFGKQDSGKTNVDIEKVMITDEEEIRTTNPAATEQYGSVSTNLQSGNTQAATSDVNTQGVLPGMVWQDRDVYLQGPIWAKIPHTDGHFHPSPLMGGFGLKHPPPQILIKNTPVPANPSTTFSAAKFVSFITQYSTGQVSVEIEWELQKENSKRWNPEIQYTSNYNKSVNVDFTVDTNGVYSEPRPIGTRYLTRNL

SEQ ID NO: 4883 - DNA, 2208 bp, Adeno-associated virus
atggctgccgatggttatcttccagattggctcgaggacactctctctgaaggaataagacagtggtggaaactcaaacctggcccaccaccaccaaagcccgcagagcggcataaggacgacagcaggggtcttgtgcttcctgggtacaagtacctcggacccttcaacggactcgacaagggagagccggtcaacgaggcagacgccgcggccctcgagcacgacaaggcctacgaccggcagctcgacagcggagacaacccgtacctcaagtacaaccacgccgacgcggagtttcaggagcgccttaaagaagatacgtcttttgggggcaacctcggacgagcagtcttccaggcaaaaaagagggttctggaacctctgagcctggttgaggagcctgttaagacggctccgggaaaaaagaggccggtagagcactctcccgcagagccagattcctcctccggaactggaaagtcgggcaaccagcctgcaagaaagagattgaatttcggtcagactggagactcagactccgtacctgacccccagcctctcggacagccaccagcagccccctctggtctgggaactaatacgatggctacaggcagtggcgcaccaatggcagacaataacgagggcgccgacggagtgggtaattcctcgggaaattggcattgcgattccacatggatgggcgacagagtcatcaccaccagcacccgaacctgggccctgcccacctacaacaaccatctgtacaagcaaatatccagccagtctggagccagcaacgacaatcactactttggctacagcaccccctgggggtattttgacttcaacagattccactgccacttttcaccacgtgactggcaaagactcatcaacaacaactggggattccgacccaagagactcaacttcaagctctttaacattcaagtcaaagaggtcacgcagaatgacggtacgacgacgattgccaataaccttaccagcacggttcaggtgtttactgactcggagtaccagctcccgtacgtcctcggctcggcgcatcaaggatgcctcccgccgttcccagcagacgtcttcatggtgccacagtatggatacctcaccctgaacaacgggagtcaggcagtaggacgctcttcattttactgcctagagtactttccttctcagatgctgcgtaccggaaacaactttaccttcagctacacctttgaggacgttcctttccacagcagctacgctcacagccagagtttggaccgtctcatgaatcctctcatcgaccagtacctgtattacttgagcagaacaaacactccaagcggaaccaccacgcagtccaggcttcagttttctcaggccggagcgagtgacattcaggaccagtctaggaactggcttcctggaccctgttaccgtcagcagcgagtatcaaagacatctgcggataacaacaacagtgaatactcgtggactggagctaccaagtaccacctcaatggcagagactctctggtgaatccgggcccggccatggccagccacaaagacgatgaagaaaagttttttcctcagagcggggttcttatctttgggaagcaaggctcagagaaaacaaatgtggatattgaaaaggtcatgattacagacgaagaggaaatcaggaccaccaatcccgtggctacggagcagtatggttctgtatctaccaacctccagagcggcaacacacaagcagctaccgcagatgtcaacacacaaggcgttcttccaggcatggtcgggcaagacagagacgtgtacctgcaggggcctacttgggcaaagattccacacacggacggacattttcacccctctcccctcatgggcggatttggacttaaacaccctcctccacagattctcatcaagaacaccccggtacctgcgaatccttcgaccaccttcagtgcggcaaagtttgcttccttcattacacagtactccacggggcaggtcagcgtggagatcgagtgggagctgcagaaggagaacagcaaacgctggaatcccgagatccagtacacttccaactacaacaagtctgttaatgtggactttactgtggacactaatggcgtgtattcagagcctcgccccattggcaccagatacctgactcgtaatctgtaa

SEQ ID NO: 4884 - protein, 735 aa, Adeno-associated virus
MAADGYLPDWLEDTLSEGIRQWWKLKPGPPPPKPAERHKDDSRGLVLPGYKYLGPFNGLDKGEPVNEADAAALEHDKAYDRQLDSGDNPYLKYNHADAEFQERLKEDTSFGGNLGRAVFQAKKRVLEPLSLVEEPVKTAPGKKRPVEHSPAEPDSSSGTGKSGNQPARKRLNFGQTGDSDSVPDPQPLGQPPAAPSGLGTNTMATGSGAPMADNNEGADGVGNSSGNWHCDSTWMGDRVITTSTRTWALPTYNNHLYKQISSQSGASNDNHYFGYSTPWGYFDFNRFHCHFSPRDWQRLINNNWGFRPKRLNFKLFNIQVKEVTQNDGTTTIANNLTSTVQVFTDSEYQLPYVLGSAHQGCLPPFPADVFMVPQYGYLTLNNGSQAVGRSSFYCLEYFPSQMLRTGNNFTFSYTFEDVPFHSSYAHSQSLDRLMNPLIDQYLYYLSRTNTPSGTTTQSRLQFSQAGASDIQDQSRNWLPGPCYRQQRVSKTSADNNNSEYSWTGATKYHLNGRDSLVNPGPAMASHKDDEEKFFPQSGVLIFGKQGSEKTNVDIEKVMITDEEEIRTTNPVATEQYGSVSTNLQSGNTQAATADVNTQGVLPGMVGQDRDVYLQGPTWAKIPHTDGHFHPSPLMGGFGLKHPPPQILIKNTPVPANPSTTFSAAKFASFITQYSTGQVSVEIEWELQKENSKRWNPEIQYTSNYNKSVNVDFTVDTNGVYSEPRPIGTRYLTRNL

SEQ ID NO: 4885 - DNA, 2208 bp, Adeno-associated virus
atggctgccgatggttatcttccagattggctcgaggacactctctctgaaggaataagacagtggtggaagctcaaacctggcccaccaccaccaaagcccgcagagcggcataaggacgacagcaggggtcttgtgcttcctgggtacaagtacctcggacccttcaacggactcgacaagggagagccggtcaacgaggcagacgccgcggccctcgagcacgacaaggcctacgaccggcagctcgacagcggagacaacccgtacctcaagtacaaccacgccgacgcagagtttcaggagcgccttaaagaagatacgtcttttgggggcaacctcggacgagcagtcttccaggcaaaaaagagggttctggaacctctgggcctggttgaggagcctgttaagacggctccgggaaaaaagaggccggtagagcactctcctgcagagccagattcctcctccggaactggaaagtcgggcaaccagcctgcaagaaagagattgaatttcggtcagactggagactcagactccgtacctgacccccagcctctcggacagccaccagcagccccctctggtctgggaactaatacgatggctacaggcagtggcgcaccaatggcagacaataacgagggcgccgacggagtgggtaattcctcgggaaattggcattgcgattccacatggatgggcgacagagtcatcaccaccagcacccgaacctgggccctgcccacctacaacaaccatctgtacaagcaaatatccagccagtctggagccagcaacgacaatcactactttggctacagcaccccctgggggtattttgacttcaacagattccactgccacttttcaccacgtgactggcaaagactcatcaacaacaactggggattccgacccaagagactcaacttcaagctctttaacattcaagtcaaagaggtcacgcagaatgacggtacgacgacgattgccaataaccttaccagcacggttcaggtgtttactgactcggagtaccagctcccgtacgtcctcggctcggcgcatcaaggatgcctcccgccgttcccagcagacgtcttcatggtgccacagtatggatacctcaccctgaacaacgggagtcaggcagtaggacgctcttcattttactgcctagggtactttccttctcagatgctgcgtaccggaaacaactttaccttcagctacacctttgaggacgttcctttccacagcagctacgctcacagccagagtttggaccgtctcatgaatcctctcatcgaccagtacctgtattacttgagcagaacaaacactccaagcggaaccaccacgcagtccaggcttcagttttctcaggccggagcgagtgacattcgggaccagtctaggaactggcttcctggaccctgttaccgtcagcagcgagtatcaaagacatctgcggataacaacaacagtgaatactcgtggactggagctaccaagtaccacctcaatggcagagactctctggtgaatccgggcccggccatggccagccacaaagacgatgaagaaaagttttttcctcagagcggggttcttatctttgggaagcaaggcccagagaaaacaaatgtggatattgaaaaggtcatgattacagacgaagaggaaatcaggaccaccaatcccgtggctacggagcagtatggttctgtatctaccaacctccagagcggcaacacacaagcagctaccgcagatgtcaacacacaaggcgttcttccaggcatggtctggcaagacagagacgtgtacctgcaggggcctatttgggcaaagattccacacacggacggacattttcacccctctcccctcatgggcggatttggacttaaacaccctcctccacagattctcatcaagaacaccccggtacctgcgaatccttcgaccaccttcagtgcggcaaagtttgcttccttcattacacagtactccacggggcaggtcagcgtggagatcgagtgggagctgcagaaggagaacagcaaacgctggaatcccgagatccagtacacttccaactacaacaagtctgttaatgtggactttactgtggacactaatggcgtgtattcagagcctcgccccattggcaccagatacctgactcgtaatctgtaa

SEQ ID NO: 4886 - protein, 735 aa, Adeno-associated virus
MAADGYLPDWLEDTLSEGIRQWWKLKPGPPPPKPAERHKDDSRGLVLPGYKYLGPFNGLDKGEPVNEADAAALEHDKAYDRQLDSGDNPYLKYNHADAEFQERLKEDTSFGGNLGRAVFQAKKRVLEPLGLVEEPVKTAPGKKRPVEHSPAEPDSSSGTGKSGNQPARKRLNFGQTGDSDSVPDPQPLGQPPAAPSGLGTNTMATGSGAPMADNNEGADGVGNSSGNWHCDSTWMGDRVITTSTRTWALPTYNNHLYKQISSQSGASNDNHYFGYSTPWGYFDFNRFHCHFSPRDWQRLINNNWGFRPKRLNFKLFNIQVKEVTQNDGTTTIANNLTSTVQVFTDSEYQLPYVLGSAHQGCLPPFPADVFMVPQYGYLTLNNGSQAVGRSSFYCLGYFPSQMLRTGNNFTFSYTFEDVPFHSSYAHSQSLDRLMNPLIDQYLYYLSRTNTPSGTTTQSRLQFSQAGASDIRDQSRNWLPGPCYRQQRVSKTSADNNNSEYSWTGATKYHLNGRDSLVNPGPAMASHKDDEEKFFPQSGVLIFGKQGPEKTNVDIEKVMITDEEEIRTTNPVATEQYGSVSTNLQSGNTQAATADVNTQGVLPGMVWQDRDVYLQGPIWAKIPHTDGHFHPSPLMGGFGLKHPPPQILIKNTPVPANPSTTFSAAKFASFITQYSTGQVSVEIEWELQKENSKRWNPEIQYTSNYNKSVNVDFTVDTNGVYSEPRPIGTRYLTRNL

SEQ ID NO: 4887 - protein, 735 aa, Adeno-associated virus
MAADGYLPDWLEDTLSEGIRQWWKLKPGPPPPKPAERHKDDSRGLVLPGYKYLGPFNGLDKGEPVNEADAAALEHDKAYDRQLDSGDNPYLKYNHADAEFQERLKEDTSFGGNLGRAVFQAKKRVLEPLGLVEEPVKTAPGKKRPVEHSPAEPDSSSGTGKSGNQPARKRLNFGQTGDSDSVPDPQPLGQPPAAPSGLGTNTMATGSGAPMADNNEGADGVGNSSGNWHCDSTWMGDRVITTSTRTWALPTYNNHLYKQISSQSGASNDNHYFGYSTPWGYFDFNRFHCHFSPRDWQRLINNNWGFRPKRLNFKLFNIQVKEVTQNDGTTTIANNLTSTVQVFTDSEYQLPYVLGSAHQGCLPPFPADVFMVPQYGYLTLNNGSQAVGRSSFYCLEYFPSQMLRTGNNFTFSYTFEDVPFHSSYAHSQSLDRLMNPLIDQYLYYLSRTNTPSGTTTQSRLQFSQAGASDIRDQSRNWLPGPCYRQQRVSKTSADNNNSEYSWTGATKYHLNGRDSLVNPGPAMASHKDDEEKFFPQSGVLIFGKQGPEKTNVDIEKVMITDEEEIRTTNPVATEQYGSVSTNLQSGNTQAATADVNTQGVLPGMVWQDRDVYLQGPIWAKIPHTDGHFHPSPLMGGFGLKHPPPQILIKNTPVPANPSTTFSAAKFASFITQYSTGQVSVEIEWELQKENSKRWNPEIQYTSNYNKSVNVDFTVDTNGVYSEPRPIGTRYLTRNL

SEQ ID NO: 4888 - protein, 735 aa, Adeno-associated virus; identical to SEQ ID NO: 4887

SEQ ID NO: 4889 - DNA, 2211 bp, Adeno-associated virus
atggctgccgatggttatcttccagattggctcgaggacactctctctgaaggaataagacagtggtggaagctcaaacctggcccaccaccaccaaagcccgcagagcggcataaggacgacagcaggggtcttgtgcttcctgggtacaagtacctcggacccttcaacggactcgacaagggggagccggtcaacgaggcagacgccgcggccctcgagcacgacaaggcctacgaccggcagctcgacagcggagacaacccgtacctcaagtacaaccacgccgacgcagagtttcaggagcgccttaaagaagatacgtcttttgggggcaacctcggacgagcagtcttccaggcgaaaaagagggttcttgaacctctgcggcctggtttgaggaaacctgttaagacggctccgggaaaaaagaggccggtagagcactctcctgtggagccagactcctcctcgggaaccggaaaagcgggccagcagcctgcaagaaaaagattaaattttggtcagactggagacgcagactccgtacctgacccccagcctctcggacagccaccagcagccccctctggtctgggatctactacaatggctacaggcagtggcgcaccaatggcagacaataacgagggtgccgatggagtgggtaattcctcaggaaattggcattgcgattcccaatggctggacgacagagtcatcgccaccagcacccgaacctgggccctgcccacatacaacaaccacctctacaagcaaatctccagccaatcaggagcctgcaacgacaaccactactttggctacagcaccccctgggggtattttgacttcaacagattccactgccacttttcaccacgtgactggcaaagactcatcaacagcaactggggattccggcccaaaagactcaacttcaagctctttaatattcaagtcaaagaggtcacgcagaatgacggtacgacgacgattgccaataaccttaccagcacggttcaggtgtttactgactcggagtaccagctcccgtacgtcccgggctcggcgcatcaaggatgcctcccgccgtttccagcggacgtcttcatggtcccacagtatggatacctcaccctgaacaacgggagtcaggcggtaggacgctcttccttttactgcctggagtactttccttctcagatgctgcgtactggaaacaactttcagttcagctacacttttgaagacgtgcctttccacagcagctacgctcactgccagagtctggatcggctgatgaatcctctgatcgaccagtacctgtattatctgaacaagacacaaacaaatagtggaactcttcagcagtctcggctactgtttagccaagctggaccaaccaacatgtctcttcaagctaaaaactggctgcctggaccttgctacagacagcagcgtctgtcaaaacaggcaaacgacaataacaactgcaactttccctggactgcagctacaaagtatcatctaaatggccgggactcgttggttaatccaggaccagctatggccagtcacaaggatgacgaagaaaagtttttccccatgcatggaaccctgatatttggtaaacaaggaacaaatgccaacgacgcggatttggaaaatgtcatgattacagatgaagaagaaatcaggcccaccaatcccgtggctacggagcagtacgggactgtgtcaaataatttgcaaaactcaaacactggtccaactacaggaactgtcaatcaccaaggagcgttacctggtatggtgtggcaggatcgagacgtgtacctgcagggacccatttgggccaagattcctcacaccgatggacactttcatccttctccactgatgggaggttttggactcaaacacccgcctcctcagatcatgatcaaaagcactcccgttccagccaatcctcccacaaacttcagttctgccaagtttgcttcttccatcacacagtattccacgggacaggtcagcgtggagatcgagtgggagctgcagaaggagaacagcaaacgctggaatcccgaaattcagtacacttccaactacaacaagtctgttaatgtggactttactgtggacactaatggtgtgtattcagagcctcgccccattggcaccagatacctgactcgtaatctgtaa

SEQ ID NO: 4890 - protein, 736 aa, Adeno-associated virus
MAADGYLPDWLEDTLSEGIRQWWKLKPGPPPPKPAERHKDDSRGLVLPGYKYLGPFNGLDKGEPVNEADAAALEHDKAYDRQLDSGDNPYLKYNHADAEFQERLKEDTSFGGNLGRAVFQAKKRVLEPLRPGLRKPVKTAPGKKRPVEHSPVEPDSSSGTGKAGQQPARKRLNFGQTGDADSVPDPQPLGQPPAAPSGLGSTTMATGSGAPMADNNEGADGVGNSSGNWHCDSQWLDDRVIATSTRTWALPTYNNHLYKQISSQSGACNDNHYFGYSTPWGYFDFNRFHCHFSPRDWQRLINSNWGFRPKRLNFKLFNIQVKEVTQNDGTTTIANNLTSTVQVFTDSEYQLPYVPGSAHQGCLPPFPADVFMVPQYGYLTLNNGSQAVGRSSFYCLEYFPSQMLRTGNNFQFSYTFEDVPFHSSYAHCQSLDRLMNPLIDQYLYYLNKTQTNSGTLQQSRLLFSQAGPTNMSLQAKNWLPGPCYRQQRLSKQANDNNNCNFPWTAATKYHLNGRDSLVNPGPAMASHKDDEEKFFPMHGTLIFGKQGTNANDADLENVMITDEEEIRPTNPVATEQYGTVSNNLQNSNTGPTTGTVNHQGALPGMVWQDRDVYLQGPIWAKIPHTDGHFHPSPLMGGFGLKHPPPQIMIKSTPVPANPPTNFSSAKFASSITQYSTGQVSVEIEWELQKENSKRWNPEIQYTSNYNKSVNVDFTVDTNGVYSEPRPIGTRYLTRNL

SEQ ID NO: 4891 - DNA, 2208 bp, Adeno-associated virus
atggctgccgatggttatcttccagattggctcgaggacactctctctgaaggaataagacagtggtggaagctcaaacctggcccaccaccaccaaagcccgcagagcggcataaggacgacagcaggggtcttgtgcttcctgggtacaagtacctcggacccttcaacggactcgacaagggagagccggtcaacgaggcagacgccgcggccctcgagcacgacaaggcctacgaccggcagctcgacagcggagacaacccgtacctcaagtacaaccacgccgacgcggagtttcaggagcgccttaaagaggatacgtcttttgggggcaacctcggacgagcagtcttccaggcaaaaaagagggttctggaacctctgggcctggttgaggagcctgttaagacggctccgggaaaaaagaggccggtagagcactctcctgcagagccagattcctcctccggaactggaaagtcgggcaaccagcctgcaagaaagagattgaatttcggtcagactggagactcagactccgtacctgacccccagcctctcggacagccaccagcagccccctctggtctgggaactaatacgatggctacaggcagtggcgcaccaatggcagacaataacgagggcgccgacggagtgggtaattcctcgggaaattggcattgcgattccacatggatgggcgacagagtcatcaccaccagcacccgaacctgggccctgcccacctacaacaaccatctgtacaagcaaatatccagccagtctggagccagcaacgacaatcactactttggctacagcaccccctgggggtattttgacttcaacagattccactgccacttttcaccacgtgactggcaaagactcatcaacaacaactggggattccgacccaagagactcaacttcaagctctttaacattcaagtcaaagaggtcacgcagaatgacggtacgacgacgattgccaataaccttaccagcacggttcaggtgtttactgactcggagtaccagctcccgtacgtcctcggctcggcgcatcaaggatgcctcccgccgttcccagcagacgtcttcatggtgccacagtatggatacctcaccctgaacaacgggagtcaggcagtaggacgctcttcattttactgcctagagtactttccttctcagatgctgcgtaccggaaacagctttaccttcagctacacctttgaggacgttcctttccacagcagctacgctcacagccagagtttggaccgtctcatgaatcctctcatcgaccagtacctgtattacttgagcagaacaaacactccaagcggaaccaccacgcagtccaggcttcagttttctcaggccggagcgagtgacattcgggaccagtctaggaactggcttcctggaccctgttaccgtcagcagcgagtatcaaagacatctgcggataacaacaacagtgaatactcgtggactggagctaccaagtaccacctcaatggcagagactctctggtgaatccgggcccggccatggccagccacaaagacgatgaagaaaagttctttcctcagagcggggttcttatctttgggaagcaaggctcagagaaaacaaatgtggatattgaaaaggtcatgattacagacgaagaggaaatcaggaccaccaatcccgtggctacggagcagtatggttctgtatctaccaacctccagagcggcaacacacaagcagctaccgcagatgtcaacacacaaggcgttcttccaggcatggtctggcaagacagagacgtgtacctgcaggggcctatttgggcaaagattccacacacggacggacattttcacccctctcccctcatgggcggatttggacttaaacaccctcctccacagattctcatcaagaacaccccggtacctgcgaatccttcgaccaccttcagtgcggcaaagtttgcttccttcattacacagtactccacggggcaggtcagcgtggagatcgagtgggagctgcagaaggagaacagcaaacgctggaatcccgagatccagtacacttccaactacaacaagtctgttaatgtggactttactgtggacactaatggcgtgtattcagagcctcgccccattggcaccagatacctgactcgtaatctgtaa

SEQ ID NO: 4892 - protein, 735 aa, Adeno-associated virus
MAADGYLPDWLEDTLSEGIRQWWKLKPGPPPPKPAERHKDDSRGLVLPGYKYLGPFNGLDKGEPVNEADAAALEHDKAYDRQLDSGDNPYLKYNHADAEFQERLKEDTSFGGNLGRAVFQAKKRVLEPLGLVEEPVKTAPGKKRPVEHSPAEPDSSSGTGKSGNQPARKRLNFGQTGDSDSVPDPQPLGQPPAAPSGLGTNTMATGSGAPMADNNEGADGVGNSSGNWHCDSTWMGDRVITTSTRTWALPTYNNHLYKQISSQSGASNDNHYFGYSTPWGYFDFNRFHCHFSPRDWQRLINNNWGFRPKRLNFKLFNIQVKEVTQNDGTTTIANNLTSTVQVFTDSEYQLPYVLGSAHQGCLPPFPADVFMVPQYGYLTLNNGSQAVGRSSFYCLEYFPSQMLRTGNSFTFSYTFEDVPFHSSYAHSQSLDRLMNPLIDQYLYYLSRTNTPSGTTTQSRLQFSQAGASDIRDQSRNWLPGPCYRQQRVSKTSADNNNSEYSWTGATKYHLNGRDSLVNPGPAMASHKDDEEKFFPQSGVLIFGKQGSEKTNVDIEKVMITDEEEIRTTNPVATEQYGSVSTNLQSGNTQAATADVNTQGVLPGMVWQDRDVYLQGPIWAKIPHTDGHFHPSPLMGGFGLKHPPPQILIKNTPVPANPSTTFSAAKFASFITQYSTGQVSVEIEWELQKENSKRWNPEIQYTSNYNKSVNVDFTVDTNGVYSEPRPIGTRYLTRNL

SEQ ID NO: 4893 - DNA, 2211 bp, Adeno-associated virus; identical to SEQ ID NO: 4804

SEQ ID NO: 4894 - protein, 736 aa, Adeno-associated virus
MAADGYLPDWLEDTLSEGIRQWWKLKPGPPPPKPAERHKDDSRGLVLPGYKYLGPGNGLDKGEPVNAADAAALEHDKAYDQQLKAGDNPYLKYNHADAEFQERLKEDTSFGGNLGRAVFQAKKRLLEPLGLVEEAAKTAPGKKRPVEQSPQEPDSSAGIGKSGSQPAKKKLNFGQTGDTESVPDPQPIGEPPAAPSGVGSLTMASGGGAPVADNNEGADGVGSSSGNWHCDSQWLGDRVITTSTRTWALPTYNNHLYKQISNSTSGGSSNDNAYFGYSTPWGYFDFNRFHCHFSPRDWQRLINNNWGFRPKRLNFKLFNIQVKEVTDNNGVKTIANNLTSTVQVFTDSDYQLPYVLGSAHEGCLPPFPADVFMIPQYGYLTLNDGGQAVGRSSFYCLEYFPSQMLRTGNNFQFSYEFENVPFHSSYAHSQSLDRLMNPLIDQYLYYLSKTINGSGQNQQTLKFSVAGPSNMAVQGRNYIPGPSYRQQRVSTTVTQNNNSEFAWPGASSWALNGRNSLMNPGPAMASHKEGEDRFFPLSGSLIFGKQGTGRDNVDADKVMITNEEEIKTTNPVATESYGQVATNHQSAQAQAQTGWVQNQGILPGMVWQDRDVYLQGPIWAKIPHTDGNFHPSPLMGGFGMKHPPPQILIKNTPVPADPPTAFNKDKLNSFITQYSTGQVSVEIEWELQKENSKRWNPEIQYTSNYYKSNNVEFAVSTEGVYSEPRPIGTRYLTRNL

SEQ ID NO: 4895 - DNA, 2211 bp, Adeno-associated virus
atggctgccgatggttatcttccagattggctcgaggacactctctctgaaggaataagacagtggtggaagctcaaacctggcccaccaccaccaaagcccgcagagcggcataaggacgacagcaggggtcttgtgcttcctgggtacaagtacctcggacccggcaacggactcgacaagggggagccggtcaacgcagcagacgcggcggccctcgagcacgacaaggcctacgaccagcagctcaaggccggagacaacccgtacctcaagtacaaccacgccgacgccgagttccaggagcggctcaaagaagatacgtcttttgggggcaacctcgggcgagcagtcttccaggccaaaaagaggcttcttgaacctcttggtctggttgaggaagcggctaagacggctcctggaaagaagaggcctgtagagcagtctcctcaggaaccggactcctccgcgggtattggcaaatcgggttcacagcccgctaaaaagaaactcaatttcggtcagactggcgacacagagtcagtccccgaccctcaaccaatcggagaacctcccgcagccccctcaggtgtgggatctcttacaatggcttcaggtggtggcgcaccagtggcagacaataacgaaggtgccgatggagtgggtagttcctcgggaaattggcattgcgattcccaatggctgggggacagagtcatcaccaccagcacccgaacctgggccctgcccacctacaacaatcacctctacaagcaaatctccaacagcacatctggaggatcttcaaatgacaacgcctacttcggctacagcaccccctgggggtattttgacttcaacagattccactgccacttctcaccacgtgactggcagcgactcatcaacaacaactggggattccggcctaagcgactcaacttcaagctcttcaacattcaggtcaaagaggttacggacaacaatggagtcaagaccatcgccaataaccttaccagcacggtccaggtcttcacggactcagactatcagctcccgtacgtgctcgggtcggctcacgagggctgcctcccgccgttcccagcggacgttttcatgattcctcagtacgggtatctgacgcttaatgatgggagccaggccgtgggtcgttcgtccttttactgcctggaatatttcccgtcgcaaatgctaagaacgggtaacaacttccagttcagctacgagtttgagaacgtacctttccatagcagctacgctcacagccaaagcctggaccgactaatgaatccactcatcgaccaatacttgtactatctctcaaagactattaacggttctggacagaatcaacaaacgctaaaattcagcgtggccggacccagcaacatggctgtccagggaagaaactacatacctggacccagctaccgacaacaacgtgtctcaaccactgtgactcaaaacaacaacagcgaatttgcttggcctggagcttcttcttgggctctcaatggacgtaatagcttgatgaatcctggacctgctatggccagccacaaagaaggagaggaccgtttctttcctttgtctggatctttaatttttggcaaacaaggaactggaagagacaacgtggatgcggacaaagtcatgataaccaacgaagaagaaattaaaactactaacccggtagcaacggagtcctatggacaagtggccacaaaccaccagagtgcccaagcacaggcgcagaccggctgggttcaaaaccaaggaatacttccgggtatggtttggcaggacagagatgtgtacctgcaaggacccatttgggccaaaattcctcacacggacggcaactttcacccttctccgctaatgggagggtttggaatgaagcacccgcctcctcagatcctcatcaaaaacacacctgtacctgcggatcctccaacggctttcaataaggacaagctgaactctttcatcacccagtattctactggccaagtcagcgtggagattgagtgggagctgcagaaggaaaacagcaagcgctggaacccggagatccagtacacttccaactattacaagtctaataatgttgaatttgctgttaatactgaaggtgtatatagtgaaccccgccccattggcaccagatacctgactcgtaatctgtaa

SEQ ID NO: 4896 - protein, 736 aa, Adeno-associated virus
MAADGYLPDWLEDTLSEGIRQWWKLKPGPPPPKPAERHKDDSRGLVLPGYKYLGPGNGLDKGEPVNAADAAALEHDKAYDQQLKAGDNPYLKYNHADAEFQERLKEDTSFGGNLGRAVFQAKKRLLEPLGLVEEAAKTAPGKKRPVEQSPQEPDSSAGIGKSGSQPAKKKLNFGQTGDTESVPDPQPIGEPPAAPSGVGSLTMASGGGAPVADNNEGADGVGSSSGNWHCDSQWLGDRVITTSTRTWALPTYNNHLYKQISNSTSGGSSNDNAYFGYSTPWGYFDFNRFHCHFSPRDWQRLINNNWGFRPKRLNFKLFNIQVKEVTDNNGVKTIANNLTSTVQVFTDSDYQLPYVLGSAHEGCLPPFPADVFMIPQYGYLTLNDGSQAVGRSSFYCLEYFPSQMLRTGNNFQFSYEFENVPFHSSYAHSQSLDRLMNPLIDQYLYYLSKTINGSGQNQQTLKFSVAGPSNMAVQGRNYIPGPSYRQQRVSTTVTQNNNSEFAWPGASSWALNGRNSLMNPGPAMASHKEGEDRFFPLSGSLIFGKQGTGRDNVDADKVMITNEEEIKTTNPVATESYGQVATNHQSAQAQAQTGWVQNQGILPGMVWQDRDVYLQGPIWAKIPHTDGNFHPSPLMGGFGMKHPPPQILIKNTPVPADPPTAFNKDKLNSFITQYSTGQVSVEIEWELQKENSKRWNPEIQYTSNYYKSNNVEFAVNTEGVYSEPRPIGTRYLTRNL

SEQ ID NO: 4897 - DNA, 2208 bp, Adeno-associated virus
atggctgccgatggttatcttccagattggctcgaggacactctctctgaaggaataagacagcggtggaagctcaaacctggcccaccaccaccagagcccgcagagcggcataaggacgacagcaggggtcttgtgcttcctgggtacaagtacctcggacccttcaacggactcgacaagggagagccggtcaacgaggcagacgccgcggccctcgagcacgacaaagcctacgaccggcagctcgacagcggagacaacccgtacctcaagtacaaccacgccgacgcggagtttcaggagcgccttaaagaagatacgtcttttgggggcaacctcggacgagcagtcttccaggcgaaaaagagggtacttgaacctctgggcctggttgaggaacctgttaagacggctccgggaaaaaagaggccggtagagcactctcctgtggagccagactcctcctcgggaaccggaaaggcgggccagcagcctgcaagaaaaagattgaattttggtcagactggagacgcagactcagtacctgacccccagcctctcggacagccaccagcagccccctctggtctgggaactaatacgatggctacaggcagtggcgcaccaatggcagacaataacgagggcgccgacggagtgggtaattcctcgggaaattggcattgcgattccacatggatgggcgacagagtcatcaccaccagcacccgaacctgggccctgcccacctacaacaaccacctctacaaacaaatttccagccaatcaggagcctcgaacgacaatcactactttggctacagcaccccttgggggtattttgacttcaacagattccactgccacttttcaccacgtgactggcaaagactcatcaacaacaactggggattccgacccaagagactcaacttcaagctctttaacattcaagtcaaagaggtcacgcagaatgacggtacgacgacgattgccaataaccttaccggcacggttcaggtgtttactgactcggagtaccagctcccgtacgtcctcggctcggcgcatcaaggatgcctcccgccgttcccagcagacgtcttcatggtgccacagtatggatacctcaccctgaacaacgggagtcaggcagtaggacgctcttcattttactgcctggagtactttccttctcagatgctgcgtaccggaaacaactttaccttcagctacacttttgaggacgttcctttccacagcagctacgctcacagccagagtctgggccgtctcatgaatcctctcatcgaccagtacctgtattacttgagcagaacaaacactccaagtggaaccaccacgcagtcaaggcttcagttttctcaggccggagcgagtgacattcgggaccagtctaggaactggcttcctggaccctgttaccgccagcagcgagtatcaaagacatctgcggataacaacaacagtgaatactcgtggactggagctaccaagtaccacctcaatggcagagactctctggtgaatccgggcccggccatggcaagccacaaggacgatgaagaaaagttttttcctcagagcggggttctcatctttgggaagcaaggctcagagaaaacaaatgtggacattgaaaaggtcatgattacagacgaagaggaaatcaggacaaccaatcccgtggctacggagcagtatggttctgtatctaccaacctccagagaggcaacagacaagcagctaccgcagatgtcaacacacaaggcgttcttccaggcatggtctggcaggacagagatgtgtaccttcaggggcccatctgggcaaagattccacacacggacggacattttcacccctctcccctcatgggtggattcggacttaaacaccctcctccacagattctcatcaagaacaccccggtacctgcgaatccttcgaccaccttcagtgcggcaaagtttgcttccttcatcacacagtactccacgggacaggtcagcgtggagatcgagtgggagctgcagaaggaaaacagcaaacgctggaatcccgaaattcagtacacttccaactacaacaagtctgttaatgtggactttactgtggacactaatggcgtgtattcagagcctcgccccattggcaccagatacctgactcgtaatctgtaa

SEQ ID NO: 4898 - protein, 735 aa, Adeno-associated virus
MAADGYLPDWLEDTLSEGIRQRWKLKPGPPPPEPAERHKDDSRGLVLPGYKYLGPFNGLDKGEPVNEADAAALEHDKAYDRQLDSGDNPYLKYNHADAEFQERLKEDTSFGGNLGRAVFQAKKRVLEPLGLVEEPVKTAPGKKRPVEHSPVEPDSSSGTGKAGQQPARKRLNFGQTGDADSVPDPQPLGQPPAAPSGLGTNTMATGSGAPMADNNEGADGVGNSSGNWHCDSTWMGDRVITTSTRTWALPTYNNHLYKQISSQSGASNDNHYFGYSTPWGYFDFNRFHCHFSPRDWQRLINNNWGFRPKRLNFKLFNIQVKEVTQNDGTTTIANNLTGTVQVFTDSEYQLPYVLGSAHQGCLPPFPADVFMVPQYGYLTLNNGSQAVGRSSFYCLEYFPSQMLRTGNNFTFSYTFEDVPFHSSYAHSQSLGRLMNPLIDQYLYYLSRTNTPSGTTTQSRLQFSQAGASDIRDQSRNWLPGPCYRQQRVSKTSADNNNSEYSWTGATKYHLNGRDSLVNPGPAMASHKDDEEKFFPQSGVLIFGKQGSEKTNVDIEKVMITDEEEIRTTNPVATEQYGSVSTNLQRGNRQAATADVNTQGVLPGMVWQDRDVYLQGPIWAKIPHTDGHFHPSPLMGGFGLKHPPPQILIKNTPVPANPSTTFSAAKFASFITQYSTGQVSVEIEWELQKENSKRWNPEIQYTSNYNKSVNVDFTVDTNGVYSEPRPIGTRYLTRNL

SEQ ID NO: 4899 - DNA, 2208 bp, Adeno-associated virus
atggctgccgatggttatcttccagattggctcgaggacactctctctgaaggaataagacagcggtggaagctcaaacctggcccaccaccaccagagcccgcagagcggcataaggacgacagcaggggtcttgtgcttcctgggtacaagtacctcggacccttcaacggactcgacaagggagagccggtcaacgaggcagacgccgcggccctcgagcacgacaaagcctacgaccggcagctcgacagcggagacaacccgtacctcaagtacaaccacgccgacgcggagtttcaggagcgccttaaagaagatacgtcctttgggggcaacctcggacgagcagtcttccaggcgaaaaagagggtacttgaacctctgggcctggttgaggaacctgttaagacggctccgggaaaaaagaggccggtagagcactctcctgtggagccagactcctcctcgggaaccggaaaggcgggccagcagcctgcaagaaaaagattgaattttggtcagactggagacgcagactcagtacctgacccccagcctctcggacagccaccagcagccccctctggtctgggaactaatacgatggctacaggcagtggcgcaccaatggcagacaataacgagggcgccgacggagtgggtaattcctcgggaaattggcattgcgattccacatggatgggcgacagagtcatcaccaccagcacccgaacctgggccctgcccacctacaacaaccacctctacaaacaaatttccagccaatcaggagcctcgaacgacaatcactactttggctacagcaccccttgggggtattttgacttcaacagattccactgccacttttcaccacgtgactggcaaagactcatcaacaacaactggggattccgacccaagagactcaacttcaagctctttaacattcaagtcaaagaggtcacgcagaatgacggtacgacgacgattgccaataaccttaccagcacggttcaggtgtttactgactcggagtaccagctcccgtacgtcctcggctcggcgcatcaaggatgcctcccgccgttcccagcagacgtcttcatggtgccacagtatggatacctcaccctgaacaacgagagtcaggcagtaggacgctcttcattttactgcctggagtactttccttctcagatgctgcgtaccggaaacaactttaccttcagctacacttttgaggacgttcctttccacagcagctacgctcacagccagagtctgggccgtctcatgaatcctctcatcgaccagtacctgtattacttgagcagaacaaacactccaagtggaaccaccacgcagtcaaggcttcagttttctcaggccggagcgagtgacattcgggaccagtctaggaactggcttcctggaccctgttaccgccagcagcgagtatcaaagacatctgcggataacaacaacagtgaatactcgtggactggagctaccaagtaccacctcaatggcagagactctctggtgaatccgggcccggccatggcaagccacaaggacgatgaagaaaagttttttcctcagagcggggttctcatctttgggaagcaaggctcagagaaaacaaatgtggacattgaaaaggtcatgattacagacgaagaggaaatcaggacaaccaatcccgtggctacggagcagtatggttctgtatctaccaacctccagagaggcaacagacaagcagctaccgcagatgtcaacacacaaggcgttcttccaggcatggtctggcaggacagagatgtgtaccttcaggggcccatctgggcaaagattccacacacggacggacattttcacccctctcccctcatgggtggattcggacttaaacaccctcctccacagattctcatcaagaacaccccggtacctgcgaatccttcgaccaccttcagtgcggcaaagtttgcttccttcatcacacagtactccacgggacaggtcagcgtggagatcgagtgggagctgcagaaggaaaacagcaaacgctggaatcccgaaattcagtacacttccaactacaacaagtctgttaatgtggactttactgtggacactaatggcgtgtattcagagcctcgccccattggcaccagatacctgactcgtaatctgtaa

SEQ ID NO: 4900 - protein, 735 aa, Adeno-associated virus
MAADGYLPDWLEDTLSEGIRQRWKLKPGPPPPEPAERHKDDSRGLVLPGYKYLGPFNGLDKGEPVNEADAAALEHDKAYDRQLDSGDNPYLKYNHADAEFQERLKEDTSFGGNLGRAVFQAKKRVLEPLGLVEEPVKTAPGKKRPVEHSPVEPDSSSGTGKAGQQPARKRLNFGQTGDADSVPDPQPLGQPPAAPSGLGTNTMATGSGAPMADNNEGADGVGNSSGNWHCDSTWMGDRVITTSTRTWALPTYNNHLYKQISSQSGASNDNHYFGYSTPWGYFDFNRFHCHFSPRDWQRLINNNWGFRPKRLNFKLFNIQVKEVTQNDGTTTIANNLTSTVQVFTDSEYQLPYVLGSAHQGCLPPFPADVFMVPQYGYLTLNNESQAVGRSSFYCLEYFPSQMLRTGNNFTFSYTFEDVPFHSSYAHSQSLGRLMNPLIDQYLYYLSRTNTPSGTTTQSRLQFSQAGASDIRDQSRNWLPGPCYRQQRVSKTSADNNNSEYSWTGATKYHLNGRDSLVNPGPAMASHKDDEEKFFPQSGVLIFGKQGSEKTNVDIEKVMITDEEEIRTTNPVATEQYGSVSTNLQRGNRQAATADVNTQGVLPGMVWQDRDVYLQGPIWAKIPHTDGHFHPSPLMGGFGLKHPPPQILIKNTPVPANPSTTFSAAKFASFITQYSTGQVSVEIEWELQKENSKRWNPEIQYTSNYNKSVNVDFTVDTNGVYSEPRPIGTRYLTRNL

SEQ ID NO: 4901 - DNA, 2208 bp, Adeno-associated virus
atggctgccgatggttatcttccagattggctcgaggacactctctctgaaggaataagacagcggtggaagctcaaacctggcccaccaccaccagagcccgcagagcggcataaggacgacagcaggggtcttgtgcttcctgggtacaagtacctcggacccttcaacggactcgacaagggagagccggtcaacgaggcagacgccgcggccctcgagcacgacaaagcctacgaccggcagctcgacagcggagacaacccgtacctcaagtacaaccacgccgacgcggagtttcaggagcgccttaaagaagatacgtcttttgggggcaacctcggacgagcagtcttccaggcgaaaaagagggtacttgaacctctgggcctggttgaggaacctgttaagacggctccgggaaaaaagaggccggtagagcactctcctgtggagccagactcctcctcgggaaccggaaaggcgggccagcagcctgcaagaaaaagattgaattttggtcagactggagacgcagactcagtacctgacccccagcctctcggacagccaccagcagccccctctggtctgggaactaatacgatggctacaggcagtggcgcaccaatggcagacaataacgagggcgccgacggagtgggtaattcctcgggaaattggcattgcgattccacatggatgggcgacagagtcatcaccaccagcacccgaacctgggccctgcccacctacaacaaccacctctacaaacaaatttccagccaatcaggagcctcgaacgacaatcactactttggctacagcaccccttgggggtattttgacttcaacagattccactgccacttttcaccacgtgactggcaaagactcatcaacaacaactggggattccgacccaagagactcaacttcaagctctttaacattcaagtcaaagaggtcacgcagaatgacggtacgacgacgattgccaataaccttaccagcacggttcaggtgtttactgactcggagtaccagctcccgtacgtcctcggctcggcgcatcaaggatgcctcccgccgttcccagcagacgtcttcatggtaccacagtatggatacctcaccctgaacaacgggagtcaggcagtaggacgctcttcattttactgcctggagtactttccttctcagatgctgcgtaccggaaacaactttaccttcagctacacttttgaggacgttcctttccacagcagctacgctcacagccagagtctgggccgtctcatgaatcctctcatcgaccagtacctgtattacttgagcagaacaaacactccaagtggaaccaccacgcagtcaaggcttcagttttctcaggccggagcgagtgacattcgggaccagtctaggaactggcttcctggaccctgttaccgccagcagcgagtatcaaagacatctgcggataacaacaacagtgaatactcgtggactggagctaccaagtaccacctcaatggcagagactctctggtgaatccgggcccggccatggcaagccacaaggacgatgaagaaaagttttttcctcagagcggggttctcatctttgggaagcaaggctcagagaaaacaaatgtggacattgaaaaggtcatgattacagacgaagaggaaatcaggacaaccaatcccgtggctacggagcagtatggttctgtatctaccaacctccagagaggcaacagacaagcagctaccgcagatgtcaacacacaaggcgttcttccaggcatggtctggcaggacagagatgtgtaccttcaggggcccatctgggcaaagattccacacacggacggacattttcacccctctcccctcatgggtggattcggacttaaacaccctcctccacagattctcatcaagaacaccccggtacctgcgaatccttcgaccaccttcagtgcggcaaagtttgcttccttcatcacacagtactccacgggacaggtcagcgtggagatcgagtgggagctgcagaaggaaaacagcaaacgctggaatcccgaaattcagtacacttccaactacaacaagtctgttaatgtggactttactgtggacactaatggcgtgtattcagagcctcgccccattggcaccagatacctgactcgtaatctgtaa

SEQ ID NO: 4902 - protein, 735 aa, Adeno-associated virus
MAADGYLPDWLEDTLSEGIRQRWKLKPGPPPPEPAERHKDDSRGLVLPGYKYLGPFNGLDKGEPVNEADAAALEHDKAYDRQLDSGDNPYLKYNHADAEFQERLKEDTSFGGNLGRAVFQAKKRVLEPLGLVEEPVKTAPGKKRPVEHSPVEPDSSSGTGKAGQQPARKRLNFGQTGDADSVPDPQPLGQPPAAPSGLGTNTMATGSGAPMADNNEGADGVGNSSGNWHCDSTWMGDRVITTSTRTWALPTYNNHLYKQISSQSGASNDNHYFGYSTPWGYFDFNRFHCHFSPRDWQRLINNNWGFRPKRLNFKLFNIQVKEVTQNDGTTTIANNLTSTVQVFTDSEYQLPYVLGSAHQGCLPPFPADVFMVPQYGYLTLNNGSQAVGRSSFYCLEYFPSQMLRTGNNFTFSYTFEDVPFHSSYAHSQSLGRLMNPLIDQYLYYLSRTNTPSGTTTQSRLQFSQAGASDIRDQSRNWLPGPCYRQQRVSKTSADNNNSEYSWTGATKYHLNGRDSLVNPGPAMASHKDDEEKFFPQSGVLIFGKQGSEKTNVDIEKVMITDEEEIRTTNPVATEQYGSVSTNLQRGNRQAATADVNTQGVLPGMVWQDRDVYLQGPIWAKIPHTDGHFHPSPLMGGFGLKHPPPQILIKNTPVPANPSTTFSAAKFASFITQYSTGQVSVEIEWELQKENSKRWNPEIQYTSNYNKSVNVDFTVDTNGVYSEPRPIGTRYLTRNL

SEQ ID NO: 4903 - DNA, 2208 bp, Adeno-associated virus
atggctgccgatggttatcttccagattggctcgaggacactctctctgaaggaataagacagcggtggaagctcaaacctggcccaccaccaccagagcccgcagagcggcataaggacgacagcaggggtcttgtgcttcctgggtacaagtacctcggacccttcaacggactcgacaagggagagccggtcaacgaggcagacgccgcggccctcgagcacgacaaagcctacgaccggcagctcgacagcggagacaacccgtacctcaagtacaaccacgccgacgcggagtttcaggagcgccttaaagaagatacgtcttttgggggcaacctcggacgagcagtcttccaggcgaaaaagagggtactcgaacctctgggcctggttgaggaacctgttaagacggctccgggaaaaaagaggccggtagagcactctcctgtggagccagactcctcctcgggaaccggaaaggcgggccagcagcctgcaagaaaaagattgaattttggtcagactggagacgcagactcagtacctgacccccagcctctcggacagccaccagcagccccctctggtctgggaactaatacgatggctacaggcagtggcgcaccaatggcagacaataacgagggcgccgacggagtgggtaattcctcgggaaattggcattgcgattccacatggatgggcgacagagtcatcaccaccagcacccgaacctgggccctgcccacctacaacaaccacctctacaaacaaatttccagccaatcaggagcctcgaacgacaatcactactttggctacagcaccccttgggggtattttgacttcaacagattccactgccacttttcaccacgtgactggcaaagactcatcaacaacaactggggattccgacccaagagactcaacttcaagctctttaacattcaagtcaaagaggtcacgcagaatgacggtacgacgacgattgccaataaccttaccagcacggttcaggtgtttactgactcggagtaccagctcccgtacgtcctcggctcggcgcatcaaggatgcctcccgccgttcccagcagacgtcttcatggtgccacagtatggatacctcaccctgaacaacgggagtcaggcagcaggacgctcttcattttactgcctggagtactttccttctcagatgctgcgtaccggaaacaactttaccttcagctacacttttgaggacgttcctttccacagcagctacgctcacagccagagtctgggccgtctcatgaatcctctcatcgaccagtacctgtattacttgagcagaacaaacactccaagtggaaccaccacgcagtcaaggcttcagttttctcaggccggagcgagtgacattcgggaccagtctaggaactggcttcctggaccctgttaccgccagcagcgagtatcaaagacatctgcggataacaacaacagtgaatactcgtggactggagctaccaagtaccacctcaatggcagagactctctggtgaatccgggcccggccatggcaagccacaaggacgatgaagaaaagttttttcctcagagcggggttctcatctttgggaagcaaggctcagagaaaacaaatgtggacattgaaaaggtcatgattacagacgaagaggaaatcaggacaaccaatcccgtggctacggagcagtatggttctgtatctaccaacctccagagaggcaacagacaagcagctaccgcagatgtcaacacacaaggcgttcttccaggcatggtctggcaggacagagatgtgtaccttcaggggcccatctgggcaaagattccacacacggacggacattttcacccctctcccctcatgggtggattcggacttaaacaccctcctccacagattctcatcaagaacaccccggtacctgcgaatccttcgaccaccttcagtgcggcaaagtttgcttccttcatcacacagtactccacgggacaggtcagcgtggagatcgagtgggagctgcagaaggaaaacagcaaacgctggaatcccgaaattcagtacacttccaactacaacaagtccgttaatgtggactttactgtggacactaatggcgtgtattcagagcctcgccccattggcaccagatacctgactcgtaatctgtaa

SEQ ID NO: 4904 - protein, 735 aa, Adeno-associated virus
MAADGYLPDWLEDTLSEGIRQRWKLKPGPPPPEPAERHKDDSRGLVLPGYKYLGPFNGLDKGEPVNEADAAALEHDKAYDRQLDSGDNPYLKYNHADAEFQERLKEDTSFGGNLGRAVFQAKKRVLEPLGLVEEPVKTAPGKKRPVEHSPVEPDSSSGTGKAGQQPARKRLNFGQTGDADSVPDPQPLGQPPAAPSGLGTNTMATGSGAPMADNNEGADGVGNSSGNWHCDSTWMGDRVITTSTRTWALPTYNNHLYKQISSQSGASNDNHYFGYSTPWGYFDFNRFHCHFSPRDWQRLINNNWGFRPKRLNFKLFNIQVKEVTQNDGTTTIANNLTSTVQVFTDSEYQLPYVLGSAHQGCLPPFPADVFMVPQYGYLTLNNGSQAAGRSSFYCLEYFPSQMLRTGNNFTFSYTFEDVPFHSSYAHSQSLGRLMNPLIDQYLYYLSRTNTPSGTTTQSRLQFSQAGASDIRDQSRNWLPGPCYRQQRVSKTSADNNNSEYSWTGATKYHLNGRDSLVNPGPAMASHKDDEEKFFPQSGVLIFGKQGSEKTNVDIEKVMITDEEEIRTTNPVATEQYGSVSTNLQRGNRQAATADVNTQGVLPGMVWQDRDVYLQGPIWAKIPHTDGHFHPSPLMGGFGLKHPPPQILIKNTPVPANPSTTFSAAKFASFITQYSTGQVSVEIEWELQKENSKRWNPEIQYTSNYNKSVNVDFTVDTNGVYSEPRPIGTRYLTRNL

SEQ ID NO: 4905 - protein, 738 aa, Adeno-associated virus; identical to SEQ ID NO: 4797

SEQ ID NO: 4906 - DNA, 2217 bp, Adeno-associated virus
atggctgctgacggttatcttccagattggctcgaggacaacctctctgagggcattcgcgagtggtgggacctgaaacctggagcccccaagcccaaggccaaccagcagaagcaggacgacggccggggtctggtgcttcctggctacaagtacctcggacccttcaacggactcgacaagggggagcccgtcaacgcggcggacgcagcggccctcgagcacgacaaggcctacgaccagcagctcaaagcgggtgacaatccgtacctgcggtataaccacgccgacgccgagtttcaggagcgtctgcaagaagatacgtcttttgggggcaacctcgggcgagcagtcttccaggccaagaagcgggttctcgaacctctcggtctggttgaggaagctgctaagacggctcctggaaagaagagaccggtagaaccgtcacctcagcgttcccccgactcctccacgggcatcggcaagaaaggccagcagcccgctaaaaagagactgaactttggtcagactggcgactcagagtcagtccccgaccctcaaccaatcggagaaccaccagcaggcccctctggtctgggatctggtacaatggctgcaggcggtggcgctccaatggcagacaataacgaaggcgccgacggagtgggtagttcctcaggaaattggcattgcgattccacatggctgggcgacagagtcatcaccaccagcacccgaacctgggccctgcccacctacaacaaccacctctacaagcaaatatccaatgggacatcgggaggaagcaccaacgacaacacctacttcggctacagcaccccctgggggtattttgacttcaacagattccactgccacttctcaccacgtgactggcagcgactcatcaacaacaactggggattccggccaaaaagactcagcttcaagctcttcaacatccaggtcaaggaggtcacgcagaatgaaggcaccaagaccatcgccaataaccttaccagcacgattcaggtatttacggactcggaataccagctgccgtacgtcctcggctccgcgcaccagggctgcctgcctccgttcccggcggacgtcttcatgattccccagtacggctaccttacactgaacaatggaagtcaagccgtaggccgttcctccttctactgcctggaatattttccatctcaaatgctgcgaactggaaacaattttgaattcagctacaccttcgaggacgtgcctttccacagcagctacgcacacagccagagcttggaccgactgatgaatcctctcatcgaccagtacctgtactacttatccagaactcagtccacaggaggaactcaaggtacccagcaattgttattttctcaagctgggcctgcaaacatgtcggctcaggctaagaactggctacctggaccttgctaccggcagcagcgagtctctacgacactgtcgcaaaacaacaacagcaactttgcttggactggtgccaccaaatatcacctgaacggaagagactctttggtaaatcccggtgtcgccatggcaacccacaaggacgacgaggaacgcttcttcccgtcgagtggagtcctgatgttcggaaaacagggtgctggaagagacaatgtggactacagcagcgttatgctaaccagcgaagaagaaattaaaaccactaaccccgtagccacagaacaatacggtgtggtggctgacaacttgcagcaaaccaatacagggcctattgtgggaaatgtcaacagccaaggagccttacctggcatggtctggcagaaccgagacgtgtacctgcagggtcccatctgggccaagattcctcacacggacggcaacttccacccttcaccgctaatgggaggatttggactgaagcacccacctcctcagatcctgatcaagaacacgccggtacctgcggatcctccaacaacgttcagccaggcgaaattggcttccttcattacgcagtacagcaccggacaggtcagcgtggaaatcgagtgggagctgcagaaggagaacagcaaacgctggaacccagagattcagtacacttcaaactactacaaatctacaaatgtggactttgctgtcaatacagagggaacttattctgagcctcgccccattggtactcgttacctcacccgtaatctgtaa

SEQ ID NO: 4907 - protein, 738 aa, Adeno-associated virus
MAADGYLPDWLEDNLSEGIREWWDLKPGAPKPKANQQKQDDGRGLVLPGYKYLGPFNGLDKGEPVNAADAAALEHDKAYDQQLKAGDNPYLRYNHADAEFQERLQEDTSFGGNLGRAVFQAKKRVLEPLGLVEEAAKTAPGKKRPVEPSPQRSPDSSTGIGKKGQQPAKKRLNFGQTGDSESVPDPQPIGEPPAGPSGLGSGTMAAGGGAPMADNNEGADGVGSSSGNWHCDSTWLGDRVITTSTRTWALPTYNNHLYKQISNGTSGGSTNDNTYFGYSTPWGYFDFNRFHCHFSPRDWQRLINNNWGFRPKRLSFKLFNIQVKEVTQNEGTKTIANNLTSTIQVFTDSEYQLPYVLGSAHQGCLPPFPADVFMIPQYGYLTLNNGSQAVGRSSFYCLEYFPSQMLRTGNNFEFSYTFEDVPFHSSYAHSQSLDRLMNPLIDQYLYYLSRTQSTGGTQGTQQLLFSQAGPANMSAQAKNWLPGPCYRQQRVSTTLSQNNNSNFAWTGATKYHLNGRDSLVNPGVAMATHKDDEERFFPSSGVLMFGKQGAGRDNVDYSSVMLTSEEEIKTTNPVATEQYGVVADNLQQTNTGPIVGNVNSQGALPGMVWQNRDVYLQGPIWAKIPHTDGNCHPSPLMGGFGLKHPPPQILIKNTPVPADPPTTFSQAKLASFITQYSTGQVSVEIEWELQKENSKRWNPEIQYTSNYYKSTNVDFAVNTEGTYSEPRPIGTRYLTRNL

SEQ ID NO: 4908 - protein, 738 aa, Adeno-associated virus
MAADGYLPDWLEDNLSEGIREWWDLKPGAPKPKANQQKQDDGRGLVLPGYKYLGPFNGLDKGEPVNAADAAALEHDKAYDQQLKAGDNPYLRYNHADAEFQERLQEDTSFGGNLGRAVFQAKKRVLEPLGLVEEGAKTAPGKKRPVEPSPQRSPDSSTGIGKKGQQPARKRLNFGRTGDSESVPDPQPIGEPPAAPSSVGSGTMAAGGGAPMADNNEGADGVGSSSGNWHCDSTWLGDRVITTSTRTWALPTYNNHLYKQISNGTSGGSTNDNTYFGYSTPWGYLDFNRFHCHFSPRDWQRLINNNWGFRPKRLSFKLFNIQVKEVTQNEGTKTIANNLASTIQVFTDSEYQPPYVLGSAHQGCLPPFPADVFMIPQYGYLTLNNGSQAVGRSSFYCLEYFPSQMLRTGNNFSFSYTFEDVPFHSSYAHSQSLDRLMNPLIDQYLYYLSRTQSTGGTAGTQQLLFSRAGPSNMSAQARNWLPGPCYRQQRVSTTLSQNNNSNFAWTGATKYHLNGRDSLVNPGVAMATNKDDEDRFFPSSGILMFGKQGAGKDNVDYSNVMLTSEEEIKTTNPVATEQYGVVADNLQQQNTAPTVGAVNSQGALPGMVWQNRDVYLQGPIWAKIPHTDGNFHPSPLMGGFGLKHPPPQILIKNTPVPADPPTAFNQAKLNSFIAQYSTGQVSVEIEWELQKENSKRWNPEIQYTSNYYKSTNADFAVNTEGVYSEPRPIGTRYLTRNL

SEQ ID NO: 4909 - DNA, 2217 bp, Adeno-associated virus
atggctgccgatggttatcttccagattggctcgaggacaacctctctgagggcattcgcgagtggtgggacctgaaacctggagccccgaaacccaaagccaaccagcaaaagcaggacgacggccggggtctggtgcttcctggctacaagtacctcggacccttcaacggactcgacaagggggagcccgtcaacgcggcggacgcagcggccctcgagcacgacaaggcctacgaccagcagctcaaagcgggtgacaatccgtacctgcggtataatcacgccgacgccgagtttcaggagcgtctgcaagaagatacgtcttttgggggcaacctcgggcgagcagtcttccaggccaagaagcgggttctcgaacctctcggtctggttgaggaaggcgctaagacggctcctggaaagaagagaccggtagagccgtcaccacagcgttcccccgactcctccacgggcatcggcaagaaaggccagcagcccgccagaaagagactcaatttcggtcggactggcgactcagagtcagtccccgaccctcaacctatcggagaacctccagcagcgccctctagtgtgggatctggtacaatggctgcaggcggtggcgcaccaatggcagacaataacgaaggtgccgacggagtgggtagttcctcgggaaattggcattgcgattccacatggctgggcgacagagttatcaccaccagcacccgaacctgggccctgcccacctacaacaaccacctctacaagcaaatctccaacgggacctcgggaggcagcaccaacgacaacacctactttggctacagcaccccctgggggtatcttgactttaacagattccactgccacttctcaccacgtgactggcagcgactcatcaacaacaactggggattccggcccaagagactcagcttcaagctcttcaacatccaggtcaaagaggtcacgcagaatgaaggcaccaagaccatcgccaataacctcgccagcaccatccaggtgtttacggactcggaataccagccgccgtacgtcctcggctctgcccaccagggctgcctgcctccgttcccggcggacgtcttcatgattcctcagtacggctacctgactctcaacaacggtagtcaggccgtgggacgttcctccttctactgcctggagtacttcccctctcagatgctgagaacgggcaacaacttttccttcagctacactttcgaggacgtgcctttccacagcagctacgcgcacagccagagtttggacaggctgatgaatcctctcatcgaccagtacctgtactacctgtcaagaacccagtctacgggaggcacagcgggaacccagcagttgctgttttctcgggccgggcctagcaacatgtcggctcaggccagaaactggctgcctggaccctgctacagacagcagcgcgtctccacgacactgtcgcaaaacaacaacagcaactttgcctggactggtgccaccaagtatcatctgaacggcagagactctctggtgaatccgggcgtcgccatggcaaccaacaaggacgacgaggaccgcttcttcccatccagcggcatcctcatgtttggcaagcagggagctggaaaagacaacgtggactatagcaacgtgatgctaaccagcgaggaagaaatcaagaccaccaaccccgtggccacagaacagtatggcgtggtggctgataacctacagcagcaaaacaccgctcctactgtgggggccgtcaacagccagggagccttacctggcatggtctggcagaaccgggacgtgtacctgcagggtcctatttgggccaagattcctcacacagatggcaactttcacccgtctcctttaatgggcggctttggacttaaacatccgcctcctcagatcctcatcaaaaacactcctgttcctgcggatcctccaacagcgttcaaccaggccaagctgaattctttcatcgcgcagtacagcaccggacaagtcagcgtggagatcgagtgggagctgcagaaggagaacagcaagcgctggaacccagagattcagtatacttccaactactacaaatctacaaatgcggactttgctgttaatactgagggtgtttactctgagcctcgccccattggcactcgttacctcacccgtaatctgtaa

SEQ ID NO: 4910 - DNA, 2208 bp, Adeno-associated virus
atggctgccgatggttatcttccagattggctcgaggacactctctctgaaggaataagacagtggtggaagctcaaacctggcccaccaccaccaaagcccgcagagcggcataaggacgacagcaggggtcttgtgcttcctgggtacaagtacctcggacccttcaacggactcgacaagggggagccggtcaacgaggcagacgccgcggccctcgagcacgacaaggcctacgaccggcagctcgacagcggagacaacccgtacctcaagtacaaccacgccgacgcagagtttcaggagcgccttaaagaagatacgtcttttgggggcaacctcggacgagcagtcttccaggcgaaaaagagggttcttgaacctctgggcctggttgaggagcctgttaagacggctccgggaaaaaagaggccggtagagcactctcctgtggagccagactcctcctcgggaaccggaaaagcgggccagcagcctgcaagaaaaagattaaattttggtcagactggagacgcagactccgtacctgacccccagcctctcggacagccaccagcagccccctctggtctgggatctactacaatggctacaggcagtggcgcaccaatggcagacaataacgagggtgccgatggagtgggtaattcctcaggaaattggcattgcgattcccaatggctgggcgacagagtcatcaccaccagcacccgaacctgggccctgcccacatacaacaaccacctctacaagcaaatctccagccaatcaggagccagcaacgacaaccactactttggctacagcaccccctgggggtattttgacttcaacagattccactgccacttttcaccacgtgactggcaaagactcgtcaacaacaaccggggattccggcccaaaagactcaacttcaagctctttaatattcaagtcaaagaggtcacgcagaatgacggtacgacgacgattgccaataaccttaccagcacggttcaggtgtttactgactcggagtaccagctcccgtacgtcctgggctcggcgcatcaaggatgcctcccgccgtttccagcggacgtcttcatggtcccacagtatggatacctcaccctgaacaacgggagtcaggcggtaggacgctcttccttttactgcctggagtactttccttctcagatgctgcgtactggaaacaactttcagttcagctacacttttgaagacgtgcctttccacagcagctacgctcacagccagagtctggatcggctgatgaatcctctgatcgaccagtacctgtattatctgaacaagacacaaacaaatagtggaactcttcagcagtctcggctactgtttagccaagctggaccaaccaacatgtctcttcaagctaaaaactggctgcctggaccttgctacagacagcagcgtctgtcaaaacaggcaaacgacaacaacaacagcaactttccctggactgcagctacaaagtatcatctaaatggccgggactcgttggttaatccaggaccagctatggccagtcacaaggatgacgaagaaaagtttttccccatgcatggaaccctgatatttggtaaacaaggaacaaatgccaacgacgcggatttggaaaatgtcatgattacagatgaagaagaaatcagggccaccaatcccgtggctacggagcagtacgggactgtgtcaaataatttgcaaaactcaaacactggtccaactactggaactgtcaatcaccaaggagcgttacctggtatggtgtggcaggatcgagacgtgtacctgcagggacccatttgggccaagattcctcacaccgatggacactttcatccttctccactgatgggaggttttggactcaaacacccgcctcctcagatcatgatcaaaaacactcccgttccagccaatcctcccacaaacttcagttctgccaagtttgcttctttcatcacacagtattccacgggacaggtcagcgtggagatcgagtgggagctgcagaaggagaacagcaaacgctggaatcccgaaattcagtacacttccaactacaacaagtctgttaatgtggactttactgtggacactaatggtgtgtattcagagcctcgccccattggcaccagatacctgactcgtaatctgtaa

SEQ ID NO: 4911 - protein, 735 aa, Adeno-associated virus
MAADGYLPDWLEDTLSEGIRQWWKLKPGPPPPKPAERHKDDSRGLVLPGYKYLGPFNGLDKGEPVNEADAAALEHDKAYDRQLDSGDNPYLKYNHADAEFQERLKEDTSFGGNLGRAVFQAKKRVLEPLGLVEEPVKTAPGKKRPVEHSPVEPDSSSGTGKAGQQPARKRLNFGQTGDADSVPDPQPLGQPPAAPSGLGSTTMATGSGAPMADNNEGADGVGNSSGNWHCDSQWLGDRVITTSTRTWALPTYNNHLYKQISSQSGASNDNHYFGYSTPWGYFDFNRFHCHFSPRDWQRLVNNNRGFRPKRLNFKLFNIQVKEVTQNDGTTTIANNLTSTVQVFTDSEYQLPYVLGSAHQGCLPPFPADVFMVPQYGYLTLNNGSQAVGRSSFYCLEYFPSQMLRTGNNFQFSYTFEDVPFHSSYAHSQSLDRLMNPLIDQYLYYLNKTQTNSGTLQQSRLLFSQAGPTNMSLQAKNWLPGPCYRQQRLSKQANDNNNSNFPWTAATKYHLNGRDSLVNPGPAMASHKDDEEKFFPMHGTLIFGKQGTNANDADLENVMITDEEEIRATNPVATEQYGTVSNNLQNSNTGPTTGTVNHQGALPGMVWQDRDVYLQGPIWAKIPHTDGHFHPSPLMGGFGLKHPPPQIMIKNTPVPANPPTNFSSAKFASFITQYSTGQVSVEIEWELQKENSKRWNPEIQYTSNYNKSVNVDFTVDTNGVYSEPRPIGTRYLTRNL

SEQ ID NO: 4912 - protein, 738 aa, Adeno-associated virus
MAADGYLPDWLEDNLSEGIREWWDLKPGAPKPKANQQKQDDGRGLVLPGYKYLGPFNGLDKGEPVNAADAAALEHDKAYDQQLKAGDNPYLRYNHADAEFQERLQEDTSFGGNLGRAVFQAKKRVLEPLGLVEEAAKTAPGKKRPVEPSPQRSPDSSTGIGKKGQQPAKKRLSFGQTGDSESVPDPQPIGEPPAGPSGLGSGTMAAGGGAPMADNNEGADGVGSSSGNWHCDSTWLGDRVITTSTRTWALPTYNNHLYKQISNGTSGGSTNDNTYFGYSTPWGYFDFNRFHCHFSPRDWQRLINNNWGFRPKRLSFKLFNIQVKEVTQNEGTKTIANNLTSTIQVFTDSEYQLPYVLGSAHQGCLPPFPADVFMIPQYGYLTLNNGSQAVGRSSFYCLEYFPSQMLRTGNNSEFSYTFEDVPFHSSYAHSQSLDRLMNPLIDQYLYYLSRTQSTGGTQGTQQLLFSQAGPANMSAQAKNWLPGPCYRQQRVSTTLSQNNNSNFAWTGATKYHLNGRDSLVNPGVAMATHKDDEERFFPSSGVLMFGKQGAGRDNVDYSSVMLTSEEEIKTTNPVATEQYGVVADNLQQTNTGPIVGNVNSQGALPGMVWQNRDVYLQGPIWAKIPHTDGNFHPSPLMGGFGLKHPPPQILIKNTPVPADPPTTFSQAKLASFITQYSTGQVSVEIEWELQKENSKRWNPEIQYTSNYYKSTNVDFAVNTEGTYSEPRPIGTRYLTRNL

SEQ ID NO: 4913 - DNA, 2217 bp, Adeno-associated virus
atggctgctgacggttatcttccagattggctcgaggacaacctctctgagggcattcgcgagtggtgggacctgaaacctggagcccccaagcccaaggccaaccagcagaagcaggacgacggccggggtctggtgcttcctggctacaagtacctcggacccttcaacggactcgacaagggggagcccgtcaacgcggcggacgcagcggccctcgagcacgacaaggcctacgaccagcagctcaaagcgggtgacaatccgtacctgcggtataaccacgccgacgccgagtttcaggagcgtctgcaagaagatacgtcttttgggggcaacctcgggcgagcagtcttccaggccaagaagcgggttctcgaacctctcggtctggttgaggaagctgctaagacggctcctggaaagaagagaccggtagaaccgtcacctcagcgttcccccgactcctccacgggcatcggcaagaaaggccagcagcccgctaaaaagagactgagctttggtcagactggcgactcagagtcagtccccgaccctcaaccaatcggagaaccaccagcaggcccctctggtctgggatctggtacaatggctgcaggcggtggcgctccaatggcagacaataacgaaggcgccgacggagtgggtagttcctcaggaaattggcattgcgattccacatggctgggcgacagagtcatcaccaccagcacccgaacctgggccctgcccacctacaacaaccacctctacaagcaaatatccaatgggacatcgggaggaagcaccaacgacaacacctacttcggctacagcaccccctgggggtattttgacttcaacagattccactgccacttctcaccacgtgactggcagcgactcatcaacaacaactggggattccggccaaaaagactcagcttcaagctcttcaacatccaggtcaaggaggtcacgcagaatgaaggcaccaagaccatcgccaataaccttaccagcacgattcaggtatttacggactcggaataccagctgccgtacgtcctcggctccgcgcaccagggctgcctgcctccgttcccggcggacgtcttcatgattccccagtacggctaccttacactgaacaatggaagtcaagccgtaggccgttcctccttctactgcctggaatattttccatctcaaatgctgcgaactggaaacaattctgaattcagctacaccttcgaggacgtgcctttccacagcagctacgcacacagccagagcttggaccgactgatgaatcctctcatcgaccagtacctgtactacttatccagaactcagtccacaggaggaactcaaggtacccagcaattgttattttctcaagctgggcctgcaaacatgtcggctcaggctaagaactggctacctggaccttgctaccggcagcagcgagtctctacgacactgtcgcaaaacaacaacagcaactttgcttggactggtgccaccaaatatcacctgaacggaagagactctttggtaaatcccggtgtcgccatggcaacccacaaggacgacgaggaacgcttcttcccgtcgagtggagtcctgatgtttggaaaacagggtgctggaagagacaatgtggactacagcagcgttatgctaaccagcgaagaagaaattaaaaccactaaccctgtagccacagaacaatacggtgtggtggctgacaacttgcagcaaaccaatacagggcctattgtgggaaatgtcaacagccaaggagccttacctggcatggtctggcagaaccgagacgtgtacctgcagggtcccatctgggccaagattcctcacacggacggcaacttccacccttcaccgctaatgggaggatttggactgaagcacccacctcctcagatcctgatcaagaacacgccggtacctgcggatcctccaacaacgttcagccaggcgaaattggcttccttcattacgcagtacagcaccggacaggtcagcgtggaaatcgagtgggagctgcagaaggagaacagcaaacgctggaacccagagattcagtacacttcaaactactacaaatctacaaatgtggactttgctgtcaatacagagggaacttattctgagcctcgccccattggtactcgttacctcacccgtaatctgtaa

SEQ ID NO: 4914 - protein, 738 aa, Adeno-associated virus
MAADGYLPDWLEDNLSEGIREWWDLKPGAPKPKANQQKQDDGRGLVLPGYKYLGPFNGLDKGEPVNAADAAALEHDKAYDQQLKAGDNPYLRYNHADAEFQERLQEDTSFGGNLGRAVFQAKKRVLEPLGPVEEAAKTAPGKKRPVEPPPQRSPDSSTGIGKKGQQPAKKRLNFGQTGDSESVPDPQPIGEPPAGPSGLGSGTMAAGGGAPMADNNEGADGVGSSSGNWHCDSTWLGDRVITTSTRTWALPTYNNHLYKQISNGTSGGSTNDNTYFGYSTPWGYFDFNRFHCHFSPRDWQRLINNNWGFRPKRLSFKLFNIQVKEVTQNEGTKTVANNLTSTIQVFTDSEYQLPYVLGSAHQGCLPPFPADVFMIPQYGYLTLNNGSQAVGRSSFYCLEYFPSQMLRTGNNFEFSYTFEDVPFHSSYAHSQSLDRLMNPLIDQYLYYLSRTQSTGGTQGTQQLLFSQAGPANMSAQAKNWLPGPCYRQQRVSTTLSQNNNSNFAWTGATKYHLNGRDSLVNPGVAMATHKDDEERFFPSSGVLMFGKQGAGRDNVDYSSVMLTSEEEIKTTNPVATEQYGVVADNLQQTNTGPIVGNVNSQGALPGMVWQNRDVYLQGPIWAKIPHTDGNFHPSPLMGGFGLKHPPPQILIKNTPVPADPPTTFSQAKLASFITQYSTGQVSVEIEWELQKENSKRWNPEIQYTSNYYKSTNVDFAVNTEGTYSEPRPIGTRYLTRNL

SEQ ID NO: 4915 - DNA, 2217 bp, Adeno-associated virus
atggctgctgacggttatcttccagattggctcgaggacaacctctctgagggcattcgcgagtggtgggacctgaaacctggagcccccaagcccaaggccaaccagcagaagcaggacgacggccggggtctggtgcttcctggctacaagtacctcggacccttcaacggactcgacaagggggagcccgtcaacgcggcggacgcagcggccctcgagcacgacaaggcctacgaccagcagctcaaagcgggtgacaatccgtacctgcggtataaccacgccgacgccgagtttcaggagcgtctacaagaagatacgtcttttgggggcaacctcgggcgagcagtcttccaggccaagaagcgggttctcgaacctctcggtccggttgaggaagctgctaagacggctcctggaaagaagagaccggtagaaccgccacctcagcgttcccccgactcctccacgggcatcggcaagaaaggccagcagcccgctaaaaagagactgaactttggtcagactggcgactcagagtcagtccccgaccctcaaccaatcggagaaccaccagcaggcccctctggtctgggatctggtacaatggctgcaggcggtggcgctccaatggcagacaataacgaaggcgccgacggagtgggtagttcctcaggaaattggcattgcgattccacatggctgggcgacagagtcatcaccaccagcacccgaacctgggccctgcccacctacaacaaccacctctacaagcaaatatccaatgggacatcgggaggaagcaccaacgacaacacctacttcggctacagcaccccctgggggtattttgacttcaacagattccactgccacttctcaccacgtgactggcagcgactcatcaacaacaactggggattccggccaaaaagactcagcttcaagctcttcaacatccaggtcaaggaggtcacgcagaatgaaggcaccaagaccgtcgccaataaccttaccagcacgattcaggtatttacggactcggaataccagctgccgtacgtcctcggctccgcgcaccagggctgcctgcctccgttcccggcggacgtcttcatgattccccagtacggctaccttacactgaacaatggaagtcaagccgtaggccgttcctccttctactgcctggaatattttccatctcaaatgctgcgaactggaaacaattttgaattcagctacaccttcgaggacgtgcctttccacagcagctacgcacacagccagagcttggaccgactgatgaatcctctcatcgaccagtacctgtactacttatccagaactcagtccacaggaggaactcaaggtacccagcaattgttattttctcaagctgggcctgcaaacatgtcggctcaggctaagaactggctacctggaccttgctaccggcagcagcgagtctctacgacactgtcgcaaaacaacaacagcaactttgcttggactggtgccaccaaatatcacctgaacggaagagactctttggtaaatcccggtgtcgccatggcaacccacaaggacgacgaggaacgcttcttcccgtcgagtggagtcctgatgtttggaaaacagggtgctggaagagacaatgtggactacagcagcgttatgctaaccagcgaagaagaaattaaaaccactaaccctgtagccacagaacaatacggtgtggtggctgacaacttgcagcaaaccaatacagggcctattgtgggaaatgtcaacagccaaggagccttacctggcatggtctggcagaaccgagacgtgtacctgcagggtcccatctgggccaagattcctcacacggacggcaacttccacccttcaccgctaatgggaggatttggactgaagcacccacctcctcagatcctgatcaagaacacgccggtacctgcggatcctccaacaacgttcagccaggcgaaattggcttccttcattacgcagtacagcaccggacaggtcagcgtggaaatcgagtgggagctgcagaaggagaacagcaaacgttggaacccagagattcagtacacttcaaactactacaaatctacaaatgtggactttgctgtcaatacagagggaacttattctgagcctcgccccattggtactcgttacctcacccgtaatctgtaa

SEQ ID NO: 4916 - protein, 738 aa, Adeno-associated virus
MAADGYLPDWLEDNLSEGIREWWDLKPGAPKPKANQQKQDDGRGLVLPGYKYLGPFNGLDKGEPVNAADAAALEHDKAYDQQLKAGDNPYLRYNHADAEFQERLQEDTSFGGNLGRAVFQAKKRVLEPLGLVEEAAKTAPGKKRPVEPSPQRSPDSSTGIGKKGQQPAKKRLNFGQTGDSESVPDPQPIGEPPAGPSGLGSGTMAAGGGAPMADNNEGADGVGSSSGNWHCDSTWLGDRVITTSTRTWALPTYNNHLYKQISNGTSGGSTNDNTYFGYSTPWGYFDFNRFHCHFSPRDWQRLINNNWGFRPKRLSFKLFNIQVKEVTQNEGTKTIANNLTSTIQVFTDSEYQLPYVLGSAHQGCLPPFPADVFMIPQYGYLTLNNGSQAVGRSSFYCLEYFPSQMLRTGNNFEFSYTFEDVPFHSSYAHSQSLDRLMNPLIDQYLYYLSRTQSTGGTQGTQQLLFSQAGPANMSAQAKNWLPGPCYRQQRVSTTLSQSNNSNFAWTGATKYHLNGRDSLVNPGVAMATHKDDEERFFPSSGVLMFGKQGAGRDNVDYSSVMLTSEEEIKTTNPVATEQYGVVADNLQQTNTGPIVGNVNSQGALPGMVWQNRDVYLQGPIWAKIPHTDGNFHPSPLMGGLGLKHPPPQILIKNTPVPADPPTTFSQAKLASFITQYSTGQVSVEIEWELQKENSKRWNPEIQYTSNYYKSTNVDFAVNTEGTYSEPRPIGTRYLTRNL

SEQ ID NO: 4917 - DNA, 2217 bp, Adeno-associated virus
atggctgctgacggttatcttccagattggctcgaggacaacctctctgagggcattcgcgagtggtgggacctgaaacctggagcccccaagcccaaggccaaccagcagaagcaggacgacggccggggtctggtgcttcctggctacaagtacctcggacccttcaacggactcgacaagggggagcccgtcaacgcggcggacgcagcggccctcgagcacgacaaggcctacgaccagcagctcaaagcgggtgacaatccgtacctgcggtataaccacgccgacgccgagtttcaggagcgtctgcaagaagatacgtcttttgggggcaacctcgggcgagcagtcttccaggccaagaagcgggttctcgaacctctcggtctggttgaggaagcggctaagacggctcctggaaagaagagaccggtagaaccgtcacctcagcgttcccccgactcctccacgggcatcggcaagaaaggccagcagcccgctaaaaagagactgaactttggtcagactggcgactcagagtcagtccccgaccctcaaccaatcggagaaccaccagcaggcccctctggtctgggatctggtacaatggctgcaggcggtggcgctccaatggcagacaataacgaaggcgccgacggagtgggtagttcctcaggaaattggcattgcgattccacatggctgggcgacagagtcatcaccaccagcacccgaacctgggccctgcccacctacaacaaccacctctacaagcaaatatccaatgggacatcgggaggaagcaccaacgacaacacctacttcggctacagcaccccctgggggtattttgacttcaacagattccactgccacttctcaccacgtgactggcagcgactcatcaacaacaactggggattccggccaaaaagactcagcttcaagctcttcaacatccaggtcaaggaggtcacgcagaatgaaggcaccaagaccatcgccaataaccttaccagcacgattcaggtatttacggactcggaataccagctgccgtacgtcctcggctccgcgcaccagggctgcctgcctccgttcccggcggacgtcttcatgattccccagtacggctaccttacactgaacaatggaagtcaagccgtaggccgttcctccttctactgcctggaatattttccatctcaaatgctgcgaactggaaacaattttgaattcagctacaccttcgaggacgtgcctttccacagcagctacgcacacagccagagcttggaccgactgatgaatcctctcatcgaccagtacctgtactacttatccagaactcagtccacaggaggaactcaaggtacccagcaattgttattttctcaagctgggcctgcaaacatgtcggctcaggctaagaactggctacctggaccttgctaccggcagcagcgagtctctacgacactgtcgcaaagcaacaacagcaactttgcttggactggtgccaccaaatatcacctgaacggaagagactctttggtaaatcccggtgtcgccatggcaacccacaaggacgacgaggaacgcttcttcccgtcgagtggagtcctgatgtttggaaaacagggtgctggaagagacaatgtggactacagcagcgttatgctaaccagcgaagaagaaattaaaaccactaaccctgtagccacagaacaatacggtgtggtggctgacaacttgcagcaaaccaatacagggcctattgtgggaaatgtcaacagccaaggagccttacctggcatggtctggcagaaccgagacgtgtacctgcagggtcccatctgggccaagattcctcacacggacggcaacttccacccttcaccgctaatgggaggacttggactgaagcacccacctcctcagatcctgatcaagaacacgccggtacctgcggatcctccaacaacgttcagccaggcgaaattggcttccttcattacgcagtacagcaccggacaggtcagcgtggaaatcgagtgggagctgcagaaggagaacagcaaacgctggaacccagagattcagtacacttcaaactactacaaatctacaaatgtggactttgctgtcaatacagagggaacttattctgagcctcgccccattggtactcgttacctcacccgtaatctgtaa

SEQ ID NO: 4918 - protein, 737 aa, Adeno-associated virus
MAADGYLPDWLEDNLSEGIREWWDLKPGAPKPKANQQKQDDGRGLVLPGYKYLGPFNGLDKGEPVNAADAAALEHDKAYDQQLKAGDNPYPRYNHADAEFQERLQEDTPFGGNLGRAVFQAKKRVLEPLGLVEEAAKTAPGKKRPVEPSPQRSPDSSTGIGKKGQQPAKKRLNFGQTGDSESVPDPQPIGEPPAGPSGLGSGTMAAGGGAPMADNNEGADGVGNASGNWHCDSTWLGDRVITTSTRTWALPTYNNHLYKQISSASTGASNDNHYFGYSTPWGYFDFNRFHCHFSPRDWQRLINNNWGFRPKRLNFKLFNIQVKEVTTNDGVTTIANNLTSTVQVFSDSEYQLPYVLGSAHQGCLPPFPADVFMIPQYGYLTLNNGSQAVGRSSFYCLEYFPSQMLRTGNNFTFSYTFEEVPLHSSYAHSQSLDRLMNPLIVQYLYYLNRTQNQSGSAQNKDLLFSRGSPAGMSVQPKNWLPGPCYRQQRVSKTKTDNNNSNFTWTGASKYNLNGRESIINPGTAMASHKDDEDKFFPMSGVMIFGKESAGASNTALDNVMITDEEEIKATNPVATERFGTVAVNFQSSSTDPATGDVHAMGALPGMVWQDRDVYLQGPIWAKIPHTDGHFHPSPLMGGFGLKNPPPQILIKNTPVPANPPAEFSATKFASFITQYSTGQVSVEIEWELQKENSKRWNPEVQYTSNYAKSASVDFTVDNNGLYTEPRPIGTRYLTRPL

SEQ ID NO: 4919 - protein, 737 aa, Adeno-associated virus
MAADGYLPDWLEDNLSEGIREWWDLKPGAPKPKANQQKQDDGRGLVLPGYKYLGPFNGLDKGEPVNAADAAALEHDKAYDQQLKAGDNPYPRYNHADAEFQERLQEDTSFGGNLGRAVFQAKKRVLEPLGLVEEAAKTAPGKKRPVEPSPQRSPDSSTGIGKKGQQPAKKRLNFGQTGDSESVPDPQPIGEPPAGPSGLGSGTMAAGGGAPMADNNEGADGVGNASGNWHCDSTWLGDRVITTSTRTWALPTYNNHLYKQISSASTGASNDNHYFGYSTPWGYFDFNRFHCHFSPRDWQRLINNNWGFRPKRLNFKLFNIQVKEVTTNDGVTTIANNLTSTVQVFSDSEYQLPYVLGSAHQGCLPPFPADVFMIPQYGYLTLNNGSQAVGRSSFYCLEYFPSQMLRTGNNFTFSYTFEEVPLHSSYAHSQSLDRLMNPLIDQYLYYLNRTQNQSGSAQNKDLLFSRGSPAGMSVQPKNWLPGPCYRQQRVSKTKTDNNNSNFTWTGASKYNLNGRESIINPGTAMASHKDDEDKFFPMSGVMIFGKESAGASNTALDNVMITDEEEIKATNPVATERFGTVAVNFQSSSTDPATGDVHAMGALPGMVWQDRDVYLQGPIWAKIPHTDGHFHPSPLMGGFGLKNPPPQILIKNTPVPANPPAEFSATKFASFITQYSTGQVSVEIEWELQKENSKRWNPEVQYTSNYAKSASVDFTVDNNGLYTEPRPIGTRYLTRPL

SEQ ID NO: 4920 - DNA, 2214 bp, Adeno-associated virus
atggctgctgacggttatcttccagattggctcgaggacaacctctctgagggcattcgcgagtggtgggacctgaaacctggagcccccaagcccaaggccaaccagcagaagcaggacgacggccggggtctggtgcttcctggctacaagtacctcggacccttcaacggactcgacaagggggagcccgtcaacgcggcggacgcagcggccctcgagcacgacaaggcctacgaccagcagctcaaagcgggtgacaatccgtacccgcggtataaccacgccgacgccgagtttcaggagcgtctgcaagaagatacgccttttgggggcaacctcgggcgagcagtcttccaggccaagaagcgggttctcgaacctctcggtctggttgaggaagctgctaagacggctcctggaaagaagagaccggtagaaccgtcacctcagcgttcccccgactcctccacgggcatcggcaagaaaggccagcagcccgctaaaaagagactgaactttggtcagactggcgactcagagtcagtccccgaccctcaaccaatcggagaaccaccagcaggcccctctggtctgggatctggtacaatggctgcaggcggtggcgctccaatggcagacaataacgaaggcgccgacggagtgggtaatgcctcaggaaattggcattgcgattccacatggctgggcgacagagtcatcaccaccagcacccgcacctgggccttgcccacctacaataaccacctctacaagcaaatctccagtgcttcaacgggggccagcaacgacaaccactacttcggctacagcaccccctgggggtattttgatttcaacagattccactgccacttttcaccacgtgactggcagcgactcatcaacaacaattggggattccggcccaagagactcaacttcaaactcttcaacatccaagtcaaggaggtcacgacgaatgatggcgtcacaaccatcgctaataaccttaccagcacggttcaagtcttctcggactcggagtaccagcttccgtacgtcctcggctctgcgcaccagggctgcctccctccgttcccggcggacgtgttcatgattccgcaatacggctacctgacgctcaacaatggcagccaagccgtgggacgttcatccttttactgcctggaatatttcccttctcagatgctgagaacgggcaacaactttaccttcagctacacctttgaggaagtgcctctccacagcagctacgcgcacagccagagcctggaccggctgatgaatcctctcatcgtccaatacctgtattacctgaacagaactcaaaatcagtccggaagtgcccaaaacaaggacttgctgttcagccgtgggtctccagctggcatgtctgttcagcccaaaaactggctacctggaccctgttatcggcagcagcgcgtttctaaaacaaaaacagacaacaacaacagcaattttacctggactggtgcttcaaaatataacctcaatgggcgtgaatccatcatcaaccctggcactgctatggcctcacacaaagacgacgaagacaagttctttcccatgagcggtgtcatgatttttggaaaagagagcgccggagcttcaaacactgcattggacaatgtcatgattacagacgaagaggaaattaaagccactaaccctgtggccaccgaaagatttgggaccgtggcagtcaatttccagagcagcagcacagaccctgcgaccggagatgtgcatgctatgggagcattacctggcatggtgtggcaagatagagacgtgtacctgcagggtcccatttgggccaaaattcctcacacagatggacactttcacccgtctcctcttatgggcggctttggactcaagaacccgcctcctcagatcctcatcaaaaacacgcctgttcctgcgaatcctccggcggagttttcagctacaaagtttgcttcattcatcacccaatactccacaggacaagtgagtgtggaaattgaatgggagctgcagaaagaaaacagcaagcgctggaatcccgaagtgcagtacacatccaattatgcaaaatctgccagcgttgattttactgtggacaacaatggactttatactgagcctcgccccattggcacccgttaccttacccgtcccctgtaa

SEQ ID NO: 4921 - protein, 736 aa, Adeno-associated virus
MAADGYLPDWLEDTLSEGIRQWWKLRPGPPPPKPAERHKDDSRGLVLPGYKYLGPFNGLDKGEPVNEADAAALEHDKAYDRQLDSGDNPYLKYNHADAEFQERLKEDTSFGGNLGRAVFQAKKRVLEPLGLVEEGAETAPGKKRPVEQSPQGPDSSSGIGKTGQQPAKKRLNFGQTGDSESVPDPQPLGEPPATPAAVGPTTMASGGGAPMADNNEGADGVGNASGNWHCDSTWLGDRVITTSTRTWALPTYNNHLYKQISSASTGASNDNHYFGYSTPWGYFDFNRFHCHFSPRDWQRLINNNWGFRPKRLNFKLFNIQVKEVTTNDGVTTIANNLTSTVQVFSDSEYQLPYVLGSAHQGCLPPFPADVFMIPQYGYLTLNNGSQAVGRSSFYCLEYFPSQMLRTGNNFTFSYTFEEVPFHSSYAHSQSLDRLMNPLIDQYLYYPNRTQNQSGSAQNKDLLFSRGSPAGMSVQPKNWLPGPCYRQQRVSKTKTDNNNSNFTWTGASKYNLNGRESIINPGTAMASHKDDEDKFFPMSGVMIFGKESAGASNTALDNVMITDEEEIKATNPVATERFGTVAVNFQSSSTDPATGDVHAMGALPGMVWQGRDVYLQGPIWAKIPHTDGHFHPSPLMGGFGLKNPPPQILIKNTPVPANPPAEFSATKFASFITQYSTGQVSVEIEWELQKENSKRWNPEVQYTSNYAKSANVDFTVDNNGLYTEPRPIGTRYLTRPL

SEQ ID NO: 4922 - DNA, 2211 bp, Adeno-associated virus
atggctgccgatggttatcttccagattggctcgaggacactctctctgaaggaataagacagtggtggaagctcagacctggcccaccaccaccaaagcccgcagagcggcataaggacgacagcaggggtcttgtgcttcctgggtacaagtacctcggacccttcaacggactcgacaagggagagccggtcaacgaggcagacgccgcggccctcgagcacgacaaagcctacgaccggcagctcgacagcggagacaacccgtacctcaagtacaaccacgccgacgcggagtttcaggagcgccttaaagaagatacgtcttttgggggcaacctcgggcgagcagtcttccaggccaagaagcgggttctcgaacctctcggtctggttgaggaaggcgctgagacggctcctggaaagaaacgtccggtagagcagtcgccacaagggccagactcctcctcgggcatcggcaagacaggccagcagcccgctaaaaagagactcaattttggtcagactggcgactcagagtcagtccccgatccacaacctctcggagaacctccagcaacccccgctgctgtgggacctactacaatggcttcaggcggtggcgcaccaatggcagacaataacgaaggcgccgacggagtgggtaatgcctcaggaaattggcattgcgattccacatggctgggcgacagagtcatcaccaccagcacccgcacctgggccttgcccacctacaataaccacctctacaagcaaatctccagtgcttcaacgggggccagcaacgacaaccactacttcggctacagcaccccctgggggtattttgatttcaacagattccactgccacttttcaccacgtgactggcagcgactcatcaacaacaattggggattccggcccaagagactcaacttcaaactcttcaacatccaagtcaaggaggtcacgacgaatgatggcgtcacaaccatcgctaataaccttaccagcacggttcaagtcttctcggactcggagtaccagcttccgtacgtcctcggctctgcgcaccagggctgcctccctccgttcccggcggacgtgttcatgattccgcaatacggctacctgacgctcaacaatggcagccaagccgtgggacgttcatccttttactgcctggaatatttcccttctcagatgctgagaacgggcaacaactttaccttcagctacacctttgaggaagtgcctttccacagcagctacgcgcacagccagagcctggaccggctgatgaatcctctcatcgaccaatacctgtattacccgaacagaactcaaaatcagtccggaagtgcccaaaacaaggacttgctgtttagccgtgggtctccagctggcatgtctgttcagcccaaaaactggctacctggaccctgttatcggcagcagcgcgtttctaaaacaaaaacagacaacaacaacagcaattttacctggactggtgcttcaaaatataacctcaatgggcgtgaatccatcatcaaccctggcactgctatggcctcacacaaagacgacgaagacaagttctttcccatgagcggtgtcatgatttttggaaaagagagcgccggagcttcaaacactgcattggacaatgtcatgattacagacgaagaggaaattaaagccactaaccctgtggccaccgaaagatttgggaccgtggcagtcaatttccagagcagcagcacagaccctgcgaccggagatgtgcatgctatgggagcattacctggcatggtgtggcaaggtagagacgtgtacctgcagggtcccatttgggccaaaattcctcacacagatggacactttcacccgtctcctcttatgggcggctttggactcaagaacccgcctcctcagatcctcatcaaaaacacgcctgttcctgcgaatcctccggcggagttttcagctacaaagtttgcttcattcatcacccaatactccacaggacaagtgagtgtggaaattgaatgggagctgcagaaagaaaacagcaagcgctggaatcccgaagtgcagtacacatccaattatgcaaaatctgccaacgttgattttactgtggacaacaatggactttatactgagcctcgccccattggcacccgttaccttacccgtcccctgtaa

SEQ ID NO: 4923 - protein, 736 aa, Adeno-associated virus
MAADGYLPDWLEDTLSEGIRQWWKLRPGPPPPKPAERHKDDSRGLVLPGYKYLGPFNGLDKGEPVNEADAAALEHDKAYDRQLDSGDNPYLKYNHADAEFQERLKEDTSFGGNLGRAVFQAKKRVLEPLGLVEEGAKTAPGKKRPVEQSPQGPDSSSGIGKTGQQPAKKRLNFGQTGDSESVPDPQPLGEPPATPAAVGPTTMASGGGAPMADNNEGADGVGNASGNWHCDSTWLGDRVITTSTRTWALPTYNNHLYKQISSASTGASNDNHYFGYSTPWGYFDFNRFHCHFSPRDWQRLINNNWGFRPKRLNFKLFNIQVKEVTTNDGVTTIANNLTSTVQVFSDSEYQLPYVLGSAHQGCLPPFPADVFMIPQYGYLTLNNGSQAVGRSSFYCLEYFPSQMLRTGNNFTFSYTFEEVPFHSSYAHSQSLDRLMNPLIDQYLYYPNRTQNQSGSAQNKDLLFSRGSPAGMSVQPKNWLPGPCYRQQRVSKTKTDNNNSNFTWTGASKYNLNGRESIINPGTAMASHKDDEDKFFPMSGVMIFGKESAGASNTALDNVMITDEEEIKATNPVATERFGTVAVNFQSSSTDPATGDVHAMGALPGMVWQGRDVYLQGPIWAKIPHTDGHFHPSPLMGGFGLKNPPPQILIKNTPVPANPPAEFSATKFASFITQYSTGQVSVEIEWELQKENSKRWNPEVQYTSNYAKSANVDFTVDNNGLYTEPRPIGTRYLTRPL

SEQ ID NO: 4924 - protein, 736 aa, Adeno-associated virus
MAADGYLPDWLEDTLSEGIRQWWKLRPGPPPPKPAERHKDDSRGLVLPGYKYLGPFNGLDKGEPVNEADAAALEHDKAYDRQLDSGDNPYLKYNHADAEFQERLKEDTSFGGNLGRAVFQAKKRVLEPLGLVEEGAKTAPGKKRPVEQSPQGPDSSSGIGKTGQQPAKKRLNFGQTGDSESVPDPQPLGEPPATPAAVGPTTMASGGGAPMADNNEGADGVGNASGNWHCDSTWLGDRVITTSTRTWALPTYNNHLYKQISSASTGASNDNHYFGYSTPWGYFDFNRFHCHFSPRDWQRLINNNWGFRPKRLNFKLFNIQVKEVTTNDGVTTIANNLTSTVQVFSDSEYQLPYVLGSAHQGCLPPFPADVFMIPQYGYLTLNNGSQAVGRSSFYCLEYFPSQMLRTGNNFTFSYTFEEVPFHSSYAHSQSLDRLMNPLIDQYLYYLNRTQNQSGSAQNKDLLFSRGSPAGMSVQPKNWLPGPCYRQQRVSKTKTDNNNSNFTWTGASKYNLNGRESIINPGTAMASHKDDEDKFFPMSGVMIFGKESAGASNTALDNVMITDEEEIKATNPVATERFGTVAVNFQSSSTDPATGDVHAMGALPGMVWQGRDVYLQGPIWAKIPHTDGHFHPSPLMGGFGLKNPPPQILIKNTPVPANPPAEFSATKFASFITQYSTGQVSVEIEWELQKENSKRWNPEVQYTSNYAKSANVDFTVDNNGLYTEPRPIGTRYLTRPL

SEQ ID NO: 4925 - protein, 736 aa, Adeno-associated virus
MAADGYLPDWLEDTLSEGIRQWWKLRPGPPPPKPAERHKDDSRGLVLPGYKYLGPFNGLDKGEPVNEADAAALEHDKAYDRQLDSGDNPYLKYNHADAEFQERLKEDTSFGGNLGRAVFQAKKRVLEPLGLVEEGAKTAPGKKRPVEQSPQGPDSSSGIGKTGQQPAKKRLNFGQTGDSESVPDPQPLGEPPATPAAVGPTTMASGGGAPMADNNEGADGVGNASGNWHCDSTWLGDRVITTSTRTWALPTYNNHLYKQISSASTGASNDNHYFGYSTPWGYFDFNRFHCHFSPRDWQRLINNNWGFRPKRLNFKLFNIQVKEVTTNDGVTTIANNLTSTVQVFSDSEYQLPYVLGSAHQGCLPPFPADVFMIPQYGYLTLNNGSQAVGRSSFYCLEYFPSQMLRTGNNFTFSYTFEEVPFHSSYAHSQSLDRLMNPLIDQYLYYLNRTQNQSGSAQNKDLLFSRGSPAGMSVQPKNWLPGPCYRQQRVSKTKTDNNNSNFTWTGASKYNLNGRESIINPGTAMASHKDDEDKFFPMSGVMIFGKESAGASNTALDNVMITDEEEIKATNPVATERFGTVAVNFQSSSTDPATGDVHAMGALPGMVWQDRDVYLQGPIWAKIPHTDGHFHPSPLMGGFGLKNPPPQILIKNTPVPANPPAEFSATKFASFITQYSTGQVSVEIEWELQKENSKRWNPEVQYTSNYAKSANVDFTVDNNGLYTEPRPIGTRYLTRPL

SEQ ID NO: 4926 - DNA, 2208 bp, Adeno-associated virus
atggctgccgatggctatcttccagattggctcgaggacactctctctgaaggaataagacagtggtggaagctcaaacctggcccaccaccaccaaagcccgcagagcggcatagggacgacagcaggggtcttgtgcttcctgggtacaagtacctcggacccttcaacggactcgacaagggagagccggtcaacgaggcagacgccgcggccctcgagcacgacaaagcctacgaccggcagctcgacagcggagacaacccgtacctcaagtacaaccacgccgacgcggagtttcaggagcgccttaaagaagatacgtcttttgggggcaacctcggacgagcagtcttccaggcgaaaaagagggttcttgaacctctgggcctggttgaggaacctgttaagacggctccgggaaaaaagaggccggtagagcactctcctgtggagccagactcctcctcgggaaccggaaaggcgggccagcagcctgcaagaaaaagattgaattttggtcagactggagacgcagactcagtacctgacccccagcctctcggacagccaccagcagccccctctggtctgggaactaatacgatggctacaggcagtggcgcaccaatggcagacaataacgagggcgccgacggagtgggtaattcctcgggaaattggcattgcgattccacatggatgggcgacagagtcatcaccaccagcacccgaacctgggccctgcccacctacaacaaccacctctacaaacaaatttccagccaatcaggagcctcgaacgacaatcactactttggctacagcaccccttgggggtattttgacttcaacagattccactgccacttttcaccacgtgactggcaaagactcatcaacaacaactggggattccgacccaagagactcaacttcaagctctttaacattcaagtcaaagaggtcacgcagaatgacggtacgacgacgattgccaataaccttaccagcacggttcaggtgtttactgactcggggtaccagctcccgtacgtcctcggctcggcgcatcaaggatgcctcccgccgttcccagcagacgtcttcatggtgccacagtatggataccccaccctgaacaacgggagtcaggcagtaggacgctcttcattttactgcctggagtactttccttctcagatgctgcgtaccggaaacaactttaccttcagctacacttttgaggacgttcctttccacagcagctacgctcacagccagagtctggaccgtctcatgaatcctctcatcgaccagtacctgtattacttgagcacaacaaacactccaagtggaaccaccacgcagtcaaggcttcagttttctcaggccggagcgagtgacattcgggaccagtctaggaactggcttcctggaccctgttaccgccagcagcgagtatcaaagacatctgcggataacaacaacagtgaatactcgtggactggagctaccaagtaccacctcaatggcagagactctctggtgaatccgggcccggccgtggcaagccacaaggacgatgaagaaaagttttttcctcagagcggggttctcatctttgggaagcaaggctcagagaaaacaaatgtggacattgaaaaggtcatgattacagacgaagaggaaatcaggacaaccaatcccgtggctacggagcagtatggttctgtatctaccaacctccagagaggcaacagacaagcagctaccgcagatgtcaacacacaaggcgttcttccaggcatggtctggcaggacagagatgtgtaccttcaggggcccatctgggcaaagattccacacacggacggacattttcacccctctcccctcatgggtggattcggacttaaacaccctcctccacagattctcatcaagaacaccccggtacctgcgaatccttcgaccaccttcagtgcggcaaagtttgcttccttcatcacacagtactccacgggacaggtcagcgtggagatcgagtgggagctgcagaaggaaaacagcaaacgctggaatcccgaaattcagtacacttccaactacaacaagtctgttaatgtggactttactgtggacactaatggcgtgtattcagagcctcgccccattggcaccagatacctgactcgtaatctgtaa

SEQ ID NO: 4927 - protein, 735 aa, Adeno-associated virus
MAADGYLPDWLEDTLSEGIRQWWKLKPGPPPPKPAERHRDDSRGLVLPGYKYLGPFNGLDKGEPVNEADAAALEHDKAYDRQLDSGDNPYLKYNHADAEFQERLKEDTSFGGNLGRAVFQAKKRVLEPLGLVEEPVKTAPGKKRPVEHSPVEPDSSSGTGKAGQQPARKRLNFGQTGDADSVPDPQPLGQPPAAPSGLGTNTMATGSGAPMADNNEGADGVGNSSGNWHCDSTWMGDRVITTSTRTWALPTYNNHLYKQISSQSGASNDNHYFGYSTPWGYFDFNRFHCHFSPRDWQRLINNNWGFRPKRLNFKLFNIQVKEVTQNDGTTTIANNLTSTVQVFTDSGYQLPYVLGSAHQGCLPPFPADVFMVPQYGYPTLNNGSQAVGRSSFYCLEYFPSQMLRTGNNFTFSYTFEDVPFHSSYAHSQSLDRLMNPLIDQYLYYLSTTNTPSGTTTQSRLQFSQAGASDIRDQSRNWLPGPCYRQQRVSKTSADNNNSEYSWTGATKYHLNGRDSLVNPGPAVASHKDDEEKFFPQSGVLIFGKQGSEKTNVDIEKVMITDEEEIRTTNPVATEQYGSVSTNLQRGNRQAATADVNTQGVLPGMVWQDRDVYLQGPIWAKIPHTDGHFHPSPLMGGFGLKHPPPQILIKNTPVPANPSTTFSAAKFASFITQYSTGQVSVEIEWELQKENSKRWNPEIQYTSNYNKSVNVDFTVDTNGVYSEPRPIGTRYLTRNL

SEQ ID NO: 4928 - DNA, 2211 bp, Adeno-associated virus
atggctgccgacggttatcttccagattggctcgaggacactctctctgaaggaataagacagtggtggaagctcaaacctggcccaccaccaccaaagcccgcagagcggcataaggacgacagcaggggtcttgtgcttcctgggtacaagtacctcggacccttcaacggactcgacaagggagagccggtcaacgaggcagacgccgcggccctcgagcacgacaaagcctacgaccggcagctcgacagcggagacaacccgtacctcaagtacaaccacgccgacgcggagtttcaggagcgccttaaagaagatacgtcttttgggggcaacctcgggcgggcagtcttccaggccaagaagcgggttctcgaacctctcggtctggttgaggaaggcgctaagacggctcctggaaagaaacgtccggtagagcagtcgccacaagagccagactccccctcgggcatcggcaagacaggccagcagcccgctaaaaagagactcaattttggtcagactggcgactcagagtcagtccccgatccacaacctctcggagaacctccagcaacccccgctgctgtgggacctactacaatggcttcaggcggtggcgcaccaatggcagacaataacgaaggcgccgacggagtgggtaatgcctcaggaaattggcactgcgattccacatggctgggcgacagagtcatcaccaccagcacccgcacctgggccttgcccacctacaataaccacctctacaagcaaatctccagtgcttcaacgggggccagcaacgacaaccactacttcggctacagcaccccctgggggtattttgatttcaacagattccactgccacttttcaccacgtgactggcagcgactcatcaacaacaattggggattccggcccaagagactcaacttcaaactcttcaacatccaagtcaaggaggtcacgacgaatgatggcgtcacaaccatcgctaataaccttaccagcacggttcaagtcttctcggactcggagtaccagcttccgtacgtcctcggctctgcgcaccagggccgcctccctccgttcccggcggacgtgttcatgattccgcaatacggctacctgacgctcaacaatggcagccaagccgtgggacgttcatcctcttactgcctggaatatttcccttctcagatgctgagaacgggcaacaactttaccttcagctacacctttgaggaagtgcctctccacagcagctgcgcgcacagccagagcctggaccggctgatgaatcctctcatcgaccaatacctgtattacctgaacagaactcaaaatcagtccggaagtgcccaaaacagggacttgctgttcagccgtgggtctccagctggcatgtctgttcagcccaaaaactggctacctggaccctgttatcggcagcagcgcgtttctaaaacaaaaacagacaacaacaacagcaattttacctggactggtgcttcaaaatataacctcaatgggcgtgaatccatcatcaaccctggcactgctatggcctcacacaaagacgacgaagacaagttctttcccatgagcggtgtcatgatttttggaaaagagagcgccggagcttcaaacactgcattggacaatgtcatgattacagacgaagaggaaattaaagccactaaccctgtggccaccgaaagatttgggaccgtggcagtcaatttccagagcagcagcacagaccctgcgaccggagatgtgcatgctatgggagcattacctggcatggtgtggcaagatagagacgtgtacctgcagggtcccatttgggccaaaattcctcacacagatggacactttcacccgtctcctcttatgggcggctttggactcaagaacccgcctcctcagatcctcatcaaaaacacgcctgttcctgcgaatcctccggcggagttttcagctacaaagtttgcttcattcatcacccaatactccgcaggacaagtgagtgtggaaattgaatgggagctgcagaaagaaaacagcaagcgctggaatcccgaagtgcagtacacatccaattatgcaaaatctgccaacgttgattttactgtggacaacaatggactttatactgagcctcgccccattggcacccgttaccttacccgtcccctgtaa

SEQ ID NO: 4929 - protein, 736 aa, Adeno-associated virus
MAADGYLPDWLEDTLSEGIRQWWKLKPGPPPPKPAERHKDDSRGLVLPGYKYLGPFNGLDKGEPVNEADAAALEHDKAYDRQLDSGDNPYLKYNHADAEFQERLKEDTSFGGNLGRAVFQAKKRVLEPLGLVEEGAKTAPGKKRPVEQSPQEPDSPSGIGKTGQQPAKKRLNFGQTGDSESVPDPQPLGEPPATPAAVGPTTMASGGGAPMADNNEGADGVGNASGNWHCDSTWLGDRVITTSTRTWALPTYNNHLYKQISSASTGASNDNHYFGYSTPWGYFDFNRFHCHFSPRDWQRLINNNWGFRPKRLNFKLFNIQVKEVTTNDGVTTIANNLTSTVQVFSDSEYQLPYVLGSAHQGRLPPFPADVFMIPQYGYLTLNNGSQAVGRSSSYCLEYFPSQMLRTGNNFTFSYTFEEVPLHSSCAHSQSLDRLMNPLIDQYLYYLNRTQNQSGSAQNRDLLFSRGSPAGMSVQPKNWLPGPCYRQQRVSKTKTDNNNSNFTWTGASKYNLNGRESIINPGTAMASHKDDEDKFFPMSGVMIFGKESAGASNTALDNVMITDEEEIKATNPVATERFGTVAVNFQSSSTDPATGDVHAMGALPGMVWQDRDVYLQGPIWAKIPHTDGHFHPSPLMGGFGLKNPPPQILIKNTPVPANPPAEFSATKFASFITQYSAGQVSVEIEWELQKENSKRWNPEVQYTSNYAKSANVDFTVDNNGLYTEPRPIGTRYLTRPL

SEQ ID NO: 4930 - protein, 736 aa, Adeno-associated virus
MAADGYLPDWLEDTLSEGIRQWWKLKPGPPPPKPAERHKDDSRGLVLPGYKYLGPFNGLDKGEPVNEADAAALEHDKAYDRQLDSGDNPYLKYNHADAEFQERLKEDTSFGGNLGRAVFQAKKRVLEPLGLVEEGAKTAPGKKRPVEQSPQEPDSSSGIGKTGQQPAKKRLNFGQTGDSESVPDPQPLGEPPATPAAVGPTTMASGGGAPMADNNEGADGVGNASGNWHCDSTWLGDRVITTSTRTWALPTYNNHLYKQISSASTGASNDNHYFGYSTPWGYFDFNRFHCHFSPRDWQRLINNNWGFRPKRLNFKLFNIQVKEVTTNDGVTTIANNLTSTVQVFSDSEYQLPYVLGSAHQGCLPPFPADVFMIPQYGYLTLNNGSQAVGRSSFYCLEYFPSQMLRTGNNFTFSYTFEEVPLHSSCAHSQSLDRLMNPLIDQYLYYLNRTQNQSGSAQNRDLLFSRGSPAGMSVQPKNWLPGPCYRQQRVSKTKTDNNNSNFTWTGASKYNLNGRESIINPGTAMASHKDDEDKFFPMSGVMIFGKESAGASNTALDNVMITDEEEIKATNPVATERFGTVAVNFQSSSTDPATGDVHAMGALPGMVWQDRDVYLQGPIWAKIPHTDGHFHPSPLMGGFGLKNPPPQILIKNTPVPANPPAEFSATKFASFITQYSTGQVSVEIEWELQKENSKRWNPEVQYTSNYAKSANVDFTVDNNGLYTEPRPIGTRYLTRPL

SEQ ID NO: 4931 - DNA, 2208 bp, Adeno-associated virus
atggctgccgatggctatcttccagattggctcgaggacactctctctgaaggaataagacagtggtggaagctcaaacctggcccaccaccaccaaagcccgcagagcggcatagggacgacagcaggggtcttgtgcttcctgggtacaagtacctcggacccttcaacggactcgacaagggagagccggtcaacgaggcagacgccgcggccctcgagcacgacaaagcctacgaccggcagctcgacagcggagacaacccgtacctcaagtacaaccacgccgacgcggagtttcaggagcgccttaaagaagatacgtcttttgggggcaacctcggacgagcagtcttccaggcgaaaaagagggttcttgaacctctgggcctggttggggaacctgttaagacggctccgggaaaaaagaggccggtagagcactctcctgtggagccagactcctcctcgggaaccggaaaggcgggccagcagcctgcaagaaaaagattgaattttggtcagactggagacgcagactcagtacctgacccccagcctctcggacagccaccagcagccccctctggtctgggaactaatacgatggctacaggcagtggcgcaccaatggcagacaataacgagggcgccgacggagtgggtaattcctcgggaaattggcattgcgattccacatggatgggcgacagagtcatcaccaccagcacccgaacctgggccctgcccacctacaacaaccacctctacaaacaaatttccagccaatcaggagcctcgaacgacagtcactactttggctacagcaccccttgggggtattttgacttcaacagattccactgccacttttcaccacgtgactggcaaagactcatcaacaacaactggggattccgacccaagagactcaacttcaagctctttaacattcaagtcaaagaggtcacgcagaatgacggtacgacgacgattgccaataaccttaccagcacggttcaggtgtttactgactcggagtaccagctcccgtacgtcctcggctcggcgcatcaaggatgcctcccgccgttcccagcagacgtcttcatggtgccacagtatggatacctcaccctgaacaacgggagtcaggcagtaggacgctcttcattttactgcctggagtactttccttctcagatgctgcgtaccggaaacaactttaccttcagctacacttttgaggacgttcctttccacagcagctacgctcacagccagagtctggaccgtctcatgaatcctctcatcgaccagtacctgtattacttgagcacaacaaacactccaagtggaaccaccacgcagtcaaggctccagttttctcaggccggagcgagtgacattcgggaccagtctaggaactggcttcctggaccctgttaccgccagcagcgagtatcaaagacatctgcggataacaacaacagtgaatactcgtggactggagctaccaagtaccacctcaatggcagagactctctggtgaatccgggcccggccatggcaagccacaaggacaatgaagaaaagttttttcctcagagcggggttctcatctttgggaagcaaggctcagagaaaacaaatgtggacattgaaaaggtcatgattacagacgaagaggaaatcaggacaaccaatcccgtggctacggagcagtatggttctgtatctaccaacctccagagaggcaacagacaagcagctaccgcagatgtcaacacacaaggcgttcttccaggcatggtctggcaggacagagatgtgtaccttcaggggcccatctgggcaaagattccacacacggacggacattttcacccctctcccctcatgggtggattcggacttaaacaccctcctccacagattctcatcaagaacaccccggtacctgcgaatccttcgaccaccttcagtgcggcaaagtttgcttccttcatcacacagtactccacgggacaggtcagcgtggagatcgagtgggagctgcagaaggaaaacagcaaacgctggaatcccgaaattcagtacacttccaactacaacaagtctgttaatgtggactttactgtggacactaatggcgtgtattcagagcctcgccccattggcaccagatacctgactcgtaatctgtaa

SEQ ID NO: 4932 - protein, 735 aa, Adeno-associated virus
MAADGYLPDWLEDTLSEGIRQWWKLKPGPPPPKPAERHRDDSRGLVLPGYKYLGPFNGLDKGEPVNEADAAALEHDKAYDRQLDSGDNPYLKYNHADAEFQERLKEDTSFGGNLGRAVFQAKKRVLEPLGLVGEPVKTAPGKKRPVEHSPVEPDSSSGTGKAGQQPARKRLNFGQTGDADSVPDPQPLGQPPAAPSGLGTNTMATGSGAPMADNNEGADGVGNSSGNWHCDSTWMGDRVITTSTRTWALPTYNNHLYKQISSQSGASNDSHYFGYSTPWGYFDFNRFHCHFSPRDWQRLINNNWGFRPKRLNFKLFNIQVKEVTQNDGTTTIANNLTSTVQVFTDSEYQLPYVLGSAHQGCLPPFPADVFMVPQYGYLTLNNGSQAVGRSSFYCLEYFPSQMLRTGNNFTFSYTFEDVPFHSSYAHSQSLDRLMNPLIDQYLYYLSTTNTPSGTTTQSRLQFSQAGASDIRDQSRNWLPGPCYRQQRVSKTSADNNNSEYSWTGATKYHLNGRDSLVNPGPAMASHKDNEEKFFPQSGVLIFGKQGSEKTNVDIEKVMITDEEEIRTTNPVATEQYGSVSTNLQRGNRQAATADVNTQGVLPGMVWQDRDVYLQGPIWAKIPHTDGHFHPSPLMGGFGLKHPPPQILIKNTPVPANPSTTFSAAKFASFITQYSTGQVSVEIEWELQKENSKRWNPEIQYTSNYNKSVNVDFTVDTNGVYSEPRPIGTRYLTRNL

SEQ ID NO: 4933 - protein, 737 aa, Adeno-associated virus
RMAADGYLPDWLEDNLSEGIREWWDLKPGAPKPKANQQKQDDGRGLVLPGYKYLGPFNGLDKGEPVNAADAAALEHDKAYDQQLKAGDNPYLRYNHADAEFQERLQEDTSFGGNLGRAVFQAKKRVLEPLGLVEEGAKTAPGKKRPVEQSPQEPDSSSGIGKTGQQPAKKRLNFGQTGDSESVPDPQPLGEPPATPAAVGPTTMASGGGAPMADNNEGADGVGNASGNWHCDSTWLGDRVITTSTRTWALPTYNNHLYKQISSTSTGASNDNHYFGYGTPWGYFDFNRFHCHFSPRDWQRLINNNWGFRPKRLNFKLFNIQVEEVTTNDGVTTIANNLTSTVQVFSDSEYQLPYVLGSAHQGCLPPFPADVFMIPQYGYLTLNNGSQAVGRSSFYCLEYFPSQMLRTGNNFTFSYTFEEVPFHSSYAHSQSLDRLMNPLIDQYLYYLNRTQNQSGSAQNKDLLFSRGSPAGMSVQPKNWLPGPCYRQQRVSKTKTDNNNSNFTWTGASKYNLNGRESIINPGTAVASHKDDEDKFFPMSGVMIFGKESAGASSTALDNVMITDEEEIKATNPVATERFGTVAVNFQSSSTDPATGDVHAMGALPGMVWQDRDVYLQGPIWAKIPHTDGHFHPSPLMGGFGLKNPPPQILIKNTPVPANPPAEFSATKFASFITQYSTGQVSVEIEWELQKENSKRWNPEVQYTSNYAKSANVDFTVDNNGLYTEPRPIGTRYLTRPL

SEQ ID NO: 4934 - protein, 736 aa, Adeno-associated virus
MAADGYLPDWLEDNLSEGIREWWDLKPGAPKPKANQQKQDDGRGLVLPGYKYLGPFNGLDKGEPVNAADAAALEHDKAYDQQLKAGDNPYLRYNHADAEFQERLQEDTSFGGNLGRAVFQAKKRVLEPLGLVEEGAKTAPGKKRPVEQSPQEPDSSSGIGKTGQQPAKKRLNFGQTGDSESVPDPQPLGEPPATPAAVGPTTMASGGGAPMADNNEGADGVGNASGNWHCDSTWLGDRVITTSTRTWALPTYNNHLYKQISSTSTGASNDNHYFGYGTPWGYFDFNRFHCHFSPRDWQRLINNNWGFRPKRLNFKLFNIQVEEVTTNDGVTTIANNLTSTVQVFSDSEYQLPYVLGSAHQGCLPPFPADVFMIPQYGYLTLNNGSQAVGRSSFYCLEYFPSQMLRTGNNFTFSYTFEEVPFHSSYAHSQSLDRLMNPLIDQYLYYLNRTQNQSGSAQNKDLLFSRGSPAGMSVQPKNWLPGPCYRQQRVSKTKTDNNNSNFTWTGASKYNLNGRESIINPGTAVASHKDDEDKFFPMSGVMIFGKESAGASSTALDNVMITDEEEIKATNPVATERFGTVAVNFQSSSTDPATGDVHAMGALPGMVWQDRDVYLQGPIWAKIPHTDGHFHPSPLMGGFGLKNPPPQILIKNTPVPANPPAEFSATKFASFITQYSTGQVSVEIEWELQKENSKRWNPEVQYTSNYAKSANVDFTVDNNGLYTEPRPIGTRYLTRPL

SEQ ID NO: 4935 - DNA, 2211 bp, Adeno-associated virus
atggctgccgatggttatcttccagattggctcgaggacaacctctctgagggcattcgcgagtggtgggacttgaaacctggagccccgaagcccaaagccaaccagcaaaagcaggacgacggccggggtctggtgcttcctggctacaagtacctcggacccttcaacggactcgacaagggggagcccgtcaacgcggcggacgcagcggccctcgagcacgacaaggcctacgaccagcagctcaaagcgggtgacaatccgtacctgcggtataaccacgccgacgccgagtttcaggagcgtctgcaagaagatacgtcttttgggggcaacctcgggcgagcagtcttccaggccaagaagcgggttctcgaacctctcggtctggttgaggaaggcgctaagacggctcctggaaagaaacgtccggtagagcagtcgccacaagagccagactcctcctcgggcatcggcaagacaggccagcagcccgctaaaaagagactcaattttggccagactggcgactcagagtcagtccccgatccacaacctctcggagaacctccagcaacccccgctgctgtgggacctactacaatggcttcaggcggtggcgcaccaatggcagacaataacgaaggcgccgacggagtgggtaatgcctcaggaaattggcattgcgattccacatggctgggcgacagagtcatcaccaccagcacccgcacctgggccttgcccacctacaataaccacctctacaagcaaatctccagtacttcaacgggggccagcaacgacaaccactacttcggctacggcaccccctgggggtattttgatttcaacagattccactgccacttttcaccacgtgactggcagcgactcatcaacaacaattggggattccggcccaagagactcaacttcaaactcttcaacatccaagtcgaggaggtcacgacgaatgatggcgtcacaaccatcgctaataaccttaccagcacggttcaagtcttctcggactcggagtaccagcttccgtacgtcctcggctctgcgcaccagggctgcctccctccgttcccggcggacgtgttcatgattccgcaatacggctacctgacgctcaacaatggcagccaagccgtgggacgttcatccttttactgcctggaatatttcccttctcagatgctgagaacgggcaacaactttaccttcagctacacctttgaggaagtgcctttccacagcagctacgcgcacagccagagcctggaccggctgatgaatcctctcatcgaccaatacctgtattacctgaacagaacacaaaatcagtccggaagtgcccaaaacaaggacttgctgtttagccgtgggtctccagctggcatgtctgttcagcccaaaaactggctacctggaccctgttatcggcagcagcgcgtttctaaaacaaaaacagacaacaacaacagcaattttacctggactggtgcttcaaaatataacctcaatgggcgtgaatccatcatcaaccctggcaccgctgtggcctcacacaaagacgacgaagacaagttctttcccatgagcggtgtcatgatttttggaaaagagagcgccggagcttcaagcactgcattggacaatgtcatgattacagacgaagaggaaattaaagccactaaccctgtggccaccgaaagatttgggaccgtggcagtcaatttccagagcagcagcacagaccctgcgaccggagatgtgcatgctatgggagcattacctggcatggtgtggcaagatagagacgtgtacctgcagggtcccatttgggccaaaattcctcacacagatggacactttcacccgtctcctcttatgggcggctttggactcaagaacccgcctcctcagatcctcatcaaaaacacgcctgttcctgcgaatcctccggcggagttttcagctacaaagtttgcttcattcatcacccaatactccacaggacaagtgagtgtggaaattgaatgggagctgcagaaagaaaacagcaagcgctggaatcccgaagtgcagtacacatccaattatgcaaaatctgccaacgttgattttactgtggacaacaatggactttatactgagcctcgccccattggcacccgttaccttacccgtcccctgtaa

SEQ ID NO: 4936 - protein, 737 aa, Adeno-associated virus
RMAADGYLPDWLEDNLSEGIREWWDLKPGAPKPKANQQKQDDGRGLVLPGYKYLGPFNGLDKGEPVNAADAAALEHDKAYDQQLKAGDNPYLRYNHADAEFQERLQEDTSFGGNLGRAVFQAKKRVLEPLGLVEEGAKTAPGKKRPVEQSPQEPDSSSGIGKTGQQPAKKRLNFGQTGDSESVPDPQPLGEPPATPAAVGPTTMASGGGAPMADNNEGADGVGNASGNWHCDSTWLGDRVITTSTRTWALPTYNNHLYKQISSTSTGASNDNHYFGYSTPWGYFDFNRFHCHFSPRDWQRLINNNWGFRPKRLNFKLFNIQVEEVTTNDGVTTIANNLTSTVQVFSDSEYQLPYVLGSAHQGCLPPFPADVFMIPQYGYLTLNNGSQAVGRSSFYCLEYFPSQMLRTGNNFTFSYTFEEVPFHSSYAHSQSLDRLMNPLIDQYLYYLNRTQNQSGSAQNKDLLFSRGSPAGMSVQPKNWLPGPCYRQQRVSKTKTDNNNSNFTWTGASKYNLNGRESIINPGTAVASHKDDEDKFFPMSGVMIFGKESAGASSTALDNVMITDEEEIKATNPVATERFGTVAVNFQSSSTDPATGDVHAMGALPGMVWQDRDVYLQGPIWAKIPHTDGHFHPSPLMGGFGLKNPPPQILIKNTPVPANPPAEFSATKFASFITQYSTGQVSVEIEWELQKENSKRWNPEVQYTSNYAKSANVDFTVDNNGLYTEPRPIGTRYLTRPL

SEQ ID NO: 4937 - protein, 737 aa, Adeno-associated virus
RMAADGYLPDWLEDNLSEGIREWWDLKPGAPKPKANQQKQDDGRGLVLPGYKYLGPFNGLDKGEPVNAADAAALEHDKAYDQQLKAGDNPYLRYNHADAEFQERLQEDTSFGGNLGRAVFQAKKRVLEPLGLVEEGAKTAPGKKRPVEQSPQEPDSSSGIGKTGQQPAKKRLNFGQTGDSESVPDPQPLGEPPATPAAVGPTTMASGGGAPMADNNEGADGVGNASGNWHCDSTWLGDRVITTSTRTWALPTYNNHLYKQISSTSTGASNDNHYFGYSTPWGYFDFNRFHCHFSPRDWQRLINNNWGFRPKRLNFKLFNIQVKEVTTNDGVTTIANNLTSTVQVFSDSEYQLPYVLGSAHQGCLPPFPADVFMIPQYGYLTLNNGSQAVGRSSFYCLEYFPSQMLRTGNNFTFSYTFEEVPFHSSYAHSQSLDRLMNPLIDQYLYYLNRTQNQSGSAQNKDLLFSRGSPAGMSVQPKNWLPGPCYRQQRVSKTKTDNNNSNFTWTGASKYNLNGRESIINPGTAVASHKDDEDKFFPMSGVMIFGKESAGASSTALDNVMITDEEEIKATNPVATERFGTVAVNFQSSSTDPATGDVHAMGALPGMVWQDRDVYLQGPIWAKIPHTDGHFHPSPLMGGFGLKNPPPQILIKNTPVPANPPAEFSATKFASFITQYSTGQVSVEIEWELQKENSKRWNPEVQYTSNYAKSANVDFTVDNNGLYTEPRPIGTRYLTRPL

SEQ ID NO: 4938 - protein, 737 aa, Adeno-associated virus
RMAADGYLPDWLEDNLSEGIREWWDLKPGAPKPKANQQKQDDGRGLVLPGYKYLGPFNGLDKGEPVNAADAAALEHDKAYDQQLKAGDNPYLRYNHADAEFQERLQEDTSFGGNLGRAVFQAKKRVLEPLGLVEEGAKTAPGKKRPVEQSPQEPDSSSGIGKTGQQPAKKRLNFGQTGDSESVPDPQPLGEPPATPAAVGPTTMASGGGAPMADNNEGADGVGNASGNWHCDSTWLGDRVITTSTRTWALPTYNNHLYKQISSTSTGASNDNHYFGYSTPWGYFDFNRFHCHFSPRDWQRLINNNWGFRPKRLNFKLFNIQVKEVTTNDGVTTIANNLTSTVQVFSDSEYQLPYVLGSAHQGCLPPFPADVFMIPQYGYLTLNNGSQAVGRSSFYCLEYFPSQMLRTGNNFTFSYTFEEVPFHSSYAHSQSLDRLMNPLIDQYLYYLNRTQNQSGSAQNKDLLFSRGSPAGMSVQPKNWLPGPCYRQQRVSKTKTDNNNSNFTWTGASKYNLNGRESIINPGTAVASHKDDEDKFFPMSGVMIFGKESAGANSTALDNVMITDEEEIKATNPVATERFGTVAVNFQSSSTDPATGDVHAMGALPGMVWQDRDVYLQGPIWAKIPHTDGHFHPSPLMGGFGLKNPPPQILIKNTPVPANPPAEFSATKFASFITQYSTGQVSVEIEWELQKENSKRWNPEVQYTSNYAKSANVDFTVDNNGLYTEPRPIGTRYLTRPL

SEQ ID NO: 4939 - DNA, 2208 bp, Adeno-associated virus
atggctgccgatggttatcttccagattggctcaaggacactctctctgaaggaataagacagtggtggaagctcaaacctggcccaccaccaccaaagcccgcagagcggcataaggacgacagcgggggtcttgtgcttcctgggtacaagtacctcggacccttcaacggactcgacaagggagagccggtcaacgaggcagacgccgcggccctcgagtacgacaaggcctacgaccggcagctcgacagcggagacaacccgtacctcaagtacaaccacgccgacgcggagtttcaggagcgccttaaagaagatacgtcttttgggggcaacctcggacgagcagtcttccaggcgaaaaagagggttcttgaacctctgggcctggttgaggaacctgttaagacggctccgggaaaaaagaggccggtagagcactctcctgtggagccagactcctcctcgggaacaggaaaagcgggccagcagcctgcgagaaagagattgaattttggtcagactggagacgcagactccgtacctgacccccagcctctcggacagccaccagcagccccctctggtctgggaactaatacgatggctacaggcagtggcgcaccaatggcagacaataacgagggcgccgacggagtgggtaattcctcgggaagttggcattgcgattccacatggatgggcgacagagtcatcaccaccagcacccgaacctgggctctgcccacctacaacaaccatctgtacaagcagatctccagccaatcaggagccagcaacgacaaccactactttggctacagcaccccttgggggtattttgacttcaacagattccactgccacttttcaccacgtgactggcaaagactcatcaacaacaactggggattccggcccaagagactcaacttcaagctctttaacattcaagtcaaggaggtcacgcagaatgacggtacgacgacgattgccaataaccttaccagcacggttcaggtgtttactgactcggagtaccagctcccgtacgtccccggctcggcgcatcaaggatgcctcccgccgttcccagcagacgtcttcatggtgccacagtatggatacctcaccctgaacaacgggagtcaggcagtaggacgctcttcattttactgcctggagtactttccttctcagatgcttcgtaccggaaacaactttaccttcagctacacctttgaggatgttcctttccacagcagctacgctcacagccagagtttggaccgtctcatgaatcctctcatcgaccagtacctgtattacttgagcagaacaaacactccaagcggaaccaccacgcagtccaggcttcagttttctcaggccggagcaagtgacattcgggaccagtctaggaactggcttcctggaccctgttaccgccagcagcgagtatcaaagacagctgcggacaacaacaacagtgaatactcgtggactggagctaccaagtaccacctcaatggcagagactctctggtgaatccgggcccggccatggccagccacaaggacgatgaagaaaagttttttcctcaaagcggggttctcatctttgggaagcaaggctcagagaaaacaaatgtggacattgaaaaggtcatgattacagacgaagaggaaatcagaaccaccaatcccgtggccacggagcagtatggttctgtatctaccaacctccagagcggcaacacacaagcagctactgcagatgtcaacacacaaggcgttcttccaggcatggtctggcaggacagagacgtgcacctgcaggggcctatctgggcaaagattccacacacggacggacattttcacccctctcccctcatgggcggatttggacttaaacaccctcctccacagattctcatcaagaacaccccggtacctgcaaatccttcgaccaccttcagtgcggcaaagtttgcttccttcatcacacagtattccacagggcaggtcagcgtggagatcgagtgggagctgcagaaggagaacagcaaacgctggaaccccgagatccagtacacttccaactacaacaaatctgttaatgtggactttactgtggacactaatggtgtgtattcagagcctcgccccattggcaccagatacctgactcgtaatctgtaa

SEQ ID NO: 4940 - protein, 735 aa, Adeno-associated virus
MAADGYLPDWLKDTLSEGIRQWWKLKPGPPPPKPAERHKDDSGGLVLPGYKYLGPFNGLDKGEPVNEADAAALEYDKAYDRQLDSGDNPYLKYNHADAEFQERLKEDTSFGGNLGRAVFQAKKRVLEPLGLVEEPVKTAPGKKRPVEHSPVEPDSSSGTGKAGQQPARKRLNFGQTGDADSVPDPQPLGQPPAAPSGLGTNTMATGSGAPMADNNEGADGVGNSSGSWHCDSTWMGDRVITTSTRTWALPTYNNHLYKQISSQSGASNDNHYFGYSTPWGYFDFNRFHCHFSPRDWQRLINNNWGFRPKRLNFKLFNIQVKEVTQNDGTTTIANNLTSTVQVFTDSEYQLPYVPGSAHQGCLPPFPADVFMVPQYGYLTLNNGSQAVGRSSFYCLEYFPSQMLRTGNNFTFSYTFEDVPFHSSYAHSQSLDRLMNPLIDQYLYYLSRTNTPSGTTTQSRLQFSQAGASDIRDQSRNWLPGPCYRQQRVSKTAADNNNSEYSWTGATKYHLNGRDSLVNPGPAMASHKDDEEKFFPQSGVLIFGKQGSEKTNVDIEKVMITDEEEIRTTNPVATEQYGSVSTNLQSGNTQAATADVNTQGVLPGMVWQDRDVHLQGPIWAKIPHTDGHFHPSPLMGGFGLKHPPPQILIKNTPVPANPSTTFSAAKFASFITQYSTGQVSVEIEWELQKENSKRWNPEIQYTSNYNKSVNVDFTVDTNGVYSEPRPIGTRYLTRNL

SEQ ID NO: 4941 - DNA, 2208 bp, Adeno-associated virus
atggctgccgatggttatcttccagattggctcgaggacactctctctgaaggaataagacagtggtggaagctcaaacctggcccaccaccaccaaagcccgcagagcggcataaggacgacagcaggggtcttgtgcttcctgggtacaagtacctcggacccttcaacggactcgacaagggggagccggtcaacgaggcagacgccgcggccctcgagcacgacaaggcctacgaccggcagctcgacagcggagacaacccgtacctcaagtacaaccacgccgacgcagagtttcaggagcgccttaaagaagatacgtcttttgggggcaacctcggacgagcagtcttccaggcgaaaaagagggttcttgaacctctgggcctggttgaggaacctgttaagacggctccgggaaaaaagaggccggtagagcactctcctgtggagccagactcctcctcgggaaccggaaaagcgggccagcagcctgcaagaaaaagattaaattttggtcagactggagacgcagactccgtacctgacccccagcctctcggacagccaccagcagccccctctggtctgggatctactacaatggctacaggcagtggcgcaccaatggcagacaataacgagggtgccgatggagtgggtaattcctcaggaaattggcattgcgattcccaatggctgggcgacagagtcatcaccaccagcacccgaacctgggccctgcccacatacaacaaccacctctacaagcaaatctccagccaatcaggagccagcaacgacaaccactactttggctacagcaccccctgggggtattttgacttcaacagattccactgccacttttcaccacgtgactggcaaagactcatcaacaacaactggggattccggcccaaaagactcaacttcaagctctttaatattcaagtcaaagaggtcacgcagaatgacggtacgacgacgattgccaataaccttaccagcacggttcaggtgtttactgactcggagtaccagctcccgtacgtcctgggctcggcgcatcaaggatgcctcccgccgtttccagcggacgtcttcatggtcccacagtatggatacctcaccctgaacaacgggagtcaggcggtaggacgctcttccttttactgcctggagtactttccttctcagatgctgcgtactggaaacaactttcagttcagctacacttttgaagacgtgcctttccacagcagctacgctcacagccagagtctggatcggctgatgaatcctctgatcgaccagtacctgtattatctgaacaagacacaaacaaatagtggaactcttcagcagtctcggctactgtttagccaagctggaccaaccaacatgtctcttcaagctaaaaactggctgcctggaccttgctacagacagcagcgtctgtcaaaacaggcaaacgacaacaacaacagcaactttccctggactgcagctacaaagtatcatctaaatggccgggactcgttggttaatccaggaccagctatggccagtcgcaaggatgacgaagaaaagtttttccccatgcatggaaccctgatatttggtaaacaaggaacaaatgccaacgacgcggatttggaaaatgtcatgattacagatgaagaagaaatcagggccaccaatcccgtggctacggagcagtacgggactgtgtcaaataatttgcaaaactcaaacactggtccaactactggaactgtcaatcaccaaggagcgttacctggtatggtgtggcaggatcgagacgtgtacctgcagggacccatttgggccaagattcctcacaccgatggacactttcatccttctccactgatgggaggttttggactcaaacacccgcctcctcagatcatgatcaaaaacactcccgttccagccaatcctcccacaaacttcagttctgccaagtttgcttctttcatcacacagtattccacgggacaggtcagcgtggagatcgagtgggagctgcagaaggagaacagcaaacgctggaatcccgaaattcagtacacttccaactacaacaagtctgttaatgtggactttactgtggacactaatggtgtgtattcagagcctcgccccattggcaccagatacctgactcgtaatctgtaa

SEQ ID NO: 4942 - protein, 735 aa, Adeno-associated virus
MAADGYLPDWLEDTLSEGIRQWWKLKPGPPPPKPAERHKDDSRGLVLPGYKYLGPFNGLDKGEPVNEADAAALEHDKAYDRQLDSGDNPYLKYNHADAEFQERLKEDTSFGGNLGRAVFQAKKRVLEPLGLVEEPVKTAPGKKRPVEHSPVEPDSSSGTGKAGQQPARKRLNFGQTGDADSVPDPQPLGQPPAAPSGLGSTTMATGSGAPMADNNEGADGVGNSSGNWHCDSQWLGDRVITTSTRTWALPTYNNHLYKQISSQSGASNDNHYFGYSTPWGYFDFNRFHCHFSPRDWQRLINNNWGFRPKRLNFKLFNIQVKEVTQNDGTTTIANNLTSTVQVFTDSEYQLPYVLGSAHQGCLPPFPADVFMVPQYGYLTLNNGSQAVGRSSFYCLEYFPSQMLRTGNNFQFSYTFEDVPFHSSYAHSQSLDRLMNPLIDQYLYYLNKTQTNSGTLQQSRLLFSQAGPTNMSLQAKNWLPGPCYRQQRLSKQANDNNNSNFPWTAATKYHLNGRDSLVNPGPAMASRKDDEEKFFPMHGTLIFGKQGTNANDADLENVMITDEEEIRATNPVATEQYGTVSNNLQNSNTGPTTGTVNHQGALPGMVWQDRDVYLQGPIWAKIPHTDGHFHPSPLMGGFGLKHPPPQIMIKNTPVPANPPTNFSSAKFASFITQYSTGQVSVEIEWELQKENSKRWNPEIQYTSNYNKSVNVDFTVDTNGVYSEPRPIGTRYLTRNL

SEQ ID NO: 4943 - DNA, 2208 bp, Adeno-associated virus
atggctgccgatggttatcttccagattggctcgaggacactctctctgaaggaataagacagtggtggaagctcaaacctggcccaccaccaccaaagcccgcagagcggcataaggacgacagcaggggtcttgtgcttcctgggtacaagtacctcggacccttcaacggactcgacaagggagagccggtcaacgaggcagacgccgcggccctcgagcacgacaaagcctacgaccggcagctcgacagcggagacaacccgtacctcaagtacaaccacgccgacgcggagtttcaggagcgccttaaagaagatacgtcttttgggggcaacctcggacgagcagtcttccaggcgaaaaagagggttcttgaacctctgggcctggttggggaacctgtcaagacggctccaggaaaaaagaggccggtagagcactctcctgtggagccagactcctcctcgggaaccggaaaggcgggccagcagcctgcaagaaaaagattgaattttggtcagactggagacgcagactcagtacctgacccccagcctctcggacagccaccagcagccccctctggtctgggaactaatacgatggctacaggcagtggcgcaccaatggcagacaataacgagggcgccgacggagtgggtaattcctcgggaaattggcattgcgattccacatggatgggcgacagagtcatcaccaccagcacccgaacctgggccctgcccacctacaacaaccacctctacaaacaaatttccagccaatcaggagcctcgaacgacaatcactactttggctacagcaccccttgggggtattttgacttcaacagattccactgccacttttcaccacgtgactggcaaagactcatcaacaacaactggggattccgacccaagagactcaacttcaagctctttaacattcaagtcaaagaggtcacgcagaatgacggtacgacgacgattgccaataaccttaccagcacggttcaggtgtttactgactcggagtaccagctcccgtacgtcctcggctcggcgcatcaaggatgcctcccgccgttcccagcagacgtcttcatggtgccacagtatggatacctcaccctgaacaacgggagtcaggcagtaggacgctcttcattttactgcctggagtactttccttctcagatgctgcgtaccggaaacaactttaccttcagctacacttttgaggacgttcctttccacagcggctacgctcacagccagagtctggaccgtctcatgaatcctctcatcgaccagtacctgtattacttgagcacaacaaacactccaagtggaaccaccacgcagtcaaggcttcagttttctcaggccggagcgagtgacattcgggaccagtctaggaactggcttcctggaccctgttaccgccagcagcgagtatcaaagacatctgcggataacaacaacagtgaatactcgtggactggagctaccaagtaccacctcaatggcagagactctctggtgaatccgggcccggccatggcaagccacaaggacaatgaagaaaagttttttcctcagagcggggttctcatctttgggaagcaaggctcagagaaaacaaatgtggacattgaaaaggtcatgattacagacgaagaggaaatcaggacaaccaatcccgtggctacggagcagtacggttctgtatctaccaacctccagagaggcaacagacaagcagctaccgcagatgtcaacacacaaggcgttcttccaggcatggtctggcaggacagagatgtgtaccttcaggggcccatctgggcaaagattccacacacggacggacattttcacccctctcccctcatgggtggattcggacttaaacaccctcctccacagattctcatcaagaacaccccggtacctgcgaatccttcgaccaccttcagtgcggcaaagtttgcttccttcatcacacagtactccacgggacaggtcagcgtggagatcgagtgggagctgcagaaggaaaacagcaaacgctggaatcccgaaattcagtacacttccaactacaacaagtctgttaatgtggactttactgtggacactaatggcgtgtattcagagcctcgccccattggcaccagatacctgactcgtaatctgtaa

SEQ ID NO: 4944 - protein, 735 aa, Adeno-associated virus
MAADGYLPDWLEDTLSEGIRQWWKLKPGPPPPKPAERHKDDSRGLVLPGYKYLGPFNGLDKGEPVNEADAAALEHDKAYDRQLDSGDNPYLKYNHADAEFQERLKEDTSFGGNLGRAVFQAKKRVLEPLGLVGEPVKTAPGKKRPVEHSPVEPDSSSGTGKAGQQPARKRLNFGQTGDADSVPDPQPLGQPPAAPSGLGTNTMATGSGAPMADNNEGADGVGNSSGNWHCDSTWMGDRVITTSTRTWALPTYNNHLYKQISSQSGASNDNHYFGYSTPWGYFDFNRFHCHFSPRDWQRLINNNWGFRPKRLNFKLFNIQVKEVTQNDGTTTIANNLTSTVQVFTDSEYQLPYVLGSAHQGCLPPFPADVFMVPQYGYLTLNNGSQAVGRSSFYCLEYFPSQMLRTGNNFTFSYTFEDVPFHSGYAHSQSLDRLMNPLIDQYLYYLSTTNTPSGTTTQSRLQFSQAGASDIRDQSRNWLPGPCYRQQRVSKTSADNNNSEYSWTGATKYHLNGRDSLVNPGPAMASHKDNEEKFFPQSGVLIFGKQGSEKTNVDIEKVMITDEEEIRTTNPVATEQYGSVSTNLQRGNRQAATADVNTQGVLPGMVWQDRDVYLQGPIWAKIPHTDGHFHPSPLMGGFGLKHPPPQILIKNTPVPANPSTTFSAAKFASFITQYSTGQVSVEIEWELQKENSKRWNPEIQYTSNYNKSVNVDFTVDTNGVYSEPRPIGTRYLTRNL

SEQ ID NO: 4945 - DNA, 2208 bp, Adeno-associated virus
atggctgccgatggttatcttccagattggctcgaggacactctctctgaaggaataagacagtggtggaagctcaaacctggcccaccaccaccaaagcccgcagagcggcataaggacgacagcaggggtcttgtgcttcctgggtacaagtacctcggacccttcaacggactcgacaagggagagccggtcaacgaggcagacgccgcggccctcgagcacgacaaagcctacgaccggcagctcgacagcggagacaacccgtacctcaagtacaaccacgccgacgcggagtttcaggagcgccttaaagaagatacgtcttttgggggcaacctcggacgagcagtcttccaggcgaaaaagagggttcttgaacctctgggcctggttggggaacctgttaagacggctccgggaaaaaagaggccggtagagcactctcctgtggagccagactcctcctcgggaaccggaaaggcgggccagcagcctgcaagaaaaagattgaattttggtcagactggagacgcagactcagtacctgacccccagcctctcggacagccaccagcagccccctctggtctgggaactaatacgatggctacaggcagtggcgcaccaatggcagacaataacgagggcgccgacggagtgggtaattcctcgggaaatcggcattgcgattccacatggatgggcgacagagtcatcaccaccagcacccgaacctgggccctgcccacctacaacaaccacctctacagacaaatttccagccaatcaggagcctcgaacgacaatcactactttggctacagcaccccttgggggtattttgacttcaacagattccactgccacttttcaccacgtgactggcaaagactcatcaacaacaactggggattccgacccaagagactcaacttcaagctctttaacattcaagtcaaagaggtcacgcagaatgacggtacgacgacgattgccaataaccttaccagcacggttcaggtgtttactgactcggagtaccagctcccgtacgtcctcggctcggcgcatcaaggatgcctcccgccgttcccagcagacgtcttcatggtgccacagtatggatacctcaccctgagcaacgggagtcaggcagtaggacgctcttcattttactgcccggagtactttccttctcagatgctgcgtaccggaaacaactttaccttcagctacacttttgaggacgttcctttccacagcagctacgctcacagccagagtctggaccgtctcatgaatcctctcatcgaccagtacctgtattacttgagcacaacaaacactccaagtggaaccaccacgcagtcaaggcttcagttttctcaggccggagcgagtgacattcgggaccagtctaggaactggcttcctggaccctgttaccgccagcagcgagtatcaaagacatctgcggataacaacaacagtgaatactcgtggactggagctaccaagtaccacctcaatggcagagactctctggtgaatccgggcccggccatggcaagccacaaggacaatgaagaaaagttttttcctcagagcggggttctcatctttgggaagcaaggctcagagaaaacaaatgtggacattgaaaaggtcatgattacagacgaagaggaaatcaggacaaccaatcccgtggctacggagcagtatggttctgtatctaccaacctccagagaggcaacagacaagcagctaccgcagatgtcaacacacaaggcgttcttccaggcatggtctggcaggacagagatgtgtaccttcaggggcccatctgggcaaagattccacacacggacggacattttcacccctctcccctcatgggtggattcggacctaaacaccctcctccacagattctcatcaagaacaccccggtacctgcgaatccttcgaccaccttcagtgcggcaaagtttgcttccttcatcacacagtactccacgggacaggtcagcgtggagatcgagtgggagctgcagaaggaaaacagcaaacgctggaatcccgaaattcagtacacttccaactacaacaagtctgttaatgtggactttactgtggacactaatggcgtgtattcagagcctcgccccattggcaccagatacctgactcgtaatttgtaa

SEQ ID NO: 4946 - protein, 735 aa, Adeno-associated virus
MAADGYLPDWLEDTLSEGIRQWWKLKPGPPPPKPAERHKDDSRGLVLPGYKYLGPFNGLDKGEPVNEADAAALEHDKAYDRQLDSGDNPYLKYNHADAEFQERLKEDTSFGGNLGRAVFQAKKRVLEPLGLVGEPVKTAPGKKRPVEHSPVEPDSSSGTGKAGQQPARKRLNFGQTGDADSVPDPQPLGQPPAAPSGLGTNTMATGSGAPMADNNEGADGVGNSSGNRHCDSTWMGDRVITTSTRTWALPTYNNHLYRQISSQSGASNDNHYFGYSTPWGYFDFNRFHCHFSPRDWQRLINNNWGFRPKRLNFKLFNIQVKEVTQNDGTTTIANNLTSTVQVFTDSEYQLPYVLGSAHQGCLPPFPADVFMVPQYGYLTLSNGSQAVGRSSFYCPEYFPSQMLRTGNNFTFSYTFEDVPFHSSYAHSQSLDRLMNPLIDQYLYYLSTTNTPSGTTTQSRLQFSQAGASDIRDQSRNWLPGPCYRQQRVSKTSADNNNSEYSWTGATKYHLNGRDSLVNPGPAMASHKDNEEKFFPQSGVLIFGKQGSEKTNVDIEKVMITDEEEIRTTNPVATEQYGSVSTNLQRGNRQAATADVNTQGVLPGMVWQDRDVYLQGPIWAKIPHTDGHFHPSPLMGGFGPKHPPPQILIKNTPVPANPSTTFSAAKFASFITQYSTGQVSVEIEWELQKENSKRWNPEIQYTSNYNKSVNVDFTVDTNGVYSEPRPIGTRYLTRNL

SEQ ID NO: 4947 - DNA, 2205 bp, Adeno-associated virus
atggctgccgatggttatcttccagattggctcgaggacactctctctgaaggaataagacagtggtggaagctcaaacctggcccaccaccaccaaagcccgcagagcggcataaggacgacagcaggggtcttgtgcttcctgggtacaagtacctcggacccttcaacggactcgacaagggagagccggtcaacgaggcagacgccgcggccctcgagcacgacaaggcctacgaccggcagctcgacagcggagacaacccgtacctcaagtacaaccacgccgacgcggagtttcaggagcgtcttaaagaagatacgtcttttgggggcaacctcggacgagcagtcttccaggcgaaaaagagggttcttgaacctctgggcctggttgaggaacctgttaagacggctccgggaaaaaagaggccggtagagcactctcctgcggagccagactcctcctcgggaaccggaaaagcgggccagcagcctgcaagaaaaagactgaatttcggtcagactggagacgcagactccgtacctgacccccagcctctcagacagccaccagcagcccccacaagtttgggatctactacaatggctacaggcagtggcgcaccaatggcagacaataacgagggtgccgatggagtgggtaattcctcaggaaattggcattgcgattcccaatggctgggcgacagagtcatcaccaccagcacccgaacctgggccctgcccacctacaacaaccacctttacaagcaaatctccagccaatcaggagcctcaaacgacaaccactactttggctacagcaccccctgggggtattttgacttcaacagattccactgccacttttcaccacgtgactggcaaagactcatcaacaacaactggggattccgacccaagagactcaacttcaagctctttaacattcaagtcaaagaggtcacgcagaatgacggtacgacgacgattgccaataaccttaccagcacggttcaggtgtttactgactcggagtaccagctcccgtacgtcctcggctcggcgcatcaaggatgcctcccgccgtttccagcggacgtcttcatggtcccacagtatggatacctcaccctgaacaacgggagtcaggcggtaggacgctcttccttttactgcctggagtactttccttctcagatgctgcgtactggaaacaactttcagttcagctacacttttgaagacgtgcctttccacagcagctacgctcacagccagagtttggatcggctgatgaatcctctgatcgaccagtacctgtattatctaaacagaacacaaacagctagtggaactcagcagtctcggctactgtttagccaagctggacccacaagcatgtctcttcaagctaaaaactggctgcctggaccgtgttatcgccagcagcgtttgtcaaagcaggcaaacgacaacaacaacagcaactttccctggactggagctaccaagtactacctcaatggcagagactctttggtgaacccgggcccggccatggccagccacaaggacgatgaagaaaagtttttccccatgcatggaaccctaatatttggtaaagaaggaacaaatgctaccaacgcggaattggaaaatgtcatgattacagatgaagaggaaatcaggaccaccaatcccgtggctacagagcagtacggatatgtgtcaaataatttgcaaaactcaaatactgctgcaagtactgaaactgtgaatcaccaaggagcattacctggtatggtgtggcaggatcgagacgtgtacctgcagggacccatttgggccaagattcctcacaccgatggacactttcatccttctccactgatgggaggttttggactcaaacacccgcctcctcagattatgatcaaaaacactcccgttccagccaatcctcccacaaacttcagttctgccaagtttgcttccttcatcacacagtattccacgggacaggtcagcgtggagatcgagtgggagctgcagaaggagaacagcaaacgctggaatcccgaaattcagtacacttccaactacaacaaatctgttaatgtggactttactgtggacactaatggtgtgtattcagagcctcgccccattggcaccagatacctgactcgtaatctgtaa

SEQ ID NO: 4948 - protein, 734 aa, Adeno-associated virus
MAADGYLPDWLEDTLSEGIRQWWKLKPGPPPPKPAERHKDDSRGLVLPGYKYLGPFNGLDKGEPVNEADAAALEHDKAYDRQLDSGDNPYLKYNHADAEFQERLKEDTSFGGNLGRAVFQAKKRVLEPLGLVEEPVKTAPGKKRPVEHSPAEPDSSSGTGKAGQQPARKRLNFGQTGDADSVPDPQPLRQPPAAPTSLGSTTMATGSGAPMADNNEGADGVGNSSGNWHCDSQWLGDRVITTSTRTWALPTYNNHLYKQISSQSGASNDNHYFGYSTPWGYFDFNRFHCHFSPRDWQRLINNNWGFRPKRLNFKLFNIQVKEVTQNDGTTTIANNLTSTVQVFTDSEYQLPYVLGSAHQGCLPPFPADVFMVPQYGYLTLNNGSQAVGRSSFYCLEYFPSQMLRTGNNFQFSYTFEDVPFHSSYAHSQSLDRLMNPLIDQYLYYLNRTQTASGTQQSRLLFSQAGPTSMSLQAKNWLPGPCYRQQRLSKQANDNNNSNFPWTGATKYYLNGRDSLVNPGPAMASHKDDEEKFFPMHGTLIFGKEGTNATNAELENVMITDEEEIRTTNPVATEQYGYVSNNLQNSNTAASTETVNHQGALPGMVWQDRDVYLQGPIWAKIPHTDGHFHPSPLMGGFGLKHPPPQIMIKNTPVPANPPTNFSSAKFASFITQYSTGQVSVEIEWELQKENSKRWNPEIQYTSNYNKSVNVDFTVDTNGVYSEPRPIGTRYLTRNL

SEQ ID NO: 4949 - DNA, 3160 bp, Adeno-associated virus
acccttcactaaagggactagtcctgcaggtttaaacgaattcgcccttgctgcgtcaactggaccaatgagaactttcccttcaacgactgtgtcgacaagatggtgatttggtgggaggaggggaagatgaccgccaaggtcgtggagtcggccaaagccattctcggaggaagcaaggtgcgcgtggaccagaaatgcaagtcctcggcccagatagatccgactcccgtgatcgtcacctccaacaccaacatgtgcgccgtgattgacgggaactcaacgaccttcgaacaccagcagccgttgcaagaccggatgttcaaatttgaactcacccgccgtctggatcatgactttgggaaggtcaccaagcgggaagtcaaagactttttccggtgggcaaaggatcacgtggttgaggtggagcatgaattctacgtcaaaaagggtggagccaagaaaagacccgcccctagtgacgcagatataagtgagcccaaacgggtgcgcgagtcagttgcgcagccatcgacgtcagacgcggaagcttcgatcaactacgcggacaggtaccaaaacaaatgttctcgtcacgtgggcatgaatctgatgctgtttccctgcagacaatgcgagagaatgaatcaaaattcaaatatctgcttcactcacggacagaaagactgtttagagtgctttcccgtgtcagaatctcaacctgtttctgtcgtcaaaaaggcgtatcagaaactgtgctacattcatcatatcatgggaaaggtgccagacgcttgcactgcctgcgatctggtcaatgtggatttggatgactgcatctctgaacaataaatgatttaaatcaggtatggctgccgatggttatcttccagattggctcgaggacactctctctgaaggaataagacagtggtggaagctcaaacctggcccaccaccaccaaagcccgcagagcggcataaggacgacagcaggggtcttgtgcttcctgggtacaagtacctcggacccttcaacggactcgacaagggagagccggtcaacgaggcagacgccgcggccctcgagcacgacaaggcctacgaccggcagctcgacagcggagacaacccgtacctcaagtacaaccacgccgacgcggagtttcaggagcgtcttaaagaagatacgtcttttgggggcaacctcggacgagcagtcttccaggcgaaaaagagggttcttgaacctctgggcctggttgaggaacctgttaagacggctccgggaaaaaagaggccggtagagcactctcctgcggagccagactcctcctcgggaaccggaaaagcgggccagcagcctgcaagaaaaagactgaatttcggtcagactggagacgcagactccgtacctgacccccagcctctcagacagccaccagcagcccccacaagtttgggatctactacaatggctacaggcagtggcgcaccaatggcagacaataacgagggtgccgatggagtgggtaattcctcaggaaattggcattgcgattcccaatggctgggcgacagagtcatcaccaccagcacccgaacctgggccctgcccacctacaacaaccacctttacaagcaaatctccagccaatcaggagcctcaaacgacaaccactactttggctacagcaccccctgggggtattttgacttcaacagattccactgccacttttcaccacgtgactggcaaagactcatcaacaacaactggggattccgacccaagagactcaacttcaagctctttaacattcaagtcaaagaggtcacgcagaatgacggtacgacgacgattgccaataaccttaccagcacggttcaggtgtttactgactcggagtaccagctcccgtacgtcctcggctcggcgcatcaaggatgcctcccgccgtttccagcggacgtcttcatggtcccacagtatggatacctcaccctgaacaacgggagtcaggcggtaggacgctcttccttttactgcctggagtactttccttctcagatgctgcgtactggaaacaactttcagttcagctacacttttgaagacgtgcctttccacagcagctacgctcacagccagagtttggatcggctgatgaatcctctgatcgaccagtacctgtattatctaaacagaacacaaacagctagtggaactcagcagtctcggctactgtttagccaagctggacccacaagcatgtctcttcaagctaaaaactggctgcctggaccgtgttatcgccagcagcgtttgtcaaagcaggcaaacgacaacaacaacagcaactttccctggactggagctaccaagtactacctcaatggcagagactctttggtgaacccgggcccggccatggccagccacaaggacgatgaagaaaagtttttccccatgcatggaaccctaatatttggtaaagaaggaacaaatgctaccaacgcggaattggaaaatgtcatgattacagatgaagaggaaatcaggaccaccaatcccgtggctacagagcagtacggatatgtgtcaaataatttgcaaaactcaaatactgctgcaagtactgaaactgtgaatcaccaaggagcattacctggtatggtgtggcaggatcgagacgtgtacctgcagggacccatttgggccaagattcctcacaccgatggacactttcatccttctccactgatgggaggttttggactcaaacacccgcctcctcagattatgatcaaaaacactcccgttccagccaatcctcccacaaacttcagttctgccaagtttgcttccttcatcacacagtattccacgggacaggtcagcgtggagatcgagtgggagctgcagaaggagaacagcaaacgctggaatcccgaaattcagtacacttccaactacaacaaatctgttaatgtggactttactgtggacactaatggtgtgtattcagagcctcgccccattggcaccagatacctgactcgtaatctgtaattgcttgttaatcaataaaccgtttaattcgtttcagttgaactttggtctctgcgaagggcgaattcgcggccgctaaatcaatcg

SEQ ID NO: 4950 - protein, 734 aa, Adeno-associated virus
MAADGYLPDWLEDTLSEGIRQWWKLKPGPPPPKPAERHKDDSRGLVLPGYKYLGPFNGLDKGEPVNEADAAALEHDKAYDRQLDSGDNPYLKYNHADAEFQERLKEDTSFGGNLGRAVFQAKKRVLEPLGLVEEPVKTAPGKKRPVEHSPAEPDSSSGTGKAGQQPARKRLNFGQTGDADSVPDPQPLGQPPAAPTSLGSTTMATGSGAPMADNNEGADGVGNSSGNWHCDSQWLGDRVITTSTRTWALPTYNNHLYKQISSQSGASNDNHYFGYSTPWGYFDFNRFHCRFSPRDWQRLINNNWGFRPKRLNFKLFNIQVKEVTQNDGTTTIANNLTSTVQVFTDSEYQLPYVLGSAHQGCLPPFPADVFMVPQYGYLTLNNGSQAVGRSSFYCLEYFPSQMLRTGNNFQFSYTFEDVPFHSSYAHSQGLDRLMNPLIDQYLYYLNRTQTASGTQQSRLLFSQAGPTSMSLQAKNWLPGPCYRQQRLSKQANDNNNSNFPWTGATKYHLNGGDSLVNPGPAMASHKDDEEKFFPMHGTLIFGKEGTNATNAELENVMITDEEEIRTTNPVATEQYGYVSNNLQNSNTAASTETVNHQGALPGMVWQDRDVYLRGPIWAKIPHADGHFHPSPLMGGFGLKHPPPQIMIKNTPVPANPPTNFSSAKFASFITQYSTGQVSVEIEWELQKENSKRWNPEIQYTSNYNKSVNVDFTVDTNGVYSEPRPIGTRYLTRNL

SEQ ID NO: 4951 - DNA, 3157 bp, Adeno-associated virus
ctcactaagggactagtcctgcaggtttaaacgaattcgcccttgctgcgtcaactggaccaatgagaactttcccttcaacgactgtgtcgacaagatggtgatttggtgggaggaggggaagatgaccgccaaggtcgtggagtcggccaaagccactctcggaggaagcaaggtgcgcgtggaccagaaacgcaagtcctcggcccagatagatccgactcccgtgatcgtcacctccaacaccaacatgtgcgccgtgattgacgggaactcaacgaccttcgaacaccagcagccgttgcaagaccgaatgttcaaatttgaactcacccgccgtctggatcatgacttcgggaaggtcaccaagcaggaagtcaaagactttttccggtgggcaaaggatcacgtggttgaggtggagcatgaattctacgtcaaaaagggtggagccaagaaaagacccgcccctagtgacgcagatataagtgagcccaaacgggtgcgcgagtcagttgcgcagccatcgacgtcagacgcggaagcttcgatcaactacgcggacaggtaccaaaacaaatgttctcgtcacgtgggcatgaatctgatgctgtttccctgcagacaatgcgagagaatgaatcaaaattcaaatatctgcttcactcacggacagaaagactgtttagagtgctttcccgtgtcagaatctcaacctgtttctgtcgtcaaaaaggcgtatcagaaactgtgctacattcatcatatcatgggaaaggtgccagacgcttgcactgcctgcgatctggtcaatgtggatttggatgactgcatctctgaacaataaatgatttaaatcaggtatggctgccgatggttatcttccagattggctcgaggacactctctctgaaggaataagacagtggtggaagctcaaacctggcccaccaccaccaaagcccgcagagcggcataaggacgacagcaggggtcttgtgcttcctgggtacaagtacctcggacccttcaacggactcgacaagggagagccggtcaacgaggcagacgccgcggctctcgagcacgacaaggcctacgaccggcagctcgacagcggagacaacccgtacctcaagtacaaccacgccgacgcggagtttcaggagcgtcttaaagaagatacgtcttttgggggcaacctcggacgagcagtcttccaggcgaaaaagagggttcttgaacctctgggcctggttgaggaacctgttaagacggctccgggaaaaaagaggccggtagagcactctcctgcggagccagactcctcctcgggaaccggaaaagcgggccagcagcctgcaagaaaaagactgaatttcggtcagactggagacgcagactccgtacctgacccccagcctctcggacagccaccagcagcccccacaagtttgggatctactacaatggctacaggcagtggcgcaccaatggcagacaataacgagggtgccgatggagtgggtaattcctcaggaaattggcattgcgattcccaatggctgggcgacagagtcatcaccaccagcacccgaacctgggccctgcccacctacaacaaccacctttacaagcaaatctccagccaatcaggagcctcaaacgacaaccactactttggctacagcaccccctgggggtattttgacttcaacagattccactgccgcttttcaccacgtgactggcaaagactcatcaacaacaactggggattccgacccaagagactcaacttcaagctctttaacattcaagtcaaagaggtcacgcagaatgacggtacgacgacgattgccaataaccttaccagcacggttcaggtgtttactgactcggagtaccagctcccgtacgtcctcggctcggcgcatcaaggatgcctcccgccgtttccagcggacgtcttcatggtcccacagtatggatacctcaccctgaacaacgggagtcaggcggtaggacgctcttccttttactgcctggagtactttccttctcagatgctgcgtactggaaacaactttcagttcagctacacttttgaagacgtgcctttccacagcagctacgctcacagccagggtttggatcggctgatgaatcctctgatcgaccagtacctgtattatctaaacagaacacaaacagctagtggaactcagcagtctcggctactgtttagccaagctggacccacaagcatgtctcttcaagctaaaaactggctgcctggaccgtgttatcgccagcagcgtttgtcaaagcaggcaaacgacaacaacaacagcaactttccctggactggagctaccaagtaccacctcaatggcggagactctttggtgaacccgggcccggccatggccagccacaaggacgatgaagaaaagtttttccccatgcatggaaccctaatatttggtaaagaaggaacaaatgctaccaacgcggaattggaaaatgtcatgattacagatgaagaggaaatcaggaccaccaatcccgtggctacagagcagtacggatatgtgtcaaataatttgcaaaactcaaatactgctgcaagtactgaaactgtgaatcaccaaggagcattacctggtatggtgtggcaggatcgagacgtgtacctgcggggacccatttgggccaagattcctcacgccgatggacactttcatccttctccactgatgggaggttttggactcaaacacccgcctcctcagattatgatcaaaaacactcccgttccagccaatcctcccacaaacttcagttctgccaagtttgcttccttcatcacacagtattccacgggacaggtcagcgtggagatcgagtgggagctgcagaaggagaacagcaaacgctggaatcccgaaattcagtacacttccaactacaacaaatctgttaatgtggactttactgtggacactaatggtgtgtattcagagcctcgccccattggcaccagatacctgactcgtaatctgtaattgcttgttaatcaataaaccgtttaattcgtttcagttgaactttggtctctgcgaagggcgaattcgcggccgctaaattcaattcg

SEQ ID NO: 4952 - protein, 734 aa, Adeno-associated virus
MAADGYLPDWLEDTLSEGIRQWWKLKPGPPPPKPAERHKDDSRGLVLPGYKYLGPFNGLDKGEPVNEADAAALEHDKAYDRQLDSGDNPYLKYNHADAEFQERLKEDTSFGGNLGRAVFQAKKRVLEPLGLVEEPVKTAPGKKRPVEHSPAEPDSSSGTGKAGQQPARKRLNFGQTGDADSVPDPQPLGQPPAAPTSLGSTTMATGSGAPMADNNEGADGVGNSSGNWHCDSQWLGDRVITTSTRTWALPTYNNHLYKQISSQSGASNDNHYFGYSTPWGYFDFNRFHCHFSPRDWQRLINNNWGFRPKRLNFKLFNIQVKEVTQNDGTTTIANNLTSTVQVFTDSEYQLPYVLGSAHQGCLPPFPADVFMVPQYGYLTLNNGSQAVGRSSFYCLECFPSQMLRTGNNFQFSYTFEDVPFHSSYAHSQSLDRLMNPLIDQYLYYLNRTQTASGTQQSRLLFSQAGPTSMSLQAKNWLPGPCYRQQRLSKQANDNNNSNFPWTGATKYHLNGRDSLVNPGPAMASHKDDEEKFFPMHGTLIFGKEGTNATNAELENVMITDEEEIRTTNPVATEQYGYVSNNLQNSNTAASTETVNHQGALPGMVWQDRDVYLQGPIWAKIPHTDGHFHPSPLMGGFGLKHPPPQIMIKNTPVPANPPTNFSSAKFASFITQYSTGQVSVEIEWELQKENSKRWNPEIQYTSNYNKSVNVDFTVDTNGVYSEPRPIGTRYLTRNL

SEQ ID NO: 4953 - DNA, 2208 bp, Adeno-associated virus
atggctgccgatggttatcttccagattggctcgaggacactctctctgaaggaataagacagtggtggaagctcaaacctggcccaccaccaccaaagcccgcagagcggcataaggacgacagcaggggtcttgtgcttcctggatacaagtacctcggacccttcaacggactcgacaagggagagccggtcaacgaggcagacgccgcggccctcgagcacgacaaggcctacgaccggcagctcgacagcggagacaacccgtacctcaagtacaaccacgccgacgcggagtttcaggagcgccttaaagaagatacgtcttttgggggcaacctcggacgagcagtcttccaggcgaaaaagagggttcttgaacctctgggcctggttgaggaacctgttaagacggctccgggaaaaaagaggccggtagagcactctcctgtggagccagactcctcctcgggaaccggaaaagcgggcaaccagcctgcaagaaaaagattgaatttcggtcagactggagacgcagactccgtacctgacccccagcctctcggacagccaccagcatccccctctggtctgggaactaatacgatggctacaggcagtggcgcaccaatggcagacaataacgagggcgccgacggagtgggtaattcctcgggaaattggcattgcgattccacatggatgggcgacagagtcgtcaccaccagcacccgcacctgggccctgcccacctacaacaaccacctctacaagcagatttccagccaatcaggagccagcaacgacaaccactactttggctacagcaccccttgggggtattttgacttcaacagattccactgccacttttcgccacgcgactggcagagactcatcaacaacaactggggattccggcccaaaagactcaacttcaagctgtttaacattcaagtcaaggaggtcacgcagaatgacggtacgacgacgattgccaataaccttaccagcacggttcaggtgtttactgacttggagtaccagctcccgtacgtcctcggctcggcgcatcaaggatgcctcccgccgttcccagcagacgtcttcatggtgccacagtatggatacctcaccctgaacaacgggagtcaggcggtaggacgctcttccttttactgcctggagtactttccttctcagatgcttcgcaccggaaacaactttaccttcagctacacttttgaagacgttcctttccacagcagctacgctcacagtcaaagtctggaccgtctcatgaatcctctcatcgaccagtacctgtattacttgagcagaacaaacactccaagcggaaccactacgcagtccaggcttcagttttctcaggccggagcgagtgacattcgggaccagtctaggaactggcttcctggaccctgttaccgccagcagcgagtatcaaagacagctgcggataacaacaacagtgaatactcgtggactggagctaccaagtaccacctcaatggcagagactctctggtgaatccgggcccggccatggccagccacaaggacgatgaagaaaagttttttcctcaaagcggggttctcatctttgggaagcaaggctcagagaaaacaaatgtggacattgaaaaggtcatgattacagacgaagaggaaatcaggaccaccaatcccgtggctacggagcagtatggttctgtatctaccaacctccagagcggcaacacacaagcagctacctcagatgtcaacacacaaggcgttcttccaggcatggtctggcaggacagagacgtgtacctgcaggggcccatctgggcaaaaattccacacacggacggacattttcacccctctcccctcatgggcggatttggacttaaacaccctcctccacagattctcattaagaataccccggtacctgcgaatccttcgaccaccttcagcgcggcaaagtttgcttccttcatcacacagtattccacggggcaggtcagcgtggagatcgagtgggagctgcagaaggagaacagcaaacgctggaatcccgaaattcagtacacttccaactacaacaaatctgttaatgtggactttactgtggacactaatggggtgtattcagagcctcgccctattggcaccagatacctgactcgtaatctgtaa

SEQ ID NO: 4954 - DNA, 3159 bp, Adeno-associated virus
gattgatttagcggccgcgaattcgcccttgctgcgtcaactggaccaatgagaactttcccttcaacgattgcgtcgacaagatggtgatctggtgggaggagggaaagatgaccgccaaggtcgtggagtcggccaaagccattctcggaggaagcaaggtgcgtgtggaccaaaagtgcaagtcttcggcccagatcgacccgactcccgtgatcgtcacctccaacaccaacatgtgcgccgtgattgatggaaactcaacgaccttcgagcaccagcagccgttgcaagaccggatgttcaaatttgaacttacccgccgtctggatcatgactttggaaaggtcaccaagcaggaagtgaaagactttttccggtgggcaaaggatcacgtggttgaggtggagcatgagttctacgtcaaaaagggtggagccaaaaaaagacccgcccccagtgacgcagatataagtgagcccaaacgggcgcgcgagtcagttgcgcagccatcgacgtcagacgcggaagcttcgatcaactacgcggacaggtaccaaaacaaatgttctcgtcacgtgggcatgaatctgatgctgtttccctgcagacaatgcgagagaatgaatcagaattcaaatatctgcttcactcacggacagaaagactgtccatagtgctttcccgtgtcagaatctcaacccgtttctgtcgtcaaaaaggcgtatcagaaactgtgctacattcatcacatcatgggaaaggtgccagacgcttgcactgcttgcgacctggtcaatgtggatttggatgactgcatctctgaacaataaatgatttaaatcaggtatggctgccgatggttatcttccagattggctcgaggacactctctctgaaggaataagacagtggtggaagctcaaacctggcccaccaccaccaaagcccgcagagcggcataaggacgacagcaggggtcttgtgcttcctggatacaagtacctcggacccttcaacggactcgacaagggagagccggtcaacgaggcagacgccgcggccctcgagcacgacaaggcctacgaccggcagctcgacagcggagacaacccgtacctcaagtacaaccacgccgacgcggagtttcaggagcgccttaaagaagatacgtcttttgggggcaacctcggacgagcagtcttccaggcgaaaaagagggttcttgaacctctgggcctggttgaggaacctgttaagacggctccgggaaaaaagaggccggtagagcactctcctgtggagccagactcctcctcgggaaccggaaaagcgggcaaccagcctgcaagaaaaagattgaatttcggtcagactggagacgcagactccgtacctgacccccagcctctcggacagccaccagcatccccctctggtctgggaactaatacgatggctacaggcagtggcgcaccaatggcagacaataacgagggcgccgacggagtgggtaattcctcgggaaattggcattgcgattccacatggatgggcgacagagtcgtcaccaccagcacccgcacctgggccctgcccacctacaacaaccacctctacaagcagatttccagccaatcaggagccagcaacgacaaccactactttggctacagcaccccttgggggtattttgacttcaacagattccactgccacttttcgccacgcgactggcagagactcatcaacaacaactggggattccggcccaaaagactcaacttcaagctgtttaacattcaagtcaaggaggtcacgcagaatgacggtacgacgacgattgccaataaccttaccagcacggttcaggtgtttactgacttggagtaccagctcccgtacgtcctcggctcggcgcatcaaggatgcctcccgccgttcccagcagacgtcttcatggtgccacagtatggatacctcaccctgaacaacgggagtcaggcggtaggacgctcttccttttactgcctggagtactttccttctcagatgcttcgcaccggaaacaactttaccttcagctacacttttgaagacgttcctttccacagcagctacgctcacagtcaaagtctggaccgtctcatgaatcctctcatcgaccagtacctgtattacttgagcagaacaaacactccaagcggaaccactacgcagtccaggcttcagttttctcaggccggagcgagtgacattcgggaccagtctaggaactggcttcctggaccctgttaccgccagcagcgagtatcaaagacagctgcggataacaacaacagtgaatactcgtggactggagctaccaagtaccacctcaatggcagagactctctggtgaatccgggcccggccatggccagccacaaggacgatgaagaaaagttttttcctcaaagcggggttctcatctttgggaagcaaggctcagagaaaacaaatgtggacattgaaaaggtcatgattacagacgaagaggaaatcaggaccaccaatcccgtggctacggagcagtatggttctgtatctaccaacctccagagcggcaacacacaagcagctacctcagatgtcaacacacaaggcgttcttccaggcatggtctggcaggacagagacgtgtacctgcaggggcccatctgggcaaaaattccacacacggacggacattttcacccctctcccctcatgggcggatttggacttaaacaccctcctccacagattctcattaagaataccccggtacctgcgaatccttcgaccaccttcagcgcggcaaagtttgcttccttcatcacacagtattccacggggcaggtcagcgtggagatcgagtgggagctgcagaaggagaacagcaaacgctggaatcccgaaattcagtacacttccaactacaacaaatctgttaatgtggactttactgtggacactaatggggtgtattcagagcctcgccctattggcaccagatacctgactcgtaatctgtaattgcttgttaatcaataaaccgtttaattcgtttcagttgaactttggtctctgcgaagggcgaattcgtttaaacctgcaggactagtccctttagtgagg

SEQ ID NO: 4955 - protein, 735 aa, Adeno-associated virus
MAADGYLPDWLEDTLSEGIRQWWKLKPGPPPPKPAERHKDDSRGLVLPGYKYLGPFNGLDKGEPVNEADAAALEHDKAYDRQLDSGDNPYLKYNHADAEFQERLKEDTSFGGNLGRAVFQAKKRVLEPLGLVEEPVKTAPGKKRPVEHSPVEPDSSSGTGKAGNQPARKRLNFGQTGDADSVPDPQPLGQPPASPSGLGTNTMATGSGAPMADNNEGADGVGNSSGNWHCDSTWMGDRVVTTSTRTWALPTYNNHLYKQISSQSGASNDNHYFGYSTPWGYFDFNRFHCHFSPRDWQRLINNNWGFRPKRLNFKLFNIQVKEVTQNDGTTTIANNLTSTVQVFTDLEYQLPYVLGSAHQGCLPPFPADVFMVPQYGYLTLNNGSQAVGRSSFYCLEYFPSQMLRTGNNFTFSYTFEDVPFHSSYAHSQSLDRLMNPLIDQYLYYLSRTNTPSGTTTQSRLQFSQAGASDIRDQSRNWLPGPCYRQQRVSKTAADNNNSEYSWTGATKYHLNGRDSLVNPGPAMASHKDDEEKFFPQSGVLIFGKQGSEKTNVDIEKVMITDEEEIRTTNPVATEQYGSVSTNLQSGNTQAATSDVNTQGVLPGMVWQDRDVYLQGPIWAKIPHTDGHFHPSPLMGGFGLKHPPPQILIKNTPVPANPSTTFSAAKFASFITQYSTGQVSVEIEWELQKENSKRWNPEIQYTSNYNKSVNVDFTVDTNGVYSEPRPIGTRYLTRNL

SEQ ID NO: 4956 - DNA, 2205 bp, Adeno-associated virus
atggctgccgatggttatcttccagattggctcgaggacactctctctgaaggaataagacagtggtggaagctcaaacctggcccaccaccaaagcccgcagagcggcataaggacgacagcaggggtcttgtgcttcctggatacaagtacctcggacccttcaacggactcgacaagggagagccggtcaacgaggcagacgccgcggccctcgagcacgacaaggcctacgaccggcagctcgacagcggagacaacccgtacctcaagtacaaccacgccgacgcggagtttcaggagcgccttaaagaagatacgtcttttgggggcaacctcggacgagcagtcttccaggcgaaaaagagggttcttgaacctctgggcctggttgaggaacctgttaagacggctccgggaaaaaagaggcccgtagagcactctcctgtggagccagactcctcctcgggaaccggaaaagcgggcaaccagcctgcaagaaaaagattgaatttcggtcagactggagacgcagactccgtacctgacccccagcctctcggacagccaccagcagccccctctggtctgggaactaatacgatggctacaggcagtggcgcaccaatggcagacaataacgagggcgccgacggagtgggtaattcctcgggagattggcattgcgattccacatggatgggcgacagagtcatcaccaccagcacccgcacctgggccctgcccacctacaacaaccacctctacaagcagatttccagccaatcaggagccagcaatgacaaccactactttggctacagcaccccttgggggtattttgacttcaacagattccactgccacttttcgccacgcgactggcagagactcatcaacaacaactggggattccggcccaaaagactcaacctcaagctgtttaacattcaagtcaaggaggtcacgcagaatgacggtacgacgacgattgccaataaccttaccagcacggttcaggtgtttactgacttggagtaccagctcccgtacgtcctcggctcggcgcatcaaggatgcctcccgccgttcccagcagacgtcttcatggtgccacagtatggatacctcaccctgaacaacgggagtcaggcggtaggacgctcttccttttactgcctggagtactttccttctcagatgcttcgtaccggaaacaactttaccttcagctacacttttgaagacgttcctttccacagcagctacgctcacagtcaaagtctggaccgtctcatgaatcctctcatcgaccagtacctgtattacttgagcagaacaaacactccaagcggaaccactacgcagtccaggcttcagttttctcaggccggagcgagtgacattcgggaccagtctaggaactggcttcctggaccctgttaccgccagcagcgagtatcaaagacagctgcggataacaacaacggtgaatactcgtggactggagctaccaagtaccacctcaatggcagagactctctggtgaatccgggcccggccatggccagccacaaggacgatgaagaaaagttttttcctcaaagcggggttctcatctttgggaagcaaggctcagagaaaacaaatgtggacattgaaaaggtcatgattacagacgaagaggaaatcaggaccaccaatcccgtggctacggagcagtatggttctgtatctaccaacctccagagcggcaacacacgagcagctacctcagatgtcaacacacaaggcgttcttccaggcatggtctggcaggacagagacgtgtacctgcaggggcccatctgggcaaaaattccacacacggacggacattttcacccctctcccctcatgggcggatttggacttaaacaccctcctccacagattctcattaagaataccccggtacctgcgaatccttcgaccaccttcagcgcggcaaagtttgcttccttcatcacacagtattccacggggcaggtcagcgtggagatcgagtgggagctgcagaaggagaacagcaaacgctggaatcccgaaattcagtacacttccaactacaacaaatctgttaatgtggactttactgtggacactaatggggtgtattcagagcctcgccctattggcaccagatacctgactcgtaatctgtaa

SEQ ID NO: 4957 - DNA, 3156 bp, Adeno-associated virus
cgattgaatttagcggccgcgaattcgcccttgctgcgtcaacggaccaatgagaactttcccttcaacgattgcgtcgacaagatggtgatctggtgggaggagggaaagatgaccgccaaggtcgtggagtcggccaaagccattctcggaggaagcaaggtgcgtgtggaccaaaagtgcaagtcttcggcccagatcgacccgactcccgtgatcgtcacctccaacaccaacatgtgcgccgtgattgatggaaactcaacgaccttcgagcaccagcagccgttgcaagaccggatgttcaaatttgaacttacccgccgtctggatcatgactttggaaaggtcaccaagcaggaagtgaaagactttttccggtgggcaaaggatcacgtggttgaggtggagcatgagttctacgtcaaaaagggtggagccaaaaaaagacccgcccccagtgacgcagatataagtgagcccaaacgggcgcgcgagtcagttgcgcagccatcgacgtcagacgcggaagcttcgatcaactacgcggacaggtaccaaaacaaatgttctcgtcacgtgggcatgaatctgatgctgtttccctgcagacaatgcgagcgaatgaatcagaattcaaatatctgcttcactcacggacagaaagactgtttagagtgctttcccgtgtcagaatctcaacccgtttctgtcgtcaaaaaggcgtatcagaaactgtgctacattcatcacatcatgggaaaggtgccagacgcttgcactgcttgcgacctggtcaatgtggatttggatgactgcatctctgaacaataaatgatttaaatcaggtatggctgccgatggttatcttccagattggctcgaggacactctctctgaaggaataagacagtggtggaagctcaaacctggcccaccaccaaagcccgcagagcggcataaggacgacagcaggggtcttgtgcttcctggatacaagtacctcggacccttcaacggactcgacaagggagagccggtcaacgaggcagacgccgcggccctcgagcacgacaaggcctacgaccggcagctcgacagcggagacaacccgtacctcaagtacaaccacgccgacgcggagtttcaggagcgccttaaagaagatacgtcttttgggggcaacctcggacgagcagtcttccaggcgaaaaagagggttcttgaacctctgggcctggttgaggaacctgttaagacggctccgggaaaaaagaggcccgtagagcactctcctgtggagccagactcctcctcgggaaccggaaaagcgggcaaccagcctgcaagaaaaagattgaatttcggtcagactggagacgcagactccgtacctgacccccagcctctcggacagccaccagcagccccctctggtctgggaactaatacgatggctacaggcagtggcgcaccaatggcagacaataacgagggcgccgacggagtgggtaattcctcgggagattggcattgcgattccacatggatgggcgacagagtcatcaccaccagcacccgcacctgggccctgcccacctacaacaaccacctctacaagcagatttccagccaatcaggagccagcaatgacaaccactactttggctacagcaccccttgggggtattttgacttcaacagattccactgccacttttcgccacgcgactggcagagactcatcaacaacaactggggattccggcccaaaagactcaacctcaagctgtttaacattcaagtcaaggaggtcacgcagaatgacggtacgacgacgattgccaataaccttaccagcacggttcaggtgtttactgacttggagtaccagctcccgtacgtcctcggctcggcgcatcaaggatgcctcccgccgttcccagcagacgtcttcatggtgccacagtatggatacctcaccctgaacaacgggagtcaggcggtaggacgctcttccttttactgcctggagtactttccttctcagatgcttcgtaccggaaacaactttaccttcagctacacttttgaagacgttcctttccacagcagctacgctcacagtcaaagtctggaccgtctcatgaatcctctcatcgaccagtacctgtattacttgagcagaacaaacactccaagcggaaccactacgcagtccaggcttcagttttctcaggccggagcgagtgacattcgggaccagtctaggaactggcttcctggaccctgttaccgccagcagcgagtatcaaagacagctgcggataacaacaacggtgaatactcgtggactggagctaccaagtaccacctcaatggcagagactctctggtgaatccgggcccggccatggccagccacaaggacgatgaagaaaagttttttcctcaaagcggggttctcatctttgggaagcaaggctcagagaaaacaaatgtggacattgaaaaggtcatgattacagacgaagaggaaatcaggaccaccaatcccgtggctacggagcagtatggttctgtatctaccaacctccagagcggcaacacacgagcagctacctcagatgtcaacacacaaggcgttcttccaggcatggtctggcaggacagagacgtgtacctgcaggggcccatctgggcaaaaattccacacacggacggacattttcacccctctcccctcatgggcggatttggacttaaacaccctcctccacagattctcattaagaataccccggtacctgcgaatccttcgaccaccttcagcgcggcaaagtttgcttccttcatcacacagtattccacggggcaggtcagcgtggagatcgagtgggagctgcagaaggagaacagcaaacgctggaatcccgaaattcagtacacttccaactacaacaaatctgttaatgtggactttactgtggacactaatggggtgtattcagagcctcgccctattggcaccagatacctgactcgtaatctgtaattgcttgttaatcaataaaccgtttaattcgtttcagttgaactttggtctctgcgaagggcgaattcgtttaaacctgcaggactagtccctttagtgag

SEQ ID NO: 4958 - protein, 734 aa, Adeno-associated virus
MAADGYLPDWLEDTLSEGIRQWWKLKPGPPPKPAERHKDDSRGLVLPGYKYLGPFNGLDKGEPVNEADAAALEHDKAYDRQLDSGDNPYLKYNHADAEFQERLKEDTSFGGNLGRAVFQAKKRVLEPLGLVEEPVKTAPGKKRPVEHSPVEPDSSSGTGKAGNQPARKRLNFGQTGDADSVPDPQPLGQPPAAPSGLGTNTMATGSGAPMADNNEGADGVGNSSGDWHCDSTWMGDRVITTSTRTWALPTYNNHLYKQISSQSGASNDNHYFGYSTPWGYFDFNRFHCHFSPRDWQRLINNNWGFRPKRLNLKLFNIQVKEVTQNDGTTTIANNLTSTVQVFTDLEYQLPYVLGSAHQGCLPPFPADVFMVPQYGYLTLNNGSQAVGRSSFYCLEYFPSQMLRTGNNFTFSYTFEDVPFHSSYAHSQSLDRLMNPLIDQYLYYLSRTNTPSGTTTQSRLQFSQAGASDIRDQSRNWLPGPCYRQQRVSKTAADNNNGEYSWTGATKYHLNGRDSLVNPGPAMASHKDDEEKFFPQSGVLIFGKQGSEKTNVDIEKVMITDEEEIRTTNPVATEQYGSVSTNLQSGNTRAATSDVNTQGVLPGMVWQDRDVYLQGPIWAKIPHTDGHFHPSPLMGGFGLKHPPPQILIKNTPVPANPSTTFSAAKFASFITQYSTGQVSVEIEWELQKENSKRWNPEIQYTSNYNKSVNVDFTVDTNGVYSEPRPIGTRYLTRNL

SEQ ID NO: 4959 - DNA, 2208 bp, Adeno-associated virus
atggctgccgatggttatcttccagattggctcgaggacactctctctgaaggaataagacagtggtggaagctcaaacctggcccaccaccaccaaagcccgcagagcggcataaggacgacagcaggggtcttgtgcttcctgggtacaagtacctcggacccttcaacggactcgacaagggagagccggtcaacgaggcagacgccgcggccctcgagcacgacaaggcctacgaccggcagctcgacagcggagacaacccgtacctcaagtacgaccacgccgacgcggagtttcaggagcgccttaaagaagatacgtcttttgggggcaacctcggacgagcagtcttccaggcaaaaaagagggttcttgaacctctgggcctggttgaggagcctgttaagacggctccgggaaaaaagaggccggtagagcactctcctgtggagccagactcctcctcgggaaccggaaaagcgggcaaccagcctgcaagaaagagattgaatttcggtcagactggagacgcagactccgtacctgacccccagcctctcggacagccaccagcagccccctctggtctgggaactaatacgatggctacaggcagtggcgcaccaatggcagacaataacgatggcgccgacggagtgggtaattcctcgggaaattggcattgcgattccacatggatgggcgacagagtcatcaccaccagcacccgaacctgggctctgcccacctacaacaaccatctgtacaagcagatttccagccaatcaggagccagcaacgacaaccactactttggctacagcaccccttgggggtattttgacttcaacagattccactgccacttttcaccacgtgactggcaaagactcatcaacaacaactggggattccggcccaagagactcaacttcaagctctttaacattcaagtcagagaggtcacgcagaatgatggtacgacgacgattgccaataaccttaccagcacggttcaggtgtttactgactcggagtaccagctcccgtacgtcctcggctcggcgcatcaaggatgcctcccgccgttcccagcagacgtcttcatggtgccacagtatggatacctcaccctgaacaacgggagtcaggcagtaggacgctcttcattttactgcctggagtacttcccttctcagatgctgcgtaccggaaacaactttaccttcagctacacctttgaggatgttcctttccacagcagctacgctcacagccagagtttggaccgtctcatgaatcctctcatcgaccagtacctgtattacttgagcagaacaaacactccaagcggaaccaccacgcagtccaggcttcagttttctcaggccggagcgagtgacattcgggatcagtctaggaactggcttcctggaccctgttaccgccagcagcgagtatcaaagacatctgcggacaacaacaacagtgaatactcgtggattggagctaccaagtaccacctcaatggcagagactctctggtgaatccgggcccggcaatggccagccacaaggacgatgaagaaaagttttttcctcagagcggggttctcatctttggaaaacaaggatcagagaaaacaaatgtggacattgaaaaggtcatgattacagacgaagaggaaatcagaaccaccaatcccgtggccacggagcagtatggttctgtatctaccaacctccagagcggcaacacacaagcatctactgcagatgtcaacacacaaggcgttcttccaggcatggtctggcaggacagagacgtgtacctgcaggggcctatctgggcaaagattccgcacacggacggacattttcacccctctcccctcatgggcggattcggacttaaacaccctcctccacagattctcatcaaaaacaccccggtacctgcgaatccttcgaccaccttcagtgcggcaaagtttgcttccttcatcacacagtattccacggggcgggtcagcgtggagatcgagtgggagctacagaaggagaacagcaaacgctggaatcccgagatccagtacacttccaactacaacaaatctgttaatgtggactttactgtggacactaatggtgtgtattcagagcctcgccccattggcaccagatacctgactcgtaatctgtaa

SEQ ID NO: 4960 - protein, 735 aa, Adeno-associated virus
MAADGYLPDWLEDTLSEGIRQWWKLKPGPPPPKPAERHKDDSRGLVLPGYKYLGPFNGLDKGEPVNEADAAALEHDKAYDRQLDSGDNPYLKYDHADAEFQERLKEDTSFGGNLGRAVFQAKKRVLEPLGLVEEPVKTAPGKKRPVEHSPVEPDSSSGTGKAGNQPARKRLNFGQTGDADSVPDPQPLGQPPAAPSGLGTNTMATGSGAPMADNNDGADGVGNSSGNWHCDSTWMGDRVITTSTRTWALPTYNNHLYKQISSQSGASNDNHYFGYSTPWGYFDFNRFHCHFSPRDWQRLINNNWGFRPKRLNFKLFNIQVREVTQNDGTTTIANNLTSTVQVFTDSEYQLPYVLGSAHQGCLPPFPADVFMVPQYGYLTLNNGSQAVGRSSFYCLEYFPSQMLRTGNNFTFSYTFEDVPFHSSYAHSQSLDRLMNPLIDQYLYYLSRTNTPSGTTTQSRLQFSQAGASDIRDQSRNWLPGPCYRQQRVSKTSADNNNSEYSWIGATKYHLNGRDSLVNPGPAMASHKDDEEKFFPQSGVLIFGKQGSEKTNVDIEKVMITDEEEIRTTNPVATEQYGSVSTNLQSGNTQASTADVNTQGVLPGMVWQDRDVYLQGPIWAKIPHTDGHFHPSPLMGGFGLKHPPPQILIKNTPVPANPSTTFSAAKFASFITQYSTGRVSVEIEWELQKENSKRWNPEIQYTSNYNKSVNVDFTVDTNGVYSEPRPIGTRYLTRNL

SEQ ID NO: 4961 - DNA, 2217 bp, Adeno-associated virus
atggctgccgatggttatcttccagattggctcgaggacaacctctctgagggcattcgcgagtggtgggacttgaaacctggagccccgaaacccaaagccaaccagcaaaagcaggacgacggccggggtctggtgcttcctggctacaagtacctcggacccttcaacggactcgacaagggggagcccgtcaacgcggcggacgcagcggccctcgagcacgacaaggcctacgaccagcagctcaaagcgggtgacaatccgtacctgcggtataaccacgccgacgccgagtttcaggagcgtctgcaagaagatacgtcttttgggggcaacctcgggcgagcagtcttccaggccaagaagcgggttctcgaacctctcggtctggttgaggaaggcgctaagacggctcctggaaagaagagaccggtagagccatcaccccagcgttctccagactcctctacgggcatcggcaagacaggccagcagcccgcgaaaaagagactcaactttgggcagactggcgactcagagtcagtgcccgaccctcaaccaatcggagaaccccccgcaggcccctctggtctgggatctggtacaatggctgcaggcggtggcgctccaatggcagacaataacgaaggcgccgacggagtgggtagttcctcaggaaattggcattgcgattccgcatggctgggcgacagagtcatcaccaccagcacccgaccctgggccctccccacctacaacaaccacctctacaagcaaatctccaacgggacatcgggaggaagcaccaacgacaacacctacttcggctacagcaccccctgggggtattttgactttaacagattccactgccacttctcaccacgtgactggcagcgactcatcaacaacaactggggattccggcccaagagactcaacttcaagctcttcaacatccaggtcaaggaggtcacgcagaatgaaggcaccaagaccatcgccaataaccttaccagcacgattcaggtctttacggactcggaataccagctcccgtacgtcctcggctctgcgcaccagggctgcccgcctccgttcccggcggacgtcttcatgattcctcagtacgggtacctgactctgaacaacggcagtcaggccgtgggccgttcctccttctactgcctggagtactttccttctcaaatgcggagaacgggcaacaactttgagttcagctaccagtttgaggacgtgccttttcacagcagctacgcgcatagccaaagcctggaccggctgatgaaccccctcatcgaccagtacctgtactacctgtctcggactcagtccacgggaggtaccgcaggaactcagcagttgctattttctcaggccgggcctaataacatgtcggctcaggccaaaaactggctacccgggccctgctaccggcagcaacgcgtctccacgacactgtcgcaaaataacaacagcaactttgcttggaccggtgccaccaagtatcatctgaatggcagagactctctggtaaatcccggtgtcgctatggcaacgcacaaggacgacgaagagcgattttttccatccagcggagtcttgatgtttgggaaacagggagctggaaaagacaacgtggactatagcagcgttatgctaaccagtgaggaagaaatcaaaaccaccaacccagtggccacagaacagtacggcgtggtggccgataacctgcaacagcaaaacgccgctcctattgtaggggccgtcaacagtcaaggagccttacctggcatggtctggcagaaccgggacgtgtacctgcagggtcctatctgggccaagattcctcacacggacggcaactttcatccttcgccgctgatgggaggctttggactgaaacacccgcctcctcagatcctgattaagaatacacctgttcccgcggatcctccaactaccttcagtcaagccaagctggcgtcgttcatcacgcagtacagcaccggacaggtcagcgtggaaattgaatgggagctgcagaaagagaacagcaagcgctggaacccagagattcagtatacttccaactactacaaatctacaaatgtggactttgctgtcaatactgagggtacttattcagagcctcgccccattggcacccgttacctcacccgtaacctgtaa

SEQ ID NO: 4962 - protein, 738 aa, Adeno-associated virus
MAADGYLPDWLEDNLSEGIREWWDLKPGAPKPKANQQKQDDGRGLVLPGYKYLGPFNGLDKGEPVNAADAAALEHDKAYDQQLKAGDNPYLRYNHADAEFQERLQEDTSFGGNLGRAVFQAKKRVLEPLGLVEEGAKTAPGKKRPVEPSPQRSPDSSTGIGKTGQQPAKKRLNFGQTGDSESVPDPQPIGEPPAGPSGLGSGTMAAGGGAPMADNNEGADGVGSSSGNWHCDSAWLGDRVITTSTRPWALPTYNNHLYKQISNGTSGGSTNDNTYFGYSTPWGYFDFNRFHCHFSPRDWQRLINNNWGFRPKRLNFKLFNIQVKEVTQNEGTKTIANNLTSTIQVFTDSEYQLPYVLGSAHQGCPPPFPADVFMIPQYGYLTLNNGSQAVGRSSFYCLEYFPSQMRRTGNNFEFSYQFEDVPFHSSYAHSQSLDRLMNPLIDQYLYYLSRTQSTGGTAGTQQLLFSQAGPNNMSAQAKNWLPGPCYRQQRVSTTLSQNNNSNFAWTGATKYHLNGRDSLVNPGVAMATHKDDEERFFPSSGVLMFGKQGAGKDNVDYSSVMLTSEEEIKTTNPVATEQYGVVADNLQQQNAAPIVGAVNSQGALPGMVWQNRDVYLQGPIWAKIPHTDGNFHPSPLMGGFGLKHPPPQILIKNTPVPADPPTTFSQAKLASFITQYSTGQVSVEIEWELQKENSKRWNPEIQYTSNYYKSTNVDFAVNTEGTYSEPRPIGTRYLTRNL

SEQ ID NO: 4963 - protein, 735 aa, Adeno-associated virus
MAADGYLPDWLEDTLSEGIRQWWKLKPGPPPPKPAERHKDDSRGLVLPGYKYLGPFNGLDKGEPVNEADAAALEHDKAYDRQLDSGDNPYLKYNHADAEFQERLKEDTSFGGNLGRAVFQAKKRVLEPLGLVEEPVKTAPGKKRPVEHSPVEPDSSSGTGKAGQQPARKRLNFGQTGDADSVPDPQPLGQPPAAPSGLGSTTMATGSGAPMADNNEGADGVGNSSGNWHCDSQWLGDRVITTSTRTWALPTYNNHLYKQISSQSGASNDNHYFGYSTPWGYFDFNRFHCHFSPRDWQRLINNNWGFRPKRLNFKLFNIQVKEVTQNDGTTTIANNLTSTVQVFTDSEYQLPYVLGSAHQGCLPPFPADVFMVPQYGYLTLNNGSQAVGRSSFYCLEYFPSQMLRTGNNFQFSYTFEDVPFHSSYAHSQSLDRLMNPLVDQYLYYLNKTQTNSGTLQQSRLLFSQAGPTNMSLQAKNWLPGPCYRQQRLSKQANDNNNSNFPWTAATKYHLNGRDSLVNPGPAMASHKDDEEKFFPMHGTLIFGKQGTNANDADLENVMITDEEEIRTTNPVATEQYGTVSNNLQNSNTGPTTGTVNHQGALPGMVWQDRDVYLQGPIWAKIPHTDGHFHPSPLMGGFGLKHPPPQIMIKNTPVPANPPTNFSSAKFASFITQYSTGQVSVEIEWELQKENSKRWNPEIQYTSNYNKSVNVDFTVDTNGVYSEPRPIGTRYLTRNL

SEQ ID NO: 4964 - DNA, 3158 bp, Adeno-associated virus
gattgaatttagcggccgcgaattcgcccttgctgcgtcaactggaccaatgagaactttcctttcaatgattgcgtcgacaagatggtgatctggtgggaggagggaaagatgaccgccaaggtcgtggagtcggccaaagccattctcggaggaagcaaggtgcgcgcggaccagaaatgcaagtcctcggcccagatagacccgactcccgtgattgtcacctccaacaccaacatgtgcgccgtgattgacgggaactcaacgaccttcgaacaccagcagccgttgcaagaccggatgttcaaatttgaactcacccgccgtctggatcatgactttgggaaggtcaccaagcaggaagtcaaagactttttccggtgggcaaaggatcacgtggttgaggtggagcatgaattctacgtcaaaaagggtggagctaagaaaagacccgcccccagtgacgcagatataagtgagcccaaacgggcgcgcgagtcagttgcgcagccatcgacgtcagacgcggaagcttcgatcaactacgcgggcaggtaccaaaacaaatgttctcgtcacgtgggcatgaatctgatgctgtttccctgcagacaatgcgagagaatgaatcagaattcaaatatctgcttcactcacggacagaaagactgtttagagtgctttcccgtgtcagaatctcaacccgtttctgtcgtcaaaaaggcgtatcagaaactttgctacattcatcatatcatgggaaaggtgccagacgcttgcactgcctgcgatctggtcaatgtggatttggatgactgcatctctgaacaataaatgatttaaatcaggtatggctgccgatggttatcttccagattggctcgaggacactctctctgaaggaataagacagtggtggaagctcaaacctggcccaccaccaccaaagcccgcagagcggcataaggacgacagcaggggtcttgtgcttcctgggtacaagtacctcggacccttcaacggactcgacaagggggagccggtcaacgaggcagacgccgcggccctcgagcacgacaaggcctacgaccggcagctcgacagcggagacaacccgtacctcaagtacaaccacgccgacgcggagtttcaggagcgccttaaagaagatacgtcttttgggggcaacctcggacgagcagtcttccaggcaaaaaagagggttcttgaacctctgggcctggttgaggaacctgttaaaacggctccgggaaaaaagaggccggtagagcactctcctgtggagccagactcctcctcgggaaccggaaaagcgggccagcagcctgcaagaaaaagattgaatttcggtcagactggagacgcagactccgtacctgacccccagcctctcggacagccaccagcagccccctctggtctgggatctactacaatggctacaggcagtggcgcaccaatggcagacaataacgagggtgccgatggagtgggtaattcctcgggaaattggcattgcgattcccaatggctgggcgacagagtcatcaccaccagcacccgcacctgggccctgcccacctacaacaaccacctctacaagcaaatctccagccaatcaggagcctcaaacgacaaccactactttggctacagcaccccctgggggtattttgacttcaacagattccactgccacttttcaccacgtgactggcaaagactcatcaacaacaactggggattccgacccaagagactcaacttcaagctctttaacattcaagtcaaagaggtcacgcagaatgacggtacgacgacgattgccaataaccttaccagcacggttcaggtgtttactgactcggagtaccagctcccgtacgtcctcggctcggcgcatcaaggatgcctcccgccgtttccagcggacgtcttcatggtcccacagtatggatacctcaccctgaacaacgggagtcaggcagtaggacgctcttcattttactgcctggagtactttccttctcagatgctgcgtaccggaaacaactttcaattcagctacacttttgaagacgtgcctttccacagcagctacgctcacagccagagtctggatcggctgatgaatcctctggtcgaccagtacctgtattatctgaacaagacacaaacaaatagtggaactcttcagcagtctcggctactgtttagccaagctggacccaccaacatgtctcttcaagctaaaaactggctgcctggaccttgctacagacagcagcgtctgtcaaagcaggcaaacgacaacaacaacagcaactttccctggactgcagctacaaagtatcatctaaatggccgggactcgttggttaatccaggaccagctatggccagtcacaaggatgacgaagaaaagtttttccccatgcatggaacccttatatttggtaaacaaggaacaaatgccaacgacgcggatttggaaaatgtcatgattacagatgaagaagaaatcaggaccaccaatcccgtggctacggagcagtacggaactgtatcaaataatttgcaaaactcaaacactggtccaactactggaactgtcaatcaccaaggagcgttacctggtatggtgtggcaggatcgagacgtgtacctgcagggacccatttgggccaagattcctcacaccgatggacactttcatccttctccactgatgggaggttttggactcaaacacccacctcctcaaatcatgatcaaaaacactcccgttccagccaatcctcccacaaacttcagttctgccaagtttgcttctttcatcacacagtattccacggggcaggtcagcgtggagatcgagtgggagctgcagaaggagaacagcaaacgctggaatcccgaaattcagtacacttccaactacaacaaatctgttaatgtggactttactgtggacactaatggtgtgtattcagagcctcgccccattggcaccagatacctgactcgtaatctgtaattgcttgttaatcaataaaccgtttaattcgtttcagttgaactttggtctctgcgaagggcgaattcgtttaaacctgcaggactagtccctttagtga

SEQ ID NO: 4965 - protein, 735 aa, Adeno-associated virus
MAADGYLPDWLEDTLSEGIRQWWKLKPGPPPPKPAERHKDDSRGLVLPGYKYLGPFNGLDKGEPVNEADAAALEHDKAYDRQLDSGDNPYLKYNHADAEFQERLKEDTSFGGNLGRAVFQAKKRVLEPLGLVEEPVKTAPGKKRPVEHPPVEPDSSSGTGKAGQQPARKRLNFGQTGDADSVPDPQPLGQPPAAPSGLGSTTMATGSGAPMADNNEGADGVGNSSGNWHCDSQWLGDRVITTSTRTWALPTYNNHLYKQISSQSGASNDNHYFGYSTPWGYFDFNRFHCHFSPRDWQRLINNNWGFRPKRLNFKLFNIQVKEVTQNDGTTTIANNLTSTVQVFTDSEYQLPYVLGSAHQGCLPPFPADVFMVPQYGYLTLNNGSQAVGRSSFYCLEYFPSQMLRTGNNFQFSYTFEDVPFHSSYAHSQSLDRLMNPLIDQYLYYLNKTQTNSGTLQQSRLLFSQAGPTNMSLQAKNRLPGPCYRQQRLSKQANDNNNSNFPWTAATKYHLNGRDSLVNPGPAMASHKDDEEKFFPMHGTLIFGKQGTNANDADLENVMITDEEEIRTTNPVATEQYGTVSNNLQNSNTGPTTGTVNHQGALPGMVWQDRDVYLQGPIWAKIPHTDGHFHPSPLVGGFGLKHPPPQIMIKNTPVPANPPTNFSSAKFASFITQYSTGQVSVEIEWELQKENSKRWNPEIQYTSNYNKSVNVDFTVDTNGVYSEPRPIGTRYLTRNL

SEQ ID NO: 4966 - DNA, 3159 bp, Adeno-associated virus
gattgaatttagcggccgcgaattcgcccttgctgcgtcaactggaccaatgagaactttcctttcaatgattgcgtcgacaagatggtgatctggtgggaggagggaaagatgaccgccaaggtcgtggagtcggccaaagccattctcggaggaagcaaggtgcgcgtggaccagaaatgcaagtcctcggcccagatagacccgactcccgtgattgtcacctccaacaccgacatgtgcgccgtgattgacgggaactcaacgaccttcgaacaccagcagccgttgcaagaccggatgttcaaatttgaactcacccgccgtctggatcatgactttgggaaggtcaccaagcaggaagtcaaagactttttccggtgggcaaaggatcacgtggttgaggtggagcatgaattctacgtcaaaaagggtggagctaagaaaagacccgcccccagtgacgcagatataagtgagcccaaacgggcgcgcgagtcagttgcgcagccatcgacgtcagacgcggaagcttcgatcaactacgcggacaggtaccaaaacaaatgttctcgtcacgtgggcatgaatctgatgctgtttccctgcagacaatgcgagagaatgaatcagaattcaaatatctgcttcactcacggacagaaagactgtttagagtgctttcccgtgtcagaatctcaacccgtttctgtcgtcaaaaaggcgtatcagaaactttgctacattcatcatatcatgggaaaggtgccagacgcttgcactgcctgcgatctggtcaatgtggatttggatgactgcatctctgaacaataaatgatttaaatcaggtatggctgccgatggttatcttccagattggctcgaggacactctctctgaaggaataagacagtggtggaagctcaaacctggcccaccaccaccaaagcccgcagagcggcataaggacgacagcaggggtcttgtgcttcctgggtacaagtacctcggacccttcaacggactcgacaagggggagccggtcaacgaggcagacgccgcggccctcgagcacgacaaggcctacgaccggcagctcgacagcggagacaacccgtacctcaagtacaaccacgccgacgcggagtttcaggagcgccttaaagaagatacgtcttttgggggcaacctcggacgagcagtcttccaggcaaaaaagagggttcttgaacctctgggcctggttgaggaacctgttaaaacggctccgggaaaaaagaggccggtagagcaccctcctgtggagccagactcctcctcgggaaccggaaaagcgggccagcagcctgcaagaaaaagattgaatttcggtcagactggagacgcagactccgtacctgacccccagcctctcggacagccaccagcagccccctctggtctgggatctactacaatggctacaggcagtggcgcaccaatggcagacaataacgagggtgccgatggagtgggtaattcctcgggaaattggcattgcgattcccaatggctgggcgacagagtcatcaccaccagcacccgcacctgggccctgcccacctacaacaaccacctctacaagcaaatctccagccaatcaggagcctcaaacgacaaccactactttggctacagcaccccctgggggtattttgacttcaacagattccactgccacttttcaccacgtgactggcaaagactcatcaacaacaactggggattccgacccaagagactcaacttcaagctctttaacattcaagtcaaagaggtcacgcagaatgacggtacgacgacgattgccaataaccttaccagcacggttcaggtgtttactgactcggagtaccagctcccgtacgtcctcggctcggcgcatcaaggatgcctcccgccgtttccagcggacgtcttcatggtcccacagtatggatacctcaccctgaacaacgggagtcaggcagtaggacgctcttcattttactgcctggagtactttccttctcagatgctgcgtaccggaaacaactttcagttcagctacacttttgaagacgtgcctttccacagcagctacgctcacagccagagtctggatcggctgatgaatcctctgatcgaccagtacctgtattatctgaacaagacacaaacaaatagtggaactcttcagcagtctcggctactgtttagccaagctggacccaccaacatgtctcttcaagctaaaaaccggctgcctggaccttgctacagacagcagcgtctgtcaaagcaggcaaacgacaacaacaacagcaactttccctggaccgcagctacaaagtatcatctaaatggccgggactcgttggttaatccaggaccagctatggccagtcacaaggatgacgaagaaaagtttttccccatgcatggaacccttatatttggtaaacaaggaacaaatgccaacgacgcggatttggaaaatgtcatgattacagatgaagaagaaatcaggaccaccaatcccgtggctacggagcagtacggaactgtatcaaataatttgcaaaactcaaacactggtccaactactggaactgtcaatcaccaaggagcgttacctggtatggtgtggcaggatcgagacgtgtacctgcagggacccatttgggccaagattcctcacaccgatggacactttcatccttctccactggtgggaggttttggactcaaacacccacctcctcaaatcatgatcaaaaacactcccgttccagccaatcctcccacaaacttcagttctgccaagtttgcttctttcatcacacagtattccacggggcaggtcagcgtggagatcgagtgggagctgcagaaggagaacagcaaacgctggaatcccgaaattcagtacacttccaactacaacaaatctgttaatgtggactttactgtggacactaatggtgtgtattcagagcctcgccccattggcaccagatacctgactcgtaatctgtaattgcttgttaatcaataaaccgtttaattcgtttcagttgaactttggtctctgcgaagggcgaattcgtttaaacctgcaggactagtccctttagtgag

SEQ ID NO: 4967 - DNA, 2208 bp, Adeno-associated virus
atggctgccgatggttatcttccagattggctcgaggacactctctctgaaggaataagacagtggtggaagctcaaacctggcccaccaccaccaaagcccgcagagcggcataaggacgacagcaggggtcttgtgcttcctgggtacaagtaccttggacccttcaacggactcgacaagggagagccggtcaacgaggcagacgccgcggccctcgagcacgacaaggcctacgaccggcagctcgacagcggagacaacccgtaccccaagtacaaccacgccgacgcggagttccaggagcgtcttaaagaagatacgtcttttgggggcaacctcggacgagcagtcttccaggcgaaaaagagggttcttgaacctctgggcctggttgaggaacctgttaagacggctccgggaaaaaagaggccggtagagcactctcctgcggagccagactcctcctcgggaaccggaaaagcgggccagcagcctgcaagaaagagattgaatttcggtcagactggagacgcagactccgtacctgacccccagcctctcggacagccaccagcagccccctctggtctgggaactaatacgatggctacaggcagtggcgcaccaatggcagacaataacgagggcgccgacggagtgggtaattcctcgggaaattggcattgcgattccacatggatgggcgacagagtcatcaccaccagcacccgcacctgggctctgcccacctacaacaaccacctctacaagcagatttccagccaatcaggagcctcaaacgacaaccactactttggctacagcaccccttgggggtattttgacttcaacagattccactgccacttttcgccacgtgactggcaaagactcatcaacaacaattggggattccggcccaaaagactcaacttcaagctctttaacattcaagtcaaggaggtcacgcagaatgacggtacgacgacgattgccaataaccttaccagcacggttcaggtgtttactgactcggagtaccagctcccgtacgtcctcggctcggcgcatcaaggatgcctcccgccgttcccagcagacgtcttcatggtgccacagtatggatacctcaccctgaacaacgggagtcaggcagtaggacgctcttcattttactgcctggagtactttccttctcagatgctgcgtaccggaaacaactttaccttcagctacacctttgaggacgttcctttccacagcagctacgcccacagccagagtttggaccgtctcatgaatcctctcatcgaccagtacctgtattacttgagcagaacaaacactccaagcggaaccaccacgcagtcaaggcttcagttttctcaggccggagcaagtgacattcgggaccagtctaggaactggcttcctggaccctgttaccgccagcagcgagtatcaaagacatctgcggataacaacaacagtgaatactcgtggactggagctaccaagtaccaccttaatggaagagactctctggtgaatccgggcccggccatggccagccacaaggacgatgaagaaaagttttttcctcagagcggggttctcatctttggaaaacaagactcgggaaaaactaatgtggacattgaaaaggtcatgattacagacgaagaggaaatcaggaccaccaatcccgtggctacggagcagtatggttctgtatctaccaacctccagagcggcaacacacaagcagctacctcagatgtcaacacacaaggcgttcttccaggcatggtgtggcaggacagagacgtgtacctgcaggggcccatctgggcaaagattccacacacggacggacattttcacccctctcccctcatgggcggattcggacttaaacaccctcccccgcagattctcatcaagaacaccccggtacctgcgaatccttcgactaccttcagtgcggcaaagtttgcttccttcattacacagtactccacggggcaggtcagcgtggagatcgagtgggagctgcagaaggagaacagcaaacgctggaatcccgagattcagtacacttccaactacaacaaatctgttaatgtggactttactgtggacactaatggtgtgtattcagagcctcgccccattggcaccaggtacctgactcgtaatctgtaa

SEQ ID NO: 4968 - protein, 735 aa, Adeno-associated virus
MAADGYLPDWLEDTLSEGIRQWWKLKPGPPPPKPAERHKDDSRGLVLPGYKYLGPFNGLDKGEPVNEADAAALEHDKAYDRQLDSGDNPYPKYNHADAEFQERLKEDTSFGGNLGRAVFQAKKRVLEPLGLVEEPVKTAPGKKRPVEHSPAEPDSSSGTGKAGQQPARKRLNFGQTGDADSVPDPQPLGQPPAAPSGLGTNTMATGSGAPMADNNEGADGVGNSSGNWHCDSTWMGDRVITTSTRTWALPTYNNHLYKQISSQSGASNDNHYFGYSTPWGYFDFNRFHCHFSPRDWQRLINNNWGFRPKRLNFKLFNIQVKEVTQNDGTTTIANNLTSTVQVFTDSEYQLPYVLGSAHQGCLPPFPADVFMVPQYGYLTLNNGSQAVGRSSFYCLEYFPSQMLRTGNNFTFSYTFEDVPFHSSYAHSQSLDRLMNPLIDQYLYYLSRTNTPSGTTTQSRLQFSQAGASDIRDQSRNWLPGPCYRQQRVSKTSADNNNSEYSWTGATKYHLNGRDSLVNPGPAMASHKDDEEKFFPQSGVLIFGKQDSGKTNVDIEKVMITDEEEIRTTNPVATEQYGSVSTNLQSGNTQAATSDVNTQGVLPGMVWQDRDVYLQGPIWAKIPHTDGHFHPSPLMGGFGLKHPPPQILIKNTPVPANPSTTFSAAKFASFITQYSTGQVSVEIEWELQKENSKRWNPEIQYTSNYNKSVNVDFTVDTNGVYSEPRPIGTRYLTRNL

SEQ ID NO: 4969 - DNA, 2208 bp, Adeno-associated virus
atggctgccgatggttatcttccagattggctcgaggacactctctctgaaggaataagacagtggtggaagctcaaacctggcccaccaccaccaaagcccgcagagcggcataaggacgacagcaggggtcttgtgcttcctgggtacaagtaccttggacccttcaacggactcgacaagggagagccggtcaacgaggcagacgccgcggccctcgagcacgacaaggcctacgaccggcagctcgacggcggagacaacccgtacctcaagtacaaccacgccgacgcggagttccaggagcgtcttaaagaagatacgtcttttgggggcaacctcggacgagcagtcttccaggcgaaaaagagggttcttgaacctctgggcctggttgaggaacctgttaagacggctccgggaaaaaagaggccggtagagcactctcttgcggagccagactcctcctcgggaaccggaaaagcgggccagcagcctgcaagaaggagattgaatttcggtcagactggagacgcagactccgtacctgacccccagcctctcggacagccaccagcagccccctctggtctgggaactaatacgatggctacaggcagtggcgcaccaatggcagacaataacgagggcgccgacggagtgggtaattcctcgggaaattggcattgcgattccacatggatgggcgacagagtcatcaccaccagcacccgcacctgggctctgcccacctacaacaaccacctctacaggcagatttccagccaatcaggagcctcaaacgacaaccactactttggctacagcaccccttgggggtattttgacttcaacagattccactgccacttttcgccacgtgactggcaaagactcatcaacaacaattggggatcccggcccaaaagactcaacttcaagctctttaacattcaagtcaaggaggtcacgcagaatgacggtacgacgacgattgccaataaccttaccagcacggttcaggtgtttactgactcggagtaccagctcccgtacgtcctcggctcggcgcatcaaggatgcctcccgccgttcccagcagacgtcttcatggtgccacagtatggatacctcaccctgaacaacgggagtcaggcagtaggacgctcttcattttactgcctggagtactttccttctcagatgctgcgtaccggaaacaactttaccttcagctacacctttgaggacgttcctttccacagcagctacgcccacagccagagtttggaccgtctcatgaatcctctcgtcgaccagtacctgtattacttgagcagaacaaacactccaagcggaaccaccacgcagtcaaggcttcagttttctcaggccggagcaagtgacattcgggaccagtctaggaactggcttcctggaccctgttaccgccagcagcgagtatcaaagacatctgcggataacaacaacagtgaatactcgtggactggagctaccaagtaccaccttaatggaagagactctctggtgaatccgggcccggccatggccagccacaaggacgatgaagaaaagttttttcctcagagcggggttctcatctttggaaaacaagactcgggaaaaactaatgtggacattgaaaaggtcatgattacagacgaagaggaaatcaggaccaccaatcccgtggctacggagcagtatggttctgtatctaccaacctccagagcggcaacacacaagcagctacctcagatgtcaacacacaaggcgttcttccaggcatggtgtggcaggacagagacgtgtacctgcaggggcccatctgggcaaagattccacacacggacggacattttcacccctctcccctcatgggcggattcggacttaaacaccctcccccgcagattctcatcaagaacaccccggtacctgcgaatccttcgactaccttcagtgcggcaaagtttgcttccttcattacacagtactccacggggcaggtcagcgtggagatcgagtgggagctgcagaaggagaacagcaaacgctggaatcccgagattcagtacacttccaactacaacaaatctgttaatgtggactttactgtggacactaatggtgtgtattcagagcctcgccccattggcaccagatacctgactcgtaatctgtaa

SEQ ID NO: 4970 - protein, 735 aa, Adeno-associated virus
MAADGYLPDWLEDTLSEGIRQWWKLKPGPPPPKPAERHKDDSRGLVLPGYKYLGPFNGLDKGEPVNEADAAALEHDKAYDRQLDGGDNPYLKYNHADAEFQERLKEDTSFGGNLGRAVFQAKKRVLEPLGLVEEPVKTAPGKKRPVEHSLAEPDSSSGTGKAGQQPARRRLNFGQTGDADSVPDPQPLGQPPAAPSGLGTNTMATGSGAPMADNNEGADGVGNSSGNWHCDSTWMGDRVITTSTRTWALPTYNNHLYRQISSQSGASNDNHYFGYSTPWGYFDFNRFHCHFSPRDWQRLINNNWGSRPKRLNFKLFNIQVKEVTQNDGTTTIANNLTSTVQVFTDSEYQLPYVLGSAHQGCLPPFPADVFMVPQYGYLTLNNGSQAVGRSSFYCLEYFPSQMLRTGNNFTFSYTFEDVPFHSSYAHSQSLDRLMNPLVDQYLYYLSRTNTPSGTTTQSRLQFSQAGASDIRDQSRNWLPGPCYRQQRVSKTSADNNNSEYSWTGATKYHLNGRDSLVNPGPAMASHKDDEEKFFPQSGVLIFGKQDSGKTNVDIEKVMITDEEEIRTTNPVATEQYGSVSTNLQSGNTQAATSDVNTQGVLPGMVWQDRDVYLQGPIWAKIPHTDGHFHPSPLMGGFGLKHPPPQILIKNTPVPANPSTTFSAAKFASFITQYSTGQVSVEIEWELQKENSKRWNPEIQYTSNYNKSVNVDFTVDTNGVYSEPRPIGTRYLTRNL

SEQ ID NO: 4971 - protein, 738 aa, Adeno-associated virus
MAADGYLPDWLEDNLSEGIREWWDLKPGAPKPKANQQKQDDGRGLVLPGYKYLGPFNGLDKGEPVNAADAAALEHDKAYDQQLKAGDNPYLRYNHADAEFQERLQEDTSFGGNLGRAVFQAKKRVLEPLGLVEEAAKTAPGKKRPVEPSPQRSPDSSAGIGKKGQQPAKKRLNFGQTGDSESVPDPQPIGEPPAGPSGLGSGTMAAGGGAPMADNNEGADGVGSSSGNWHCDSTWLGDRVITTSTRTWALPTYNNHLYKQISNGTSGGSTNDNTYFGYSTPWGYFDFNRFHCHFSPRDWQRLINNNWGFRPKRLSFKLFNIQVKEVTQNEGTETIANNLTSTIQVFTDSEYQLPYVLGSAHQGCLPPFPADVFMIPQYGYLTLNNGSQAVGRSSFYCLEYFPSQMLRTGNNFEFSYTFEDVPFHSSCAHSQSSDRLMNPLIDQYLYYLSRTRSTGGTQGTQQLLFSQAGPANMSAQAKNWLPGPCYRQQRVSTTLSQNNNSNFAWTGATKYHLNGRDSLVNPGVAMATHKDDEERFFPSSGVLMFGKQGAGRDNVDYSSVMLTSEEEIKTTNPVATEQYGVVADNLQQTNTGPIVGNVNSQGALPGMVWQNRDVYLQGPIWAKIPHTDGNFHPSPLMGGFGLKHPPPQILIKNTPVPADPPTTFSQAKLASFITQYSTGQVSVEIEWELQKENSKRWNPEIQYTSNYYKSTNVDFAVNTEGTYSEPRPIGTRYLTRNL

SEQ ID NO: 4972 - DNA, 2217 bp, Adeno-associated virus
atggctgctgacggttatcttccagattggctcgaggacaacctctctgagggcattcgcgagtggtgggacctgaaacctggagcccccaagcccaaggccaaccagcagaagcaggacgacggccggggtctggtgcttcttggctacaagtacctcggacccttcaacggactcgacaagggggagcccgtcaatgcggcggacgcagcggccctcgagcacgacaaggcctacgaccagcagctcaaagcgggtgacaatccgtacctgcggtataaccacgccgacgccgagtttcaggagcgtctgcaagaagatacgtcttttgggggcaacctcgggcgagcagtcttccaggccaagaagcgggttctcgaacctctcggtctggttgaggaagctgctaagacggctcctggaaagaagagaccggtagaaccgtcacctcagcgttcccccgactcctccacgggcatcggcaagaaaggccagcagcccgctaaaaagagactgaactttggtcagactggcgactcagagtcagtccccgaccctcaaccaatcggagaaccaccagcaggcccctctggtctgggatctggtacaatggctgcaggcggtggcgctccaatggcagacaataacgaaggcgccgacggagtgggtagttcctcaggaaattggcattgcgattccacatggctgggcgacagagtcatcaccaccagcacccgaacctgggccctgcccacctacaacaaccacctctacaagcaaatatccaatgggacatcgggaggaagcaccaacgacaacacctacttcggctacagcaccccctgggggtattttgacttcaacagattccactgccacttctcaccacgtgactggcagcgactcatcaacaacaactggggattccggccaaaaagactcagcttcaagctcttcaacatccaggtcaaggaggtcacgcagaatgaaggcaccaagaccatcgccaataaccttaccagcacgattcaggtatttacggactcggaataccagctgccgtacgtcctcggctccgcgcaccagggctgcctgcctccgttcccggcggacgtcttcatgattccccagtacggctaccttacactgaacaatggaagtcaagccgtaggccgttcctccttctactgcctggaatattttccatctcaaatgctgcgaactggaaacaattttgaattcagctacaccttcgaggacgtgcctttccacagcggctacgcacacagccagagcttggaccgactgatgaatcctctcatcgaccagtacctgtactacttatccagaactcagtccacaggaggaactcaaggtacccagcaattgttattttctcaagctgggcctgcaaacatgtcggctcaggctaagaactggctacctggaccttgctaccggcagcagcgagtctctacgacactgtcgcaaaacaacaacagcaactttgcttggactggtgccaccaaatatcacctgaacggaagagactctttggtaaatcccggtgtcgccatggcaacccacaaggacgacgaggaacgcttcttcccgtcgagtggagtcctgatgtttggaaaacagggtgctggaagagacaatgtggactacagcagcgttatgctaaccagcgaagaagaaattaaaaccactaaccctgtagccacagaacaatacggtgtggtggctgacaacttgcagcaaaccaatacagggcctattgtgggaaatgtcaacagccaaggagccttacctggcatggtctggcagaaccgagacgtgtacctgcagggtcccatctgggccaagattcctcacacggacggcaacttccacccttcaccgctaatgggaggatttggactgaagcacccacctcctcagatcctgatcaagaacacgccggtacctgcggatcctccaacgacgttcagccaggcgaaattggcttccttcattacgcagtacagcaccggacaggtcagcgtggaaatcgagtgggagctgcagaaggagaacagcaaacgctggaacccagagattcagtacacttcaaactactacaaatctacaaatgtggactttgctgtcaatacagagggaacttattctgagcctcgccccattggtactcgttacctcacccgtaatctgtaa

SEQ ID NO: 4973 - protein, 738 aa, Adeno-associated virus
MAADGYLPDWLEDNLSEGIREWWDLKPGAPKPKANQQKQDDGRGLVLLGYKYLGPFNGLDKGEPVNAADAAALEHDKAYDQQLKAGDNPYLRYNHADAEFQERLQEDTSFGGNLGRAVFQAKKRVLEPLGLVEEAAKTAPGKKRPVEPSPQRSPDSSTGIGKKGQQPAKKRLNFGQTGDSESVPDPQPIGEPPAGPSGLGSGTMAAGGGAPMADNNEGADGVGSSSGNWHCDSTWLGDRVITTSTRTWALPTYNNHLYKQISNGTSGGSTNDNTYFGYSTPWGYFDFNRFHCHFSPRDWQRLINNNWGFRPKRLSFKLFNIQVKEVTQNEGTKTIANNLTSTIQVFTDSEYQLPYVLGSAHQGCLPPFPADVFMIPQYGYLTLNNGSQAVGRSSFYCLEYFPSQMLRTGNNFEFSYTFEDVPFHSGYAHSQSLDRLMNPLIDQYLYYLSRTQSTGGTQGTQQLLFSQAGPANMSAQAKNWLPGPCYRQQRVSTTLSQNNNSNFAWTGATKYHLNGRDSLVNPGVAMATHKDDEERFFPSSGVLMFGKQGAGRDNVDYSSVMLTSEEEIKTTNPVATEQYGVVADNLQQTNTGPIVGNVNSQGALPGMVWQNRDVYLQGPIWAKIPHTDGNFHPSPLMGGFGLKHPPPQILIKNTPVPADPPTTFSQAKLASFITQYSTGQVSVEIEWELQKENSKRWNPEIQYTSNYYKSTNVDFAVNTEGTYSEPRPIGTRYLTRNL

SEQ ID NO: 4974 - protein, 735 aa, Adeno-associated virus
MAADGYLPDWLEDTLSEGIRQWWKLKPGPPPPKPAERHKDDSRGLVLPGYKYLGPFNGLDKGEPVNEADAAALEHDKAYDRQLDSGDNPYLKYNHADAEFQERLKEDTSFGGNLGRAVFQAKKRVLEPLGLVEPPVKTAPGKKRPVEHSPAEPDSSSGTGKAGQQPARKRLNFGQTGDADSVPDPQPLGQPPAAPSGLGSTTMATGSGAPMADNNEGADGVGNSSGNWHCDSQWLGDRVITTSTRTWALPTYNNHLYKQISSQSGASNDNHYFGYSTPWGYFDFNRFHCHFSPRDWQRLINNNWGFRPKRLNFKLFNIQVKEVTQNDGTTTIANNLTSTVQVFTDSEYQLPYVLGSAHQGCLPPFPADVFMVPQYGYLTLNNGSQAVGRSSFYCLEYFPSQMLRTGNNFQFSYTFEDVPFHSSYAHSQSLDRLMNPLIDQYLYYLNKTQSNSGTLQQSRLLFSQAGPTSMSLQAKNWLPGPCYRQQRLSKQANDNNNSNFPWTAATKYHLNGRDSLVNPGPAMASHKDDEEKFFPMHGTLIFGKQGTNANDADLDNVMITDEEEIRTTNPVATEQYGYVSNNLQNSNTGPTTGTVNHQGALPGMVWQDRDVYLQGPIWAKIPHTDGHFHPSPLMGGFGLKHPPPQIMIKNTPVPANPPTNFSSAKFASFITQYSTGQVSVEIEWELQKENSKRWNPEIQYTSNYNKSVNVDFTVDTNGVYSEPRPIGTRYLTRNL

SEQ ID NO: 4975 - protein, 735 aa, Adeno-associated virus
MAADGYLPDWLEDTLSEGIRQWWKLKPGPPPPKPAERHKDDSRGLVLPGYKYLGPFNGLDKGEPVNEADAAALEHDKAYDRQLDSGDNPYLKYNHADAEFQERLKEDTSFGGNLGRAVFQAKKRVLEPLGLVEGPVKTAPGKKRPVEHSPAEPDSSSGTGKAGQQPARKRLNFGQTGDADSVPDPQPLGQPPAAPSGLGSTTMATGSGAPMADNNEGADGVGNSSGNWHCDSQWLGDRVITTSTRTWALPTYNNHLYKQISSQSGASNDNHYFGYSTPWGYFDFNRFHCHFSPRDWQRLINNNWGFRPKRLNFKLFNIQVKEVTQNDGTTTIANNLTSTVQVFTDSEYQLPYVLGSAHQGCLPPFPADVFMVPQYGYLTLNNGSQAVGRSSFYCLEYFPSQMLRTGNNFQFSYTFEDVPFHSSYAHSQSLDRLMNPLIDQYLYYLNKTQSNSGTLQQSRLLFSQAGPTSMSLQAKNWLPGPCYRQQRLSKQANDNNNSNFPWTAATKYHLNGRDSLVNPGPAMASHKDDEEKFFPMHGTLIFGKQGTNANDADLDNVMITDEEEIRTTNPVATEQYGYVSNNLQNSNTGPTTGTVNHQGALPGMVWQDRDVYLQGPIWAKIPHTDGHFHPSPLMGGFGLKHPPPQIMIKNTPVPANPPTNFSSAKFASFITQYSTGQVSVEIEWELQKENSKRWNPEIQYTSNYNKSVNVDFTVDTNGVYSEPRPIGTRYLTRNL

SEQ ID NO: 4976 - DNA, 2208 bp, Adeno-associated virus
atggctgccgatggttatcttccagattggctcgaggacactctctctgaaggaataagacagtggtggaagctcaaacctggcccaccaccaccaaagcccgcagagcggcataaggacgacagcaggggtcttgtgcttcctgggtacaagtacctcggacccttcaacggactcgacaagggggagccggtcaacgaggcagacgccgcggccctcgagcacgacaaggcctacgaccggcagctcgacagcggagacaacccgtacctcaagtacaaccacgccgacgcggagtttcaggagcgtcttaaagaagatacgtcttttgggggcaacctcggacgagcagtcttccaggcgaaaaagagggttcttgaacctctgggcctggttgagggacctgttaagacggctccgggaaaaaagaggccggtagagcactctcctgcggagccagactcctcctcgggaaccggaaaagcgggccagcagcctgcaagaaaaagattgaattttggtcagactggagacgcagactccgtacctgacccccagcctctcggacagccaccagcagccccctctggtttgggatctactacaatggctacaggcagtggcgcaccaatggcagacaataacgagggtgccgatggagtgggtaattcctcaggaaattggcattgcgattcccaatggctgggcgacagagtcatcaccaccagcacccgaacctgggccctgcccacctacaacaaccacctctacaagcaaatctcaagccaatcaggagcctcaaacgacaaccactactttggctacagcaccccttgggggtattttgacttcaacagattccactgccacttttcaccacgtgactggcaaagactcatcaacaacaactggggattccgacccaagagactcaacttcaagctctttaacattcaagtcaaagaggtcacgcagaatgacggtacgacgacgattgccaataaccttaccagcacggttcaggtgtttactgactcggagtaccagctcccgtacgtcctcgggtcggcgcatcaaggatgcctcccgccgtttccagcggacgtcttcatggtcccacagtatggatacctcaccctgaacaacgggagtcaggcggtaggacgctcttccttttactgcctggagtactttccttctcagatgcttcgtactggaaacaactttcagttcagctacacctttgaagacgttcctttccacagcagctacgctcacagccagagtctggatcggctgatgaatcctctgatcgaccagtacctgtattatctgaacaaaacacaatcaaatagtggaactcttcagcagtctcggctactgtttagtcaagctggacccaccagcatgtctcttcaagctaaaaactggctacctggaccttgctacagacagcagcgtctgtcaaagcaggcaaacgacaacaacaacagcaactttccctggactgcggctacaaagtatcacctaaatggccgggactcgttggttaatccaggaccagctatggccagtcacaaagacgatgaagaaaagtttttccccatgcatggaaccctgatatttggtaaacaaggaacaaatgctaacgacgcggatttggacaatgtcatgattacagatgaagaagaaatccgcaccaccaatcccgtggctacggagcagtacggatatgtgtcaaataatttgcaaaactcaaatactggtccaactactggaactgtcaatcaccaaggagcgttacctggcatggtgtggcaggatcgagacgtgtacctgcagggacccatttgggccaagattcctcacaccgatggacactttcatccttctccactgatgggaggttttgggctcaaacacccgcctcctcagatcatgatcaaaaacactcccgttccagccaatcctcccacaaacttcagttctgccaagtttgcttctttcatcacacagtattccacggggcaggtcagcgtggagatcgagtgggagctgcagaaagagaacagcaaacgctggaatcccgaaattcagtacacttccaactacaacaaatctgttaatgtggactttactgtggacactaatggcgtgtattcagagcctcgccccattggcaccagatacctgactcgtaatctgtaa

SEQ ID NO: 4977 - DNA, 2211 bp, Adeno-associated virus
atggctgccgatggttatcttccagattggctcgaggacaacctctctgagggcattcgcgagtggtgggacttgaaacctggagccccgaagcccaaagccaaccagcaaaagcaggacgacggccggggtctggtgcttcctggctacaagtacctcggacccttcaacggactcgacaagggggagcccgtcaacgcggcggacgcagcggccctcgagcacgacaaggcctacgaccagcagctcaaagcgggtgacaatccgtacctgcggtataaccacgccgacgccgagtttcaggagcgtctgcaagaagatacgtcttttgggggcaacctcgggcgagcagtcttccaggccaagaagcgggttctcgaacctctcggtctggttgaggaaggcgctaagacggctcctggaaagaaacgtccggtagagcagtcgccacaagagccagactcctcctcgggcatcggcaagacaggccagcagcccgctaaaaagagactcaattttggtcagactggcgactcagagtcagtccccgatccacaacctctcggagaacctccagcaacccccgctgctgtgggacctactacaatggcttcaggcggtggcgcaccaatggcagacaataacgaaggcgccgacggagtgggtaatgcctcaggaaattggcattgcgattccacatggctgggcgacagagtcatcaccaccagcacccgcacctgggccttgcccacctacaataaccacctctacaagcaaatctccagtgcttcaacgggggccagcaacgacaaccactacttcggctacagcaccccctgggggtattttgatttcaacagattccactgccacttttcaccacgtgactggcagcgactcatcaacaacaattggggattccggcccaagagactcaacttcaaactcttcaacatccaagtcaaggaggtcacgacgaatgatggcgtcacaaccatcgctaataaccttaccagcacggttcaagtcttctcggactcggagtaccagcttccgtacgtcctcggctctgcgcaccagggctgcctccctccgttcccggcggacgtgttcatgattccgcaatacggctacctgacgctcaacaatggcagccaagccgtgggacgttcatccttttactgcctggaatatttcccttctcagatgctgagaacgggcaacaactttaccttcagctacacctttgaggaagtgcctttccacagcagctacgcgcacagccagagcctggaccggctgatgaatcctctcatcgaccaatacctgtattacctgaacagaactcaaaatcagtccggaagtgcccaaaacaaggacttgctgtttagccgtgggtctccagctggcatgtctgttcagcccaaaaactggctacctggaccctgttatcggcagcagcgcgtttctaaaacaaaaacagacaacaacaacagcaattttacctggactggtgcttcaaaatataacctcaatgggcgtgaatccatcatcaaccctggcactgctatggcctcacacaaagacgacgaagacaagttctttcccatgagcggtgtcatgatttttggaaaagagagcgccggagcttcaaacactgcattggacaatgtcatgattacagacgaagaggaaattaaagccactaaccctgtggccaccgaaagatttgggaccgtggcagtcaatttccagagcagcagcacagaccctgcgaccggagatgtgcatgctatgggagcattacctggcatggtgtggcaagatagagacgtgtacctgcagggtcccatttgggccaaaattcctcacacagatggacactttcacccgtctcctcttatgggcggctttggactcaagaacccgcctcctcagatcctcatcaaaaacacgcctgttcctgcgaatcctccggcggagttttcagctacaaagtttgcttcattcatcacccaatactccacaggacaagtgagtgtggaaattgaatgggagctgcagaaagaaaacagcaagcgctggaatcccgaagtgcagtacacatccaattatgcaaaatctgccaacgttgattttactgtggacaacaatggactttatactgagcctcgccccattggcacccgttaccttacccgtcccctgtaa

SEQ ID NO: 4978 - DNA, 2208 bp, Adeno-associated virus
atggctgccgatggttatcttccagattggctcgaggacactctctctgaaggaacaagacagtggtggaagctcaaacctggcccaccaccaccaaagcccgcagagcggcataaggacgacagcaggggtcttgtgcttcctgggtacaagtacctcggacccttcaacggactcgacaagggggagccggtcaacgaggcagacgccgcggccctcgagcacgacaaggcctacgaccggcagctcgacagcggagacaacccgtacctcaagtacaaccacgccgacgcggagtttcaggagcgtcttaaagaagatacgtcttttgggggcaacctcggacgagcagtcttccaggcgaaaaagagggttcttgaacctctgggcctggttgaggaacctgttaagacggctccgggaaaaaagaggccggtagagcactctcctgcggagccagactcctcctcgggaaccggaaaagcgggccagcagcctgcaagaaaaagattgaattttggtcagactggagacgcagactccgtacctgacccccagcctctcggacagccaccagcagccccctctggtttgggatctactacaatggctacaggcagtggcgcaccaatggcagacaataacgagggtgccgatggagtgggtaattcctcaggaaattggcattgcgattcccaatggctgggcgacagagtcatcaccaccagcacccgaacctgggccctgcccacctacaacaaccacctctacaagcaaatctcaagccaatcaggagcctcaaacgacaaccactactttggctacagcaccccttgggggtattttgacttcaacagattccactgccacttttcaccacgtgactggcaaagactcatcaacaacaactggggattccgacccaagagactcaacttcaagctctttaacattcaagtcaaagaggtcacgcagaatgacggtacgacgacgattgccaataaccttaccagcacggttcaggtgtttactgactcggagtaccagctcccgtacgtcctcgggtcggcgcatcaaggatgcctcccgccgtttccagcggacgtcttcatggtcccacagtatggatacctcaccctgaacaacgggagtcaggcggtaggacgctcttccttttactgcctggagtactttccttctcagatgcttcgtactggaaacaactttcagttcagctacacctttgaagacgttcctttccacagcagctacgctcacagccagagtctggatcggctgatgaatcctctgatcgaccagtacctgtattatctgaacaaaacacaatcaaatagtggaactcttcagcagtctcggctactgtttagtcaagctggacccaccagcatgtctcttcaagctaaaaactggctacctggaccttgctacagacagcagcgtctgtcaaagcaggcaaacgacaacaacaacagcaactttccctggactgcggctacaaagtaccacctaaatggccgggactcgttggttaatccaggaccagctatggccagtcacaaagacgatgaagaaaagtttttccccatgcatggaaccctgatatttggtaaacaaggaacaaatgctaacgacgcggatttggacaatgtcatgattacagatgaagaagaaatccgcaccaccaatcccgtggctacggagcagtacggatatgtgtcaaataatttgcaaaactcaaatactggtccaactactggaactgtcaatcaccaaggagcgttacctggcatggtgtggcaggatcgagacgtgtacctgcagggacccatttgggccaagattcctcacaccgatggacactttcatccttctccactgatgggaggttttgggctcaaacacccgcctcctcagatcatgatcaaaaacactcccgttccagccaatcctcccacaaacttcagttctgccaagtttgcttctttcatcacacagtattccacggggcaggtcagcgtggagatcgagtgggagctgcagaaagagaacagcaaacgctggaatcccgaaattcagtacacttccaactacaacaaatctgttaatgtggactttactgtggacactaatggcgtgtattcagagcctcgccccattggcaccagatacctgactcgtaatctgtaa

SEQ ID NO: 4979 - DNA, 2217 bp, Adeno-associated virus
atggctgctgacggttatcttccagattggctcgaggacaacctctctgagggcattcgcgagtggtgggacctgaaacctggagcccccaagcccaaggccaaccagcagaagcaggacgacggccggggtctggtgcttcctggctacaagtacctcggacccttcaacggactcgacaagggggagcccgtcaacgcggcggacgcagcggccctcgagcacgacaaggcctacgaccagcagctcaaagcgggtgacaatccgtacctgcggtataaccacgccgacgccgagtttcaggagcgtctgcaagaagatacgtcttttgggggcaacctcgggcgagcagtcttccaggccaagaagcgggttctcgaacctctcggtctggttgaggaagctgctaagacggctcctggaaagaagagaccggtagaaccgtcacctcagcgttcccccgactcctccacgggcatcggcaagaaaggccagcagcccgctaaaaagagactgaactttggtcagactggcgactcagagtcagtccccgaccctcaaccaatcggagaaccacctgcaggcccctctggtctgggatctggtacaatggctgcaggcggtggcgctccaatggcagacaataacgaaggcgccgacggagtgggtagttcctcaggaaattggcattgcgattccacatggctgggcgacagagtcatcaccaccagcacccgaacctgggccctgcccacctacaacaaccacctctacaagcaaatatccaatgggacatcgggagggagcaccaacgacaacacctacttcggctacagcaccccctgggggtattttgacttcaacagattccactgccacttctcaccacgtgactggcagcgactcatcaacaacaactggggattccggccaaaaagactcagcttcaagctcttcaacatccaggtcaaggaggtcacgcagaatgaaggcaccaagaccatcgccaataaccttaccagcacgattcaggtatttacggactcggaataccagctgccgtacgtcctcggctccgcgcaccagggctgcctgcctccgttcccggcggacgtcttcatgattccccagtacggctaccttacactgaacaatggaagtcaagccgtaggccgttcctccttctactgcctggaatattttccatctcaaatgctgcgaactggaaacaattttgaattcagctacaccttcgaggacgtgcctttccacagcagctacgcacacagccagagcttggaccgactgatgaatcctctcatcgaccagtacctgtactacttatccagaactcagtccacaggaggaactcaaggtacccagcaattgttattttctcaagctgggcctgcaaacatgtcggctcaggctaagaactggctacctggaccttgctaccggcagcagcgagtctctacgacactgtcgcaaaacaacaacagcaactttgcttggactggtgccaccaaatatcacctgaacggaagagactctttggtaaatcccggtgtcgccatggcaacccacaaggacgacgaggaacgcttcttcccgtcgagtggagtcctgatgtttggaaaacagggtgctggaagagacaatgtggactacagcagcgttatgctaaccagcgaagaagaaattaaaaccactaaccctgtagccacagaacaatacggtgtggtggctgacaacttgcagcaaaccaatacagggcctattgtgggaaatgtcaacagccaaggagccttacctggcatggtctggcagaaccgagacgtgtacctgcagggtcccatctgggccaagattcctcacacggacggcaactgccacccttcaccgctaatgggaggatttggactgaagcacccacctcctcagatcctgatcaagaacacgccggtacctgcggatcctccaacaacgttcagccaggcgaaattggcttccttcattacgcagtacagcaccggacaggtcagcgtggaaatcgagtgggagctgcagaaggagaacagcaaacgctggaacccagagattcagtacacttcaaactactacaaatctacaaatgtggactttgctgtcaatacagagggaacttattctgagcctcgccccattggtactcgttacctcacccgtaatctgtaa

SEQ ID NO: 4980 - protein, 735 aa, Adeno-associated virus
MAADGYLPDWLEDTLSEGTRQWWKLKPGPPPPKPAERHKDDSRGLVLPGYKYLGPFNGLDKGEPVNEADAAALEHDKAYDRQLDSGDNPYLKYNHADAEFQERLKEDTSFGGNLGRAVFQAKKRVLEPLGLVEEPVKTAPGKKRPVEHSPAEPDSSSGTGKAGQQPARKRLNFGQTGDADSVPDPQPLGQPPAAPSGLGSTTMATGSGAPMADNNEGADGVGNSSGNWHCDSQWLGDRVITTSTRTWALPTYNNHLYKQISSQSGASNDNHYFGYSTPWGYFDFNRFHCHFSPRDWQRLINNNWGFRPKRLNFKLFNIQVKEVTQNDGTTTIANNLTSTVQVFTDSEYQLPYVLGSAHQGCLPPFPADVFMVPQYGYLTLNNGSQAVGRSSFYCLEYFPSQMLRTGNNFQFSYTFEDVPFHSSYAHSQSLDRLMNPLIDQYLYYLNKTQSNSGTLQQSRLLFSQAGPTSMSLQAKNWLPGPCYRQQRLSKQANDNNNSNFPWTAATKYHLNGRDSLVNPGPAMASHKDDEEKFFPMHGTLIFGKQGTNANDADLDNVMITDEEEIRTTNPVATEQYGYVSNNLQNSNTGPTTGTVNHQGALPGMVWQDRDVYLQGPIWAKIPHTDGHFHPSPLMGGFGLKHPPPQIMIKNTPVPANPPTNFSSAKFASFITQYSTGQVSVEIEWELQKENSKRWNPEIQYTSNYNKSVNVDFTVDTNGVYSEPRPIGTRYLTRNL

SEQ ID NO: 4981 - DNA, 2208 bp, Adeno-associated virus
atggctgccgatggttatcttccagattggctcgaggacactctctctgaaggaataagacagtggtggaagctcaaacctggcccaccaccaccaaagcccgcagagcggcatcaggacaacagcaggggtcttgtgcttcctgggtacaagtacctcggaccctccaacggactcgacaaaggagagccggtcaacgaggcagacgccgcggccctcgagcacgacaaggcctacgaccggcagctcgacagcggagacaacccgtacctcaagtacaaccacgccgacgcggagtttcaggagcgtcttaaagaagatacgtcttttgggggcaacctcggacgagcagtcttccaggcgaaaaagagggttcttgaacctctgggcctggttgaggaacctgttaagacggctccgggaaaaaagaggccggtagagcactctcctgtggagccagactcctcctcgggaaccggaaaagcgggccatcagcctgcgagaaagagattgaattttggtcagactggagacgcagactccgtacctgacccccagcctctcggacagccaccagcagcccccacaagtttgggatctactacaatggctacaggcagtggcgcaccaatggcagacaataacgagggtgccgatggagtgggtaattcctcaggaaattggcattgcgattcccaatggctgggcgacagagtcatcaccaccagcacccgaacctgggccctgcccacctacaacaaccacctctacaagcaaatctccagccaatcaggagcctcgaacgacaaccactactttggctgcagcaccccctgggggtattttgacttcaacagattccactgtcacttctccccacgtgattggcaaagactcatcaacaacaactggggattccgacccaagagactcaacttcaagctctttaacattcaagtcaaagaggtcacgcagaatgacggtacgacgacgattgccaataaccttaccagcacggttcaggtgtttactgactcggagtacccgctcccgtacgtcctcggctcggcgcatcaaggatgcctcccgccgtttccagcggacgtcttcatggtcccacagtatggatacctcaccctgaacaacgggagtcaggcggtaggacgctcttccttttactgcctggagtactttccttctcagatgctgcgtaccggaaacaactttaccttcagctacacctttgaggacgttcctttccacagcagctacgctcacagccagagtttggaccggctgatgaatcctctgatcgaccagtatctatattatctgaacaggacacaatcaaatagtggaactcttcagcagtctaggctactgtttagccaagctggacccaccagcatgtctcttcaagctaaaaactggctgcctggaccttgctacagacagcagcgtctttcaaagcaggcaaacgacaacaacaacagcaactttccctggactgcggctacaaagtatcatctaaatggccgggactcgttggttaatccaggaccagctatggccagccacaaagacgatgaagaaaagtttttccccatgcatggaaccctgatatttggtaaacaaggaacaaatgctaacgacgcggatttggagcatgttatgattacagatgaagaagaaatcaggaccaccaatcctgtggctacagagcagtacggaaacgtgtcaaataatttgcaaaactcaaatactggtccaactacagaaaatgtcaatcaccagggagcgttacctggtatggtgtggcaggatcgagacgtgtacctgcagggacccatttgggccaagattcctcacaccgacggacactttcacccttctccactgatgggaggttttggactcaaacacccgcctcctcaaatcatgatcaaaaacactcccgttccagccaatcctcccacaaacttcagttctgccaagtttgcttctttcatcacacagtattccacgggccaggtcagcgtggagattgagtgggagctgcagaaggagaacagcaaacgctggaaccccgagatccagtatacttccaactacaacaaatctgttaatgtggactttactgtggacactaatggtgtgtattcagagccttgccccattggcaccagatacctgactcgtaatctgtaa

SEQ ID NO: 4982 - protein, 735 aa, Adeno-associated virus
MAADGYLPDWLEDTLSEGIRQWWKLKPGPPPPKPAERHQDNSRGLVLPGYKYLGPSNGLDKGEPVNEADAAALEHDKAYDRQLDSGDNPYLKYNHADAEFQERLKEDTSFGGNLGRAVFQAKKRVLEPLGLVEEPVKTAPGKKRPVEHSPVEPDSSSGTGKAGHQPARKRLNFGQTGDADSVPDPQPLGQPPAAPTSLGSTTMATGSGAPMADNNEGADGVGNSSGNWHCDSQWLGDRVITTSTRTWALPTYNNHLYKQISSQSGASNDNHYFGCSTPWGYFDFNRFHCHFSPRDWQRLINNNWGFRPKRLNFKLFNIQVKEVTQNDGTTTIANNLTSTVQVFTDSEYPLPYVLGSAHQGCLPPFPADVFMVPQYGYLTLNNGSQAVGRSSFYCLEYFPSQMLRTGNNFTFSYTFEDVPFHSSYAHSQSLDRLMNPLIDQYLYYLNRTQSNSGTLQQSRLLFSQAGPTSMSLQAKNWLPGPCYRQQRLSKQANDNNNSNFPWTAATKYHLNGRDSLVNPGPAMASHKDDEEKFFPMHGTLIFGKQGTNANDADLEHVMITDEEEIRTTNPVATEQYGNVSNNLQNSNTGPTTENVNHQGALPGMVWQDRDVYLQGPIWAKIPHTDGHFHPSPLMGGFGLKHPPPQIMIKNTPVPANPPTNFSSAKFASFITQYSTGQVSVEIEWELQKENSKRWNPEIQYTSNYNKSVNVDFTVDTNGVYSEPCPIGTRYLTRNL

SEQ ID NO: 4983 - DNA, 2196 bp, Adeno-associated virus
atggctgctgacggttatcttccagattggctcgaggacaacctctctgagggcattcgcgagtggtgggcgctgaaacctggagccccgcaacccaaagccaaccagcaaaagcaggacgacggccggggtctggtgcttcctggctacaagtacctcggacccttcaacggactcgacaagggggagcccgtcaacgaggcggacgccgcggccctcgagcacgacaaggcctacgaccagcagctcaaagcgggtgacaatccgtacctgcggtataatcacgccgacgccgagtttcaagagcgtctgcaagaagatacgtcctttgggggcaacctcgggcgagcagtcttccaggccaaaaagagggtactcgagcctctgggtctggttgaggaaggcgctaagacggctcctggaaagaagcggccagtagaaccggactccagctcgggcatcggcaagtcaggccagcagcccgcgaaaaagagactgaattttgggcagactggcgactcagagtcagtgcctgacccccaacctctctcagaaccacccgcaggtccctctggtctgggatctggtacaatggctgctggcggtggcgctccaatggcagacaataacgaaggcgccgacggagtgggtaatgtctcaggaaattggcattgcgattccacatggctgggcgaccgagtcatcaccaccagcactcggacctgggccctccccacctacaacaaccacctctacaagcaaatctccaacgggacctcgggaggcagcagcaacgacaacacctactttggctacagcaccccctgggggtattttgactttaacagattccactgccacttttcaccacgtgactggcagcgactcatcaacaacaactgggggttccggcccaagaagctcaacttcaagctcttcaacatccaggtcaaggaggtcacccagaatgaaggcaccaagaccatcgccaataacctcaccagcacggtgcaggtctttacggactcggagtaccagctcccgtacgtgctcggctctgcccaccagggctgcctgcctccgttcccggcggacgtgttcatgattccgcagtacgggtacctgacgctgaacaacgggagccaggccgtggggcgatcctccttctactgcctggagtactttccctcgcagatgctgagaacgggcaacaactttaccttcagctacaccttcgaggacgtgcccttccacagcagctacgcgcacagccagagcctggaccggctgatgaacccgctgattgaccagtacctgtactacctgtctcggactcagaccaacgggaccaatgccacgcagactctgttgtttgctcaggccgggcctcagaacatgtcggctcaggccaagaactggctgcctggtccttgctatcggcagcagcgcgtctctacgacagtgtcgcaaaacaacaacagcaactttacctggaccggggcgaccaagtaccacctgaacggccgagactccctggtgagccccggtgtcgccatggcaacgcacaaggacgacgaggagcgcttcttcccgagcagcggggtcctgatgtttggcaagcagggcgctggaaaggacaatgtcgagtacaccaacgtgatgctcaccagcgaggaggagatcaagaccaccaaccctgtggccacggagcagtacggcgtggtggctgacaatctgcagcagaccaactcagctcccattgtgggggcagtcaacagccagggggccttacccggtatggtctggcagaaccgggacgtgtacctgcagggtcccatctgggccaagatcccgcatacggacggcaactttcacccgtctcctctcatgggcggctttggactgaaacacccgcctccccagatcctgatcaaaaacacgccggtacctgcggatcccccggtgaactttacggacgctaagctggcgagtttcatcacgcagtacagcaccgggcaggtcagcgtggagattgagtgggagctgcagaaggagaacagcaagcgctggaatcccgagattcagtacacttccaattattataaatcagctaatgtggactttgccgtcaatgcagatggtgtatatagtgaaccccgccccattggcactcgttacctcacccgtaatctgtaa

SEQ ID NO: 4984 - protein, 731 aa, Adeno-associated virus
MAADGYLPDWLEDNLSEGIREWWALKPGAPQPKANQQKQDDGRGLVLPGYKYLGPFNGLDKGEPVNEADAAALEHDKAYDQQLKAGDNPYLRYNHADAEFQERLQEDTSFGGNLGRAVFQAKKRVLEPLGLVEEGAKTAPGKKRPVEPDSSSGIGKSGQQPAKKRLNFGQTGDSESVPDPQPLSEPPAGPSGLGSGTMAAGGGAPMADNNEGADGVGNVSGNWHCDSTWLGDRVITTSTRTWALPTYNNHLYKQISNGTSGGSSNDNTYFGYSTPWGYFDFNRFHCHFSPRDWQRLINNNWGFRPKKLNFKLFNIQVKEVTQNEGTKTIANNLTSTVQVFTDSEYQLPYVLGSAHQGCLPPFPADVFMIPQYGYLTLNNGSQAVGRSSFYCLEYFPSQMLRTGNNFTFSYTFEDVPFHSSYAHSQSLDRLMNPLIDQYLYYLSRTQTNGTNATQTLLFAQAGPQNMSAQAKNWLPGPCYRQQRVSTTVSQNNNSNFTWTGATKYHLNGRDSLVSPGVAMATHKDDEERFFPSSGVLMFGKQGAGKDNVEYTNVMLTSEEEIKTTNPVATEQYGVVADNLQQTNSAPIVGAVNSQGALPGMVWQNRDVYLQGPIWAKIPHTDGNFHPSPLMGGFGLKHPPPQILIKNTPVPADPPVNFTDAKLASFITQYSTGQVSVEIEWELQKENSKRWNPEIQYTSNYYKSANVDFAVNADGVYSEPRPIGTRYLTRNL

SEQ ID NO: 4985 - DNA, 2196 bp, Adeno-associated virus
atggctgctgacggttatcttccagattggctcgaggacaacctctctgagggcattcgcgagtggtgggcgctgaaacctggagccccgcaacccaaagccaaccagcaaaagcaggacgacggccggggtctggtgcttcctggctacaagtacctcggacccttcaacggactcgacaagggggagcccgtcaacgaggcggacgccgcggccctcgagcacgacaaggcctacgaccagcagctcaaagcgggtgacaatccgtacctgcggtataatcacgccgacgccgagtttcaagagcgtctgcaagaagatacgtcctttgggggcaacctcgggcgagcagtcttccaggccaaaaagagggtactcgagcctctgggtctggttgaggaaggcgctaagacggctcctggaaagaagcggccagtagaaccggactccagctcgggcatcggcaagtcaggccggcagcccgcgaaaaagagactgaattttgggcagactggcgactcagagtcagtgcctgacccccaacctctctcagaaccacccgcaggtccctctggtctgggatctggtacaatggctgcaggcggtggcgctccaatggcagacaataacgaaggcgccgacggagtgggtaatgcctcaggaaattggcattgcgattccacatggctgggcgaccgagtcatcaccaccagcactcggacctgggccctccccacctacaacaaccacctctacaagcaaatctccaacgggacctcgggaggcagcagcaacgacaacacctactttggctacagcaccccctgggggtattttgactttaacagattccactgccacttttcaccacgtgactggcagcgactcatcaacaacaactggggattccggcccaagaggctcaacttcaagctcttcaacatccaggtcaaggaggtcacccagaatgaaggcaccaagaccatcgccaataacctcaccagcacggtgcaggtctttacggactcgaagtaccagctcccgtacgtgctcggctctgcccaccagggctgcctgcctccgttcccggcggacgtgttcatgattccgcagtacgggtacctgacgctgaacaacgggagccaggccgtggggcgatcctccttctactgcctggagtactttccctcgcagatgctgagaacgggcaacaactttaccttcagctacaccttcgaggacgtgcccttccacagcagctacgcgcacagccagagcctggaccggctgatgaacccgctgattgaccagtacctgtactacctgtctcggactcagaccaacgggaccaatgccacgcagactctgttgtttgctcaggccgggcctcagaacatgtcggctcaggccaagaactggctgcctggtccttgctatcggcagcagcgcgtctctacgacagtgtcgcaaaacaacaacagcaactttacctggaccggggcgaccaagtaccacctgaacggccgagactccctggtgaaccccggtgtcgccatggcaacgcacaaggacgacgaggagcgcttcttcccgagcagcggggtcctgatgtttggcaagcagggcgctggaaaggacaatgtcgagtacaccaacgtgatgctcaccagcgaggaggagatcaagaccaccaaccctgtggccacggagcagtacggtgtggtggctgacaatctgcagcagaccaactcggctcccattgtgggggcagtcaacagccagggggccttacccggtatggtctggcagaaccgggacgtgtacctgcagggtcccatctgggccaagatcccgcatacggacggcaactttcacccgtctcctctcatgggcggctttggactgaaacacccgcctccccagatcctgatcaaaaacacgccggtacctgcggatcccccggtgaactttacggacgctaagctggcgagtttcatcacgcagtacagcaccgggcaggtcagcgtggagattgagtgggagctgcagaaggagaacagcaagcgctggaatcccgagattcagtacacttccaattattataaatcagctaatgtggactttgccgtcaatgcagatggtgtatatagtgaaccccgccccattggcactcgttacctcacccgtaatctgtaa

SEQ ID NO: 4986 - protein, 731 aa, Adeno-associated virus
MAADGYLPDWLEDNLSEGIREWWALKPGAPQPKANQQKQDDGRGLVLPGYKYLGPFNGLDKGEPVNEADAAALEHDKAYDQQLKAGDNPYLRYNHADAEFQERLQEDTSFGGNLGRAVFQAKKRVLEPLGLVEEGAKTAPGKKRPVEPDSSSGIGKSGRQPAKKRLNFGQTGDSESVPDPQPLSEPPAGPSGLGSGTMAAGGGAPMADNNEGADGVGNASGNWHCDSTWLGDRVITTSTRTWALPTYNNHLYKQISNGTSGGSSNDNTYFGYSTPWGYFDFNRFHCHFSPRDWQRLINNNWGFRPKRLNFKLFNIQVKEVTQNEGTKTIANNLTSTVQVFTDSKYQLPYVLGSAHQGCLPPFPADVFMIPQYGYLTLNNGSQAVGRSSFYCLEYFPSQMLRTGNNFTFSYTFEDVPFHSSYAHSQSLDRLMNPLIDQYLYYLSRTQTNGTNATQTLLFAQAGPQNMSAQAKNWLPGPCYRQQRVSTTVSQNNNSNFTWTGATKYHLNGRDSLVNPGVAMATHKDDEERFFPSSGVLMFGKQGAGKDNVEYTNVMLTSEEEIKTTNPVATEQYGVVADNLQQTNSAPIVGAVNSQGALPGMVWQNRDVYLQGPIWAKIPHTDGNFHPSPLMGGFGLKHPPPQILIKNTPVPADPPVNFTDAKLASFITQYSTGQVSVEIEWELQKENSKRWNPEIQYTSNYYKSANVDFAVNADGVYSEPRPIGTRYLTRNL

SEQ ID NO: 4987 - DNA, 2196 bp, Adeno-associated virus
atggctgctgacggttatcttccagattggctcgaggacaacctctctgagggcattcgcgagtggtgggcgctgaaacctggagccccgcaacccaaagccaaccagcaaaagcaggacgacggccggggtctggtgcttcctggctacaagtacctcggacccttcaacggactcgacaagggggagcccgtcaacgaggcggacgccgcggccctcgagcacgacaaggcctacgaccagcagctcaaagcgggtgacaatccgtacctgcggtataatcacgccgacgccgagtttcaagagcgtctgcaagaagatacgtcctttgggggcaacctcgggcgagcagtcttccaggccaaaaagagggtactcgagcctctgggtctggttgaggaaggcgctaagacggctcctggaaagaagcggccagtagaaccggactccagctcgggcatcggcaagtcaggccagcagcccgcgaaaaagagactgaattttgggccgactggcgactcagagtcagtgcctgacccccaacctctctcagaaccacctgcaggtccctctggtctgggatctggtacaatggctgcaggcggtggcgctccaatggcagacaataacgaaggcgccgacggagtgggtaatgtctcaggaaattggcattgcgattccacatggctgggcgaccgagtcatcaccaccagcactcggacctgggccctccccacctacaacaaccacctctacaagcaaatctccaacgggacctcgggaggcagcagcaacgacaacacctactttggctacagcaccccctgggggtattttgactttaacagattccactgccacttttcaccacgcgactggcagcgactcatcaacaacaactggggattccggcccaagaagctcaacttcaagctcttcaacatccaggtcaaggaggtcacccagaatgaaggcaccaagaccaccgccaataacctcaccagcacggtgcaggtctttacggactcggagtaccagctcccgtacgtgctcggctctgcccaccagggctgcctgcctccgttcccggcggacgtgttcatgattccgcagtacgggtacctgacgctgaacaacgggagccaggccgtggggcgatcctccttctactgcctggagtactttccctcgcagatgctgagaacgggcaacaactttaccttcagctacaccttcgaggacgtgcccttccacagcagctacgcgcacagccagagcctggaccggctgatgaacccgctgattgaccagtacctgtactacctgtctcggactcagaccaacgggaccaatgccacgcagactctgttgtttgctcaggccgggcctcagaacatgtcggctcaggccaagaactggctgcctggtccttgctatcggcagcagcgcgtctctacggcagtgtcgcaaaacaacaacagcaactttacctggaccggggcgaccaagtaccacctgaacggccgagactccctggtgaaccccggtgtcgccatggcaacgcacaaggacgacgaggagcgcttcttcccgagcagcggggtcctgatgtttggcaagcagggcgctggaaaggacaatgtcgagtacaccaacgtgatgctcaccagcgaggaggagatcaagaccaccaaccctgtggccacggagcagtacggtgtggtggctgacaatctgcagcagaccaactcggctcccattgtgggggcagtcaacagccagggggccttacccggtatggtctggcagaaccgggacgtgtacctgcagggtcccatctgggccaagatcccgcatacggacggcaactttcacccgtctcctctcatgggcggctttggactgaaacacccgcctccccagatcctgatcaaaaacacgccggtacctgcggatcccccggtgaactttacggacgctaagctggcgagtttcatcacgcagtacagcaccgggcaggtcagcgtggagattgagtgggagctgcagaaggagaacagcaagcgctggaatcccgagattcagtacacttccaattattataaatcagctaatgtggactttgccgtcaatgcagatggtgtatatagcgaaccccgccccattggcactcgttacctcacccgtaatctgtaa

SEQ ID NO: 4988 - protein, 731 aa, Adeno-associated virus
MAADGYLPDWLEDNLSEGIREWWALKPGAPQPKANQQKQDDGRGLVLPGYKYLGPFNGLDKGEPVNEADAAALEHDKAYDQQLKAGDNPYLRYNHADAEFQERLQEDTSFGGNLGRAVFQAKKRVLEPLGLVEEGAKTAPGKKRPVEPDSSSGIGKSGQQPAKKRLNFGPTGDSESVPDPQPLSEPPAGPSGLGSGTMAAGGGAPMADNNEGADGVGNVSGNWHCDSTWLGDRVITTSTRTWALPTYNNHLYKQISNGTSGGSSNDNTYFGYSTPWGYFDFNRFHCHFSPRDWQRLINNNWGFRPKKLNFKLFNIQVKEVTQNEGTKTTANNLTSTVQVFTDSEYQLPYVLGSAHQGCLPPFPADVFMIPQYGYLTLNNGSQAVGRSSFYCLEYFPSQMLRTGNNFTFSYTFEDVPFHSSYAHSQSLDRLMNPLIDQYLYYLSRTQTNGTNATQTLLFAQAGPQNMSAQAKNWLPGPCYRQQRVSTAVSQNNNSNFTWTGATKYHLNGRDSLVNPGVAMATHKDDEERFFPSSGVLMFGKQGAGKDNVEYTNVMLTSEEEIKTTNPVATEQYGVVADNLQQTNSAPIVGAVNSQGALPGMVWQNRDVYLQGPIWAKIPHTDGNFHPSPLMGGFGLKHPPPQILIKNTPVPADPPVNFTDAKLASFITQYSTGQVSVEIEWELQKENSKRWNPEIQYTSNYYKSANVDFAVNADGVYSEPRPIGTRYLTRNL

SEQ ID NO: 4989 - DNA, 4404 bp, Adeno-associated virus
atggctgccgatggttatcttccagattggctcgagggcaacctctctgagggcattcgcgagtggtgggacttgaaacctggagccccgaaacccaaagccaaccagcaaaagcaggacgacggccggggtctggtgcttcctggctacaggtacctcggacccttcaacggactcgacaagggagagccggtcaacgaggcagacgccgcggccctcgagcacgacaaggcctacgacaagcagctcgagcagggggacaacccgtacctcaagtacaaccacgccgacgccgagtttcaggagcgtcttcaagaagatacgtcttttgggggcaacctcgggcgagcagtcttccaggccaagaagcgggttctcgaacctctcggtctggttgaggaaggcgctaagacggctcctggaaagaagagacccatagaatcccccgactcctccacgggcatcggcaagaacggccagccgcccgctaaaaagaagctcaactttgggcagactggcgactcagagtcagtgcccgacccccaacctctcggagaacctcccgccgcgccctcaggtctgggatctggtacaatggctgcaggcggtggcgcaccaatggcagacaataacgaaggcgccgacggagtgggtaatgcctccggaaattggcattgcgattccacatggctgggcgacagagtcatcaccaccagcacccgcacctgggccctgcccacctacaacaaccacctctacaagcagatatcaagtcagagcggggctaccaacgacaaccacttcttcggctacagcaccccctggggctattttgacttcaacagattccactgccacttctcaccacgtgactggcagcgactcatcaacaacaactggggattccggcccagaaagctgcggttcaagttgttcaacatccaggtcaaggaggtcacgacgaacgacggcgttacgaccatcgctaataaccttaccagcacgattcaggtcttctcggactcggagtaccaactgccgtacgtcctcggctctgcgcaccagggctgcctccctccgttccctgcggacgtgttcatgattcctcagtacggatatctgactctaaacaacggcagtcagtctgtgggacgttcctccttctactgcctggagtactttccttctcagatgctgagaacgggcgataactttgaattcagctacacctttgaggaagtgcctttccacagcagctatgcgcacagccagagcctggaccggctgatgaatcccctcatcgaccagtacctgtactacctggcccggacccagagcactacggggtccacaagggagctgcagttccatcaggctgggcccaacaccatggccgagcaatcaaagaactggctgcccggaccctgttatcggcagcagagactgtcaaaaaacatagacagcaacaacaacagtaactttgcctggaccggggccactaaataccatctgaatggtagaaattcattaaccaacccgggcgtagccatggccaccaacaaggacgacgaggaccagttctttcccatcaacggagtgctggtttttggcaaaacgggggctgccaacaagacaacgctggaaaacgtgctaatgaccagcgaggaggagatcaaaaccaccaatcccgtggctacagaagaatacggtgtggtctccagcaacctgcaatcgtctacggccggaccccagacacagactgtcaacagccagggggctctgcccggcatggtctggcagaaccgggacgtgtacctgcagggtcccatctgggccaaaattcctcacacggacggcaactttcacccgtctcccctgatgggcggatttggactcaaacacccgcctcctcaaattctcatcaaaaacaccccggtacctgctaatcctccagaggtgtttactcctgccaagtttgcctcatttatcacgcagtacagcaccggccaggtcagcgtggagatcgagtgggaactgcagaaagaaaacagcaaacgctggaatccagagattcagtacacctcaaattatgccaagtctaataatgtggaatttgctgtcaacaacgaaggggtttatactgagcctcgccccattggcacccgttacctcacccgtaacctgtaaatggctgccgatggttatcttccagattggctcgaggacaacctctctgagggcattcgcgagtggtgggacttgaaacctggagccccgaaacccaaagccaaccagcaaaagcaggacgacggccggggtctggtgcttcctggctacaagtacctcggacccttcaacggactcgacaagggggagcccgtcaacgcggcggacgcagcggccctcgagcacgacaaggcctacgaccagcagctcaaagcgggtgacaatccgtacctgcggtataaccacgccgacgccgagtttcaggagcgtctgcaagaagatacgtcttttgggggcaacctcgggcgagcagtcttccaggccaagaagcgggttctcgaacctctcggtctggttgaggaaggcgctaagacggctcctggaaagaagagaccggtagagccatcaccccagcgttctccagactcctctacgggcatcggcaagaaaggccagcagcccgcgaaaaagagactcaactttgggcagactggcgactcagagtcagtgcccgaccctcaaccaatcggagaaccccccgcaggcccctctggtctgggatctggtacaatggctgcaggcggtggcgctccaatggcagacaataacgaaggcgccgacggagtgggtagttcctcaggaaattggcattgcgattccacatggctgggcgacagagtcatcaccaccagcacccgaacctgggccctccccacctacaacaaccacctctacaagcaaatctccaacgggacttcgggaggaagcaccaacgacaacacctacttcggctacagcaccccctgggggtattttgactttaacagattccactgccacttctcaccacgtgactggcagcgactcatcaacaacaactggggattccggcccaagagactcaacttcaagctcttcaacatccaggtcaaggaggtcacgcagaatgaaggcaccaagaccatcgccaataaccttaccagcacgattcaggtctttacggactcggaataccagctcccgtacgtcctcggctctgcgcaccagggctgcctgcctccgttcccggcggacgtcttcatgattcctcagtacgggtacctgactctgaacaatggcagtcaggccgtgggccgttcctccttctactgcctggagtactttccttctcaaatgctgagaacgggcaacaactttgagttcagctaccagtttgaggacgtgccttttcacagcagctacgcgcacagccaaagcctggaccggctgatgaaccccctcatcgaccagtacctgtactacctgtctcggactcagtccacgggaggtaccgcaggaactcagcagttgctattttctcaggccgggcctaataacatgtcggctcaggccaaaaactggctacccgggccctgctaccggcagcaacgcgtctccacgacactgtcgcaaaataacaacagcaactttgcctggaccggtgccaccaagtatcatctgaatggcagagactctctggtaaatcccggtgtcgctatggcaacccacaaggacgacgaagagcgattttttccgtccagcggagtcttaatgtttgggaaacagggagctggaaaagacaacgtggactatagcagcgttatgctaaccagtgaggaagaaattaaaaccaccaacccagtggccacagaacagtacggcgtggtggccgataacctgcaacagcaaaacgccgctcctattgtaggggccgtcaacagtcaaggagccttacctggcatggtctggcagaaccgggacgtgtacctgcagggtcctatctgggccaagattcctcacacggacggaaactttcatccctcgccgctgatgggaggctttggactgaaacacccgcctcctcagatcctgattaagaatacacctgttcccgcggatcctccaactaccttcagtcaagctaagctggcgtcgttcatcacgcagtacagcaccggacaggtcagcgtggaaattgaatgggagctgcagaaagaaaacagcaaacgctggaacccagagattcaatacacttccaactactacaaatctacaaatgtggactttgctgttaacacagatggcacttattctgagcctcgccccatcggcacccgttacctcacccgtaatctgtaa

SEQ ID NO: 4990 - protein, 738 aa, Adeno-associated virus; identical to SEQ ID NO: 4793

SEQ ID NO: 4991 - protein, 738 aa, Adeno-associated virus; identical to SEQ ID NO: 4793

SEQ ID NO: 4992 - DNA, 2501 bp, Adeno-associated virus
gaattcgcccttggctgcgtcaactggaccaatgagaactttcccttcaacgattgcgtcgacaagatggtgatctggtgggaggagggcaagatgacggccaaggtcgtggagtccgccaaggccattcatcatctgctggggcgggctcccgagattgcttgctcggcctgcgatctggtcaacgtggacctggatgactgtgtttctgagcaataaatgacttaaaccaggtatggctgccgatggttatcttccagattggctcgaggacaacctctctgagggcattcgcgagtggtgggacttgagacctggagccccgaaacccaaagccaaccagcaaaagcaggacgacggccggggtctggtgcttcctggctacaagtacctcggacccttcaacggactcgacaagggagagccggtcaacgaggcagacgccgcggccctcgagcacgacaaggcctacgacaagcagctcgagcagggggacaacccgtacctcaagtacaaccacgccgacgccgagtttcaggagcgtcttcaagaagatacgtcttttgggggcaacctcgggcgagcagtcttccaggccaagaagcgggttctcgaacctctcggtctggttgaggaaggcgctaagacggctcctggaaagaagagacccatagaatcccccgactcctccacgggcatcggcaagaaaggccagcagcccgctaaaaagagactcaactttgggcagactggcgactcagagtcagtgcccgaccctcaaccaatcggagaaccccccgcaggcccctctggtctgggatctggcacaatggctgcaggcggtggcgctccaatggcagacaataacgaaggcgccgacggagtgggtagttcctcaggaaattggcattgcgattccacatggctgggcgacagagtcatcaccaccagcacccgaacctgggccctccccacctacaacaaccacctctacaagcaaatctccaacgggacatcgggaggaagcaccaacgacaacacctacttcggctacagcaccccctgggggtattttgactttaacagattccactgccacttctcaccacgtgactggcagcgactcatcaacaacaactggggattccggcccaagagactcaacttcaagctcttcaacatccaggtcaaggaggtcacgcagaatgaaggcaccaagaccatcgccaataaccttaccagcacgattcaggtctttacggactcggaataccagctcccgtacgtcctcggctctgcgcaccagggctgcctgcctccgttcccggcggacgtcttcatgattcctcagtacgggtacctgactctgaacaacggcagtcaggccgtgggccgttcctccttctactgcctggagtactttccttctcaaatgctgagaacgggcaacaactttgagttcagctaccagtttgaggacgtgccttttcacagcagctatgcgcacagccaaagcctggaccggctgatgaaccccctcatcgaccagtacctgtactacctgtctcggactcagtccacgggaggtaccgcaggaactcagcagttgctattttctcaggccgggcctaataacatgtcggctcaggccaaaaactggctacccgggccctgctaccggcagcaacgcgtctccacgacagtgtcgcaaaataacaacagcaactttgcttggaccggtgccaccaagtatcatctgaatggcagagactctctggtaaatcccggtgtcgctatggcaacgcacaagggcgacgaagagcgattttttccatccagcggagtcttgatgtttgggaaacagggagctggaaaagacaacgtagactatagcagcgttatgctaaccagtgaggaagaaatcaaaaccaccaacccagtggccacagaacagtacggcgtggtggccgataacctgcaacagcaaaacgccgctcctattgtaggggccgtcaacagtcaaggagccttacctggcatggtctggcagaaccgggacgtgtacctgcagggtcctatctgggccaagattcctcacacggacggcaactttcatccttcgccgctgatgggaggctttggactgaaacacccgcctcctcagatcctgattaagaatacacctgttcccgcggatcctccaactaccttcagtcaagccaagctggcgtcgttcatcacgcagtacagcaccggacaggtcagcgtggaaattgaatgggagctgcagaaagagaacagcaagcgctggaacccagagattcagtatacttccaactactacaaatctacaaatgtggactttgctgtcaatactgagggtacttattcagagcctcgccccattggcacccgttacctcacccgtaacctgtaattgcctgttaatcaataaaccggttgattcgtttcagttgaactttggtctcaagggcgaattc

SEQ ID NO: 4993 - DNA, 2187 bp, Adeno-associated virus
atggctgccgatggttatcttccagattggctcgaggacaacctctctgagggcattcgcgagtggtgggacttgaaacctggagccccgaaacccaaagccaaccagcaaaagcaggacgacggccggggtctggtgcttcctggctacaagtacctcggacccttcaacggactcgacaagggagagccggtcaacgaggcagacgccgcggccctcgagcacgacaaggcctacgacaagcagctcgagcagggggacaacccgtacctcaagtacaaccacgccgacgccgagtttcaggagcgtcttcaagaagatacgtcttttgggggcaacctcgggcgagcagtcttccaggccaagaagcgggttctcgaacctctcggtctggttgaggaaggcgctaagacggctcctggaaagaagagacccatagaatcccccgactcctccacgggcatcggcaagaaaggccagcagcccgctaaaaagaagctcaactttgggcagactggcgactcagagtcagtgcccgacccccaacctctcggagaacctcccgccgcgccctcaggtctgggatctggtacaatggctgcaggcggtggcgcaccaatggcagacaataacgaaggcgccgacggagtgggtaatgcctccggaaattggcattgcgattccacatggctgggcgacagagtcatcaccaccagcacccgcacctgggccctgcccacctacaacaaccacctctacaagcagatatcaagtcagagcggggctaccaacgacaaccacttcttcggctacagcaccccctggggctattttgacttcaacagattccactgccacttctcaccacgtgactggcagcgactcatcaacaacaactggggattccggcccagaaagctgcggttcaagttgttcaacatccaggtcaaggaggtcacgacgaacgacggcgttacgaccatcgctaataaccttaccagcacgattcaggtcttctcggactcggagtaccaactgccgtacgtcctcggctctgcgcaccagggctgcctccctccgttccctgcggacgtgttcatgattcctcagtacggatatctgactctaaacaacggcagtcagtctgtgggacgttcctccttctactgcctggagtactttccttctcagatgctgagaacgggcaataactttgaattcagctacacctttgaggaagtgcctttccacagcagctatgcgcacagccagagcctggaccggctgatgaatcccctcatcgaccagtacctgtactacctggcccggacccagagcactacggggtccacaagggagctgcagttccatcaggctgggcccaacaccatggccgagcaatcaaagaactggctgcccggaccctgttatcggcagcagagactgtcaaaaaacatagacagcaacaacaacagtaactttgcctggaccggggccactaaataccatctgaatggtagaaattcattaaccaacccgggcgtagccatggccaccaacaaggacgacgaggaccagttctttcccatcaacggagtgctggtttttggcgaaacgggggctgccaacaagacaacgctggaaaacgtgctaatgaccagcgaggaggagatcaaaaccaccaatcccgtggctacagaagaatacggtgtggtctccagcaacctgcaatcgtctacggccggaccccagacacagactgtcaacagccagggggctctgcccggcatggtctggcagaaccgggacgtgtacctgcagggtcccatctgggccaaaattcctcacacggacggcaactttcacccgtctcccctgatgggcggatttggactcaaacacccgcctcctcaaattctcatcaaaaacaccccggtacctgctaatcctccagaggtgtttactcctgccaagtttgcctcatttatcacgcagtacagcaccggccaggtcagcgtggagatcgagtgggaactgcagaaagaaaacagcaaacgctggaatccagagattcagtacacctcaaattatgccaagtctaataatgtggaatttgctgtcaacaacgaaggggtttatactgagcctcgccccattggcacccgttacctcacccgtaacctgtaa

SEQ ID NO: 4994 - protein, 728 aa, Adeno-associated virus; identical to SEQ ID NO: 4765

SEQ ID NO: 4995 - protein, 728 aa, Adeno-associated virus; identical to SEQ ID NO: 4829

SEQ ID NO: 4996 - protein, 728 aa, Adeno-associated virus; identical to SEQ ID NO: 4829

SEQ ID NO: 4997 - DNA, 3113 bp, Adeno-associated virus
gaattcgccctttctacggctgcgtcaactggaccaatgagaactttcccttcaacgattgcgtcgacaagatggtgatctggtgggaggagggcaagatgacggccaaggtcgtggagtccgccaaggccattctcggcggcagcaaggtgcgcgtggaccaaaagtgcaagtcgtccgcccagatcgatcccacccccgtgatcgtcacttccaacaccaacatgtgcgccgtgattgacgggaacagcaccaccttcgagcaccagcagccgttacaagaccggatgttcaaatttgaactcacccgccgtctggagcatgactttggcaaggtgacaaagcaggaagtcaaagagttcttccgctgggcgcaggatcacgtgaccgaggtggcgcatgagttctacgtcagaaagggtggagccaacaagagacccgcccccgatgacgcggataaaagcgagcccaagcgggcctgcccctcagtcgcggatccatcgacgtcagacgcggaaggagctccggtggactttgccgacaggtaccaaaacaaatgttctcgtcacgcgggcatgcttcagatgctgcttccctgcaagacatgcgagagaatgaatcagaatttcagcatttgcttcacgcacgggaccagagactgttcagaatgtttccccggcgtgtcagaatctcaaccggtcgtcagaaagaggacgtatcggaaactctgtgccattcatcatctgctggggcgggctcccgagattgcttgctcggcctgcgatctggtcaacgtggacctggatgactgtgtttctgagcaataaatgacttaaaccaggtatggctgccgatggtcatcttccagattggctcgaggacaacctctctgagggcattcgcgagtggtgggacttgaaacctggagccccgaaacccaaagccaaccagcaaaagcaggacgacggccggggtctggtgcttcctggctacaagtacctcggacccttcaacggactcgacaagggggagcccgtcaacgcggcggacgcagcggccctcgagcacgacaaggcctacgaccagcagctcaaagcgggtgacaatccgtacctgcggtataaccacgccgacgccgagtttcaggagcgtcttcaagaagatacgtcttttgggggcaacctcgggcgagcagtcttccaggccaagaagcgggttctcgaacctctcggtctggttgaggaaggcgctaagacggctcctggaaagaagagacccatagaatcccccgactcctccacgggcatcggcaagaaaggccagcagcccgctaaaaagaagctcaactttgggcagactggcgactcagagtcagtgcccgaccctcaaccaatcggagaaccccccgcaggcccctctggtctgggatctggtacaatggctgcaggcggtggcgctccaatggcagacaataacgaaggcgccgacggagtgggtagttcctcaggaaattggcattgcgattccacatagctgggcgacagagtcatcaccaccagcacccgaacctgggccctccccacctacaacaaccacctctacaagcaaatctccaacgggacatcgggaggaagcaccaacgacaacacctacttcggctacagcaccccctgggggtattttgactttaacagattccactgccacttctcaccacgtgactggcagcgactcatcaacaacagctggggattccggcccaagagactcaacttcaagctcttcaacatccaggtcaaggaggtcacgcagaatgaaggcaccaagaccatcgccaataaccttaccagcacgattcaggtctttacggactcggaataccagctcccgtacgtcctcggctctgcgcaccagggctgcctgcctccgttcccggcggacgtcttcatgattcctcagtacgggtacctgactctgaacaacggcagtcaggccgtgggccgttcctccttctactgcctggagtactttccttctcaaatgctgagaacgggcaacaactttgagttcagctaccagtttgaggacgtgccttttcacagcagctacgcgcacagccaaagcctggaccggctgatgaaccccctcatcgaccagtacctgtactacctgtctcggactcagtccacgggaggtaccgcaggaactcagcagttgctattttctcaggccgggcctaataacatgtcggctcaggccaaaaactggctacccgggccctgctaccggcagcaacgcgtctccacgacactgtcgcaaaataacaacagcaactttgcttggaccggtgccaccaagtatcatctgaatggcagagactctctggtaaatcccggtgtcgctatggcaacgcacaaggacgacgaagagcgattttttccatccagcggagtcttgatgtttgggaaacagggagctggaaaagacaacgtggactatagcagcgttatgctaaccagtgaggaagaaatcaaaaccaccaacccagtggccacagaacagtacggcgtggtggccgataacctgcaacagcaaaacgccgctcctattgtaggggccgtcaacagtcaaggagccttacctggcatggtctggcagaaccgggacgtgtacctgcagggtcctatctgggccaagattcctcacacggacggcaactttcatccttcgccgctgatgggaggctttggactgaaacacccgcctcctcagatcctgattaagaatacacctgttcccgcggatcctccaactaccttcagtcaagccaagctggcgtcgttcatcacgcagtacagcaccggacaggtcagcgtggaaattgaatgggagctgcagaaagagaacagcaagcgctggaacccagagattcagtatacttccaactactacaaatctacaaatgtggactttgctgtcaatactgagggtacttattcagagcctcgccccattggcacccgttacctcacccgtaacctgtaattgcctgttaatcaataaaccggttaattcgtttcagttgaactttggtctctgcgaagggcgaattc

SEQ ID NO: 4998 - DNA, 3106 bp, Adeno-associated virus
gaattcgcccttctacggctgcgtcaactggaccaatgagaactttcccttcaacgattgcgtcgacaagatggtgatctggtgggaggagggcaagatgacggccaaggtcgtggagtccgccaaggccattctcggcggcagcaaggtgcgcgtggaccaaaagtgcaagtcgtccgcccagatcgaccccacccccgtgatcgtcacctccaacaccaacatgtgcgccgtgattgacgggaacagcaccaccttcgagcaccagcagccgttgcaggaccggatgttcaaatttgaactcacccgccgtctggagcatgactttggcaaggcgacaaagcaggaagtcaaagagttcttccgctgggcgcaggatcacgtgaccgaggtggcgcatgagttctacgtcagaaagggtggagccaacaagagacccgcccccgatgacgcggataaaagcgagcccaagcgggcccgcccctcagtcgcggatccatcgacgtcagacgcggaaggagctccggtggactttgccgacaggtaccaaaacaaatgttctcgtcacgcgggcatgcttcagatgctgtttccctgcaaaacatgcgagagaatgaatcagaatttcaacatttgcttcacgcacgggaccagagactgttcagaatgtttccccggcgtgtcagaatctcaaccggtcgtcagaaagaggacgtatcggaaactctgtgccattcatcatctgctggggcgggctcccgagattgcttgctcggcctgcgatctggtcaacgtggacctggatgactgtgtttctgagcaataaatgacttaaaccaggtatggctgccgatggttatcttccagattggctcgaggacaacctctctgagggcattcgcgagtggtgggacttgaaacctggagccccgaaacccaaagccaaccagcaaaagcaggacgacggccggggtctggtgcttcctggctacaagtacctcggacccttcaacggactcgacaagggagagccggtcaacgaggcagacgccgcggccctcgagcacgacaaggcctacgacaagcagctcgagcagggggacaacccgtacctcaagtacaaccacgccgacgccgagtttcaggagcgtcttcaagaagatacgtcttttgggggcaacctcgggcgagcagtcttccgggccaagaagcgggttctcgaacctctcggtctggttgaggaaggcgctaagacggctcctggaaagaagagacccatagaatcccccgactcctccacgggcatcggcaagaaaggccagcagcccgctaaaaagaagctcaactttgggcagactggcgactcagagtcagtgcccgacccccaacctctcggagaacctcccgccgcgccctcaggtctgggatctggtacaatggctgcaggcggtggcgcaccaatggcagacaataacgaaggcgccgacggagtgggtaatgcctccggaaattggcattgcgattccacatggctgggcgacagagtcatcaccaccagcacccgcacctgggccctgcccacctacaacaaccacctctacaagcagatatcaagtcagagcggggctaccaacgacaaccacttcttcggctacagcaccccctggggctattttgacttcaacagattccactgccacttctcaccacgtgactggcagcgactcatcaacaacaaccggggattccggcccagaaagctgcggttcaagttgttcaacatccaggtcaaggaggtcacgacgaacgacggcgttacgaccatcgctaataaccttaccagcacgattcaggtcttctcggactcggagtaccaactgccgtacgtcctcggctctgcgcaccagggctgcctccctccgttccctgcggacgtgttcatgattcctcagtacggatatctgactctaaacaacggcagtcagtctgtgggacgttcctccttctactgcctggagtactttccttctcagatgctgagaacgggcaataactttgaattcagctaccagtttgaggacgtgccctttcacagcagctacgcgcacagccaaagcctggaccggctgatgaaccccctcatcgaccagtacctgtactacctgtctcggactcagtccacgggaggtaccgcaggaactcagcagttgctattttctcaggccgggcctaataacatgtcggctcaggccaaaaactggctacccgggccctgctaccggcagcaacgcgtctccacgacactgtcgcaaaataacaacagcaactttgcttggaccggtgccaccaagtatcatctgaatggcagagactctctggtaaatcccggtgtcgctatggcaacgcacaaggacgacgaagagcgattttttccatccagcggagtcttgatgtttgggaaacagggagctggaaaagacaacgtggactatagcagcgttatgctaaccagtgaggaagaaatcaaaaccaccaacccagtggccacagaacagtacggcgtggtggccgataacctgcaacagcaaaacgccgctcctattgtaggggccgtcaacagtcaaggagccttacctggcatggcctggcagaaccgggacgtgtacctgcagggtcctatctgggccaagattcctcacacggacggcaactttcatccttcgccgctgatgggaggctttggactgaaacacccgcctcctcagatcctgattaagaatacacctgttcccgcggatcctccaactaccttcagtcaagccaagctggcgtcgttcatcacgcagtacagcaccggacaggtcagcgtggaaattgaatgggagctgcagaaagagaacagcaagcgctggaacccagagattcagtatacttccaactactacaaatctacaaatgtggactttgctgtcaatactgagggtacttattcagagcctcgccccattggcacccgttacctcacccgtaacctgtaattgcctgttaatcaataaaccggttaattcgtttcagttgaactttggtctctgcgaagggcgaattc

SEQ ID NO: 4999 - DNA, 3197 bp, Adeno-associated virus
gaattcgccctttctacggctgcgtcaactggaccaatgagaactttcccttcaacgattgcgtcgacaagatggtgatctggtgggaggagggcaagatgacggccaaggtcgtggagtccgccaaggccattctcggcggcagcaaggtgcgcgtggaccaaaagtgcaagtcgtccgcccagatcgaccccacccccgtgatcgtcacctccaacaccaacatgtgcgccgtgattgacgggaacagcaccaccttcgagcaccagcagccgttacaagaccggatgttcaaatttgaactcacccgccgtctggagcacgactttggcaaggtgacaaagcaggaagtcaaagagttcttccgctgggcgcaggatcacgtgaccgaggtggcgcatgagttctacgtcagaaagggtggagccaacaagagacccgcccccgatgacgcggataaaagcgagcccaagcgggcctgcccctcagtcgcggatccatcgacgtcagacgcggaaggagctccggtggactttgccgacaggtaccaaaacaaatgttctcgtcacgcgggcatgcttcagatgctgtttccctgcaagacatgcgagagaatgaatcagaatttcaacatttgcttcacgcacgggaccagagactgttcagaatgtttccccggcgtgtcagaatctcaaccggtcgtcagaaagaggacgtatcggaaactctgtgccattcatcatctgctggggcgggctcccgagattgcttgctcggcctgcgatctggtcaacgtggacctggatgactgtgtttctgagcaataaatgacttaaaccaggtatggctgccgatggttatcttccagattggctcgaggacaacctctctgagggcattcgcgagtggtgggacttgaaacctggagccccgaaacccaaagccaaccagcaaaagcaggacgacggccggggtctggtgcttcctggctacaagtacctcggacccttcaacggactcgacaagggagagccggtcaacgaggcagacgccgcggccctcgagcacgacaaggcctacgacaagcagctcgagcagggggacaacccgtacctcaagtacaaccacgccgacgccgagtttcaggagcgtcttcaagaagatacgtcttttgggggcaacctcgggcgagcagtcttccaggccaagaagcgggttctcgaacctctcggtctggttgaggaaggcgctaagacggctcctggaaagaagagaccggtagagccatcaccccagcgttctccagactcctctacgggcatcggcaagacaggccagcagcccgcgaaaaagagactcaactttgggcagactggcgactcagagtcagtgcccgaccctcaaccaatcggagaaccccccgcaggcccctctggtctgggatctggtacaatggctgcaggcggtggcgctccaatggcagacaataacgaaggcgccgacggagtgggtagttcctcaggaaattggcattgcgattccacatggctgggcgacagagtcatcaccaccagcacccgaacctgggccctccccacctacaacaaccacctctacaagcaaatctccaacgggacatcgggaggaagcaccaacgacaacacctacttcggctacagcaccccctgggggtattttgactttaacagattccactgccacttctcaccacgtgactggcagcgactcatcaacaacaactggggattccggcccaagagactcaacttcaagctcttcaacatccaggtcaaggaggtcacgcagaatgaaggcaccaagaccatcgccaataaccttaccagcacgattcaggtctttacggactcggaataccagctcccgtacgtcctcggctctgcgcaccagggctgcctgcctccgttcccggcggacgtcttcatgattcctcagtacgggtacctgactctgaacaacggcagtcaggccgtgggccgttcctccttctactgcctggagtactttccttctcaaatgctgagaacgggcaacaactttgagttcagctaccagtttgaggacgtgccttttcacagcagctacgcgcacagccaaagcctggaccggctgatgaaccccctcatcgaccagtacctgtactacctgtctcggactcagtccacgggaggtaccgcaggaactcagcagttgctattttctcaggccgggcctaataacatgtcggctcaggccaaaaactggctacccgggccctgctaccggcagcaacgcgtctccacgacactgtcgcaaaataacaacagcaactttgcttggaccggtgccaccaagtatcatctgaatggcagagactctctggtaaatcccggtgtcgctatggcaacgcacaaggacgacgaagagcgattttttccatccagcggagtcttgatgtttgggaaacagggagctggaaaagacaacgtggactatagcagcgttatgctaaccagtgaggaagaaatcaaaaccaccaacccagtggccacagaacagtacggcgtggtggccgataacctgcaacagcaaaacgccgctcctattgtaggggccgtcaacagtcaaggagccttacctggcatggtctggcagaaccgggacgtgtacctgcagggtcctatctgggccaagattcctcacacggacggcaactttcatccttcgccgctgatgggaggctttggactgaaacacccgcctcctcagatcctgattaagaatacacctgttcccgcggatcctccaactaccttcagtcaagccaagctggcgtcgttcatcacgcagtacagcaccggacaggtcagcgtggaaattgaatgggagctgcagaaagagaacagcaagcgctggaacccagagattcagtatacttccaactactacaaatctacaaatgtggactttgctgtcaatactgagggtacttattcagagcctcgccccattggcacccgttacctcacccgtaacctgtaattgcctgttaatcaataaaccggttaattcgtttcagttgaactttggtctctgcgaagggcgaattcgtttaaacctgcaggactagtccctttagtgagggttaattctgagcttggcgtaatcatgggtcatag

SEQ ID NO: 5000 - DNA, 3276 bp, Adeno-associated virus
gaattcgcccttcgcagagaccaaagttcaactgaaacgaattaaccggtttattgattaacaggcaattacaggttacgggtgaggtaacgggtgccaatggggcgaggctcagtataaaccccttcgttgttgacagcaaattccacattattagacttggcataatttgaggtgtactgaatctctggattccagcgtttgctgttttctttctgcagttcccactcgatctccacgctgacctggccggtgctgtactgcgtgataaatgaggcaaacttggcaggagtaaacacctctggaggattagcaggtaccggggtgtttttgatgagaatttgaggaggcgggtgtttgagtccaaatccgtccatcaggggagacgggtgaaagttgccgtccgtgtgaggaattttggcccagatgggaccctgcaggtacacgtcccggttctgccagaccatgccgggcagagccccctggctgttgacagtctgtgtctggggtccggccgtagacgattgcaggttgctggagaccacaccgtattcttctgtagccacgggattggtggttttgatctcctcctcgctggtcattagcacgttttccagcgttgtcttgttggcagcccccgttttgccaaaaaccagcactccgttgatgggaaagaactggtcctcgtcgtccttgttggtggccatggctacgcccgggttggttaatgaatttctaccattcagatggtatttagtggccccggtccaggcaaagttactgttgttgttgctgtctatgttttttgacagtctctgctgccgataacagggtccgggcagccagttctttgattgctcggccatggtgttgggcccagcctgatggaactgcagctcccttgtggaccccgtagtgctctgggtccgggccaggtagtacaggtactggtcgatgaggggattcatcagccggtccaggctctggctatgcgcatagctgctgtggaaaggcacttcctcaaaggtgtagctgaattcaaagttattgcccgttctcagcatctgagaaggaaagtactccaggcagtagaaggaggaacgtcccacagactgactgccgttgtttagagtcagatatccgtactgaggaatcatgaacacgtccgcagggaacggagggaggcagccctggtgcgcagagccgaggacgtacggcagttggtactccgagtccgagaagacctgaatcgtgctggtaaggttattagcgatggtcgtaacgccgtcgtccgtcgtgacctccttgacctggatgttgaacaacttgaaccgcagctttctgggccggaatccccagttgttgttgatgagtcgctgccagtcacgtggtgagaagtggcagtggaatctgttaaagtcaaaatacccccagggggtgctgtagccgaagtaggtgttgtcgttggtgcttcctcccgatgtcccgttggagatttgcttgtagaggtggttgttgtaggtggggagggcccaggttcgggtgctggtggtgatgactctgtcgcccagccatgtggaatcgcaatgccaatttcctgaggaactacccactccgtcggcgccttcgttattgtctgccattggagcgccaccgcctgcagccattgtaccagatcccagaccagaggggcctgcggggggttctccgattggttgagggtcgggcactgactctgagtcgccagtctgcccaaagttgagtctctttttcgcgggctgctggcctgtcttgccgatgcccgtagaggagtctggagaacgctggggtgatggctctaccggtctcttctttccaggagccgtcttagcgccttcctcaaccagaccgagaggttcgagaacccgcttcttggcctggaagactgctcgcccgaggttgcccccaaaagacgtatcttcttgaagacgctcctgaaactcggcgtcggcgtggttgtacttgaggtacgggttgtccccctgctcgagctgcttgtcgtaggccttgtcgtgctcgagggccgcggcgtctgcctcgttgaccggctctcccttgtcgagtccgttgaagggtccgaggtacttgtagccaggaagcaccagaccccggccgtcgtcctgcttttgctggttggctttgggtttcggggctccaggtttcaagtcccaccactcgcgaatgccctcagagaggttgtcctcgagccaatctggaagataaccatcggcagccatacctggtttaagtcatttattgctcagaaacacagtcatccaggtccacgttgaccagatcgcaggccgagcaagcaatctcgggagcccgccccagcagatgatgaatggcacagagtttccgatacgtcctctttctgacgaccggttgagattctgacacgccggggaaacattctgaacagtctctggtcccgtgcgtgaagcaaatgttgaaattctgattcattctctcgcatgtcttgcagggaaacagcatctgaagcatgcccgcgtgacgagaacacttgttttggtacctgtcggcaaagtccaccggagctccttccgcgtctgacgtcgatggatgcaaaatgtcgcaaaagcactcacgtgacagctaatacaggaccactcccctatgacgtgatttacgtcagcgctatgcccgcgtgacgagaacatttgttttggtacctgtcggcaaagtccaccggagctccttccgcgtctgacgtcgatggatccgcgactgaggggcaggcccgcttgggctcgcttttatccgcgtcatcgggggcgggtctcttgttggctccaccctttctgacgtagaactcatgcgccacctcggtcacgtgatcctgcgcccagcggaagaactctttgacttcctgctttgtcaccttgccaaagtcatgctccagacggcgggtgagttcaaatttgaacatccggtcctgcaacggctgctggtgctcgaaggtggtgctgttcccgtcaatcacggcgcacatgttggtgttggaagtgacgatcacgggggtgggatcgatctgggcggaagacttgcacttttggtccacgcgcaccttgctgccgccgagaatggccttggcggactccacgaccttggccgtcatcttgccctcctcccaccagatcaccatcttgtcgacgcaatcgttgaagggaaagttctcattggtccagttgacgcagccgtagaaagggcgaattc

SEQ ID NO: 5001 - protein, 738 aa, Adeno-associated virus; identical to SEQ ID NO: 4777

SEQ ID NO: 5002 - protein, 738 aa, Adeno-associated virus
MAADGYLPDWLEDNLSEGIREWWDLKPGAPKPKANQQKQDDGRGLVLPGYKYLGPFNGLDKGEPVNAADAAALEHDKAYDQQLKAGDNPYLRYNHADAEFQERLQEDTSFGGNLGRAVFQAKKRVLEPLGLVEEGAKTAPGKKRPVEPSPQRSPDSSTGIGKKGHQPARKRLNFGQTGDSESVPDPQPIGEPPAGPSGLGSGTMAAGGGAPMADNNEGADGVGSSSGNWHCDSTWLGDRVITTSTRTWALPTYNNHLYKQISNGTSGGSTNDNTYFGYSTPWGYFDFNRFHCHFSPRDWQRLINNNWGFRPKRLNFKLFNIQVKEVTQNEGTKTIANNLTSTIQVFTDSEYQLPYVPGSAHQGCLPPFPADVFMIPQYGYLTLNNGSQAVGRSSFYCLEYFPSQMLRTGNNFEFSYTFEDVPFHSSYAHSQSLDRLMNPLIDQYLYYLSRTQSTGGTQGTQQLLFSQAGPANMSAQAKNWLPGPCYRQQRVSTTLSQNNNSNFAWTGATKYHLNGRDSLVNPGVAMATHKDDEERFFPSSGVLMFGKQGAGKDNVDYSSVMLTSEEEIKTTNPVATEQYGVVADNLQQTNGAPIVGTVNSQGALPGMVWQNRDVYLQGPIWAKIPHTDGNFHPSPLMGGFGLKHPPPQILIKNTPVPADPPTTFSQAKLASFITQYSTGQVSVEIEWELQKENSKRWNPEIQYTSNYYKSTNVDFAVNTEGTYSEPRPIGTRYLTRNL

SEQ ID NO: 5003 - protein, 738 aa, Adeno-associated virus; identical to SEQ ID NO: 4775

SEQ ID NO: 5004 - DNA, 2489 bp, Adeno-associated virus
gaattcgccctttctacggctgcgtcaactggaccaatgagaactttcccttcaacgattgcgtcgacaagatggtgatctggtgggaggagggcaagatgacggccaaggtcgtgaagtccgccaaggccattcatcatctgctggggcgggctcccgagattgcttgctcggcctgcgatctggtcaacgtggacctggatgactgtgtttctgagcaataaatgacttaaaccaggtatggctgccgatggttatcttccagattggctcgaggacaacctctctgagggcattcgcgagtggtgggacttgaaacctggagccccgaaacccaaagccaaccagcaaaagcaggacgacggccggggtctggtgcttcctggctacaagtacctcggacccttcaacggactcgacaagggagagccggtcaacgaggcagacgccgcggccctcgagcacgacaaggcctacgacaagcagctcgagcagggggacaacccgtacctcaagtacaaccacgccgacgccgagtttcaggagcgtcttcaagaagatacgtcttttgggggcaacctcgggcgagcagtcttccaggccaagaagcgggttctcgaacctctcggtctggttgaggaaggcgctaagacggctcctggaaagaagagacccatagaatcccccgactcctccacgggcatcggcaggaaaggccagcagcccgctaaaaagaagctcaactttgggcagactggcgactcagagtcagtgcccgaccctcaaccaatcggagaaccccccgcaggcccctctggtctgggatctggtacaatggctgcaggcggtggcgctccaatggcagacaataacgaaggcgccgacggagtgggtaatgcctccggaaattggcattgcgattccacatggctgggcgacagagtcatcaccaccagcacccgcacctgggccctgcccacctacaacaaccacctctacaagcagatatcaagtcagagcggggctaccaacgacaaccacttcttcggctacagcaccccctggggctattttgacttcaacagattccactgccacttctcaccacgtgactggcagcgactcatcaacaacaactggggattccggcccagaaagctgcggttcaagttgttcaacatccaggtcaaggaggtcacgacgaacgacggcgttacgaccatcgccaataaccttaccagcacgattcaggtcttctcggactcggagtaccaactgccgtacgtcctcggctctgcgcaccagggctgcctccctccgttccctgcggacgtgttcatgattcctcagtacggatatctgactctaaacaacggcagtcagtctgtgggacgttcctccttctactgcctggagtactttccttctcagatgctgagaacgggcaataactttgaattcagctacacctttgaggaagtgcctttccacagcagctatgcgcacagccagagcctggaccggctgatgaatcccctcatcgaccagtacctgtactacctggcccggacccagagcactacggggtccacaagggagctgcagttccatcaggctgggcccaacaccatggccgagcaatcaaagaactggctgcccggaccctgttatcggcagcagagactgtcaaaaaacatagacagcaacaacaacagtaactttgcctggaccggggccactaaataccatctgaatggtagaaattcattaaccaacccgggcgtagccatggccaccaacaaggacgacgaggaccagttctttcccatcaacggagtgctggtttttggcaaaacgggggctgccaacaagacaacgctggaaaacgtgctaatgaccagcgaggaggagatcaaaaccaccaatcccgtggctacagaagaatacggtgtggtctccagcaacctgcaatcgtctacggccggaccccagacacagactgtcaacagccagggggctctgcccggcatggtctggcagaaccgggacgtgtacctgcagggtcccatctgggccaaaattcctcacacggacggcaactttcacccgtctcccctgatgggcggatttggactcaaacacccgcctcctcaaattctcatcaaaaacaccccggtacctgctaatcctccagaggtgtttactcctgccaagtttgcctcatttatcacgcagtacagcaccggccaggtcagcgtggagatcgagtgggaactgcagaaagaaaacagcaaacgctggaatccagagattcagtacacctcaaattatgccaagtctaataatgtggaatttgctgtcaacaacgaaggggtttatactgagcctcgccccattggcacccgttacctcacccgtaacctgtaattgcctgttaatcaataaaccggttaattcgtttcagttgaactttggtcaagggcgaattc

SEQ ID NO: 5005 - DNA, 3098 bp, Adeno-associated virus
gaattcgccctttctacggctgcgtcaactggaccaatgagaactttcccttcaacgattgcgtcgacaagatggtgatctggtgggaggagggcaagatgacggccaaggtcgtggagtccgccaaggccattctcggcggcagcaaggtgcgcgtggaccaaaagtgcaagtcttccgcccagatcgatcccacccccgtgatcgtcacttccaacaccaacatgtgcgccgtgattgacgggaacagcaccaccttcgagcaccagcagccgttacaagaccggatgttcaaatttgaactcacccgccgtctggagcacgactttggcaaggtgacaaagcaggaagtcaaagagttcttccgctgggcgcaggatcacgtgaccgaggtggcgcatgagttctacgtcagaaagggtggagccaacaagagacccgcccccgatgacgcggataaaagcgagcccaagcgggcctgcccctcagtcgcggatccatcgacgtcagacgcggaaggagctccggtggactttgccgacaggtaccaaaacaaatgttctcgtcacgcgggcatgcttcagatgctgtttccctgcaagacatgcgagagaatgaatcagaatttcaacatttgcttcacgcacgggaccggagactgttcagaatgtttccccggcgtgtcagaatctcaaccggtcgtcagaaagaggacgtatcggaaactctgtgccattcatcatctgctggggcgggctcccgagattgcttgctcggcctgcgatctggtcaacgtggacctggatgactgtgtttctgagcaataaatgacttaaaccaggtatggctgccgatggttatcttccagattggctcgaggacaacctctctgagggcattcgcgagtggtgggacttgaaacctggagccccgaaacccaaagccaaccagcaaaagcaggacgacggccggggtctggtgcttcctggctacaagtacctcggacccttcaacggactcgacaagggagagccggtcaacgcggcggacgcagcggccctcgagcacgacaaggcctacgaccagcagctcaaagcgggtgacaatccgtacctgcggtataaccacgccgacgccgagtttcaggagcgtcttcaagaagatacgtcttttgggggcaacctcgggcgagcagtcttccaggccaagaagcgggttctcgaacctctcggtctggttgaggaaggcgctaagacggctcctggaaagaagagacccatagaatcccccgactcctccacgggcatcggcaagaaaggccagcagcccgctaaaaagaagctcaactttgggcagactggcgactcagagtcagtgcccgaccctcaaccaatcggagaaccccccgcaggcccctctggtctgggatctggtacaatggctgcaggcggtggcgctccaatggcagacaataacgaaggcgccgacggagtgggtaatgcctccggaaattggcattgcgattccacatggctgggcgacagagtcatcaccaccagcacccgcacctgggccctgcccacctacaacaaccacctctacaagcagatatcaagtcagagcggggctaccaacgacaaccacttcttcggctacagcaccccctggggctattttgacttcaacagattccactgccacttctcaccacgtgactggcagcgactcatcaacaacaactggggattccggcccagaaagctgcggttcaagttgttcaacatccaggtcaaggaggtcacgacgaacgacggcgttacgaccatcgctaataaccttaccagcacgattcaggtcttctcggactcggagtaccaactgccgtacgtcctcggctctgcgcaccagggctgcctccctccgttccctgcggacgtgttcatgattcctcagtacggatatctgactctaaacaacggcagtcagtctgtgggacgttcctccttctactgcctggagtactttccttctcagatgctgagaacgggcaataactttgaattcagctacacctttgaggaagtgcctttccacagcagctatgcgcacagccagagcctggaccggctgatgaatcccctcatcgaccagtacctgtactacctggcccggacccagagcactacggggtccacaagggagctgcagttccatcaggctgggcccaacaccatggccgagcaatcaaagaactggctgcccggaccctgttatcggcggcagagactgtcaaaagacatagacagcaacaacaacagtaactttgcctggaccggggccactaaataccatctgaatggtagaaattcattaaccaacccgggcgtagccatggccaccaacaaggacgacgaggaccagttctttcccatcaacggagtgctggtttttggcaaaacgggggctgccaacaagacaacgctggaaaacgtgctaatgaccagcgaggaggagatcaaaaccaccaatcccgtggctacagaagaatacggtgtggtctccagcaacctgcaatcgtctacggccggaccccagacacagactgtcaacagccagggggctctgcccggcatggtctggcagaaccgggacgtgtacctgcagggtcccatctgggccaaaattcctcacacggacggcaactttcacccgtctcccctgatgggcggatttggactcaaacacccgcctcctcaaattctcatcaaaaacaccccggtacctgctaatcctccagaggtgtttactcctgccaagtttgcctcatttatcacgcagtacagcaccggccaggtcagcgtggagatcgagtgggaactgcagaaagagaacagcaaacgctggaatccagagattcagtacacctcaaattatgccaagtctaataatgtggaatttgctgtcaacaacgaaggggtttatactgagcctcgccccattggcacccgttacctcacccgtaacctgtaattacttgttaatcaataaaccggttgattcgtttcagttgaactttggtctctgcgaagggcgaattc

SEQ ID NO: 5006 - DNA, 2969 bp, Adeno-associated virus
gaattcgccctttctacggctgcgtcaactggaccaatgagaactttcccttcaacgattgcgtcgacaagatggtgatctggtgggaggagggcaagatgacggccaaggtcgtggagtccgccaaggccattctcggcggcagcaaggtgcgcgtggaccaaaagtgcaagtcgtccgcccagatcgaccccacccccgtgatcgtcacctccaacaccaacatgtgcgccgtgattgacgggaacagcaccaccttcgagcaccagcagccgttacaagaccggatgttcaaatttgaactcacccgccgtctggagcacgactttggcaaggtgacaaagcaggaagtcaaagagttcttccgctgggcgcaggatcacgtgaccgaggtggcgcatgagttctacgtcagaaagggtggagccaacaagagacccgcccccgatgacgcggataaaagcgagcccaagcgggcctgcccctcagtcgcggatccatcgacgtcagacgcggaaggagctccggtggactttgccgacaggtaccaaaacaaatgttctcgtcacgcgggcatgcttcagatgctgtttccctgcaagacatgcgagagaatgaatcagaatttcaacatttgcttcacgcacgggaccagagactgttcagaatgtttccccggcgtgtcagaatctcaaccggtcgtcagaaagaggacgtatcggaaactctgtgccattcatcatctgctggggcgggctcccgagattgcttgctcggcctgcgatctggtcaacgtggacctggatgactgtgtttctgagcaataaatgacttaaaccaggtatggctgccgatggttatcttccagattggctcgaggacaacctctctgagggcatccgcgagtggtgggacttgaaacctggagccccgaaacccaaagccaaccagcaaaagcaggacgacggccggggtctggtgcttcctggctacaagtacctcggacccttcaacggactcgacaagggagagccggtcaacgaggcagacgccgcggccctcgagcacgacaaggcctacgacaagcagctcgagcagggggacaacccgtacctcaagtacaaccacgccgacgccgagtttcaggagcgtcttcaagaagatacgtcttttgggggcaacctcgggcgagcagtcttccaggccaagaagcgggttctcgaacctctcggtctggttgaggaaggcgctaagacggctcctggaaagaagagaccggtagagccatcaccccagcgttctccagactcctctacgggcatcggcaagacaggccagcagcccgcgaaaaagagactcaactttgggcagactggcgactcagagtcagtgcccgaccctcaaccaatcggagaaccccccgcaggcccctctggtctgggatctggtacaatggctgcaggcggtggcgctccaatggcagacaataacgaaggcgccgacggagtgggtagttcctcaggaaattggcattgcgattccacatggctgggcgacagagtcatcaccaccagcacccgaacctgggccctccccacctacaacaaccacctctacaagcaaatctccaacgggacatcgggaggaagcaccaacgacaacacctacttcggctacagcaccccctgggggtattttgactttaacagattccactgccacttctcaccacgtgactggcagcgactcatcaacaacaactggggattccggcccaagagactcaacttcaagctcttcaacatccaggtcaaggaggtcacgcagaatgaaggcaccaagaccatcgccaataaccttaccagcacgattcaggtctttacggactcggaataccagctcccgtacgtcctcggctctgcgcaccagggctgcctgcctccgttcccggcggacgtcttcatgattcctcagtacgggtacctgactctgaacaacggcagtcaggccgtgggccgttcctccttctactgcctggagtactttccttctcaaatgctgagaacgggcaacaactttgagttcagctaccagtttgaggacgtgccttttcacagcagctacgcgcacagccaaagcctggaccggctgacgaaccccctcatcgaccagtacctgtactacctggcccggacccagagcactacggggtccacaagggggctgcagttccatcaggctgggcccaacaccatggccgagcaatcaaagaactggctgcccggaccctgttatcggcagcagagactgtcaaaaaacatagacagcaacaacaacagtaactttgcctggaccggggccactaaataccatctgaatggtagaaattcattaaccaacccgggcgtagccatggccaccaacaaggacgacgaggaccagttctttcccatcaacggagtgctggtttttggcaaaacgggggctgccaacaagacaacgctggaaaacgtgctaatgaccagcgaggaggagatcaaaaccaccaatcccgtggctacagaagaatacggtgtggtctccagcaacctgcaatcgtctacggccggaccccagacacagactgtcaacagccagggggctctgcccggcatggtctggcagaaccgggacgtgtacctgcagggtcccatctgggccaaaattcctcacacggacggcaactttcacccgtctcccctgatgggcggatttggactcaaacacccgcctcctcaaattctcatcaagtatacttccaactactacaaatctacaaatgtggactttgctgtcaatactgagggtacttattcagagcctcgccccattggcacccgttacctcacccgtaacctgtaattgcctgttaatcaataaaccggttaattcgtttcagttgaactttggtctctgcgaagggcgaattc

SEQ ID NO: 5007 - DNA, 3113 bp, Adeno-associated virus
gaattcgccctttctacggctgcgtcaactggaccaatgagaactttcccttcaacgattgcgtcgacaagatggtgatctggtgggaggagggcaagatgacggccaaggtcgtggagtccgccaaggccattctcggcggcagcaaggtgcgcgtggaccaaaagtgcaagtcgtccgcccagatcgatcccacccccgtgatcgtcacttccaacaccaacatgtgcgccgtgattgacgggaacagcaccaccttcgagcaccagcagccgttacaagaccggatgttcaaatttgaactcacccgccgtctggagcatgactttggcaaggtgacaaagcaggaagtcaaagagttcttccgctgggcgcaggatcacgtgaccgaggtggcgcatgagttctacgtcagaaagggtggagccaacaagagacccgcccccgatgacgcggataaaagcgagcccaagcgggcctgcccctcagtcgcggatccatcgacgtcagacgcggaaggagctccggtggactttgccgacaggtaccaaaacaaatgttctcgtcacgcgggcatgcttcagatgctgtttccctgcaagacatgcgagagaatgaatcagaatttcaacatttgcttcacgcacgggaccagagactgttcagaatgtttccccggcgtgtcagaatctcaaccggtcgtcagaaagaggacgtatcggaaactctgtgccattcatcatctgctggggcgggctcccgagattgcttgctcggcctgcgatctggtcaacgtggacctggatgactgtgtttctgagcaataaatgacttaaaccaggtatggctgccgatggttatcttccagattggctcgaggacaacctctctgagggcattcgcgagtggtgggacttgaaacctggagccccgaaacccaaagccaaccagcaaaagcaggacgacggccggggtctggtgcttcctggctacaagtacctcggacccttcaacggactcgacaagggggagcccgtcaacgcggcggacgcagcggccctcgagcacgacaaggcctacgaccagcagctcaaagcgggtgacaatccgtacctgcggtataaccacgccgacgccgagtttcaggagcgtcttcaagaagatacgtcttttgggggcaacctcgggcgagcagtcttccaggccaagaagcgggttctcgaacctctcggtctggttgaggaaggcgctaagacggctcctggaaagaagagacccatagaatcccccgactcctccacgggcatcggcaagaaaggccagcagcccgctaaaaagaagctcaactttgggcagactggcgactcagagtcagtgcccgaccctcaaccaatcggagaaccccccgcaggcccctctggtctgggatctggtacaatggctgcaggcggtggcgctccaatggcagacaataacgaaggcgccgacggagtgggtagttcctcaggaaattggcattgcgattccacatggctgggcgacagagtcatcaccaccagcacccgaacctgggccctccccacctacaacaaccacctctacaagcaaatctccaacgggacatcgggaggaagcaccaacgacaacacctacttcggctacagcaccccctgggggtattttgactttaacagattccactgccacttctcaccacgtgactggcagcgactcatcaacaacaactggggattccggcccaagagactcaacttcaagctcttcaacatccaggtcaaggaggtcacgcagaatgaaggcaccaagaccatcgccaataaccttaccagcacgattcaggtctttacggactcggaataccagctcccgtacgtcctcggctctgcgcaccagggctgcctgcctccgttcccggcggacgtcttcatgattcctcagtacgggtacctgactctgaacaacggcagtcaggccgtgggccgttcctccttctactgcctggagtactttccttctcaaatgctgagaacgggcaacaactttgagttcagctaccagtttgaggacgtgccttttcacagcagctatgcgcacagccaaagcctggaccggctgatgaaccccctcatcgaccagtacctgtactacctgtctcggactcagtccacgggaggtaccgcaggaactcagcagttgctattttctcaggccgggcctaataacatgtcggctcaggccaaaaactggctacccgggccctgctaccggcagcaacgcgtctccacgacagtgtcgcaaaataacaacagcaactttgcttggaccggtgccaccaagtatcatctgaatggcagagactctctggtaaatcccggtgtcgctatggcaacgcacaagggcgacgaagagcgattttttccatccagcggagtcttgatgtttgggaaacagggagctggaaaagacaacgtggactatagcagcgttatgctaaccagtgaggaagaaatcaaaaccaccaacccagtggccacagaacagtacggcgtggtggccgataacctgcaacagcaaaacgccgctcctattgtaggggccgtcaacagtcaaggagccttacctggcatggtctggcagaaccgggacgtgtacctgcagggtcctatctgggccaagattcctcacacggacggcaactttcatccttcgccgctgatgggaggctttggactgaaacacccgcctcctcagatcctgattaagaatacacctgttcccgcggatcctccaactaccttcagtcaagccaagctggcgtcgttcatcacgcagtacagcaccggacaggtcagcgtggaaattgaatgggagctgcagaaagagaacagcaagcgctggaacccagagattcagtatacttccaactactacaaatctacaaatgtggactttgctgtcaatactgagggtacttattcagagcctcgccccattggcacccgttacctcacccgtagcctgtaattgcctgttaatcaataaaccggttgattcgtttcagttgaactttggtctctgcgaagggcgaattc

SEQ ID NO: 5008 - DNA, 3128 bp, Adeno-associated virus
gaattcgccctttctacggctgcgtcaactggaccaatgagaactttcccttcaacgattgcgtcgacaagatggtgatctggtgggaggagggcaagatgacggccaaggtcgtggagtccgccaaggccattctcggcggcagcaaggtgcgcgtggaccaaaagtgcaagtcgtccgcccagatcgaccccacccccgtgatcgtcacctccaacaccaacatgtgcgccgtgattgacgggaacagcaccaccttcgagcaccagcagccgttgcaggaccggatgttcaaatttgaactcacccgccgtctggagcatgactttggcaaggtgacaaagcaggaagtcaaagagttcttccgctgggcgcaggatcacgtgaccgaggtggcgcatgagttctacgtcagaaagggtggagccaacaagagacccgcccccgatgacgcggataaaagcgagcccaagcgggcctgcccctcagtcgcggatccatcgacgtcagacgcggaaggagctccggtggactttgccgacaggtaccaaaacaaatgttctcgtcacgcgggcatgcttcagatgctgtttccctgcaagacatgcgagagaatgaatcagaatttcaacatttgcttcacgcgcgggaccagagactgttcagaatgtttcccgggcgtgtcagaatctcaaccggtcgtcagaaagaggacgtatcggaaactctgtgccattcatcatctgctggggcgggctcccgagattgcttgctcggcctgcgatctggtcaacgtggacctggatgactgtgtttctgagcaataaatgacttaaaccaggtatggctgccgatggttatcttccagattggctcgaggacaacctctctgagggcattcgcgagtggtgggacttgaaacctggagccccgaaacccaaagccaaccagcaaaagcaggacgacggccggggtctggtgcttcctggctacaagtacctcggacccttcaacggactcgacaagggggagcccgtcaacgcggcggacgcagcggccctcgagcacgacaaggcctacgaccagcagctcaaagcgggtgacaatccgtacctgcggtataaccacgccgacgccgagtttcaggagcgtctgcaagaagatacgtcttttgggggcaacctcgggcgagcagtcttccaggccaagaagcgggttctcgaacctctcggtctggttgaggaaggcgctaagacggctcctggaaagaagagaccggtagagccatcaccccagcgttctccagactcctctacgggcatcggcaagacaggccagcagcccgcgaaaaagagactcaactttgggcagactggcgactcagagtcagtgcccgaccctcaaccaatcggagaaccccccgcaggcccctctggtctgggatctggtacaatggctgcaggcggtggcgctccaatggcagacaataacgaaggcgccgacggagtgggtagttcctcaggaaattggcattgcgattccacatggctgggcgacagagtcatcaccaccagcacccgaacctgggccctccccacctacaacaaccacctctacaagcaaatctccaacgggacatcgggaggaagcaccaacgacaacacctacttcggctacagcaccccctgggggtattttgactttaacagattccactgccacttctcaccacgtgactggcagcgactcatcaacaacaactggggattccggcccaagagactcaacttcaagctcttcaacatccaggtcaaggaggtcacgcagaatgaaggcaccaagaccatcgccaataaccttaccagcacgattcaggtctttacggactcggaataccagctcccgtacgtcctcggctctgcgcaccagggctgcccgcctccgttcccggcggacgtcttcatgattcctcagtacgggtacctgactctgaacaacggcagtcaggccgtgggccgttcctccttctactgcctggagtactttccttctcaaatgcggagaacgggcaacaactttgagttcagctaccagtttgaggacgtgccttttcacagcagctacgcgcatagccaaagcctggaccggctgatgaaccccctcatcgaccagtacctgtactacctgtctcggactcagtccacgggaggtaccgcaggaactcagcagttgctattttctcaggccgggcctaataacatgtcggctcaggccaaaaactggctacccgggccctgctaccggcagcaacgcgtctccacgacactgtcgcaaaataacaacagcaactttgcttggaccggtgccaccaagtatcatctgaatggcagagactctctggtaaatcccggtgtcgctatggcaacgcacaaggacgacgaagagcgattttttccatccagcggagtcttgatgtttgggaaacagggagctggaaaagacaacgtggactatagcagcgttatgctaaccagtgaggaagaaatcaaaaccaccaacccagtggccacagaacagtacggcgtggtggccgataacctgcaacagcaaaacgccgctcctattgtaggggccgtcaacagtcaaggagccttacctggcatggtctggcagaaccgggacgtgtacctgcagggtcctatctgggccaagattcctcacacggacggcaactttcatccttcgccgctgatgggaggctttggactgaaacacccgcctcctcagatcctgattaagaatacacctgttcccgcggatcctccaactaccttcagtcaagccaagctggcgtcgttcatcacgcagtacagcaccggacaggtcagcgtggaaattgaatgggagctgcagaaagagaacagcaagcgctggaacccagagattcagtatacttccaactactacaaatctacaaatgtggactttgctgtcaatactgagggtacttattcagagcctcgccccattggcacccgttacctcacccgtaacctgtaattgcctgttaatcaataaaccggttaattcgtttcagttgaactttggtctctgcgaagggcgaattc

SEQ ID NO: 5009 - protein, 738 aa, Adeno-associated virus; identical to SEQ ID NO: 5002

SEQ ID NO: 5010 - DNA, 1933 bp, Adeno-associated virus
  modified_base (1302)..(1302): a, c, t or g
caaggcctacgaccagcagctcaaagcgggtgacaatccgtacctgcggtataaccacgccgacgccgagtttcaggagcgtcttcaagaagatacgtcttttgggggcaacctcgggcgagcagtcttccaggccaaaaagcgggttctcgaacctcttggtctggttgagacgccagctaagacggcacctggaaagaagcgaccggtagactcgccagactccacctcgggcatcggcaagaaaggccagcagcccgcgaaaaagagactcaactttgggcagactggcgactcagagtcagtccccgaccctcaaccaatcggagaaccaccagcaggcccctctggtctgggatctggtacaatggctgcaggcggtggcgcaccaatggctgacaataacgagggcgccgacggagtgggtaatgcctcaggaaattggcattgcgattccacatggctgggcgacagagtcatcaccaccagcacccgaacctgggccctgcccacctacaacaaccacctctacaagcaaatctccagtcagtcagcagggagcaccaacgataacgtctatttcggctacagcaccccctgggggtattttgacttcaacagattccattgccacttctcaccacgtgactggcagcgacttatcaacaacaactggggattccggcccaagaagctcaacttcaagctcttcaacatccaggtcaaggaggtcacgacgaatgacggtgtcacaaccatcgctaataaccttaccagcacggttcaggtcttttcggactcggaatatcaactgccgtacgtcctcggctccgcgcaccagggctgcctgcctccgttcccggcagacgtgttcatgattccgcagtacggatacctgactctgaacaatggcagccaatcggtaggccgttcctccttctactgcctggagtactttccttctcagatgctgagaacgggcaacaacttcacctttagctacaccttcgaggacgtgcctttccacagcagctacgcgcacagccagagtctggaccggctgatgaatcccctcatcgaccagtacctgtactacttggccagaacacagagcaacgcaggaggtactgctggcaatcgggaactgcagttttatcagggcggacctaccaccatggccgaacaagcaaagaactggctgcccggaccttgcttccggcaacagagagtatccaagacgctggatcaaaataacaacagcaactttgcctggactggtgccacaaaataccatttaaatgnaagaaattcattggttaatcccggtgtcgccatggcaacccacaaggacgacgaggaacgcttcttcccttcgagcggagttctaatttttggcaaaactggagcagctaataaaactacattagaaaacgtgctcatgacaaatgaagaagaaattcgtcctaccaacccggtagctaccgaggaatacgggattgtaagcagcaacttgcaggcggctagcaccgcagcccagacacaagttgttaacaaccagggagccttacctggcatggtctggcagaaccgggacgtgtacctgcaaggtcccatttgggccaagattcctcacacggacggcaactttcacccgtctcctctaatgggtggctttggactgaaacacccgcctccccagatcctgatcaaaaacacaccggtacctgctaatcctccagaagtgtttactcctgccaagtttgcttccttcatcacgcagtacagcaccgggcaagtcagcgttgagatcgagtgggagctgcagaaagagaacagcaagcgctggaacccagagattcagtacacctccaactttgacaaacagactggagtggactttgctgttgacagccagggtgtttactctgagcct

SEQ ID NO: 5011 - DNA, 3105 bp, Adeno-associated virus
gaattcgcccttgctgcgtcaactggaccaatgagaactttcccttcaacgattgcgtcgacaagatggtgatctggtgggaggagggcaagatgaccgccaaggtcgtggagtccgccaaggccattctgggcggaagcaaggtgcgcgtggaccaaaagtgcaagtcatcggcccagatcgaccccacgcccgtgatcgtcacctccaacaccaacatgtgcgccgtgatcgacgggaacagcaccaccttcgagcaccagcagccgctgcaggaccgcatgttcaagttcgagctcacccgccgtctggagcacgactttggcaaggtgaccaagcaggaagtcaaagagttcttccgctgggctcaggatcacgtgactgaggtggcgcatgagttctacgtcagaaagggcggagccaccaaaagacccgcccccagtgacgcggatataagcgagcccaagcgggcctgcccctcagttgcggagccatcgacgtcagacgcggaagcaccggtggactttgcggacaggtaccaaaacaaatgttctcgtcacgcgggcatgcttcagatgctgtttccctgcaagacatgcgagagaatgaatcagaatttcaacgtctgcttcacgcacggggtcagagactgctcagagtgcttccccggcgcgtcagaatctcaacccgtcgtcagaaaaaagacgtatcagaaactgtgcgcgattcatcatctgctggggcgggcacccgagattgcgtgttcggcccgcgatctcgtcaacgtggacttggatgactgtgtttctgagcaataaatgacttaaaccaggtatggctgctgacggttatcttccagattggctcgaggacaacctctctgagggcattcgcgagtggtgggacctgaaacctggagcccccaagcccaaggccaaccagcagaagcaggacgacggccggggtctggtgcttcctggctacaagtacctcggacccttcaacggactcgacaagggggagcccgtcaacgcggcggacgcagcggccctcgagcacgacaaggcctacgaccagcagctcaaagcgggtgacaatccgtacctgcggtataaccacgccgacgccgagtttcaggagcgtctgcaagaagatacgtcttttgggggcaacctcgggcgagcagtcttccaggccaagaagagggtactcgaacctctgggcctggttgaagaaggtgctaagacggctcctggaaagaagagaccgttagagtcaccacaagagcccgactcctcctcaggaatcggcaaaaaaggcaaacaaccagccaaaaagagactcaactttgaagaggacactggagccggagacggaccccctgaaggatcagataccagcgccatgtcttcagacattgaaatgcgtgcagcaccgggcggaaatgctgtcgatgcgggacaaggttccgatggagtgggtaatgcctcgggtgattggcattgcgattccacctggtctgagggcaaggtcacaacaacctcgaccagaacctgggtcttgcccacctacaacaaccacttgtacctgcggctcggaacaacatcaaacagcaacacctacaacggattctccaccccctggggatactttgactttaacagattccactgtcacttctcaccacgtgactggcaaagactcatcaacaacaactggggactacgaccaaaagccatgcgcgttaaaatcttcaatatccaagttaaggaggtcacaacgtcgaacggcgagactacggtcgctaataaccttaccagcacggttcagatatttgcggactcgtcgtatgagctcccgtacgtgatggacgctggacaagagggaagtctgtctcctttccccaatgacgtcttcatggtgcctcaatatggctactgtggcattgtgactggcgaaaatcagaaccagacggacagaaatgctttctactgcctggagtattttccttcacaaatgctgagaactggcaataactttgaaatggcttacaactttgggaaggtgccgttccactcaatgtatgcttacagccagagcccggacagactgatgaatcccctcctggaccagtacctgtggcacttacagtcgaccacctctggagagactctgaatcaaggcaatgcagcaaccacatttggaaaaatcaggagtggagactttgccttttacagaaagaactggctgcctgggccttgtgttaaacagcagagactctcaaaaactgccagtcaaaattacaagattcctgccagcgggggcaacgctctgttaaagtatgacacccactataccttaaacaaccgctggagcaacatagcgcctggacctccaatggcaacagctggaccttcagatggggacttcagcaacgcccagctcatcttccctggaccatcagtcaccggaaacacaacaacctcagcaaacaatctgttgtttacatcagaagaagaaattgctgccaccaacccaagagacacggacatgtttggtcagattgctgacaataatcagaatgctacaactgctcccataaccggcaacgtgactgctatgggagtgcttcctggcatggtgtggcaaaacagagacatttactaccaagggccaatttgggccaagatcccacacgcggacggacattttcatccttcaccgctaattggcggttttggactgaaacatccgcctccccagatatttatcaaaaacacccccgtacctgccaatcctgcgacaaccttcactgcagccagagtggactctttcatcacacaatacagcaccggccaggtcgctgttcagattgaatgggaaatcgaaaaggaacgctccaaacgctggaatcctgaagtgcagtttacttcaaactatgggaaccagtcttctatgttgtgggctcccgatacaactgggaagtatacagagccgcgggttattggctctcgttatttgactaatcatttgtaactgcctagttaatcaataaaccgtgtgattcgtttcagttgaactttggtctctgcgaagggcgaattc

SEQ ID NO: 5012 - protein, 733 aa, Adeno-associated virus
MAADGYLPDWLEDNLSEGIREWWDLKPGAPKPKANQQKQDDGRGLVLPGYKYLGPFNGLDKGEPVNAADAAALEHDKAYDQQLKAGDNPYLRYNHADAEFQERLQEDTSFGGNLGRAVFQAKKRVLEPLGLVEEGAKTAPGKKRPLESPQEPDSSSGIGKKGKQPAKKRLNFEEDTGAGDGPPEGSDTSAMSSDIEMRAAPGGNAVDAGQGSDGVGNASGDWHCDSTWSEGKVTTTSTRTWVLPTYNNHLYLRLGTTSNSNTYNGFSTPWGYFDFNRFHCHFSPRDWQRLINNNWGLRPKAMRVKIFNIQVKEVTTSNGETTVANNLTSTVQIFADSSYELPYVMDAGQEGSLPPFPNDVFMVPQYGYCGIVTGENQNQTDRNAFYCLEYFPSQMLRTGNNFEMAYNFEKVPFHSMYAHSQSLDRLMNPLLDQYLWHLQSTTSGETLNQGNAATTFGKIRSGDFAFYRKNWLPGPCVKQQRFSKTASQNYKIPASGGNALLKYDTHYTLNNRWSNIAPGPPMATAGPSDGDFSNAQLIFPGPSVTGNTTTSANNLLFTSEEEIAATNPRDTDMFGQIADNNQNATTAPITGNVTAMGVLPGMVWQNRDIYYQGPIWAKIPHADGHFHPSPLIGGFGLKHPPPQIFIKNTPVPANPATTFTAARVDSFITQYSTGQVAVQIEWEIEKERSKRWNPEVQFTSNYGNQSSMLWAPDTTGKYTEPRVIGSRYLTNHL

SEQ ID NO: 5013 - DNA, 3105 bp, Adeno-associated virus
gaattcgcccttgctgcgtcaactggaccaatgagaactttcccttcaacgattgcgtcgacaagatggtgatctggtgggaggagggcaagatgaccgccaaggtcgtggagtccgccaaggccattctgggcggaagcaaggtgcgcgtggaccaaaagtgcaagtcatcggcccagatcgaccccacgcccgtgatcgtcacctccaacaccaacatgtgcgccgtgatcgacgggaacagcaccaccttcgagcaccagcagccgctgcaggaccgcatgttcaagttcgagctcacccgccgtctggagcacgactttggcaaggtgaccaagcaggaagtcaaagagttcttccgctgggctcaggatcacgtgactgaggtggcgcatgagttctacgtcagaaagggcggagccaccaaaagacccgcccccagtgacgcggatataagcgagcccaagcgggcctgcccctcagttgcggagccatcgacgtcagacgcggaagcaccggtggactttgcggacaggtaccaaaacaaatgttctcgtcacgcgggcatgcttcagatgctgtttccctgcaagacatgcgagagaatgaatcagaatttcaacgtctgcttcacgcacggggtcagagactgctcagagtgcttccccggcgcgtcagaatctcaacccgtcgtcagaaaaaagacgtatcagaaactgtgcgcgattcatcatctgctggggcgggcacccgagattgcgtgttcggcctgcgatctcgtcaacgtggacttggatgactgtgtttctgagcaataaatgacttaaaccaggtatggctgctgacggttatcttccagattggctcgaggacaacctctctgagggcattcgcgagtggtgggacctgaaacctggagcccccaagctcaaggccaaccagcagaagcaggacgacggccggggtctggtgcttcctggctacaagtacctcggacccttccacggactcgacaagggggagcccgtcaacgcggcggacgcagcggccctcgagcacgacaaggcctacgaccagcagctcaaagcgggtgacaatccgtacctgcggtataaccacgccgacgccgagtttcaggagcgtctgcaagaagatacgtcttttgggggcaacctcgggcgagcagtcttccaggccaagaagagggtactcgaaccactgggcctggttgaagaaggtgctaagacggctcctggaaagaagagaccgttagagtcaccacaagagcccgactcctcctcaggaatcggcaaaaaaggcaaacaaccagccaaaaagagactcaactttgaagaggacactggagccggagacggaccccctgaaggatcagataccagcgccatgtcttcagacattgaaatgcgtgcagcaccgggcggaaatgctgtcgatgcgggacaaggttccgatggagtgggtaatgcctcgggtgattggcattgcgattccacctggtctgagggcaaggtcacaacaacctcgaccagaacctgggtcttgcccacctacaacaaccacttgtacctgcggctcggaacaacatcaaacagcaacacctacaacggattctccaccccctggggatactttgactttaacagattccactgtcacttctcaccacgtgactggcaaagactcatcaacaacaactggggactacgaccaaaagccatgcgcgttaaaatcttcaatatccaagttaaggaggtcacaacgtcgaacggcgagactacggtcgctaataaccttaccagcacggttcagatatttgcggactcgtcgtatgagctcccgtacgtgatggacgctggacaagagggaagtctgcctcctttccccaatgacgtcttcatggtgcctcaatatggctactgtggcattgtgactggcgaaaatcagaaccagacggacagaaatgctttctactgcctggagtattttccttcacaaatgctgagaactggcaataactttgaaatggcttacaactttgagaaggtgccgttccactcaatgtatgctcacagccagagcctggacagactgatgaatcccctcctggaccagtacctgtggcacttacagtcgaccacctctggagagactctgaatcaaggcaatgcagcaaccacatttggaaaaatcaggagtggagactttgccttttacagaaagaactggctgcctgggccttgtgttaaacagcagagattctcaaaaactgccagtcaaaattacaagattcctgccagcgggggcaacgctctgttaaagtatgacacccactataccttaaacaaccgctggagcaacatagcgcctggacctccaatggcaacagctggaccttcagatggggacttcagcaacgcccagctcatcttccctggaccatcagtcaccggaaacacaacaacctcagcaaacaatctgttgtttacatcagaaggagaaattgctgccaccaacccaagagacacggacatgtttggtcagattgctgacaataatcagaatgctacaactgctcccataaccggcaacgtgactgctatgggagtgcttcctggcatggtgtggcaaaacagagacatttactaccaagggccaatttgggccaagatcccacacgcggacggacattttcatccttcaccgctaattggcggttttggactgaaacatccgcctccccagatatttatcaaaaacacccccgtacctgccaatcctgcgacaaccttcactgcagccagagtggactctttcatcacacaatacagcaccggccaggtcgctgttcagattgaatgggaaatcgaaaaggaacgctccaaacgccggaatcctgaagtgcagtttacttcaaactatgggaaccagtcttctatgttgtgggctcccgatacaactgggaagtatacagagccgcgggttattggctctcgttatttgactaatcatttgtaactgcctagttaatcaataaaccgtgtgattcgtttcagttgaactttggtctctgcgaagggcgaattc

SEQ ID NO: 5014 - DNA, 3105 bp, Adeno-associated virus
gaattcgcccttcgcagagaccaaagttcaactgaaacgaatcacacggtttattgattaactaggcagttacaaatgattagtcaaataacgagagccaataacccgcggctctgtatacttcccagttgtatcgggagcccacaacatagaagactggttcccacagtttgaagtaaactgcacttcaggattccagcgtttggagcgttccttttcgatttcccattcaatctgaacagcgacctggccggtgctgtattgtgtgatgaaagagtccactctggctgcagtgaaggttgtcgcaggataggcaggtacgggggtgtttttgataaatatctggggaggcggatgtttcagtccaaaaccgccaattagcggtgaaggatgaaaatgtccgtccgcgtgtgggatcttggcccaaattggcccttggtagtaaatgtctctgttttgccacaccatgccaggaagcactcccatagcagtcacgttgccggttatgggagcagttgtagcattctgattattgtcagcaatctgaccaaacatgtccgtgtctcttgggttggtggcagcaatttcttcttctgatgtaaacaacagattgtttgctgaggttgttgtgtttccggtgactgatggtccagggaagatgagctgggcgttgctgaagtccccatctgaaggtccagctgttgccattggaggtccaggcgctatgttgctccagcggttgtttaaggtatagtgggtgtcatactttaacagagcgttgcccccgctggcaggaatcttgtaattttgactggcagtttttgagaatctctgctgtttaacacaaggcccaggcagccagttctttctgtaaaaggcaaagtctccactcctgatttttccaaatgtggttgctgcattgccttgattcagagtctctccagaggtggtcgactgtaagtgccacaggtactggtccaggaggggattcatcagtccgtccaggctctggctgtgagcatacattgagtggaacggcaccttctcaaagttgtaagccgtttcaaagttattgccagttctcagcatttgtgaaggaaaatactccaggcagtagaaagcatttctgtccgtctggttctgattttcgccagtcacaatgccacagtagccatattgaggcaccatgaagacgtcattggggaaaggaggcagacttccctcttgtccagcgtccatcacgtacgggagctcatacgacgagtccgcaaatatctgaaccgtgctggtaaggttattagcgaccgtagtctcgccgttcgacgttgtgacctccttaacttggatattgaagattttaacgcgcatggcttttggtcgtagtccccagttgttgttgatgagtctttgccagtcacgtggtgagaagtgacagtggaatctgttaaagtcaaagtatccccagggggtggagaatccgttgtaggtgttgctgtttgatgttgttccgagccgcaggtacaagtggttgttgtaggtgggcaagacccaggttctggtcgaggttgttgtgaccttgccctcagaccaggtggaatcgcaatgccaatcacccgaggcattacccactccatcggaaccttgtcccgcatcgacagcatttccgcccggtgctgcacgcatttcaatgtctgaagacatggcgctggtatctgatccttcagggggtccgtctccggctccagtgtcctcttcaaagttgagtctctttttggctggttgtttgccttttttgccgattcctgaggaggagtcgggctcttgtggtgactctaacggtctcttctttccaggagccgtcttagcaccttcttcaaccaggcccagaggttcgagtaccctcttcttggcctggaagactgctcgcccgaggttgcccccaaaagacgtatcttcttgcagacgctcctgaaactcggcgtcggcgtggttataccgcaggtacggattgtcacccgctttgagctgctggtcgtaggccttgtcgtgctcgagggccgctgcgtccgccgcgttgacgggctcccccttgtcgagtccgttgaagggtccgaggtactcgtagccaggaagcaccagaccccggccgtcgtcctgcttctgctggttggccttgggcttgggggctccaggtttcaggtcccaccactcgcgaatgccctcagagaggttgtcctcgagccaatctggaagataaccgtcagcagccatacctggtttaagtcatttattgctcagaaacacagtcatccaagtccacgttgacgagatcgcaggccgaacacgcaatctcgggtgcccgccccagcagatgatgaatcgcgcacagtttctgatacgtcttttttctgacgacgggttgagattctgacgcgccggggaagcactctgagcagtctctgaccccgtgcgtgaagcagacgttgaaattctgattcattctctcgcatgtcttgcagggaaacagcatctgaagcatgcccgcgtgacgagaacatttgttttggtacctgtccgcaaggtccaccggtgcttccgcgtctgacgtcgatggctccgcaactgaggggcaggcccgcttgggctcgcttatatccgcgtcactgggggcgggtcttttggtggctccgccctttctgacgtagaactcatgcgccacctcagtcacgtgatcctgagcccagcggaagaactctttgacttcctgcttggtcaccttgccaaagtcgtgctccagacggcgggtgagctcgaacttgaacatgcggtcctgcagcggctgctggtgctcgaaggtggtgctgttcccgtcgatcacggcgcacatgttggtgttggaggtgacgatcacgggcgtggggtcgatctgggccgatgacttgcacttttggtccacgcgcaccttgcttccgcccagaatggccttggcggactccacgaccttggcggtcatcttgccctcctcccaccagatcaccatcttgtcgacgcaatcgttgaagggaaagttctcattggtccagttgacgcagcaagggcgaattc

SEQ ID NO: 5015 - DNA, 3094 bp, Adeno-associated virus
gaattcgcccttgctgcgtcaactggaccaagagaactttcccttcaacgattgcgtcgacaagatggtgatctggtgggaggagggcaagatgacggccaaggtcgtggagtccgccaaagccattctgggcggaagcaaggtgcgcgtcgaccaaaagtgcaagtcctcggcccagatcgatcccacccccgtgatcgtcacctccaacaccaacatgtgcgccgtgatcgacgggaacagcaccaccttcgagcaccagcagccgttgcaggaccggatgttcaaatttgaactcacccgccgtctggaacacgactttggcaaggtgaccaagcaggaagtcaaagagttcttccgctgggctagtgatcacgtgactgaggtgacgcatgagttctacgtcagaaagggcggagccagcaaaagacccgcccccgatgacgcggatataagcgagcccaagcgggcctgtccctcagtcacggacccatcgacgtcagacgcggaaggagctccggtggactttgccgacaggtaccaaaacaaatgttctcgtcacgcgggcatgcttcagatgctgtttccctgcaaaacgtgcgagagaatgaatcagaatttcaacatttgcttcacgcacggggtcagagactgtttagaatgtttccccggcgtgtcagaatctcaaccggtcgtcagaaaaaagacgtatcggaagctgtgtgcgattcatcatctgctggggcgggcacccgagattgcttgctcggcctgcgacctggtcaacgtggacctggacgactgtgtttctgagcaataaatgacttaaaccgggtatggctgccgatggttatcttccagattggctcgaggacaacctctctgagggcattcgcgagtggtgggacctgaaacctggagccccgaaacccaaagccaaccagcaaaagcaggacgacggccggggtctggtgcttcctggctacaagtacctcggacccttcaacggactcgacaagggggagcccgtcaacgcggcggacgcagcggccctcgagcacgacaaggcctacgaccagcagctcaaagcgggtgacaatccgtacctgcggtataaccacgccgacgccgagtttcaggagcgtctgcaagaagatacgtcatttgggggcaacctcgggcgagcagtcttccaggccaagaagcgggttctcgaacctctcggtctggttgaggaaggcgctaagacggctcctggaaagaagagacccatagactctccagactcctccacgggcatcggcaaaaaaggccagcagcccgctaaaaagaagctcaattttggtcagactggcgactcagagtcagtccccgaccctcaacctcttggagaacctccagcagcgccctctagtgtgggatctggtacaatggctgcaggcggtggcgcaccaatggcagacaataacgaaggtgccgacggagtgggtaatgcctcaggaaattggcattgcgattccacatggctgggcgacagagtcatcaccaccagcaccagaacctgggccctccccacctacaacaaccacctctacaagcaaatctccagcagcagctcaggagccaccaatgacaaccactacttcggctacagcaccccctgggggtattttgactttaacagattccactgccacttctcaccacgtgactggcagcgactcatcaacaacaactggggattccggcccaagaagctgcggttcaagctcttcaacatccaggtcaaggaggtcacaacgaatgacggcgtcacgaccatcgctaataaccttaccagcacggttcaggtcttctcggactcggaataccagctgccgtacgtcctcggctctgcgcaccagggctgcctgcctccgttcccggcggacgtcttcatgattcctcagtacggctacctgactctgaacaacggcagccaatcggtgggccgttcctccttctactgcctggaatatttcccctctcaaatgctgagaacgggcaacaactttgagttcagttacagcttcgaggacgtgcctttccacagcagctacgcgcacagccagagcctagaccggctgatgaaccctctcatcgaccagtacctgtactacctggcccggacccagagcaccacgggttccaccagggaactgcaatttcatcaagctgggcccaatactatggccgagcagtcaaagaactggctgcctggaccctgctataggcaacagggactgtcaaagaacttggactttaacaacaacagcaattttgcctggactgctgccactaaatatcatctgaatggcagaaactctttgaccaatcctggcattcccatggcaaccaacaaggatgatgaggaccagttctttcccatcaacggggtactggtttttggcaagacgggagctgccaacaaaactacgctggaaaacgttctgatgaccagcgaggaggagatcaagaccactaaccctgtggctacagaagaatacggtgtggtctccagcaacctgcagccgtctacagccgggcctcaatcacagactatcaacagccagggagcactgcctggcatggtctggcagaaccgggacgtgtatctgcagggtcccatctgggccaaaattcctcacacggatggcaactttcacccgtctcctctgatgggcggttttggactcaaacacccgcctccacagatcctgatcaaaaacacacctgtacctgctaatcctccggaggtgtttactcctgccaagtttgcctccttcatcacgcagtacagcaccggacaagtcagcgtggaaatcgagtgggagctgcagaaagaaaacagcaagcgctggaacccagaaattcagtatacttccaattatgccaagtctaataatgttgaatttgctgtgaaccctgatggtgtttatactgagcctcgccccattggcactcgttacctcccccgtaatctgtaattgcttgttaatcaataaaccggttgattcgtttcagttgaactttggtctctgcgaagggcgaattc

SEQ ID NO: 5016 - DNA, 3095 bp, Adeno-associated virus
gaattcgcccttcgcagagaccaaagttcaactgaaacgaatcaaccggtttattgattaacaagcaattacagattacgggtgaggtaacgagtgccaatggggcgaggctcagtataaacaccatcagggttcacagcaaattcaacattattagacttggcataattggaagtatactgaatttctgggttccagcgcttgctgttttctttctgcagctcccactcgatttccacgctgacttgtccggtgctgtactgcgtgatgaaggaggcaaacttggcaggagtaaacacctccggaggattagcaggtacaggtgtgtttttgatcaggatctgtggaggcgggtgtttgagtccaaaaccgcccatcagaggagacgggtgaaagttgccatccgtgtgaggaattttggcccagatgggaccctgcagatacacgtcccggttctgccagaccatgccaggcagtgctccctggctgttgatagtctgtgattgaggcccggctgtagacgactgcaggttgctggagaccacaccgtattcttctgtagccacagggttagtggtcttgatctcctcctcgctggtcatcagaacgttttccagcgtagttttgttggcagctcccgtcttgccaaaaaccagtaccccgttgatgggaaagaactggtcctcatcatccttgttggttgccatgggaatgccaggattggtcaaagagtttctgccattcagatgatatttagtggcagcagtccaggcaaaattgctgttgttgttaaagtccaagttctttgacagtctctgttgcctatagcagggtccaggcagccagttctttgactgctcggccatagtattgggcccagcttgatgaaattgcagttccctggtggaacccgtggtgctctgggtccgggccaggtagtacaggtactggtcgatgagagggttcatcagccggtctaggctctggctgtgcgcgtagctgctgtggaaaggcacgtcctcgaagctgtaactgaactcaaagttgttgcccgttctcagcatttgagaggggaaatattccaggcagtagaaggaggaacggcccaccgattggctgccgttgtccagagtcaggtagccgtactgaggaatcatgaagacgtccgccgggaacggaggcaggcagccctggtgcgcagagccgaggacgtacggcagctggtattccgagtccgagaagacctgaaccgtgctggtaaggttattagcgatggtcgtgacgccgtcattcgttgtgacctccttgacctggatgttgaggagcttgaaccgcagcttcttgggccggaatccccagttgttgttgatgagtcgctgccagtcacgtggtgagaagtggcagtggaatctgttaaagtcaaaatacccccagggggtgctgtagccgaagtagtggttgtcattggtggctcctgagctgctgctggagatttgcttgtagaggtggttgttgtaggtggggagggcccaggttctggtgctggtggtgatgactctgtcgcccagccatgtggaatcgcaatgccaatttcctgaggcattacccactccgtcggcaccttcgttattgtctgccattggtgcgccaccgcctgcagccattgtaccagatcccacactagagggcgctgctggaggttctccaagaggttgagggtcggggactgactctgagtcgccagtctgaccaaaattgagcttctttttagcgggctgctggccttttttgccgatgcccgtggaggagtctggagagcctatgggtctcttctttccaggagccgtcttagcgccttcctcaaccagaccgagaggttcgagaacccgcttcttggcctggaagactgctcgcccgaggttgcccccaaatgacgtatcttcttgcagacgctcctgaaactcggcgtcggcgtggttataccgcaggtacggattgtcacccgctttgagctgctggtcgtaggccttgtcgtgctcgagggccgctgcgtccgccgcgttgacgggctcccccttgtcgagtccgttgaagggtccgaggtacttgtagccaggaagcaccagaccccggccgtcgtcctgcttttgctggttggctttgggtttcggggctccaggtttcaggtcccaccactcgcgaatgccctcagagaggttgtcctcgagccaatctggaagataaccatcggcagccatacctggtttaagtcatttattgctcagaaacacagtcgtccaggtccacgttgaccaggtcgcaggccgagcaagcaatctcgggtgcccgccccagcagatgatgaatcgcacacagcttccgatacgtcttttttctgacgaccggttgagattctgacacgccggggaaacattctaaacagtctctgaccccgtgcgtgaagcaaatgttgaaattctgattcattctctcgcacgttttgcagggaaacagcacctgaagcatgcccgcgtgacgagaacatttgttttggtacctgtcggcaaagtccaccggagctccttccgcgtctgacgtcgatgggtccgtgactgagggacgggcccgcttgggctcgcttatatccgcgtcatcgggggcgggtcttttgctggctccgccctttctgacgtagaactcatgcgtcacctcagtcacgtgatcactagcccagcggaagaactctttgacttcctgctttgtcaccttgccaaagtcgtgttccagacggcgggtgagttcaaatttgaacatccggtcctgcaacggttgctggtgctcgaaggtggtgctgttcccgtcgatcacggcgcacatgttggtgttggaggtgacgatcacgggggtgggatcgatctgggcggacgacttgcacttttggtccacgcgcaccttgctgccgccgagaatggccttggcggactccacgaccttggccgtcatcttgccctcctcccaccagatcaccatcttgtcgacgcaatcgttgaagggaaagttctcattggtccagttgacgcagcaagggcgaattc

SEQ ID NO: 5017 - DNA, 3095 bp, Adeno-associated virus
gaattcgcccttcgcagagaccaaagttcaactgaaacgaatcaaccggtttattgattaacaagcaattacagattacgggtgaggtaacgagtgccaatggggcgaggctcagtataaacaccatcagggttcacagcaaattcaacattattagacttggcataattggaagtatactgaatttctgggttccagcgcttgctgttttctttctgcagctcccactcgatttccacgctgacttgtccggtgctgtactgcgtgatgaaggaggcaaacttggcaggagtaaacacctccggaggattagcaggtacaggtgtgtttttgatcaggatctgtggaggcgggtgttcgagtccaaaaccgcccatcagaggagacgggtgaaagttgccatccgtgtgaggaattttggcccagatgggaccctgcagatacacgtcccggttctgccagaccatgccaggcagtgctccctggctgttgatagtctgtgattgaggcccggctgtagacgactgcaggttgctggagaccacaccgtattcttctgtagccacagggttagtggtcttgatctcctcctcgctggtcatcagaacgttttccagcgtagttttgttggcagctcccgtcttgccaaaaaccagtaccccgttgatgggaaagaactggtcctcatcatccttgttggttgccatgggaatgccaggattggtcaaagagtttctgccattcagatgatatttagtggcagcagtccaggcaaaattgctgttgttgttaaagtccaagttctttgacagtctctgttgcctatagcagggtccaggcagccagttctttgactgctcggccatagtattgggcccagcttgatgaaattgcagttccctggtggaacccgtggtgctctgggtccgggccaggtagtacaggtactggtcgatgagagggttcatcagccggtctaggctctggctgtgcgcgtagctgctgtggaaaggcacgtcctcgaagctgtaactgaactcaaagttgttgcccgttctcagcatttgagaggggaaatattccaggcagtagaaggaggaacggcccaccgattggctgccgttgttcagagtcaggtagccgtactgaggaatcatgaagacgtccgccgggaacggaggcaggcagccctggtgcgcagagccgaggacgtacggcagctggtattccgagtccgagaagacctgaaccgtgctggtaaggttattagcgatggtcgtgacgccgtcattcgttgtgacctccttgacctggatgttgaagagcttgaaccgcagcttcttgggccggaatccccagttgttgttgatgagtcgctgccagtcacgtggtgagaagtggcagtggaatctgttaaagtcaaaatacccccagggggtgctgtagccgaagtagtggttgtcattggtggctcctgagctgctgctggagatttgcttgtagaggtggttgttgtaggtggggagggcccaggttctggtgctggtggtgatgactctgtcgcccagccatgtggaatcgcaatgccaatttcctgaggcattacccactccgtcggcaccttcgttattgtctgccgttggtgcgccaccgcctgcagccattgtaccagatcccacactagagggcgctgctggaggttctccaagaggttgagggtcggggactgactctgagtcgccagtctgaccaaaattgagcttctttttagcgggctgctggccttttttgccgatgcccgtggaggagtctggagagtctatgggtctcttctttccaggagccgtcttagcgccttcctcaaccagaccgagaggttcgagaacccgcttcttggcctggaagactgctcgcccgaggttgcccccaaatgacgtatcttcttgcaggcgctcctgaaactcggcgtcggcgtggttataccgcaggtacggattgtcacccgctttgagctgctggtcgtaggccttgtcgtgctcgagggccgctgcgtccgccgcgttgacgggctcccccttgtcgagtccgttgaagggtccgaggtacttgtagccaggaagcaccagaccccggccgtcgtcctgcttttgctggttggctttgggtttcggggctccaggtttcaggtcccaccactcgcgaatgccctcagagaggttgtcctcgagccaatctggaagataaccatcggcagccatacctggtttaagccatttattgctcagaaacacagtcgtccaggtccacgttgaccaggtcgcaggccgagcaggcaatctcgggtgcccgccccagcagatgatgaatcgcacacagcttccgatacgtcttttttctgacgaccggttgagattctgacacgccggggaaacattctaaacagtctctgaccccgtgcgtgaagcaaatgttgaaattctgattcattctctcgcacgttttgcagggaaacagcatctgaagcatgcccgcgtggcgagaacatttgttttggtacctgtcggcaaagtccaccggagctccttccgcgtctgacgtcgatgggtccgtgactgagggacaggcccgcttgggctcgcttatatccgcgtcatcgggggcgggtcttttgctggctccgccctttctgacgtagaactcatgcgtcacctcagtcacgtgatcactagcccagcggaagaactctttgacttcctgctttgtcaccttgccaaagtcgtgttccagacggcgggtgagttcaaatttgaacatccggtcctgcaacggctgctggtgctcgaaggtggtgctgttcccgtcgatcacggcgcgcatgttggtgttggaggtgacgatcacgggggtgggatcgatctgggcggacgacttgcacttttggtccacgcgcaccttgctgccgccgagaatggccttggcggactccacgaccttggccgtcatcttgccctcctcccaccagatcaccatcttgtcgacgcaatcgttgaagggaaagttctcattggtccagttgacgcagcaagggcgaattc

SEQ ID NO: 5018 - protein, 729 aa, Adeno-associated virus; identical to SEQ ID NO: 4833

SEQ ID NO: 5019 - protein, 729 aa, Adeno-associated virus
MAADGYLPDWLEDNLSEGIREWWDLKPGAPKPKANQQKQDDGRGLVLPGYKYLGPFNGLDKGEPVNAADAAALEHDKAYDQQLKAGDNPYLRYNHADAEFQERLQEDTSFGGNLGRAVFQAKKRVLEPLGLVEEGAKTAPGKKRPIDSPDSSTGIGKKGQQPAKKKLNFGQTGDSESVPDPQPLGEPPAAPSSVGSGTMAAGGGAPTADNNEGADGVGNASGNWHCDSTWLGDRVITTSTRTWALPTYNNHLYKQISSSSSGATNDNHYFGYSTPWGYFDFNRFHCHFSPRDWQRLINNNWGFRPKKLRFKLFNIQVKEVTTNDGVTTIANNLTSTVQVFSDSEYQLPYVLGSAHQGCLPPFPADVFMIPQYGYLTLNNGSQSVGRSSFYCLEYFPSQMLRTGNNFEFSYSFEDVPFHSSYAHSQSLDRLMNPLIDQYLYYLARTQSTTGSTRELQFHQAGPNTMAEQSKNWLPGPCYRQQRLSKNLDFNNNSNFAWTAATKYHLNGRNSLTNPGIPMATNKDDEDQFFPINGVLVFGKTGAANKTTLENVLMTSEEEIKTTNPVATEEYGVVSSNLQSSTAGPQSQTINSQGALPGMVWQNRDVYLQGPIWAKIPHTDGNFHPSPLMGGFGLKHPPPQILIKNTPVPANPPEVFTPAKFASFITQYSTGQVSVEIEWELQKENSKRWNPEIQYTSNYAKSNNVEFAVNPDGVYTEPRPIGTRYLTRNL

SEQ ID NO: 5020 - protein, 729 aa, Adeno-associated virus
MAADGYLPDWLEDNLSEGIREWWDLKPGAPKPKANQQKQDDGRGLVLPGYKYLGPFNGLDKGEPVNAADAAALEHDKAYDQQLKAGDNPYLRYNHADAEFQERLQEDTSFGGNLGRAVFQAKKRVLEPLGLVEEGAKTAPGKKRPIDSPDSSTGIGKKGQQPAKKKLNFGQTGDSESVPDPQPLGEPPAAPSSVGSGTMAAGGGAPMADNNEGADGVGNASGNWHCDSTWLGDRVITTSTRTWALPTYNNHLYKQISSSSSGATNDNHYFGYSTPWGYFDFNRFHCHFSPRDWQRLINNNWGFRPKKLRFKLFNIQVKEVTTNDGVTTIANNLTSTVQVFSDSEYQLPYVLGSAHQGCLPPFPADVFMIPQYGYLTLNNGSQSVGRSSFYCLEYFPSQMLRTGNNFEFSYSFEDVPFHSSYAHSQSLDRLMNPLIDQYLYYLARTQSTTGSTRELQFHQAGPNTMAEQSKNWLPGPCYRQQRLSKNLDFNNNSNFAWTAATKYHLNGRNSLTNPGIPMATNKDDEDQFFPINGVLVFGKTGAANKTTLENVLMTSEEEIKTTNPVATEEYGVVSSNLQSSTAGPQSQTINSQGALPGMVWQNRDVYLQGPIWAKIPHTDGNFHPSPLMGGFGLKHPPPQILIKNTPVPANPPEVFTPAKFASFITQYSTGQVSVEIEWELQKENSKRWNPEIQYTSNYAKSNNVEFAVNPDGVYTEPRPIGTRYLTRNL

SEQ ID NO: 5021 - DNA, 2217 bp, Adeno-associated virus
atggctgctgacggttatcttccagattggctcgaggacaacctctctgagggcattcgcgagtggtgggacctgaaacctggagcccccaagcccaaggccaaccagcagaagcaggacgacggccggggtctggtgcttcctggctacaagtacctcggacccttcaacggactcgacaagggggagcccgtcaacgcggcggacgcagcggccctcgagcacgacaaggcctacgaccagcagctcaaagcgggtgacaatccgtacctgcggtataaccacgccgacgccgagtttcaggagcgtctacaagaagatacgtcttttgggggcaacctcgggcgagcagtcttccaggccaagaagcgggttctcgaacctctcggtctggttgaggaagctgctaagacggctcctggaaagaagagaccggtagaaccgtcacctcagcgttcccccgactcctccacgggcatcggcaagaaaggccagcggcccgctaaaaagagactgaactttggtcagactggcgactcagagtcagtccccgaccctcaaccaatcggagaaccaccagcaggcccctctggtctgggatctggtacaatggctgcaggcggtggcgctccaatggcagacaataacgaaggcgccgacggagtgggtagttcctcaggaaattggcattgcgattccacatggctgggcgacagagtcatcaccaccagcacccgaacctgggccctgcccacctacaacaaccacctctacaagcaaatatccaatgggacatcgggaggaagcaccaacgacaacacctacttcggctacagcaccccctgggggtattttgacttcaacagattccactgccacttctcaccacgtgactggcagcgactcatcaacaacaactggggattccggccaaaaagactcagcttcaagcccttcaacatccaggtcaaggaggtcacgcagaatgaaggcaccaagaccatcgccaataaccttaccagcacgattcaggtatttacggactcggaataccagctgccgtacgtcctcggctccgcgcaccagggctgcctgcctccgttcccggcggacgtcttcatgattccccagtacggctaccttacactgaacaatggaagtcaagccgtaggccgttcctccttctactgcctggaatattttccatctcaaatgctgcgaactggaaacaattttgaattcagctacaccttcgaggacgtgcctttccacagcagctacgcacacagccagagcttggaccgactgatgaatcctctcatcgaccagtacctgcactacttatccagaactcagtccacaggaggaactcaaggtacccagcaattgttattttctcaagctgggcctgcaaacatgtcggctcaggctaagaactggctacctggaccttgctaccggcagcagcgagtctctacgacactgtcgcaaaacaacaacagcaactttgcttggactggtgccaccaaatatcacctgaacggaagagactctttggtaaatcccggtgtcgccatggcaacccacaaggacgacgaggaacgcttcttcccgtcgagtggagtcctgatgtttggaaaacagggtgctggaagagacaatgtggactacagcagcgttatgctaaccagcgaagaagaaattaaaaccactaaccctgtagccacagaacaatacggtgtggtggctgacaacttgcagcaaaccaatacagggcctattgtgggaaatgtcaacagccaaggagccttacctggcatggtctggcagaaccgagacgtgtacctgcagggtcccatctgggccaagattcctcacacggacggcaacttccacccttcaccgctaatgggaggatttggactgaagcacccacctcctcagatcctgatcaagaacacgccggtacctgcggatcctccaacaacgttcagccaggcgaaattggcttccttcattacgcagtacagcaccggacaggtcagcgtggaaatcgagtgggagctgcagaaggagaacagcaaacgctggaacccagagattcagtacacttcaaactactacaaatctacaaatgtggactttgctgtcaatacagagggaacttattctgagcctcgccccattggtactcgctacctcacccgtaatctgtaa

SEQ ID NO: 5022 - protein, 738 aa, Adeno-associated virus
MAADGYLPDWLEDNLSEGIREWWDLKPGAPKPKANQQKQDDGRGLVLPGYKYLGPFNGLDKGEPVNAADAAALEHDKAYDQQLKAGDNPYLRYNHADAEFQERLQEDTSFGGNLGRAVFQAKKRVLEPLGLVEEAAKTAPGKKRPVEPSPQRSPDSSTGIGKKGQRPAKKRLNFGQTGDSESVPDPQPIGEPPAGPSGLGSGTMAAGGGAPMADNNEGADGVGSSSGNWHCDSTWLGDRVITTSTRTWALPTYNNHLYKQISNGTSGGSTNDNTYFGYSTPWGYFDFNRFHCHFSPRDWQRLINNNWGFRPKRLSFKPFNIQVKEVTQNEGTKTIANNLTSTIQVFTDSEYQLPYVLGSAHQGCLPPFPADVFMIPQYGYLTLNNGSQAVGRSSFYCLEYFPSQMLRTGNNFEFSYTFEDVPFHSSYAHSQSLDRLMNPLIDQYLHYLSRTQSTGGTQGTQQLLFSQAGPANMSAQAKNWLPGPCYRQQRVSTTLSQNNNSNFAWTGATKYHLNGRDSLVNPGVAMATHKDDEERFFPSSGVLMFGKQGAGRDNVDYSSVMLTSEEEIKTTNPVATEQYGVVADNLQQTNTGPIVGNVNSQGALPGMVWQNRDVYLQGPIWAKIPHTDGNFHPSPLMGGFGLKHPPPQILIKNTPVPADPPTTFSQAKLASFITQYSTGQVSVEIEWELQKENSKRWNPEIQYTSNYYKSTNVDFAVNTEGTYSEPRPIGTRYLTRNL

SEQ ID NO: 5023 - DNA, 2217 bp, Adeno-associated virus
atggctgctgacggttatcttccagattggctcgaggacaacctctctgagggcattcgcgagtggtgggacctgaaacctggagcccccaagcccaaggccaaccagcagaagcaggacgacggccggggtctggtgcttcctggctacaagtacctcggacccttcaacggactcgacaagggggagcccgtcaacgcggcggacgcagcggccctcgagcacgacaaggcctacgaccagcagctcaaagcgggtgacaatccgtacctgcggtataaccacgccgacgccgagtttcaggagcgtctgcaagaagatacgtcttttgggggcaacctcgggcgagcagtcttccaggccaagaagcgggttctcgaacctctcggtctggttgaggaagctgctaagacggctcctggaaagaagagaccggtagaaccgtcacctcagcgttcccccgactcctccacgggcatcggcaagaaaggccagcagcccgctaaaaagagactgaactttggtcagactggcgactcagagtcagtccccgaccctcaaccaatcggagaaccaccagcaggcccctctggtctgggatctggtacaatggctgcaggcggtggcgctccaatggcagacaataacgaaggcgccgacggagtgggtagttcctcaggaaattggcattgcgattccacatggctgggcgacagagtcatcaccaccagcacccgaacctgggccctgcccacctacaacaaccacctctacaagcaaatatccaatgggacatcgggaggaagcaccaacgacaacacctacttcggctacagcaccccctgggggtattttgacttcaacagattccactgccacttctcaccacgtgactggcagcgactcatcaacaacaactggggattccggccaaaaagactcagcttcaagctcttcaacatccaggtcaaggaggtcacgcagaatgaaggcaccaagaccatcgccaataaccttaccagcacgattcaggtatttacggactcggaataccagctgccgtacgtcctcggctccgcgcaccagggctgcctgcctccgttcccggcggacgtcttcatgattccccagtacggctaccttacactgaacaatggaagtcaagccgtaggccgttcctccttctactgcctggaatattttccatctcaaatgctgcgaactggaaacaattttgaattcagctacaccttcgaggacgtgcctttccacagcagctacgcacacagccagagcttggaccgactgatgaatcctctcatcgaccagtacctgtactacttatccagaactcagtccacaggaggaactcaaggtacccagcaattgttattttctcaagctgggcctgcaaacatgtcggctcaggctaagaactggctacctggaccttgctaccggcagcagcgagtctctacgacactgtcgcaaaacaacaacagcaactttgcttggactggtgccaccaaatatcacctgaacggaagagactctttggtaaatcccggtgtcgccatggcaacccacaaggacgacgaggaacgcttcttcccgtcgagtggagtcctgatgtttggaaaacagggtgctggaagagacaatgtggactacagcagcgttatgctaaccagcgaagaagaaattaaaaccactaaccctgtagccacagaacaatacggtgtggtggctgataacttgcagcaaaccaatacggggcctattgtgggaaatgtcaacagccaaggagccttacctggcatggtctggcagaaccgagacgtgtacctgcagggtcccatctgggccaagattcctcacacggacggcaacttccacccttcaccgctaatgggaggatttggactgaagcacccacctcctcagatcctgatcaagaacacgccggtacctgcggatcctccaacaacgttcagccaggcgaaattggcttccttcattacgcagtacagcaccggacaggtcagcgtggaaatcgagtgggagctgcagaaggagaacagcaaacgctggaacccagagattcagtacacttcaaactactacaaatctacaaatgtggactttgctgtcaatacagagggaacttattctgagcctcgccccattggtactcgttacctcacccgtaatctgtaa

SEQ ID NO: 5024 - protein, 738 aa, Adeno-associated virus; identical to SEQ ID NO: 4797

SEQ ID NO: 5025 - protein, 738 aa, Adeno-associated virus
MAADGYLPDWLEDNLSEGIREWWDLKPGAPKPKANQQKQDDGRGLVLPGYKYLGPFNGLDKGEPVNAADAAALEHDKAYDQQLKAGDNPYLRYNHADAEFQERLQEDTSFGGNLGRAVFQAKKRVLEPLGLVEEAAKTAPGKKRPVEPSPQRSPDSSTGIGKKGQQPAKKRLNFGQTGDSESVPDPQPIGEPPAGPSGLGSGTMAAGGGAPMADNNEGADGVGSSSGNWHCDSTWLGDRVITTSTRTWALPTYNNHLYKQISNGTSGGSTNDNTYFGYSTPWGYFDFNRFHCHFSPRDWQRLINNNWGFRPKRLSFKLFNIQVKEVTQDEGTKTIANNLTSTIQVFTDSEYQLPYVLGSAHQGCLPPFPADVFMIPQYGYLTLNNGSQAVGRSSFYCLEYFPSQMLRTGNNFEFSYTFEDVPFHSSYAHSQSLDRLMNPLIDQYLYYLSRTQSTGGTQGTQQLLFSQAGPANMSARAKNWLPGPCYRQQRVSTTLSQNNNSNFAWTGATKYHLNGRDSLVNPGVAMATHKDDEERFFPSSGVLMFGKQGAGRDNVDYSSVMLTSEEEIKTTNPVATEQYGVVADNLQQANTGPIVGNVNSQGALPGMVWQNRDVYLQGPIWAKIPHTDGNFHPSPLMGGFGLKHPPPQILIKNTPVPADPPTTFSQAKLASFITQYSTGQVSVEIEWELQKENSKRWNPEIQYTSNYYKSTNVDFAVNSEGTYSEPRPIGTRYLTRNL

SEQ ID NO: 5026 - DNA, 2217 bp, Adeno-associated virus
atggctgctgacggttatcttccagattggctcgaggacaacctctctgagggcattcgcgagtggtgggacctgaaacctggagcccccaagcccaaggccaaccagcagaagcaggacgacggccggggtctggtgcttcctggctacaagtacctcggacccttcaacggactcgacaagggggagcccgtcaacgcggcggacgcagcggccctcgagcacgacaaggcctacgaccagcagctcaaagcgggtgacaatccgtacctgcggtataaccacgccgacgccgagtttcaggagcgtctgcaagaagatacgtcttttgggggcaacctcgggcgagcagtcttccaggccaagaagcgggttctcgaacctctcggtctggttgaggaagctgctaagacggctcctggaaagaagagaccggtagaaccgtcacctcagcgttcccccgactcctccacgggcatcggcaagaaaggccagcagcccgctaaaaagagactgaactttggtcagactggcgactcagagtcagtccccgaccctcaaccaatcggagaaccaccagcaggcccctctggtctgggatctggtacaatggctgcaggcggtggcgctccaatggcagacaataacgaaggcgccgacggagtgggtagttcctcaggaaattggcattgcgattccacatggctgggcgacagagtcatcaccaccagcacccgaacctgggccctgcccacctacaacaaccacctctacaagcaaatatccaatgggacatcgggaggaagcaccaacgacaacacctacttcggctacagcaccccctgggggtattttgacttcaacagattccactgccacttctcaccacgtgactggcagcgactcatcaacaacaactggggattccggccaaaaagactcagcttcaagctcttcaacatccaggtcaaggaggtcacgcaggatgaaggcaccaagaccatcgccaataaccttaccagcacgattcaggtatttacggactcggaataccagctgccgtacgtcctcggctccgcgcaccagggctgcctgcctccgttcccggcggacgtcttcatgattccccagtacggctaccttacactgaacaatggaagtcaagccgtaggccgttcctccttctactgcctggaatattttccatctcaaatgctgcgaactggaaacaattttgaattcagctacaccttcgaggacgtgcctttccacagcagctacgcacacagccagagcttggaccgactgatgaatcctctcatcgaccagtacctgtactacttatccagaactcagtccacaggaggaactcaaggtacccagcaattgttattttctcaagctgggcctgcaaacatgtcggctcgggctaagaactggctacctggaccttgctaccggcagcagcgagtctctacgacactgtcgcaaaacaacaacagcaactttgcttggactggtgccaccaaatatcacctgaacggaagagactctttggtaaatcccggtgttgctatggcaacgcataaggacgacgaggaacgtttctttccatcgagcggagtcctgatgtttggaaaacagggtgctggaagagacaatgtggactatagcagcgttatgctaaccagcgaggaagaaattaaaaccactaaccctgtagccacagaacaatacggtgtggtggctgacaacttgcagcaagccaatacagggcctattgtgggaaatgtcaacagccaaggagccttacctggcatggtctggcagaaccgagacgtgtacctgcagggtcccatctgggccaaaattcctcacacggacggcaattttcacccgtctcctctgatgggcggctttggactgaagcacccacctccccagatcctgatcaagaatacgccggtacctgcggatcctccaacgacgttcagccaggcaaaattggcttccttcatcacgcagtacagcaccggccaggtcagcgtggagatcgagtgggagctgcagaaggagaacagcaagcgatggaacccagaaattcagtacacttccaactactacaaatctacaaatgtggactttgctgtcaattctgagggtacatattcagagcctcgccccattggtactcgttatctgacacgtaatctgtaa

SEQ ID NO: 5027 - DNA, 2211 bp, Adeno-associated virus
atggctgccgatggttatcttccagattggctcgaggacaacctctctgagggcattcgcgagtggtgggacttgaaacctggagccccgaaacccaaagccaaccagcaaaagcaggacgacggccggggcctggtgcttcctggctacaagtacctcggacccttcaacggactcgacaagggggagcccgtcaacgcggcggacgcagcggccctcgagcacgacaaggcctacgaccagcagctcgaagcgggtgacaatccgtacctgcggtataaccacgccgacgccgagtttcaggagcgtctgcaagaagatacgtcttttgggggcaacctcgggcgagcagtcttccaggccaagaagcgggttctcgaacctctcggtctggttgaggaaggcgctaagacggctcctggaaagaagagaccagtagagcagtcaccccaagaaccagactcctcctcgggcatcggcaagaaaggccaacagcccgccagaaaaagactcaattttggccagactggcgactcagagtcagttccagaccctcaacctctcggagaacctccagcagcgccctctggtgtgggacctaatacaatggctgcaggcggtggcgcaccaatggcagacaataacgaaggcgccgacggagtgggtagttcctcgggaaattggcattgcgattccacatggctgggcgacagagtcatcaccaccagcacccgaacctgggccctgcccacctacaacaaccacctctacaagcaaatctccaacgggacatcgggaggagccaccaacgacaacacctacttcggctacagcaccccctgggggtattttgactttaacagattccactgccacttttcaccacgtgactggcagcgactcatcaacaacaactggggattccggcccaagagactcagcttcaagctcttcaacatccaggtcaaggaggtcacgcagaatgaaggcaccaagaccatcgccaataacctcaccagcaccatccaggtgtttacggactcggagtaccagctgccgtacgttctcggctctgcccaccagggctgcctgcctccgttcccggcggacgtgttcatgattccccagtacggctacctaacactcaacaacggtagtcaggccgtgggacgctcctccttctactgcctggaatactttccttcgcagatgctgagaaccggcaacaacttccagtttacttacaccttcgaggacgtgcctttccacagcagctacgcccacagccagagcttggaccggctgatgaatcctctgattgaccagtacctgtactacttgtctcggactcaaacaacaggaggcacggcaaatacgcagactctgggcttcagccaaggtgggcctaatacaatggccaatcaggcaaagaactggctgccaggaccctgttaccgccaacaacgcgtctcaacgacaaccgggcaaaacaacaatagcaactttgcctggactgctgggaccaaataccatctgaatggaagaaattcattggctaatcctggcatcgctatggcaacacacaaagacgacgaggagcgttttttcccagtaacgggatcctgtttttggcaacaaaatgctgccagagacaatgcggattacagcgatgtcatgctcaccagcgaggaagaaatcaaaaccactaaccctgtggctacagaggaatacggtatcgtggcagataacttgcagcagcaaaacacggctcctcaaattggaactgtcaacagccagggggccttacccggtatggtctggcagaaccgggacgtgtacctgcagggtcccatctgggccaagattcctcacacggacggcaacttccacccgtctccgctgatgggcggctttggcctgaaacatcctccgcctcagatcctgatcaagaacacgcctgtacctgcggatcctccgaccaccttcaaccagtcaaagctgaactctttcatcacgcaatacagcaccggacaggtcagcgtggaaattgaatgggagctacagaaggaaaacagcaagcgctggaaccccgagatccagtacacctccaactactacaaatctacaagtgtggactttgctgttaatacagaaggcgtgtactctgaaccccgccccattggcacccgttacctcacccgtaatctgtaa

SEQ ID NO: 5028 - protein, 736 aa, Adeno-associated virus
MAADGYLPDWLEDNLSEGIREWWDLKPGAPKPKANQQKQDDGRGLVLPGYKYLGPFNGLDKGEPVNAADAAALEHDKAYDQQLEAGDNPYLRYNHADAEFQERLQEDTSFGGNLGRAVFQAKKRVLEPLGLVEEGAKTAPGKKRPVEQSPQEPDSSSGIGKKGQQPARKRLNFGQTGDSESVPDPQPLGEPPAAPSGVGPNTMAAGGGAPMADNNEGADGVGSSSGNWHCDSTWLGDRVITTSTRTWALPTYNNHLYKQISNGTSGGATNDNTYFGYSTPWGYFDFNRFHCHFSPRDWQRLINNNWGFRPKRLSFKLFNIQVKEVTQNEGTKTIANNLTSTIQVFTDSEYQLPYVLGSAHQGCLPPFPADVFMIPQYGYLTLNNGSQAVGRSSFYCLEYFPSQMLRTGNNFQFTYTFEDVPFHSSYAHSQSLDRLMNPLIDQYLYYLSRTQTTGGTANTQTLGFSQGGPNTMANQAKNWLPGPCYRQQRVSTTTGQNNNSNFAWTAGTKYHLNGRNSLANPGIAMATHKDDEERFFPVTGSCFWQQNAARDNADYSDVMLTSEEEIKTTNPVATEEYGIVADNLQQQNTAPQIGTVNSQGALPGMVWQNRDVYLQGPIWAKIPHTDGNFHPSPLMGGFGLKHPPPQILIKNTPVPADPPTTFNQSKLNSFITQYSTGQVSVEIEWELQKENSKRWNPEIQYTSNYYKSTSVDFAVNTEGVYSEPRPIGTRYLTRNL

SEQ ID NO: 5029 - DNA, 2214 bp, Adeno-associated virus
atggctgctgacggttatcttccagattggctcgaggacaacctctctgagggcattcgcgagtggtgggacctgaaacctggagcccccaagcccaaggccaaccagcagaagcaggacgacggccggggtctggtgcttcctggctacaagtacctcggacccttcaacggactcgacaagggggagcccgtcagcgcggcggacgcagcggccctcgagcacgacaaggcctgcgaccagcggctcaaagcgggtgacaatccgtacctgcggtataaccacgccgacgccgagtttcaggagcgtctgcaagaagatacgtcttttgggggcaacctcgggcgagcagtcttccaggccaagaagcgggttctcgaacctctcggtctggttgaggaagctgctaagacggctcctggaaagaagggaccggtagaaccgtcacctcagcgttcccccgactcctccacgggcatcggcaagaaaggccagcagcccgctagaaagagactgaactttgggcagactggcgactcagagtcagtccccgaccctcaaccaatcggagaaccaccagcaggcccctctggtctgggatctggtacaatggctgcaggcggtggcgcaccaatggctgacaataacgagggcgccgacggagtgggtaatgcctcaggaaattggcattgcgattccacatggctgggcgacagagtcatcaccaccagcacccgaacctgggctttgcccacctacaacaatcacctctacaagcaaatctccagtcagtcagcaggtagcaccaacgacaacgtctacttcggctacagcaccccctgggggtattttgacttcaacagattccactgtcacttctcaccacgtgactggcagcggctcatcaacaacaactggggattccggcccaagaagctcaacttcaagctgttcaacatccaggtcaaggaggtcacaacgaatgacggcgtcacgaccatcgccaataaccttaccagcacggttcaggtcttttcggactcggaataccagctgccctacgtcctcggctccgcacaccagggctgcctgcctccgttcccggcggacgtcttcatgattccccagtacggctacctgactctgaacaatggcagccaatcggtgggtcgttcctctttctactgcctggaatatttcccttctcaaatgctgagaacgggcaacaacttcaccttcagctacaccttcgaggacgttcccttccacagcagctacgcacacagccagagcctggaccggctgatgaatcctcttatcgaccagtacctgtattacctggccagaacacagagcaacgcaggaggcacagctggcaatcgggaactgcagttttatcagggcgggcctaccaccatggccgaacaagccaaaaactggctgcctggaccttgcttccggcaacaaagagtctccaagacgctggatcaaaacaacaacagcaactttgcttggactggtgccaccaaataccatctaaatggaagaaattcattggttaatcccggtgtcgccatggcaacccacaaggacgacgaggaacgcttcttcccttcgagcggagtcctgatttttggaaaaactggagcagctaataagactacactggaaaatgtgttaatgacaaatgaagaggaaattcgtcctaccaacccggtagccaccgaggaatacgggactgttagcagcaacctgcaggcggctaacactgcagcccagacacaagttgtcaacaaccagggagccttacctggtatggtctggcagaaccgggacgtgtacctgcagggtcccatctgggccaagattcctcacacggacggcaactttcacccgtctccgctgatgggcggctttggactgaagcatccgcctcctcagatcctgatcaaaaacactcctgttcctgctaatcccccggaggtgtttacgcctgccaagtttgcttctttcatcacacagtacagcaccggccaggtcagcgtggagatcgagtgggagctgcagaaggagaacagcaagcgctggaacccagagattcagtatacctccaattttgacgaacagactggtgtggactttgccgttgacagccagggtgtttattctgagcctcgccccattggtactcgttacctcacccgtaatctgtaa

SEQ ID NO: 5030 - protein, 737 aa, Adeno-associated virus
MAADGYLPDWLEDNLSEGIREWWDLKPGAPKPKANQQKQDDGRGLVLPGYKYLGPFNGLDKGEPVSAADAAALEHDKACDQRLKAGDNPYLRYNHADAEFQERLQEDTSFGGNLGRAVFQAKKRVLEPLGLVEEAAKTAPGKKGPVEPSPQRSPDSSTGIGKKGQQPARKRLNFGQTGDSESVPDPQPIGEPPAGPSGLGSGTMAAGGGAPMADNNEGADGVGNASGNWHCDSTWLGDRVITTSTRTWALPTYNNHLYKQISSQSAGSTNDNVYFGYSTPWGYFDFNRFHCHFSPRDWQRLINNNWGFRPKKLNFKLFNIQVKEVTTNDGVTTIANNLTSTVQVFSDSEYQLPYVLGSAHQGCLPPFPADVFMIPQYGYLTLNNGSQSVGRSSFYCLEYFPSQMLRTGNNFTFSYTFEDVPFHSSYAHSQSLDRLMNPLIDQYLYYLARTQSNAGGTAGNRELQFYQGGPTTMAEQAKNWLPGPCFRQQRVSKTLDQNNNSNFAWTGATKYHLNGRNSLVNPGVAMATHKDDEERFFPSSGVLIFGKTGAANKTTLENVLMTNEEEIRPTNPVATEEYGTVSSNLQAANTAAQTQVVNNQGALPGMVWQNRDVYLQGPIWAKIPHTDGNFHPSPLMGGFGLKHPPPQILIKNTPVPANPPEVFTPAKFASFITQYSTGQVSVEIEWELQKENSKRWNPEIQYTSNFDEQTGVDFAVDSQGVYSEPRPIGTRYLTRNL

SEQ ID NO: 5031 - DNA, 2214 bp, Adeno-associated virus
atggctgccgatggttatcttccagattggctcgaggacaacctctctgagggcattcgcgagtggtgggacctgaaacctggagccccgaaacccaaagccaaccagcaaaagcaggacgacggccggggtctggtgcttcctggctacaagtacctcggacccttcaacggactcgacaagggggagcccgtcaacgcggcggacgcagcggccctcgagcacgacaaggcctacgaccagcagctcaaagcgggtgacaatccgtacctgcggtataaccacgccgacgccgagtttcaggagcgtctgcaagaagatacgtcttttgggggcaacctcgggcgagcagtcttccaggccaagaagcgggttctcgaacctctcggtctggttgaggaagctgctaagacggctcctggaaagaagagaccggtagaaccgtcacctcagcgttcccccgactcctccacgggcatcggcaagaaaggccagcagcccgctagaaagagactgaactttgggcagactggcgactcagagtcagtccccgaccctcaaccaatcggagaaccaccagcaggcccctctggtctgggatctggtacaatggctgcaggcggtggcgctccaatggcagacaataacgaaggcgccgacggagtgggtaatgcctcaggaaattggcattgcgattccacatggctgggcgacagagtcatcaccaccagcacccgaacctgggctttgcccacctacaacaaccacctctacaagcaaatctccagtcagtcagcaggtagcaccaacgacaacgtctacttcggctacagcaccccctgggggtattttgacttcaacagattccactgtcacttctcaccacgtgactggcagcggctcatcaacaacaactggggattccggcccaagaagctcaacttcaagctgttcaacatccaggtcaaggaggtcacaacgaatgacggcgtcacgaccatcgccaataaccttaccagcacggttcaggtcttttcggactcggaataccagctgccctacgtcctcggctccgcacaccagggctgcctgcctccgttcccggcggacgtcttcatgattcctcagtacggctacctgactctcaacaacggtagtcaggccgtgggacgttcctccttctactgcctggagtacttcccctctcagatgctgagaacgggcaacaacttttccttcagctacactttcgaggacgtgcctttccacagcagctacgcgcacagccagagtttggacaggctgatgaatcctctcatcgaccagtacctgtactacctgtcaagaacccagtctacgggaggcacagcgggaacccagcagttgctgttttctcaggccgggcctagcaacatgtcgactcaggccagaaactggctgcctggaccctgctacagacagcagcgcgtctccacgacactgtcgcaaaacaacaacagcaactttgcctggactggtgccaccaagtatcatctgaacggcagagactctctggtgaatccgggcgtcgccatggcaaccaacaaggacgacgaggaccgcttcttcccatccagcggcatcctcatgtttggcaagcagggagctggaaaagacaacgtggactatagcaacgtgatgctaaccagcgaggaagaaatcaagaccaccaaccccgtggccacagaacagtatggcgtggtggctgataacctacagcagcaaaacaccgctcctattgtgggggccgtcaacagccagggagccttacctggcatggtctggcagaaccgggacgtgtacctgcagggtcctatttgggccaagattcctcacacagatggcaactttcacccgtctcctttaatgggcggctttggacttaaacatccgcctcctcagatccttatcaaaaacactcctgttcctgcggatcctccaacagcgttcaaccaggccaagctgaattctttcatcacgcagtacagcaccggacaagtcagcgtggagatcgagtgggagctgcagaaggagaacagcaagcgctggaacccagagattcagtatacttccaactactacaaatctacaaatgtggactttgctgttaatactgagggtgcttactctgagcctcgccccattggcactcgttacctcacccgtaatctgtaa

SEQ ID NO: 5032 - protein, 737 aa, Adeno-associated virus
MAADGYLPDWLEDNLSEGIREWWDLKPGAPKPKANQQKQDDGRGLVLPGYKYLGPFNGLDKGEPVNAADAAALEHDKAYDQQLKAGDNPYLRYNHADAEFQERLQEDTSFGGNLGRAVFQAKKRVLEPLGLVEEAAKTAPGKKRPVEPSPQRSPDSSTGIGKKGQQPARKRLNFGQTGDSESVPDPQPIGEPPAGPSGLGSGTMAAGGGAPMADNNEGADGVGNASGNWHCDSTWLGDRVITTSTRTWALPTYNNHLYKQISSQSAGSTNDNVYFGYSTPWGYFDFNRFHCHFSPRDWQRLINNNWGFRPKKLNFKLFNIQVKEVTTNDGVTTIANNLTSTVQVFSDSEYQLPYVLGSAHQGCLPPFPADVFMIPQYGYLTLNNGSQAVGRSSFYCLEYFPSQMLRTGNNFSFSYTFEDVPFHSSYAHSQSLDRLMNPLIDQYLYYLSRTQSTGGTAGTQQLLFSQAGPSNMSTQARNWLPGPCYRQQRVSTTLSQNNNSNFAWTGATKYHLNGRDSLVNPGVAMATNKDDEDRFFPSSGILMFGKQGAGKDNVDYSNVMLTSEEEIKTTNPVATEQYGVVADNLQQQNTAPIVGAVNSQGALPGMVWQNRDVYLQGPIWAKIPHTDGNFHPSPLMGGFGLKHPPPQILIKNTPVPADPPTAFNQAKLNSFITQYSTGQVSVEIEWELQKENSKRWNPEIQYTSNYYKSTNVDFAVNTEGAYSEPRPIGTRYLTRNL

SEQ ID NO: 5033 - DNA, 2217 bp, Adeno-associated virus
atggctgccgatggttatcttccagattggctcgaggacaacctctctgagggcattcgcgagtggtgggacctgaaacctggagccccgaaacccaaagccaaccagcaaaagcaggacgacggccggggtctggtgcttcctggctacaagtacctcggacccttcaacggactcgacaagggggagcccgtcaacgcggcggacgcagcggccctcgagcacgacaaggcctacgaccagcagctcaaagcgggtgacaatccgtacctgcggtataatcacgccgacgccgagtttcaggagcgtctgcaagaagatacgtcttttgggggcaacctcgggcgagcagtcttccaggccaagaagcgggttctcgaacctctcggtctggttgaggaaggcgctaagacggctcctggaaagaagagaccggtagagccgtcaccacagcgttcccccgactcctccacgggcatcggcaagaaaggccagcagcccgccagaaagagactcaatttcggtcagactggcgactcagagtcagtccccgaccctcaacctatcggagaacctccagcagcgccctctagtgtgggatctggtacaatggctgcaggcggtggcgcaccaatggcagacaataacgaaggtgccgacggagtgggtagttcctcgggaaattggcattgcgattccacatggctgggcgacagagtcatcaccaccagcacccgaacctgggccctgcccacctacaacaaccacctctacaagcaaatctccaacgggacctcgggaggcagcaccaacgacaacacctactttggctacagcaccccctgggggtattttgactttaacagattccactgccacttctcaccacgtgactggcagcgactcatcaacaacaactggggattccggcccaagagactcagcttcaagctcttcaacatccaggtcaaagaggtcacgcagaatgaaggcaccaagaccatcgccaataacctcaccagcaccatccaggtgtttacggactcggaataccagctgccgtacgtcctcggctctgcccaccagggctgcctgcctccgttcccggcggacgtcttcatgattcctcagtacggctacctgactctcaacaacggtagtcaggccgtgggacgttcctccttctactgcctggagtacttcccctctcagatgctgagaacgggcaacaacttttccttcagctacactttcgaggacgtgcctttccacagcagctacgcgcacagccagagtttggacaggctgatgaatcctctcatcgaccagtacctgtactacctgtcaagaacccagtctacgggaggcacagcgggaacccagcagttgctgttttctcaggccgggcctagcaacatgtcggctcaggccagaaactggctgcctggaccctgctacagacagcagcgcgtctccacgacactgtcgcaaaacaacaacagcaactttgcctggactggtgccaccaagtatcatctgaacggcagagactctctggtgaatccgggcgtcgccatggcaaccaacaaggacgacgaggaccgcttcttcccatccagcggcatcctcatgtttggcaagcagggagctggaaaagacaacgtggactatagcaacgtgatgctaaccagcgaggaagaaatcaaggccaccaaccccgtggccacagaacagtatggcgtggtggctgataacctacagcagcaaaacaccgctcctattgtgggggccgtcaacagccagggagccttacctggcatggtctggcagaaccgggacgtgtacctgcagggtcctatttgggccaagattcctcacacagatggcaactttcacccgtctcctttaatgggcggctttggacttaaacatccgcctcctcagatcctcatcaaaaacactcctgttcctgcggatcctccaacagcgttcaaccaggccaagctgaattctttcatcacgcagtacagcaccggacaagtcagcgtggagatcgagtgggagctgcagaaggagaacagcaagcgctggaacccagagattcagtatacttccaactactacaaatctacaaatgtggactttgctgttaatactgagggtgtttactctgagcctcgccccattggcactcgttacctcacccgtaatctgtaa

SEQ ID NO: 5034 - protein, 738 aa, Adeno-associated virus
MAADGYLPDWLEDNLSEGIREWWDLKPGAPKPKANQQKQDDGRGLVLPGYKYLGPFNGLDKGEPVNAADAAALEHDKAYDQQLKAGDNPYLRYNHADAEFQERLQEDTSFGGNLGRAVFQAKKRVLEPLGLVEEGAKTAPGKKRPVEPSPQRSPDSSTGIGKKGQQPARKRLNFGQTGDSESVPDPQPIGEPPAAPSSVGSGTMAAGGGAPMADNNEGADGVGSSSGNWHCDSTWLGDRVITTSTRTWALPTYNNHLYKQISNGTSGGSTNDNTYFGYSTPWGYFDFNRFHCHFSPRDWQRLINNNWGFRPKRLSFKLFNIQVKEVTQNEGTKTIANNLTSTIQVFTDSEYQLPYVLGSAHQGCLPPFPADVFMIPQYGYLTLNNGSQAVGRSSFYCLEYFPSQMLRTGNNFSFSYTFEDVPFHSSYAHSQSLDRLMNPLIDQYLYYLSRTQSTGGTAGTQQLLFSQAGPSNMSAQARNWLPGPCYRQQRVSTTLSQNNNSNFAWTGATKYHLNGRDSLVNPGVAMATNKDDEDRFFPSSGILMFGKQGAGKDNVDYSNVMLTSEEEIKATNPVATEQYGVVADNLQQQNTAPIVGAVNSQGALPGMVWQNRDVYLQGPIWAKIPHTDGNFHPSPLMGGFGLKHPPPQILIKNTPVPADPPTAFNQAKLNSFITQYSTGQVSVEIEWELQKENSKRWNPEIQYTSNYYKSTNVDFAVNTEGVYSEPRPIGTRYLTRNL

SEQ ID NO: 5035 - DNA, 2217 bp, Adeno-associated virus
atggctgccgatggttatcttccagattggctcgaggacaacctctctgagggcattcgcgagtggtgggacctgaaacctggagccccgaaacccaaagccaaccagcaaaagcaggacgacggccggggtctggtgcttcctggctacaagcacctcggacccttcaacggactcgacaagggggagcccgtcaacgcggcggacgcagcggccctcgagcacgacaaggcctacgaccagcagctcaaagcgggtgacaatccgtacctgcggtataatcacgctgacgccgagtttcaggagcgtctgcaagaagatacgtcttttgggggcaacctcgggcgagcagtcttccaggccaagaagcgggttctcgaacctctcggtctggttgaggaaggcgctaagacggctcctggaaagaagagaccggtagagccgtcaccacagcgttcccccgactcctccacgggcatcggcaagaaaggccagcagcccgccagaaagagactcaatttcggtcagactggcgactcagagtcagtccccgaccctcaacctatcggagaacctccagcagcgccctctagtgtgggatctggtacaatggctgcaggcggtggcgcaccaatggcagacaataacgaaggtgccgacggagtgggtagttcctcgggaaattggcattgcgattccacatggctgggcgacagagtcatcaccaccagcacccgaacctgggccctgcccacctacaacaaccacctctacaagcaaatctccaacgggacctcgggaggcagcaccaacgacaacacctactttggctacagcaccccctgggggtattttgactttaacagattccactgccacttctcaccacgtgactggcagcgactcatcaacaacaactggggattccggcccaagagactcagcttcaagctcttcaacatccaggtcaaagaggtcacgcagaatgaaggcaccaagaccatcgccaataaccttaccagcacggttcaggtcttttcggactcggaataccagctgccctacgtcctcggctccgcacaccagggctgcctgcctccgttcccggcggacgtcttcatgattccccagtacggctacctgactctgaacaatggcagccaatcggtgggtcgttcctctttctactgcctggaatatttcccttctcaaatgctgagaacgggcaacaacttcaccttcagctacaccttcgaggacgttcccttccacagcagctacgcacacagccagagcctggaccggctgatgaatcctcttatcgaccagtacctgtattacctggccagaacacagagcaacgcaggaggcacagctggcaatcgggaactgcagttttatcagggcgggcctaccaccatggccgaacaagccaaaaactggctgcctggaccttgcttccggcaacaaagagtctccaagacgctggatcaaaacaacaacagcaactttgcttggactggtgccaccaaataccatctaaatggaagaaattcattggttaatcccggtgtcgccatggcaacccacaaggacgacgaggaacgcttcttcccttcgagcggagtcctgatttttggaaaaactggagcagctaataagactacactggaaaatgtgttaatgacaaatgaagaggaaattcgtcctaccaacccggtagccaccgaggaatacgggactgttagcagcaacctgcaggcggctaacactgcagcccagacacaagttgtcaacaaccagggagccttacctggtatggtctggcagaaccgggacgtgtacctgcagggtcccatctgggccaagattcctcacacggacggcaactttcacccgtctccgctgatgggcggctttggactgaagcatccgcctcctcagatcctgatcaaaaacactcctgttcctgctaatcccccggaggtgtttacgcctgccaagtttgcttctttcatcacacagtacagcaccggccaggtcagcgtggagatcgagtgggagctgcagaaggagaacagcaagcgctggaacccagagattcagtatacctccaattttgacaaacagactggtgtggactttgccgttgacagccagggtgtttattctgagcctcgccccattggtactcgttacctcacccgtaatctgtaa

SEQ ID NO: 5036 - protein, 738 aa, Adeno-associated virus
MAADGYLPDWLEDNLSEGIREWWDLKPGAPKPKANQQKQDDGRGLVLPGYKHLGPFNGLDKGEPVNAADAAALEHDKAYDQQLKAGDNPYLRYNHADAEFQERLQEDTSFGGNLGRAVFQAKKRVLEPLGLVEEGAKTAPGKKRPVEPSPQRSPDSSTGIGKKGQQPARKRLNFGQTGDSESVPDPQPIGEPPAAPSSVGSGTMAAGGGAPMADNNEGADGVGSSSGNWHCDSTWLGDRVITTSTRTWALPTYNNHLYKQISNGTSGGSTNDNTYFGYSTPWGYFDFNRFHCHFSPRDWQRLINNNWGFRPKRLSFKLFNIQVKEVTQNEGTKTIANNLTSTVQVFSDSEYQLPYVLGSAHQGCLPPFPADVFMIPQYGYLTLNNGSQSVGRSSFYCLEYFPSQMLRTGNNFTFSYTFEDVPFHSSYAHSQSLDRLMNPLIDQYLYYLARTQSNAGGTAGNRELQFYQGGPTTMAEQAKNWLPGPCFRQQRVSKTLDQNNNSNFAWTGATKYHLNGRNSLVNPGVAMATHKDDEERFFPSSGVLIFGKTGAANKTTLENVLMTNEEEIRPTNPVATEEYGTVSSNLQAANTAAQTQVVNNQGALPGMVWQNRDVYLQGPIWAKIPHTDGNFHPSPLMGGFGLKHPPPQILIKNTPVPANPPEVFTPAKFASFITQYSTGQVSVEIEWELQKENSKRWNPEIQYTSNFDKQTGVDFAVDSQGVYSEPRPIGTRYLTRNL

SEQ ID NO: 5037 - protein, 737 aa, Adeno-associated virus
MAADGYLPDWLEDNLSEGIREWWDLKPGAPKPKANQQKQDDGRGLVLPGYKYLGPFNGLDKGEPVNAADAAALEHDKAYDQQLKAGDNPYLRYNHADAEFQERLQEDTSFGGNLGRAVFQAKKRVLEPLGLVEEAAKTAPGKKRPVEPSPQRSPDSSTGIGKKGQQPARKRLNFGQTGDSESVPDPQPIGEPPAGPSGLGSGTMAAGGGAPMADNNKGADGVGNASGNWHCDSTWLGDRVITTSTRTWALPTYNNHLYKQISSQSAGSTNDNVYFGYSTPWGYFDFNRFHCHFSPRDWQRLINSNWGFRPKKLNFKLFNIQVKEVTTNDGVTTIANNLTSTVQVFSDSEYQLPYVLGSAHQGCLPPFPADVFMIPQYGYLTLNNGSQSVGRSSFYCLEYFPSQMLRTGNNFTFSYTFEDVPFHSSYAHSQSLDRLMNPLIDQYLYYLARTQSNAGGTAGNRELQFYQGGPTTMAEQAKNWLPGPCFRQQRVSKTLDQNNNSNFAWTGATKYHLNGRNSLVNPGVAMATHKDDEERFFPSSGVLIFGKTGAANKTTLENVLMTNEEEIRPTNPVATEEYGTVSSNLQAANTAAQTQVVNNQGALPGMVWQNRDVYLQGPIWAKIPHTDGNFHPSPLMGGFGLKHPPPQILIKNTPVPANPPEVFTPAKFASFITQYSTGQVSVEIEWELQKENSKRWNPEIQYTSNFDKQTGVDFAVDSQGVYSEPRPIGTRYLTRNL

SEQ ID NO: 5038 - DNA, 2214 bp, Adeno-associated virus
atggctgctgacggttatcttccagattggctcgaggacaacctctctgagggcattcgcgagtggtgggacctgaaacctggagcccccaagcccaaggccaaccagcagaagcaggacgacggccggggtctggtgcttcctggctacaagtacctcggacccttcaacggactcgacaagggggagcccgtcaacgcggcggacgcagcggccctcgagcacgacaaggcctacgaccagcagctcaaagcgggtgacaatccgtacctgcggtataaccacgccgacgccgagtttcaggagcgtctgcaagaagatacgtcttttgggggcaacctcgggcgagcagtcttccaggccaagaagcgggttctcgaacctctcggtctggttgaggaagctgctaagacggctcctggaaagaagagaccggtagaaccgtcacctcagcgttcccccgactcctccacgggcatcggcaagaaaggccagcagcccgctagaaagagactgaactttgggcagactggcgactcagagtcagtccccgaccctcaaccaatcggagaaccaccagcaggcccctctggtctgggatctggtacaatggctgcaggcggtggcgcaccaatggctgacaataacaagggcgccgacggagtgggtaatgcctcaggaaattggcattgcgattccacatggctgggcgacagagtcatcaccaccagcacccgaacctgggctttgcccacctacaacaaccacctctacaagcaaatctccagtcagtcagcaggtagcaccaacgacaacgtctacttcggctacagcaccccctgggggtattttgacttcaacagattccactgtcacttctcaccacgtgactggcagcggctcatcaacagcaactggggattccggcccaagaagctcaacttcaagctgttcaacatccaggtcaaggaggtcacaacgaatgacggcgtcacgaccatcgccaataaccttaccagcacggttcaggtcttttcggactcggaataccagctgccctacgtcctcggctccgcacaccagggctgcctgcctccgttcccggcggacgtcttcatgattccccagtacggctacctgactctgaacaatggcagccaatcggtgggtcgttcctctttctactgcctggaatatttcccttctcaaatgctgagaacgggcaacaacttcaccttcagctacaccttcgaggacgttcccttccacagcagctacgcacacagccagagcctggaccggctgatgaatcctcttatcgaccagtacctgtattacctggccagaacacagagcaacgcaggaggcacagctggcaatcgggaactgcagttttatcagggcgggcctaccaccatggccgaacaagccaaaaactggctgcctggaccttgcttccggcaacaaagagtctccaagacgctggatcaaaacaacaacagcaactttgcttggactggtgccaccaaataccatctaaatggaagaaattcattggttaatcccggtgtcgccatggcaacccacaaggacgacgaggaacgcttcttcccttcgagcggagtcctgatttttggaaaaactggagcagctaataagactacactggaaaatgtgttaatgacaaatgaagaggaaattcgtcctaccaacccggtagccaccgaggaatacgggactgttagcagcaacctgcaggcggctaacactgcagcccagacacaagttgtcaacaaccagggagccttacctggtatggtctggcagaaccgggacgtgtacctgcagggtcccatctgggccaagattcctcacacggacggcaactttcacccgtctccgctgatgggcggctttggactgaagcatccgcctcctcagatcctgatcaaaaacactcctgttcctgctaatcccccggaggtgtttacgcctgccaagtttgcttctttcatcacacagtacagcaccggccaggtcagcgtggagatcgagtgggagctgcagaaggagaacagcaagcgctggaacccagagattcagtatacctccaattttgacaaacagactggtgtggactttgccgttgacagccagggtgtttattctgagcctcgccccattggtactcgttacctcacccgtaatctgtaa

SEQ ID NO: 5039 - protein, 737 aa, Adeno-associated virus
MAADGYLPDWLEDNLSEGIREWWDLKPGAPKPKANQQKQDDGRGLVLPGYKYLGPFNGLDKGEPVNAADAAALEHDKAYDQQLKAGDNPYLRYNHADAEFQERLQEDTSFGGNLGRAVFQAKKRVLEPLGLVEEAAKTAPGKKRPVEPSPQRSPDSSTGIGKKGQQPARKRLNFGQTGDSESVPDPQPIGEPPAGPSGLGSGTMAAGGGAPMADNNEGADGVGNASGNWHCDSTWLGDRVITTSTRTWALPTYNNHLYKQISSQSAGSTNDNVYFGYSTPWGYFDFNRFHCHFSPRDWQRLINSNWGFRPKKLNFKLFNIQVKEVTTNDGVTTIANNLTSTVQVFSDSEYQLPYVLGSAHQGCLPPFPADVFMIPQYGYLTLNNGSQSVGRSSFYCLEYFPSQMLRTGNNFTFSYTFEDVPFHSSYAHSQSLDRLMNPLIDQYLYYLARTQSNAGGTAGNRELQFYQGGPTTMAEQAKNWLPGPCFRQQRVSKTLDQNNNSNFAWTGATKYHLNGRNSLVNPGVAMATHKDDEERFFPSSGVLIFGKTGAANKTTLENVLMTNEEEIRPTNPVATEEYGTVSSNLQAANTAAQTQVVNNQGALPGMVWQNRDVYLQGPIWAKIPHTDGNFHPSPLMGGFGLKHPPPQILIKNTPVPANPPEVFTPAKFASFITQYSTGQVSVEIEWELQKENSKRWNPEIQYTSNFDKQTGVDFAVDSQGVYSEPRPIGTRYLTRNL

SEQ ID NO: 5040 - protein, 737 aa, Adeno-associated virus
MAADGYLPDWLEDNLSEGIREWWDLKPGAPKPKANQQKQDDGRGLVLPGYKYLGPFNGLDKGEPVNAADAAALEHDKAYDQQLKAGDNPYLRYNHADAEFQERLQEDTSFGGNLGRAVFQAKKRVLEPLGLVEEAAKTAPGKKRPVEPSPQRSPDSSTGIGKKGQQPARKRLNFGQTGDSESVPDPQPIGEPPAGPSGLGSGTMAAGGGAPMADNNEGADGVGNASGNWHCDSTWLGDRVITTSTRTWALPTYNNHLYKQISSQSAGSTNDNVYFGYSTPWGYFDFNRFHCHFSPRDWQRLINNNWGFRPKKLNFKLFNIQVKEVTTNDGVTTIANNLTSTVQVFSDSEYQLPYVLGSAHQGCLPPFPADVFMIPQYGYLTLNNGSQSVGRSSFYCLEYFPSQMLRTGNNFTFSYTFEDVPFHSSYAHSQSLDRLMNPLIDQYLYYLARTQSNAGGTAGNRELQFYQGGPTTMAEQAKNWLPGPCFRQQRVSKTLDQNNNSNFAWTGATKYHLNGRNSLVNPGVAMATHKDDEERFFPSSGVLIFGKTGAANKTTLENVLMTNEEEIRPTNPVATEEYGTVSSNLQAANTAAQTQVVNNQGALPGMVWQNRDVYLQGPIWAKIPHTDGNFHPSPLMGGFGLKHPPPQILIKNTPVPANPPEVFTPAKFASFITQYSTGQVSVEIEWELQKENSKRWNPEIQYTSNFDKQTGVDFAVDSQGVYSEPRPIGTRYLTRNL

SEQ ID NO: 5041 - protein, 737 aa, Adeno-associated virus
MAADGYLPDWLEDNLSEGIREWWDLKPGAPKPKANQQKQDDGRGLVLPGYKYLGPFNGLDKGEPVNAADAAALEHDKAYDQQLKAGDNPYLRYNHADAEFQERLQEDTSFGGNLGRAVFQAKKRVLEPLGLVEEAAKTAPGKKRPVEPSPQRSPDSSTGIGKKGQQPARKRLNFGQTGDSESVPDPQPIGEPPAGPSGLGSGTMAAGGGAPMADNNKGADGVGNASGNWHCDSTWLGDRVITTSTRTWALPTYNNHLYKQISSQSAGSTNDNVYFGYSTPWGYFDFNRFHCHFSPRDWQRLINNNWGFRPKKLNFKLFNIQVKEVTTNDGVTTIANNLTSTVQVFSDSEYQLPYVLGSAHQGCLPPFPADVFMIPQYGYLTLNNGSQSVGRSSFYCLEYFPSQMLRTGNNFTFSYTFEDVPFHSSYAHSQSLDRLMNPLIDQYLYYLARTQSNAGGTAGNRELQFYQGGPTTMAEQAKNWLPGPCFRQQRVSKTLDQNNNSNFAWTGATKYHLNGRNSLVNPGVAMATHKDDEERFFPSSGVLIFGKTGAANKTTLENVLMTNEEEIRPTNPVATEEYGTVSSNLQAANTAAQTQVVNNQGALPGMVWQNRDVYLQGPIWAKIPHTDGNFHPSPLMGGFGLKHPPPQILIKNTPVPANPPEVFTPAKFASFITQYSTGQVSVEIEWELQKENSKRWNPEIQYTSNFDKQTGVDFAVDSQGVYSEPRPIGTRYLTRNL

SEQ ID NO: 5042 - DNA, 2217 bp, Adeno-associated virus
atggctgccgatggttatcttccagattggctcgaggacaacctctctgagggcattcgcgagtggtgggacctgaaacctggagccccgaaacccaaagccaaccagcaaaagcaggacgacggccggggtctggtgcttcctggctacaagtacctcggacccttcaacggactcgacaagggggagcccgtcaacgcggcggacgcagcggccctcgagcacgacaaggcctacgaccagcagctcaaagcgggtgacaatccgcacctgcggtataatcacgccgacgccgagtttcaggagcgtctgcaagaagatacgtcttttgggggcaacctcgggcgagcagtcttccaggccaagaagcgggttctcgaacctctcggtctggttgaggaaggcgctaagacggctcctggaaagaagagaccggtagagccgtcaccacagcgttcccccgactcctccacgggcatcggcaagaaaggccagcagcccgccagaaagagactcaatttcggtcagactggcgactcagagtcagtccccgaccctcaacttatcggagaacctccagcagcgccctctagtgtgggatctggtacaatggctgcaggcggtggcgcaccaatggcagacaataacgaaggtgccgacggagtgggtagttcctcgggaaattggcattgcgattccacatggctgggcgacagagtcatcaccaccagcacccgaacctgggccctgcccacctacaacaaccacctctacaagcaaatctccaacgggacctcgggaggcagcaccaacgacaacacctactttggctacagcaccccctgggggtattttgactttaacagattccactgccacttctcaccacgtgactggcagcgactcatcaacaacaactggggattccggcccaagagactcagcttcaagctcttcaacatccaggtcaaagaggtcacgcagaatgaaggcaccaagaccatcgccaataacctcaccagcaccatccaggtgtttacggactcggagtaccagctgccgtacgtcctcggctctgcccaccagggctgcctgcctccgttcccggcggacgtcttcatgattcctcagtacggcaacctgactctcaacaacggtagtcaggccgtgggacgttcctccttctactgcctggagtacttcccctctcagatgctgagaacgggcaacaacttttccttcagctacactttcgaggacgtgcctttccacagcagctacgcgcacagccagagtttggacaggctgatgaatcctctcatcgaccagtacctgtactacctgtcaagaacccagtctacgggaggcacagcgggaacccagcagttgctgttttctcaggccgggcctagcaacatgtcggctcaggccagaaactggctgcctggaccctgctacagacagcagcgcgtctccacgacactgtcgcaaaacaacaacagcaactttgcctggactggtgccaccaagtatcatctgaacggcagagactctctggtgaatccgggcgtcgccatggcaaccaacaaggacgacgaggaccgcttcttcccatccagcggcatcctcatgtttggcaagcagggagctggaaaagacaacatgggctatagcaacgtgatgctaaccagcgaggaagaaatcaagaccaccaaccccgtggccacagaacagtatggcgtggtggctgataacctacagcagcaaaacaccgctcctattgtgggggccgtcaacagccagggagccttacctggcatggtctggcagaaccgggacgtgtacctgcagggtcctatttgggccaagattcctcacacagatggcaactttcacccgtctcctttaatgggcggctttggacttaaacatccgcctcctcagatcctcatcaaaaacactcctgttcctgcggatcctccaacagcgttcaaccaggccaagctgaattctttcatcacgcagtacggcaccggacaagtcagcgtggagatcgagtgggagctgcagaaggagaacagcaagcgctggaacccagagattcagtatacttccaactactacaaatctacaaatgtggactttgctgttaatactgagggtgtttactctgagcctcgccccattggcactcgttacctcacccgtaatctgtaa

SEQ ID NO: 5043 - protein, 738 aa, Adeno-associated virus
MAADGYLPDWLEDNLSEGIREWWDLKPGAPKPKANQQKQDDGRGLVLPGYKYLGPFNGLDKGEPVNAADAAALEHDKAYDQQLKAGDNPHLRYNHADAEFQERLQEDTSFGGNLGRAVFQAKKRVLEPLGLVEEGAKTAPGKKRPVEPSPQRSPDSSTGIGKKGQQPARKRLNFGQTGDSESVPDPQLIGEPPAAPSSVGSGTMAAGGGAPMADNNEGADGVGSSSGNWHCDSTWLGDRVITTSTRTWALPTYNNHLYKQISNGTSGGSTNDNTYFGYSTPWGYFDFNRFHCHFSPRDWQRLINNNWGFRPKRLSFKLFNIQVKEVTQNEGTKTIANNLTSTIQVFTDSEYQLPYVLGSAHQGCLPPFPADVFMIPQYGNLTLNNGSQAVGRSSFYCLEYFPSQMLRTGNNFSFSYTFEDVPFHSSYAHSQSLDRLMNPLIDQYLYYLSRTQSTGGTAGTQQLLFSQAGPSNMSAQARNWLPGPCYRQQRVSTTLSQNNNSNFAWTGATKYHLNGRDSLVNPGVAMATNKDDEDRFFPSSGILMFGKQGAGKDNMGYSNVMLTSEEEIKTTNPVATEQYGVVADNLQQQNTAPIVGAVNSQGALPGMVWQNRDVYLQGPIWAKIPHTDGNFHPSPLMGGFGLKHPPPQILIKNTPVPADPPTAFNQAKLNSFITQYGTGQVSVEIEWELQKENSKRWNPEIQYTSNYYKSTNVDFAVNTEGVYSEPRPIGTRYLTRNL

SEQ ID NO: 5044 - DNA, 2217 bp, Adeno-associated virus
atggctgccgatggttatcttccagattggctcgaggacaacctctctgagggcattcgcgagtggtgggacctgaaacctggagccccgaaacccaaagccaaccagcaaaagcaggacgacggccggggtctggtgcttcctggctacaagtacctcggacccttcaacggactcgacaagggggagcccgtcaacgcggcggacgcagcggccctcgagcacgacaaggcctacgaccagcagctcaaagcgggtgacaatccgtacctgcggtataatcacgccgacgccgagtttcaggagcgtctgcaagaagatacgtcttttgggggcaacctcgggcgagcagtcttccaggccaagaagcgggttctcgaacctctcggtctggttgaggaaggcgctaagacggctcctggaaagaagagaccggtagagccgtcaccacagcgttcccccgactcctccacgggcatcggcaagaaaggccagcagcccgccggaaagagactcaatttcggtcagactggcgactcagagtcagtccccgaccctcaacctatcggagaacctccagcagcgccctctagtgtgggatctggtacaatggctgcaggcggtggcgcaccaatggcagacaataacgaaggtgccgacggagtgggtagttcctcgggaaattggcattgcgattccacatggctgggcgacagagtcatcaccaccagcacccgaacctgggccctgcccacctacaacaaccacctctacaagcaaatctccaacgggacctcgggaggcagcaccaacgacaacacctactttggctacagcaccccctgggggtattttgactttaacagattccactgccacttctcaccacgtgactggcagcgactcatcaacaacaactggggattccggcccaagagactcagcttcaagctcttcaacatccaggtcaaagaggtcacgcagaatgaaggcaccaagaccatcgccaataacctcaccagcaccatccaggtgtttacggactcggaataccagctgccgtacgtcctcggctctgcccaccagggctgcctgcctccgttcccggcggacgtcttcatgattcctcagtacggctacctgactctcaacaacggtagtcaggccgtgggacgttcctccttctactgcctggagtacttcccctctcagatgctgagaacgggcaacaacttttccttcagctacactttcgaggacgtgcctttccacagcagctacgcgcacagccagagtttggacaggctgatgaatcctctcgtcgaccagtacctgtactacctgtcaagaacccagtctacgggaggcacagcgggaacccagcagttgctgttttctcaggccgggcctagcaacatgtcggctcaggccagaaactggctgcctggaccctgctacagacagcagcgcgtctccacgacactgtcgcaaaacaacaacagcaactttgcctggactggtgccaccaagtatcatctgaacggcagagactctctggtgaatccgggcgtcgccatggcaaccaacaaggacgacgaggaccgcttcttcccatccagcggcatcctcatgtttggcaagcagggagctggaaaagacaacgtggactatagcaacgtgatgctaaccagcgaggaagaaatcaagaccaccaaccccgtggccacagaacagtatggcgtggtggctgataacctacagcagcaaaacaccgctcctattgtgggggccgtcaacagccagggagccttacctggcatggtctggcagaaccgggacgtgtacctgcagggtcctatttgggccaagattcctcacacagatggcaactttcacccgtctcctttaatgggcggctttggacttaaacatccgcctcctcagatcctcatcaaaaacactcctgttcctgcggatcctccaacagcgttcaaccaggccaagctgaattctttcatcacgcagtacagcaccggacaagtcagcgtggagatcgagtgggagctgcagaaggagaacagcaagcgctggagcccagagattcagtatacttccaactactacaaatctacaaatgtggactttgctgttaatactgagggtgtttactctgagcctcgccccattggcactcgttacctcacccgtaatctgtaa

SEQ ID NO: 5045 - protein, 738 aa, Adeno-associated virus
MAADGYLPDWLEDNLSEGIREWWDLKPGAPKPKANQQKQDDGRGLVLPGYKYLGPFNGLDKGEPVNAADAAALEHDKAYDQQLKAGDNPYLRYNHADAEFQERLQEDTSFGGNLGRAVFQAKKRVLEPLGLVEEGAKTAPGKKRPVEPSPQRSPDSSTGIGKKGQQPAGKRLNFGQTGDSESVPDPQPIGEPPAAPSSVGSGTMAAGGGAPMADNNEGADGVGSSSGNWHCDSTWLGDRVITTSTRTWALPTYNNHLYKQISNGTSGGSTNDNTYFGYSTPWGYFDFNRFHCHFSPRDWQRLINNNWGFRPKRLSFKLFNIQVKEVTQNEGTKTIANNLTSTIQVFTDSEYQLPYVLGSAHQGCLPPFPADVFMIPQYGYLTLNNGSQAVGRSSFYCLEYFPSQMLRTGNNFSFSYTFEDVPFHSSYAHSQSLDRLMNPLVDQYLYYLSRTQSTGGTAGTQQLLFSQAGPSNMSAQARNWLPGPCYRQQRVSTTLSQNNNSNFAWTGATKYHLNGRDSLVNPGVAMATNKDDEDRFFPSSGILMFGKQGAGKDNVDYSNVMLTSEEEIKTTNPVATEQYGVVADNLQQQNTAPIVGAVNSQGALPGMVWQNRDVYLQGPIWAKIPHTDGNFHPSPLMGGFGLKHPPPQILIKNTPVPADPPTAFNQAKLNSFITQYSTGQVSVEIEWELQKENSKRWSPEIQYTSNYYKSTNVDFAVNTEGVYSEPRPIGTRYLTRNL

SEQ ID NO: 5046 - DNA, 2217 bp, Adeno-associated virus
atggttgccgatggttatcttccagattggctcgaggacaacctctctgagggcattcgcgagtggtgggacctgaaacctggagccccgaaacccaaagccaaccagcaaaagcagggcgacggccggggtctggtgcttcctggctacaagtacctcggacccttcaacggactcgacaagggggagcccgtcaacgcggcggacgcagcggccctcgagcacgacaaggcctacgaccagcagcttaaagcgggtgacaatccgtacctgcggtataatcacgccgacgccgagcttcaggagcgtctgcaagaagatacgtcttttgggggcaacctcgggcgagcagtcttccaggccaagaagcgggttctcgaacctctcggtctggttgaggaaggcgctaagacggctcctggaaagaagagaccggtagagccgtcaccacagcgttcccccgactcctccacgggcatcggcaagaaaggccagcagcccgccagaaagagactcaatttcggtcagactggcgactcagagtcagtccccgaccctcaacctatcggagaacctccagcagcgccctctagtgtgggatctggtacaatggctgcaggcggtggcgcgccaatggcagacaataacgaaggtgccgacggagtgggtagttcctcgggaaattggcattgcgattccacatggctgggcgacagagtcatcaccaccagcacccgaacctgggccctgcccacctacaacaaccacctctacaagcaaatctccaacgggacctcgggaggcagcaccaacgacaacacctactttggctacagcaccccctgggggtattttgactttaacagattccactgccacttctcaccacgtgactggcagcgactcatcaacaacaactggggattccggcccaagagactcagcttcaagctcttcaacatccaggtcaaagaggtcacgcagaatgaaggcaccaagaccatcgccaataacctcaccagcaccatccaggtgtttacggactcggaataccagctgccgtacgtcctcggctctgcccaccagggctgccagcctccgttcccggcggacgtcttcatgattcctcagtacggctacctgactctcaacaacggtagtcaggccgtgggacgttcctccttctactgcctggagtacttcccctctcagatgctgagaacgggcaacaacttttccttcagctacactttcgaggacgtgcctttccacagcagctacgcgcacagccagagtttggacaggctgatgaatcctctcatcgaccagtacctgtactacctgtcaagaacccagtctacgggaggcacagcgggaacccagcagttgctgttttctcaggccgggcctagcaacatgtcggctcaggccagaaactggctgcctggaccctgctacagacagcagcgcgtctccacgacactgtcgcaaaacaacaacagcaactttgcctggactggtgccaccaagtatcatctgaacggcagagactctctggtgaatccgggcgtcgccatggcaaccaacaaggacgacgaggaccgcttcttcccatccagcggcatcctcatgtttggcaagcagggagctggaaaagacaacgtggactatagcaacgtgatgctaaccagcgaggaagaaatcaagaccaccaaccccgtggccacagaacagtatggcgtggtggctgataacctacagcagcaaaacaccgctcctattgtgggggccgtcaacagccagggagccttacctggcatggtctggcagaaccgggacgtgtacctgcagggtcctatttgggccaagattcctcacacagatggcaactttcacccgtctcctttaatgggcggctttggacttaaacatccgcctcctcagatcctcatcaaaaacactcctgttcctgcggatcctccaacagcgttcaaccaggccaagctgaattctttcatcacgcagtacagcaccggacaagtcagcgtggagatcgagtgggagccgcagaaggagaacagcaagcgctggaacccagagattcagtatacttccaactactacaaatctacaaatgtggactttgctgttaatactgagggtgtttactctgagcctcgccccattggcactcgttacctcacccgtaatctgtaa

SEQ ID NO: 5047 - protein, 738 aa, Adeno-associated virus
MVADGYLPDWLEDNLSEGIREWWDLKPGAPKPKANQQKQGDGRGLVLPGYKYLGPFNGLDKGEPVNAADAAALEHDKAYDQQLKAGDNPYLRYNHADAELQERLQEDTSFGGNLGRAVFQAKKRVLEPLGLVEEGAKTAPGKKRPVEPSPQRSPDSSTGIGKKGQQPARKRLNFGQTGDSESVPDPQPIGEPPAAPSSVGSGTMAAGGGAPMADNNEGADGVGSSSGNWHCDSTWLGDRVITTSTRTWALPTYNNHLYKQISNGTSGGSTNDNTYFGYSTPWGYFDFNRFHCHFSPRDWQRLINNNWGFRPKRLSFKLFNIQVKEVTQNEGTKTIANNLTSTIQVFTDSEYQLPYVLGSAHQGCQPPFPADVFMIPQYGYLTLNNGSQAVGRSSFYCLEYFPSQMLRTGNNFSFSYTFEDVPFHSSYAHSQSLDRLMNPLIDQYLYYLSRTQSTGGTAGTQQLLFSQAGPSNMSAQARNWLPGPCYRQQRVSTTLSQNNNSNFAWTGATKYHLNGRDSLVNPGVAMATNKDDEDRFFPSSGILMFGKQGAGKDNVDYSNVMLTSEEEIKTTNPVATEQYGVVADNLQQQNTAPIVGAVNSQGALPGMVWQNRDVYLQGPIWAKIPHTDGNFHPSPLMGGFGLKHPPPQILIKNTPVPADPPTAFNQAKLNSFITQYSTGQVSVEIEWEPQKENSKRWNPEIQYTSNYYKSTNVDFAVNTEGVYSEPRPIGTRYLTRNL

SEQ ID NO: 5048 - DNA, 2217 bp, Adeno-associated virus
atggctgccgatggttatcttccagattggctcgaggacaacctctctgagggcattcgcgagtggtgggacctgaaacctggagccccgaaacccaaagccaaccagcaaaagcaggacgacggccggggtctggtgcttcctggctacaagtacctcggacccttcaacggactcgacaagggggagcccgtcaacgcggcggacgcagcggccctcgagcacgacaaggcctacgaccagcagctcaaagcgggtgacaatccgtacctgcggtataatcacgccgacgccgagtttcaggagcgtctgcaagaagatacgtcttttgggggcaacctcgggcgagcagtcttccaggccaagaagcgggttctcgaacctctcggtctggttgaggaaggcgctaagacggctcctggaaagaagagaccggtagagccgtcaccacagcgttcccccgactcctccacgggcatcggcaagaaaggccagcagcccgccagaaagagactcaatttcggtcagactggcgactcagagtcagtccccgaccctcaacctatcggagaacctccagcagcgccctctagtgtgggatctggtacaatggctgcaggcggtggcgcaccaatggcagacaataacgaaggtgccgacggagtgggtagttcctcgggaaattggcattgcgattccacatggctgggcgacagagtcatcaccaccagcacccgaacctgggccctgcccacctacaacaaccacctctacaagcaaatctccaacgggacctcgggaggcagcaccaacgacaacacctactttggctacagcaccccctgggggtattttgactttaacagattccactgccacttctcaccacgtgactggcagcgactcatcaacaacaactggggattccggcccaagagactcagcttcaagctcttcaacatccaggtcaaagaggtcacgcagaatgaaggcaccaagaccatcgccaatagcctcaccagcaccatccaggtgtttacggactcggaataccagctgccgtacgtcctcggctctgcccaccagggctgcctgcctccgttcccggcggacgtcttcatgattcctcagtacggctacctgactcccaacaacggtagtcaggccgtgggacgttcctccttctactgcctggagtacttcccctctcagatgctgagaacgggcaacaacttttccttcagctacactttcgaggacgtgcctttccacagcagctacgcgcacagccagagtttggacaggctgatgaatcctctcatcgaccagtacctgtactacctgtcaagaacccagtctacgggaggcacagcgggaacccagcagttgctgtcttctcaggccgggcctagcaacatgtcggctcaggccagaaactggctgcctggaccctgctacagacagcagcgcgtctccacgacactgtcgcaaaacaacaacagcaactttgcctggactggtgccaccaagtatcatctgaacggcagagactctctggtgaatccgggcgtcgccatggcaaccaacaaggacgacgaggaccgcttcttcccatccagcggcatcctcatgtttggcaagcagggagctggaaaagacaacgtggactatagcaacgtgatgctaaccagcgaggaagaaatcaagaccaccaaccccgtggccacagaacagtatggcgtggtggctgataacctacagcagcaaaacaccgctcctattgtgggggccgtcaacagccagggagccttacctggcatggtctggcagaaccgggacgtgtacttgcagggtcctatttgggccaagattcctcacacagatggcaactttcacccgtctcctttaatgggcggctttggacttaaacatccgcctcctcagatcctcatcaaaaacactcctgttcctgcggatcctccaacagcgttcaaccaggccaagctgaattctttcatcacgcagtacagcaccggacaagtcagcgtggagatcgagtgggagctgcagaaggagaacagcaagcgctggaacccagagattcagtatacttccaactactacaaatctacaaatgtggactttgctgttaatactgagggtgtttactctgagcctcgccccattggcactcgttacctcacccgtaatctgtaa

SEQ ID NO: 5049 - protein, 738 aa, Adeno-associated virus
MAADGYLPDWLEDNLSEGIREWWDLKPGAPKPKANQQKQDDGRGLVLPGYKYLGPFNGLDKGEPVNAADAAALEHDKAYDQQLKAGDNPYLRYNHADAEFQERLQEDTSFGGNLGRAVFQAKKRVLEPLGLVEEGAKTAPGKKRPVEPSPQRSPDSSTGIGKKGQQPARKRLNFGQTGDSESVPDPQPIGEPPAAPSSVGSGTMAAGGGAPMADNNEGADGVGSSSGNWHCDSTWLGDRVITTSTRTWALPTYNNHLYKQISNGTSGGSTNDNTYFGYSTPWGYFDFNRFHCHFSPRDWQRLINNNWGFRPKRLSFKLFNIQVKEVTQNEGTKTIANSLTSTIQVFTDSEYQLPYVLGSAHQGCLPPFPADVFMIPQYGYLTPNNGSQAVGRSSFYCLEYFPSQMLRTGNNFSFSYTFEDVPFHSSYAHSQSLDRLMNPLIDQYLYYLSRTQSTGGTAGTQQLLSSQAGPSNMSAQARNWLPGPCYRQQRVSTTLSQNNNSNFAWTGATKYHLNGRDSLVNPGVAMATNKDDEDRFFPSSGILMFGKQGAGKDNVDYSNVMLTSEEEIKTTNPVATEQYGVVADNLQQQNTAPIVGAVNSQGALPGMVWQNRDVYLQGPIWAKIPHTDGNFHPSPLMGGFGLKHPPPQILIKNTPVPADPPTAFNQAKLNSFITQYSTGQVSVEIEWELQKENSKRWNPEIQYTSNYYKSTNVDFAVNTEGVYSEPRPIGTRYLTRNL

SEQ ID NO: 5050 - protein, 738 aa, Adeno-associated virus
MAADGYLPDWLEDNLSEGIREWWDLKPGAPKPKANQQKQDDGRGLVLPGYKYLGPFNGLDKGEPVNAADAAALEHDKAYDQQLKAGDNPYLRYNHADAEFQERLQEDTSFGGNLGRAVFQAKKRVLEPLGLVEEGAKTAPGKKRPVEPSPQRSPDSSTGIGKKGQQPARKRLNFGQTGDSESVPDPQPIGEPPAAPSSVGSGTMAAGGGAPMADNNEGADGVGSSSGNWHCDSTWLGDRVITTSTRTWALPTYNNHLYKQISNGTSGGSTNDNTYFGYSTPWGYFDFNRFHCHFSPRDWQRLINNNWGFRPKRLSFKLFNIQVKEVTQNEGTKTIANNLTSTIQVFTDSEYQLPYVLGSAHQGCLPPFPADVFMIPQYGYLTLNNGSQAVGRSSFYCLEYFPSQMLRTGNNFSFSYTFEDVPFHSSYVHSQSLDRLMNPLIDQYLYYLSRTQSTGGTAGTQQLLFSQAGPSNMSAQARNWLPGPCYRQQRVSTTLSQNNNSNFAWTGATKYHLNGRDSLVNSGVAMATNKDDEDRFFPSSGILMFGKQGAGKDNVDYSNVMLTSEEEIKTTNPVATEQYGVVADNLQQQNTAPIVGAVNSQGALPGMVWQNRDVYLQGPIWAKIPHTDGNFHPSPLMGGFGLKHPPPQILIKNTPVPADPPTAFNQAKLNSFITQYSTGQVSVEIEWELQKENSKRWNPEIQYTSNYYKSTNVDFAVNTEGVYSEPRPIGTRYPTRNL

SEQ ID NO: 5051 - DNA, 2217 bp, Adeno-associated virus
atggctgccgatggttatcttccagattggctcgaggacaacctctctgagggcattcgcgagtggtgggacctgaaacctggagccccgaaacccaaagccaaccagcaaaagcaggacgacggccggggtctggtgcttcctggctacaagtacctcggacccttcaacggactcgacaagggggagcccgtcaacgcggcggacgcagcggccctcgagcacgacaaggcctacgaccagcagctcaaagcgggtgacaatccgtacctgcggtataatcacgccgacgccgagtttcaggagcgtctgcaagaagatacgtcttttgggggcaacctcgggcgagcagtcttccaggccaagaagcgggttctcgaacctctcggtctggttgaggaaggcgctaagacggctcctggaaagaagagaccggtagagccgtcaccacagcgttcccccgactcctccacgggcatcggcaagaaaggccagcagcccgccagaaagagactcaatttcggtcagactggcgactcagagtcagtccccgaccctcaacctatcggagaacctccagcagcgccctctagtgtgggatctggtacaatggctgcaggcggtggcgcaccaatggcagacaataacgaaggtgccgacggagtgggtagttcctcgggaaattggcattgcgattccacatggctgggcgacagagtcatcaccaccagcacccgaacctgggccctgcccacctacaacaaccacctctacaagcaaatctccaacgggacctcgggaggcagcaccaacgacaacacctactttggctacagcaccccctgggggtattttgactttaacagattccactgccacttctcaccacgtgactggcagcgactcatcaacaacaactggggattccggcccaagagactcagcttcaagctcttcaacatccaggtcaaagaggtcacgcagaatgaaggcaccaagaccatcgccaataacctcaccagcaccatccaggtgtttacggactcggaataccagctgccgtacgtcctcggctctgcccaccagggctgcctgcctccgttcccggcggacgtcttcatgattcctcagtacggctacctgactctcaacaacggtagtcaggccgtgggacgttcctccttctactgcctggagtacttcccctctcagatgctgagaacgggcaacaacttttccttcagctacactttcgaggacgtgcctttccacagcagctacgtgcacagccagagtttggacaggctgatgaatcctctcatcgaccagtacctgtactacctgtcaagaacccagtctacgggaggcacagcgggaacccagcagttgctgttttctcaggccgggcctagcaacatgtcggctcaggccagaaactggctgcctggaccctgctacagacagcagcgcgtctccacgacactgtcgcaaaacaacaacagcaactttgcctggactggtgccaccaagtatcatctgaacggcagagactctctggtgaattcgggcgtcgccatggcaaccaacaaggacgacgaggaccgcttcttcccatccagcggcatcctcatgtttggcaagcagggagctggaaaagacaacgtggactatagcaacgtgatgctaaccagcgaggaagaaatcaagaccaccaaccccgtggccacagaacagtatggcgtggtggctgataacctacagcagcaaaacaccgctcctattgtgggggccgtcaacagccagggagccttacctggcatggtctggcagaaccgggacgtgtacctgcagggtcctatttgggccaagattcctcacacagatggcaactttcacccgtctcctttaatgggcggctttggacttaaacatccgcctcctcagatcctcatcaaaaacactcctgttcctgcggatcctccaacagcgttcaaccaggccaagctgaattctttcatcacgcagtacagcaccggacaagtcagcgtggagatcgagtgggagctgcagaaggagaacagcaagcgctggaacccagagattcagtatacttccaactactacaaatctacaaatgtggactttgctgttaatactgagggtgtttactctgagcctcgccccattggcactcgttaccccacccgtaatctgtaa

SEQ ID NO: 5052 - protein, 734 aa, Adeno-associated virus; identical to SEQ ID NO: 4948

SEQ ID NO: 5053 - DNA, 2214 bp, Adeno-associated virus
atggctgctgacggttatcttccagattggctcgaggacaacctctctgagggcattcgcgagtggtgggacctgaaacctggagccccgaaacccaaagccaaccagcagaagcaggacgacggccggggtctggtgcttcctggctacaagtacctcggacccttcaacggactcgacaagggggagcccgtcaacgcggcggacgcagcggccctcgagcacgacaaggcctacgaccagcagctcaaagcgggtgacaatccgtacctgcggtataaccacgccgacgccgagtttcaggagcgtctgcaagaagatacgtcttttgggggcaacctcgggcgagcagtcttccaggccaagaagcgggttctcgaacctctcggtctggttgaggaagctgctaagacggctcctggaaagaagagaccggtagaaccgtcacctcagcgttcccccgactcctccacgggcatcggcaagaaaggccagcagcccgctagaaagagactgaactttgggcagactggcgactcagagtcagtccccgaccctcaacctctcggagaaccaccagcaggcccctctggtctgggatctggtacaatggctgcaggcggtggcgctccaatggcagacaataacgaaggcgccgacggagtgggtaatgcctcaggaaattggcattgcgattccacatggctgggcgacagagtcatcaccaccagcacccgaacctgggctttgcccacctacaacaaccacctctacaagcaaatctccagtcagtcagcaggtagcaccaacgacaacgtctacttcggctacagcaccccctgggggtattttgacttcaacagattccactgtcacttctcaccacgtgactggcagcgactcatcaacaacaactggggattccggcccaagaagctcaacttcaagctcttcaacatccaagtcaaggaggtcacgacgaatgacggcgtcacgaccatcgctaataaccttaccagcacggttcaggtcttttcggactcggagtaccagctgccgtacgtcctcggctctgcccaccagggctgcctgcctccgttcccggcggacgtcttcatgattcctcagtacggctacctgactctgaacaatggcagccaatcggtgggacgttcatccttctactgcctggaatacttcccttctcaggtgctgagaacgggtaacaacttcaccttcagttacaccttcgaggacgtgcctttccacagcagctacgcgcacagccagagcctagaccggctgatgaatcccctcatcgaccagtacctgtattacctggctagaacacagagtaacccaggaggcacatctggcaatcgggaactgcagttttaccagggcgggccttccaccatggccgaacaagccaagaactggttacctggaccttgcttccggcaacaaagagtttccaaaacactggatcaaaacaacaacagcaactttgcttggactggtgccaccaaatatcacctgaacggcagaaactcattggtgaatcctggtgtcgccatggcaactcacaaggacgacgaggaccgctttttcccatccagcggagtcctgatttttggaaaaactggagcaaccaacaagactacattggaaaacgtgttaatgacaaatgaagaagaaattcgtcctactaatcctgtggccacagaagaatacgggatagtcagcagcaatttacaagcggccaatactgcagcccagacacaagttgtcaacaaccagggagccttacctggcatggtctggcagaaccgggacgtgtacctgcagggtcccatctgggccaaaattcctcacacagacggcaactttcacccgtctccgctgatgggcggctttggactgaagcatccgcctcctcagatcctgatcaaaaacactcctgttcctgctaatcccccggaggtgtttacgcctgccaagtttgcttctttcatcacacagtacagcaccggccaggtcagcgtggagatcgagtgggagctgcagaaggagaacagcaagcgctggaacccagagattcagtatacctccaattttgacaaacagactggtgtggactttgccgttgacagccagggtgtttattctgagcctcgccccattggtactcgttacctcacccgtaatctgtaa

SEQ ID NO: 5054 - protein, 737 aa, Adeno-associated virus
MAADGYLPDWLEDNLSEGIREWWDLKPGAPKPKANQQKQDDGRGLVLPGYKYLGPFNGLDKGEPVNAADAAALEHDKAYDQQLKAGDNPYLRYNHADAEFQERLQEDTSFGGNLGRAVFQAKKRVLEPLGLVEEAAKTAPGKKRPVEPSPQRSPDSSTGIGKKGQQPARKRLNFGQTGDSESVPDPQPLGEPPAGPSGLGSGTMAAGGGAPMADNNEGADGVGNASGNWHCDSTWLGDRVITTSTRTWALPTYNNHLYKQISSQSAGSTNDNVYFGYSTPWGYFDFNRFHCHFSPRDWQRLINNNWGFRPKKLNFKLFNIQVKEVTTNDGVTTIANNLTSTVQVFSDSEYQLPYVLGSAHQGCLPPFPADVFMIPQYGYLTLNNGSQSVGRSSFYCLEYFPSQVLRTGNNFTFSYTFEDVPFHSSYAHSQSLDRLMNPLIDQYLYYLARTQSNPGGTSGNRELQFYQGGPSTMAEQAKNWLPGPCFRQQRVSKTLDQNNNSNFAWTGATKYHLNGRNSLVNPGVAMATHKDDEDRFFPSSGVLIFGKTGATNKTTLENVLMTNEEEIRPTNPVATEEYGIVSSNLQAANTAAQTQVVNNQGALPGMVWQNRDVYLQGPIWAKIPHTDGNFHPSPLMGGFGLKHPPPQILIKNTPVPANPPEVFTPAKFASFITQYSTGQVSVEIEWELQKENSKRWNPEIQYTSNFDKQTGVDFAVDSQGVYSEPRPIGTRYLTRNL

SEQ ID NO: 5055 - DNA, 2214 bp, Adeno-associated virus
atggctgccgatggttatcttccagattggctcgaggacaacctctctgagggcattcgcgagtggtgggacctgaaacctggagccccgaaacccaaagccaaccagcaaaagcaggacgacggccggggtctggtgcttcctggctacaagtacctcggacccttcaacggactcgacaagggggagcccgtcaacgcggcggacgcagcggccctcgagcacgacaaggcctacgaccagcagctcaaagcgggtgacaatccgtacctgcggtataatcacgccgacgccgagtttcaggagcgtctgcaagaagatacgtcttttgggggcaacctcgggcgagcagtcttccaggccaagaagcgggttctcgaacctctcggtctggttgaggaaggcgctaagacggctcctggaaagaagagaccggtagagccgtcaccacagcgttcccccgactcctccacgggcatcggcaagaaaggccagcagcccgccagaaagagactcaatttcggtcagactggcgactcagagtcagtccccgaccctcaacctatcggagaacctccagcagcgccctctagtgtgggatctggtacaatggctgcaggcggtggcgcaccaatggcagacaataacgaaggtgccgacggagtgggtagttcctcgggaaattggcattgcgattccacacggctgggcgacagagtcatcaccaccagcacccggacctgggctttgcccacctacaacaaccacctctacaagcaaatctccagtcagtcagcaggtagcaccaacgacaacgtctacttcggctacagcaccccctgggggtattttgacttcaacagattccactgtcacttctcaccacgtgactggcagcggctcatcaacaacaactggggattccggcccaagaagctcaacttcaagctgttcaacatccaggtcaaggaggtcacaacgaatgacggcgtcacgaccatcgccaataaccttaccagcacggttcaggtcttttcggactcggaataccagctgccctacgtcctcggctccgcacaccagggctgcctgcctccgttcccggcggacgtcttcatgattccccagtacggctacctgactctgaacaatggcagccaatcggtgggtcgttcctctttctactgcctggaatatttcccttctcaaatgctgagaacgggcaacaacttcaccttcagctacaccttcgaggacgttcccttccacagcagctacgcacacagccagagcctggaccggctgatgaatcctcttatcgaccagtacctgtattacctggccagaacacagagcaacgcaggaggcacagctggcaatcgggaactgcagttttatcagggcgggcctaccaccatggccgaacaagccaaaaactggctgcctggaccttgcttccggcaacgaagagtctccaagacgctggatcaaaacaacaacagcaactttgcttggactggtgccaccaaataccatctaaatggaagaaattcattggttaatcccggtgtcgccatggcaacccacaaggacgacgaggaacgcttcttcccttcgagcggagtcctgatttttggaaaaactggagcagctaataagactacactggaaaatgtgttaatgacaaatgaagaggaaattcgtcctaccaacccggtagccaccgaggaatacgggactgttagcagcaacctgcaggcggctaacactgcagcccagacacaagttgtcaacaaccagggagccttacctggtatggtctggcagaaccgggacgtgtacctgcagggtcccatctgggccaagattcctcacacggacggcaactttcacccgtctccgctgatgggcggctttggactgaagcatccgcctcctcagatcctgatcaaaaacactcctgttcctgctaatcccccggaggtgtttacgcctgccaagtttgcttctttcatcacacagtacagcaccggccaggtcagcgtggagatcgagtgggagctgcagaaggagaacagcaagcgctggaacccagagattcagtatacctccaattttgacaaacagactggtgtggactttgccgttgacagccagggtgtttattctgagcctcgccccattggtactcgttacctcacccgtaatctgtaa

SEQ ID NO: 5056 - protein, 737 aa, Adeno-associated virus
MAADGYLPDWLEDNLSEGIREWWDLKPGAPKPKANQQKQDDGRGLVLPGYKYLGPFNGLDKGEPVNAADAAALEHDKAYDQQLKAGDNPYLRYNHADAEFQERLQEDTSFGGNLGRAVFQAKKRVLEPLGLVEEGAKTAPGKKRPVEPSPQRSPDSSTGIGKKGQQPARKRLNFGQTGDSESVPDPQPIGEPPAAPSSVGSGTMAAGGGAPMADNNEGADGVGSSSGNWHCDSTRLGDRVITTSTRTWALPTYNNHLYKQISSQSAGSTNDNVYFGYSTPWGYFDFNRFHCHFSPRDWQRLINNNWGFRPKKLNFKLFNIQVKEVTTNDGVTTIANNLTSTVQVFSDSEYQLPYVLGSAHQGCLPPFPADVFMIPQYGYLTLNNGSQSVGRSSFYCLEYFPSQMLRTGNNFTFSYTFEDVPFHSSYAHSQSLDRLMNPLIDQYLYYLARTQSNAGGTAGNRELQFYQGGPTTMAEQAKNWLPGPCFRQRRVSKTLDQNNNSNFAWTGATKYHLNGRNSLVNPGVAMATHKDDEERFFPSSGVLIFGKTGAANKTTLENVLMTNEEEIRPTNPVATEEYGTVSSNLQAANTAAQTQVVNNQGALPGMVWQNRDVYLQGPIWAKIPHTDGNFHPSPLMGGFGLKHPPPQILIKNTPVPANPPEVFTPAKFASFITQYSTGQVSVEIEWELQKENSKRWNPEIQYTSNFDKQTGVDFAVDSQGVYSEPRPIGTRYLTRNL

SEQ ID NO: 5057 - DNA, 2208 bp, Adeno-associated virus
atggctgccgatggttatcttccagattggctcgaggacactctctctgaaggaataagacagtggtggaagctcaaacctggcccaccaccaccaaagcccgcagagcggcataaggacgacagcaggggtcttgtgcttcctgggtacaagtacctcggacccttcaacggactcgacaagggggagccggtcaacgaggcagacgccgcggccctcgagcacgacaaggcctacgaccggcagctcgacagcggagacaacccgtacctcaagtacaaccacgccgacgcggagtttcaggagcgtcttaaagaagatacgtcttttgggggcaacctcggacgagcagtcttccaggcgaaaaagagggttcttgaacctctgggcctggttgaggaacctgttaagacggctccgggaaaaaagaggccggtagagcactctcctgcggagccagactcctcctcgggaaccggaaaagcgggccagcagcctgcaagaaaaagattgaattttggtcagactggagacgcagactccgtacctgacccccagcctctcggacagccaccagcagccccctctggtttgggatctactacaatggctacaggcagtggcgcaccaatggcagacaataacgagggtgccgatggagtgggtaattcttcaggaaattggcattgcgattcccaatggctgggcgacagagtcatcaccaccagcacccgaacctgggcccagcccacctacaacaaccacctctacaagcaaatctcaagccaatcaggagcctcaaacgacaaccactactttggctacagcaccccttgggggtattttgacttcaacagattccactgccacttttcaccacgtgactggcaaagactcatcaacaacaactggggattccgacccaagagactcaacttcaagctctttaacattcaagtcaaagaggtcacgcagaatgacggtacgacgacgattgccaataaccttaccagcacggttcaggtgtttactgactcggagtaccagctcccgtacgtcctcgggtcggcgcatcaaggatgcctcccgccgtttccagcggacgtcttcatggtcccacagtatggatacctcaccctgaacaacgggagtcaggcggtaggacgctcttccttttactgcctggagtactttccttctcagatgcttcgtactggaaacaactttcagttcagctacacctttgaagacgttcctttccacagcagctacgctcacagccagagtctggatcggctgatgaatcctctgatcgaccagtacctgtattatctgaacaaaacacaatcaaatagtggagctcttcagcagtctcggctactgtttagtcaagctggacccaccagcatgtctcttcaagctaaaaactggctacctggaccttgctacagacagcagcgtctgtcaaagcaggcaaacgacaacaacaacagcaactttccctggactgcggctacaaagtaccacctaaatggccgggactcgttggttaatccaggaccagctatggccagtcacaaagacgatgaagaaaagtttttccccatgcatggaaccctgatatttggtaaacaaggaacaaatgctaacgacgcggatttggacaatgtcatgattacagatgaagaagaaatccgcaccaccaatcccgtggctacggagcagtacggatatgtgtcaaataatttgcaaaactcaaatactggtccaactactggaactgtcaatcaccgaggagcgttacctggcatggtgtggcaggatcgagacgtgtacctgcagggacccatttgggccaagattcctcacaccgatggacactttcatccttctccactgatgggaggttttgggctcaaacacccgcctcctcagatcatgatcaaaaacactcccgttccagccaatcctcccacaaacttcagttctgccaagtttgcttctttcatcacacagtattccacggggcaggtcagcgtggagatcgagtgggagctgcagaaagagaacagcaaacgctggaatcccgaaattcagtacacttccaactacaacaaatctgttaatgtggactttactgtggacactaatggcgtgtattcagagcctcgccccattggcaccagatacctgactcgtaatctgtaa

SEQ ID NO: 5058 - protein, 735 aa, Adeno-associated virus
MAADGYLPDWLEDTLSEGIRQWWKLKPGPPPPKPAERHKDDSRGLVLPGYKYLGPFNGLDKGEPVNEADAAALEHDKAYDRQLDSGDNPYLKYNHADAEFQERLKEDTSFGGNLGRAVFQAKKRVLEPLGLVEEPVKTAPGKKRPVEHSPAEPDSSSGTGKAGQQPARKRLNFGQTGDADSVPDPQPLGQPPAAPSGLGSTTMATGSGAPMADNNEGADGVGNSSGNWHCDSQWLGDRVITTSTRTWAQPTYNNHLYKQISSQSGASNDNHYFGYSTPWGYFDFNRFHCHFSPRDWQRLINNNWGFRPKRLNFKLFNIQVKEVTQNDGTTTIANNLTSTVQVFTDSEYQLPYVLGSAHQGCLPPFPADVFMVPQYGYLTLNNGSQAVGRSSFYCLEYFPSQMLRTGNNFQFSYTFEDVPFHSSYAHSQSLDRLMNPLIDQYLYYLNKTQSNSGALQQSRLLFSQAGPTSMSLQAKNWLPGPCYRQQRLSKQANDNNNSNFPWTAATKYHLNGRDSLVNPGPAMASHKDDEEKFFPMHGTLIFGKQGTNANDADLDNVMITDEEEIRTTNPVATEQYGYVSNNLQNSNTGPTTGTVNHRGALPGMVWQDRDVYLQGPIWAKIPHTDGHFHPSPLMGGFGLKHPPPQIMIKNTPVPANPPTNFSSAKFASFITQYSTGQVSVEIEWELQKENSKRWNPEIQYTSNYNKSVNVDFTVDTNGVYSEPRPIGTRYLTRNL

SEQ ID NO: 5059 - DNA, 2217 bp, Adeno-associated virus
atggctgccgatggttatcttccagattggctcgaggacaacctctctgagggcattcgcgagtggtgggcgctgaaacctggagccccgaagcccaaagccaaccagcaaaagcaggacgacggccggggtctggtgcttcctggctacaagtacctcggacccttcaacggactcgacaagggggagcccgtcaacgcggcggacgcagcggccctcgagcacgacaaggcctacgaccagcagctgcaggcgggtgacaatccgtacctgcggtataatcacgccgacgccgagtttcaggagcgtctgcaagaagatacgtcttttgggggcaacctcgggcgagcagtcttccaggccaagaagcgggttctcgaacctctcggtctggttgaggaaggcgctaagacggctcctggaaagaagagaccggtagagccgtcaccacagcgttcccccgactcctccacgggcatcggcaagaaaggccagcagcccgccagaaagagactcaatttcggtcagactggcgactcagagtcagtccccgaccctcaacctatcggagaacctccagcagcgccctctagtgtgggatctggtacaatggctgcaggcggtggcgcgccaatggcagacaataacgaaggtgccgacggagtgggtagttcctcgggaaattggcattgcgattccacatggctgggcgacagagtcatcaccaccagcacccgaacctgggccctgcccacctacaacaaccacctctacaagcaaacctccaacgggacctcgggaggcagcaccaacgacaacacctactttggctacagcaccccctgggggtattttgactttaacagattccactgccacttctcaccacgtgactggcagcgactcatcaacaacaactggggattccggcccaagagactcagcttcaagctcttcaacatccaggtcaaagaggtcacgcagaatgaaggcaccaagaccatcgccaataacctcaccagcaccatccaggtgtttacggactcggaataccagctgccgtacgtcctcggctctgcccaccagggctgcctgcctccgttcccggcggacgtcttcatgattcctcagtacggctacctgactctcaacaacggtagtcaggccgtgggacgttcctccttctactgcctggagtacttcccctctcagatgctgagaacgggcaacaacttttccttcagctacactttcgaggacgtgcctttccacagcagctacgcgcacagccagagtttggacaggctgatgaatcctctcatcgaccagtacctgtactacctgtcaagaacccagtctacgggaggcacagcgggaacccagcagttgctgttttctcaggccgggcctagcaacatgtcggctcaggccagaaactggctgcctggaccctgctacagacagcagcgcgtctccacgacactgtcgcaaaacaacaacagcaactttgcctggactggtgccaccaagtatcatctgaacggcagagactctctggtgaatccgggcgtcgccatggcaaccaacaaggacgacgaggaccgcttcttcccatccagcggcatcctcatgtttggcaagcagggagctggaaaagacaacgtggactatagcaacgtgatgctaaccagcgaggaagaaatcaagaccaccaaccccgtggccacagaacagtatggcgtggtggctgataacctacagcagcaaaacaccgctcctattgtgggggccgtcaacagccagggagccttacctggcatggtctggcagaaccgggacgtgtacctgcagggtcctatttgggccaagattcctcacacagatggcaactttcacccgtctcctttaatgggcggctttggacttaaacatccgcctcctcagatcctcatcaaaaacactcctgttcctgcggatcctccaacagcgttcaaccaggccaagctgaattctttcatcacgcagtacagcaccggacaagtcagcgcggagatcgagtgggagctgcagaaggagaacagcaagcgctggaacccagagattcagtatacttccaactactacaaatctacaaatgtggactttgctgttaatactgagggtgtttactctgagcctcgccccattggcactcgttacctcacccgtaatctgtaa

SEQ ID NO: 5060 - protein, 738 aa, Adeno-associated virus
MAADGYLPDWLEDNLSEGIREWWALKPGAPKPKANQQKQDDGRGLVLPGYKYLGPFNGLDKGEPVNAADAAALEHDKAYDQQLQAGDNPYLRYNHADAEFQERLQEDTSFGGNLGRAVFQAKKRVLEPLGLVEEGAKTAPGKKRPVEPSPQRSPDSSTGIGKKGQQPARKRLNFGQTGDSESVPDPQPIGEPPAAPSSVGSGTMAAGGGAPMADNNEGADGVGSSSGNWHCDSTWLGDRVITTSTRTWALPTYNNHLYKQTSNGTSGGSTNDNTYFGYSTPWGYFDFNRFHCHFSPRDWQRLINNNWGFRPKRLSFKLFNIQVKEVTQNEGTKTIANNLTSTIQVFTDSEYQLPYVLGSAHQGCLPPFPADVFMIPQYGYLTLNNGSQAVGRSSFYCLEYFPSQMLRTGNNFSFSYTFEDVPFHSSYAHSQSLDRLMNPLIDQYLYYLSRTQSTGGTAGTQQLLFSQAGPSNMSAQARNWLPGPCYRQQRVSTTLSQNNNSNFAWTGATKYHLNGRDSLVNPGVAMATNKDDEDRFFPSSGILMFGKQGAGKDNVDYSNVMLTSEEEIKTTNPVATEQYGVVADNLQQQNTAPIVGAVNSQGALPGMVWQNRDVYLQGPIWAKIPHTDGNFHPSPLMGGFGLKHPPPQILIKNTPVPADPPTAFNQAKLNSFITQYSTGQVSAEIEWELQKENSKRWNPEIQYTSNYYKSTNVDFAVNTEGVYSEPRPIGTRYLTRNL

SEQ ID NO: 5061 - DNA, 2217 bp, Adeno-associated virus
atggctgctgacggttatcttccagattggctcgaggacaacctctctgagggcattcgcgagtggtgggacctgaaacctggagcccccaagcccaaggccaaccagcagaagcaggacgacggccggggtctggtgcttcctggctacaagtacctcggacccttcaacggactcgacaagggggagcccgtcaacgcggcggacgcagcggccctcgagcacgacaaggcctacgaccagcagctcaaagcgggtgacaatccgtacctgcggtataatcacgccgacgccgagtttcaggagcgtctgcaagaagatacgtcttttgggggcaacctcgggcgagcagtcttccaggccaagaagcgggttctcgaacctctcggtctggttgaggaagctgctaagacggctcctggaaagaagagaccggtagaaccgtcacctcagcgttcccccgactcctccacgggcatcggcaagaaaggccagcagcccgctagaaagagactgaactttgggcagactggcgactcagagtcagtccccgaccctcaaccaatcggagaacctccagcagcgccctctagtgtgggatctggtacaatggccgcaggcggtggcgcaccaatggcagacaataacgaaggtgccgacggagtgggtagttcctcgggaaattggcattgcgattccacatggctgggcgacagagtcatcaccaccagcacccgaacctgggccctgcccacctacaacaaccacctctacaagcaaatctccaacgggacctcgggaggcagcaccaacgacaacacctactttggctacagcaccccctgggggtattttgactttaacagattccactgccacttctcaccacgtgactggcagcgactcatcaacaacaactggggattccggcccaagagactcagcttcaagctcttcaacatccaggtcaaagaggtcacgcagaatgaaggcaccaagaccatcgccaataacctcaccagcaccatccaggtgtttacggactcggaataccagctgccgtacgtcctcggctctgcccaccagggctgcctgcctccgttcccggcggacgtcttcatgattcctcagtacggctacctgactctcaacaacggtagtcaggccgtgggacgttcctccttctactgcctggagtacttcccctctcagatgctgagaacgggcaacaacttttccttcagctacactttcgaggacgtgcctttccacagcagctacgcgcacagccagagtttggacaggctgatgaatcctctcatcgaccagtacctgtactacctgtcaagaacccagtctacgggaggcacagcgggaacccagcagctgctgttttctcaggccgggcctagcaacatgtcggctcaggccagaaactggctgcctggaccctgctacagacagcagcgcgtctccacgacactgtcgcaaaacaacaacagcaactttgcctggactggtgccaccaagtatcatctgaacggcagagactctctggtgaatccgggcgtcgccatggcaaccaacaaggacgacgaggaccgcttcttcccatccagcggcatcctcatgtttggcaagcagggagctggaaaagacaacgtggactatagcaacgtgatgctaaccagcgaggaagaaatcaagaccaccaaccccgtggccacagaacagtatggcgtggtggctgataacctacagcagcaaaacaccgctcctattgtgggggccgtcaacagccagggagccttacctggcatggtctggcagaaccgggacgtgtacctgcagggtcctatttgggccaagattcctcacacagatggcaactttcacccgtctcctttaatgggcggctttggacttaaacatccgcctcctcagatcctcatcaaaagcactcctgttcctgcggatcctccaacagcgttcaaccaggccaagctgaattctttcatcacgcagtacagcaccggacaagtcagcgtggagatcgagtgggagctgcagaaggagaacagcaagtgctggaacccagagattcagtatacttccaactactacaaatctacaaatgtggactttgctgttaatactgagggtgtttactctgagcctcgccccattggcactcgttacctcacccgtaatctgtaa

SEQ ID NO: 5062 - protein, 738 aa, Adeno-associated virus
MAADGYLPDWLEDNLSEGIREWWDLKPGAPKPKANQQKQDDGRGLVLPGYKYLGPFNGLDKGEPVNAADAAALEHDKAYDQQLKAGDNPYLRYNHADAEFQERLQEDTSFGGNLGRAVFQAKKRVLEPLGLVEEAAKTAPGKKRPVEPSPQRSPDSSTGIGKKGQQPARKRLNFGQTGDSESVPDPQPIGEPPAAPSSVGSGTMAAGGGAPMADNNEGADGVGSSSGNWHCDSTWLGDRVITTSTRTWALPTYNNHLYKQISNGTSGGSTNDNTYFGYSTPWGYFDFNRFHCHFSPRDWQRLINNNWGFRPKRLSFKLFNIQVKEVTQNEGTKTIANNLTSTIQVFTDSEYQLPYVLGSAHQGCLPPFPADVFMIPQYGYLTLNNGSQAVGRSSFYCLEYFPSQMLRTGNNFSFSYTFEDVPFHSSYAHSQSLDRLMNPLIDQYLYYLSRTQSTGGTAGTQQLLFSQAGPSNMSAQARNWLPGPCYRQQRVSTTLSQNNNSNFAWTGATKYHLNGRDSLVNPGVAMATNKDDEDRFFPSSGILMFGKQGAGKDNVDYSNVMLTSEEEIKTTNPVATEQYGVVADNLQQQNTAPIVGAVNSQGALPGMVWQNRDVYLQGPIWAKIPHTDGNFHPSPLMGGFGLKHPPPQILIKSTPVPADPPTAFNQAKLNSFITQYSTGQVSVEIEWELQKENSKCWNPEIQYTSNYYKSTNVDFAVNTEGVYSEPRPIGTRYLTRNL

SEQ ID NO: 5063 - protein, 738 aa, Adeno-associated virus
MAADGYLPDWLEDNLSEGIREWWDLKPGAPKPKANQQKQDDGRGLVLPGYKYLGPFNGLDKGEPVNAADAAALEHDKAYDQQLKAGDNPYLRYNHADAEFQERLQEDTSFGGNLGRAVFQAKKRVLEPLGLVEEAAKTAPGKKRPVEPSPQRSPDSSTGIGKKGQQPARKRLNFGQTGDSESVPDPQPIGEPPAAPSSVGSGTMAAGGGAPMADNNEGADGVGSSSGNWHCDSTWLGDRVITTSTRTWALPTYNNHLYKQISNGTSGGSTNDNTYFGYSTPWGYFDFNRFHCHFSPRDWQRLINNNWGFRPKRLSFKLFNIQVKEVTQNEGTKTIANNLTSTIQVFTDSEYQLPYVLGSAHQGCLPPFPADVFMIPQYGYLTLNNGSQAVGRSSFYCLEYFPSQMLRTGNNFSFSYTFEDVPFHSSYAHSQSLDRLMNPLIDQYLYYLSRTQSTGGTAGTQQLLFSQAGPSNMSAQARNWLPGPCYRQQRVSTTLSQNNNSNFAWTGATKYHLNGRDSLVNPGVAMATNKDDEDRFFPSSGILMFGKQGAGKDNVDYSNVMLTSEEEIKTTNPVATEQYGVVADNLQQQNTAPIVGAVNSQGALPGMVWQNRDVYLQGPIWAKIPHTDGNFHPSPLMGGFGLKHPPPQILIKSTPVPADPPTAFNQAKLNSFITQYSTGQVSVEIEWELQKENSKRWNPEIQYTSNYYKSTNVDFAVNTEGVYSEPRPIGTRYLTRNL

SEQ ID NO: 5064 - DNA, 2217 bp, Adeno-associated virus
atggctgctgacggttatcttccagattggctcgaggacaacctctctgagggcattcgcgagtggtgggacctgaaacctggagcccccaagcccaaggccaaccagcagaagcaggacgacggccggggtctggtgcttcctggctacaagtacctcggacccttcaacggactcgacaagggggagcccgtcaacgcggcggacgcagcggccctcgagcacgacaaggcctacgaccagcagctcaaagcgggtgacaatccgtacctgcggtataaccacgccgacgccgagtttcaggagcgtctgcaagaagatacgtcttttgggggcaacctcgggcgagcagtcttccaggccaagaagcgggttctcgaacctctcggtctggttgaggaagctgctaagacggctcctggaaagaagagaccggtagaaccgtcacctcagcgttcccccgactcctccacgggcatcggcaagaaaggccagcagcccgctagaaagagactgaactttgggcagactggcgactcagagtcagtccccgaccctcaaccaatcggagaaccaccagcaggcccctctggtctgggatctggtacaatggctgcaggcggtggcgcaccaatggctgacaataacgagggcgccgacggagtgggtaatgcctcaggaaattggcattgcgattccacatggctgggcgacagagtcatcaccaccagcacccgaacctgggctttgcccacctacaacaaccacctctacaagcaaatctccagtcagtcagcaggtagcaccaacgacaacgtctacttcggctacagcaccccctgggggtattttgacttcaacagattccactgtcacttctcaccacgtgactggcagcggctcatcaacaacaactggggattccggcccaagaagctcaacttcaagctgttcaacatccaggtcaaggaggtcacaacgaatgacggcgtcacgaccatcgccaataaccctaccagcacggttcaggtcttttcggactcggaataccagctgccctacgtcctcggctccgcacaccagggctgcctgcctccgttcccggcggacgtcttcatgattccccagtacggctacctgactctgaacaatggcagccaatcggtgggtcgttcctctttctactgcctggaatatttcccttctcaaatgctgagaacgggcaacaacttcaccttcagctacaccttcgaggacgttcccttccacagcagctacgcacacagccagagcctggaccggctgatgaatcctcttatcgaccagtacctgtattacctggccagaacacagagcaacgcaggaggcacagctggcaatcgggaactgcagttttatcagggcgggcctaccaccatggccgaacaagccaaaaactggctgcctggaccctgctacagacagcagcgcgtctccacgacactgtcgcaaaacaacaacagcaactttgcctggactggtgccaccaagtatcatctgaacggcagagactctctggtgaatccgggcgtcgccatggcaaccaacaaggacgacgaggaccgcttcttcccatccagcggcatcctcatgtttggcaagcagggagctggaaaagacaacgtggactatagcaacgtgatgctaaccagcgaggaagaaatcaagaccaccaaccccgtggccacagaacagtatggcgtggtggctgataacctacagcagcaaaacaccgctcctattgtgggggccgtcaacagccagggagccttacctggcatggtctggcagaaccgggacgtgtacctgcagggtcctatttgggccaagattcctcacacagatggcaactttcacccgtctcctttaatgggcggctttggacttaaacatccgcctcctcagatcctcatcaaaaacactcctgttcctgcggatcctccaacagcgttcaaccaggccaagctgaattctttcatcacgcagtacagcaccggacaagtcagcgtggagatcgagtgggagctgcagaaggagaacagcaagcgctggaacccagagattcagtatacttccaactactacaaatctacaaatgtggactttgctgttaatactgagggtgtttactctgagcctcgccccattggcactcgttacctcacccgtaatctgtaa

SEQ ID NO: 5065 - protein, 738 aa, Adeno-associated virus
MAADGYLPDWLEDNLSEGIREWWDLKPGAPKPKANQQKQDDGRGLVLPGYKYLGPFNGLDKGEPVNAADAAALEHDKAYDQQLKAGDNPYLRYNHADAEFQERLQEDTSFGGNLGRAVFQAKKRVLEPLGLVEEAAKTAPGKKRPVEPSPQRSPDSSTGIGKKGQQPARKRLNFGQTGDSESVPDPQPIGEPPAGPSGLGSGTMAAGGGAPMADNNEGADGVGNASGNWHCDSTWLGDRVITTSTRTWALPTYNNHLYKQISSQSAGSTNDNVYFGYSTPWGYFDFNRFHCHFSPRDWQRLINNNWGFRPKKLNFKLFNIQVKEVTTNDGVTTIANNPTSTVQVFSDSEYQLPYVLGSAHQGCLPPFPADVFMIPQYGYLTLNNGSQSVGRSSFYCLEYFPSQMLRTGNNFTFSYTFEDVPFHSSYAHSQSLDRLMNPLIDQYLYYLARTQSNAGGTAGNRELQFYQGGPTTMAEQAKNWLPGPCYRQQRVSTTLSQNNNSNFAWTGATKYHLNGRDSLVNPGVAMATNKDDEDRFFPSSGILMFGKQGAGKDNVDYSNVMLTSEEEIKTTNPVATEQYGVVADNLQQQNTAPIVGAVNSQGALPGMVWQNRDVYLQGPIWAKIPHTDGNFHPSPLMGGFGLKHPPPQILIKNTPVPADPPTAFNQAKLNSFITQYSTGQVSVEIEWELQKENSKRWNPEIQYTSNYYKSTNVDFAVNTEGVYSEPRPIGTRYLTRNL

SEQ ID NO: 5066 - DNA, 2208 bp, Adeno-associated virus
atggctgccgatggttatcttccagattggctcgaggacaacctctctgagggcattcacgagtggtgggacccgaaacctggagccccgaaacccaaagccaaccagcaaaagcaggacgacggccggggtctggtgcttcctggctacaagtacctcggacccttcaacggactcgacaagggggagcccgtcaacgcggcggacgcagcggccctcgagcacgacaaggcctacgaccagcagctcaaagcgggtgacaatccgtacctgcggtataatcacgccgacgccgagtttcaggagcgtctgcaagaagatacgtcttttgggggcaacctcgggcgagcagtcttccaggccaagaagcgggttctcgaacctctcggtctggttgaggaaggcgctaagacggctcctggaaagaagagaccggtagagccgtcaccacagcgttcccccgactcctccacgggcatcggcaagaaaggccagcagcccgccagaaagagactcaatttcggtcagactggcgactcagagtcagtccccgaccctcaacctatcggagaacctccagcagcgccctctagtgtgggatctggtacaatggctgcaggcggtggcgcaccaatggcagacaataacgaaggtgccgacggagtgggtagttcctcgggaaattggcattgcgattccacatggctgggcgacagagtcatcaccaccagcacccgaacctgggccctgcccacccacaacaaccacctctacaagcaaatctccaacgggacctcgggaggcagcaccaacgacaacgtctacttcggctacagcaccccctgggggtattttgacttcaacagattccactgtcacttctcaccacgtgaccggcagcgactcatcaacaacaactggggattccggcccaagagactcagcttcaagctcttcaacatccaggtcaaagaggtcacgcagaatgaaggcaccaagaccatcgccaataacctcaccagcaccatccaggtgtttacggactcggaataccagctgccgtacgtcctcggctctgcccaccagggctgcctgcctccgttcccggcggacgtcttcatgattcctcagtacggctacctgactctcaacaacggtagtcaggccgtgggacgttcctccttctactgcctggagtacttcccctctcagatgctgagaacgggcaacaacttttccttcagctacactttcgaggacgtgcctttccacagcagctacgcgcacagccagagtttggacaggctgatgaatcctctcatcgaccagtacctgtactacctgtcaagaacccagtctacggaaggcacagcgggaacccagcagttgctgttttctcaggccgggcctagcaacatgtcggctcaggccagaaactggctgcctggaccctgctacagacagcagcgcgtctccacgacactgtcgcaaaacaacaacagcaactttgcctggactggtgccaccaagtatcatctgaacggcagagactctctggtgaatccgggcgtcgccatggcaacccacaaggacgacgaggaacgcttcttcccttcgagcggagtcctgatttttggaaaaactggagcagctaataagactacactggaaaatgtgttaatgacaaatgaagaggaaattcgtcctaccaacccggtagccaccgaggaatacgggactgttagcagcaacctgcaggcggctaacactgcagcccagacacaagttgtcaacaaccagggagccttacctggtatggtctggcagaaccgggacgtgtacctgcagggtcccatctgggccaagattcctcacacggacggcaactttcacccgtctccgctgatgggcggctttggactgaagcatcctcagatcctgatcaaaaacactcctgttcctgctaatcccccggaggtgtttacgcctgccaagtttgcttctttcatcacacagtacagcaccggccaggtcagcgtggagatcgagtgggagctgcagaaggagaacagcaagcgctggaacccagagattcagtatacctccaattttgacaaacagactggtgtggactttgccgttgacagccagggtgtttattctgagcctcgccccattggtactcgttacctcacccgtaatctgtaa

SEQ ID NO: 5067 - protein, 735 aa, Adeno-associated virus
MAADGYLPDWLEDNLSEGIHEWWDPKPGAPKPKANQQKQDDGRGLVLPGYKYLGPFNGLDKGEPVNAADAAALEHDKAYDQQLKAGDNPYLRYNHADAEFQERLQEDTSFGGNLGRAVFQAKKRVLEPLGLVEEGAKTAPGKKRPVEPSPQRSPDSSTGIGKKGQQPARKRLNFGQTGDSESVPDPQPIGEPPAAPSSVGSGTMAAGGGAPMADNNEGADGVGSSSGNWHCDSTWLGDRVITTSTRTWALPTHNNHLYKQISNGTSGGSTNDNVYFGYSTPWGYFDFNRFHCHFSPRDRQRLINNNWGFRPKRLSFKLFNIQVKEVTQNEGTKTIANNLTSTIQVFTDSEYQLPYVLGSAHQGCLPPFPADVFMIPQYGYLTLNNGSQAVGRSSFYCLEYFPSQMLRTGNNFSFSYTFEDVPFHSSYAHSQSLDRLMNPLIDQYLYYLSRTQSTEGTAGTQQLLFSQAGPSNMSAQARNWLPGPCYRQQRVSTTLSQNNNSNFAWTGATKYHLNGRDSLVNPGVAMATHKDDEERFFPSSGVLIFGKTGAANKTTLENVLMTNEEEIRPTNPVATEEYGTVSSNLQAANTAAQTQVVNNQGALPGMVWQNRDVYLQGPIWAKIPHTDGNFHPSPLMGGFGLKHPQILIKNTPVPANPPEVFTPAKFASFITQYSTGQVSVEIEWELQKENSKRWNPEIQYTSNFDKQTGVDFAVDSQGVYSEPRPIGTRYLTRNL

SEQ ID NO: 5068 - protein, 738 aa, Adeno-associated virus
MAADGYLPDWLEDNLSEGIREWWDLKPGAPKPKANQQKQDDGRGLVLPGYKYLGPFNGLDKGEPVNAADAAALEHDKAYDQQLKAGDNPYLRYNHADAEFQERLQEDTSFGGNLGRAVFQAKKRVLEPLGLVEEGAKTAPGKKRPVEPSPQRSPDSSTGIGKKGQQPARKRLNFGQTGDSESVPDPQPIGEPPAAPSSVGSGTMAAGGGAPMADNNEGADGVGSSSGNWHCDSTWLGDRVITTSTRTWALPTYNNHLYKQISNGTSGGSTNDNTYFGYSTPWGYFDFNRFHCHFSPRDWQRPINNNWGFRPKRLSFKLFNIQVKEVTQNEGTKTIANNLTSTIQVFTDSEYQLPYVLGSAHQGCLPPFPADVFMIPQYGYLTLNNGSQAVGRSSFYCLEYFPSQMLRTGNNFSFSYPFEDVPFHSSYAHSQSLDRLMNPLIDQYLYYLSRTQSTGGTAGTQQLLFSQAGPSNMSAQARNWLPGPCYRQQRVSTTLSQNNNSNFAWTGATKYHLNGRDSLVNPGVAMATNKDDEDRFFPSSGILMFGKQGAGKDNVDYSNVMLTSEEEIKTTNPVATEQYGVVADNLQQQDTAPIVGAVNSQGALPGMVWQNRDVYLQGPIWAKIPHTDGNFHPSPLMGGFGLKHPPPQVLIKNTPVPADPPTAFNQAKLNSFITQYSTGQVSVEIEWELQKENSKRWNPEIQYTSNYYKSTNVDFAVNTEGVYSEPRPIGTRYLTRNL

SEQ ID NO: 5069 - DNA, 2217 bp, Adeno-associated virus
atggctgccgatggttatcttccagattggctcgaggacaacctctctgagggcattcgcgagtggtgggacctgaaacctggagccccgaaacccaaggccaaccagcaaaagcaggacgacggccggggtctggtgcttcctggctacaagtacctcggacccttcaacggactcgacaagggggagcccgtcaacgcggcggacgcagcggccctcgagcacgacaaggcctacgaccagcagctcaaagcgggtgacaatccgtacctgcggtataatcacgccgacgccgagtttcaggagcgtctgcaagaagatacgtcttttgggggcaacctcgggcgagcagtcttccaggccaagaagcgggttctcgaacctctcggtctggttgaggaaggcgctaagacggctcctggaaagaagagaccggtagagccgtcaccacagcgttcccccgactcctccacgggcatcggcaagaaaggccagcagcccgccagaaagagactcaatttcggtcagactggcgactcagagtcagtccccgaccctcaacctatcggagaacctccagcagcgccctctagtgtgggatctggtacaatggctgcaggcggtggcgcaccaatggcagacaataacgaaggtgccgacggagtgggtagttcctcgggaaattggcattgcgattccacatggctgggcgacagagtcatcaccaccagcacccgaacctgggccctgcccacctacaacaaccacctctacaagcaaatctccaacgggacctcgggaggcagcaccaacgacaacacctactttggctacagcaccccctgggggtattttgactttaacagattccactgccacttctcaccacgtgactggcagcgacccatcaacaacaactggggattccggcccaagagactcagcttcaagctcttcaacatccaggtcaaagaggtcacgcagaatgaaggcaccaagaccatcgccaataacctcaccagcaccatccaggtgtttacggactcggaataccagctgccgtacgtcctcggctctgcccaccagggctgcctgcctccgttcccggcggacgtcttcatgattcctcagtacggctacctgactctcaacaacggtagtcaggccgtgggacgttcctccttctactgcctggagtacttcccctctcagatgctgagaacgggcaacaacttttccttcagctaccctttcgaggacgtgcctttccacagcagctacgcgcacagccagagtttggacaggctgatgaatcctctcatcgaccagtacctgtactacctgtcaagaacccagtctacgggaggcacagcgggaacccagcagttgctgttttctcaggccgggcctagcaacatgtcggctcaggccagaaactggctgcctggaccctgctacagacagcagcgcgtctccacgacactgtcgcaaaacaacaacagcaactttgcctggactggtgccaccaagtatcatctgaacggcagagactctctggtgaatccgggcgtcgccatggcaaccaacaaggacgacgaggaccgcttcttcccatccagcggcatcctcatgtttggcaagcagggagctggaaaagacaacgtggactatagcaacgtgatgctaaccagcgaggaagaaatcaagaccaccaaccccgtggccacagaacagtatggcgtggtggctgataacctacagcagcaagacaccgctcctattgtgggggccgtcaacagccagggagccttacctggcatggtctggcagaaccgggacgtgtacctgcagggtcctatttgggccaagattcctcacacagatggcaactttcacccgtctcctttaatgggcggctttggacttaaacatccgcctcctcaggtcctcatcaaaaacactcctgttcctgcggatcctccaacagcgttcaaccaggccaagctgaattctttcatcacgcagtacagcaccggacaagtcagcgtggagatcgagtgggagctgcagaaggagaacagcaagcgctggaacccagagattcagtatacttccaactactacaaatctacaaatgtggactttgctgttaatactgagggtgtttactctgagcctcgccccattggcactcgttacctcacccgtaatctgtaa

SEQ ID NO: 5070 - DNA, 2214 bp, Adeno-associated virus
atggctgctgacggttatcttccagattggctcgaggacaacctctctgagggcattcgcgagtggtgggacctgaaacctggagcccccaagcccaaggccaaccagcagaagcaggacgacggccggggtctggtgcttcctggctacaagtacctcggacccttcaacggactcgacaagggggagcccgtcaacgcggcggacgcagcggccctcgagcacgacaaggcctacgaccagcagctcaaagcgggtgacaatccgtacctgcggtataaccacgccgacgccgagttccaggagcgtctgcaagaagatacgtcttttgggggcaacctcgggcgagcagtcttccaggccaagaagcgggttctcgaacctctcggtctggctgaggaagctgctaagacggctcctggaaagaagagaccggtagaaccgtcacctcagcgttcccccgactcctccacgggcatcggcaagaaaggccagcagcccgctagaaagagactgaactttgggcagactggcgactcagagtcagtccccgaccctcaaccaatcggagagccaccagcaggcccctctggtctgggatctggtacaatggctgcaggcggtggcgcaccaatggctgacaataacaagggcgccgacggagtgggtaatgcctcaggaaattggcattgcgattccacatggctgggcgacagagtcatcaccaccagcacccgaacctgggctttgcccacctacaacaaccacctctacaagcaaatctccagtcagtcagcaggtagcaccaacgacaacgtctacttcggctacagcaccccctgggggtattttgacttcaacagattccactgtcacttctcaccacgtgactggcagcggctcatcaacaacaactggggattccggcccaagaagctcaacttcaagctgttcaacatccaggtcaaggaggtcacaacgggtgacggcgtcacgaccatcgccaataaccttaccagcacggttcaggtcttttcggactcggaataccagctgccctacgtcctcggctccgcacaccagggctgcctgcctccgttcccggcggacgtcttcatgattccccagtacggctacctgactctgaacaatgacagccaatcggtgggtcgttcctctttctactgcctggaatatttcccttctcaaatgctgagaacgggcaacaacttcaccttcagctacaccttcgaggacgttcccttccacagcagctacgcacacagccagagcctggaccggctgatgaatcctcttatcgaccagtacctgtattacctggccagaacacagagcaacgcaggaggcacagctggcaatcgggaactgcagttttatcagggcgggcctaccaccatggccgaacaagccaaaaactggctgcctggaccttgcttccggcaacaaagagtctccaagacgctggatcaaaacaacaacagcaactttgcttggactggtgccaccaaataccatctaaatggaagaaattcattggttaatcccggtgtcgccatggcaacccacaaggacgacgaggaacgcttcttcccttcgagcggagtcctgatttttggaaaaactggagcagctaataagactacactggaaaatgtgttaatgacaaatgaagaggaaattcgtcctaccaacccggtagccaccgaggaatacgggactgttagcagcaacctgcaggcggctaacactgcagcccagacacaagttgtcaacaaccagggagccttacctggtatggtctggcagaaccgggacgtgtacctgcagggtcccatctgggccaagattcctcacacggacggcaactttcacccgtctccgctgatgggcggctttggactgaagcatccgcctcctcagatcctgatcaaaaacactcctgttcctgctaatcccccggaggtgtttacgcctgccaagtttgcttctttcatcacacagtacagcaccggccaggtcagcgtggagatcgagtgggagctgcagaaggagaacagcaagcgctggaacccagagattcagtatacctccaattttgacaaacagactggtgtggactttgccgttgacagccagggtgtttattctgagcctcgccccattggtactcgttacctcacccgtaatctgtaa

SEQ ID NO: 5071 - protein, 737 aa, Adeno-associated virus
MAADGYLPDWLEDNLSEGIREWWDLKPGAPKPKANQQKQDDGRGLVLPGYKYLGPFNGLDKGEPVNAADAAALEHDKAYDQQLKAGDNPYLRYNHADAEFQERLQEDTSFGGNLGRAVFQAKKRVLEPLGLAEEAAKTAPGKKRPVEPSPQRSPDSSTGIGKKGQQPARKRLNFGQTGDSESVPDPQPIGEPPAGPSGLGSGTMAAGGGAPMADNNKGADGVGNASGNWHCDSTWLGDRVITTSTRTWALPTYNNHLYKQISSQSAGSTNDNVYFGYSTPWGYFDFNRFHCHFSPRDWQRLINNNWGFRPKKLNFKLFNIQVKEVTTGDGVTTIANNLTSTVQVFSDSEYQLPYVLGSAHQGCLPPFPADVFMIPQYGYLTLNNDSQSVGRSSFYCLEYFPSQMLRTGNNFTFSYTFEDVPFHSSYAHSQSLDRLMNPLIDQYLYYLARTQSNAGGTAGNRELQFYQGGPTTMAEQAKNWLPGPCFRQQRVSKTLDQNNNSNFAWTGATKYHLNGRNSLVNPGVAMATHKDDEERFFPSSGVLIFGKTGAANKTTLENVLMTNEEEIRPTNPVATEEYGTVSSNLQAANTAAQTQVVNNQGALPGMVWQNRDVYLQGPIWAKIPHTDGNFHPSPLMGGFGLKHPPPQILIKNTPVPANPPEVFTPAKFASFITQYSTGQVSVEIEWELQKENSKRWNPEIQYTSNFDKQTGVDFAVDSQGVYSEPRPIGTRYLTRNL

SEQ ID NO: 5072 - DNA, 2217 bp, Adeno-associated virus
atggctgccgatggttatcttccagattggctcgaggacaacctctctgagggcattcgcgagtggtgggacctgaaacctggagccccgaaacccaaagccaaccagcaaaagcaggacgacggccggggtctggtgcttcctggctacaagtacctcggacccttcaacggactcgacaagggggagcccgtcaacgcggcggacgcagcggccctcgagcacgacaaggcctacgaccagcagctcaaagcgggtgacaatccgtacctgcggtataatcacgccgacgccgagtttcaggagcgtctgcaagaagatacgtcttttgggggcaacctcgggcgagcagtcttccaggccaagaagcgggttctcgaacctctcggtctggttgaggaaggcgctaagacggctcctggaaagaagagaccggtagagccgtcaccacagcgttcccccgactcctccacgggcatcggcaagaaaggccagcagcccgccagaaagagactcaatttcggtcagactggcgactcagagtcagtccccgaccctcaacctatcggagaacctccagcagcgccctctagtgtgggatctggtacaatggctgcaggcggtggcgcaccaatggcagacaataacgaaggtgccgacggagtgggtagttcctcgggaaattggcattgcgattccacatggctgggcgacagagtcatcaccaccagcacccgaacctgggccctgcccacctacaacaaccacctctacaagcaaatctccaacgggacctcgggaggcagcaccaacgacaacacctactttggctacagcaccccctgggggtattttgactttaacagattccactgccacttctcaccacgtgactggcagcgactcatcaacaacaactggggattccggcccaagagactcagcttcaagctcttcaacatccaggtcaaagaggtcacgcagaatgaaggcaccaagaccatcgccaataacctcaccagcaccatccaggtgtttacggactcggaataccagctgccgtacgtcctcggctctgcccaccagggctgcctgcctccgttcccggcggacgtcttcatgattcctcagtacggctacctgactctcaacaacggtagtcaggccgtgggacgttcctccttctactgcctggagtacttcccctctcagatgctgagaacgggcaacaacttttccttcagctacactttcgaggacgtgcctttccacagcagctacgcgcacagccagagtttggacaggctgatgaatcctctcatcgaccagtacctgtactacctgtcaagaacccagtctacgggaggcacagcgggaacccagcagttgctgttttctcaggccgggcctagcaacatgtcggctcaggccagaaactggctgcctggaccctgctacagacagcagcgcgtctccacgacactgtcgcaaaacaacaacagcaactttgcctggactggtgccaccaagtatcatctgaacggcagagactctctggtgaatccgggcgtcgccatggcaaccaacaaggacgacgaggaccgcttcttcccatccagcggcatcctcatgtttggcaagcagggagctggaaaagacaacgtggactatagcaacgtgatgctaaccagcgaggaagaaatcaagaccaccaaccccgtggccacagaacagtatggcgtggtggctgataacctacagcagcaaaacaccgctcctattgtgggggccgtcaacagccagggagccttacctggcatggtctggcagaaccgggacgtgtacctgcagggtcctatttgggccaagattcctcacacagatggcaactttcacccgtctcctttaatgggcggctttggacttaaacatccgcctcctcagatcctcatcaaaaacactcctgttcctgcggatcctccaacagcgttcaaccaggccaagctgaattctttcatcacgcagtacagcaccggacaagtcagcgtggagatcgtgtgggagctgcagaaggagaacagcaagcgcaggaacccagagattcagtatacttccaactactacaaatctacaaatgtggactttgctgttaatactgagggtgtttactctgagcctcgccccattggcactcgttacctcacccgtaatctgtaa

SEQ ID NO: 5073 - protein, 738 aa, Adeno-associated virus
MAADGYLPDWLEDNLSEGIREWWDLKPGAPKPKANQQKQDDGRGLVLPGYKYLGPFNGLDKGEPVNAADAAALEHDKAYDQQLKAGDNPYLRYNHADAEFQERLQEDTSFGGNLGRAVFQAKKRVLEPLGLVEEGAKTAPGKKRPVEPSPQRSPDSSTGIGKKGQQPARKRLNFGQTGDSESVPDPQPIGEPPAAPSSVGSGTMAAGGGAPMADNNEGADGVGSSSGNWHCDSTWLGDRVITTSTRTWALPTYNNHLYKQISNGTSGGSTNDNTYFGYSTPWGYFDFNRFHCHFSPRDWQRLINNNWGFRPKRLSFKLFNIQVKEVTQNEGTKTIANNLTSTIQVFTDSEYQLPYVLGSAHQGCLPPFPADVFMIPQYGYLTLNNGSQAVGRSSFYCLEYFPSQMLRTGNNFSFSYTFEDVPFHSSYAHSQSLDRLMNPLIDQYLYYLSRTQSTGGTAGTQQLLFSQAGPSNMSAQARNWLPGPCYRQQRVSTTLSQNNNSNFAWTGATKYHLNGRDSLVNPGVAMATNKDDEDRFFPSSGILMFGKQGAGKDNVDYSNVMLTSEEEIKTTNPVATEQYGVVADNLQQQNTAPIVGAVNSQGALPGMVWQNRDVYLQGPIWAKIPHTDGNFHPSPLMGGFGLKHPPPQILIKNTPVPADPPTAFNQAKLNSFITQYSTGQVSVEIVWELQKENSKRRNPEIQYTSNYYKSTNVDFAVNTEGVYSEPRPIGTRYLTRNL

SEQ ID NO: 5074 - protein, 738 aa, Adeno-associated virus
MAADGYLPDWLEDNLSEGIREWWDLKPGAPKPKANQQKQDDGRGLVLPGYKYLGPFNGLDKGEPVNAADAAALEHDKAYDQQLKAGDNPYLRYNHADAEFQERLQEDTSFGGNLGRAVFQAKKRVLEPLGLVEEGAKTAPGKKRPVEPSPQRSPDSSTGIGKKGQQPARKRLNFGQTGDSESVPDPQPIGEPPAAPSSVGSGTMAAGGGAPMADNNEGADGVGSSSGNWHCDSTWLGDRVITTSTRTWALPTYNNHLYKQISNGTSGGSTNDNTYFGYSTPWGYFDFNRFHCHFSPRDWQRLINNNWGFRPKRLSFKLFNIQVKEVTQNEGTKTIANNLTSTIQVFTDSEYQLPYVLGSAHQGCLPPFPADVFMIPQYGYLTLNNGSQAVGRSSFYCLEYFPSQMLRTGNNFSFSYTFEDVPFHSSYAHSQSLDRLMNPLIDQYLYYLSRTQSTGGTAGTQQLLFSQAGPSNMSAQARNWLPGPCYRQQRVSTTLSQNNNSNFAWTGATKYHLNGRDSLVNPGVAMATNKDDEDRFFPSSGILMFGKQGAGKDNVDYSNVMLTSEEEIKTTNPVATEQYGVVADNLQQQNTAPIVGAVNSQGALPGMVWQNRDVYLQGPIWAKIPHTDGNFHPSPLMGGFGLKHPPPQILIKNTPVPADPPTAFNQAKLNSFITQYSTGQVSVEIEWELQKENSKRWNPEIQYTSNYYKSTNVDFAVNTEGVYSEPRPIGTRYLTRNL

SEQ ID NO: 5075 - protein, 738 aa, Adeno-associated virus
MAADGYLPDWLEDNLSEGIREWWDLKPGAPKPKANQQKQDDGRGLVLPGYKYLGPFNGLDKGEPVNAADAAALEHDKAYDQQLKAGDNPYLRYNHADAEFQERLQEDTSFGGNLGRAVFQAKKRVLEPLGLVEEGAKTAPGKKRPVEPSPQRSPDSSTGIGKKGQQPARKRLNFGQTGDSESVPDPQPIGEPPAAPSSVGSGTMAAGGGAPMADNNEGADGVGSSSGNWHCDSTWLGDRVITTSTRTWALPTYNNHLYKQISNGTSGGSTNDNTYFGYSTPWGYFDFNRFHCHFSPRDWQRLINNNWGFRPKRLSFKLFNIQVKEVTQNEGTKTIANNLTSTIQVFTDSEYQLPYVLGSAHQGCLPPFPADVFMIPQYGYLTLNNGSQAVGRSSFYCLEYFPSQMLRTGNNFSFSYTFEDVPFHSSYAHSQSLDRLMNPLIDQYLYYLSRTQSTGGTAGTQQLLFSQAGPSNMSAQARNWLPGPCYRQQRVSTTLSQNNNSNFAWTGATKYHLNGRDSLVNPGVAMATNKDDEDRFFPSSGILMFGKQGAGKDNVDYSNVMLTSEEEIKTTNPVATEQYGVVADNLQQQNTAPIVGAVNSQGALPGMVWQNRDVYLQGPIWAKIPHTDGNFHPSPLMGGFGLKHPPPQILIKNTPVPADPPTAFNQAKLNSFITQYSTGQVSVEIVWELQKENSKRWNPEIQYTSNYYKSTNVDFAVNTEGVYSEPRPIGTRYLTRNL

SEQ ID NO: 5076 - protein, 738 aa, Adeno-associated virus; identical to SEQ ID NO: 5074

SEQ ID NO: 5077 - DNA, 2214 bp, Adeno-associated virus
atggctgctgacggttatcttccagattggctcgaggacaacctctctgagggcattcgcgagtggtgggacctgaaacctggagcccccaagcccaaggccaaccagcagaagcaggacgacggccggggtctggtgcttcctggctacaagtacctcggacccttcaacggactcgacaagggggagcccgtcaacgcggcggacgcagcggccctcgagcacgacaaggcctacgaccagcagctcaaagcgggtgacaatccgtacctgcggtataaccacgccgacgccgagtttcaggagcgtctgcaagaagatacgtcttttgggggcaacctcgggcgagcagtcttccaggccaagaagcgggttctcgaacctctcggtctggttgaggaagctgctaagacggctcctggaaagaagagaccggtagaaccgtcacctcagcgttcccccgactcctccacgggcatcggcaagaaaggccagcagcccgctagaaagagactgaactttgggcagactggcgactcagagtcagtccccgaccctcaaccaatcggagaaccaccagcaggcccctctggtctgggatctggtacaatggctgcaggcggtggcgctccaatggcagacaataacgaaggcgccgacggagtgggtaatgcctcaggaaattggcattgcgattccacatggctgggcgacagagtcatcaccaccagcacccgaacctgggctttgcccacctacaacaaccacctctacaagcaaatctccagtcagtcagcaggtagcaccaacgacaacgtctacttcggctacagcaccccctgggggtattttgacttcaacagattccactgtcacttctcaccacgtgactggcagcggctcatcaacaacaactggggattccggcccaagaagctcaacttcaagctgttcaacatccaggtcaaggaggtcacaacgaatgacggcgtcacgaccatcgccaataaccttaccagcacggttcaggtcttttcggactcggaataccagctgccctacgtcctcggctccgcacaccagggctgcctgcctccgttcccggcggacgtcttcatgattccccagtacggctacctgactctgaacaatggcagccaatcggtgggtcgttcctctttctactgcctggaatatttcccttctcaaatgctgagaacgggcaacaacttcaccttcagctacaccttcgaggacgttcccttccacagcagctacgcacacagccagagcctggaccggctgatgaatcctcttatcgaccagtacctgtattacctggccagaacacagagcaacgcaggaggcacagctggcaatcgggaactgcagttttatcagggcgggcctaccaccatggccgaacaagccaaaaactggctgcctagaccttgcttccggcaacaaagagtctccaagacgctggatcaaaacaacaacagcaactttgcttggactggtgccaccaaataccatctaaatggaagaaattcattggttaatcccggtgtcgccatggcaacccacaaggacgacgaggaacgcttcttcccttcgagcggagtcctgatttttggaaaaactggagcagctaataagactacactggaaaatgtgttaatgacaaatgaagaggaaattcgtcctaccaacccggtagccaccgaggaatacgggactgttagcagcaacctgcaggcggctaacactgcagcccagacacaagttgtcaacaaccagggagccttacctggtatggtctggcagaaccgggacgtgtacctgcagggtcccatctgggccaagattcctcacacggacggcaactttcacccgtctccgctgatgggcggctttggactgaagcatccgcctcctcagatcctgatcaaaaacactcctgttcctgctaatcccccggaggtgtttacgcctgccaagtttgcttctttcatcacacagtacagcaccggccaggtcagcgtggagatcgagtgggagctgcagaaggagaacagcaagcgctggaacccagagattcagtatacctccaattttgacaaacagactggtgtggactttgccgttgacagccagggtgtttattctgagcctcgccccattggtactcgttacctcacccgtaatctgtaa

SEQ ID NO: 5078 - protein, 737 aa, Adeno-associated virus
MAADGYLPDWLEDNLSEGIREWWDLKPGAPKPKANQQKQDDGRGLVLPGYKYLGPFNGLDKGEPVNAADAAALEHDKAYDQQLKAGDNPYLRYNHADAEFQERLQEDTSFGGNLGRAVFQAKKRVLEPLGLVEEAAKTAPGKKRPVEPSPQRSPDSSTGIGKKGQQPARKRLNFGQTGDSESVPDPQPIGEPPAGPSGLGSGTMAAGGGAPMADNNEGADGVGNASGNWHCDSTWLGDRVITTSTRTWALPTYNNHLYKQISSQSAGSTNDNVYFGYSTPWGYFDFNRFHCHFSPRDWQRLINNNWGFRPKKLNFKLFNIQVKEVTTNDGVTTIANNLTSTVQVFSDSEYQLPYVLGSAHQGCLPPFPADVFMIPQYGYLTLNNGSQSVGRSSFYCLEYFPSQMLRTGNNFTFSYTFEDVPFHSSYAHSQSLDRLMNPLIDQYLYYLARTQSNAGGTAGNRELQFYQGGPTTMAEQAKNWLPRPCFRQQRVSKTLDQNNNSNFAWTGATKYHLNGRNSLVNPGVAMATHKDDEERFFPSSGVLIFGKTGAANKTTLENVLMTNEEEIRPTNPVATEEYGTVSSNLQAANTAAQTQVVNNQGALPGMVWQNRDVYLQGPIWAKIPHTDGNFHPSPLMGGFGLKHPPPQILIKNTPVPANPPEVFTPAKFASFITQYSTGQVSVEIEWELQKENSKRWNPEIQYTSNFDKQTGVDFAVDSQGVYSEPRPIGTRYLTRNL

SEQ ID NO: 5079 - DNA, 2214 bp, Adeno-associated virus
atggctgctgacggttatcttccagattggctcgaggacaacctctctgagggcattcgcgagtggtgggacctgaaacctggagcccccaagcccaaggccaaccagcagaagcaggacgacggccggggtctggtgcttcctggctacaagtacctcggacccttcaacggactcgacaagggggagcccgtcaacgcggcggacgcagcggccctcgagcacgacaaggcctacgaccagcagctcaaagcgggtgacaatccgtacctgcggtataaccatgccgacgccgagtttcaggagcgtctgcaagaagatacgtcttttgggggcaacctcgggcgagcagtcctccaggccaagaagcgggttctcgaacctctcggtctggttgaggaagctgctaagacggctcctggaaagaagagaccggtagaaccgtcacctcagcgttcccccgactcctccacgggcatcggcaagaaaggccagcagcccgctagaaagagactgaactttgggcagactggcgactcagagtcagtccccgaccctcaaccaatcggagaaccaccagcaggcccctctggtctgggatctggtacaatggctgcaggcggtggcgctccaatggcagacaataacgaaggcgccgacggagtgggtaatgcctcaggaaattggcattgcgattccacatggctgggcgacagagtcatcaccaccagcacccgaacctgggctttgcccacctacaacaaccacctctacaagcaaatctccagtcagtcagcaggtagcaccaacgacaacgtctacttcggctacagcaccccctgggggtattttgacttcaacagattccactgtcacttctcaccacgtgactggcagcggctcatcaacaacaactggggattccggcccaagaagctcaacttcaagctgttcaacatccaggtcaaggaggtcacaacgaatgacggcgtcacgaccatcgccaataaccttaccagcacggttcaggtcttttcggactcggaataccagctgccctacgtcctcggctccgcacaccagggctgcctgcctccgttcccggcggacgtcttcatgattccccagtacggctacctgactctgaacaatggcagccaatcggtgggtcgttcctctttctactgcctggaatatttcccttctcaaatgctgagaacgggcaacaacttcaccttcagctacaccttcgaggacgttcccttccacagcagctacgcacacagccagagcctggaccggctgatgaatcctcttatcgaccagtacctgtattacctggccagaacacagagcaacgcaggaggcacagctggcaatcgggaactgcagttttatcagggcgggcctaccaccatggccgaacaagccaaaaactggctgcctggaccttgcttccggcaacaaagagtctccaagacgctggatcaaaacaacaacagcaactttgcttggactggtgccaccaaataccatctaaatggaagaaattcattggttaatcccggtgtcgccatggcaacccacaaggacgacgaggaacgcttcttcccttcgagcggagtcctgatttttggaaaaactggagcagctaataagactacactggaaaatgtgttaatgacaaatgaagaggaaattcgtcctaccaacccggtagccaccgaggaatacgggactgttagcagcaacctgcaggcggctaacactgcagcccagacacaagttgtcaacaaccagggagccttacctggtatggtctggcagaaccgggacgtgtacctgcagggtcccatctgggccaagattcctcacacggacggcaactttcacccgtctccgctgatgggcggctttggactgaagcatccgcctcctcagatcctgatcaaaaacactcctgttcctgctaatcccccggaggtgtttacgcctgccaagtttgcttctttcatcacacagtacagcaccggccaggtcagcgtggagatcgagtgggagctgcagaaggagaacagcaagcgctggaacccagagattcagtatacctccaattttgacaaacagactggtgtggactttgccgttgacagccagggtgtttattctgagcctcgccccattggtactcgttacctcacccgtaatctgtaa

SEQ ID NO: 5080 - protein, 737 aa, Adeno-associated virus; identical to SEQ ID NO: 5040

SEQ ID NO: 5081 - protein, 737 aa, Adeno-associated virus
MAADGYLPDWLEDNLSEGIREWWDLKPGAPKPKANQQKQDDGRGLVLPGYKYLGPFNGLDKGEPVNAADAAALEHDKAYDQQLKAGDNPYLRYNHADAEFQERLQEDTSFGGNLGRAVLQAKKRVLEPLGLVEEAAKTAPGKKRPVEPSPQRSPDSSTGIGKKGQQPARKRLNFGQTGDSESVPDPQPIGEPPAGPSGLGSGTMAAGGGAPMADNNEGADGVGNASGNWHCDSTWLGDRVITTSTRTWALPTYNNHLYKQISSQSAGSTNDNVYFGYSTPWGYFDFNRFHCHFSPRDWQRLINNNWGFRPKKLNFKLFNIQVKEVTTNDGVTTIANNLTSTVQVFSDSEYQLPYVLGSAHQGCLPPFPADVFMIPQYGYLTLNNGSQSVGRSSFYCLEYFPSQMLRTGNNFTFSYTFEDVPFHSSYAHSQSLDRLMNPLIDQYLYYLARTQSNAGGTAGNRELQFYQGGPTTMAEQAKNWLPGPCFRQQRVSKTLDQNNNSNFAWTGATKYHLNGRNSLVNPGVAMATHKDDEERFFPSSGVLIFGKTGAANKTTLENVLMTNEEEIRPTNPVATEEYGTVSSNLQAANTAAQTQVVNNQGALPGMVWQNRDVYLQGPIWAKIPHTDGNFHPSPLMGGFGLKHPPPQILIKNTPVPANPPEVFTPAKFASFITQYSTGQVSVEIEWELQKENSKRWNPEIQYTSNFDKQTGVDFAVDSQGVYSEPRPIGTRYLTRNL

SEQ ID NO: 5082 - DNA, 2217 bp, Adeno-associated virus
atggctgccgatggttatcttccagattggctcgaggacaacctctctgagggcattcgcgagtggtgggacctgaaacctggagccccgaaacccaaagccaaccagcaaaagcaggacgacggccggggtctggtgcttcctggctacaagtacctcggacccttcaacggactcgacaagggggagcccgtcaacgcggcggacgcagcggccctcgagcacgacaaggcctacgaccagcagctcaaagcgggtgacaatccgtacctgcggtataatcacgccgacgccgagtttcaggagcgtctgcaagaagatacgtcttttgggggcaacctcgggcgagcagtcttccaggccaagaagcgggttctcgaacctctcggtctggttgaggaaggcgctaagacggctcctggaaagaagagaccggtagagccgtcaccacagcgttcccccgactcctccacgggcatcggcaagaaaggccagcagcccgccagaaagagactcaatttcggtcagactggcgactcagagtcagtccccgaccctcaacctatcggagaacctccagcagcgccctctagtgtgggatctggtacaatggctgcaggcggtggcgcaccaatggcagacaataacgaaggtgccgacggagtgggtagttcctcgggaaattggcattgcgattccacatggctgggcgacagagtcatcaccaccagcacccgaacctgggccctgcccacctacaacaaccacctctacaagcaaatctccaacgggacctcgggaggcagcaccaacgacaacacctactttggctacagcaccccctgggggtattttgactttaacagattccactgccacttctcaccacgtgactggcagcgactcatcaacaacaactggggattccggcccaagagactcagcttcaagctcttcaacatccaggtcaaagaggtcacgcagaatgaaggcaccaagaccatcgccaataacctcaccagcaccatccaggtgtttacggactcggaataccagctgccgtacgtcctcggctctgcccaccagggctgcctgcctccgttcccggcggacgtcttcatgattcctcagtacggctacctgactctcaacaacggtagtcaggccgtgggacgttcctccttctactgcctggagtacttcccctctcagatgctgagaacgggcaacaacttttccttcagctacactttcgaggacgtgcctttccacagcagctacgcgcacagccagagtttggacaggctgatgaatcctctcatcgaccagtacctgtactacctgtcaagaacccagtctacgggaggcacagcgggaacccagcagttgctgttttctcaggccgggcctagcaacatgtcggctcaggccagaaactggctgcctggaccctgctacagacagcagcgcgtctccacgacactgtcgcaaaacaacaacagcaactttgcctggactggtgccaccaagtatcatctgaacggcagagactctctggtgaatccgggcgtcgccatggcaaccaacaaggacgacgaggaccgcttcttcccacccagcggcatcctcatgtttggcaagcagggagctggaaaagacaacgtggactatagcaacgtgatgctaaccagcgaggaagaaatcaagaccaccaaccccgtggccacagaacagtatggcgtggtggctgataacctacagcagcaaaacaccgctcctattgtgggggccgtcaacagccagggagccttacctggcatggtctggcagaaccgggacgtgtacctgcagggtcctatttgggccaagattcctcacacagatggcaactttcacccgtctcctttaatgggcggctttggacttaaacatccgcctcctcagatcctcatcaaaaacactcctgttcctgcggatcctccaacagcgttcaaccaggccaagctgaattctttcatcacgcagtacagcaccggacaagtcagcgtggtgatcgagtgggagctgcagaaggagaacagcaagcgctggaacccagagattcagtatacttccaactactacaaatctacaaatgtggactttgctgttaatactgagggtgtttactctgagcttcgccccattggcactcgttacctcacccgtaatctgtaa

SEQ ID NO: 5083 - protein, 738 aa, Adeno-associated virus
MAADGYLPDWLEDNLSEGIREWWDLKPGAPKPKANQQKQDDGRGLVLPGYKYLGPFNGLDKGEPVNAADAAALEHDKAYDQQLKAGDNPYLRYNHADAEFQERLQEDTSFGGNLGRAVFQAKKRVLEPLGLVEEGAKTAPGKKRPVEPSPQRSPDSSTGIGKKGQQPARKRLNFGQTGDSESVPDPQPIGEPPAAPSSVGSGTMAAGGGAPMADNNEGADGVGSSSGNWHCDSTWLGDRVITTSTRTWALPTYNNHLYKQISNGTSGGSTNDNTYFGYSTPWGYFDFNRFHCHFSPRDWQRLINNNWGFRPKRLSFKLFNIQVKEVTQNEGTKTIANNLTSTIQVFTDSEYQLPYVLGSAHQGCLPPFPADVFMIPQYGYLTLNNGSQAVGRSSFYCLEYFPSQMLRTGNNFSFSYTFEDVPFHSSYAHSQSLDRLMNPLIDQYLYYLSRTQSTGGTAGTQQLLFSQAGPSNMSAQARNWLPGPCYRQQRVSTTLSQNNNSNFAWTGATKYHLNGRDSLVNPGVAMATNKDDEDRFFPPSGILMFGKQGAGKDNVDYSNVMLTSEEEIKTTNPVATEQYGVVADNLQQQNTAPIVGAVNSQGALPGMVWQNRDVYLQGPIWAKIPHTDGNFHPSPLMGGFGLKHPPPQILIKNTPVPADPPTAFNQAKLNSFITQYSTGQVSVVIEWELQKENSKRWNPEIQYTSNYYKSTNVDFAVNTEGVYSELRPIGTRYLTRNL

SEQ ID NO: 5084 - DNA, 2214 bp, Adeno-associated virus
atggctgctgacggttatcttccagattggctcgaggacaacctctctgagggcattcgcgagtggtgggacctgaaacctggagcccccaagcccaaggccaaccagcagaagcaggacgacggccggggtctggtgcttcctggctacaagtacctcggacccttcaacggactcgacaagggggagcccgtcaacgcggcggacgcagcggccctcgagcacgacaaggcctacgaccagcagctcaaagcgggtgacaatccgtacctgcggtataaccacgccgacgccgagtttcaggagcgtctgcaagaagatacgtcttttgggggcaacctcgggcgagcagtcttccaggccaagaagcgggttctcgaacctctcggtctggttgaggaagctgctaagacggctcctggaaagaagagaccggtagaaccgtcacctcagcgttcccccgactcctccacgggcatcggcaagaaaggccagcagcccgctagaaagagactgaactttgggcagactggcgactcagagtcagtccccgaccctcaaccaatcggagaaccaccagcaggcccctctggtctgggatctggtacaatggctgcaggcggtggcgccccaatggcagacaataacgaaggcgccgacggagtgggtaatgcctcaggaaattggcattgcgattccacatggctgggcgacagagtcatcaccaccagcacccgaacctgggctttgcccacctacaacaaccacctctacaagcaaatctccagtcagtcagcaggtagcaccaacgacaacgtctacttcggctacagcaccccctgggggtattttgacttcaacagattccactgtcacttctcaccacgtgactggcagcggctcatcaacaacaactggggattccggcccaagaagctcaacttcaagctgttcaacatccaggtcaaggaggtcacaacgaatgacggcgtcacgaccatcgccaataaccttaccagcacggttcaggtcttttcggactcggaataccagctgccctacgtcctcggctccgcacaccagggctgcctgcctccgttcccggcggacgtcttcatgattccccagtacggctacctgactctgaacaatggcagccaatcggtgggtcgttcctctttctactgcctggaatatttcccttctcaaatgctgagaacgggcaacaacttcaccatcagctacaccttcgaggacgttcccttccacagcagctacgcacacagccagagcctggaccggctgatgaatcctcttatcgaccagtacctgtattacctggccagaacacagagcaacgcaggaggcacagctggcaatcaggaactgcagttttatcagggcgggcctaccaccatggccgaacaagccaaaaactggctgcctggaccttgcttccggcaacaaagagtctccaagacgctggatcaaaacaacaacagcaactttgcttggactggtgccaccaaataccatctaaatggaagaaattcattggttaatcccggtgtcgccatggcaacccacaaggacgacgaggaacgcttcttcccttcgagcggagtcctgatttttggaaaaactggagcagctaataagactacactggaaaatgtgttaatgacaaatgaagaggaaattcgtcctaccaacccggtagccaccgaggaatacgggactgttagcagcaacctgcaggcggctaacactgcagcccagacacaagttgtcaacaaccagggagccttacctggtatggtctggcagaaccgggacgtgtacctgcagggtcccatctgggccaagattcctcacacagatggcaactttcacccgtctcctttaatgggcggctttggacttaaacatccgcctcctcagatcctcatcaaaaacactcctgttcctgcggatcctccaacagcgttcaaccaggccaagctgaattctttcatcacgcagtacagcaccggacaagtcagcgtggagatcgagtgggagctgcagaaggagaacagcaagcgctggaacccagagattcagtatacttccaactactacaaatctacaaatgtggactttgctgttaatactgagggtgtttactctgagcctcgccccattggcactcgttacctcacccgtaatctgtaa

SEQ ID NO: 5085 - protein, 737 aa, Adeno-associated virus
MAADGYLPDWLEDNLSEGIREWWDLKPGAPKPKANQQKQDDGRGLVLPGYKYLGPFNGLDKGEPVNAADAAALEHDKAYDQQLKAGDNPYLRYNHADAEFQERLQEDTSFGGNLGRAVFQAKKRVLEPLGLVEEAAKTAPGKKRPVEPSPQRSPDSSTGIGKKGQQPARKRLNFGQTGDSESVPDPQPIGEPPAGPSGLGSGTMAAGGGAPMADNNEGADGVGNASGNWHCDSTWLGDRVITTSTRTWALPTYNNHLYKQISSQSAGSTNDNVYFGYSTPWGYFDFNRFHCHFSPRDWQRLINNNWGFRPKKLNFKLFNIQVKEVTTNDGVTTIANNLTSTVQVFSDSEYQLPYVLGSAHQGCLPPFPADVFMIPQYGYLTLNNGSQSVGRSSFYCLEYFPSQMLRTGNNFTISYTFEDVPFHSSYAHSQSLDRLMNPLIDQYLYYLARTQSNAGGTAGNQELQFYQGGPTTMAEQAKNWLPGPCFRQQRVSKTLDQNNNSNFAWTGATKYHLNGRNSLVNPGVAMATHKDDEERFFPSSGVLIFGKTGAANKTTLENVLMTNEEEIRPTNPVATEEYGTVSSNLQAANTAAQTQVVNNQGALPGMVWQNRDVYLQGPIWAKIPHTDGNFHPSPLMGGFGLKHPPPQILIKNTPVPADPPTAFNQAKLNSFITQYSTGQVSVEIEWELQKENSKRWNPEIQYTSNYYKSTNVDFAVNTEGVYSEPRPIGTRYLTRNL

SEQ ID NO: 5086 - DNA, 2217 bp, Adeno-associated virus
atggctgccgatggttatcttccagattggctcgaggacaacctctctgagggcattcgcgagtggtgggacctgaaacctggagccccgaaacccaaagccaaccagcaaaagcaggacgacggccggggtctggtgcttcctggctacaagtacctcggacccttcaacggactcgacaagggggagcccgtcaacgcggcggacgcagcggccctcgagcacgacaaggcctacgaccagcagctcaaagcgggtgacaatccgtacctgcggtataatcacgccgacgccgagtttcaggagcgtctgcaagaagatacgtcttttgggggcaacctcgggcgagcagtcttccaggccaagaagcgggttctcgaacctctcggtctggttgaggaaggcgctaagacggctcctggaaagaagagaccggtagagccgtcaccacagcgttcccccgactcctccacgggcatcggcaagaaaggccagcagcccgccagaaagagactcaatttcggtcagactggcgactcagagtcagtccccgaccctcaacctatcggagaacctccagcagcgccctctagtgtgggatctggtacaatggctgcaggcggtggcgcaccaatggcagacaataacgaaggtgccgacggagtgggtagttcctcgggaaattggcattgcgattccacatggctgggcgacagagtcatcaccaccagcacccgaacctgggccctgcccgcctacaacaaccacctctacaagcaaatctccaacgggacctcgggaggcagcaccaacgacaacacctactttggctacagcaccccctgggggtattttgactttaacagattccactgccacttctcaccacgtgactggcagcgactcatcaacaacaactggggattccggcccaagagactcagcttcaagctcttcaacatccaggtcaaagaggtcacgcagaatgaaggcaccaagaccatcgccaataacctcaccagcaccatccaggtgtttacggactcggaataccagctgccgtacgtcctcggctctgcccaccagggctgcctgcctccgttcccggcggatgtcttcatgattcctcagtacggctacctgactctcaacaacggtagtcaggccgtgggacgttcctccttctactgcctggagtacttcccctctcagatgctgagaacgggcaacaacttttccttcagctacactttcgaggacgtgcctttccacagcagctacgcgcacagccagagtttggacaggctgatgaatcctctcatcgaccagtacctgtactacctgtcaagaacccagtctacgggaggcacagcgggaacccagcagttgctgttttctcaggccgggcctagcaacatgtcggctcaggccagaaactggctgcctggaccctgctacagacagcagcgcgtctccacgacactgtcgcaaaacaacaacagcaactttgcctggactggtgccaccaagtatcatctgagcggcagagactctctggtgaatccgggcgtcgccatggcaaccaacaaggacgacgaggaccgcttcttcccatccagcggcatcctcatgtttggcaagcagggagctggaaaagacaacgtggactatagcaacgtgatgctaaccagcgaggaagaaatcaagaccaccaaccccgtggccacagaacagtatggcgtggtggctgataacctacagcagcaaaacaccgctcctattgtgggggccgtcaacagccagggagccttacctggcatggtctggcagaaccgggacgtgtacctgcagggtcctatttgggccaagattcctcacacagatggcaactttcacccgtctcctttaatgggcggctttggacttaaacatccgcctcctcagatcctcatcaaaaacactcctgttcctgcggatcctccaacagcgttcaaccaggccaagctgaattcttccatcacgcagtacagcaccggacaagtcagcgtggagatcgagtgggagctgcagaaggagaacagcaagcgctggaacccagagattcagtatacttccaactactacaaatctacaaatgtggactttgctgttaatactgagggtgtttactctgagcctcgccccattggcactcgttacctcacccgtaatttgtaa

SEQ ID NO: 5087 - protein, 738 aa, Adeno-associated virus
MAADGYLPDWLEDNLSEGIREWWDLKPGAPKPKANQQKQDDGRGLVLPGYKYLGPFNGLDKGEPVNAADAAALEHDKAYDQQLKAGDNPYLRYNHADAEFQERLQEDTSFGGNLGRAVFQAKKRVLEPLGLVEEGAKTAPGKKRPVEPSPQRSPDSSTGIGKKGQQPARKRLNFGQTGDSESVPDPQPIGEPPAAPSSVGSGTMAAGGGAPMADNNEGADGVGSSSGNWHCDSTWLGDRVITTSTRTWALPAYNNHLYKQISNGTSGGSTNDNTYFGYSTPWGYFDFNRFHCHFSPRDWQRLINNNWGFRPKRLSFKLFNIQVKEVTQNEGTKTIANNLTSTIQVFTDSEYQLPYVLGSAHQGCLPPFPADVFMIPQYGYLTLNNGSQAVGRSSFYCLEYFPSQMLRTGNNFSFSYTFEDVPFHSSYAHSQSLDRLMNPLIDQYLYYLSRTQSTGGTAGTQQLLFSQAGPSNMSAQARNWLPGPCYRQQRVSTTLSQNNNSNFAWTGATKYHLSGRDSLVNPGVAMATNKDDEDRFFPSSGILMFGKQGAGKDNVDYSNVMLTSEEEIKTTNPVATEQYGVVADNLQQQNTAPIVGAVNSQGALPGMVWQNRDVYLQGPIWAKIPHTDGNFHPSPLMGGFGLKHPPPQILIKNTPVPADPPTAFNQAKLNSSITQYSTGQVSVEIEWELQKENSKRWNPEIQYTSNYYKSTNVDFAVNTEGVYSEPRPIGTRYLTRNL

SEQ ID NO: 5088 - protein, 736 aa, Adeno-associated virus
MAADGYLPDWLEDNLSEGIREWWDLKPGAPKPKANQQKQDDGRGLVLPGYKYLGPFNGLDKGEPVNAADAAALEHDKAYDQQLKAGDNPYLRYNHADAEFQERLQEDTSFGGNLGRAVFQAKKRVLEPLGLVEEGAKTAPGKKRPVEQSPQEPDSSSGIGKTGQQPAKKRLNFGQTGDSESVPDPQPLGEPPATPAAVGPTTMASGGGAPMADNNEGADGVGNASGNWHCDSTWLGDRVITTSTRTWALPTYNNHLYKQISSASTGASNDNHYFGYSTPWGYFDFNRFHCHFSPRDWQRLINNNWGFRPKRLNFKLFNIQVKEVTTNDGVTTIANNLTSTVQVFSDSEYQLPYVLGSAHQGCLPPFPADVFMIPQYGYLTLNNGSQAVGRSSFYCLEYFPSQMLRTGNNFTFSYTFEEVPFHSSYAHSQSLDRLMNPLIDQYLYYLNRTQNQSGSAQNKDLLFSRGSPAGMSVQPKNWLPGPCYRQQRVSKTKTDNNNSNFTWTGASKYNLNGRESIINPGTAMASHKDDEDKFFPMSGVMIFGKESAGASNTALDNVMITDEEEIKATNPVATERFGTVAVNFQSSSTDPATGDVHAMGALPGMVWQDRDVYLQGPIWAKIPHTDGHFHPSPLMGGFGLKNPPPQILIKNTPVPANPPAEFSATKFASFITQYSTGQVSVEIEWELQKENSKRWNPEVQYTSNYAKSANVDFTVDNNGLYTEPRPIGTRYLTRPL

SEQ ID NO: 5089 - DNA, 2217 bp, Adeno-associated virus
atggctgctgacggttatcttccagattggctcgaggacaacctctctgagggcattcgcgagtggtgggacctgaaacctggagcccccaagcccaaggccaaccagcagaagcaggacgacggccggggtctggtgcttcctggctacaagtacctcggacccttcaacggactcgacaagggggagcccgtcaacgcggcggacgcagcggccctcgagcacgacaaggcctacgaccagcagctcaaagcgggtgacaatccgtacctgcggtataaccacgccgacgccgagtttcaggagcgtctgcaagaagatacgtcttttgggggcaacctcgggcgagcagtcttccaggccaagaagcgggttctcgaacctctcggtctggttgaggaagctgctaagacggctcctggaaagaagagaccggtagaaccgtcacctcagcgttcccccgactcctccacgggcatcggcaagaaaggccagcagcccgctaaaaagagactgaactttggtcagactggcgactcagagtcagtccccgaccctcaaccaatcggagaaccaccagcaggcccctctggtctgggatctggtacaatggctgcaggcggtggcgctccaatggcagacaataacgaaggcgccgacggagtgggtagttcctcaggaaattggcattgcgattccacatggctgggcgacagagtcatcaccaccagcacccgaacctgggccctgcccacctacaacaaccacctctacaagcaaatatccaatgggacatcgggaggaagcaccaacgacaacacctacttcggctacagcaccccctgggggtattttgacttcaacagattccactgccacttctcaccacgtgactggcagcgactcatcaacaacaactggggattccggccaaaaagactcagcttcaagctcttcaacatccaggtcaaggaggtcacgcagaatgaaggcaccaagaccatcgccaataaccttaccagcacgattcaggtatttacggactcggaataccagctgccgtacgtcctcggctccgcgcaccagggctgcctgcctccgttcccggcggacgtcttcatgattccccagtacggctaccttacactgaacaatggaagtcaagccgtaggccgttcctccttctactgcctggaatattttccatctcaaatgctgcgaactggaaacaattttgaattcagctacaccttcgaggacgtgcctttccacagcagctacgcacacagccagagcttggaccgactgatgaatcctctcatcgaccagtacctgtactacttatccagaactcagtccacaggaggaactcaaggtacccagcaattgttattttctcaagctgggcctgcaaacatgtcggctcaggctaagaactggctacctggaccttgctaccggcagcagcgagtctctacgacactgtcgcaaaacaacaacagcaactttgcttggactggtgccaccaaatatcacctgaacggaagagactctttggtaaatcccggtgtcgccatggcaacccacaaggacgacgaggaacgcttcttcccgtcgagtggagtcctgatgtttggaaaacagggtgctggaagagacaatgtggactacagcagcgttatgctaaccagcgaagaagaaattaaaaccactaaccctgtagccacagaacaatacggtgtggtggctgacaacttgcagcaaaccaatacagggcctattgtgggaaatgtcaacagccaaggagccttacctggcatggtctggcagaaccgagacgtgtacctgcagggtcccatctgggccaagattcctcacacggacggcaacttccacccttcaccgctaatgggaggatttggactgaagcacccacctcctcagatcctgatcaagaacacgccggtacctgcggatcctccaacaacgttcagccaggcgaaattggcttccttcattacgcagtacagcaccggacaggtcagcgtggaaatcgagtgggagctgcagaaggagaacagcaaacgctggaacccagagattcagtacacttcaaactactacaaatctacaaatgtggactttgctgtcaatacagagggaacttattctgagcctcgccccattggtactcgttacctcacccgtaatctgtaa

SEQ ID NO: 5090 - protein, 738 aa, Adeno-associated virus
MAADGYLPDWLEDNLSEGIREWWDLKPGAPKPKANQQKQDDGRGLVLPGYKYLGPFNGLDKGEPVNAADAAALEHDKAYDQQLKAGDNPYLRYNHADAEFQERLQEDTSFGGNLGRAVFQAKKRVLEPLGLVEEGAKTAPGKKRPVEPSPQRSPDSSTGIGKKGQQPARKRLNFGQTGDSESVPDPQPLGEPPAAPSSVGSGTMAAGGGAPMADNNEGADGVGSSSGNWHCDSTWLGDRVITTSTRTWALPTYNNHLYKQISNGTSGGSTNDNTYFGYSTPWGYFDFNRFHCHFSPRDWQRLINNNWGFRPKRLSFKLFNIQVKEVTQNEGTKTIANNLTSTIQVFTDSEYQLPYVLGSAHQGCLPPFPADVFMIPQYGYLTLNNGSQAVGRSSFYCLEYFPSQMLRTGNNFSFSYTFEDVPFHSSYAHSQSLDRLMNPLIDQYLYYLSRTQSTGGTAGTQQLLFSQAGPSNMSAQARNWLPGPCYRQQRVSTTLSQNNNSNFAWTGATKYHLNGRDSLVNPGVAMATNKDDEDRFFPSSGILMFGKQGAGKDNVDYSNVMLTSEEEIKTTNPVATEQYGVVADNLQRQNTAPIVGAVNSQGALPGMVWQNRDVYLQGPIWAKIPHTDGNFHPSPLMGGFGLKHPPPQILIKNTPVPADPPTAFNQAKLNSFITQYSTGQVSVEIEWELQKENSKRWNPEIQYTSNYYKSTNVDFAVNTEGVYSEPRPIGTRYLTRNL

SEQ ID NO: 5091 - protein, 736 aa, Adeno-associated virus
MAADGYLPDWLEDNLSEGIREWLNLKPGAPQPKANQQKQDNARGLVLPGYKYLGPFNGLDKGDPVNEADAAALEHDKAYGQQLKAGDNPYLKYNHADAEFQERLQKDTSFGGNLGKAVFQAKKRILEPLGLVETPAKTAPGKKRPVDPSPQRSPDSSSGIGKKSPHPARKRLNFGQTGEAESVPDPQPIGEPPSDPSSVGSGTMAAGGGAPMADNNEGADGVGNSSGNWHCDSTWLGDRVITTSTRTWALPTYNNHLYKQISSQSGATNDNHYFGYSTPWGYFDFNRFHCHFSPRDWQRLINNNWGFRPKRLSFKLFNIQVKEVTQNDGTTTIANNLTSTVQVFTDSEYQLPYVLGSAHQGCLPPFPADVFMIPQYGYLTLNNGSQAVGRSSFYCLEYFPSQMLRTGNNFQFSYTFEDVPFHSSYAHSQSLDRLMNPLIDQYLYYLSKTQGTNATVQGAKLQFSQAGPSNMRDQARNWLPGPCYRQQRVSKTANDNNNSEYAWTGATKYHLNGRDSLVNPGPAMASHKDDEEKFFPMNGTLVFGKNGAGNSNVDIENVMITDEEEIRTTNPVATEQYGVVSDNLQSSNTRPITGDVDSQGVLPGMVWQDRDVYLQGPIWAKIPHTDGHFHPSPLMGGFGLKHPPPQILIKNTPVPANPATTFTPGKFASFITQYSTGQVSVQIEWELQKENSKRWNPEIQYTSNYNKSVNVDFTVDTNGVYSEPRPIGTRYLTRNL

SEQ ID NO: 5092 - protein, 736 aa, Adeno-associated virus; identical to SEQ ID NO: 4787

SEQ ID NO: 5093 - protein, 736 aa, Adeno-associated virus
MAADGYLPDWLEDNLSEGIREWWDLKPGAPKPKANQQKQDDGRGLVLPGYKYLGPFNGLDKGEPVNAADAAALEHDKAYDQQLKAGDNPYLRYNHADAEFQERLQEDTSFGGNLGRAVFQAKKRVLEPLGLVEEGAKTAPGKKRPVEQSPQEPDSSSGIGKTGQQPAKKRLNFGQTGDSESVPDPQPLGEPPAAPSGLGPNTMASGGGAPMADNNEGADGVGNSSGNWHCDSTWLGDRVITTSTRTWALPTYNNHLYKQISNGTSGGSTNDNTYFGYSTPWGYFDFNRFHCHFSPRDWQRLINNNWGFRPKRLNFKLFNIQVKEVTTNEGTKTIANNLTSTVQVFTDSEYQLPYVLGSAHQGCLPPFPADVFMVPQYGYLTLNNGSQALGRSSFYCLEYFPSQMLRTGNNFQFSYTFEDVPFHSSYAHSQSLDRLMNPLIDQYLYYLVRTQTTGTGGTQTLAFSQAGPSSMANQARNWVPGPCYRQQRVSTTTNQNNNSNFAWTGAAKFKLNGRDSLMNPGVAMASHKDDEDRFFPSSGVLIFGKQGAGNDGVDYSQVLITDEEEIKATNPVATEEYGAVAINNQAANTQAQTGLVHNQGVIPGMVWQNRDVYLQGPIWAKIPHTDGNFHPSPLMGGFGLKHPPPQILIKNTPVPADPPLTFNQAKLNSFITQYSTGQVSVEIEWELQKENSKRWNPEIQYTSNYYKSTNVDFAVNTEGVYSEPRPIGTRYLTRNL

SEQ ID NO: 5094 - DNA, 2211 bp, Adeno-associated virus 1; identical to SEQ ID NO: 4977

SEQ ID NO: 5095 - protein, 736 aa, Adeno-associated virus 1; identical to SEQ ID NO: 5088

SEQ ID NO: 5096 - DNA, 4718 bp, Adeno-associated virus 1
ttgcccactccctctctgcgcgctcgctcgctcggtggggcctgcggaccaaaggtccgcagacggcagagctctgctctgccggccccaccgagcgagcgagcgcgcagagagggagtgggcaactccatcactaggggtaatcgcgaagcgcctcccacgctgccgcgtcagcgctgacgtaaattacgtcataggggagtggtcctgtattagctgtcacgtgagtgcttttgcgacattttgcgacaccacgtggccatttagggtatatatggccgagtgagcgagcaggatctccattttgaccgcgaaatttgaacgagcagcagccatgccgggcttctacgagatcgtgatcaaggtgccgagcgacctggacgagcacctgccgggcatttctgactcgtttgtgagctgggtggccgagaaggaatgggagctgcccccggattctgacatggatctgaatctgattgagcaggcacccctgaccgtggccgagaagctgcagcgcgacttcctggtccaatggcgccgcgtgagtaaggccccggaggccctcttctttgttcagttcgagaagggcgagtcctacttccacctccatattctggtggagaccacgggggtcaaatccatggtgctgggccgcttcctgagtcagattagggacaagctggtgcagaccatctaccgcgggatcgagccgaccctgcccaactggttcgcggtgaccaagacgcgtaatggcgccggaggggggaacaaggtggtggacgagtgctacatccccaactacctcctgcccaagactcagcccgagctgcagtgggcgtggactaacatggaggagtatataagcgcctgtttgaacctggccgagcgcaaacggctcgtggcgcagcacctgacccacgtcagccagacccaggagcagaacaaggagaatctgaaccccaattctgacgcgcctgtcatccggtcaaaaacctccgcgcgctacatggagctggtcgggtggctggtggaccggggcatcacctccgagaagcagtggatccaggaggaccaggcctcgtacatctccttcaacgccgcttccaactcgcggtcccagatcaaggccgctctggacaatgccggcaagatcatggcgctgaccaaatccgcgcccgactacctggtaggccccgctccgcccgcggacattaaaaccaaccgcatctaccgcatcctggagctgaacggctacgaacctgcctacgccggctccgtctttctcggctgggcccagaaaaggttcgggaagcgcaacaccatctggctgtttgggccggccaccacgggcaagaccaacatcgcggaagccatcgcccacgccgtgcccttctacggctgcgtcaactggaccaatgagaactttcccttcaatgattgcgtcgacaagatggtgatctggtgggaggagggcaagatgacggccaaggtcgtggagtccgccaaggccattctcggcggcagcaaggtgcgcgtggaccaaaagtgcaagtcgtccgcccagatcgaccccacccccgtgatcgtcacctccaacaccaacatgtgcgccgtgattgacgggaacagcaccaccttcgagcaccagcagccgttgcaggaccggatgttcaaatttgaactcacccgccgtctggagcatgactttggcaaggtgacaaagcaggaagtcaaagagttcttccgctgggcgcaggatcacgtgaccgaggtggcgcatgagttctacgtcagaaagggtggagccaacaaaagacccgcccccgatgacgcggataaaagcgagcccaagcgggcctgcccctcagtcgcggatccatcgacgtcagacgcggaaggagctccggtggactttgccgacaggtaccaaaacaaatgttctcgtcacgcgggcatgcttcagatgctgtttccctgcaagacatgcgagagaatgaatcagaatttcaacatttgcttcacgcacgggacgagagactgttcagagtgcttccccggcgtgtcagaatctcaaccggtcgtcagaaagaggacgtatcggaaactctgtgccattcatcatctgctggggcgggctcccgagattgcttgctcggcctgcgatctggtcaacgtggacctggatgactgtgtttctgagcaataaatgacttaaaccaggtatggctgccgatggttatcttccagattggctcgaggacaacctctctgagggcattcgcgagtggtgggacttgaaacctggagccccgaagcccaaagccaaccagcaaaagcaggacgacggccggggtctggtgcttcctggctacaagtacctcggacccttcaacggactcgacaagggggagcccgtcaacgcggcggacgcagcggccctcgagcacgacaaggcctacgaccagcagctcaaagcgggtgacaatccgtacctgcggtataaccacgccgacgccgagtttcaggagcgtctgcaagaagatacgtcttttgggggcaacctcgggcgagcagtcttccaggccaagaagcgggttctcgaacctctcggtctggttgaggaaggcgctaagacggctcctggaaagaaacgtccggtagagcagtcgccacaagagccagactcctcctcgggcatcggcaagacaggccagcagcccgctaaaaagagactcaattttggtcagactggcgactcagagtcagtccccgatccacaacctctcggagaacctccagcaacccccgctgctgtgggacctactacaatggcttcaggcggtggcgcaccaatggcagacaataacgaaggcgccgacggagtgggtaatgcctcaggaaattggcattgcgattccacatggctgggcgacagagtcatcaccaccagcacccgcacctgggccttgcccacctacaataaccacctctacaagcaaatctccagtgcttcaacgggggccagcaacgacaaccactacttcggctacagcaccccctgggggtattttgatttcaacagattccactgccacttttcaccacgtgactggcagcgactcatcaacaacaattggggattccggcccaagagactcaacttcaaactcttcaacatccaagtcaaggaggtcacgacgaatgatggcgtcacaaccatcgctaataaccttaccagcacggttcaagtcttctcggactcggagtaccagcttccgtacgtcctcggctctgcgcaccagggctgcctccctccgttcccggcggacgtgttcatgattccgcaatacggctacctgacgctcaacaatggcagccaagccgtgggacgttcatccttttactgcctggaatatttcccttctcagatgctgagaacgggcaacaactttaccttcagctacacctttgaggaagtgcctttccacagcagctacgcgcacagccagagcctggaccggctgatgaatcctctcatcgaccaatacctgtattacctgaacagaactcaaaatcagtccggaagtgcccaaaacaaggacttgctgtttagccgtgggtctccagctggcatgtctgttcagcccaaaaactggctacctggaccctgttatcggcagcagcgcgtttctaaaacaaaaacagacaacaacaacagcaattttacctggactggtgcttcaaaatataacctcaatgggcgtgaatccatcatcaaccctggcactgctatggcctcacacaaagacgacgaagacaagttctttcccatgagcggtgtcatgatttttggaaaagagagcgccggagcttcaaacactgcattggacaatgtcatgattacagacgaagaggaaattaaagccactaaccctgtggccaccgaaagatttgggaccgtggcagtcaatttccagagcagcagcacagaccctgcgaccggagatgtgcatgctatgggagcattacctggcatggtgtggcaagatagagacgtgtacctgcagggtcccatttgggccaaaattcctcacacagatggacactttcacccgtctcctcttatgggcggctttggactcaagaacccgcctcctcagatcctcatcaaaaacacgcctgttcctgcgaatcctccggcggagttttcagctacaaagtttgcttcattcatcacccaatactccacaggacaagtgagtgtggaaattgaatgggagctgcagaaagaaaacagcaagcgctggaatcccgaagtgcagtacacatccaattatgcaaaatctgccaacgttgattttactgtggacaacaatggactttatactgagcctcgccccattggcacccgttaccttacccgtcccctgtaattacgtgttaatcaataaaccggttgattcgtttcagttgaactttggtctcctgtccttcttatcttatcggttaccatggttatagcttacacattaactgcttggttgcgcttcgcgataaaagacttacgtcatcgggttacccctagtgatggagttgcccactccctctctgcgcgctcgctcgctcggtggggcctgcggaccaaaggtccgcagacggcagagctctgctctgccggccccaccgagcgagcgagcgcgcagagagggagtgggcaa

SEQ ID NO: 5097 - DNA, 255 bp, Adeno-associated virus 10
ggtaattcctccggaaattggcattgcgattccacatggctgggcgacagagtcatcaccaccagcacccgaacctgggtcctgcccacctacaacaaccacatctacaagcaaatctccagcgagacaggagccaccaacgacaaccactacttcggctacagcaccccctgggggtattttgactttaacagattccactgccacttttcaccacgtgactggcagcgactcatcaacaacaactggggattc

SEQ ID NO: 5098 - protein, 738 aa, Adeno-associated virus 10
MAADGYLPDWLEDNLSEGIREWWDLKPGAPKPKANQQKQDDGRGLVLPGYKYLGPFNGLDKGEPVNAADAAALEHDKAYDQQLKAGDNPYLRYNHADAEFQERLQEDTSFGGNLGRAVFQAKKRVLEPLGLVEEAAKTAPGKKRPVEPSPQRSPDSSTGIGKKGQQPAKKRLNFGQTGESESVPDPQPIGEPPAGPSGLGSGTMAAGGGAPMADNNEGADGVGSSSGNWHCDSTWLGDRVITTSTRTWALPTYNNHLYKQISNGTSGGSTNDNTYFGYSTPWGYFDFNRFHCHFSPRDWQRLINNNWGFRPKRLSFKLFNIQVKEVTQNEGTKTIANNLTSTIQVFTDSEYQLPYVLGSAHQGCLPPFPADVFMIPQYGYLTLNNGSQAVGRSSFYCLEYFPSQMLRTGNNFEFSYTFEDVPFHSSYAHSQSLDRLMNPLIDQYLYYLSRTQSTGGTQGTQQLLFSQAGPANMSAQAKNWLPGPCYRQQRVSTTLSQNNNSNFAWTGATKYHLNGRDSLVNPGVAMATHKDDEERFFPSSGVLMFGKQGAGRDNVDYSSVMLTSEEEIKTTNPVATEQYGVVADNLQQANTGPIVGNVNSQGALPGMVWQNRDVYLQGPIWAKIPHTDGNFHPSPLMGGFGLKHPPPQILIKNTPVPADPPTTFSQAKLASFITQYSTGQVSVEIEWELQKENSKRWNPEIQYTSNYYKSTNVDFAVNTEGTYSEPRPIGTRYLTRNL

SEQ ID NO: 5099 - protein, 738 aa, Adeno-associated virus 10; identical to SEQ ID NO: 4793

SEQ ID NO: 5100 - DNA, 258 bp, Adeno-associated virus 11
ggtaattcctccggaaattggcattgcgattccacatggctgggcgacagagtcatcaccaccagcacccgaacctgggccctgccaacctacaacaaccacctctacaaacaaatctccagcgcttcaacgggggccagcaacgacaaccactactttggctacagcaccccctgggggtattttgactttaacagattccactgccacttctcaccacgtgactggcagcgactcatcaacaacaactggggattc

SEQ ID NO: 5101 - DNA, 255 bp, Adeno-associated virus 12
ggtaattcctccggaaattggcattgcgattccacatggctgggcgaccgagtcattaccaccagcacccggacttgggccctgcccacctacaacaaccacctctacaagcaaatctccagccaatcgggtgccaccaacgacaaccactacttcggctacagcaccccttgggggtattttgatttcaacagattccactgccatttctcaccacgtgactggcagcgactcatcaacaacaactggggattc

SEQ ID NO: 5102 - DNA, 2208 bp, Adeno-associated virus 2
atggctgccgatggttatcttccagattggctcgaggacactctctctgaaggaataagacagtggtggaagctcaaacctggcccaccaccaccaaagcccgcagagcggcataaggacgacagcaggggtcttgtgcttcctgggtacaagtacctcggacccttcaacggactcgacaagggagagccggtcaacgaggcagacgccgcggccctcgagcacgacaaagcctacgaccggcagctcgacagcggagacaacccgtacctcaagtacaaccacgccgacgcggagtttcaggagcgccttaaagaagatacgtcttttgggggcaacctcggacgagcagtcttccaggcgaaaaagagggttcttgaacctctgggcctggttgaggaacctgttaagacggctccgggaaaaaagaggccggtagagcactctcctgtggagccagactcctcctcgggaaccggaaaggcgggccagcagcctgcaagaaaaagattgaattttggtcagactggagacgcagactcagtacctgacccccagcctctcggacagccaccagcagccccctctggtctgggaactaatacgatggctacaggcagtggcgcaccaatggcagacaataacgagggcgccgacggagtgggtaattcctcgggaaattggcattgcgattccacatggatgggcgacagagtcatcaccaccagcacccgaacctgggccctgcccacctacaacaaccacctctacaaacaaatttccagccaatcaggagcctcgaacgacaatcactactttggctacagcaccccttgggggtattttgacttcaacagattccactgccacttttcaccacgtgactggcaaagactcatcaacaacaactggggattccgacccaagagactcaacttcaagctctttaacattcaagtcaaagaggtcacgcagaatgacggtacgacgacgattgccaataaccttaccagcacggttcaggtgtttactgactcggagtaccagctcccgtacgtcctcggctcggcgcatcaaggatgcctcccgccgttcccagcagacgtcttcatggtgccacagtatggatacctcaccctgaacaacgggagtcaggcagtaggacgctcttcattttactgcctggagtactttccttctcagatgctgcgtaccggaaacaactttaccttcagctacacttttgaggacgttcctttccacagcagctacgctcacagccagagtctggaccgtctcatgaatcctctcatcgaccagtacctgtattacttgagcagaacaaacactccaagtggaaccaccacgcagtcaaggcttcagttttctcaggccggagcgagtgacattcgggaccagtctaggaactggcttcctggaccctgttaccgccagcagcgagtatcaaagacatctgcggataacaacaacagtgaatactcgtggactggagctaccaagtaccacctcaatggcagagactctctggtgaatccgggcccggccatggcaagccacaaggacgatgaagaaaagttttttcctcagagcggggttctcatctttgggaagcaaggctcagagaaaacaaatgtggacattgaaaaggtcatgattacagacgaagaggaaatcaggacaaccaatcccgtggctacggagcagtatggttctgtatctaccaacctccagagaggcaacagacaagcagctaccgcagatgtcaacacacaaggcgttcttccaggcatggtctggcaggacagagatgtgtaccttcaggggcccatctgggcaaagattccacacacggacggacattttcacccctctcccctcatgggtggattcggacttaaacaccctcctccacagattctcatcaagaacaccccggtacctgcgaatccttcgaccaccttcagtgcggcaaagtttgcttccttcatcacacagtactccacgggacaggtcagcgtggagatcgagtgggagctgcagaaggaaaacagcaaacgctggaatcccgaaattcagtacacttccaactacaacaagtctgttaatgtggactttactgtggacactaatggcgtgtattcagagcctcgccccattggcaccagatacctgactcgtaatctgtaa

SEQ ID NO: 5103 - protein, 735 aa, Adeno-associated virus 2 [sequence omitted]

SEQ ID NO: 5104 - protein, 621 aa, Adeno-associated virus 2
MPGFYEIVIKVPSDLDGHLPGISDSFVNWVAEKEWELPPDSDMDLNLIEQAPLTVAEKLQRDFLTEWRRVSKAPEALFFVQFEKGESYFHMHVLVETTGVKSMVLGRFLSQIREKLIQRIYRGIEPTLPNWFAVTKTRNGAGGGNKVVDECYIPNYLLPKTQPELQWAWTNMEQYLSACLNLTERKRLVAQHLTHVSQTQEQNKENQNPNSDAPVIRSKTSARYMELVGWLVDKGITSEKQWIQEDQASYISFNAASNSRSQIKAALDNAGKIMSLTKTAPDYLVGQQPVEDISSNRIYKILELNGYDPQYAASVFLGWATKKFGKRNTIWLFGPATTGKTNIAEAIAHTVPFYGCVNWTNENFPFNDCVDKMVIWWEEGKMTAKVVESAKAILGGSKVRVDQKCKSSAQIDPTPVIVTSNTNMCAVIDGNSTTFEHQQPLQDRMFKFELTRRLDHDFGKVTKQEVKDFFRWAKDHVVEVEHEFYVKKGGAKKRPAPSDADISEPKRVRESVAQPSTSDAEASINYADRYQNKCSRHVGMNLMLFPCRQCERMNQNSNICFTHGQKDCLECFPVSESQPVSVVKKAYQKLCYIHHIMGKVPDACTACDLVNVDLDDCIFEQ

SEQ ID NO: 5105 - DNA, 4675 bp, Adeno-associated virus 2
ttggccactccctctctgcgcgctcgctcgctcactgaggccgggcgaccaaaggtcgcccgacgcccgggctttgcccgggcggcctcagtgagcgagcgagcgcgcagagagggagtggccaactccatcactaggggttcctggaggggtggagtcgtgacgtgaattacgtcatagggttagggaggtcctgtattagaggtcacgtgagtgttttgcgacattttgcgacaccatgtggtcacgctgggtatttaagcccgagtgagcacgcagggtctccattttgaagcgggaggtttgaacgcgcagccgccatgccggggttttacgagattgtgattaaggtccccagcgaccttgacgggcatctgcccggcatttctgacagctttgtgaactgggtggccgagaaggaatgggagttgccgccagattctgacatggatctgaatctgattgagcaggcacccctgaccgtggccgagaagctgcagcgcgactttctgacggaatggcgccgtgtgagtaaggccccggaggcccttttctttgtgcaatttgagaagggagagagctacttccacatgcacgtgctcgtggaaaccaccggggtgaaatccatggttttgggacgtttcctgagtcagattcgcgaaaaactgattcagagaatttaccgcgggatcgagccgactttgccaaactggttcgcggtcacaaagaccagaaatggcgccggaggcgggaacaaggtggtggatgagtgctacatccccaattacttgctccccaaaacccagcctgagctccagtgggcgtggactaatatggaacagtatttaagcgcctgtttgaatctcacggagcgtaaacggttggtggcgcagcatctgacgcacgtgtcgcagacgcaggagcagaacaaagagaatcagaatcccaattctgatgcgccggtgatcagatcaaaaacttcagccaggtacatggagctggtcgggtggctcgtggacaaggggattacctcggagaagcagtggatccaggaggaccaggcctcatacatctccttcaatgcggcctccaactcgcggtcccaaatcaaggctgccttggacaatgcgggaaagattatgagcctgactaaaaccgcccccgactacctggtgggccagcagcccgtggaggacatttccagcaatcggatttataaaattttggaactaaacgggtacgatccccaatatgcggcttccgtctttctgggatgggccacgaaaaagttcggcaagaggaacaccatctggctgtttgggcctgcaactaccgggaagaccaacatcgcggaggccatagcccacactgtgcccttctacgggtgcgtaaactggaccaatgagaactttcccttcaacgactgtgtcgacaagatggtgatctggtgggaggaggggaagatgaccgccaaggtcgtggagtcggccaaagccattctcggaggaagcaaggtgcgcgtggaccagaaatgcaagtcctcggcccagatagacccgactcccgtgatcgtcacctccaacaccaacatgtgcgccgtgattgacgggaactcaacgaccttcgaacaccagcagccgttgcaagaccggatgttcaaatttgaactcacccgccgtctggatcatgactttgggaaggtcaccaagcaggaagtcaaagactttttccggtgggcaaaggatcacgtggttgaggtggagcatgaattctacgtcaaaaagggtggagccaagaaaagacccgcccccagtgacgcagatataagtgagcccaaacgggtgcgcgagtcagttgcgcagccatcgacgtcagacgcggaagcttcgatcaactacgcagacaggtaccaaaacaaatgttctcgtcacgtgggcatgaatctgatgctgtttccctgcagacaatgcgagagaatgaatcagaattcaaatatctgcttcactcacggacagaaagactgtttagagtgctttcccgtgtcagaatctcaacccgtttctgtcgtcaaaaaggcgtatcagaaactgtgctacattcatcatatcatgggaaaggtgccagacgcttgcactgcctgcgatctggtcaatgtggatttggatgactgcatctttgaacaataaatgatttaaatcaggtatggctgccgatggttatcttccagattggctcgaggacactctctctgaaggaataagacagtggtggaagctcaaacctggcccaccaccaccaaagcccgcagagcggcataaggacgacagcaggggtcttgtgcttcctgggtacaagtacctcggacccttcaacggactcgacaagggagagccggtcaacgaggcagacgccgcggccctcgagcacgtacaaagcctacgaccggcagctcgacagcggagacaacccgtacctcaagtacaaccacgccgacgcggagtttcaggagcgccttaaagaagatacgtcttttgggggcaacctcggacgagcagtcttccaggcgaaaaagagggttcttgaacctctgggcctggttgaggaacctgttaagacggctccgggaaaaaagaggccggtagagcactctcctgtggagccagactcctcctcgggaaccggaaaggcgggccagcagcctgcaagaaaaagattgaattttggtcagactggagacgcagactcagtacctgacccccagcctctcggacagccaccagcagccccctctggtctgggaactaatacgatggctacaggcagtggcgcaccaatggcagacaataacgagggcgccgacggagtgggtaattcctccggaaattggcattgcgattccacatggatgggcgacagagtcatcaccaccagcacccgaacctgggccctgcccacctacaacaaccacctctacaaacaaatttccagccaatcaggagcctcgaacgacaatcactactttggctacagcaccccttgggggtattttgacttcaacagattccactgccacttttcaccacgtgactggcaaagactcatcaacaacaactggggattccgacccaagagactcaacttcaagctctttaacattcaagtcaaagaggtcacgcagaatgacggtacgacgacgattgccaataaccttaccagcacggttcaggtgtttactgactcggagtaccagctcccgtacgtcctcggctcggcgcatcaaggatgcctcccgccgttcccagcagacgtcttcatggtgccacagtatggatacctcaccctgaacaacgggagtcaggcagtaggacgctcttcattttactgcctggagtactttccttctcagatgctgcgtaccggaaacaactttaccttcagctacacttttgaggacgttcctttccacagcagctacgctcacagccagagtctggaccgtctcatgaatcctctcatcgaccagtacctgtattacttgagcagaacaaacactccaagtggaaccaccacgcagtcaaggcttcagttttctcaggccggagcgagtgacattcgggaccagtctaggaactggcttcctggaccctgttaccgccagcagcgagtatcaaagacatctgcggataacaacaacagtgaatactcgtggactggagctaccaagtaccacctcaatggcagagactctctggtgaatccggccatggcaagccacaaggacgatgaagaaaagttttttcctcagagcggggttctcatctttgggaagcaaggctcagagaaaacaaatgtgaacattgaaaaggtcatgattacagacgaagaggaaatcggaacaaccaatcccgtggctacggagcagtatggttctgtatctaccaacctccagagaggcaacagacaagcagctaccgcagatgtcaacacacaaggcgttcttccaggcatggtctggcaggacagagatgtgtaccttcaggggcccatctgggcaaagattccacacacggacggacattttcacccctctcccctcatgggtggattcggacttaaacaccctcctccacagattctcatcaagaacaccccggtacctgcgaatccttcgaccaccttcagtgcggcaaagtttgcttccttcatcacacagtactccacgggacacggtcagcgtggagatcgagtgggagctgcagaaggaaaacagcaaacgctggaatcccgaaattcagtacacttccaactacaacaagtctgttaatcgtggacttaccgtggatactaatggcgtgtattcagagcctcgccccattggcaccagatacctgactcgtaatctgtaattgcttgttaatcaataaaccgtttaattcgtttcagttgaactttggtctctgcgtatttctttcttatctagtttccatggctacgtagataagtagcatggcgggttaatcattaactacaaggaacccctagtgatggagttggccactccctctctgcgcgctcgctcgctcactgaggccgggcgaccaaaggtcgcccgacgcccgggctttgcccgggcggcctcagtgagcgagcgagcgcgcagagagggagtggccaa

SEQ ID NO: 5106 - DNA, 4679 bp, Adeno-associated virus 2
ttggccactccctctctgcgcgctcgctcgctcactgaggccgggcgaccaaaggtcgcccgacgcccgggctttgcccgggcggcctcagtgagcgagcgagcgcgcagagagggagtggccaactccatcactaggggttcctggaggggtggagtcgtgacgtgaattacgtcatagggttagggaggtcctgtattagaggtcacgtgagtgttttgcgacattttgcgacaccatgtggtcacgctgggtatttaagcccgagtgagcacgcagggtctccattttgaagcgggaggtttgaacgcgcagccgccatgccggggttttacgagattgtgattaaggtccccagcgaccttgacgggcatctgcccggcatttctgacagctttgtgaactgggtggccgagaaggaatgggagttgccgccagattctgacatggatctgaatctgattgagcaggcacccctgaccgtggccgagaagctgcagcgcgactttctgacggaatggcgccgtgtgagtaaggccccggaggcccttttctttgtgcaatttgagaagggagagagctacttccacatgcacgtgctcgtggaaaccaccggggtgaaatccatggttttgggacgtttcctgagtcagattcgcgaaaaactgattcagagaatttaccgcgggatcgagccgactttgccaaactggttcgcggtcacaaagaccagaaatggcgccggaggcgggaacaaggtggtggatgagtgctacatccccaattacttgctccccaaaacccagcctgagctccagtgggcgtggactaatatggaacagtatttaagcgcctgtttgaatctcacggagcgtaaacggttggtggcgcagcatctgacgcacgtgtcgcagacgcaggagcagaacaaagagaatcagaatcccaattctgatgcgccggtgatcagatcaaaaacttcagccaggtacatggagctggtcgggtggctcgtggacaaggggattacctcggagaagcagtggatccaggaggaccaggcctcatacatctccttcaatgcggcctccaactcgcggtcccaaatcaaggctgccttggacaatgcgggaaagattatgagcctgactaaaaccgcccccgactacctggtgggccagcagcccgtggaggacatttccagcaatcggatttataaaattttggaactaaacgggtacgatccccaatatgcggcttccgtctttctgggatgggccacgaaaaagttcggcaagaggaacaccatctggctgtttgggcctgcaactaccgggaagaccaacatcgcggaggccatagcccacactgtgcccttctacgggtgcgtaaactggaccaatgagaactttcccttcaacgactgtgtcgacaagatggtgatctggtgggaggaggggaagatgaccgccaaggtcgtggagtcggccaaagccattctcggaggaagcaaggtgcgcgtggaccagaaatgcaagtcctcggcccagatagacccgactcccgtgatcgtcacctccaacaccaacatgtgcgccgtgattgacgggaactcaacgaccttcgaacaccagcagccgttgcaagaccggatgttcaaatttgaactcacccgccgtctggatcatgactttgggaaggtcaccaagcaggaagtcaaagactttttccggtgggcaaaggatcacgtggttgaggtggagcatgaattctacgtcaaaaagggtggagccaagaaaagacccgcccccagtgacgcagatataagtgagcccaaacgggtgcgcgagtcagttgcgcagccatcgacgtcagacgcggaagcttcgatcaactacgcagacaggtaccaaaacaaatgttctcgtcacgtgggcatgaatctgatgctgtttccctgcagacaatgcgagagaatgaatcagaattcaaatatctgcttcactcacggacagaaagactgtttagagtgctttcccgtgtcagaatctcaacccgtttctgtcgtcaaaaaggcgtatcagaaactgtgctacattcatcatatcatgggaaaggtgccagacgcttgcactgcctgcgatctggtcaatgtggatttggatgactgcatctttgaacaataaatgatttaaatcaggtatggctgccgatggttatcttccagattggctcgaggacactctctctgaaggaataagacagtggtggaagctcaaacctggcccaccaccaccaaagcccgcagagcggcataaggacgacagcaggggtcttgtgcttcctgggtacaagtacctcggacccttcaacggactcgacaagggagagccggtcaacgaggcagacgccgcggccctcgagcacgacaaagcctacgaccggcagctcgacagcggagacaacccgtacctcaagtacaaccacgccgacgcggagtttcaggagcgccttaaagaagatacgtcttttgggggcaacctcggacgagcagtcttccaggcgaaaaagagggttcttgaacctctgggcctggttgaggaacctgttaagacggctccgggaaaaaagaggccggtagagcactctcctgtggagccagactcctcctcgggaaccggaaaggcgggccagcagcctgcaagaaaaagattgaattttggtcagactggagacgcagactcagtacctgacccccagcctctcggacagccaccagcagccccctctggtctgggaactaatacgatggctacaggcagtggcgcaccaatggcagacaataacgagggcgccgacggagtgggtaattcctccggaaattggcattgcgattccacatggatgggcgacagagtcatcaccaccagcacccgaacctgggccctgcccacctacaacaaccacctctacaaacaaatttccagccaatcaggagcctcgaacgacaatcactactttggctacagcaccccttgggggtattttgacttcaacagattccactgccacttttcaccacgtgactggcaaagactcatcaacaacaactggggattccgacccaagagactcaacttcaagctctttaacattcaagtcaaagaggtcacgcagaatgacggtacgacgacgattgccaataaccttaccagcacggttcaggtgtttactgactcggagtaccagctcccgtacgtcctcggctcggcgcatcaaggatgcctcccgccgttcccagcagacgtcttcatggtgccacagtatggatacctcaccctgaacaacgggagtcaggcagtaggacgctcttcattttactgcctggagtactttccttctcagatgctgcgtaccggaaacaactttaccttcagctacacttttgaggacgttcctttccacagcagctacgctcacagccagagtctggaccgtctcatgaatcctctcatcgaccagtacctgtattacttgagcagaacaaacactccaagtggaaccaccacgcagtcaaggcttcagttttctcaggccggagcgagtgacattcgggaccagtctaggaactggcttcctggaccctgttaccgccagcagcgagtatcaaagacatctgcggataacaacaacagtgaatactcgtggactggagctaccaagtaccacctcaatggcagagactctctggtgaatccgggcccggccatggcaagccacaaggacgatgaagaaaagttttttcctcagagcggggttctcatctttgggaagcaaggctcagagaaaacaaatgtggacattgaaaaggtcatgattacagacgaagaggaaatcaggacaaccaatcccgtggctacggagcagtatggttctgtatctaccaacctccagagaggcaacagacaagcagctaccgcagatgtcaacacacaaggcgttcttccaggcatggtctggcaggacagagatgtgtaccttcaggggcccatctgggcaaagattccacacacggacggacattttcacccctctcccctcatgggtggattcggacttaaacaccctcctccacagattctcatcaagaacaccccggtacctgcgaatccttcgaccaccttcagtgcggcaaagtttgcttccttcatcacacagtactccacgggacaggtcagcgtggagatcgagtgggagctgcagaaggaaaacagcaaacgctggaatcccgaaattcagtacacttccaactacaacaagtctgttaatgtggactttactgtggacactaatggcgtgtattcagagcctcgccccattggcaccagatacctgactcgtaatctgtaattgcttgttaatcaataaaccgtttaattcgtttcagttgaactttggtctctgcgtatttctttcttatctagtttccatggctacgtagataagtagcatggcgggttaatcattaactacaaggaacccctagtgatggagttggccactccctctctgcgcgctcgctcgctcactgaggccgggcgaccaaaggtcgcccgacgcccgggctttgcccgggcggcctcagtgagcgagcgagcgcgcagagagggagtggccaa

SEQ ID NO: 5107 - protein, 735 aa, Adeno-associated virus 2
MAADGYLPDWLEDTLSEGIRQWWKLKPGPPPPKPAERHKDDSRGLVLPGYKYLGPFNGLDKGEPVNEADAAALEHDKAYDRQLDSGDNPYLKYNHADAEFQERLKEDTSFGGNLGRAVFQAKKRVLEPLGLVEEPVKTAPGKKRPVEHSPVEPDSSSGTGKAGQQPARKRLNFGQTGDADSVPDPQPLGEPPATPAAVGPTTMASGGGAPMADNNEGADGVGNASGNWHCDSTWLGDRVITTSTRTWALPTYNNHLYKQISSASTGASNDNHYFGYSTPWGYFDFNRFHCHFSPRDWQRLINNNWGFRPKRLNFKLFNIQVKEVTQNDGTTTIANNLTSTVQVFTDSEYQLPYVLGSAHQGCLPPFPADVFMIPQYGYLTLNNGSQAVGRSSFYCLEYFPSQMLRTGNNFTFSYTFEDVPFHSSYAHSQSLDRLMNPLIDQYLYYLNRTQNQSGSAQDKALLFSRGSPAGMSVQPKNWLPGPCYRQQRVSKTKTDNNNSNFTWTGASKYNLNGRESIINPGTAMASHKDDKDKFFPMSGVMIFGKESAGASNTALDNVMITDEEEIKATNPVATERFGTVAVNFQSSSTDPATGDVHVMGALPGMVWQDRDVYLQGPIWAKIPHTDGHFHPSPLMGGFGLKHPPPQILIKNTPVPANPPAEFSATKFASFITQYSTGQVSVEIEWELQKENSKRWNPEVQYTSNYAKSANVDFTVDNNGLYTEPRPIGTRYLTRP

SEQ ID NO: 5108 - protein, 740 aa, Adeno-associated virus 2
MAADGYLPDWLEDTLSEGIRQWWKLKPGPPPPKPAERHKDDSRGLVLPGYKYLGPFNGLDKGEPVNAADAAALEHDKAYDRQLDSGDNPYLKYNHADAEFQERLKEDTSFGGNLGRAVFQAKKRVLEPLGLVEEPVKTAPGKKRPVEHSPVEPDSSSGTGKAGQQPARKRLNFGQTGDADSVPDPQPLGQPPAAPSGLGTNTMATGSGAPMADNNEGADGVGNSSGNWHCDSTWMGDRVITTSTRTWALPTYNNHLYKQISSQSGASNDNHYFGYSTPWGYFDFNRFHCHFSPRDWQRLINNNWGFRPKRLNFKLFNIQVKEVTQNDGTTTIANNLTSTVQVFTDSEYQLPYVLGSAHQGCLPPFPADVFMVPQYGYLTLNNGSQAVGRSSFYCLEYFPSQMLRTGNNFTFSYTFEDVPFHSSYAHSQSLDRLMNPLIDQYLYYLSRTNTPSGTTTQSGLQFSQAGASDIRDQSRNWLPGPCYRQQRVSKTSADNNNSEYSWTGATKYHLNGRDSLVNPGPAMASHKDDEEKFFPQSGVLIFGKQGSEKTNVDIEKVMITDEEEIRTTNPVATEQYGSVSTNLQRGNRQAATADVNTQGVLPGMVWQDRDVYLQGPIWAKIPHTDGHFHPSPLMGGFGLKHPPPQILIKNTPVPANPSTTFSAAKFASFITQYSTGQVSVEIEWELQKENSKRWNPEIQYTSNYNKSVNVDFTVDTNGVYSEPRPIGTRYLTRNLLLAAA

SEQ ID NO: 5109 - protein, 734 aa, Adeno-associated virus 2
MAADGYLPDWLEDTLSEGIRQWWKLKPGPPPPKPAERHKDDSRGLVLPGYKYLGPFNGLDKGEPVNEADAAALEHDKAYDRQLDSGDNPYLKYNHADAEFQERLKEDTSFGGNLGRAVFQAKKRVLEPLGLVEEPVKTAPGKKRPVEHSPVEPDSSSGTGKAGQQPARKRLNFGQTGDADSVPDPQPLGQPPAAPSGLGTNTMATGSGAPMADNNEGADGVGNSSGNWHCDSTWMGDRVITTSTRTWALPTYNNHLYKQISSQSGASNDNHYFGYSTPWGYFDFNRFHCHFSPRDWQRLINNNWGFRPKRLNFKLFNIQVKEVTQNDGTTTIANNLTSTVQVFTDSEYQLPYVLGSAHQGCLPPFPADVFMVPQYGYLTLNNGSQAVGRSSFYCLEYFPSQMLRTGNNFTFSYTFEDVPFHSSYAHSQSLDRLMNPLIDQYLYYLSRTNTPSGTTTQSGLQFSQAGASDIRDQSRNWLPGPCYRQQRVSKTSADNNNSEYSWTGATMYHLNGRDSLVNPGPAMASHKDDEEKFFPQSGVLIFGKQGSEKTNVDIEKVMITDEEEIRTTNPVATEQYGSVSTNLQRGNRQAATADVNTQGVLPGMVWQDRDVYLQGPIWAKIPHTDGHFHPSPLMGGFGLKHPPPQILIKNTPVPANPSTTFSAAKFASFITQYSTGQVSVEIEWELQKENSKRWNPEIQYTSNYNKSINVDFTVDTNGVYSEPRPIGTRYLTRN

SEQ ID NO: 5110 - protein, 734 aa, Adeno-associated virus 2
MAADGYLPDWLEDTLSEGIRQWWKLKPGPPPPKPAERHKDDSRGLVLPGYKYLGPFNGLDKGEPVNEADAAALEHDKAYDRQLDSGDNPYLKYNHADAEFQERLKEDTSFGGNLGRAVFQAKKRVLEPLGLVEEPVKTAPGKKRPVEHSPVEPDSSSGTGKAGQQPARKRLNFGQTGDADSVPDPQPLGQPPAAPSGLGTNTMATGSGAPMADNNEGADGVGNSSGNWHCDSTWMGDRVITTSTRTWALPTYNNHLYKQISSQSGASNDNHYFGYSTPWGYFDFNRFHCHFSPRDWQRLINNNWGFRPKRLNFKLFNIQVKEVTQNDGTTTIANNLTSTVQVFTDSEYQLPYVLGSAHQGCLPPFPADVFMVPQYGYLTLNNGSQAVGRSSFYCLEYFPSQMLRTGNNFTFSYTFEDVPFHSSYAHSQSLDRLMNPLIDQYLYYLSRTNTPSGTTTQSGLQFSQAGASDIRDQSRNWLPGPCYRQQRVSKTSADNNNSEYSWTGATKYHLNGRDSLVNPGPAMASHKDDEEKFFPQSGVLIFGKQGSEKTNVDIEKVMITDEEEIRTTNPVATEQYGSVSTNLQRGNRQAATADVNTQGVLPGMVWQDRDVYLQGPIWAKIPHTDGHFHPSPLMGGFGLKHPPPQILIKNTPVPANPSTTFSEAKFASFITQYSTGQVSVEIEWELQKENSKRWNPEIQYTSNYNKSVNVDFTVDTNGVYSEPRPIGTRYLTRN

SEQ ID NO: 5111 - protein, 739 aa, Adeno-associated virus 2
MAADGYLPDWLEDTLSEGIRQWWKLKPGPPPPKPAERHKDDSRGLVLPGYKYLGPFNGLDKGEPVNEADAAALEHDKAYDRQLDSGDNPYLKYNHADAEFQERLKEDTSFGGNLGRAVFQAKKRVLEPLGLVEEPVKTAPGKKRPVEHSPVEPDSSSGTGKAGQQPARKRLNFGQTGDADSVPDPQPLGQPPAAPSGLGTNTMATGSGAPMADNNEGADGVGNSSGNWHCDSTWMGDRVITTSTRTWALPTYNNHLYKQISSQSGASNDNHYFGYSTPWGYFDFNRFHCHFSPRDWQRLINNNWGFRPKRLNFKLFNIQVKEVTQNDGTTTIANNLTSTVQVFTDSEYQLPYVLGSAHQGCLPPFPADVFMVPQYGYLTLNNGSQAVGRSSFYCLEYFPSQMLRTGNNFTFSYTFEDVPFHSSYAHSQSLDRLMNPLIDQYLYYLSRTNTPSGTTTQSGLQFSQAGASDIRDQSRNWLPGPCYRQQRVSKTSADNNNSEYSWTGATKYHLNGRDSLVNPGPAMASHKDDEEKFFPQSGVLIFGKQGSEKTNVDIEKVMITDEEEIRTTNPVATEQYGSVSTNLQRGNRQAATADVNTQGVLPGMVWQDRDVYLQGPIWAKIPHTDGHFHPSPLMGGFGLKHPPPQILIKNTPVPANPSTTFSAAKFASFITQYSTGQVSVEIEWELQKENSKRWNPEIQYTSNYNKSVNVDFTVDTNGVYSEPRPIGTRYLTRNLLLAA

SEQ ID NO: 5112 - protein, 725 aa, Adeno-associated virus 2
MAADGYLPDWLEDTLSEGIRQWWKLKPGPPPPKPAERHKDDSRGLVLPGYKYLGPFNGLDKGEPVNEADAAALEHDKAYDRQLDSGDNPYLKYNHADAEFQERLKEDTSFGGNLGRAVFQAKKRVLEPLGLVEEPVKTAPGKKRPVEHSPVEPDSSSGTGKAGQQPARKRLNFGQTGDADSVPDPQPLGQPPAAPSGLGTNTMATGSGAPMADNNEGADGVGNSSGNWHCDSTWMGDRVITTSTRTWALPTYNNHLYKQISSQSGASNDNHYFGYSTPWGYFDFNRFHCHFSPRDWQRLINNNWGFRPKRLNFKLFNIQVKEVTQNDGTTTIANNLTSTVQVFTDSEYQLPYVLGSAHQGCLPPFPADVFMVPQYGYLTLNNGSQAVGRSSFYCLEYFPSQMLRTGNNFTFSYTFEDVPFHSSYAHSQSLDRLMNPLIDQYLYYLSRTNTPSGTTTQSGLQFSQAGASDIRDQSRNWLPGPCYRQQRVSKTSADNNNSEYSWTGATKYHLNGRDSLVNPGPAMASHKDDEEKFFPQSGVLIFGKQGSEKTNVDIEKVMITDEEEIRTTNPVATEQYGSVSTNLQRGNRQAATADVNTQGVLPGMVWQDRDVYLQGPIWAKIPHTDGHFHPSPLMGGFGLKHPPPQILIKNTPVPANPSTTFSAAKFASFITQYSTGQVSVEIEWELQKENSKRWNPEIQYTSNYNKSVNVDFTVDTNGVYSEPRP

SEQ ID NO: 5113 - protein, 707 aa, Adeno-associated virus 2
MAADGYLPDWLEDTLSEGIRQWWKLKPGPPPPKPAERHKDDSRGLVLPGYKYLGPFNGLDKGEPVNEADAAALEHDKAYDRQLDSGDNPYLKYNHADAEFQERLKEDTSFGGNLGRAVFQAKKRVLEPLGLVEEPVKTAPGKKRPVEHSPVEPDSSSGTGKAGQQPARKRLNFGQTGDADSVPDPQPLGQPPAAPSGLGTNTMATGSGAPMADNNEGADGVGNSSGNWHCDSTWMGDRVITTSTRTWALPTYNNHLYKQISSQSGASNDNHYFGYSTPWGYFDFNRFHCHFSPRDWQRLINNNWGFRPKRLNFKLFNIQVKEVTQNDGTTTIANNLTSTVQVFTDSEYQLPYVLGSAHQGCLPPFPADVFMVPQYGYLTLNNGSQAVGRSSFYCLEYFPSQMLRTGNNFTFSYTFEDVPFHSSYAHSQSLDRLMNPLIDQYLYYLSRTNTPSGTTTQSGLQFSQAGASDIRDQSRNWLPGPCYRQQRVSKTSADNNNSEYSWTGATKYHLNGRDSLVNPGPAMASHKDDEEKFFPQSGVLIFGKQGSEKTNVDIEKVMITDEEEIRTTNPVATEQYGSCIYQPPERQQTSSYRRCQHTRRSSRHGLAGQRCVPSGAHLGKDSTHGRTFSPLSPHGWIRTTPSSTDSHQEHPGTCESFDHLQCGKVCFLHHTVLHGTGQRGDRVRAAEGKQQTLESRNSVHFQLQQVC

SEQ ID NO: 5114 - protein, 739 aa, Adeno-associated virus 2; identical to SEQ ID NO: 5111

SEQ ID NO: 5115 - protein, 737 aa, Adeno-associated virus 2
MASDGYLPDWLEDNLSEGIREWWDLKPGAPKPKANQQKQDDGRGLVLPGYKYLGPFNGLDKGEPVNAADAAALEHDKAYDQQLKAGDNPYLRYNHADAEFQERLQEDTSFGGNLGRAVFQAKKRVLEPFGLVEEGAKTAPGKKRPVEQSPQEPDSSSGIGKTGQQPAKKRLNFGQTGDSESVPDPQPLGEPPATPAAVGPTTMASGGGAPMADNNEGADGVGNASGNWHCDSTWLGDRVITTSTRTWALPTYNNHLYKQISSASTGASNDNHYFGYSTPWGYFDFNRFHCHFSPRDWQRLINNNWGFRPKRLNFKLFNIQVKEVTTNDGTTTIANNLTSTVQVFTDSEYQLPYVLGSAHQGCLPPFPADVFMVPQYGYLTLNNGSQAVGRSSFYCLEYFPSQMLRTGNNFTFSYTFEDVPFHSSYAHSQSLDRLMNPLIDQYLYYLSRTNTPSGTTTQSGLQFSQAGASDIRDQSRNWLPGPCYRQQRVSKTSADNNNSEYSWTGATKYHLNGRDSLVNPGPAMASHKDDEEKFFPQSGVLIFGKQGSEKTNVDIEKVMITDEEEIRTTNPVATEQYGSVSTNLQRGNRQAATADVNTQGVLPGMVWQDRDVYLQGPIWAKIPHTDGHFHPSPLMGGFGLKHHPPQILIKNTPVPANPSTTFSAAKFASFITQYSTGQVSVEIEWELQKENSKRWNPEIQYTSNYNKSVNVDFTVDTNGVYSEPRPIGTRYLTRNLL

SEQ ID NO: 5116 - protein, 741 aa, Adeno-associated virus 2
MAADGYLPDWLEDTLSEGIREWWALKPGAPKPKANQQKQDDGRGLVLPGYKYLGPFNGLDKGEPVNEADAAALEHDKAYDQQLQAGDNPYLRYNHADAEFQERLQEDTSFGGNLGRAVFQAKKRVLEPLGLVEEPVKTAPGKKRPVEHSPVEPDSSSGTGKSGQQPARKRLNFGQTGDADSVPDPQPLGQPPAAPSGLGTNTMATGSGAPMADNNEGADGVGNSSGNWHCDSTWMGDRVITTSTRTWALPTYNNHLYKQISSQSGASNDNHYFGYSTPWGYFDFNRFHCHFSPRDWQRLINNNWGFRPKRLNFKLFNIQVKEVTQNDGTTTIANNLTSTVQVFTDSEYQLPYVLGSAHQGCLPPFPADVFMVPQYGYLTLNNGSQAVGRSSFYCLEYFPSQMLRTGNNFTFSYTFEDVPFHSSYAHSQSLDRLMNPLIDQYLYYLSRTNTPSGTTTQSGLQFSQAGASDIRDQSRNWLPGPCYRQQRVSKTSADNNNSEYSWTGATKYHLNGRDSLVNPGPAMASHKDDEEKFFPQSGVLIFGKQGSEKTNVDIEKVMITDEEEIRTTNPVATEQYGSVSTNLQRGNLANHNNTTNARQAATADVNTQGVLPGMVWQDRDVYLQGPIWAKIPHTDGHFHPSPLMGGFGLKHPPPQILIKNTPVPANPSTTFSAAKFASFITQYSTGQVSVEIEWELQKENSKRWNPEIQYTSNYNKSINVDFTVDTNGVYSEPRPIGTRYL

SEQ ID NO: 5117 - protein, 730 aa, Adeno-associated virus 2
MASDGYLPDWLEDNLSEGIREWWDLKPGAPKPKANQQKQDDGRGLVLPGYKYLGPFNGLDKGEPVNAADAAALEHDKAYDQQLKAGDNPYLRYNHADAEFQERLQEDTSFGGNLGRAVFQAKKRVLEPFGLVEEGAKTAPGKKRPVEQSPQEPDSSSGIGKTGQQPAKKRLNFGQTGDSESVPDPQPLGEPPATPAAVGPTTMASGGGAPMADNNEGADGVGNASGNWHCDSTWLGDRVITTSTRTWALPTYNNHLYKQISSASTGASNDNHYFGYSTPWGYFDFNRFHCHFSPRDWQRLINNNWGFRPKRLNFKLFNIQVKEVTTNDGVTTIANNLTSTVQVFSDSEYQLPYVLGSAHQGCLPPFPADVFMIPQYGYLTLNNGSQAVGRSSFYCLEYFPSQMLRTGNNFTFSYTFEDVPFHSSYAHSQSLDRLMNPLIDQYLYYLNRTQNQSGSAQNNDLLFSRGSPAGMSVQPKNWLPGPCYRQQRVSKTKTDNNNSNFTWTGASKYNLNGRESIINPGTAMASHKDDKDKFFPMSGVMIFGKESAGASNTALDNVMITDEEEIKATNPVATERFGTVAVNLQSSSTDPATGDVHVMGALPGMVWQDRDVYLQGPIWAKIPHTDGHFHPSPLMGGFGLKNPPPQILIKNTPVPANPPAEFSATKFASFITQYSTGQVSVEIEWELQKENSKRWNPEVQYTSNYAKSANVDFTVDNNGLYTEPRPIGTR

SEQ ID NO: 5118 - protein, 735 aa, Adeno-associated virus 2
  MOD_RES (239)..(239): Any amino acid
MASDGYLPDWLEDNLSEGIREWWDLKPGAPKPKANQQKQDDGRGLVLPGYKYLGPFNGLDKGEPVNAADAAALEHDKAYDQQLKAGDNPYLRYNHADAEFQERLQEDTSFGGNLGRAVFQAKKRVLEPFGLVEEGAKTAPGKKRPVEQSPQEPDSSSGIGKTGQQPAKKRLNFGQTGDSESVPDPQPLGEPPATPAAVGPTTMASGGGAPMADNNEGADGVGNASGNWHCDSTWLGDRXITTSTRTWALPTYNNHLYKQISSASTGASNDNHYFGYSTPWGYFDFNRFHCHFSPRDWQRLINNNWGFRPKRLNFKLFNIQVKEVTTNDGVTTIANNLTSTVQVFSDSEYQLPYVLGSAHQGCLPPFPADVFMIPQYGYLTLNNGSQAVGRSSFYCLEYFPSQMLRTGNNFTFSYTFEDVPFHSSYAHSQSLDRLMNPLIDQYLYYLNRTQNQSGSAQNNDLLFSRGSPAGMSVQPKNWLPGPCYRQQRVSKTKTDNNNSNFTWTGASKYNLNGRESIINPGTAMASHKDDKDKFFPMSGVMIFGKESAGASNTALDNVMITDEEEIKATNPVATERFGTVAVNLQSSSTDPATGDVHVMGALPGMVWQDRDVYLQGPIWAKIPHTDGHFHPSPLMGGFGLKNPPPQILIKNTPVPANPPAEFSATKFASFITQYSTGQVSVEIEWELQKENSKRWNPEVQYTSNYAKSANVDFTVDNNGLYTEPRPIGTRYLTRP

SEQ ID NO: 5119 - protein, 733 aa, Adeno-associated virus 2
MASDGYLPDWLEDNLSEGIREWWDLKPGAPKPKANQQKQDDGRGLVLPGYKYLGPFNGLDKGEPVNAADAAALEHDKAYDQQLKAGDNPYLRYNHADAEFQERLQEDTSFGGNLGRAVFLAKKRVLEPFGLVEEGAKTAPGKKRPVEQSPQEPDSSSGIGKTGQQPAKKRLNFGQTGDSESVPDPQPLGEPPATPAAVGPTTMASGGGAPMADNNEGADGVGNASGNWHCDSTWLGDRVITTSTRTWALPTYNNHLYKQISSASTGASNDNHYFGYSTPWGYFDFNRFHCHFSPRDWQRLINNNWGFRPKRLNFKLFNIQVKEVTTNDGVTTIANNLTSTVQVFSDSEYQLPYVLGSAHQGCLPPFPADVFMIPQYGYLTLNNGSQAVGRSSFYCLEYFPSQMLRTGNNFTFSYTFEDVPFHSSYAHSQSLDRLMNPLIDQYLYYLNRTQNQSGSAQNNDLLFSRGSPAGMSVQPKNWLPGPCYRQQRVSKTKTDNNNSNFTWTGASKYNLNGRESIINPGTAMASHKDDKDKFFPMSGVMIFGKESAGASNTALDNVMITDEEEIKATNPVATERFGTVAVNLQSSSTDPATGDVHVMGALPGMVWQDRDVYLQGPIWAKIPHTDGHFHPSPLMGGFGLKNPPPQILIKNTPVPANPPAEFSATKFASFITQYSTGQVSVEIEWELQKENSKRWNPEVQYTSNYAKSANVDFTVDNNGLYTEPRPIGTRYLT

SEQ ID NO: 5120 - protein, 734 aa, Adeno-associated virus 2
MAADGYLPDWLEDTLSEGIRQWWKLKPGPPPPKPAERHKDDSRGLVLPGCKYLGPFNGLDKGEPVNEADAAALEHDKAYDRQLDSGDNPYLKYNHADAEFQERLKEDTSFGGNLGRAVFQAKKRVLEPLGLVEEPVKTAPGKKRPVEHSPVEPDSSSGTGKAGQQPARKRLNFGQTGDADSVPDPQPLGQPPAAPSGLGTNTMATGSGAPMADNNEGADGVGNSSGNWHCDSTWMGDRVITTSTRTWALPTYNNHLYKQISSQSGASNDNHYFGYSTPWGYFDFNRFHCHFSPRDWQRLINNNWGFRPKRLNFKLFNIQVKEVTQNDGTTTIANNLTSTVQVFSDSEYQLPYVLGSAHQGCLPPFPADVFMIPQYGYLTLNNGSQAVGRSSFYCLEYFPSQMLRTGNNFTFNYTFEDVPFHSSYAHSQSLDRLMNPLIDQYLYYLNRTQNQSGSAQNNDLLFSRGSPAGMSVQPKNWLPGPCYRQQRVSKTKTDNNNSNFTWTGASKYNLNGRESIINPGTAMASHKDDKDKFFPMSGVMIFGKESAGASNTALDNVMITDEEEIKATNPVATERFGTVAVNLQSSSTDPATGDVHVMGALPGMVWQDRDVYLQGPIWAKIPHTDGHFHPSPLMGGFGLKNPPPQILIKNTPVPANPPAEFSATKFASFITQYSTGQVSVEIEWELQKENSKRWNPEVQYTSNYAKSANVDFTVDNNGLYTEPRPIGTRYLTRP

SEQ ID NO: 5121 - protein, 734 aa, Adeno-associated virus 2
MAADGYLPDWLEDTLSEGIRQWWKLKPGPPPPKPAERHKDDSRGLVLPGYKYLGPFNGLDKGEPVNEADAAALEHDKAYDRQLDSGDNPYLKYNHADAEFQERLKEDTSFGGNLGRAVFQAKKRVLEPLGLVEEPVKTAPGKKRPVEHSPVEPDSSSGTGKAGQQPARKRLNFGQTGDADSVPDPQPLGQPPAAPSGLGTNTMATGSGAPMADNNEGADGVGNSSGNWHCDSTWMGDRVITTSTRTWALSTYNNHLYKQISSQSGASNDNHYFGYSTPWGYFDFNRFHCHFSPRDWQRLINNNWGFRPKRLNFKLFNIQVKEVTQNDGTTTIANNLTSTVQVFTDSEYQLPYVLGSAHQGCLPPFPADVFMVPQYGYLTLNNGSQAVGRSSFYCLEYFPSQMLRTGNNFTFSYTFEDVPFHSSYAHSQSLDRLMNPLIDQYLYYLSRTNTPSGTTTQSRLQFSQAGASDIRDQSRNWLPGPCYRQQRVSKTSADNNNSEYSWTGATKYHLNGRDSLVNPGPAMASHKDDEEKFFPQSGVLIFGKQGSEKTNVDIEKVMITDEEEIRTTNPVATEQYGSVSTNLQRGNRQAATADVNTQGVLPGMVWQDRDVYLQGPIWAKIPHTDGHFHPSPLMGGFGLKHPPPQILIKNTPVPANPSTTFSAAKFASFITQYSTGQVSVEIEWELQKENSKRWNPEIQYTSNYNKSINVDFTVDTNGVYSEPRPIGTRYLTRN

SEQ ID NO: 5122 - protein, 738 aa, Adeno-associated virus 2
MAADGYLPDWLEDTLSEGIRQWWKLKPGPPPPKPAERHKDDSRGLVLPGYKYLGPFNGLDKGEPVNEADAAALEHDKAYDRQLDGGDNPYLKYNHADAEFQERLKEDTSFGGNLGRAVFQAKKRVLEPLGLVEEPVKTAPGKKRPVEHSPVEPDSSSGTGKAGQQPARKRLNFGQTGDADSVPDPQPLGQPPAAPSGLGTNTMATGSGAPMADNNEGADGVGNSSGNWHCDSTWMGDRVITTSTRTWALPTYNNHLYKQISSQSGASNDNHYFGYSTPWGYFDFNRFHCHFSPRDWQRLINNNWGFRPKRLNFKLFNIQVKEVTQNDGTTTIANNLTSTVQVFTDSEYQLPYVLGSAHQGCLPPFPADVFMVPQYGYLTLNNGSQAVGRSSFYCLEYFPSQMLRTGNNFTFSYTFEDVPFHSSYAHSQSLDRLMNPLIDQYLYYLSRTNTPSGTTTQSGLQFSQAGASDIRDQSRNWLPGPCYRQQRVSKTSADNNNSEYSWTGATKYHLNGRDSLVNPGPAMASHKDDEEKFFPQSGVLIFGKQGSEKTNVDIEKVMITDEEEIRTTNPVATEQYGSVSTNLQRGNRQAATADVNTQGVLPGMVWQDRDVYLQGPIWAKIPHTDGHFHPSPLMGGFGLKHPPPQILIKNTPVPANPSTTFSAAKFASFITQYSTGQVSVEIEWELQKENSKRWNPEIQYTSNYNKSVNVDFTVDTNGVYSEPRPIGTRYLTRNLLRP

SEQ ID NO: 5123 - protein, 736 aa, Adeno-associated virus 3; identical to SEQ ID NO: 4757

SEQ ID NO: 5124 - DNA, 4726 bp, Adeno-associated virus 3
ttggccactccctctatgcgcactcgctcgctcggtggggcctggcgaccaaaggtcgccagacggacgtgctttgcacgtccggccccaccgagcgagcgagtgcgcatagagggagtggccaactccatcactagaggtatggcagtgacgtaacgcgaagcgcgcgaagcgagaccacgcctaccagctgcgtcagcagtcaggtgacccttttgcgacagtttgcgacaccacgtggccgctgagggtatatattctcgagtgagcgaaccaggagctccattttgaccgcgaaatttgaacgagcagcagccatgccggggttctacgagattgtcctgaaggtcccgagtgacctggacgagcgcctgccgggcatttctaactcgtttgttaactgggtggccgagaaggaatgggacgtgccgccggattctgacatggatccgaatctgattgagcaggcacccctgaccgtggccgaaaagcttcagcgcgagttcctggtggagtggcgccgcgtgagtaaggccccggaggccctcttttttgtccagttcgaaaagggggagacctacttccacctgcacgtgctgattgagaccatcggggtcaaatccatggtggtcggccgctacgtgagccagattaaagagaagctggtgacccgcatctaccgcggggtcgagccgcagcttccgaactggttcgcggtgaccaaaacgcgaaatggcgccgggggcgggaacaaggtggtggacgactgctacatccccaactacctgctccccaagacccagcccgagctccagtgggcgtggactaacatggaccagtatttaagcgcctgtttgaatctcgcggagcgtaaacggctggtggcgcagcatctgacgcacgtgtcgcagacgcaggagcagaacaaagagaatcagaaccccaattctgacgcgccggtcatcaggtcaaaaacctcagccaggtacatggagctggtcgggtggctggtggaccgcgggatcacgtcagaaaagcaatggattcaggaggaccaggcctcgtacatctccttcaacgccgcctccaactcgcggtcccagatcaaggccgcgctggacaatgcctccaagatcatgagcctgacaaagacggctccggactacctggtgggcagcaacccgccggaggacattaccaaaaatcggatctaccaaatcctggagctgaacgggtacgatccgcagtacgcggcctccgtcttcctgggctgggcgcaaaagaagttcgggaagaggaacaccatctggctctttgggccggccacgacgggtaaaaccaacatcgcggaagccatcgcccacgccgtgcccttctacggctgcgtaaactggaccaatgagaactttcccttcaacgattgcgtcgacaagatggtgatctggtgggaggagggcaagatgacggccaaggtcgtggagagcgccaaggccattctgggcggaagcaaggtgcgcgtggaccaaaagtgcaagtcatcggcccagatcgaacccactcccgtgatcgtcacctccaacaccaacatgtgcgccgtgattgacgggaacagcaccaccttcgagcatcagcagccgctgcaggaccggatgtttgaatttgaacttacccgccgtttggaccatgactttgggaaggtcaccaaacaggaagtaaaggactttttccggtgggcttccgatcacgtgactgacgtggctcatgagttctacgtcagaaagggtggagctaagaaacgccccgcctccaatgacgcggatgtaagcgagccaaaacgggagtgcacgtcacttgcgcagccgacaacgtcagacgcggaagcaccggcggactacgcggacaggtaccaaaacaaatgttctcgtcacgtgggcatgaatctgatgctttttccctgtaaaacatgcgagagaatgaatcaaatttccaatgtctgttttacgcatggtcaaagagactgtggggaatgcttccctggaatgtcagaatctcaacccgtttctgtcgtcaaaaagaagacttatcagaaactgtgtccaattcatcatatcctgggaagggcacccgagattgcctgttcggcctgcgatttggccaatgtggacttggatgactgtgtttctgagcaataaatgacttaaaccaggtatggctgctgacggttatcttccagattggctcgaggacaacctttctgaaggcattcgtgagtggtgggctctgaaacctggagtccctcaacccaaagcgaaccaacaacaccaggacaaccgtcggggtcttgtgcttccgggttacaaatacctcggacccggtaacggactcgacaaaggagagccggtcaacgaggcggacgcggcagccctcgaacacgacaaagcttacgaccagcagctcaaggccggtgacaacccgtacctcaagtacaaccacgccgacgccgagtttcaggagcgtcttcaagaagatacgtcttttgggggcaaccttggcagagcagtcttccaggccaaaaagaggatccttgagcctcttggtctggttgaggaagcagctaaaacggctcctggaaagaagggggctgtagatcagtctcctcaggaaccggactcatcatctggtgttggcaaatcgggcaaacagcctgccagaaaaagactaaatttcggtcagactggagactcagagtcagtcccagaccctcaacctctcggagaaccaccagcagcccccacaagtttgggatctaatacaatggcttcaggcggtggcgcaccaatggcagacaataacgagggtgccgatggagtgggtaattcctcaggaaattggcattgcgattcccaatggctgggcgacagagtcatcaccaccagcaccagaacctgggccctgcccacttacaacaaccatctctacaagcaaatctccagccaatcaggagcttcaaacgacaaccactactttggctacagcaccccttgggggtattttgactttaacagattccactgccacttctcaccacgtgactggcagcgactcattaacaacaactggggattccggcccaagaaactcagcttcaagctcttcaacatccaagttagaggggtcacgcagaacgatggcacgacgactattgccaataaccttaccagcacggttcaagtgtttacggactcggagtatcagctcccgtacgtgctcgggtcggcgcaccaaggctgtctcccgccgtttccagcggacgtcttcatggtccctcagtatggatacctcaccctgaacaacggaagtcaagcggtgggacgctcatccttttactgcctggagtacttcccttcgcagatgctaaggactggaaataacttccaattcagctataccttcgaggatgtaccttttcacagcagctacgctcacagccagagtttggatcgcttgatgaatcctcttattgatcagtatctgtactacctgaacagaacgcaaggaacaacctctggaacaaccaaccaatcacggctgctttttagccaggctgggcctcagtctatgtctttgcaggccagaaattggctacctgggccctgctaccggcaacagagactttcaaagactgctaacgacaacaacaacagtaactttccttggacagcggccagcaaatatcatctcaatggccgcgactcgctggtgaatccaggaccagctatggccagtcacaaggacgatgaagaaaaatttttccctatgcacggcaatctaatatttggcaaagaagggacaacggcaagtaacgcagaattagataatgtaatgattacggatgaagaagagattcgtaccaccaatcctgtggcaacagagcagtatggaactgtggcaaataacttgcagagctcaaatacagctcccacgactggaactgtcaatcatcagggggccttacctggcatggtgtggcaagatcgtgacgtgtaccttcaaggacctatctgggcaaagattcctcacacggatggacactttcatccttctcctctgatgggaggctttggactgaaacatccgcctcctcaaatcatgatcaaaaatactccggtaccggcaaatcctccgacgactttcagcccggccaagtttgcttcatttatcactcagtactccactggacaggtcagcgtggaaattgagtgggagctacagaaagaaaacagcaaacgttggaatccagagattcagtacacttccaactacaacaagtctgttaatgtggactttactgtagacactaatggtgtttatagtgaacctcgccctattggaacccggtatctcacacgaaacttgtgaatcctggttaatcaataaaccgtttaattcgtttcagttgaactttggctcttgtgcacttctttatctttatcttgtttccatggctactgcgtagataagcagcggcctgcggcgcttgcgcttcgcggtttacaactgctggttaatatttaactctcgccatacctctagtgatggagttggccactccctctatgcgcactcgctcgctcggtggggcctggcgaccaaaggtcgccagacggacgtgctttgcacgtccggccccaccgagcgagcgagtgcgcatagagggagtggccaa

SEQ ID NO: 5125 - protein, 736 aa, Adeno-associated virus 3A; identical to SEQ ID NO: 4757

SEQ ID NO: 5126 - protein, 624 aa, Adeno-associated virus 3A
MPGFYEIVLKVPSDLDERLPGISNSFVNWVAEKEWDVPPDSDMDPNLIEQAPLTVAEKLQREFLVEWRRVSKAPEALFFVQFEKGETYFHLHVLIETIGVKSMVVGRYVSQIKEKLVTRIYRGVEPQLPNWFAVTKTRNGAGGGNKVVDDCYIPNYLLPKTQPELQWAWTNMDQYLSACLNLAERKRLVAQHLTHVSQTQEQNKENQNPNSDAPVIRSKTSARYMELVGWLVDRGITSEKQWIQEDQASYISFNAASNSRSQIKAALDNASKIMSLTKTAPDYLVGSNPPEDITKNRIYQILELNGYDPQYAASVFLGWAQKKFGKRNTIWLFGPATTGKTNIAEAIAHAVPFYGCVNWTNENFPFNDCVDKMVIWWEEGKMTAKVVESAKAILGGSKVRVDQKCKSSAQIEPTPVIVTSNTNMCAVIDGNSTTFEHQQPLQDRMFEFELTRRLDHDFGKVTKQEVKDFFRWASDHVTDVAHEFYVRKGGAKKRPASNDADVSEPKRECTSLAQPTTSDAEAPADYADRYQNKCSRHVGMNLMLFPCKTCERMNQISNVCFTHGQRDCGECFPGMSESQPVSVVKKKTYQKLCPIHHILGRAPEIACSACDLANVDLDDCVSEQ

SEQ ID NO: 5127 - protein, 736 aa, Adeno-associated virus 3B
MAADGYLPDWLEDNLSEGIREWWALKPGVPQPKANQQHQDNRRGLVLPGYKYLGPGNGLDKGEPVNEADAAALEHDKAYDQQLKAGDNPYLKYNHADAEFQERLQEDTSFGGNLGRAVFQAKKRILEPLGLVEEAAKTAPGKKRPVDQSPQEPDSSSGVGKSGKQPARKRLNFGQTGDSESVPDPQPLGEPPAAPTSLGSNTMASGGGAPMADNNEGADGVGNSSGNWHCDSQWLGDRVITTSTRTWALPTYNNHLYKQISSQSGASNDNHYFGYSTPWGYFDFNRFHCHFSPRDWQRLINNNWGFRPKKLSFKLFNIQVKEVTQNDGTTTIANNLTSTVQVFTDSEYQLPYVLGSAHQGCLPPFPADVFMVPQYGYLTLNNGSQAVGRSSFYCLEYFPSQMLRTGNNFQFSYTFEDVPFHSSYAHSQSLDRLMNPLIDQYLYYLNRTQGTTSGTTNQSRLLFSQAGPQSMSLQARNWLPGPCYRQQRLSKTANDNNNSNFPWTAASKYHLNGRDSLVNPGPAMASHKDDEEKFFPMHGNLIFGKEGTTASNAELDNVMITDEEEIRTTNPVATEQYGTVANNLQSSNTAPTTRTVNDQGALPGMVWQDRDVYLQGPIWAKIPHTDGHFHPSPLMGGFGLKHPPPQIMIKNTPVPANPPTTFSPAKFASFITQYSTGQVSVEIEWELQKENSKRWNPEIQYTSNYNKSVNVDFTVDTNGVYSEPRPIGTRYLTRNL

SEQ ID NO: 5128 - protein, 624 aa, Adeno-associated virus 3B
MPGFYEIVLKVPSDLDEHLPGISNSFVNWVAEKEWELPPDSDMDPNLIEQAPLTVAEKLQREFLVEWRRVSKAPEALFFVQFEKGETYFHLHVLIETIGVKSMVVGRYVSQIKEKLVTRIYRGVEPQLPNWFAVTKTRNGAGGGNKVVDDCYIPNYLLPKTQPELQWAWTNMDQYLSACLNLAERKRLVAQHLTHVSQTQEQNKENQNPNSDAPVIRSKTSARYMELVGWLVDRGITSEKQWIQEDQASYISFNAASNSRSQIKAALDNASKIMSLTKTAPDYLVGSNPPEDITKNRIYQILELNGYDPQYAASVFLGWAQKKFGKRNTIWLFGPATTGKTNIAEAIAHAVPFYGCVNWTNENFPFNDCVDKMVIWWEEGKMTAKVVESAKAILGGSKVRVDQKCKSSAQIEPTPVIVTSNTNMCAVIDGNSTTFEHQQPLQDRMFKFELTRRLDHDFGKVTKQEVKDFFRWASDHVTDVAHEFYVRKGGAKKRPASNDADVSEPKRQCTSLAQPTTSDAEAPADYADRYQNKCSRHVGMNLMLFPCKTCERMNQISNVCFTHGQRDCGECFPGMSESQPVSVVKKKTYQKLCPIHHILGRAPEIACSACDLANVDLDDCVSEQ

SEQ ID NO: 5129 - DNA, 4722 bp, Adeno-associated virus 3B
tggccactccctctatgcgcactcgctcgctcggtggggcctggcgaccaaaggtcgccagacggacgtgctttgcacgtccggccccaccgagcgagcgagtgcgcatagagggagtggccaactccatcactagaggtatggcagtgacgtaacgcgaagcgcgcgaagcgagaccacgcctaccagctgcgtcagcagtcaggtgacccttttgcgacagtttgcgacaccacgtggccgctgagggtatatattctcgagtgagcgaaccaggagctccattttgaccgcgaaatttgaacgagcagcagccatgccggggttctacgagattgtcctgaaggtcccgagtgacctggacgagcacctgccgggcatttctaactcgtttgttaactgggtggccgagaaggaatgggagctgccgccggattctgacatggatccgaatctgattgagcaggcacccctgaccgtggccgaaaagcttcagcgcgagttcctggtggagtggcgccgcgtgagtaaggccccggaggccctcttttttgtccagttcgaaaagggggagacctacttccacctgcacgtgctgattgagaccatcggggtcaaatccatggtggtcggccgctacgtgagccagattaaagagaagctggtgacccgcatctaccgcggggtcgagccgcagcttccgaactggttcgcggtgaccaaaacgcgaaatggcgccgggggcgggaacaaggtggtggacgactgctacatccccaactacctgctccccaagacccagcccgagctccagtgggcgtggactaacatggaccagtatttaagcgcctgtttgaatctcgcggagcgtaaacggctggtggcgcagcatctgacgcacgtgtcgcagacgcaggagcagaacaaagagaatcagaaccccaattctgacgcgccggtcatcaggtcaaaaacctcagccaggtacatggagctggtcgggtggctggtggaccgcgggatcacgtcagaaaagcaatggattcaggaggaccaggcctcgtacatctccttcaacgccgcctccaactcgcggtcccagatcaaggccgcgctggacaatgcctccaagatcatgagcctgacaaagacggctccggactacctggtgggcagcaacccgccggaggacattaccaaaaatcggatctaccaaatcctggagctgaacgggtacgatccgcagtacgcggcctccgtcttcctgggctgggcgcaaaagaagttcgggaagaggaacaccatctggctctttgggccggccacgacgggtaaaaccaacatcgcggaagccatcgcccacgccgtgcccttctacggctgcgtaaactggaccaatgagaactttcccttcaacgattgcgtcgacaagatggtgatctggtgggaggagggcaagatgacggccaaggtcgtggagagcgccaaggccattctgggcggaagcaaggtgcgcgtggaccaaaagtgcaagtcatcggcccagatcgaacccactcccgtgatcgtcacctccaacaccaacatgtgcgccgtgattgacgggaacagcaccaccttcgagcatcagcagccgctgcaggaccggatgtttaaatttgaacttacccgccgtttggaccatgactttgggaaggtcaccaaacaggaagtaaaggactttttccggtgggcttccgatcacgtgactgacgtggctcatgagttctacgtcagaaagggtggagctaagaaacgccccgcctccaatgacgcggatgtaagcgagccaaaacggcagtgcacgtcacttgcgcagccgacaacgtcagacgcggaagcaccggcggactacgcggacaggtaccaaaacaaatgttctcgtcacgtgggcatgaatctgatgctttttccctgtaaaacatgcgagagaatgaatcaaatttccaatgtctgttttacgcatggtcaaagagactgtggggaatgcttccctggaatgtcagaatctcaacccgtttctgtcgtcaaaaagaagacttatcagaaactgtgtccaattcatcatatcctgggaagggcacccgagattgcctgttcggcctgcgatttggccaatgtggacttggatgactgtgtttctgagcaataaatgacttaaaccaggtatggctgctgacggttatcttccagattggctcgaggacaacctttctgaaggcattcgtgagtggtgggctctgaaacctggagtccctcaacccaaagcgaaccaacaacaccaggacaaccgtcggggtcttgtgcttccgggttacaaatacctcggacccggtaacggactcgacaaaggagagccggtcaacgaggcggacgcggcagccctcgaacacgacaaagcttacgaccagcagctcaaggccggtgacaacccgtacctcaagtacaaccacgccgacgccgagtttcaggagcgtcttcaagaagatacgtcttttgggggcaaccttggcagagcagtcttccaggccaaaaagaggatccttgagcctcttggtctggttgaggaagcagctaaaacggctcctggaaagaagaggcctgtagatcagtctcctcaggaaccggactcatcatctggtgttggcaaatcgggcaaacagcctgccagaaaaagactaaatttcggtcagactggcgactcagagtcagtcccagaccctcaacctctcggagaaccaccagcagcccccacaagtttgggatctaatacaatggcttcaggcggtggcgcaccaatggcagacaataacgagggtgccgatggagtgggtaattcctcaggaaattggcattgcgattcccaatggctgggcgacagagtcatcaccaccagcaccagaacctgggccctgcccacttacaacaaccatctctacaagcaaatctccagccaatcaggagcttcaaacgacaaccactactttggctacagcaccccttgggggtattttgactttaacagattccactgccacttctcaccacgtgactggcagcgactcattaacaacaactggggattccggcccaagaaactcagcttcaagctcttcaacatccaagttaaagaggtcacgcagaacgatggcacgacgactattgccaataaccttaccagcacggttcaagtgtttacggactcggagtatcagctcccgtacgtgctcgggtcggcgcaccaaggctgtctcccgccgtttccagcggacgtcttcatggtccctcagtatggatacctcaccctgaacaacggaagtcaagcggtgggacgctcatccttttactgcctggagtacttcccttcgcagatgctaaggactggaaataacttccaattcagctataccttcgaggatgtaccttttcacagcagctacgctcacagccagagtttggatcgcttgatgaatcctcttattgatcagtatctgtactacctgaacagaacgcaaggaacaacctctggaacaaccaaccaatcacggctgctttttagccaggctgggcctcagtctatgtctttgcaggccagaaattggctacctgggccctgctaccggcaacagagactttcaaagactgctaacgacaacaacaacagtaactttccttggacagcggccagcaaatatcatctcaatggccgcgactcgctggtgaatccaggaccagctatggccagtcacaaggacgatgaagaaaaatttttccctatgcacggcaatctaatatttggcaaagaagggacaacggcaagtaacgcagaattagataatgtaatgattacggatgaagaagagattcgtaccaccaatcctgtggcaacagagcagtatggaactgtggcaaataacttgcagagctcaaatacagctcccacgactagaactgtcaatgatcagggggccttacctggcatggtgtggcaagatcgtgacgtgtaccttcaaggacctatctgggcaaagattcctcacacggatggacactttcatccttctcctctgatgggaggctttggactgaaacatccgcctcctcaaatcatgatcaaaaatactccggtaccggcaaatcctccgacgactttcagcccggccaagtttgcttcatttatcactcagtactccactggacaggtcagcgtggaaattgagtgggagctacagaaagaaaacagcaaacgttggaatccagagattcagtacacttccaactacaacaagtctgttaatgtggactttactgtagacactaatggtgtttatagtgaacctcgccctattggaacccggtatctcacacgaaacttgtaatcctggttaatcaataaaccgtttaattcgtttcagttgaactttggctcttgtgcacttcttatcttatcttgtttccatggctactgcgtagataagcagcggcctgcggcgcttgcgcttcgcggtttacaactgctggttaatatttaactctcgccatacctctagtgatggagttggccactccctctatgcgcactcgctcgctcggtggggccggacgtgcaaagcacgtccgtctggcgacctttggtcgccaggccccaccgagcgagcgagtgcgcatagagggagtggccaa

SEQ ID NO: 5130 - DNA, 1800 bp, Adeno-associated virus 4
  modified_base (342)..(342): a, c, t or g
acggctcctggaaagaagagaccgttgattgaatccccccagcagcccgactcctccacgggtatcggcaaaaaaggcaagcagccggctaaaaagaagctcgttttcgaagacgaaactggagcaggcgacggaccccctgagggatcaacttccggagccatgtctgatgacagtgagatgcgtgcagcagctggcggagctgcagtcgagggsggacaaggtgccgatggagtgggtaatgcctcgggtgattggcattgcgattccacctggtctgagggccacgtcacgaccaccagcaccagaacctgggtcttgcccacctacaacaaccacctntacaagcgactcggagagagcctgcagtccaacacctacaacggattctccaccccctggggatactttgacttcaaccgcttccactgccacttctcaccacgtgactggcagcgactcatcaacaacaactggggcatgcgacccaaagccatgcgggtcaaaatcttcaacatccaggtcaaggaggtcacgacgtcgaacggcgagacaacggtggctaataaccttaccagcacggttcagatctttgcggactcgtcgtacgaactgccgtacgtgatggatgcgggtcaagagggcagcctgcctccttttcccaacgacgtctttatggtgccccagtacggctactgtggactggtgaccggcaacacttcgcagcaacagactgacagaaatgccttctactgcctggagtactttccttcgcagatgctgcggactggcaacaactttgaaattacgtacagttttgagaaggtgcctttccactcgatgtacgcgcacagccagagcctggaccggctgatgaaccctctcatcgaccagtacctgtggggactgcaatcgaccaccaccggaaccaccctgaatgccgggactgccaccaccaactttaccaagctgcggcctaccaacttttccaactttaaaaagaactggctgcccgggccttcaatcaagcagcagggcttctcaaagactgccaatcaaaactacaagatccctgccaccgggtcagacagtctcatcaaatacgagacgcacagcactctggacggaagatggagtgccctgacccccggacctccaatggccacggctggacctgcggacagcaagttcagcaacagccagctcatctttgcggggcctaaacagaacggcaacacggccaccgtacccgggactctgatcttcacctctgaggaggagctggcagccaccaacgccaccgatacggacatgtggggcaacctacctggcggtgaccagagcaacagcaacctgccgaccgtggacagactgacagccttgggagccgtgcctggaatggtctggcaaaacagagacatttactaccagggtcccatttgggccaagattcctcataccgatggacactttcacccctcaccgctgattggtgggtttgggctgaaacacccgcctcctcaaatttttatcaagaacaccccggtacctgcgaatcctgcaacgaccttcagctctactccggtaaactccttcattactcagtacagcactggccaggtgtcggtgcagattgactgggagatccagaaggagcggtccaaacgctggaaccccgaggtccagtttacctccaactacggacagcaaaactctctgttgtgggctcccgatgcggctgggaaatacactgagcctagggctatcggtacccgctacctcacccaccacctgtaataa

SEQ ID NO: 5131 - DNA, 2208 bp, Adeno-associated virus 4
  modified_base (750)..(750): a, c, t or g
atgactgacggttaccttccagattggctagaggacaacctctctgaaggcgttcgagagtggtgggcgctgcaacctggagcccctaaacccaaggcaaatcaacaacatcaggacaacgctcggggtcttgtgcttccgggttacaaatacctcggacccggcaacggactcgacaagggggaacccgtcaacgcagcggacgcggcagccctcgagcacgacaaggcctacgaccagcagctcaaggccggtgacaacccctacctcaagtacaaccacgccgacgcggagttccagcagcggcttcagggcgacacatcgtttgggggcaacctcggcagagcagtcttccaggccaaaaagagggttcttgaacctcttggtctggttgagcaagcgggtgagacggctcctggaaagaagagaccgttgattgaatccccccagcagcccgactcctccacgggtatcggcaaaaaaggcaagcagccggctaaaaagaagctcgttttcgaagacgaaactggagcaggcgacggaccccctgagggatcaacttccggagccatgtctgatgacagtgagatgcgtgcagcagctggcggagctgcagtcgagggsggacaaggtgccgatggagtgggtaatgcctcgggtgattggcattgcgattccacctggtctgagggccacgtcacgaccaccagcaccagaacctgggtcttgcccacctacaacaaccacctntacaagcgactcggagagagcctgcagtccaacacctacaacggattctccaccccctggggatactttgacttcaaccgcttccactgccacttctcaccacgtgactggcagcgactcatcaacaacaactggggcatgcgacccaaagccatgcgggtcaaaatcttcaacatccaggtcaaggaggtcacgacgtcgaacggcgagacaacggtggctaataaccttaccagcacggttcagatctttgcggactcgtcgtacgaactgccgtacgtgatggatgcgggtcaagagggcagcctgcctccttttcccaacgacgtctttatggtgccccagtacggctactgtggactggtgaccggcaacacttcgcagcaacagactgacagaaatgccttctactgcctggagtactttccttcgcagatgctgcggactggcaacaactttgaaattacgtacagttttgagaaggtgcctttccactcgatgtacgcgcacagccagagcctggaccggctgatgaaccctctcatcgaccagtacctgtggggactgcaatcgaccaccaccggaaccaccctgaatgccgggactgccaccaccaactttaccaagctgcggcctaccaacttttccaactttaaaaagaactggctgcccgggccttcaatcaagcagcagggcttctcaaagactgccaatcaaaactacaagatccctgccaccgggtcagacagtctcatcaaatacgagacgcacagcactctggacggaagatggagtgccctgacccccggacctccaatggccacggctggacctgcggacagcaagttcagcaacagccagctcatctttgcggggcctaaacagaacggcaacacggccaccgtacccgggactctgatcttcacctctgaggaggagctggcagccaccaacgccaccgatacggacatgtggggcaacctacctggcggtgaccagagcaacagcaacctgccgaccgtggacagactgacagccttgggagccgtgcctggaatggtctggcaaaacagagacatttactaccagggtcccatttgggccaagattcctcataccgatggacactttcacccctcaccgctgattggtgggtttgggctgaaacacccgcctcctcaaatttttatcaagaacaccccggtacctgcgaatcctgcaacgaccttcagctctactccggtaaactccttcattactcagtacagcactggccaggtgtcggtgcagattgactgggagatccagaaggagcggtccaaacgctggaaccccgaggtccagtttacctccaactacggacagcaaaactctctgttgtgggctcccgatgcggctgggaaatacactgagcctagggctatcggtacccgctacctcacccaccacctgtaataa

SEQ ID NO: 5132 - DNA, 1872 bp, Adeno-associated virus 4
atgccggggttctacgagatcgtgctgaaggtgcccagcgacctggacgagcacctgcccggcatttctgactcttttgtgagctgggtggccgagaaggaatgggagctgccgccggattctgacatggacttgaatctgattgagcaggcacccctgaccgtggccgaaaagctgcaacgcgagttcctggtcgagtggcgccgcgtgagtaaggccccggaggccctcttctttgtccagttcgagaagggggacagctacttccacctgcacatcctggtggagaccgtgggcgtcaaatccatggtggtgggccgctacgtgagccagattaaagagaagctggtgacccgcatctaccgcggggtcgagccgcagcttccgaactggttcgcggtgaccaagacgcgtaatggcgccggaggcgggaacaaggtggtggacgactgctacatccccaactacctgctccccaagacccagcccgagctccagtgggcgtggactaacatggaccagtatataagcgcctgtttgaatctcgcggagcgtaaacggctggtggcgcagcatctgacgcacgtgtcgcagacgcaggagcagaacaaggaaaaccagaaccccaattctgacgcgccggtcatcaggtcaaaaacctccgccaggtacatggagctggtcgggtggctggtggaccgcgggatcacgtcagaaaagcaatggatccaggaggaccaggcgtcctacatctccttcaacgccgcctccaactcgcggtcacaaatcaaggccgcgctggacaatgcctccaaaatcatgagcctgacaaagacggctccggactacctggtgggccagaacccgccggaggacatttccagcaaccgcatctaccgaatcctcgagatgaacgggtacgatccgcagtacgcggcctccgtcttcctgggctgggcgcaaaagaagttcgggaagaggaacaccatctggctctttgggccggccacgacgggtaaaaccaacatcgcggaagccatcgcccacgccgtgcccttctacggctgcgtgaactggaccaatgagaactttccgttcaacgattgcgtcgacaagatggtgatctggtgggaggagggcaagatgacggccaaggtcgtagagagcgccaaggccatcctgggcggaagcaaggtgcgcgtggaccaaaagtgcaagtcatcggcccagatcgacccaactcccgtgatcgtcacctccaacaccaacatgtgcgcggtcatcgacggaaactcgaccaccttcgagcaccaacaaccactccaggaccggatgttcaagttcgagctcaccaagcgcctggagcacgactttggcaaggtcaccaagcaggaagtcaaagactttttccggtgggcgtcagatcacgtgaccgaggtgactcacgagttttacgtcagaaagggtggagctagaaagaggcccgcccccaatgacgcagatataagtgagcccaagcgggcctgtccgtcagttgcgcagccatcgacgtcagacgcggaagctccggtggactacgcggacaggtaccaaaacaaatgttctcgtcacgtgggtatgaatctgatgctttttccctgccggcaatgcgagagaatgaatcagaatgtggacatttgcttcacgcacggggtcatggactgtgccgagtgcttccccgtgtcagaatctcaacccgtgtctgtcgtcagaaagcggacgtatcagaaactgtgtccgattcatcacatcatggggagggcgcccgaggtggcctgctcggcctgcgaactggccaatgtggacttggatgactgtgacatggaacaataa

SEQ ID NO: 5133 - DNA, 1611 bp, Adeno-associated virus 4
atgccggggttctacgagatcgtgctgaaggtgcccagcgacctggacgagcacctgcccggcatttctgactcttttgtgagctgggtggccgagaaggaatgggagctgccgccggattctgacatggacttgaatctgattgagcaggcacccctgaccgtggccgaaaagctgcaacgcgagttcctggtcgagtggcgccgcgtgagtaaggccccggaggccctcttctttgtccagttcgagaagggggacagctacttccacctgcacatcctggtggagaccgtgggcgtcaaatccatggtggtgggccgctacgtgagccagattaaagagaagctggtgacccgcatctaccgcggggtcgagccgcagcttccgaactggttcgcggtgaccaagacgcgtaatggcgccggaggcgggaacaaggtggtggacgactgctacatccccaactacctgctccccaagacccagcccgagctccagtgggcgtggactaacatggaccagtatataagcgcctgtttgaatctcgcggagcgtaaacggctggtggcgcagcatctgacgcacgtgtcgcagacgcaggagcagaacaaggaaaaccagaaccccaattctgacgcgccggtcatcaggtcaaaaacctccgccaggtacatggagctggtcgggtggctggtggaccgcgggatcacgtcagaaaagcaatggatccaggaggaccaggcgtcctacatctccttcaacgccgcctccaactcgcggtcacaaatcaaggccgcgctggacaatgcctccaaaatcatgagcctgacaaagacggctccggactacctggtgggccagaacccgccggaggacatttccagcaaccgcatctaccgaatcctcgagatgaacgggtacgatccgcagtacgcggcctccgtcttcctgggctgggcgcaaaagaagttcgggaagaggaacaccatctggctctttgggccggccacgacgggtaaaaccaacatcgcggaagccatcgcccacgccgtgcccttctacggctgcgtgaactggaccaatgagaactttccgttcaacgattgcgtcgacaagatggtgatctggtgggaggagggcaagatgacggccaaggtcgtagagagcgccaaggccatcctgggcggaagcaaggtgcgcgtggaccaaaagtgcaagtcatcggcccagatcgacccaactcccgtgatcgtcacctccaacaccaacatgtgcgcggtcatcgacggaaactcgaccaccttcgagcaccaacaaccactccaggaccggatgttcaagttcgagctcaccaagcgcctggagcacgactttggcaaggtcaccaagcaggaagtcaaagactttttccggtgggcgtcagatcacgtgaccgaggtgactcacgagttttacgtcagaaagggtggagctagaaagaggcccgcccccaatgacgcagatataagtgagcccaagcgggcctgtccgtcagttgcgcagccatcgacgtcagacgcggaagctccggtggactacgcggacagattggctagaggacaacctctctga

SEQ ID NO: 5134 - DNA, 1872 bp, Adeno-associated virus 4; identical to SEQ ID NO: 5132

SEQ ID NO: 5135 - DNA, 1617 bp, Adeno-associated virus 4
  modified_base (162)..(162): a, c, t or g
atgcgtgcagcagctggcggagctgcagtcgagggsggacaaggtgccgatggagtgggtaatgcctcgggtgattggcattgcgattccacctggtctgagggccacgtcacgaccaccagcaccagaacctgggtcttgcccacctacaacaaccacctntacaagcgactcggagagagcctgcagtccaacacctacaacggattctccaccccctggggatactttgacttcaaccgcttccactgccacttctcaccacgtgactggcagcgactcatcaacaacaactggggcatgcgacccaaagccatgcgggtcaaaatcttcaacatccaggtcaaggaggtcacgacgtcgaacggcgagacaacggtggctaataaccttaccagcacggttcagatctttgcggactcgtcgtacgaactgccgtacgtgatggatgcgggtcaagagggcagcctgcctccttttcccaacgacgtctttatggtgccccagtacggctactgtggactggtgaccggcaacacttcgcagcaacagactgacagaaatgccttctactgcctggagtactttccttcgcagatgctgcggactggcaacaactttgaaattacgtacagttttgagaaggtgcctttccactcgatgtacgcgcacagccagagcctggaccggctgatgaaccctctcatcgaccagtacctgtggggactgcaatcgaccaccaccggaaccaccctgaatgccgggactgccaccaccaactttaccaagctgcggcctaccaacttttccaactttaaaaagaactggctgcccgggccttcaatcaagcagcagggcttctcaaagactgccaatcaaaactacaagatccctgccaccgggtcagacagtctcatcaaatacgagacgcacagcactctggacggaagatggagtgccctgacccccggacctccaatggccacggctggacctgcggacagcaagttcagcaacagccagctcatctttgcggggcctaaacagaacggcaacacggccaccgtacccgggactctgatcttcacctctgaggaggagctggcagccaccaacgccaccgatacggacatgtggggcaacctacctggcggtgaccagagcaacagcaacctgccgaccgtggacagactgacagccttgggagccgtgcctggaatggtctggcaaaacagagacatttactaccagggtcccatttgggccaagattcctcataccgatggacactttcacccctcaccgctgattggtgggtttgggctgaaacacccgcctcctcaaatttttatcaagaacaccccggtacctgcgaatcctgcaacgaccttcagctctactccggtaaactccttcattactcagtacagcactggccaggtgtcggtgcagattgactgggagatccagaaggagcggtccaaacgctggaaccccgaggtccagtttacctccaactacggacagcaaaactctctgttgtgggctcccgatgcggctgggaaatacactgagcctagggctatcggtacccgctacctcacccaccacctgtaa

SEQ ID NO: 5136 - DNA, 939 bp, Adeno-associated virus 4
atggagctggtcgggtggctggtggaccgcgggatcacgtcagaaaagcaatggatccaggaggaccaggcgtcctacatctccttcaacgccgcctccaactcgcggtcacaaatcaaggccgcgctggacaatgcctccaaaatcatgagcctgacaaagacggctccggactacctggtgggccagaacccgccggaggacatttccagcaaccgcatctaccgaatcctcgagatgaacgggtacgatccgcagtacgcggcctccgtcttcctgggctgggcgcaaaagaagttcgggaagaggaacaccatctggctctttgggccggccacgacgggtaaaaccaacatcgcggaagccatcgcccacgccgtgcccttctacggctgcgtgaactggaccaatgagaactttccgttcaacgattgcgtcgacaagatggtgatctggtgggaggagggcaagatgacggccaaggtcgtagagagcgccaaggccatcctgggcggaagcaaggtgcgcgtggaccaaaagtgcaagtcatcggcccagatcgacccaactcccgtgatcgtcacctccaacaccaacatgtgcgcggtcatcgacggaaactcgaccaccttcgagcaccaacaaccactccaggaccggatgttcaagttcgagctcaccaagcgcctggagcacgactttggcaaggtcaccaagcaggaagtcaaagactttttccggtgggcgtcagatcacgtgaccgaggtgactcacgagttttacgtcagaaagggtggagctagaaagaggcccgcccccaatgacgcagatataagtgagcccaagcgggcctgtccgtcagttgcgcagccatcgacgtcagacgcggaagctccggtggactacgcggacagattggctagaggacaacctctctga

SEQ ID NO: 5137 - DNA, 1197 bp, Adeno-associated virus 4
atggagctggtcgggtggctggtggaccgcgggatcacgtcagaaaagcaatggatccaggaggaccaggcgtcctacatctccttcaacgccgcctccaactcgcggtcacaaatcaaggccgcgctggacaatgcctccaaaatcatgagcctgacaaagacggctccggactacctggtgggccagaacccgccggaggacatttccagcaaccgcatctaccgaatcctcgagatgaacgggtacgatccgcagtacgcggcctccgtcttcctgggctgggcgcaaaagaagttcgggaagaggaacaccatctggctctttgggccggccacgacgggtaaaaccaacatcgcggaagccatcgcccacgccgtgcccttctacggctgcgtgaactggaccaatgagaactttccgttcaacgattgcgtcgacaagatggtgatctggtgggaggagggcaagatgacggccaaggtcgtagagagcgccaaggccatcctgggcggaagcaaggtgcgcgtggaccaaaagtgcaagtcatcggcccagatcgacccaactcccgtgatcgtcacctccaacaccaacatgtgcgcggtcatcgacggaaactcgaccaccttcgagcaccaacaaccactccaggaccggatgttcaagttcgagctcaccaagcgcctggagcacgactttggcaaggtcaccaagcaggaagtcaaagactttttccggtgggcgtcagatcacgtgaccgaggtgactcacgagttttacgtcagaaagggtggagctagaaagaggcccgcccccaatgacgcagatataagtgagcccaagcgggcctgtccgtcagttgcgcagccatcgacgtcagacgcggaagctccggtggactacgcggacaggtaccaaaacaaatgttctcgtcacgtgggtatgaatctgatgctttttccctgccggcaatgcgagagaatgaatcagaatgtggacatttgcttcacgcacggggtcatggactgtgccgagtgcttccccgtgtcagaatctcaacccgtgtctgtcgtcagaaagcggacgtatcagaaactgtgtccgattcatcacatcatggggagggcgcccgaggtggcctgctcggcctgcgaactggccaatgtggacttggatgactgtgacatggaacaa

SEQ ID NO: 5138 - DNA, 245 bp, Adeno-associated virus 4
ctccatcatctaggtttgcccactgacgtcaatgtgacgtcctagggttagggaggtccctgtattagcagtcacgtgagtgtcgtatttcgcggagcgtagcggagcgcataccaagctgccacgtcacagccacgtggtccgtttgcgacagtttgcgacaccatgtggtcaggagggtatataaccgcgagtgagccagcgaggagctccattttgcccgcgaattttgaacgagcagcagc

SEQ ID NO: 5139 - protein, 313 aa, Adeno-associated virus 4
  MOD_RES (313)..(313): Any amino acid
MELVGWLVDRGITSEKQWIQEDQASYISFNAASNSRSQIKAALDNASKIMSLTKTAPDYLVGQNPPEDISSNRIYRILEMNGYDPQYAASVFLGWAQKKFGKRNTIWLFGPATTGKTNIAEAIAHAVPFYGCVNWTNENFPFNDCVDKMVIWWEEGKMTAKVVESAKAILGGSKVRVDQKCKSSAQIDPTPVIVTSNTNMCAVIDGNSTTFEHQQPLQDRMFKFELTKRLEHDFGKVTKQEVKDFFRWASDHVTEVTHEFYVRKGGARKRPAPNDADISEPKRACPSVAQPSTSDAEAPVDYADRLARGQPLX

SEQ ID NO: 5140 - protein, 399 aa, Adeno-associated virus 4
MELVGWLVDRGITSEKQWIQEDQASYISFNAASNSRSQIKAALDNASKIMSLTKTAPDYLVGQNPPEDISSNRIYRILEMNGYDPQYAASVFLGWAQKKFGKRNTIWLFGPATTGKTNIAEAIAHAVPFYGCVNWTNENFPFNDCVDKMVIWWEEGKMTAKVVESAKAILGGSKVRVDQKCKSSAQIDPTPVIVTSNTNMCAVIDGNSTTFEHQQPLQDRMFKFELTKRLEHDFGKVTKQEVKDFFRWASDHVTEVTHEFYVRKGGARKRPAPNDADISEPKRACPSVAQPSTSDAEAPVDYADRYQNKCSRHVGMNLMLFPCRQCERMNQNVDICFTHGVMDCAECFPVSESQPVSVVRKRTYQKLCPIHHIMGRAPEVACSACELANVDLDDCDMEQ

SEQ ID NO: 5141 - protein, 623 aa, Adeno-associated virus 4
MPGFYEIVLKVPSDLDEHLPGISDSFVSWVAEKEWELPPDSDMDLNLIEQAPLTVAEKLQREFLVEWRRVSKAPEALFFVQFEKGDSYFHLHILVETVGVKSMVVGRYVSQIKEKLVTRIYRGVEPQLPNWFAVTKTRNGAGGGNKVVDDCYIPNYLLPKTQPELQWAWTNMDQYISACLNLAERKRLVAQHLTHVSQTQEQNKENQNPNSDAPVIRSKTSARYMELVGWLVDRGITSEKQWIQEDQASYISFNAASNSRSQIKAALDNASKIMSLTKTAPDYLVGQNPPEDISSNRIYRILEMNGYDPQYAASVFLGWAQKKFGKRNTIWLFGPATTGKTNIAEAIAHAVPFYGCVNWTNENFPFNDCVDKMVIWWEEGKMTAKVVESAKAILGGSKVRVDQKCKSSAQIDPTPVIVTSNTNMCAVIDGNSTTFEHQQPLQDRMFKFELTKRLEHDFGKVTKQEVKDFFRWASDHVTEVTHEFYVRKGGARKRPAPNDADISEPKRACPSVAQPSTSDAEAPVDYADRYQNKCSRHVGMNLMLFPCRQCERMNQNVDICFTHGVMDCAECFPVSESQPVSVVRKRTYQKLCPIHHIMGRAPEVACSACELANVDLDDCDMEQ

SEQ ID NO: 5142 - protein, 537 aa, Adeno-associated virus 4
  MOD_RES (537)..(537): Any amino acid
MPGFYEIVLKVPSDLDEHLPGISDSFVSWVAEKEWELPPDSDMDLNLIEQAPLTVAEKLQREFLVEWRRVSKAPEALFFVQFEKGDSYFHLHILVETVGVKSMVVGRYVSQIKEKLVTRIYRGVEPQLPNWFAVTKTRNGAGGGNKVVDDCYIPNYLLPKTQPELQWAWTNMDQYISACLNLAERKRLVAQHLTHVSQTQEQNKENQNPNSDAPVIRSKTSARYMELVGWLVDRGITSEKQWIQEDQASYISFNAASNSRSQIKAALDNASKIMSLTKTAPDYLVGQNPPEDISSNRIYRILEMNGYDPQYAASVFLGWAQKKFGKRNTIWLFGPATTGKTNIAEAIAHAVPFYGCVNWTNENFPFNDCVDKMVIWWEEGKMTAKVVESAKAILGGSKVRVDQKCKSSAQIDPTPVIVTSNTNMCAVIDGNSTTFEHQQPLQDRMFKFELTKRLEHDFGKVTKQEVKDFFRWASDHVTEVTHEFYVRKGGARKRPAPNDADISEPKRACPSVAQPSTSDAEAPVDYADRLARGQPLX

SEQ ID NO: 5143 - protein, 623 aa, Adeno-associated virus 4; identical to SEQ ID NO: 5141

SEQ ID NO: 5144 - protein, 544 aa, Adeno-associated virus 4
MSDDSEMRAAAGGAAVEGGQGADGVGNASGDWHCDSTWSEGHVTTTSTRTWVLPTYNNHLYKRLGESLQSNTYNGFSTPWGYFDFNRFHCHFSPRDWQRLINNNWGMRPKAMRVKIFNIQVKEVTTSNGETTVANNLTSTVQIFADSSYELPYVMDAGQEGSLPPFPNDVFMVPQYGYCGLVTGNTSQQQTDRNAFYCLEYFPSQMLRTGNNFEITYSFEKVPFHSMYAHSQSLDRLMNPLIDQYLWGLQSTTTGTTLNAGTATTNFTKLRPTNFSNFKKNWLPGPSIKQQGFSKTANQNYKIPATGSDSLIKYETHSTLDGRWSALTPGPPMATAGPADSKFSNSQLIFAGPKQNGNTATVPGTLIFTSEEELAATNATDTDMWGNLPGGDQSNSNLPTVDRLTALGAVPGMVWQNRDIYYQGPIWAKIPHTDGHFHPSPLIGGFGLKHPPPQIFIKNTPVPANPATTFSSTPVNSFITQYSTGQVSVQIDWEIQKERSKRWNPEVQFTSNYGQQNSLLWAPDAAGKYTEPRAIGTRYLTHHL

SEQ ID NO: 5145 - protein, 734 aa, Adeno-associated virus 4; identical to SEQ ID NO: 4791

SEQ ID NO: 5146 - protein, 598 aa, Adeno-associated virus 4
TAPGKKRPLIESPQQPDSSTGIGKKGKQPAKKKLVFEDETGAGDGPPEGSTSGAMSDDSEMRAAAGGAAVEGGQGADGVGNASGDWHCDSTWSEGHVTTTSTRTWVLPTYNNHLYKRLGESLQSNTYNGFSTPWGYFDFNRFHCHFSPRDWQRLINNNWGMRPKAMRVKIFNIQVKEVTTSNGETTVANNLTSTVQIFADSSYELPYVMDAGQEGSLPPFPNDVFMVPQYGYCGLVTGNTSQQQTDRNAFYCLEYFPSQMLRTGNNFEITYSFEKVPFHSMYAHSQSLDRLMNPLIDQYLWGLQSTTTGTTLNAGTATTNFTKLRPTNFSNFKKNWLPGPSIKQQGFSKTANQNYKIPATGSDSLIKYETHSTLDGRWSALTPGPPMATAGPADSKFSNSQLIFAGPKQNGNTATVPGTLIFTSEEELAATNATDTDMWGNLPGGDQSNSNLPTVDRLTALGAVPGMVWQNRDIYYQGPIWAKIPHTDGHFHPSPLIGGFGLKHPPPQIFIKNTPVPANPATTFSSTPVNSFITQYSTGQVSVQIDWEIQKERSKRWNPEVQFTSNYGQQNSLLWAPDAAGKYTEPRAIGTRYLTHHL

SEQ ID NO: 5147 - DNA, 129 bp, Adeno-associated virus 4
ttggccactccctctatgcgcgctcgctcactcactcggccctgcggccagaggccggcagtctggagacctttggtgtccagggcagggccgagtgagtgagcgagcgcgcatagagggagtggccaa

SEQ ID NO: 5148 - DNA, 125 bp, Adeno-associated virus 4
ttggccactccctctatgcgcgctcgctcactcactcggccctggagaccaaaggtctccagactgccggcctctggccggcagggccgagtgagtgagcgagcgcgcatagagggagtggccaa

SEQ ID NO: 5149 - DNA, 4768 bp, Adeno-associated virus 4
  modified_base (3009)..(3009): a, c, t or g
ttggccactccctctatgcgcgctcgctcactcactcggccctggagaccaaaggtctccagactgccggcctctggccggcagggccgagtgagtgagcgagcgcgcatagagggagtggccaactccatcatctaggtttgcccactgacgtcaatgtgacgtcctagggttagggaggtccctgtattagcagtcacgtgagtgtcgtatttcgcggagcgtagcggagcgcataccaagctgccacgtcacagccacgtggtccgtttgcgacagtttgcgacaccatgtggtcaggagggtatataaccgcgagtgagccagcgaggagctccattttgcccgcgaattttgaacgagcagcagccatgccggggttctacgagatcgtgctgaaggtgcccagcgacctggacgagcacctgcccggcatttctgactcttttgtgagctgggtggccgagaaggaatgggagctgccgccggattctgacatggacttgaatctgattgagcaggcacccctgaccgtggccgaaaagctgcaacgcgagttcctggtcgagtggcgccgcgtgagtaaggccccggaggccctcttctttgtccagttcgagaagggggacagctacttccacctgcacatcctggtggagaccgtgggcgtcaaatccatggtggtgggccgctacgtgagccagattaaagagaagctggtgacccgcatctaccgcggggtcgagccgcagcttccgaactggttcgcggtgaccaagacgcgtaatggcgccggaggcgggaacaaggtggtggacgactgctacatccccaactacctgctccccaagacccagcccgagctccagtgggcgtggactaacatggaccagtatataagcgcctgtttgaatctcgcggagcgtaaacggctggtggcgcagcatctgacgcacgtgtcgcagacgcaggagcagaacaaggaaaaccagaaccccaattctgacgcgccggtcatcaggtcaaaaacctccgccaggtacatggagctggtcgggtggctggtggaccgcgggatcacgtcagaaaagcaatggatccaggaggaccaggcgtcctacatctccttcaacgccgcctccaactcgcggtcacaaatcaaggccgcgctggacaatgcctccaaaatcatgagcctgacaaagacggctccggactacctggtgggccagaacccgccggaggacatttccagcaaccgcatctaccgaatcctcgagatgaacgggtacgatccgcagtacgcggcctccgtcttcctgggctgggcgcaaaagaagttcgggaagaggaacaccatctggctctttgggccggccacgacgggtaaaaccaacatcgcggaagccatcgcccacgccgtgcccttctacggctgcgtgaactggaccaatgagaactttccgttcaacgattgcgtcgacaagatggtgatctggtgggaggagggcaagatgacggccaaggtcgtagagagcgccaaggccatcctgggcggaagcaaggtgcgcgtggaccaaaagtgcaagtcatcggcccagatcgacccaactcccgtgatcgtcacctccaacaccaacatgtgcgcggtcatcgacggaaactcgaccaccttcgagcaccaacaaccactccaggaccggatgttcaagttcgagctcaccaagcgcctggagcacgactttggcaaggtcaccaagcaggaagtcaaagactttttccggtgggcgtcagatcacgtgaccgaggtgactcacgagttttacgtcagaaagggtggagctagaaagaggcccgcccccaatgacgcagatataagtgagcccaagcgggcctgtccgtcagttgcgcagccatcgacgtcagacgcggaagctccggtggactacgcggacaggtaccaaaacaaatgttctcgtcacgtgggtatgaatctgatgctttttccctgccggcaatgcgagagaatgaatcagaatgtggacatttgcttcacgcacggggtcatggactgtgccgagtgcttccccgtgtcagaatctcaacccgtgtctgtcgtcagaaagcggacgtatcagaaactgtgtccgattcatcacatcatggggagggcgcccgaggtggcctgctcggcctgcgaactggccaatgtggacttggatgactgtgacatggaacaataaatgactcaaaccagatatgactgacggttaccttccagattggctagaggacaacctctctgaaggcgttcgagagtggtgggcgctgcaacctggagcccctaaacccaaggcaaatcaacaacatcaggacaacgctcggggtcttgtgcttccgggttacaaatacctcggacccggcaacggactcgacaagggggaacccgtcaacgcagcggacgcggcagccctcgagcacgacaaggcctacgaccagcagctcaaggccggtgacaacccctacctcaagtacaaccacgccgacgcggagttccagcagcggcttcagggcgacacaccgtttgggggcaacctcggcagagcagtcttccaggccaaaaagagggttcttgaacctcttggtctggttgagcaagcgggtgagacggctcctggaaagaagagaccgttgattgaatccccccagcagcccgactcctccacgggtatcggcaaaaaaggcaagcagccggctaaaaagaagctcgttttcgaagacgaaactggagcaggcgacggaccccctgagggatcaacttccggagccatgtctgatgacagtgagatgcgtgcagcagctggcggagctgcagtcgagggsggacaaggtgccgatggagtgggtaatgcctcgggtgattggcattgcgattccacctggtctgagggccacgtcacgaccaccagcaccagaacctgggtcttgcccacctacaacaaccacctntacaagcgactcggagagagcctgcagtccaacacctacaacggattctccaccccctggggatactttgacttcaaccgcttccactgccacttctcaccacgtgactggcagcgactcatcaacaacaactggggcatgcgacccaaagccatgcgggtcaaaatcttcaacatccaggtcaaggaggtcacgacgtcgaacggcgagacaacggtggctaataaccttaccagcacggttcagatctttgcggactcgtcgtacgaactgccgtacgtgatggatgcgggtcaagagggcagcctgcctccttttcccaacgacgtctttatggtgccccagtacggctactgtggactggtgaccggcaacacttcgcagcaacagactgacagaaatgccttctactgcctggagtactttccttcgcagatgctgcggactggcaacaactttgaaattacgtacagttttgagaaggtgcctttccactcgatgtacgcgcacagccagagcctggaccggctgatgaaccctctcatcgaccagtacctgtggggactgcaatcgaccaccaccggaaccaccctgaatgccgggactgccaccaccaactttaccaagctgcggcctaccaacttttccaactttaaaaagaactggctgcccgggccttcaatcaagcagcagggcttctcaaagactgccaatcaaaactacaagatccctgccaccgggtcagacagtctcatcaaatacgagacgcacagcactctggacggaagatggagtgccctgacccccggacctccaatggccacggctggacctgcggacagcaagttcagcaacagccagctcatctttgcggggcctaaacagaacggcaacacggccaccgtacccgggactctgatcttcacctctgaggaggagctggcagccaccaacgccaccgatacggacatgtggggcaacctacctggcggtgaccagagcaacagcaacctgccgaccgtggacagactgacagccttgggagccgtgcctggaatggtctggcaaaacagagacatttactaccagggtcccatttgggccaagattcctcataccgatggacactttcacccctcaccgctgattggtgggtttgggctgaaacacccgcctcctcaaatttttatcaagaacaccccggtacctgcgaatcctgcaacgaccttcagctctactccggtaaactccttcattactcagtacagcactggccaggtgtcggtgcagattgactgggagatccagaaggagcggtccaaacgctggaaccccgaggtccagtttacctccaactacggacagcaaaactctctgttgtgggctcccgatgcggctgggaaatacactgagcctagggctatcggtacccgctacctcacccaccacctgtaataacctgttaatcaataaaccggtttattcgtttcagttgaactttggtctccgtgtccttcttatcttatctcgtttccatggctactgcgtacataagcagcggcctgcggcgcttgcgcttcgcggtttacaactgccggttaatcagtaacttctggcaaaccatgatgatggagttggccactccctctatgcgcgctcgctcactcactcggccctggagaccaaaggtctccagactgccggcctctggccggcagggccgagtgagtgagcgagcgcgcatagagggagtggccaa

SEQ ID NO: 5150 - protein, 725 aa, Adeno-associated virus 5
MAADGYLPDWLEDTLSEGIRQWWKLKPGPPPPKPAERHKDDSRGLVLPGYKYLGPFNGLDKGEPVNEADAAALEHDKAYDRQLDSGDNPYLKYNHADAEFQERLKEDTSFGGNLGRAVFQAKKRVLEPFGLVEEGAKTAPTGKRIDDHFPKRKKARTEEDSKPSTSSDAEAGPSGSQQLQIPAQPASSLGADTMSAGGGGPLGDNNQGADGVGNASGDWHCDSTWMGDRVVTKSTRTWVLPSYNNHQYREIKSGSVDGSNANAYFGYSTPWGYFDFNRFHSHWSPRDWQRLINNYWGFRPRSLRVKIFNIQVKEVTVQDSTTTIANNLTSTVQVFTDDDYQLPYVVGNGTEGCLPAFPPQVFTLPQYGYATLNRDNTENPTERSSFFCLEYFPSKMLRTGNNFEFTYNFEEVPFHSSFAPSQNLFKLANPLVDQYLYRFVSTNNTGGVQFNKNLAGRYANTYKNWFPGPMGRTQGWNLGSGVNRASVSAFATTNRMELEGASYQVPPQPNGMTNNLQGSNTYALENTMIFNSQPANPGTTATYLEGNMLITSESETQPVNRVAYNVGGQMATNNQSSTTAPTTGTYNLQEIVPGSVWMERDVYLQGPIWAKIPETGAHFHPSPAMGGFGLKHPPPMMLIKNTPVPGNITSFSDVPVSSFITQYSTGQVTVEMEWELKKENSKRWNPEIQYTNNYNDPQFVDFAPDSTGEYRTTRPIGTRYLTRPL

SEQ ID NO: 5151 - protein, 724 aa, Adeno-associated virus 5
MSFVDHPPDWLEEVGEGLREFLGLEAGPPKPKPNQQHQDQARGLVLPGYNYLGPGNGLDRGEPVNRADEVAREHDISYNEQLEAGDNPYLKYNHADAEFQEKLADDTSFGGNLGKAVFQAKKRVLEPFGLVEEGAKTAPTGKRIDDHFPKRKKARTEEDSKPSTSSDAEAGPSGSQQLQIPAQPASSLGADTMSAGGGGPLGDNNQGADGVGNASGDWHCDSTWMGDRVVTKSTRTWVLPSYNNHQYREIKSGSVDGSNANAYFGYSTPWGYFDFNRFHSHWSPRDWQRLINNYWGFRPRSLRVKIFNIQVKEVTVQDSTTTIANNLTSTVQVFTDDDYQLPYVVGNGTEGCLPAFPPQVFTLPQYGYATLNRDNTENPTERSSFFCLEYFPSKMLRTGNNFEFTYNFEEVPFHSSFAPSQNLFKLANPLVDQYLYRFVSTNNTGGVQFNKNLAGRYANTYKNWFPGPMGRTQGWNLGSGVNRASVSAFATTNRMELEGASYQVPPQPNGMTNNLQGSNTYALENTMIFNSQPANPGTTATYLEGNMLITSESETQPVNRVAYNVGGQMATNNQSSTTAPATGTYNLQEIVPGSVWMERDVYLQGPIWAKIPETGAHFHPSPAMGGFGLKHPPPMMLIKNTPVPGNITSFSDVPVSSFITQYSTGQVTVEMEWELKKENSKRWNPEIQYTNNYNDPQFVDFAPDSTGEYRTTRPIGTRYLTRPL

SEQ ID NO: 5152 - DNA, 2175 bp, Adeno-associated virus 5
atgtcttttgttgatcaccctccagattggttggaagaagttggtgaaggtcttcgcgagtttttgggccttgaagcgggcccaccgaaaccaaaacccaatcagcagcatcaagatcaagcccgtggtcttgtgctgcctggttataactatctcggacccggaaacggtctcgatcgaggagagcctgtcaacagggcagacgaggtcgcgcgagagcacgacatctcgtacaacgagcagcttgaggcgggagacaacccctacctcaagtacaaccacgcggacgccgagtttcaggagaagctcgccgacgacacatccttcgggggaaacctcggaaaggcagtctttcaggccaagaaaagggttctcgaaccttttggcctggttgaagagggtgctaagacggcccctaccggaaagcggatagacgaccactttccaaaaagaaagaaggctcggaccgaagaggactccaagccttccacctcgtcagacgccgaagctggacccagcggatcccagcagctgcaaatcccagcccaaccagcctcaagtttgggagctgatacaatgtctgcgggaggtggcggcccattgggcgacaataaccaaggtgccgatggagtgggcaatgcctcgggagattggcattgcgattccacgtggatgggggacagagtcgtcaccaagtccacccgaacctgggtgctgcccagctacaacaaccaccagtaccgagagatcaaaagcggctccgtcgacggaagcaacgccaacgcctactttggatacagcaccccctgggggtactttgactttaaccgcttccacagccactggagcccccgagactggcaaagactcatcaacaactactggggcttcagaccccggtccctcagagtcaaaatcttcaacattcaagtcaaagaggtcacggtgcaggactccaccaccaccatcgccaacaacctcacctccaccgtccaagtgtttacggacgacgactaccagctgccctacgtcgtcggcaacgggaccgagggatgcctgccggccttccctccgcaggtctttacgctgccgcagtacggttacgcgacgctgaaccgcgacaacacagaaaatcccaccgagaggagcagcttcttctgcctagagtactttcccagcaagatgctgagaacgggcaacaactttgagtttacctacaactttgaggaggtgcccttccactccagcttcgctcccagtcagaacctgttcaagctggccaacccgctggtggaccagtacttgtaccgcttcgtgagcacaaataacactggcggagtccagttcaacaagaacctggccgggagatacgccaacacctacaaaaactggttcccggggcccatgggccgaacccagggctggaacctgggctccggggtcaaccgcgccagtgtcagcgccttcgccacgaccaataggatggagctcgagggcgcgagttaccaggtgcccccgcagccgaacggcatgaccaacaacctccagggcagcaacacctatgccctggagaacactatgatcttcaacagccagccggcgaacccgggcaccaccgccacgtacctcgagggcaacatgctcatcaccagcgagagcgagacgcagccggtgaaccgcgtggcgtacaacgtcggcgggcagatggccaccaacaaccagagctccaccactgcccccgcgaccggcacgtacaacctccaggaaatcgtgcccggcagcgtgtggatggagagggacgtgtacctccaaggacccatctgggccaagatcccagagacgggggcgcactttcacccctctccggccatgggcggattcggactcaaacacccaccgcccatgatgctcatcaagaacacgcctgtgcccggaaatatcaccagcttctcggacgtgcccgtcagcagcttcatcacccagtacagcaccgggcaggtcaccgtggagatggagtgggagctcaagaaggaaaactccaagaggtggaacccagagatccagtacacaaacaactacaacgacccccagtttgtggactttgccccggacagcaccggggaatacagaaccaccagacctatcggaacccgataccttacccgacccctttaa

SEQ ID NO: 5153 - DNA, 2208 bp, Adeno-associated virus 6
atggctgccgatggttatcttccagattggctcgaggacaacctctctgagggcattcgcgagtggtgggacttgaaacctggagccccgaaacccaaagccaaccagcaaaagcaggacgacggccggggtctggtgcttcctggctacaagtacctcggacccttcaacggactcgacaagggggagcccgtcaacgcggcggatgcagcggccctcgagcacgacaaggcctacgaccagcagctcaaagcgggtgacaatccgtacctgcggtataaccacgccgacgccgagtttcaggagcgtctgcaagaagatacgtcttttgggggcaacctcgggcgagcagtcttccaggccaagaagagggttctcgaaccttttggtctggttgaggaaggtgctaagacggctcctggaaagaaacgtccggtagagcagtcgccacaagagccagactcctcctcgggcattggcaagacaggccagcagcccgctaaaaagagactcaattttggtcagactggcgactcagagtcagtccccgacccacaacctctcggagaacctccagcaacccccgctgctgtgggacctactacaatggcttcaggcggtggcgcaccaatggcagacaataacgaaggcgccgacggagtgggtaatgcctcaggaaattggcattgcgattccacatggctgggcgacagagtcatcaccaccagcacccgaacatgggccttgcccacctataacaaccacctctacaagcaaatctccagtgcttcaacgggggccagcaacgacaaccactacttcggctacagcaccccctgggggtattttgatttcaacagattccactgccatttctcaccacgtgactggcagcgactcatcaacaacaattggggattccggcccaagagactcaacttcaagctcttcaacatccaagtcaaggaggtcacgacgaatgatggcgtcacgaccatcgctaataaccttaccagcacggttcaagtcttctcggactcggagtaccagttgccgtacgtcctcggctctgcgcaccagggctgcctccctccgttcccggcggacgtgttcatgattccgcagtacggctacctaacgctcaacaatggcagccaggcagtgggacggtcatccttttactgcctggaatatttcccatcgcagatgctgagaacgggcaataactttaccttcagctacaccttcgaggacgtgcctttccacagcagctacgcgcacagccagagcctggaccggctgatgaatcctctcatcgaccagtacctgtattacctgaacagaactcagaatcagtccggaagtgcccaaaacaaggacttgctgtttagccgggggtctccagctggcatgtctgttcagcccaaaaactggctacctggaccctgttaccggcagcagcgcgtttctaaaacaaaaacagacaacaacaacagcaactttacctggactggtgcttcaaaatataaccttaatgggcgtgaatctataatcaaccctggcactgctatggcctcacacaaagacgacaaagacaagttctttcccatgagcggtgtcatgatttttggaaaggagagcgccggagcttcaaacactgcattggacaatgtcatgatcacagacgaagaggaaatcaaagccactaaccccgtggccaccgaaagatttgggactgtggcagtcaatctccagagcagcagcacagaccctgcgaccggagatgtgcatgttatgggagccttacctggaatggtgtggcaagacagagacgtatacctgcagggtcctatttgggccaaaattcctcacacggatggacactttcacccgtctcctctcatgggcggctttggacttaagcacccgcctcctcagatcctcatcaaaaacacgcctgttcctgcgaatcctccggcagagttttcggctacaaagtttgcttcattcatcacccagtattccacaggacaagtgagcgtggagattgaatgggagctgcagaaagaaaacagcaaacgctggaatcccgaagtgcagtatacatctaactatgcaaaatctgccaacgttgatttcactgtggacaacaatggactttatactgagcctcgccccattggcacccgttacctcacccgtcccctg

SEQ ID NO: 5154 - protein, 736 aa, Adeno-associated virus 6; identical to SEQ ID NO: 4799

SEQ ID NO: 5155 - protein, 623 aa, Adeno-associated virus 6
MPGFYEIVIKVPSDLDEHLPGISDSFVNWVAEKEWELPPDSDMDLNLIEQAPLTVAEKLQRDFLVQWRRVSKAPEALFFVQFEKGESYFHLHILVETTGVKSMVLGRFLSQIRDKLVQTIYRGIEPTLPNWFAVTKTRNGAGGGNKVVDECYIPNYLLPKTQPELQWAWTNMEEYISACLNLAERKRLVAHDLTHVSQTQEQNKENLNPNSDAPVIRSKTSARYMELVGWLVDRGITSEKQWIQEDQASYISFNAASNSRSQIKAALDNAGKIMALTKSAPDYLVGPAPPADIKTNRIYRILELNGYDPAYAGSVFLGWAQKRFGKRNTIWLFGPATTGKTNIAEAIAHAVPFYGCVNWTNENFPFNDCVDKMVIWWEEGKMTAKVVESAKAILGGSKVRVDQKCKSSAQIDPTPVIVTSNTNMCAVIDGNSTTFEHQQPLQDRMFKFELTRRLEHDFGKVTKQEVKEFFRWAQDHVTEVAHEFYVRKGGANKRPAPDDADKSEPKRACPSVADPSTSDAEGAPVDFADRYQNKCSRHAGMLQMLFPCKTCERMNQNFNICFTHGTRDCSECFPGVSESQPVVRKRTYRKLCAIHHLLGRAPEIACSACDLVNVDLDDCVSEQ

SEQ ID NO: 5156 - DNA, 4683 bp, Adeno-associated virus 6
ttggccactccctctctgcgcgctcgctcgctcactgaggccgggcgaccaaaggtcgcccgacgcccgggctttgcccgggcggcctcagtgagcgagcgagcgcgcagagagggagtggccaactccatcactaggggttcctggaggggtggagtcgtgacgtgaattacgtcatagggttagggaggtcctgtattagaggtcacgtgagtgttttgcgacattttgcgacaccatgtggtcacgctgggtatttaagcccgagtgagcacgcagggtctccattttgaagcgggaggtttgaacgcgcagcgccatgccggggttttacgagattgtgattaaggtccccagcgaccttgacgagcatctgcccggcatttctgacagctttgtgaactgggtggccgagaaggaatgggagttgccgccagattctgacatggatctgaatctgattgagcaggcacccctgaccgtggccgagaagctgcagcgcgacttcctggtccagtggcgccgcgtgagtaaggccccggaggccctcttctttgttcagttcgagaagggcgagtcctacttccacctccatattctggtggagaccacgggggtcaaatccatggtgctgggccgcttcctgagtcagattagggacaagctggtgcagaccatctaccgcgggatcgagccgaccctgcccaactggttcgcggtgaccaagacgcgtaatggcgccggaggggggaacaaggtggtggacgagtgctacatccccaactacctcctgcccaagactcagcccgagctgcagtgggcgtggactaacatggaggagtatataagcgcgtgtttaaacctggccgagcgcaaacggctcgtggcgcacgacctgacccacgtcagccagacccaggagcagaacaaggagaatctgaaccccaattctgacgcgcctgtcatccggtcaaaaacctccgcacgctacatggagctggtcgggtggctggtggaccggggcatcacctccgagaagcagtggatccaggaggaccaggcctcgtacatctccttcaacgccgcctccaactcgcggtcccagatcaaggccgctctggacaatgccggcaagatcatggcgctgaccaaatccgcgcccgactacctggtaggccccgctccgcccgccgacattaaaaccaaccgcatttaccgcatcctggagctgaacggctacgaccctgcctacgccggctccgtctttctcggctgggcccagaaaaggttcggaaaacgcaacaccatctggctgtttgggccggccaccacgggcaagaccaacatcgcggaagccatcgcccacgccgtgcccttctacggctgcgtcaactggaccaatgagaactttcccttcaacgattgcgtcgacaagatggtgatctggtgggaggagggcaagatgacggccaaggtcgtggagtccgccaaggccattctcggcggcagcaaggtgcgcgtggaccaaaagtgcaagtcgtccgcccagatcgatcccacccccgtgatcgtcacctccaacaccaacatgtgcgccgtgattgacgggaacagcaccaccttcgagcaccagcagccgttgcaggaccggatgttcaaatttgaactcacccgccgtctggagcatgactttggcaaggtgacaaagcaggaagtcaaagagttcttccgctgggcgcaggatcacgtgaccgaggtggcgcatgagttctacgtcagaaagggtggagccaacaagagacccgcccccgatgacgcggataaaagcgagcccaagcgggcctgcccctcagtcgcggatccatcgacgtcagacgcggaaggagctccggtggactttgccgacaggtaccaaaacaaatgttctcgtcacgcgggcatgcttcagatgctgtttccctgcaaaacatgcgagagaatgaatcagaatttcaacatttgcttcacgcacgggaccagagactgttcagaatgtttccccggcgtgtcagaatctcaaccggtcgtcagaaagaggacgtatcggaaactctgtgccattcatcatctgctggggcgggctcccgagattgcttgctcggcctgcgatctggtcaacgtggatctggatgactgtgtttctgagcaataaatgacttaaaccaggtatggctgccgatggttatcttccagattggctcgaggacaacctctctgagggcattcgcgagtggtgggacttgaaacctggagccccgaaacccaaagccaaccagcaaaagcaggacgacggccggggtctggtgcttcctggctacaagtacctcggacccttcaacggactcgacaagggggagcccgtcaacgcggcggatgcagcggccctcgagcacgacaaggcctacgaccagcagctcaaagcgggtgacaatccgtacctgcggtataaccacgccgacgccgagtttcaggagcgtctgcaagaagatacgtcttttgggggcaacctcgggcgagcagtcttccaggccaagaagagggttctcgaaccttttggtctggttgaggaaggtgctaagacggctcctggaaagaaacgtccggtagagcagtcgccacaagagccagactcctcctcgggcattggcaagacaggccagcagcccgctaaaaagagactcaattttggtcagactggcgactcagagtcagtccccgacccacaacctctcggagaacctccagcaacccccgctgctgtgggacctactacaatggcttcaggcggtggcgcaccaatggcagacaataacgaaggcgccgacggagtgggtaatgcctcaggaaattggcattgcgattccacatggctgggcgacagagtcatcaccaccagcacccgaacatgggccttgcccacctataacaaccacctctacaagcaaatctccagtgcttcaacgggggccagcaacgacaaccactacttcggctacagcaccccctgggggtattttgatttcaacagattccactgccatttctcaccacgtgactggcagcgactcatcaacaacaattggggattccggcccaagagactcaacttcaagctcttcaacatccaagtcaaggaggtcacgacgaatgatggcgtcacgaccatcgctaataaccttaccagcacggttcaagtcttctcggactcggagtaccagttgccgtacgtcctcggctctgcgcaccagggctgcctccctccgttcccggcggacgtgttcatgattccgcagtacggctacctaacgctcaacaatggcagccaggcagtgggacggtcatccttttactgcctggaatatttcccatcgcagatgctgagaacgggcaataactttaccttcagctacaccttcgaggacgtgcctttccacagcagctacgcgcacagccagagcctggaccggctgatgaatcctctcatcgaccagtacctgtattacctgaacagaactcagaatcagtccggaagtgcccaaaacaaggacttgctgtttagccgggggtctccagctggcatgtctgttcagcccaaaaactggctacctggaccctgttaccggcagcagcgcgtttctaaaacaaaaacagacaacaacaacagcaactttacctggactggtgcttcaaaatataaccttaatgggcgtgaatctataatcaaccctggcactgctatggcctcacacaaagacgacaaagacaagttctttcccatgagcggtgtcatgatttttggaaaggagagcgccggagcttcaaacactgcattggacaatgtcatgatcacagacgaagaggaaatcaaagccactaaccccgtggccaccgaaagatttgggactgtggcagtcaatctccagagcagcagcacagaccctgcgaccggagatgtgcatgttatgggagccttacctggaatggtgtggcaagacagagacgtatacctgcagggtcctatttgggccaaaattcctcacacggatggacactttcacccgtctcctctcatgggcggctttggacttaagcacccgcctcctcagatcctcatcaaaaacacgcctgttcctgcgaatcctccggcagagttttcggctacaaagtttgcttcattcatcacccagtattccacaggacaagtgagcgtggagattgaatgggagctgcagaaagaaaacagcaaacgctggaatcccgaagtgcagtatacatctaactatgcaaaatctgccaacgttgatttcactgtggacaacaatggactttatactgagcctcgccccattggcacccgttacctcacccgtcccctgtaattgtgtgttaatcaataaaccggttaattcgtgtcagttgaactttggtctcatgtcgttattatcttatctggtcaccatagcaaccggttacacattaactgcttagttgcgcttcgcgaatacccctagtgatggagttgcccactccctctatgcgcgctcgctcgctcggtggggccggcagagcagagctctgccgtctgcggacctttggtccgcaggccccaccgagcgagcgagcgcgcatagagggagtgggcaa

SEQ ID NO: 5157 - DNA, 2211 bp, Adeno-associated virus 6
atggctgccgatggttatcttccagattggctcgaggacaacctctctgagggcattcgcgagtggtgggacttgaaacctggagccccgaaacccaaagccaaccagcaaaagcaggacgacggccggggtctggtgcttcctggctacaagtacctcggacccttcaacggactcgacaagggggagcccgtcaacgcggcggatgcagcggccctcgagcacgacaaggcctacgaccagcagctcaaagcgggtgacaatccgtacctgcggtataaccacgccgacgccgagtttcaggagcgtctgcaagaagatacgtcttttgggggcaacctcgggcgagcagtcttccaggccaagaagagggttctcgaaccttttggtctggttgaggaaggtgctaagacggctcctggaaagaaacgtccggtagagcagtcgccacaagagccagactcctcctcgggcattggcaagacaggccagcagcccgctaaaaagagactcaattttggtcagactggcgactcagagtcagtccccgacccacaacctctcggagaacctccagcaacccccgctgctgtgggacctactacaatggcttcaggcggtggcgcaccaatggcagacaataacgaaggcgccgacggagtgggtaatgcctcaggaaattggcattgcgattccacatggctgggcgacagagtcatcaccaccagcacccgaacatgggccttgcccacctataacaaccacctctacaagcaaatctccagtgcttcaacgggggccagcaacgacaaccactacttcggctacagcaccccctgggggtattttgatttcaacagattccactgccatttctcaccacgtgactggcagcgactcatcaacaacaattggggattccggcccaagagactcaacttcaagctcttcaacatccaagtcaaggaggtcacgacgaatgatggcgtcacgaccatcgctaataaccttaccagcacggttcaagtcttctcggactcggagtaccagttgccgtacgtcctcggctctgcgcaccagggctgcctccctccgttcccggcggacgtgttcatgattccgcagtacggctacctaacgctcaacaatggcagccaggcagtgggacggtcatccttttactgcctggaatatttcccatcgcagatgctgagaacgggcaataactttaccttcagctacaccttcgaggacgtgcctttccacagcagctacgcgcacagccagagcctggaccggctgatgaatcctctcatcgaccagtacctgtattacctgaacagaactcagaatcagtccggaagtgcccaaaacaaggacttgctgtttagccgggggtctccagctggcatgtctgttcagcccaaaaactggctacctggaccctgttaccggcagcagcgcgtttctaaaacaaaaacagacaacaacaacagcaactttacctggactggtgcttcaaaatataaccttaatgggcgtgaatctataatcaaccctggcactgctatggcctcacacaaagacgacaaagacaagttctttcccatgagcggtgtcatgatttttggaaaggagagcgccggagcttcaaacactgcattggacaatgtcatgatcacagacgaagaggaaatcaaagccactaaccccgtggccaccgaaagatttgggactgtggcagtcaatctccagagcagcagcacagaccctgcgaccggagatgtgcatgttatgggagccttacctggaatggtgtggcaagacagagacgtatacctgcagggtcctatttgggccaaaattcctcacacggatggacactttcacccgtctcctctcatgggcggctttggacttaagcacccgcctcctcagatcctcatcaaaaacacgcctgttcctgcgaatcctccggcagagttttcggctacaaagtttgcttcattcatcacccagtattccacaggacaagtgagcgtggagattgaatgggagctgcagaaagaaaacagcaaacgctggaatcccgaagtgcagtatacatctaactatgcaaaatctgccaacgttgatttcactgtggacaacaatggactttatactgagcctcgccccattggcacccgttacctcacccgtcccctgtaa

SEQ ID NO: 5158 - DNA, 2214 bp, Adeno-associated virus 7
atggctgccgatggttatcttccagattggctcgaggacaacctctctgagggcattcgcgagtggtgggacctgaaacctggagccccgaaacccaaagccaaccagcaaaagcaggacaacggccggggtctggtgcttcctggctacaagtacctcggacccttcaacggactcgacaagggggagcccgtcaacgcggcggacgcagcggccctcgagcacgacaaggcctacgaccagcagctcaaagcgggtgacaatccgtacctgcggtataaccacgccgacgccgagtttcaggagcgtctgcaagaagatacgtcatttgggggcaacctcgggcgagcagtcttccaggccaagaagcgggttctcgaacctctcggtctggttgaggaaggcgctaagacggctcctgcaaagaagagaccggtagagccgtcacctcagcgttcccccgactcctccacgggcatcggcaagaaaggccagcagcccgccagaaagagactcaatttcggtcagactggcgactcagagtcagtccccgaccctcaacctctcggagaacctccagcagcgccctctagtgtgggatctggtacagtggctgcaggcggtggcgcaccaatggcagacaataacgaaggtgccgacggagtgggtaatgcctcaggaaattggcattgcgattccacatggctgggcgacagagtcattaccaccagcacccgaacctgggccctgcccacctacaacaaccacctctacaagcaaatctccagtgaaactgcaggtagtaccaacgacaacacctacttcggctacagcaccccctgggggtattttgactttaacagattccactgccacttctcaccacgtgactggcagcgactcatcaacaacaactggggattccggcccaagaagctgcggttcaagctcttcaacatccaggtcaaggaggtcacgacgaatgacggcgttacgaccatcgctaataaccttaccagcacgattcaggtattctcggactcggaataccagctgccgtacgtcctcggctctgcgcaccagggctgcctgcctccgttcccggcggacgtcttcatgattcctcagtacggctacctgactctcaacaatggcagtcagtctgtgggacgttcctccttctactgcctggagtacttcccctctcagatgctgagaacgggcaacaactttgagttcagctacagcttcgaggacgtgcctttccacagcagctacgcacacagccagagcctggaccggctgatgaatcccctcatcgaccagtacttgtactacctggccagaacacagagtaacccaggaggcacagctggcaatcgggaactgcagttttaccagggcgggccttcaactatggccgaacaagccaagaattggttacctggaccttgcttccggcaacaaagagtctccaaaacgctggatcaaaacaacaacagcaactttgcttggactggtgccaccaaatatcacctgaacggcagaaactcgttggttaatcccggcgtcgccatggcaactcacaaggacgacgaggaccgctttttcccatccagcggagtcctgatttttggaaaaactggagcaactaacaaaactacattggaaaatgtgttaatgacaaatgaagaagaaattcgtcctactaatcctgtagccacggaagaatacgggatagtcagcagcaacttacaagcggctaatactgcagcccagacacaagttgtcaacaaccagggagccttacctggcatggtctggcagaaccgggacgtgtacctgcagggtcccatctgggccaagattcctcacacggatggcaactttcacccgtctcctttgatgggcggctttggacttaaacatccgcctcctcagatcctgatcaagaacactcccgttcccgctaatcctccggaggtgtttactcctgccaagtttgcttcgttcatcacacagtacagcaccggacaagtcagcgtggaaatcgagtgggagctgcagaaggaaaacagcaagcgctggaacccggagattcagtacacctccaactttgaaaagcagactggtgtggactttgccgttgacagccagggtgtttactctgagcctcgccctattggcactcgttacctcacccgtaatctgtaa

SEQ ID NO: 5159 - protein, 738 aa, Adeno-associated virus 7
MAADGYLPDWLEDNLSEGIREWWALKPGAPKPKANQQKQDDGRGLVLPGYKYLGPFNGLDKGEPVNAADAAALEHDKAYDQQLQAGDNPYLRYNHADAEFQERLQEDTSFGGNLGRAVFQAKKRVLEPLGLVEEGAKTAPGKKRPVEPSPQRSPDSSTGIGKKGQQPARKRLNFGQTGDSESVPDPQPLGEPPAAPSGVGPNTMAAGGGAPMADNNEGADGVGSSSGNWHCDSTWLGDRVITTSTRTWALPTYNNHLYKQISNGTSGGATNDNTYFGYSTPWGYFDFNRFHCHFSPRDWQRLINNNWGFRPKRLSFKLFNIQVKEVTQNEGTKTIANNLTSTIQVFTDSEYQLPYVLGSAHQGCLPPFPADVFMIPQYGYLTLNNGSQAVGRSSFYCLEYFPSQMLRTGNNFQFTYTFEDVPFHSSYAHSQSLDRLMNPLIDQYLYYLSRTQTTGGTANTQTLGFSQGGPNTMANQAKNWLPGPCYRQQRVSTTTGQNNNSNFAWTAGTKYHLNGRNSLANPGIAMATHKDDEERFFPSNGILIFGKQNAARDNADYSDVMLTSEEEIKTTNPVATEEYGIVADNLQQQNTAPQIGTVNSQGALPGMVWQNRDVYLQGPIWAKIPHTDGNFHPSPLMGGFGLKHPPPQILIKNTPVPADPPTTFNQSKLNSFITQYSTGQVSVEIEWELQKENSKRWNPEIQYTSNYYKSTSVDFAVNTEGVYSEPRPIGTRYLTRNL

SEQ ID NO: 5160 - protein, 737 aa, Adeno-associated virus 7
MAADGYLPDWLEDNLSEGIREWWDLKPGAPKPKANQQKQDNGRGLVLPGYKYLGPFNGLDKGEPVNAADAAALEHDKAYDQQLKAGDNPYLRYNHADAEFQERLQEDTSFGGNLGRAVFQAKKRVLEPLGLVEEGAKTAPAKKRPVEPSPQRSPDSSTGIGKKGQQPARKRLNFGQTGDSESVPDPQPLGEPPAAPSSVGSGTVAAGGGAPMADNNEGADGVGNASGNWHCDSTWLGDRVITTSTRTWALPTYNNHLYKQISSETAGSTNDNTYFGYSTPWGYFDFNRFHCHFSPRDWQRLINNNWGFRPKKLRFKLFNIQVKEVTTNDGVTTIANNLTSTIQVFSDSEYQLPYVLGSAHQGCLPPFPADVFMIPQYGYLTLNNGSQSVGRSSFYCLEYFPSQMLRTGNNFEFSYSFEDVPFHSSYAHSQSLDRLMNPLIDQYLYYLARTQSNPGGTAGNRELQFYQGGPSTMAEQAKNWLPGPCFRQQRVSKTLDQNNNSNFAWTGATKYHLNGRNSLVNPGVAMATHKDDEDRFFPSSGVLIFGKTGATNKTTLENVLMTNEEEIRPTNPVATEEYGIVSSNLQAANTAAQTQVVNNQGALPGMVWQNRDVYLQGPIWAKIPHTDGNFHPSPLMGGFGLKHPPPQILIKNTPVPANPPEVFTPAKFASFITQYSTGQVSVEIEWELQKENSKRWNPEIQYTSNFEKQTGVDFAVDSQGVYSEPRPIGTRYLTRNL

SEQ ID NO: 5161 - protein, 623 aa, Adeno-associated virus 7
MPGFYEIVIKVPSDLDEHLPGISDSFVNWVAEKEWELPPDSDMDLNLIEQAPLTVAEKLQRDFLVQWRRVSKAPEALFFVQFEKGESYFHLHVLVETTGVKSMVLGRFLSQIREKLVQTIYRGVEPTLPNWFAVTKTRNGAGGGNKVVDECYIPNYLLPKTQPELQWAWTNMEEYISACLNLAERKRLVAQHLTHVSQTQEQNKENLNPNSDAPVIRSKTSARYMELVGWLVDRGITSEKQWIQEDQASYISFNAASNSRSQIKAALDNAGKIMALTKSAPDYLVGPSLPADIKTNRIYRILELNGYDPAYAGSVFLGWAQKKFGKRNTIWLFGPATTGKTNIAEAIAHAVPFYGCVNWTNENFPFNDCVDKMVIWWEEGKMTAKVVESAKAILGGSKVRVDQKCKSSAQIDPTPVIVTSNTNMCAVIDGNSTTFEHQQPLQDRMFKFELTRRLEHDFGKVTKQEVKEFFRWASDHVTEVAHEFYVRKGGASKRPAPDDADISEPKRACPSVADPSTSDAEGAPVDFADRYQNKCSRHAGMIQMLFPCKTCERMNQNFNICFTHGVRDCLECFPGVSESQPVVRKKTYRKLCAIHHLLGRAPEIACSACDLVNVDLDDCVSEQ

SEQ ID NO: 5162 - DNA, 4721 bp, Adeno-associated virus 7
ttggccactccctctatgcgcgctcgctcgctcggtggggcctgcggaccaaaggtccgcagacggcagagctctgctctgccggccccaccgagcgagcgagcgcgcatagagggagtggccaactccatcactaggggtaccgcgaagcgcctcccacgctgccgcgtcagcgctgacgtaaatcacgtcataggggagtggtcctgtattagctgtcacgtgagtgcttttgcgacattttgcgacaccacgtggccatttgaggtatatatggccgagtgagcgagcaggatctccattttgaccgcgaaatttgaacgagcagcagccatgccgggtttctacgagatcgtgatcaaggtgccgagcgacctggacgagcacctgccgggcatttctgactcgtttgtgaactgggtggccgagaaggaatgggagctgcccccggattctgacatggatctgaatctgatcgagcaggcacccctgaccgtggccgagaagctgcagcgcgacttcctggtccaatggcgccgcgtgagtaaggccccggaggccctgttctttgttcagttcgagaagggcgagagctacttccaccttcacgttctggtggagaccacgggggtcaagtccatggtgctaggccgcttcctgagtcagattcgggagaagctggtccagaccatctaccgcggggtcgagcccacgctgcccaactggttcgcggtgaccaagacgcgtaatggcgccggcggggggaacaaggtggtggacgagtgctacatccccaactacctcctgcccaagacccagcccgagctgcagtgggcgtggactaacatggaggagtatataagcgcgtgtttgaacctggccgaacgcaaacggctcgtggcgcagcacctgacccacgtcagccagacgcaggagcagaacaaggagaatctgaaccccaattctgacgcgcccgtgatcaggtcaaaaacctccgcgcgctacatggagctggtcgggtggctggtggaccggggcatcacctccgagaagcagtggatccaggaggaccaggcctcgtacatctccttcaacgccgcctccaactcgcggtcccagatcaaggccgcgctggacaatgccggcaagatcatggcgctgaccaaatccgcgcccgactacctggtggggccctcgctgcccgcggacattaaaaccaaccgcatctaccgcatcctggagctgaacgggtacgatcctgcctacgccggctccgtctttctcggctgggcccagaaaaagttcgggaagcgcaacaccatctggctgtttgggcccgccaccaccggcaagaccaacattgcggaagccatcgcccacgccgtgcccttctacggctgcgtcaactggaccaatgagaactttcccttcaacgattgcgtcgacaagatggtgatctggtgggaggagggcaagatgacggccaaggtcgtggagtccgccaaggccattctcggcggcagcaaggtgcgcgtggaccaaaagtgcaagtcgtccgcccagatcgaccccacccccgtgatcgtcacctccaacaccaacatgtgcgccgtgattgacgggaacagcaccaccttcgagcaccagcagccgttgcaggaccggatgttcaaatttgaactcacccgccgtctggagcacgactttggcaaggtgacgaagcaggaagtcaaagagttcttccgctgggccagtgatcacgtgaccgaggtggcgcatgagttctacgtcagaaagggcggagccagcaaaagacccgcccccgatgacgcggatataagcgagcccaagcgggcctgcccctcagtcgcggatccatcgacgtcagacgcggaaggagctccggtggactttgccgacaggtaccaaaacaaatgttctcgtcacgcgggcatgattcagatgctgtttccctgcaaaacgtgcgagagaatgaatcagaatttcaacatttgcttcacacacggggtcagagactgtttagagtgtttccccggcgtgtcagaatctcaaccggtcgtcagaaaaaagacgtatcggaaactctgcgcgattcatcatctgctggggcgggcgcccgagattgcttgctcggcctgcgacctggtcaacgtggacctggacgactgcgtttctgagcaataaatgacttaaaccaggtatggctgccgatggttatcttccagattggctcgaggacaacctctctgagggcattcgcgagtggtgggacctgaaacctggagccccgaaacccaaagccaaccagcaaaagcaggacaacggccggggtctggtgcttcctggctacaagtacctcggacccttcaacggactcgacaagggggagcccgtcaacgcggcggacgcagcggccctcgagcacgacaaggcctacgaccagcagctcaaagcgggtgacaatccgtacctgcggtataaccacgccgacgccgagtttcaggagcgtctgcaagaagatacgtcatttgggggcaacctcgggcgagcagtcttccaggccaagaagcgggttctcgaacctctcggtctggttgaggaaggcgctaagacggctcctgcaaagaagagaccggtagagccgtcacctcagcgttcccccgactcctccacgggcatcggcaagaaaggccagcagcccgccagaaagagactcaatttcggtcagactggcgactcagagtcagtccccgaccctcaacctctcggagaacctccagcagcgccctctagtgtgggatctggtacagtggctgcaggcggtggcgcaccaatggcagacaataacgaaggtgccgacggagtgggtaatgcctcaggaaattggcattgcgattccacatggctgggcgacagagtcattaccaccagcacccgaacctgggccctgcccacctacaacaaccacctctacaagcaaatctccagtgaaactgcaggtagtaccaacgacaacacctacttcggctacagcaccccctgggggtattttgactttaacagattccactgccacttctcaccacgtgactggcagcgactcatcaacaacaactggggattccggcccaagaagctgcggttcaagctcttcaacatccaggtcaaggaggtcacgacgaatgacggcgttacgaccatcgctaataaccttaccagcacgattcaggtattctcggactcggaataccagctgccgtacgtcctcggctctgcgcaccagggctgcctgcctccgttcccggcggacgtcttcatgattcctcagtacggctacctgactctcaacaatggcagtcagtctgtgggacgttcctccttctactgcctggagtacttcccctctcagatgctgagaacgggcaacaactttgagttcagctacagcttcgaggacgtgcctttccacagcagctacgcacacagccagagcctggaccggctgatgaatcccctcatcgaccagtacttgtactacctggccagaacacagagtaacccaggaggcacagctggcaatcgggaactgcagttttaccagggcgggccttcaactatggccgaacaagccaagaattggttacctggaccttgcttccggcaacaaagagtctccaaaacgctggatcaaaacaacaacagcaactttgcttggactggtgccaccaaatatcacctgaacggcagaaactcgttggttaatcccggcgtcgccatggcaactcacaaggacgacgaggaccgctttttcccatccagcggagtcctgatttttggaaaaactggagcaactaacaaaactacattggaaaatgtgttaatgacaaatgaagaagaaattcgtcctactaatcctgtagccacggaagaatacgggatagtcagcagcaacttacaagcggctaatactgcagcccagacacaagttgtcaacaaccagggagccttacctggcatggtctggcagaaccgggacgtgtacctgcagggtcccatctgggccaagattcctcacacggatggcaactttcacccgtctcctttgatgggcggctttggacttaaacatccgcctcctcagatcctgatcaagaacactcccgttcccgctaatcctccggaggtgtttactcctgccaagtttgcttcgttcatcacacagtacagcaccggacaagtcagcgtggaaatcgagtgggagctgcagaaggaaaacagcaagcgctggaacccggagattcagtacacctccaactttgaaaagcagactggtgtggactttgccgttgacagccagggtgtttactctgagcctcgccctattggcactcgttacctcacccgtaatctgtaattgcatgttaatcaataaaccggttgattcgtttcagttgaactttggtctcctgtgcttcttatcttatcggtttccatagcaactggttacacattaactgcttgggtgcgcttcacgataagaacactgacgtcaccgcggtacccctagtgatggagttggccactccctctatgcgcgctcgctcgctcggtggggcctgcggaccaaaggtccgcagacggcagagctctgctctgccggccccaccgagcgagcgagcgcgcatagagggagtggccaa

SEQ ID NO: 5163 - DNA, 2214 bp, Adeno-associated virus 7; identical to SEQ ID NO: 5158

SEQ ID NO: 5164 - protein, 737 aa, Adeno-associated virus 7; identical to SEQ ID NO: 5160

SEQ ID NO: 5165 - DNA, 2217 bp, Adeno-associated virus 8
atggctgccgatggttatcttccagattggctcgaggacaacctctctgagggcattcgcgagtggtgggcgctgaaacctggagccccgaagcccaaagccaaccagcaaaagcaggacgacggccggggtctggtgcttcctggctacaagtacctcggacccttcaacggactcgacaagggggagcccgtcaacgcggcggacgcagcggccctcgagcacgacaaggcctacgaccagcagctgcaggcgggtgacaatccgtacctgcggtataaccacgccgacgccgagtttcaggagcgtctgcaagaagatacgtcttttgggggcaacctcgggcgagcagtcttccaggccaagaagcgggttctcgaacctctcggtctggttgaggaaggcgctaagacggctcctggaaagaagagaccggtagagccatcaccccagcgttctccagactcctctacgggcatcggcaagaaaggccaacagcccgccagaaaaagactcaattttggtcagactggcgactcagagtcagttccagaccctcaacctctcggagaacctccagcagcgccctctggtgtgggacctaatacaatggctgcaggcggtggcgcaccaatggcagacaataacgaaggcgccgacggagtgggtagttcctcgggaaattggcattgcgattccacatggctgggcgacagagtcatcaccaccagcacccgaacctgggccctgcccacctacaacaaccacctctacaagcaaatctccaacgggacatcgggaggagccaccaacgacaacacctacttcggctacagcaccccctgggggtattttgactttaacagattccactgccacttttcaccacgtgactggcagcgactcatcaacaacaactggggattccggcccaagagactcagcttcaagctcttcaacatccaggtcaaggaggtcacgcagaatgaaggcaccaagaccatcgccaataacctcaccagcaccatccaggtgtttacggactcggagtaccagctgccgtacgttctcggctctgcccaccagggctgcctgcctccgttcccggcggacgtgttcatgattccccagtacggctacctaacactcaacaacggtagtcaggccgtgggacgctcctccttctactgcctggaatactttccttcgcagatgctgagaaccggcaacaacttccagtttacttacaccttcgaggacgtgcctttccacagcagctacgcccacagccagagcttggaccggctgatgaatcctctgattgaccagtacctgtactacttgtctcggactcaaacaacaggaggcacggcaaatacgcagactctgggcttcagccaaggtgggcctaatacaatggccaatcaggcaaagaactggctgccaggaccctgttaccgccaacaacgcgtctcaacgacaaccgggcaaaacaacaatagcaactttgcctggactgctgggaccaaataccatctgaatggaagaaattcattggctaatcctggcatcgctatggcaacacacaaagacgacgaggagcgtttttttcccagtaacgggatcctgatttttggcaaacaaaatgctgccagagacaatgcggattacagcgatgtcatgctcaccagcgaggaagaaatcaaaaccactaaccctgtggctacagaggaatacggtatcgtggcagataacttgcagcagcaaaacacggctcctcaaattggaactgtcaacagccagggggccttacccggtatggtctggcagaaccgggacgtgtacctgcagggtcccatctgggccaagattcctcacacggacggcaacttccacccgtctccgctgatgggcggctttggcctgaaacatcctccgcctcagatcctgatcaagaacacgcctgtacctgcggatcctccgaccaccttcaaccagtcaaagctgaactctttcatcacgcaatacagcaccggacaggtcagcgtggaaattgaatgggagctgcagaaggaaaacagcaagcgctggaaccccgagatccagtacacctccaactactacaaatctacaagtgtggactttgctgttaatacagaaggcgtgtactctgaaccccgccccattggcacccgttacctcacccgtaatctgtaa

SEQ ID NO: 5166 - DNA, 2213 bp, Adeno-associated virus 8
atggctgccgatggttatcttccagattggctcgaggacaacctctctgagggcattcgcgagtggtgggcgctgaaacctggagccccgaagcccaaagccaaccagcaaaagcaggacgacggccggggtctggtgcttcctggctacaagtacctcggacccttcaacggactcgacaagggggagcccgtcaacgcggcggacgcagcggccctcgagcacgacaaggcctacgaccagcagctgcaggcgggtgacaatccgtacctgcggtataaccacgccgacgccgagtttcaggagcgtctgcaagaagatacgtcttttgggggcaacctcgggcgagcagtcttccaggccaagaagcgggttctcgaacctctcggtctggttgaggaaggcgctaagacggctcctggaaagaagagaccggtagagccatcaccccagcgttctccagactcctctacgggcatcggcaagaaaggccaacagcccgccagaaaaagactcaattttggtcagactggcgactcagagtcagttccagaccctcaacctctcggagaacctccagcagcgccctctggtgtgggacctaatacaatggctgcaggcggtggcgcaccaatggcagacaataacgaaggcgccgacggagtgggtagttcctcgggaaattggcattgcgattccacatggctgggcgacagagtcatcaccaccagcacccgaacctgggccctgcccacctacaacaaccacctctacaagcaaatctccaacgggacatcgggaggagccaccaacgacaacacctacttcggctacagcaccccctgggggtattttgactttaacagattccactgccacttttcaccacgtgactggcagcgactcatcaacaacaactggggattccggcccaagagactcagcttcaagctcttcaacatccaggtcaaggaggtcacgcagaatgaaggcaccaagaccatcgccaataacctcaccagcaccatccaggtgtttacggactcggagtaccagctgccgtacgttctcggctctgcccaccagggctgcctgcctccgttcccggcggacgtgttcatgattccccagtacggctacctaacactcaacaacggtagtcaggccgtgggacgctcctccttctactgcctggaatactttccttcgcagatgctgagaaccggcaacaacttccagtttacttacaccttcgaggacgtgcctttccacagcagctacgcccacagccagagcttggaccggctgatgaatcctctgattgaccagtacctgtactacttgtctcggactcaaacaacaggaggcacggcaaatacgcagactctgggcttcagccaaggtgggcctaatacaatggccaatcaggcaaagaactggctgccaggaccctgttaccgccaacaacgcgtctcaacgacaaccgggcaaaacaacaatagcaactttgcctggactgctgggaccaaataccatctgaatggaagaaattcattggctaatcctggcatcgctatggcaacacacaaagacgacgaggagcgtttttttcccagtaacgggatcctgatttttggcaaacaaaatgctgccagagacaatgcggattacagcgatgtcatgctcaccagcgaggaagaaatcaaaaccactaaccctgtggctacagaggaatacggtatcgtggcagataacttgcagcagcaaaacacggctcctcaaattggaactgtcaacagccagggggccttacccggtatggtctggcagaaccgggacgtgtacctgcagggtcccatctgggccaagattcctcacacggacggcaacttccacccgtctccgctgatgggcggctttggcctgaaacatcctccgcctcagatcctgatcaagaacacgcctgtacctgcggatcctccgaccaccttcaaccagtcaaagctgaactctttcatcacgcaatacagcaccggacaggtcagcgtggaaattgaatgggagctgcagaaggaaaacagcaagcgctggaaccccgagatccagtacacctccaactactacaaatctacaagtgtggactttgctgtaatacagaaggcgtgtactctgaaccccgccccattggcacccgttacctcacccgtaatctg

SEQ ID NO: 5167 - DNA, 4393 bp, Adeno-associated virus 8
cagagagggagtggccaactccatcactaggggtagcgcgaagcgcctcccacgctgccgcgtcagcgctgacgtaaattacgtcataggggagtggtcctgtattagctgtcacgtgagtgcttttgcggcattttgcgacaccacgtggccatttgaggtatatatggccgagtgagcgagcaggatctccattttgaccgcgaaatttgaacgagcagcagccatgccgggcttctacgagatcgtgatcaaggtgccgagcgacctggacgagcacctgccgggcatttctgactcgtttgtgaactgggtggccgagaaggaatgggagctgcccccggattctgacatggatcggaatctgatcgagcaggcacccctgaccgtggccgagaagctgcagcgcgacttcctggtccaatggcgccgcgtgagtaaggccccggaggccctcttctttgttcagttcgagaagggcgagagctactttcacctgcacgttctggtcgagaccacgggggtcaagtccatggtgctaggccgcttcctgagtcagattcgggaaaagcttggtccagaccatctacccgcggggtcgagccccaccttgcccaactggttcgcggtgaccaaagacgcggtaatggcgccggcgggggggaacaaggtggtggacgagtgctacatccccaactacctcctgcccaagactcagcccgagctgcagtgggcgtggactaacatggaggagtatataagcgcgtgcttgaacctggccgagcgcaaacggctcgtggcgcagcacctgacccacgtcagccagacgcaggagcagaacaaggagaatctgaaccccaattctgacgcgcccgtgatcaggtcaaaaacctccgcgcgctatatggagctggtcgggtggctggtggaccggggcatcacctccgagaagcagtggatccaggaggaccaggcctcgtacatctccttcaacgccgcctccaactcgcggtcccagatcaaggccgcgctggacaatgccggcaagatcatggcgctgaccaaatccgcgcccgactacctggtggggccctcgctgcccgcggacattacccagaaccgcatctaccgcatcctcgctctcaacggctacgaccctgcctacgccggctccgtctttctcggctgggctcagaaaaagttcgggaaacgcaacaccatctggctgtttggacccgccaccaccggcaagaccaacattgcggaagccatcgcccacgccgtgcccttctacggctgcgtcaactggaccaatgagaactttcccttcaatgattgcgtcgacaagatggtgatctggtgggaggagggcaagatgacggccaaggtcgtggagtccgccaaggccattctcggcggcagcaaggtgcgcgtggaccaaaagtgcaagtcgtccgcccagatcgaccccacccccgtgatcgtcacctccaacaccaacatgtgcgccgtgattgacgggaacagcaccaccttcgagcaccagcagcctctccaggaccggatgtttaagttcgaactcacccgccgtctggagcacgactttggcaaggtgacaaagcaggaagtcaaagagttcttccgctgggccagtgatcacgtgaccgaggtggcgcatgagttttacgtcagaaagggcggagccagcaaaagacccgcccccgatgacgcggataaaagcgagcccaagcgggcctgcccctcagtcgcggatccatcgacgtcagacgcggaaggagctccggtggactttgccgacaggtaccaaaacaaatgttctcgtcacgcgggcatgcttcagatgctgtttccctgcaaaacgtgcgagagaatgaatcagaatttcaacatttgcttcacacacggggtcagagactgctcagagtgtttccccggcgtgtcagaatctcaaccggtcgtcagaaagaggacgtatcggaaactctgtgcgattcatcatctgctggggcgggctcccgagattgcttgctcggcctgcgatctggtcaacgtggacctggatgactgtgtttctgagcaataaatgacttaaaccaggtatggctgccgatggttatcttccagattggctcgaggacaacctctctgagggcattcgcgagtggtgggcgctgaaacctggagccccgaagcccaaagccaaccagcaaaagcaggacgacggccggggtctggtgcttcctggctacaagtacctcggacccttcaacggactcgacaagggggagcccgtcaacgcggcggacgcagcggccctcgagcacgacaaggcctacgaccagcagctgcaggcgggtgacaatccgtacctgcggtataaccacgccgacgccgagtttcaggagcgtctgcaagaagatacgtcttttgggggcaacctcgggcgagcagtcttccaggccaagaagcgggttctcgaacctctcggtctggttgaggaaggcgctaagacggctcctggaaagaagagaccggtagagccatcaccccagcgttctccagactcctctacgggcatcggcaagaaaggccaacagcccgccagaaaaagactcaattttggtcagactggcgactcagagtcagttccagaccctcaacctctcggagaacctccagcagcgccctctggtgtgggacctaatacaatggctgcaggcggtggcgcaccaatggcagacaataacgaaggcgccgacggagtgggtagttcctcgggaaattggcattgcgattccacatggctgggcgacagagtcatcaccaccagcacccgaacctgggccctgcccacctacaacaaccacctctacaagcaaatctccaacgggacatcgggaggagccaccaacgacaacacctacttcggctacagcaccccctgggggtattttgactttaacagattccactgccacttttcaccacgtgactggcagcgactcatcaacaacaactggggattccggcccaagagactcagcttcaagctcttcaacatccaggtcaaggaggtcacgcagaatgaaggcaccaagaccatcgccaataacctcaccagcaccatccaggtgtttacggactcggagtaccagctgccgtacgttctcggctctgcccaccagggctgcctgcctccgttcccggcggacgtgttcatgattccccagtacggctacctaacactcaacaacggtagtcaggccgtgggacgctcctccttctactgcctggaatactttccttcgcagatgctgagaaccggcaacaacttccagtttacttacaccttcgaggacgtgcctttccacagcagctacgcccacagccagagcttggaccggctgatgaatcctctgattgaccagtacctgtactacttgtctcggactcaaacaacaggaggcacggcaaatacgcagactctgggcttcagccaaggtgggcctaatacaatggccaatcaggcaaagaactggctgccaggaccctgttaccgccaacaacgcgtctcaacgacaaccgggcaaaacaacaatagcaactttgcctggactgctgggaccaaataccatctgaatggaagaaattcattggctaatcctggcatcgctatggcaacacacaaagacgacgaggagcgtttttttcccagtaacgggatcctgatttttggcaaacaaaatgctgccagagacaatgcggattacagcgatgtcatgctcaccagcgaggaagaaatcaaaaccactaaccctgtggctacagaggaatacggtatcgtggcagataacttgcagcagcaaaacacggctcctcaaattggaactgtcaacagccagggggccttacccggtatggtctggcagaaccgggacgtgtacctgcagggtcccatctgggccaagattcctcacacggacggcaacttccacccgtctccgctgatgggcggctttggcctgaaacatcctccgcctcagatcctgatcaagaacacgcctgtacctgcggatcctccgaccaccttcaaccagtcaaagctgaactctttcatcacgcaatacagcaccggacaggtcagcgtggaaattgaatgggagctgcagaaggaaaacagcaagcgctggaaccccgagatccagtacacctccaactactacaaatctacaagtgtggactttgctgttaatacagaaggcgtgtactctgaaccccgccccattggcacccgttacctcacccgtaatctgtaattgcctgttaatcaataaaccggttgattcgtttcagttgaactttggtctctgcg

SEQ ID NO: 5168 - protein, 738 aa, Adeno-associated virus 8; identical to SEQ ID NO: 5159

SEQ ID NO: 5169 - protein, 737 aa, Adeno-associated virus 8
MAADGYLPDWLEDNLSEGIREWWALKPGAPKPKANQQKQDDGRGLVLPGYKYLGPFNGLDKGEPVNAADAAALEHDKAYDQQLQAGDNPYLRYNHADAEFQERLQEDTSFGGNLGRAVFQAKKRVLEPLGLVEEGAKTAPGKKRPVEPSPQRSPDSSTGIGKKGQQPARKRLNFGQTGDSESVPDPQPLGEPPAAPSGVGPNTMAAGGGAPMADNNEGADGVGSSSGNWHCDSTWLGDRVITTSTRTWALPTYNNHLYKQISNGTSGGATNDNTYFGYSTPWGYFDFNRFHCHFSPRDWQRLINNNWGFRPKRLSFKLFNIQVKEVTQNEGTKTIANNLTSTIQVFTDSEYQLPYVLGSAHQGCLPPFPADVFMIPQYGYLTLNNGSQAVGRSSFYCLEYFPSQMLRTGNNFQFTYTFEDVPFHSSYAHSQSLDRLMNPLIDQYLYYLSRTQTTGGTANTQTLGFSQGGPNTMANQAKNWLPGPCYRQQRVSTTTGQNNNSNFAWTAGTKYHLNGRNSLANPGIAMATHKDDEERFFPSNGILIFGKQNAARDNADYSDVMLTSEEEIKTTNPVATEEYGIVADNLQQQNTAPQIGTVNSQGALPGMVWQNRDVYLQGPIWAKIPHTDGNFHPSPLMGGFGLKHPPPQILIKNTPVPADPPTTFNQSKLNSFITQYSTGQVSVEIEWELQKENSKRWNPEIQYTSNYYKSTSVDFAVIQKACTLNPAPLAPVTSPVI

SEQ ID NO: 5170 - DNA, 2217 bp, Adeno-associated virus 8; identical to SEQ ID NO: 5165

SEQ ID NO: 5171 - DNA, 4385 bp, Adeno-associated virus 9
cagagagggagtggccaactccatcactaggggtaatcgcgaagcgcctcccacgctgccgcgtcagcgctgacgtagattacgtcataggggagtggtcctgtattagctgtcacgtgagtgcttttgcgacattttgcgacaccacatggccatttgaggtatatatggccgagtgagcgagcaggatctccattttgaccgcgaaatttgaacgagcagcagccatgccgggcttctacgagattgtgatcaaggtgccgagcgacctggacgagcacctgccgggcatttctgactcttttgtgaactgggtggccgagaaggaatgggagctgcccccggattctgacatggatcggaatctgatcgagcaggcacccctgaccgtggccgagaagctgcagcgcgacttcctggtccaatggcgccgcgtgagtaaggccccggaggccctcttctttgttcagttcgagaagggcgagagctactttcacctgcacgttctggtcgagaccacgggggtcaagtccatggtgctaggccgcttcctgagtcagattcgggagaagctggtccagaccatctaccgcgggatcgagccgaccctgcccaactggttcgcggtgaccaagacgcgtaatggcgccggcggggggaacaaggtggtggacgagtgctacatccccaactacctcctgcccaagactcagcccgagctgcagtgggcgtggactaacatggaggagtatataagcgcgtgcttgaacctggccgagcgcaaacggctcgtggcgcagcacctgacccacgtcagccagacgcaggagcagaacaaggagaatctgaaccccaattctgacgcgcccgtgatcaggtcaaaaacctccgcgcgctacatggagctggtcgggtggctggtggaccggggcatcacctccgagaagcagtggatccaggaggaccaggcctcgtacatctccttcaacgccgcctccaactcgcggtcccagatcaaggccgcgctggacaatgccggcaagatcatggcgctgaccaaatccgcgcccgactacctggtaggcccttcacttccggtggacattacgcagaaccgcatctaccgcatcctgcagctcaacggctacgaccctgcctacgccggctccgtctttctcggctgggcacaaaagaagttcgggaaacgcaacaccatctggctgtttgggccggccaccacgggaaagaccaacatcgcagaagccattgcccacgccgtgcccttctacggctgcgtcaactggaccaatgagaactttcccttcaacgattgcgtcgacaagatggtgatctggtgggaggagggcaagatgacggccaaggtcgtggagtccgccaaggccattctcggcggcagcaaggtgcgcgtggaccaaaagtgcaagtcgtccgcccagatcgaccccactcccgtgatcgtcacctccaacaccaacatgtgcgccgtgattgacgggaacagcaccaccttcgagcaccagcagcctctccaggaccggatgtttaagttcgaactcacccgccgtctggagcacgactttggcaaggtgacaaagcaggaagtcaaagagttcttccgctgggccagtgatcacgtgaccgaggtggcgcatgagttttacgtcagaaagggcggagccagcaaaagacccgcccccgatgacgcggataaaagcgagcccaagcgggcctgcccctcagtcgcggatccatcgacgtcagacgcggaaggagctccggtggactttgccgacaggtaccaaaacaaatgttctcgtcacgcgggcatgcttcagatgctgcttccctgcaaaacgtgcgagagaatgaatcagaatttcaacatttgcttcacacacggggtcagagactgctcagagtgtttccccggcgtgtcagaatctcaaccggtcgtcagaaagaggacgtatcggaaactctgtgcgattcatcatctgctggggcgggctcccgagattgcttgctcggcctgcgatctggtcaacgtggacctggatgactgtgtttctgagcaataaatgacttaaaccaggtatggctgccgatggttatcttccagattggctcgaggacaacctctctgagggcattcgcgagtggtgggcgctgaaacctggagccccgaagcccaaagccaaccagcaaaagcaggacgacggccggggtctggtgcttcctggctacaagtacctcggacccttcaacggactcgacaagggggagcccgtcaacgcggcggacgcagcggccctcgagcacggcaaggcctacgaccagcagctgcaggcgggtgacaatccgtacctgcggtataaccacgccgacgccgagtttcaggagcgtctgcaagaagatacgtcttttgggggcaacctcgggcgagcagtcttccaggccaagaagcgggttctcgaacctctcggtctggttgaggaaggcgctaagacggctcctggaaagaagagaccggtagagccatcaccccagcgttctccagactcctctacgggcatcggcaagaaaggccaacagcccgccagaaaaagactcaattttggtcagactggcgactcagagtcagttccagaccctcaacctctcggagaacctccagcagcgccctctggtgtgggacctaatacaatggctgcaggcggtggcgcaccaatggcagacaataacgaaggcgccgacggagtgggtaattcctcgggaaattggcattgcgattccacatggctgggggacagagtcatcaccaccagcacccgaacctgggcattgcccacctacaacaaccacctctacaagcaaatctccaatggaacatcgggaggaagcaccaacgacaacacctactttggctacagcaccccctgggggtattttgacttcaacagattccactgccacttctcaccacgtgactggcagcgactcatcaacaacaactggggattccggccaaagagactcaacttcaagctgttcaacatccaggtcaaggaggttacgacgaacgaaggcaccaagaccatcgccaataaccttaccagcaccgtccaggtctttacggactcggagtaccagctaccgtacgtcctaggctctgcccaccaaggatgcctgccaccgtttcctgcagacgtcttcatggttcctcagtacggctacctgacgctcaacaatggaagtcaagcgttaggacgttcttctttctactgtctggaatacttcccttctcagatgctgagaaccggcaacaactttcagttcagctacactttcgaggacgtgcctttccacagcagctacgcacacagccagagtctagatcgactgatgaaccccctcatcgaccagtacctatactacctggtcagaacacagacaactggaactgggggaactcaaactttggcattcagccaagcaggccctagctcaatggccaatcaggctagaaactgggtacccgggccttgctaccgtcagcagcgcgtctccacaaccaccaaccaaaataacaacagcaactttgcgtggacgggagctgctaaattcaagctgaacgggagagactcgctaatgaatcctggcgtggctatggcatcgcacaaagacgacgaggaccgcttctttccatcaagtggcgttctcatatttggcaagcaaggagccgggaacgatggagtcgactacagccaggtgctgattacagatgaggaagaaattaaagccaccaaccctgtagccacagaggaatacggagcagtggccatcaacaaccaggccgctaacacgcaggcgcaaactggacttgtgcataaccagggagttattcctggtatggtctggcagaaccgggacgtgtacctgcagggccctatttgggctaaaatacctcacacagatggcaactttcacccgtctcctctgatgggtggatttggactgaaacacccacctccacagattctaattaaaaatacaccagtgccggcagatcctcctcttaccttcaatcaagccaagctgaactctttcatcacgcagtacagcacgggacaagtcagcgtggaaatcgagtgggagctgcagaaagaaaacagcaagcgctggaatccagagatccagtatacttcaaactactacaaatctacaaatgtggactttgctgtcaataccaaaggtgtttactctgagcctcgccccattggtactcgttacctcacccgtaatttgtaattgcctgttaatcaataaaccggttaattcgtttcagttgaactttggtctctgcg

SEQ ID NO: 5172 - DNA, 4382 bp, Adeno-associated virus 9
cagagagggagtggccaactccatcactaggggtaatcgcgaagcgcctcccacgctgccgcgtcagcgctgacgtagattacgtcataggggagtggtcctgtattagctgtcacgtgagtgcttttgcgacattttgcgacaccacatggccatttgaggtatatatggccgagtgagcgagcaggatctccattttgaccgcgaaatttgaacgagcagcagccatgccgggcttctacgagattgtgatcaaggtgccgagcgacctggacgagcacctgccgggcatttctgactcttttgtgaactgggtggccgagaaggaatgggagctgcccccggattctgacatggatcggaatctgatcgagcaggcacccctgaccgtggccgagaagctgtagcgcgacttcctggtccaatggcgccgcgtgagtaaggccccggaggccctcttctttgttcagttcgagaagggcgagagctactttcacctgcacgttctggtcgagaccacgggggtcaagtccatggtgctaggccgcttcctgagtcagattcgggagaagctggtccagaccatctaccgcgggatcgagccgaccctgcccaactggttcgcggtgaccaagacgcgtaatggcgccggcggggggaacaaggtggtggacgagtgctacatccccaactacctcctgcccaagactcagcccgagctgcagtgggcgtggactaacatggaggagtatataagcgcgtgcttgaacctggccgagcgcaaacggctcgtggcgcagcacctgacccacgtcagccagacgcaggagcagaacaaggagaatctgaaccccaattctgacgcgcccgtgatcaggtcaaaaacctccgcgcgctacatggagctggtcgggtggctggtggaccggggcatcacctccgagaagcagtggatccaggaggaccaggcctcgtacatctccttcaacgccgcctccaactcgcggtcccagatcaaggccgcgctggacaatgccggcaagatcatggcgctgaccaaatccgcgcccgactacctggtaggcccttcacttccggtggacattacgcagaaccgcatctaccgcatcctgcagctcaacggctacgaccctgcctacgccggctccgtctttctcggctgggcacaaaagaagttcgggaaacgcaacaccatctggctgtttgggccggccaccacgggaaagaccaacatcgcagaagccattgcccacgccgtgcccttctacggctgcgtcaactggaccaatgagaactttcccttcaacgattgcgtcgacaagatggtgatctggtgggaggagggcaagatgacggccaaggtcgtggagtccgccaaggccattctcggcggcagcaaggtgcgcgtggaccaaaagtgcaagtcgtccgcccagatcgaccccactcccgtgatcgtcacctccaacaccaacatgtgcgccgtgattgacgggaacagcaccaccttcgagcaccagcagcctctccaggaccggatgtttaagttcgaactcacccgccgtctggagcacgactttggcaaggtgacaaagcaggaagtcaaagagttcttccgctgggccagtgatcacgtgaccgaggtggcgcatgagttttacgtcagaaagggcggagccagcaaaagacccgcccccgatgacgcggataaaagcgagcccaagcgggcctgcccctcagtcgcggatccatcgacgtcagacgcggaaggagctccggtggactttgccgacaggtaccaaaacaaatgttctcgtcacgcgggcatgcttcagatgctgcttccctgcaaaacgtgcgagagaatgaatcagaatttcaacatttgcttcacacacggggtcagagactgctcagagtgtttccccggcgtgtcagaatctcaaccggtcgtcagaaagaggacgtatcggaaactctgtgcgattcatcatctgctggggcgggctcccgagattgcttgctcggcctgcgatctggtcaacgtggacctggatgactgtgtttctgagcaataaatgacttaaaccaggtatggctgccgatggttatcttccagattggctcgaggacaacctctctgagggcattcgcgagtggtgggacctgaaacctggagccccgaaacccaaagccaaccagcaaaagcaggacgacggccggggtctggtgcttcctggctacaagtacctcggacccttcaacggactcgacaagggggagcccgtcaacgcggcggacgcagcggccctcgagcacgacaaggcctacgaccagcagctcaaagcgggtgacaatccgtacctgcggtataaccacgccgacgccgagtttcaggagcgtctgcaagaagatacgtcttttgggggcaacctcgggcgagcagtcttccaggccaagaagcgggttctcgaacctctcggtctggttgaggaaggcgctaagacggctcctggaaagaagagaccggtagagcagtcaccccaagaaccagactcatcctcgggcatcggcaaatcaggccagcagcccgctaaaaagagactcaattttggtcagactggcgactcagagtcagtccccgacccacaacctctcggagaacctccagaagccccctcaggtctgggacctaatacaatggcttcaggcggtggcgctccaatggcagacaataacgaaggcgccgacggagtgggtaattcctcgggaaattggcattgcgattccacatggctgggggacagagtcatcaccaccagcacccgaacctgggcattgcccacctacaacaaccacctctacaagcaaatctccaatggaacatcgggaggaagcaccaacgacaacacctactttggctacagcaccccctgggggtattttgacttcaacagattccactgccacttctcaccacgtgactggcagcgactcatcaacaacaactggggattccggccaaagagactcaacttcaagctgttcaacatccaggtcaaggaggttacgacgaacgaaggcaccaagaccatcgccaataaccttaccagcaccgtccaggtctttacggactcggagtaccagctaccgtacgtcctaggctctgcccaccaaggatgcctgccaccgtttcctgcagacgtcttcatggttcctcagtacggctacctgacgctcaacaatggaagtcaagcgttaggacgttcttctttctactgtctggaatacttcccttctcagatgctgagaaccggcaacaactttcagttcagctacactttcgaggacgtgcctttccacagcagctacgcacacagccagagtctagatcgactgatgaaccccctcatcgaccagtacctatactacctggtcagaacacagacaactggaactgggggaactcaaactttggcattcagccaagcaggccctagctcaatggccaatcaggctagaaactgggtacccgggccttgctaccgtcagcagcgcgtctccacaaccaccaaccaaaataacaacagcaactttgcgtggacgggagctgctaaattcaagctgaacgggagagactcgctaatgaatcctggcgtggctatggcatcgcacaaagacgacgaggaccgcttctttccatcaagtggcgttctcatatttggcaagcaaggagccgggaacgatggagtcgactacagccaggtgctgattacagatgaggaagaaattaaagccaccaaccctgtagccacagaggaatacggagcagtggccatcaacaaccaggccgctaacacgcaggcgcaaactggacttgtgcataaccagggagttattcctggtatggtctggcagaaccgggacgtgtacctgcagggccctatttgggctaaaatacctcacacagatggcaactttcacccgtctcctctgatgggtggatttggactgaaacacccacctccacagattctaattaaaaatacaccagtgccggcagatcctcctcttaccttcaatcaagccaagctgaactctttcatcacgcagtacagcacgggacaagtcagcgtggaaatcgagtgggagctgcagaaagaaaacagcaagcgctggaatccagagatccagtatacttcaaactactacaaatctacaaatgtggactttgctgtcaataccgaaggtgtttactctgagcctcgccccattggtactcgttacctcacccgtaatttgtaattgcctgttaatcaataaaccggttaattcgtttcagttgaactttggtctctgcg

SEQ ID NO: 5173 - protein, 736 aa, Adeno-associated virus 9; identical to SEQ ID NO: 4805

SEQ ID NO: 5174 - protein, 736 aa, Adeno-associated virus 9
MAADGYLPDWLEDNLSEGIREWWDLKPGAPKPKANQQKQDDGRGLVLPGYKYLGPFNGLDKGEPVNAADAAALEHDKAYDQQLKAGDNPYLRYNHADAEFQERLQEDTSFGGNLGRAVFQAKKRVLEPLGLVEEGAKTAPGKKRPVEQSPQEPDSSSGIGKSGQQPAKKRLNFGQTGDSESVPDPQPLGEPPEAPSGLGPNTMASGGGAPMADNNEGADGVGNSSGNWHCDSTWLGDRVITTSTRTWALPTYNNHLYKQISNGTSGGSTNDNTYFGYSTPWGYFDFNRFHCHFSPRDWQRLINNNWGFRPKRLNFKLFNIQVKEVTTNEGTKTIANNLTSTVQVFTDSEYQLPYVLGSAHQGCLPPFPADVFMVPQYGYLTLNNGSQALGRSSFYCLEYFPSQMLRTGNNFQFSYTFEDVPFHSSYAHSQSLDRLMNPLIDQYLYYLVRTQTTGTGGTQTLAFSQAGPSSMANQARNWVPGPCYRQQRVSTTTNQNNNSNFAWTGAAKFKLNGRDSLMNPGVAMASHKDDEDRFFPSSGVLIFGKQGAGNDGVDYSQVLITDEEEIKATNPVATEEYGAVAINNQAANTQAQTGLVHNQGVIPGMVWQNRDVYLQGPIWAKIPHTDGNFHPSPLMGGFGLKHPPPQILIKNTPVPADPPLTFNQAKLNSFITQYSTGQVSVEIEWELQKENSKRWNPEIQYTSNYYKSTNVDFAVNTEGVYSEPRPIGTRYLTRNL

SEQ ID NO: 5175 - protein, 623 aa, Adeno-associated virus 9
MPGFYEIVIKVPSDLDEHLPGISDSFVNWVAEKEWELPPDSDMDRNLIEQAPLTVAEKLQRDFLVQWRRVSKAPEALFFVQFEKGESYFHLHVLVETTGVKSMVLGRFLSQIREKLVQTIYRGIEPTLPNWFAVTKTRNGAGGGNKVVDECYIPNYLLPKTQPELQWAWTNMEEYISACLNLAERKRLVAQHLTHVSQTQEQNKENLNPNSDAPVIRSKTSARYMELVGWLVDRGITSEKQWIQEDQASYISFNAASNSRSQIKAALDNAGKIMALTKSAPDYLVGPSLPVDITQNRIYRILQLNGYDPAYAGSVFLGWAQKKFGKRNTIWLFGPATTGKTNIAEAIAHAVPFYGCVNWTNENFPFNDCVDKMVIWWEEGKMTAKVVESAKAILGGSKVRVDQKCKSSAQIDPTPVIVTSNTNMCAVIDGNSTTFEHQQPLQDRMFKFELTRRLEHDFGKVTKQEVKEFFRWASDHVTEVAHEFYVRKGGASKRPAPDDADKSEPKRACPSVADPSTSDAEGAPVDFADRYQNKCSRHAGMLQMLLPCKTCERMNQNFNICFTHGVRDCSECFPGVSESQPVVRKRTYRKLCAIHHLLGRAPEIACSACDLVNVDLDDCVSEQ

SEQ ID NO: 5176 - DNA, 1797 bp, Artificial Sequence
  Description of Artificial Sequence: Synthetic polynucleotide
acggctccgaccggagacaagcggaaaggcgaagacgaacctcgtttgcccgacacttcttcacagactcccaagaaaaacaagaagcctcgcaaggaaagaccttccggcggggcagaagatccgggcgaaggcacctcttccaacgctggagcagcagcacccgcctctagtgtgggatcatctatcatggctgaaggaggtggcggcccagtgggcgatgcaggccagggtgccgatggagtgggcaattcctccggaaattggcattgcgattcccaatggctggaaaacggagtcgtcactcgaaccacccgaacctgggtcttgcccagctacaacaaccacctgtacaaacgaatccaaggacccagcggaggcgacaacaacaacaaattctttggattcagcaccccctggggatactttgactacaatcgattccactgccacttttccccgcgagactggcaacgactcatcaacaacaactggggcatccgtcccaaagcgatgcgctttagactctttaacatccaggttaaagaggtcacggtccaagacttcaacaccaccatcggcaacaacctcaccagtacggtccaggtctttgcggacaaggactaccaactgccgtacgtcctcggatcggctaccgaaggcaccttcccgccgttcccagcggatatctacacgatcccgcagtacgggtactgcacgctaaactacaacaacgaggcggtggatcgttcggccttctactgtctggactactttccctcagacatgctgcggacaggaaataactttgagtttacttacaccttcgaggacgttcctttccatagcatgtttgcccacaaccagacgctagaccggctgatgaatcccctcgtggatcagtacctctgggctttcagctccgtcagccaagcaggctcatctggacgagctcttcattactcgcgggcgactaaaaccaacatggcggctcaatataggaactggttacctgggcctttcttccgtgatcagcaaatctttacgggcgctagcaacatcactaaaaataacgtctttagcgtttgggaaaaaggcaagcaatgggaactcgacaatcggaccaacctaatgcagcccggtcctgcggcagcgaccacctttagcggagaacctgaccgtcaagccatgcaaaacacgctggcttttagcaggaccgtctacgatcaaacgaccgccacgaccgatcgtaaccagatactcatcaccaacgaagacgaaatcagacccaccaactcggtcggtatcgacgcgtggggagcagttcccaccaacaaccagtcgatcgtgacccccggcactcgcgcggccgtcaacaatcaaggggcgcttcccgggatggtgtggcaaaacagagacatttaccctacagggacccatttggccaaaattcccgacactgacaatcacttccatccgtccccgcttattgggcggtttggctgcaagcatccccctccccagattttcattaaaaacacacccgtccctgccaacccttcggaaacgttccagacggccaaagtggcctccttcatcaaccagtactcgaccggacagtgcaccgtcgaaatcttttgggaactcaagaaggaaacctccaagcgctggaaccccgaaatccagttcacctccaactttggcaacgcggccgacatccagtttgccgtctccgacacgggatcctattccgaacctcgtcccatcggtacccgttaccttaccaaacctctgtaa

SEQ ID NO: 5177 - DNA, 1989 bp, Artificial Sequence
  Description of Artificial Sequence: Synthetic polynucleotide
atgaggtcgtactacgaggtcatcgttcagctgcccaacgacgtcgagagtcaggtacctggaatctccgattcgttcgtcaactggattacgtcgcgagaatggacgttgcctgaggacgccgattgggatttggaccaggtcgatcaagttcaactgacgctcggcgacaaaatccaacgggagattcgaactcattgggggacgatggccaaagaaccggactttcactattttatccaactggaacaaggtgaggtgttctttcatttacacgtcctgctggaaacgtgttccgtaaagccgatggtactcggaagatatatccgacatattcaacaaaaaattgtgagtaaagtctactgcgccacgagcctacgatggaaggatggatgcgtggtgaccaagaccaaaaatttcgggggcgcgaacaaggtccgggccgagtcgtatattcccgcctacctgatcccgaaacagcaaccggaagtgcagtgggcgtggactaacgtgcccgagtatataaaagcgtgcttgcaccgagaactgcgtgccagtctcgcgcgacttcacttcgaggaggcgggcgtctcgcaatccaaggaaaatctcgcgagaactgcagacggcgctcccgtgatgccgacccgcgtcagcaaacgctacatggagctcgtggattggctcgtggagaaggggatcaccaccgagaaggaatggctgctggaaaacagagaaagctttcggagctttcaggcctcgagcaactcggcgcgtcagatcaagacggccctgcaaggcgccattcaggagatgcttctgaccaagacggcggaggactacctcgtcggaaaggatcccgtctcggacgacgacatccgtcagaaccgcatctacaagattctggaactgaaccactacgacccagcgtacgtggggagtattttggtcgggtggtgccagaagaaatggggcaagcgaaacacgctgtggctgttcggacatgcgaccaccggcaagaccaacatcgcggaggctattgcccatgctgtgccgttctatggatgcgttaactggaccaacgagaactttccgttcaacgactgcgtcgaaaaaatgattatctggtgggaggagggcaaaatgaccgccaaagtggtggaaacagccaaggcgattctgggaggatctcgggtgagagtggaccaaaaatgcaaagcttcggttccgatcgaaccgacgccggtcattattaccagtaacaccaacatgtgttatgtcatcgacgggaacacgaccacgttcgagcataagcagccgttggaggacaggatgtttaagctcgaattgctgactcggttgcctgatgactttggtaaggtgaccaaacaggaggtgcgtcaattcttcaggtggtctcaggatcacctgacccctgtgatcccagaattcctagtgcggaaggcggagtctcgcaaaagacccgccccttccggggaaggctatataagcccgacaaagcggcccgcgctcgcagagcagcagcaggcgtcggagagcgcggacccggttcccaccaggtatcgtatcaaatgctcgaaacattgcggtatggataaaatgttgtttccttgccaaatttgtgaatcgatgaacagagatattaatatttgtgctattcataaaacgaccgactgtaaagagtgtttccccgactacggggataaagatgatgtagaactacccccctgtacagaacacaacgtgtctcgttgttatcaatgtcattcgggcgaattgtatcgcgtgacttcggactctgacgagaaacctgcccccgagagtgatgaaggcaccgagccatcctatgctccctgcacgattcaccacctgatgggcaagagtcacgggttagtcacttgcgcggcgtgtcggttgaaaaatagtacgttgcatgatgacttggatgacggtgatctcgaacaataa

SEQ ID NO: 5178 - DNA, 1626 bp, Artificial Sequence
  Description of Artificial Sequence: Synthetic polynucleotide
atgaggtcgtactacgaggtcatcgttcagctgcccaacgacgtcgagagtcaggtacctggaatctccgattcgttcgtcaactggattacgtcgcgagaatggacgttgcctgaggacgccgattgggatttggaccaggtcgatcaagttcaactgacgctcggcgacaaaatccaacgggagattcgaactcattgggggacgatggccaaagaaccggactttcactattttatccaactggaacaaggtgaggtgttctttcatttacacgtcctgctggaaacgtgttccgtaaagccgatggtactcggaagatatatccgacatattcaacaaaaaattgtgagtaaagtctactgcgccacgagcctacgatggaaggatggatgcgtggtgaccaagaccaaaaatttcgggggcgcgaacaaggtccgggccgagtcgtatattcccgcctacctgatcccgaaacagcaaccggaagtgcagtgggcgtggactaacgtgcccgagtatataaaagcgtgcttgcaccgagaactgcgtgccagtctcgcgcgacttcacttcgaggaggcgggcgtctcgcaatccaaggaaaatctcgcgagaactgcagacggcgctcccgtgatgccgacccgcgtcagcaaacgctacatggagctcgtggattggctcgtggagaaggggatcaccaccgagaaggaatggctgctggaaaacagagaaagctttcggagctttcaggcctcgagcaactcggcgcgtcagatcaagacggccctgcaaggcgccattcaggagatgcttctgaccaagacggcggaggactacctcgtcggaaaggatcccgtctcggacgacgacatccgtcagaaccgcatctacaagattctggaactgaaccactacgacccagcgtacgtggggagtattttggtcgggtggtgccagaagaaatggggcaagcgaaacacgctgtggctgttcggacatgcgaccaccggcaagaccaacatcgcggaggctattgcccatgctgtgccgttctatggatgcgttaactggaccaacgagaactttccgttcaacgactgcgtcgaaaaaatgattatctggtgggaggagggcaaaatgaccgccaaagtggtggaaacagccaaggcgattctgggaggatctcgggtgagagtggaccaaaaatgcaaagcttcggttccgatcgaaccgacgccggtcattattaccagtaacaccaacatgtgttatgtcatcgacgggaacacgaccacgttcgagcataagcagccgttggaggacaggatgtttaagctcgaattgctgactcggttgcctgatgactttggtaaggtgaccaaacaggaggtgcgtcaattcttcaggtggtctcaggatcacctgacccctgtgatcccagaattcctagtgcggaaggcggagtctcgcaaaagacccgccccttccggggaaggctatataagcccgacaaagcggcccgcgctcgcagagcagcagcaggcgtcggagagcgcggacccggttcccaccagattggttggagcggttggtcaaaaagggagtgaatgctgcagctga

SEQ ID NO: 5179 - DNA, 1323 bp, Artificial Sequence
  Description of Artificial Sequence: Synthetic polynucleotide
atggagctcgtggattggctcgtggagaaggggatcaccaccgagaaggaatggctgctggaaaacagagaaagctttcggagctttcaggcctcgagcaactcggcgcgtcagatcaagacggccctgcaaggcgccattcaggagatgcttctgaccaagacggcggaggactacctcgtcggaaaggatcccgtctcggacgacgacatccgtcagaaccgcatctacaagattctggaactgaaccactacgacccagcgtacgtggggagtattttggtcgggtggtgccagaagaaatggggcaagcgaaacacgctgtggctgttcggacatgcgaccaccggcaagaccaacatcgcggaggctattgcccatgctgtgccgttctatggatgcgttaactggaccaacgagaactttccgttcaacgactgcgtcgaaaaaatgattatctggtgggaggagggcaaaatgaccgccaaagtggtggaaacagccaaggcgattctgggaggatctcgggtgagagtggaccaaaaatgcaaagcttcggttccgatcgaaccgacgccggtcattattaccagtaacaccaacatgtgttatgtcatcgacgggaacacgaccacgttcgagcataagcagccgttggaggacaggatgtttaagctcgaattgctgactcggttgcctgatgactttggtaaggtgaccaaacaggaggtgcgtcaattcttcaggtggtctcaggatcacctgacccctgtgatcccagaattcctagtgcggaaggcggagtctcgcaaaagacccgccccttccggggaaggctatataagcccgacaaagcggcccgcgctcgcagagcagcagcaggcgtcggagagcgcggacccggttcccaccaggtatcgtatcaaatgctcgaaacattgcggtatggataaaatgttgtttccttgccaaatttgtgaatcgatgaacagagatattaatatttgtgctattcataaaacgaccgactgtaaagagtgtttccccgactacggggataaagatgatgtagaactacccccctgtacagaacacaacgtgtctcgttgttatcaatgtcattcgggcgaattgtatcgcgtgacttcggactctgacgagaaacctgcccccgagagtgatgaaggcaccgagccatcctatgctccctgcacgattcaccacctgatgggcaagagtcacgggttagtcacttgcgcggcgtgtcggttgaaaaatagtacgttgcatgatgacttggatgacggtgatctcgaacaataa

SEQ ID NO: 5180 - DNA, 960 bp, Artificial Sequence
  Description of Artificial Sequence: Synthetic polynucleotide
atggagctcgtggattggctcgtggagaaggggatcaccaccgagaaggaatggctgctggaaaacagagaaagctttcggagctttcaggcctcgagcaactcggcgcgtcagatcaagacggccctgcaaggcgccattcaggagatgcttctgaccaagacggcggaggactacctcgtcggaaaggatcccgtctcggacgacgacatccgtcagaaccgcatctacaagattctggaactgaaccactacgacccagcgtacgtggggagtattttggtcgggtggtgccagaagaaatggggcaagcgaaacacgctgtggctgttcggacatgcgaccaccggcaagaccaacatcgcggaggctattgcccatgctgtgccgttctatggatgcgttaactggaccaacgagaactttccgttcaacgactgcgtcgaaaaaatgattatctggtgggaggagggcaaaatgaccgccaaagtggtggaaacagccaaggcgattctgggaggatctcgggtgagagtggaccaaaaatgcaaagcttcggttccgatcgaaccgacgccggtcattattaccagtaacaccaacatgtgttatgtcatcgacgggaacacgaccacgttcgagcataagcagccgttggaggacaggatgtttaagctcgaattgctgactcggttgcctgatgactttggtaaggtgaccaaacaggaggtgcgtcaattcttcaggtggtctcaggatcacctgacccctgtgatcccagaattcctagtgcggaaggcggagtctcgcaaaagacccgccccttccggggaaggctatataagcccgacaaagcggcccgcgctcgcagagcagcagcaggcgtcggagagcgcggacccggttcccaccagattggttggagcggttggtcaaaaagggagtgaatgctgcagctga

SEQ ID NO: 5181 - DNA, 1608 bp, Artificial Sequence
  Description of Artificial Sequence: Synthetic polynucleotide
atggctgaaggaggtggcggcccagtgggcgatgcaggccagggtgccgatggagtgggcaattcctccggaaattggcattgcgattcccaatggctggaaaacggagtcgtcactcgaaccacccgaacctgggtcttgcccagctacaacaaccacctgtacaaacgaatccaaggacccagcggaggcgacaacaacaacaaattctttggattcagcaccccctggggatactttgactacaatcgattccactgccacttttccccgcgagactggcaacgactcatcaacaacaactggggcatccgtcccaaagcgatgcgctttagactctttaacatccaggttaaagaggtcacggtccaagacttcaacaccaccatcggcaacaacctcaccagtacggtccaggtctttgcggacaaggactaccaactgccgtacgtcctcggatcggctaccgaaggcaccttcccgccgttcccagcggatatctacacgatcccgcagtacgggtactgcacgctaaactacaacaacgaggcggtggatcgttcggccttctactgtctggactactttccctcagacatgctgcggacaggaaataactttgagtttacttacaccttcgaggacgttcctttccatagcatgtttgcccacaaccagacgctagaccggctgatgaatcccctcgtggatcagtacctctgggctttcagctccgtcagccaagcaggctcatctggacgagctcttcattactcgcgggcgactaaaaccaacatggcggctcaatataggaactggttacctgggcctttcttccgtgatcagcaaatctttacgggcgctagcaacatcactaaaaataacgtctttagcgtttgggaaaaaggcaagcaatgggaactcgacaatcggaccaacctaatgcagcccggtcctgcggcagcgaccacctttagcggagaacctgaccgtcaagccatgcaaaacacgctggcttttagcaggaccgtctacgatcaaacgaccgccacgaccgatcgtaaccagatactcatcaccaacgaagacgaaatcagacccaccaactcggtcggtatcgacgcgtggggagcagttcccaccaacaaccagtcgatcgtgacccccggcactcgcgcggccgtcaacaatcaaggggcgcttcccgggatggtgtggcaaaacagagacatttaccctacagggacccatttggccaaaattcccgacactgacaatcacttccatccgtccccgcttattgggcggtttggctgcaagcatccccctccccagattttcattaaaaacacacccgtccctgccaacccttcggaaacgttccagacggccaaagtggcctccttcatcaaccagtactcgaccggacagtgcaccgtcgaaatcttttgggaactcaagaaggaaacctccaagcgctggaaccccgaaatccagttcacctccaactttggcaacgcggccgacatccagtttgccgtctccgacacgggatcctattccgaacctcgtcccatcggtacccgttaccttaccaaacctctgtaa

SEQ ID NO: 5182 - DNA, 2232 bp, Artificial Sequence
  Description of Artificial Sequence: Synthetic polynucleotide
atgtctctcatttctgatgcgattccagattggttggagcggttggtcaaaaagggagtgaatgctgcagctgatttctaccatttggaaagcggtcctcctcgtcctaaggcaaatcagcaaactcaagaatctcttgaaaaggacgattcgagaggtctcgtgttcccaggctacaattatctaggccctttcaacggtctagataaaggagaacccgtcaacgaggcagacgctgccgccttagaacacgacaaggcttacgacctcgaaatcaaggacgggcacaacccgtactttgagtacaacgaggccgacagacgtttccaggaacgtctcaaagacgatacctcctttggaggcaatttaggtaaagccatcttccaggccaaaaagagggttctcgaaccctttggtctggtggaagactcaaagacggctccgaccggagacaagcggaaaggcgaagacgaacctcgtttgcccgacacttcttcacagactcccaagaaaaacaagaagcctcgcaaggaaagaccttccggcggggcagaagatccgggcgaaggcacctcttccaacgctggagcagcagcacccgcctctagtgtgggatcatctatcatggctgaaggaggtggcggcccagtgggcgatgcaggccagggtgccgatggagtgggcaattcctccggaaattggcattgcgattcccaatggctggaaaacggagtcgtcactcgaaccacccgaacctgggtcttgcccagctacaacaaccacctgtacaaacgaatccaaggacccagcggaggcgacaacaacaacaaattctttggattcagcaccccctggggatactttgactacaatcgattccactgccacttttccccgcgagactggcaacgactcatcaacaacaactggggcatccgtcccaaagcgatgcgctttagactctttaacatccaggttaaagaggtcacggtccaagacttcaacaccaccatcggcaacaacctcaccagtacggtccaggtctttgcggacaaggactaccaactgccgtacgtcctcggatcggctaccgaaggcaccttcccgccgttcccagcggatatctacacgatcccgcagtacgggtactgcacgctaaactacaacaacgaggcggtggatcgttcggccttctactgtctggactactttccctcagacatgctgcggacaggaaataactttgagtttacttacaccttcgaggacgttcctttccatagcatgtttgcccacaaccagacgctagaccggctgatgaatcccctcgtggatcagtacctctgggctttcagctccgtcagccaagcaggctcatctggacgagctcttcattactcgcgggcgactaaaaccaacatggcggctcaatataggaactggttacctgggcctttcttccgtgatcagcaaatctttacgggcgctagcaacatcactaaaaataacgtctttagcgtttgggaaaaaggcaagcaatgggaactcgacaatcggaccaacctaatgcagcccggtcctgcggcagcgaccacctttagcggagaacctgaccgtcaagccatgcaaaacacgctggcttttagcaggaccgtctacgatcaaacgaccgccacgaccgatcgtaaccagatactcatcaccaacgaagacgaaatcagacccaccaactcggtcggtatcgacgcgtggggagcagttcccaccaacaaccagtcgatcgtgacccccggcactcgcgcggccgtcaacaatcaaggggcgcttcccgggatggtgtggcaaaacagagacatttaccctacagggacccatttggccaaaattcccgacactgacaatcacttccatccgtccccgcttattgggcggtttggctgcaagcatccccctccccagattttcattaaaaacacacccgtccctgccaacccttcggaaacgttccagacggccaaagtggcctccttcatcaaccagtactcgaccggacagtgcaccgtcgaaatcttttgggaactcaagaaggaaacctccaagcgctggaaccccgaaatccagttcacctccaactttggcaacgcggccgacatccagtttgccgtctccgacacgggatcctattccgaacctcgtcccatcggtacccgttaccttaccaaacctctgtaa

SEQ ID NO: 5183 - protein, 535 aa, Artificial Sequence
  Description of Artificial Sequence: Synthetic polypeptide
MAEGGGGPVGDAGQGADGVGNSSGNWHCDSQWLENGVVTRTTRTWVLPSYNNHLYKRIQGPSGGDNNNKFFGFSTPWGYFDYNRFHCHFSPRDWQRLINNNWGIRPKAMRFRLFNIQVKEVTVQDFNTTIGNNLTSTVQVFADKDYQLPYVLGSATEGTFPPFPADIYTIPQYGYCTLNYNNEAVDRSAFYCLDYFPSDMLRTGNNFEFTYTFEDVPFHSMFAHNQTLDRLMNPLVDQYLWAFSSVSQAGSSGRALHYSRATKTNMAAQYRNWLPGPFFRDQQIFTGASNITKNNVFSVWEKGKQWELDNRTNLMQPGPAAATTFSGEPDRQAMQNTLAFSRTVYDQTTATTDRNQILITNEDEIRPTNSVGIDAWGAVPTNNQSIVTPGTRAAVNNQGALPGMVWQNRDIYPTGTHLAKIPDTDNHFHPSPLIGRFGCKHPPPQIFIKNTPVPANPSETFQTAKVASFINQYSTGQCTVEIFWELKKETSKRWNPEIQFTSNFGNAADIQFAVSDTGSYSEPRPIGTRYLTKPL

SEQ ID NO: 5184 - protein, 440 aa, Artificial Sequence
  Description of Artificial Sequence: Synthetic polypeptide
MELVDWLVEKGITTEKEWLLENRESFRSFQASSNSARQIKTALQGAIQEMLLTKTAEDYLVGKDPVSDDDIRQNRIYKILELNHYDPAYVGSILVGWCQKKWGKRNTLWLFGHATTGKTNIAEAIAHAVPFYGCVNWTNENFPFNDCVEKMIIWWEEGKMTAKVVETAKAILGGSRVRVDQKCKASVPIEPTPVIITSNTNMCYVIDGNTTTFEHKQPLEDRMFKLELLTRLPDDFGKVTKQEVRQFFRWSQDHLTPVIPEFLVRKAESRKRPAPSGEGYISPTKRPALAEQQQASESADPVPTRYRIKCSKHCGMDKMLFPCQICESMNRDINICAIHKTTDCKECFPDYGDKDDVELPPCTEHNVSRCYQCHSGELYRVTSDSDEKPAPESDEGTEPSYAPCTIHHLMGKSHGLVTCAACRLKNSTLHDDLDDGDLEQ

SEQ ID NO: 5185 - protein, 319 aa, Artificial Sequence
  Description of Artificial Sequence: Synthetic polypeptide
MELVDWLVEKGITTEKEWLLENRESFRSFQASSNSARQIKTALQGAIQEMLLTKTAEDYLVGKDPVSDDDIRQNRIYKILELNHYDPAYVGSILVGWCQKKWGKRNTLWLFGHATTGKTNIAEAIAHAVPFYGCVNWTNENFPFNDCVEKMIIWWEEGKMTAKVVETAKAILGGSRVRVDQKCKASVPIEPTPVIITSNTNMCYVIDGNTTTFEHKQPLEDRMFKLELLTRLPDDFGKVTKQEVRQFFRWSQDHLTPVIPEFLVRKAESRKRPAPSGEGYISPTKRPALAEQQQASESADPVPTRLVGAVGQKGSECCS

SEQ ID NO: 5186 - protein, 662 aa, Artificial Sequence
  Description of Artificial Sequence: Synthetic polypeptide
MRSYYEVIVQLPNDVESQVPGISDSFVNWITSREWTLPEDADWDLDQVDQVQLTLGDKIQREIRTHWGTMAKEPDFHYFIQLEQGEVFFHLHVLLETCSVKPMVLGRYIRHIQQKIVSKVYCATSLRWKDGCVVTKTKNFGGANKVRAESYIPAYLIPKQQPEVQWAWTNVPEYIKACLHRELRASLARLHFEEAGVSQSKENLARTADGAPVMPTRVSKRYMELVDWLVEKGITTEKEWLLENRESFRSFQASSNSARQIKTALQGAIQEMLLTKTAEDYLVGKDPVSDDDIRQNRIYKILELNHYDPAYVGSILVGWCQKKWGKRNTLWLFGHATTGKTNIAEAIAHAVPFYGCVNWTNENFPFNDCVEKMIIWWEEGKMTAKVVETAKAILGGSRVRVDQKCKASVPIEPTPVIITSNTNMCYVIDGNTTTFEHKQPLEDRMFKLELLTRLPDDFGKVTKQEVRQFFRWSQDHLTPVIPEFLVRKAESRKRPAPSGEGYISPTKRPALAEQQQASESADPVPTRYRIKCSKHCGMDKMLFPCQICESMNRDINICAIHKTTDCKECFPDYGDKDDVELPPCTEHNVSRCYQCHSGELYRVTSDSDEKPAPESDEGTEPSYAPCTIHHLMGKSHGLVTCAACRLKNSTLHDDLDDGDLEQ

SEQ ID NO: 5187 - protein, 541 aa, Artificial Sequence
  Description of Artificial Sequence: Synthetic polypeptide
MRSYYEVIVQLPNDVESQVPGISDSFVNWITSREWTLPEDADWDLDQVDQVQLTLGDKIQREIRTHWGTMAKEPDFHYFIQLEQGEVFFHLHVLLETCSVKPMVLGRYIRHIQQKIVSKVYCATSLRWKDGCVVTKTKNFGGANKVRAESYIPAYLIPKQQPEVQWAWTNVPEYIKACLHRELRASLARLHFEEAGVSQSKENLARTADGAPVMPTRVSKRYMELVDWLVEKGITTEKEWLLENRESFRSFQASSNSARQIKTALQGAIQEMLLTKTAEDYLVGKDPVSDDDIRQNRIYKILELNHYDPAYVGSILVGWCQKKWGKRNTLWLFGHATTGKTNIAEAIAHAVPFYGCVNWTNENFPFNDCVEKMIIWWEEGKMTAKVVETAKAILGGSRVRVDQKCKASVPIEPTPVIITSNTNMCYVIDGNTTTFEHKQPLEDRMFKLELLTRLPDDFGKVTKQEVRQFFRWSQDHLTPVIPEFLVRKAESRKRPAPSGEGYISPTKRPALAEQQQASESADPVPTRLVGAVGQKGSECCS

SEQ ID NO: 5188 - protein, 743 aa, Artificial Sequence
  Description of Artificial Sequence: Synthetic polypeptide
MSLISDAIPDWLERLVKKGVNAAADFYHLESGPPRPKANQQTQESLEKDDSRGLVFPGYNYLGPFNGLDKGEPVNEADAAALEHDKAYDLEIKDGHNPYFEYNEADRRFQERLKDDTSFGGNLGKAIFQAKKRVLEPFGLVEDSKTAPTGDKRKGEDEPRLPDTSSQTPKKNKKPRKERPSGGAEDPGEGTSSNAGAAAPASSVGSSIMAEGGGGPVGDAGQGADGVGNSSGNWHCDSQWLENGVVTRTTRTWVLPSYNNHLYKRIQGPSGGDNNNKFFGFSTPWGYFDYNRFHCHFSPRDWQRLINNNWGIRPKAMRFRLFNIQVKEVTVQDFNTTIGNNLTSTVQVFADKDYQLPYVLGSATEGTFPPFPADIYTIPQYGYCTLNYNNEAVDRSAFYCLDYFPSDMLRTGNNFEFTYTFEDVPFHSMFAHNQTLDRLMNPLVDQYLWAFSSVSQAGSSGRALHYSRATKTNMAAQYRNWLPGPFFRDQQIFTGASNITKNNVFSVWEKGKQWELDNRTNLMQPGPAAATTFSGEPDRQAMQNTLAFSRTVYDQTTATTDRNQILITNEDEIRPTNSVGIDAWGAVPTNNQSIVTPGTRAAVNNQGALPGMVWQNRDIYPTGTHLAKIPDTDNHFHPSPLIGRFGCKHPPPQIFIKNTPVPANPSETFQTAKVASFINQYSTGQCTVEIFWELKKETSKRWNPEIQFTSNFGNAADIQFAVSDTGSYSEPRPIGTRYLTKPL

SEQ ID NO: 5189 - protein, 598 aa, Artificial Sequence
  Description of Artificial Sequence: Synthetic polypeptide
TAPTGDKRKGEDEPRLPDTSSQTPKKNKKPRKERPSGGAEDPGEGTSSNAGAAAPASSVGSSIMAEGGGGPVGDAGQGADGVGNSSGNWHCDSQWLENGVVTRTTRTWVLPSYNNHLYKRIQGPSGGDNNNKFFGFSTPWGYFDYNRFHCHFSPRDWQRLINNNWGIRPKAMRFRLFNIQVKEVTVQDFNTTIGNNLTSTVQVFADKDYQLPYVLGSATEGTFPPFPADIYTIPQYGYCTLNYNNEAVDRSAFYCLDYFPSDMLRTGNNFEFTYTFEDVPFHSMFAHNQTLDRLMNPLVDQYLWAFSSVSQAGSSGRALHYSRATKTNMAAQYRNWLPGPFFRDQQIFTGASNITKNNVFSVWEKGKQWELDNRTNLMQPGPAAATTFSGEPDRQAMQNTLAFSRTVYDQTTATTDRNQILITNEDEIRPTNSVGIDAWGAVPTNNQSIVTPGTRAAVNNQGALPGMVWQNRDIYPTGTHLAKIPDTDNHFHPSPLIGRFGCKHPPPQIFIKNTPVPANPSETFQTAKVASFINQYSTGQCTVEIFWELKKETSKRWNPEIQFTSNFGNAADIQFAVSDTGSYSEPRPIGTRYLTKPL

SEQ ID NO: 5190 - DNA, 4694 bp, Artificial Sequence
  Description of Artificial Sequence: Synthetic polynucleotide
tggccagtttccaagacaggctcgctcgctcactcgggccggggccccaaaggggcccctagcgaccgcttcgcggtcgcggcccgagtgagcgagcgagcctgtcttggaaactggccagcactccggtgaggtaatgccgtcacgtggtcgggaatgggaacgggaaatctcgcgagaacgtaaacaaatataagacggcgccacacggcgctgcgtcatacgcgcgcgcgcaccggcgagatgaggtcgtactacgaggtcatcgttcagctgcccaacgacgtcgagagtcaggtacctggaatctccgattcgttcgtcaactggattacgtcgcgagaatggacgttgcctgaggacgccgattgggatttggaccaggtcgatcaagttcaactgacgctcggcgacaaaatccaacgggagattcgaactcattgggggacgatggccaaagaaccggactttcactattttatccaactggaacaaggtgaggtgttctttcatttacacgtcctgctggaaacgtgttccgtaaagccgatggtactcggaagatatatccgacatattcaacaaaaaattgtgagtaaagtctactgcgccacgagcctacgatggaaggatggatgcgtggtgaccaagaccaaaaatttcgggggcgcgaacaaggtccgggccgagtcgtatattcccgcctacctgatcccgaaacagcaaccggaagtgcagtgggcgtggactaacgtgcccgagtatataaaagcgtgcttgcaccgagaactgcgtgccagtctcgcgcgacttcacttcgaggaggcgggcgtctcgcaatccaaggaaaatctcgcgagaactgcagacggcgctcccgtgatgccgacccgcgtcagcaaacgctacatggagctcgtggattggctcgtggagaaggggatcaccaccgagaaggaatggctgctggaaaacagagaaagctttcggagctttcaggcctcgagcaactcggcgcgtcagatcaagacggccctgcaaggcgccattcaggagatgcttctgaccaagacggcggaggactacctcgtcggaaaggatcccgtctcggacgacgacatccgtcagaaccgcatctacaagattctggaactgaaccactacgacccagcgtacgtggggagtattttggtcgggtggtgccagaagaaatggggcaagcgaaacacgctgtggctgttcggacatgcgaccaccggcaagaccaacatcgcggaggctattgcccatgctgtgccgttctatggatgcgttaactggaccaacgagaactttccgttcaacgactgcgtcgaaaaaatgattatctggtgggaggagggcaaaatgaccgccaaagtggtggaaacagccaaggcgattctgggaggatctcgggtgagagtggaccaaaaatgcaaagcttcggttccgatcgaaccgacgccggtcattattaccagtaacaccaacatgtgttatgtcatcgacgggaacacgaccacgttcgagcataagcagccgttggaggacaggatgtttaagctcgaattgctgactcggttgcctgatgactttggtaaggtgaccaaacaggaggtgcgtcaattcttcaggtggtctcaggatcacctgacccctgtgatcccagaattcctagtgcggaaggcggagtctcgcaaaagacccgccccttccggggaaggctatataagcccgacaaagcggcccgcgctcgcagagcagcagcaggcgtcggagagcgcggacccggttcccaccaggtatcgtatcaaatgctcgaaacattgcggtatggataaaatgttgtttccttgccaaatttgtgaatcgatgaacagagatattaatatttgtgctattcataaaacgaccgactgtaaagagtgtttccccgactacggggataaagatgatgtagaactacccccctgtacagaacacaacgtgtctcgttgttatcaatgtcattcgggcgaattgtatcgcgtgacttcggactctgacgagaaacctgcccccgagagtgatgaaggcaccgagccatcctatgctccctgcacgattcaccacctgatgggcaagagtcacgggttagtcacttgcgcggcgtgtcggttgaaaaatagtacgttgcatgatgacttggatgacggtgatctcgaacaataaatgattgaaatgtagccatgtctctcatttctgatgcgattccagattggttggagcggttggtcaaaaagggagtgaatgctgcagctgatttctaccatttggaaagcggtcctcctcgtcctaaggcaaatcagcaaactcaagaatctcttgaaaaggacgattcgagaggtctcgtgttcccaggctacaattatctaggccctttcaacggtctagataaaggagaacccgtcaacgaggcagacgctgccgccttagaacacgacaaggcttacgacctcgaaatcaaggacgggcacaacccgtactttgagtacaacgaggccgacagacgtttccaggaacgtctcaaagacgatacctcctttggaggcaatttaggtaaagccatcttccaggccaaaaagagggttctcgaaccctttggtctggtggaagactcaaagacggctccgaccggagacaagcggaaaggcgaagacgaacctcgtttgcccgacacttcttcacagactcccaagaaaaacaagaagcctcgcaaggaaagaccttccggcggggcagaagatccgggcgaaggcacctcttccaacgctggagcagcagcacccgcctctagtgtgggatcatctatcatggctgaaggaggtggcggcccagtgggcgatgcaggccagggtgccgatggagtgggcaattcctccggaaattggcattgcgattcccaatggctggaaaacggagtcgtcactcgaaccacccgaacctgggtcttgcccagctacaacaaccacctgtacaaacgaatccaaggacccagcggaggcgacaacaacaacaaattctttggattcagcaccccctggggatactttgactacaatcgattccactgccacttttccccgcgagactggcaacgactcatcaacaacaactggggcatccgtcccaaagcgatgcgctttagactctttaacatccaggttaaagaggtcacggtccaagacttcaacaccaccatcggcaacaacctcaccagtacggtccaggtctttgcggacaaggactaccaactgccgtacgtcctcggatcggctaccgaaggcaccttcccgccgttcccagcggatatctacacgatcccgcagtacgggtactgcacgctaaactacaacaacgaggcggtggatcgttcggccttctactgtctggactactttccctcagacatgctgcggacaggaaataactttgagtttacttacaccttcgaggacgttcctttccatagcatgtttgcccacaaccagacgctagaccggctgatgaatcccctcgtggatcagtacctctgggctttcagctccgtcagccaagcaggctcatctggacgagctcttcattactcgcgggcgactaaaaccaacatggcggctcaatataggaactggttacctgggcctttcttccgtgatcagcaaatctttacgggcgctagcaacatcactaaaaataacgtctttagcgtttgggaaaaaggcaagcaatgggaactcgacaatcggaccaacctaatgcagcccggtcctgcggcagcgaccacctttagcggagaacctgaccgtcaagccatgcaaaacacgctggcttttagcaggaccgtctacgatcaaacgaccgccacgaccgatcgtaaccagatactcatcaccaacgaagacgaaatcagacccaccaactcggtcggtatcgacgcgtggggagcagttcccaccaacaaccagtcgatcgtgacccccggcactcgcgcggccgtcaacaatcaaggggcgcttcccgggatggtgtggcaaaacagagacatttaccctacagggacccatttggccaaaattcccgacactgacaatcacttccatccgtccccgcttattgggcggtttggctgcaagcatccccctccccagattttcattaaaaacacacccgtccctgccaacccttcggaaacgttccagacggccaaagtggcctccttcatcaaccagtactcgaccggacagtgcaccgtcgaaatcttttgggaactcaagaaggaaacctccaagcgctggaaccccgaaatccagttcacctccaactttggcaacgcggccgacatccagtttgccgtctccgacacgggatcctattccgaacctcgtcccatcggtacccgttaccttaccaaacctctgtaaattaaacccttcaataaaccgtttatgcgtaactgtatttccgtctcctgtcgttattcagtcacatgatgcggcattacctcaccggagtgctggccagtttccaagacaggctcgctcgctcactcgggccggggccccaaaggggcccctagcgaccgcttcgcggtcgcggcccgagtgagcgagcgagcctgtcttggaaactggcca

SEQ ID NO: 5191 - DNA, 2211 bp, Artificial Sequence
  Description of Artificial Sequence: Synthetic polynucleotide
atggctgctgatggttatcttccagattggctcgaggacactctctctgaaggaataagacagtggtggaagctcaaacctggcccaccaccaccaaagcccgcagagcggcataaggacgacagcaggggtcttgtgcttcctgggtacaagtacctcggacccttcaacggactcgacaagggagagccggtcaacgaggcagacgcagcggccctcgagcacgacaaggcctacgaccagcagctcaaggccggtgacaacccctacctcaagtacaaccacgccgacgcggagttccagcagcggcttcagggcgacacatcgtttgggggcaacctcggcagagcagtcttccaggccaaaaagagggttcttgaacctcttggtctggttgagcaagcgggtgagacggctcctggaaagaagagaccgttgattgaatccccccagcagcccgactcctccacgggtatcggcaaaaaaggcaagcagccggctaaaaagagactcaattttggtcagactggcgactcagagtcagtccccgacccacaacctctcggagaacctccagcaacccccgctgctgtgggacctactacaatggcttcaggtggtggcgcaccaatggcagacaataacgaaggcgccgacggagtgggtaatgcctcaggaaattggcattgcgattccacatggctgggcgacagagtcatcaccaccagcacccgcacctgggccttgcccacctacaataaccacctctacaagcaaatctccagtgcttcaacgggggccagcaacgacaaccactacttcggctacagcaccccctgggggtattttgacttcaacagattccactgccacttttcaccacgtgactggcagcgactcatcaacaacaattggggattccggcccaagagactcaacttcaaactcttcaacatccaagtcaaggaggtcacgacgaatgatggcgtcacaaccatcgctaataaccttaccagcacggttcaagtcttctcggactcagactatcagctcccgtacgtgctcgggtcggctcacgagggctgcctcccgccgttcccagcagacgtcttcatggtgccacagtatggatacctcaccctgaacaacgggagtcaggcagtaggacgctcttcattttactgcctggagtactttccttctcagatgctgcgtaccggaaacaactttaccttcagctacacttttgaggacgttcctttccacagcagctacgctcacagccagagtctggaccgtctcatgaatcctctcatcgaccagtacctgtattacctgaacagaactcagaatcagtccggaagtgcccaaaacaaggacttgctgtttagccgggggtctccagctggcatgtctgttcagcccaaaaactggctacctggaccctgttatcggcagcagcgcgtttctaaaacaaaaacagacaacaacaacagcaactttacctggactggtgcttcaaaatataaccttaatgggcgtgaatctataatcaaccctggcactgctatggcctcacacaaagacgacaaagacaagttctttcccatgagcggtgtcatgatttttggaaaggagagcgccggagcttcaaacactgcattggacaatgtcatgatcacagacgaagaggaaatcaaagccactaaccccgtggccaccgaaagatttgggactgtggcagtcaatctccagagcagcagcacagaccctgcgaccggagatgtgcatgttatgggagccttacctggaatggtgtggcaagacagagacgtatacctgcagggtcccatttgggccaaaattcctcacacagatggacactttcacccgtctcctcttatgggcggctttggactcaagaacccgcctcctcagatcctcatcaaaaacacgcctgttcctgcgaatcctccggcggagttttcagctacaaagtttgcttcattcatcacccaatactccacaggacaagtgagtgtggaaattgaatgggagctgcagaaagaaaacagcaagcgctggaatcccgaagtgcagtacacatccaattatgcaaaatctgccaacgttgattttactgtggacaacaatggactttatactgagcctcgccccattggcacccgttacctcacccgtcccctgtaa

SEQ ID NO: 5192 - protein, 736 aa, Artificial Sequence
  Description of Artificial Sequence: Synthetic polypeptide
MAADGYLPDWLEDTLSEGIRQWWKLKPGPPPPKPAERHKDDSRGLVLPGYKYLGPFNGLDKGEPVNEADAAALEHDKAYDQQLKAGDNPYLKYNHADAEFQQRLQGDTSFGGNLGRAVFQAKKRVLEPLGLVEQAGETAPGKKRPLIESPQQPDSSTGIGKKGKQPAKKRLNFGQTGDSESVPDPQPLGEPPATPAAVGPTTMASGGGAPMADNNEGADGVGNASGNWHCDSTWLGDRVITTSTRTWALPTYNNHLYKQISSASTGASNDNHYFGYSTPWGYFDFNRFHCHFSPRDWQRLINNNWGFRPKRLNFKLFNIQVKEVTTNDGVTTIANNLTSTVQVFSDSDYQLPYVLGSAHEGCLPPFPADVFMVPQYGYLTLNNGSQAVGRSSFYCLEYFPSQMLRTGNNFTFSYTFEDVPFHSSYAHSQSLDRLMNPLIDQYLYYLNRTQNQSGSAQNKDLLFSRGSPAGMSVQPKNWLPGPCYRQQRVSKTKTDNNNSNFTWTGASKYNLNGRESIINPGTAMASHKDDKDKFFPMSGVMIFGKESAGASNTALDNVMITDEEEIKATNPVATERFGTVAVNLQSSSTDPATGDVHVMGALPGMVWQDRDVYLQGPIWAKIPHTDGHFHPSPLMGGFGLKNPPPQILIKNTPVPANPPAEFSATKFASFITQYSTGQVSVEIEWELQKENSKRWNPEVQYTSNYAKSANVDFTVDNNGLYTEPRPIGTRYLTRPL

SEQ ID NO: 5193 - DNA, 2211 bp, Artificial Sequence
  Description of Artificial Sequence: Synthetic polynucleotide
atggcttccgatggttatcttccagattggctcgaggacaacctctctgagggcatccgcgagtggtgggacttgaaacctggagccccgaaacccaaagccaaccagcaaaagcaggacgacggccggggtctggtgcttcctggctacaagtacctcggacccttcaacggactcgacaagggggagcccgtcaacgcggcggatgcagcggccctcgagcacgacaaggcctacgaccagcagctcagagcgggtgacaatccgtacctgcggtataaccacgccgacgccgagtttcaggagcgtctgcaagaagatacgtcttttgggggcaacctcgggcgagcagtcttccaggccaagaagagggttctcgaaccttttggtctggttgaggaaggtgctaagacggctcctggaaagaaacgtccggtagagcagtcgccacaagagccagactcctcctcgggcattggcaagacaggccagcagcccgctaaaaagagactcaattttggtcagactggcgactcagagtcagtccccgacccacaacctctcggagaacctccagcaacccccgctgctgtgggacctactacaatggcttcaggcggtggcgcaccaatggcagacaataacgaaggcgccgacggagtgggtaatgcctcaggaaattggcattgcgattccacatggctgggcgacagagtcatcaccaccagcacccgaacatgggccttgcccacctataacaaccacctctacaagcaaatctccagtgcttcaacgggggccagcaacgacaaccactacttcggctacagcaccccctgggggtattttgatttcaacagattccactgccatttctcaccacgtgactggcagcgactcatcaacaacaattggggattccggcccaagagactcaacttcaaactcttcaacatccaagtcaaggaggtcacgacgaatgatggcgtcacaaccatcgctaataaccttaccagcacggttcaagtcttctcggactcggagtaccagcttccgtacgtcctcggctctgcgcaccagggctgcctccctccgttcccggcggacgtgttcatgattccgcagtacggctacctaacgctcaacaatggcagccaggcagtgggacggtcatccttttactgcctggaatatttcccatcgcagatgctgagaacgggcaataactttaccttcagctacaccttcgaggacgtgcctttccacagcagctacgcgcacagccagagcctggaccggctgatgaatcctctcatcgaccagtacctgtattacctgaacagaactcagaatcagtccggaagtgcccaaaacaaggacttgctgtttagccgggggtctccagctggcatgtctgttcagcccaaaaactggctacctggaccctgttaccggcagcagcgcgtttctaaaacaaaaacagacaacaacaacagcaactttacctggactggtgcttcaaaatataaccttaatgggcgtgaatctataatcaaccctggcactgctatggcctcacacaaagacgacaaagacaagttctttcccatgagcggtgtcatgatttttggaaaggagagcgccggagcttcaaacactgcattggacaatgtcatgatcacagacgaagaggaaatcaaagccactaaccccgtggccaccgaaagatttgggactgtggcagtcaatctccagagcagcagcacagaccctgcgaccggagatgtgcatgttatgggagccttacctggaatggtgtggcaagacagagacgtatacctgcagggtcccatttgggccaaaattcctcacacagatggacactttcacccgtctcctcttatgggcggctttggacttaagcacccgcctcctcagatcctcatcaaaaacacgcctgttcctgcgaatcctccggcagagttttcggctacaaagtttgcttcattcatcacccagtattctactggccaagtcagcgtggagattgaatgggagctgcagaaagaaaacagcaaacgctggaatcccgaagtgcagtatacatctaactatgcaaaatctgccaacgttgatttcactgtggacaacaatggactttatactgagcctcgtcccattggcacccgttacctcacccgtcccctgtaa

SEQ ID NO: 5194 - protein, 736 aa, Artificial Sequence
  Description of Artificial Sequence: Synthetic polypeptide
MASDGYLPDWLEDNLSEGIREWWDLKPGAPKPKANQQKQDDGRGLVLPGYKYLGPFNGLDKGEPVNAADAAALEHDKAYDQQLRAGDNPYLRYNHADAEFQERLQEDTSFGGNLGRAVFQAKKRVLEPFGLVEEGAKTAPGKKRPVEQSPQEPDSSSGIGKTGQQPAKKRLNFGQTGDSESVPDPQPLGEPPATPAAVGPTTMASGGGAPMADNNEGADGVGNASGNWHCDSTWLGDRVITTSTRTWALPTYNNHLYKQISSASTGASNDNHYFGYSTPWGYFDFNRFHCHFSPRDWQRLINNNWGFRPKRLNFKLFNIQVKEVTTNDGVTTIANNLTSTVQVFSDSEYQLPYVLGSAHQGCLPPFPADVFMIPQYGYLTLNNGSQAVGRSSFYCLEYFPSQMLRTGNNFTFSYTFEDVPFHSSYAHSQSLDRLMNPLIDQYLYYLNRTQNQSGSAQNKDLLFSRGSPAGMSVQPKNWLPGPCYRQQRVSKTKTDNNNSNFTWTGASKYNLNGRESIINPGTAMASHKDDKDKFFPMSGVMIFGKESAGASNTALDNVMITDEEEIKATNPVATERFGTVAVNLQSSSTDPATGDVHVMGALPGMVWQDRDVYLQGPIWAKIPHTDGHFHPSPLMGGFGLKHPPPQILIKNTPVPANPPAEFSATKFASFITQYSTGQVSVEIEWELQKENSKRWNPEVQYTSNYAKSANVDFTVDNNGLYTEPRPIGTRYLTRPL

SEQ ID NO: 5195 - DNA, 2211 bp, Artificial Sequence
  Description of Artificial Sequence: Synthetic polynucleotide
atggctgctgatggttatcttccagattggctcgaggacactctctctgaaggaataagacagtggtggaagctcaaacctggcccaccaccaccaaagcccgcagagcggcataaggacgacagcaggggtcttgtgcttcctgggtacaagtacctcggacccttcaacggactcgacaagggagagccggtcaacgaggcagacgcagcggccctcgagcacgacaaggcctacgaccagcagctcaaggccggtgacaacccctacctcaagtacaaccacgccgacgcggagttccagcagcggcttcagggcgacacatcgtttgggggcaacctcggcagagcagtcttccaggccaaaaagagggttcttgaacctcttggtctggttgagcaagcgggtgagacggctcctggaaagaagagaccgttgattgaatccccccagcagcccgactcctccacgggtatcggcaaaaaaggcaagcagccggctaaaaagagactcaattttggtcagactggcgactcagagtcagtccccgacccacaacctctcggagaacctccagcaacccccgctgctgtgggacctactacaatggcttcaggtggtggcgcaccaatggcagacaataacgaaggcgccgacggagtgggtaatgcctcaggaaattggcattgcgattccacatggctgggcgacagagtcatcaccaccagcacccgcacctgggccttgcccacctacaataaccacctctacaagcaaatctccagtgcttcaacgggggccagcaacgacaaccactacttcggctacagcaccccctgggggtattttgacttcaacagattccactgccacttttcaccacgtgactggcagcgactcatcaacaacaattggggattccggcccaagagactcaacttcaaactcttcaacatccaagtcaaggaggtcacgacgaatgatggcgtcacaaccatcgctaataaccttaccagcacggttcaagtcttctcggactcagactatcagctcccgtacgtgctcgggtcggctcacgagggctgcctcccgccgttcccagcagacgtcttcatggtgccacagtatggatacctcaccctgaacaacgggagtcaggcagtaggacgctcttcattttactgcctggagtactttccttctcagatgctgcgtaccggaaacaactttaccttcagctacacttttgaggacgttcctttccacagcagctacgctcacagccagagtctggaccgtctcatgaatcctctcatcgaccagtacctgtattacctgaacagaactcagaatcagtccggaagtgcccaaaacaaggacttgctgtttagccgggggtctccaactggcatgtctgttcagcccaaaaactggctacctggaccctgttatcggcagcagcgcgtttctaaaacaaaaacagacaacaacaacagcaactttacctggactggtgcttcaaaatataaccttaatgggcgtgaatctataatcaaccctggcactgctatggcctcacacaaagacgacaaagacaagttctttcccatgagcggtgtcatgatttttggaaaggagagcgccggagcttcaaacactgcattggacaatgtcatgatcacagacgaagaggaaatcaaagccactaaccccgtggccactgaaagatttgggactgtggcagtcaatctccagagcagcagcacagaccctgcgaccggagatgtgcatgccatgggagccttacctggaatggtgtggcaagacagagacgtatacctgcagggtcctatttgggccaaaattcctcacacggatggacactttcacccgtctcctctcatgggcggctttggactcaagaacccgcctcctcagatcctcatcaaaaacacgcctgttcctgcgaatcctccggcggagttttcagctacaaagtttgcttcattcatcacccagtattccacaggacaagtgagcgtggagattgaatgggagctgcagaaagaaaacagcaaacgctggaatcccgaagtgcagtatacatctaactatgcaaaatctgccaacgttgatttcactgtggacaacaatggactttatactgagcctcgccccattggcacccgttacctcacccgtcccctgtaa

SEQ ID NO: 5196 - protein, 736 aa, Artificial Sequence
  Description of Artificial Sequence: Synthetic polypeptide
MAADGYLPDWLEDTLSEGIRQWWKLKPGPPPPKPAERHKDDSRGLVLPGYKYLGPFNGLDKGEPVNEADAAALEHDKAYDQQLKAGDNPYLKYNHADAEFQQRLQGDTSFGGNLGRAVFQAKKRVLEPLGLVEQAGETAPGKKRPLIESPQQPDSSTGIGKKGKQPAKKRLNFGQTGDSESVPDPQPLGEPPATPAAVGPTTMASGGGAPMADNNEGADGVGNASGNWHCDSTWLGDRVITTSTRTWALPTYNNHLYKQISSASTGASNDNHYFGYSTPWGYFDFNRFHCHFSPRDWQRLINNNWGFRPKRLNFKLFNIQVKEVTTNDGVTTIANNLTSTVQVFSDSDYQLPYVLGSAHEGCLPPFPADVFMVPQYGYLTLNNGSQAVGRSSFYCLEYFPSQMLRTGNNFTFSYTFEDVPFHSSYAHSQSLDRLMNPLIDQYLYYLNRTQNQSGSAQNKDLLFSRGSPTGMSVQPKNWLPGPCYRQQRVSKTKTDNNNSNFTWTGASKYNLNGRESIINPGTAMASHKDDKDKFFPMSGVMIFGKESAGASNTALDNVMITDEEEIKATNPVATERFGTVAVNLQSSSTDPATGDVHAMGALPGMVWQDRDVYLQGPIWAKIPHTDGHFHPSPLMGGFGLKNPPPQILIKNTPVPANPPAEFSATKFASFITQYSTGQVSVEIEWELQKENSKRWNPEVQYTSNYAKSANVDFTVDNNGLYTEPRPIGTRYLTRPL

SEQ ID NO: 5197 - DNA, 2211 bp, Artificial Sequence
  Description of Artificial Sequence: Synthetic polynucleotide
atggctgccgatggttatcttccagattggctcgaggacaacctctctgagggcattcgcgagtggtgggcgctgaaacctggagccccgaagcccaaagccaaccagcaaaagcaggacgacggccggggtctggtgcttcctggctacaagtacctcggacccttcaacggactcgacaagggggagcccgtcaacgcggcggatgcagcggccctcgagcacgacaaggcctacgaccagcagctcaaagcgggtgacaatccgtacctgcggtataaccacgccgacgccgagtttcaggagcgtctgcaagaagatacgtcttttgggggcaacctcgggcgagcagtcttccaggccaagaagcgggttctcgaacctctcggtctggttgaggaaggcgctaagacggctcctggaaagaaacgtccggtagagcaatcgccacaagagccagactcctcctcgggcatcggcaagacaggccagcagcccgctaaaaagagactcaattttggtcagactggcgactcagagtcagtccccgacccacaacctctcggagaacctccagcaacccccgctgctgtgggacctactacaatggcttcaggcggtggcgcaccaatggcagacaataacgaaggcgccgacggagtgggtaatgcctcaggaaattggcattgcgattccacatggctgggcgacagagtcatcaccaccagcacccgaacatgggccttgcccacctataacaaccacctctacaagcaaatctccagtgcttcgacgggggccagcaacgacaaccactacttcggctacagcaccccctgggggtattttgactttaacagattccactgccacttttcaccacgtgactggcagcgactcatcaacaacaactggggattccggcccaagagactcagcttcaagctcttcaacatccaggtcaaggaggtcacgacgaatgatggcgtcacaaccatcgctaataaccttaccagcacggttcaagtcttctcggactcggagtaccagcttccgtacgtcctcggctctgcgcaccagggctgcctccctccgttcccggcggacgtgttcatgattccgcaatacggctacctgacgctcaacaatggcagccaagccgtgggacgttcatccttttactgcctggaatatttcccttctcagatgctgagaacgggcaacaactttaccttcagctacacctttgaggaagtgcctttccacagcagctacgcgcacagccagagcctggaccggctgatgaatcctctcatcgatcaatacctgtattacctgaacagaactcaaaatcagtccggaagtgcccaaaacaaggacttgctgtttagccgtgggtctccagctggcatgtctgttcagcccaaaaactggctacctggaccctgttatcggcagcagcgcgtttctaaaacaaaaacagacaacaacaacagcaattttacctggactggtgcttcaaaatataacctcaatgggcgtgaatccatcatcaaccctggcactgctatggcctcacataaagacgacgaagacaagttctttcccatgagcggtgtcatgatttttggaaaagagagcgccggagcttcaaacactgcattggacaatgtcatgattacagacgaagaggaaattaaagccactaaccctgtggccaccgaaagatttgggaccgtggcagtcaatttccagagcagcagcacagaccctgcgaccggagatgtgcatgctatgggagcattacctggcatggtgtggcaagatagagacgtgtacctgcagggtcccatttgggccaaaattcctcacacagatggacactttcacccgtctcctcttatgggcggctttggactcaagaacccgcctcctcagatcctcatcaaaaacacgcctgttcctgcgaatcctccggcggagttttcagctacaaagtttgcttcattcatcacccaatactccacaggacaagtgagcgtggagattgaatgggagctgcagaaagaaaacagcaaacgctggaatcccgaagtgcagtatacatctaactatgcaaaatctgccaacattgatttcactgtggacaacaatggactttatactgagcctcgccccattggcacccgttacctcacccgtccccagtaa

SEQ ID NO: 5198 - protein, 736 aa, Artificial Sequence
  Description of Artificial Sequence: Synthetic polypeptide
MAADGYLPDWLEDNLSEGIREWWALKPGAPKPKANQQKQDDGRGLVLPGYKYLGPFNGLDKGEPVNAADAAALEHDKAYDQQLKAGDNPYLRYNHADAEFQERLQEDTSFGGNLGRAVFQAKKRVLEPLGLVEEGAKTAPGKKRPVEQSPQEPDSSSGIGKTGQQPAKKRLNFGQTGDSESVPDPQPLGEPPATPAAVGPTTMASGGGAPMADNNEGADGVGNASGNWHCDSTWLGDRVITTSTRTWALPTYNNHLYKQISSASTGASNDNHYFGYSTPWGYFDFNRFHCHFSPRDWQRLINNNWGFRPKRLSFKLFNIQVKEVTTNDGVTTIANNLTSTVQVFSDSEYQLPYVLGSAHQGCLPPFPADVFMIPQYGYLTLNNGSQAVGRSSFYCLEYFPSQMLRTGNNFTFSYTFEEVPFHSSYAHSQSLDRLMNPLIDQYLYYLNRTQNQSGSAQNKDLLFSRGSPAGMSVQPKNWLPGPCYRQQRVSKTKTDNNNSNFTWTGASKYNLNGRESIINPGTAMASHKDDEDKFFPMSGVMIFGKESAGASNTALDNVMITDEEEIKATNPVATERFGTVAVNFQSSSTDPATGDVHAMGALPGMVWQDRDVYLQGPIWAKIPHTDGHFHPSPLMGGFGLKNPPPQILIKNTPVPANPPAEFSATKFASFITQYSTGQVSVEIEWELQKENSKRWNPEVQYTSNYAKSANIDFTVDNNGLYTEPRPIGTRYLTRPQ

SEQ ID NO: 5199 - DNA, 2211 bp, Artificial Sequence
  Description of Artificial Sequence: Synthetic polynucleotide
atggctgccgatggttatcttccagattggctcgaggacaacctctctgagggcattcgcgagtggtgggacttgaaacctggagccccgaaacccaaagccaaccagcaaaagcaggacgacggccggggtctggtgcttcctggctacaagtacctcggacccttcaacggactcgacaagggggagcccgtcaacgcggcggatgcagcggccctcgagcacgacaaggcctacgaccagcagctcaaagcgggtgacaatccgtaccttcggtataaccacgccgacgccgagtttcaggagcgtctgcaagaagatacgtcttttgggggcaacctcgggcgagcagtcttccaggccaaaaagagggttctcgaacctctcggtctggttgaggaagcggctaagacggctcctggaaagaaacgtccggtagagcagtcgccacaagagccagactcctcctcgggcattggcaagacaggccagcagcccgctaaaaagagactcaattttggtcagactggcgactcagagtcagtccccgacccacaacctctcggagaacctcccgcagccccctcaggtgtgggatctcttacaatggcttcaggtggtggcgcaccaatggcagacaataacgaaggcgccgacggagtgggtaatgcctcaggaaattggcattgcgattccacatggctgggcgacagagtcatcaccaccagcacccgcacctgggccttgcccacctacaataaccacctctacaagcaaatctccagtgcttcaacgggggccagcaacgacaaccactacttcggctacagcaccccctgggggtattttgacttcaacagattccactgccacttttcaccacgtgactggcaaagactcatcaacaacaattggggattccggcccaagagactcaacttcaagctcttcaacatccaagtcaaggaggtcacgacgaatgatggcgtcacgaccatcgctaataaccttaccagcacggttcaagtcttctcggactcggagtaccagttgccgtacgtcctcggctctgcgcaccagggctgcctccctccgttcccggcggacgtgttcatgattccgcagtacggctacctaacgctcaacaatggcagccaggcagtgggacggtcatccttttactgcctggaatatttcccatcgcagatgctgagaacgggcaacaactttaccttcagctacacctttgaggaagtgcctttccacagcagctacgcgcacagccagagcctggaccggctgatgaatcctctcatcgaccagtacctgtattacctgaacagaactcaaaatcagtccggaagtgcccaaaacaaggacttgctgtttagccgtgggtctccagctggcatgtctgttcagcccaaaaactggctacctggaccctgttaccggcagcagtgcgtttctaaaacaaaaacagacaacaacaacagcaactttacctggactggtgcttcaaaatataaccttaatgggcgtgaatctataatcaaccctggcactgctatggcctcacacaaagacgacaaagacaagttctttcccatgagcggtgtcatgatttttggaaaggagagcgccggagcttcaaacactgcattggacaatgtcatgatcacagacgaagaggaaatcaaagccactaaccccgtggccaccgaaagatttgggactgtggcagtcaatctccagagcagcagcacagaccctgcgaccggagatgtgcatgttatgggagccttacctggaatggtgtggcaagacagagacgtatacctgcagggtcctatttgggccaaaattcctcacacagatggacactttcacccgtctcctcttatgggcggctttggactcaagaacccgcctcctcagatcctcatcaaaaacacgcctgttcctgcgaatcctccggcggagttttcagctacaaagtttgcttcattcatcacccaatactccacaggacaagtgagcgtggagattgaatgggagctgcagaaagaaaacagcaagcgctggaatcccgaagtgcagtacacatccaattatgcaaaatctgccaacgttgatttcactgtggacaacaatggactttatactgagcctcgccccattggcacccgttacctcacccgtcccctgtaa

SEQ ID NO: 5200 - protein, 736 aa, Artificial Sequence
  Description of Artificial Sequence: Synthetic polypeptide
MAADGYLPDWLEDNLSEGIREWWDLKPGAPKPKANQQKQDDGRGLVLPGYKYLGPFNGLDKGEPVNAADAAALEHDKAYDQQLKAGDNPYLRYNHADAEFQERLQEDTSFGGNLGRAVFQAKKRVLEPLGLVEEAAKTAPGKKRPVEQSPQEPDSSSGIGKTGQQPAKKRLNFGQTGDSESVPDPQPLGEPPAAPSGVGSLTMASGGGAPMADNNEGADGVGNASGNWHCDSTWLGDRVITTSTRTWALPTYNNHLYKQISSASTGASNDNHYFGYSTPWGYFDFNRFHCHFSPRDWQRLINNNWGFRPKRLNFKLFNIQVKEVTTNDGVTTIANNLTSTVQVFSDSEYQLPYVLGSAHQGCLPPFPADVFMIPQYGYLTLNNGSQAVGRSSFYCLEYFPSQMLRTGNNFTFSYTFEEVPFHSSYAHSQSLDRLMNPLIDQYLYYLNRTQNQSGSAQNKDLLFSRGSPAGMSVQPKNWLPGPCYRQQCVSKTKTDNNNSNFTWTGASKYNLNGRESIINPGTAMASHKDDKDKFFPMSGVMIFGKESAGASNTALDNVMITDEEEIKATNPVATERFGTVAVNLQSSSTDPATGDVHVMGALPGMVWQDRDVYLQGPIWAKIPHTDGHFHPSPLMGGFGLKNPPPQILIKNTPVPANPPAEFSATKFASFITQYSTGQVSVEIEWELQKENSKRWNPEVQYTSNYAKSANVDFTVDNNGLYTEPRPIGTRYLTRPL

SEQ ID NO: 5201 - DNA, 2211 bp, Artificial Sequence
  Description of Artificial Sequence: Synthetic polynucleotide
atggctgccgatggttatcttccagattggctcgaggacaacctctctgagggcattcgcgaatggtgggacttgaaacctggagccccgaaacccaaagtcaaccagcaaaagcaggacaacgctcggggtcttgtgcttccgggttacaaatacctcggacccttcaacggactcgacaagggggagcccgtcaacgcggcggacgcagcggccctcgagcacgacaaggcctacgaccagcagctcaaagcgggtgacaatccgtaccttcggtataaccacgccgacgccgagtttcaggagcgtctgcaagaagatacgtcttttgggggcaaccttggacgagcagtcttccaggccaagaagagggttctcgaaccttttggtctggttgaggaaggtgctaagacggctcctggaaagaaacgtccggtagagcagtcgccacaagagccagactcctcctcgggcattggcaagacaggccagcagcccgctaaaaagagactcaattttggtcagactggcgactcagagtcagtccccgacccacaacctctcggagaacctccagcaacccccgctgctgtgggacctactacaatggcttcaggcggtggcgcaccaatggcagacaataacgaaggcgccgacggagtgggtaatgcctcaggaaattggcattgcgattccacatggctgggcgacagagtcatcaccaccagcacccgcacctgggccttgcccacctacaataaccacctctacaagcaaatctccagtgcttcaacgggggccagcaacgacaaccactacttcggctacagcaccccctgggggtattttgacttcaacagattccactgccacttttcaccacgtgactggcaaagactcatcaacaacaattggggattccggcccaagagactcaacttcaagctcttcaacatccaagtcaaggaggtcacgacgaatgatggcgtcacgaccatcgctaataaccttaccagcacggttcaagtcttctcggactcggagtaccagttgccgtacgtcctcggctctgcgcaccagggctgcctccctccgttcccggcggacgtgttcatgattccgcaatacggctacctgacgctcaacaatggcagccaggcagtgggacggtcatccttttactgcctggaatatttcccatcgcagatgctgagaacgggcaataactttaccttcagctacacttttgaggacgttcctttccacagcagctacgctcacagccagagcctggaccggctgatgaatcctctcatcgaccagtacctgtattacctgaacagaactcagaatcagtccggaagtgcccaaaacaaggacttgctgtttagccgtgggtctccaactggcatgtctgttcagcccaaaaactggctacctggaccctgttatcggcagcagcgcgtttctaaaacaaaaacagacaacaacaacagcaactttacctggactggtgcttcaaaatataaccttaatgggcgtgaatctataatcaaccctggcactgctatggcctcacacaaagacgacgaagacaagttctttcccatgagcggtgtcatgatttttggaaaggagagcgccggagcttcaaacactgcattggacaatgtcatgatcacagacgaagaggaaatcaaagccactaaccccgtggccactgaaagatttgggactgtggcagtcaatctccagagcagcagcacagaccctgcgaccggagatgtgcatgccatgggagccttacctggaatggtgtggcaagacagagacgtatacctgcagggtcctatttgggccaaaattcctcacacggatggacactttcacccgtctcctctcatgggcggctttggacttaagcacccgcctcctcagatcctcatcaaaaacacgcctgttcctgcgaatcctccggcagagttttcggctacaaagtttgcttcattcatcacccagtattccacaggacaagtgagcgtggagattgaatgggagctgcagaaagaaaacagcaaacgctggaatcccgaagtgcagtatacatctaactatgcaaaatctgccaacgttgatttcactgtggacaacaatggactttatactgagcctcgccccattggcacccgttacctcacccgtcccctgtaa

SEQ ID NO: 5202 - protein, 736 aa, Artificial Sequence
  Description of Artificial Sequence: Synthetic polypeptide
MAADGYLPDWLEDNLSEGIREWWDLKPGAPKPKVNQQKQDNARGLVLPGYKYLGPFNGLDKGEPVNAADAAALEHDKAYDQQLKAGDNPYLRYNHADAEFQERLQEDTSFGGNLGRAVFQAKKRVLEPFGLVEEGAKTAPGKKRPVEQSPQEPDSSSGIGKTGQQPAKKRLNFGQTGDSESVPDPQPLGEPPATPAAVGPTTMASGGGAPMADNNEGADGVGNASGNWHCDSTWLGDRVITTSTRTWALPTYNNHLYKQISSASTGASNDNHYFGYSTPWGYFDFNRFHCHFSPRDWQRLINNNWGFRPKRLNFKLFNIQVKEVTTNDGVTTIANNLTSTVQVFSDSEYQLPYVLGSAHQGCLPPFPADVFMIPQYGYLTLNNGSQAVGRSSFYCLEYFPSQMLRTGNNFTFSYTFEDVPFHSSYAHSQSLDRLMNPLIDQYLYYLNRTQNQSGSAQNKDLLFSRGSPTGMSVQPKNWLPGPCYRQQRVSKTKTDNNNSNFTWTGASKYNLNGRESIINPGTAMASHKDDEDKFFPMSGVMIFGKESAGASNTALDNVMITDEEEIKATNPVATERFGTVAVNLQSSSTDPATGDVHAMGALPGMVWQDRDVYLQGPIWAKIPHTDGHFHPSPLMGGFGLKHPPPQILIKNTPVPANPPAEFSATKFASFITQYSTGQVSVEIEWELQKENSKRWNPEVQYTSNYAKSANVDFTVDNNGLYTEPRPIGTRYLTRPL

SEQ ID NO: 5203 - DNA, 2208 bp, Artificial Sequence
  Description of Artificial Sequence: Synthetic polynucleotide
  modified_base (955)..(955): a, c, t or g
  modified_base (971)..(972): a, c, t or g
  modified_base (981)..(981): a, c, t or g
  modified_base (986)..(986): a, c, t or g
  modified_base (1235)..(1235): a, c, t or g
  modified_base (1694)..(1696): a, c, t or g
  modified_base (1698)..(1698): a, c, t or g
  modified_base (1763)..(1765): a, c, t or g
  modified_base (1778)..(1778): a, c, t or g
  modified_base (2204)..(2204): a, c, t or g
atggctgccgatggttatcttccagattggctcgaggacaacctctctgagggcattcgcgaatggtgggacttgaaacctggagccccgaaacccaaagtcaaccagcaaaagcaggacaacgctcggggtcttgtgcttccgggttacaaatacctcggacccttcaacggactcgacaagggggagcccgtcaacgcggcggacgcagcggccctcgagcacgacaaggcctacgaccagcagctcaaagcgggtgacaatccgtaccttcggtataaccacgccgacgccgagtttcaggagcgtctgcaagaagatacgtcttttgggggcaaccttggacgagcagtcttccaggccaagaagagggttctcgaaccttttggtctggttgaggaaggtgctaagacggctcctggaaagaaacgtccggtagagcagtcgccacaagagccagactcctcctcgggcattggcaagacaggccagcagcccgctaaaaagagactcaattttggtcagactggcgactcagagtcagtccccgacccacaacctctcggagaacctccagcaacccccgctgctgtgggacctactacaatggcttcaggcggtggcgcaccaatggcagacaataacgaaggcgccgacggagtgggtaatgcctcaggaaattggcattgcgattccacatggctgggcgacagagtcatcaccaccagcacccgaacatgggccttgcccacctataacaaccacctctacaagcaaatctccagtgcttcaacgggggccagcaacgacaaccactacttcggctacagcaccccctgggggtattttgatttcaacagattccactgccacttttcaccacgtgactggcagcgactcatcaataacaattggggattccggcccaagagactcaacttcaaactcttcaacntccaagtcaaggaggnnacgacgaangatgncgtcacaaccatcgctaataaccttaccagcacggttcaagtcttctcggactcggagtaccagcttccgtacgtcctcggctctgcgcaccagggctgcctccctccgttcccggcggacgtgttcatgattccgcaatacggctacctgacgctcaacaatggcagccaggcagtgggacggtcatccttttactgcctggaatatttcccatcgcagatgctgagaacgggcaataactttacctncagctacacttttgaggacgttcctttccacagcagctacgctcacagccagagcctggaccggctgatgaatcctctcatcgaccagtacctgtattacctgaacagaactcagaatcagtccggaagtgcccaaaacaaggacttgctgtttagccgtgggtctccaactggcatgtctgttcagcccaaaaactggctacctggaccctgttatcggcagcagcgcgtttctaaaacaaaaacagacaacaacaacagcaactttacctggactggtgcttcaaaatataaccttaatgggcgtgaatctataatcaaccctggcactgctatggcctcacacaaagacgacgaagacaagttctttcccatgagcggtgtcatgatttttggaaaggagagcgccggagcttcaaacactgcattggacaatgtcatgatcacagacgaagagannncnaagccactaaccccgtggccactgaaagatttgggactgtggcagtcaatctccaagcagcacannnaccctgcgaccgnagatgtgcatgccatgggagccttacctggaatggtgtggcaagacagagacgtatacctgcagggtcctatttgggccaaaattcctcacacggatggacactttcacccgtctcctctcatgggcggctttggacttaagcacccgcctcctcagatcctcatcaaaaacacgcctgttcctgcgaatcctccggcagagttttcggctacaaagtttgcttcattcatcacccagtattccacaggacaagtgagcgtggagattgaatgggagctgcagaaagaaaacagcaaacgctggaatcccgaagtgcagtatacatctaactatgcaaaatctgccaacgttgatttcactgtggacaacaatggactttatactgagcctcgccccattggcacccgttacctcacccgtccccngtaa

SEQ ID NO: 5204 - protein, 723 aa, Artificial Sequence
  Description of Artificial Sequence: Synthetic polypeptide
MAADGYLPDWLEDNLSEGIREWWDLKPGAPKPKVNQQKQDNARGLVLPGYKYLGPFNGLDKGEPVNAADAAALEHDKAYDQQLKAGDNPYLRYNHADAEFQERLQEDTSFGGNLGRAVFQAKKRVLEPFGLVEEGAKTAPGKKRPVEQSPQEPDSSSGIGKTGQQPAKKRLNFGQTGDSESVPDPQPLGEPPATPAAVGPTTMASGGGAPMADNNEGADGVGNASGNWHCDSTWLGDRVITTSTRTWALPTYNNHLYKQISSASTGASNDNHYFGYSTPWGYFDFNRFHCHFSPRDWQRLINNNWGFRPKRLNFKLFNQVKETTDVTTIANNLTSTVQVFSDSEYQLPYVLGSAHQGCLPPFPADVFMIPQYGYLTLNNGSQAVGRSSFYCLEYFPSQMLRTGNNFTSYTFEDVPFHSSYAHSQSLDRLMNPLIDQYLYYLNRTQNQSGSAQNKDLLFSRGSPTGMSVQPKNWLPGPCYRQQRVSKTKTDNNNSNFTWTGASKYNLNGRESIINPGTAMASHKDDEDKFFPMSGVMIFGKESAGASNTALDNVMITDEEATNPVATERFGTVAVNLQSSPATDVHAMGALPGMVWQDRDVYLQGPIWAKIPHTDGHFHPSPLMGGFGLKHPPPQILIKNTPVPANPPAEFSATKFASFITQYSTGQVSVEIEWELQKENSKRWNPEVQYTSNYAKSANVDFTVDNNGLYTEPRPIGTRYLTRP

SEQ ID NO: 5205 - DNA, 2208 bp, Artificial Sequence
  Description of Artificial Sequence: Synthetic polynucleotide
atggctgccgatggttatcttccagattggctcgaggacactctctctgaaggaataagacagtggtggaagctcaaacctggcccaccaccaccaaagcccgcagagcggcataaggacgacagcaggggtcttgtgcttcctgggtacaagtacctcggacccttcaacggactcgacaagggagagccggtcaacgaggcagacgccgcggccctcgagcacgacaaagcctatgaccggcagctcgacagcggagacaacccgtacctcaagtacaaccacgccgacgcggagtttcaggagcgccttaaagaagatacgtcttttgggggcaacctcggacgagcagtcttccaggcgaaaaagagggttcttgaacctctgggcctggttgaggaacctgttaagacggctccgggaaaaaagaggccggtagagcactctcctgtggagccagactcctcctcgggaaccggaaaggcgggtcagcagcctgcaagaaaaagattgaattttggtcagactggagacgcagactcagtacctgacccccagcctctcggacagccaccagcagccccctctggtctgggaactaatacgatggctacaggcagtggcgcaccaatggcagacaataacgagggcgccgacggagtgggtaattcctcgggaaattggcattgcgattccacatggatgggcgacagagtcatcaccaccagcacccgaacctgggccctgcccacctacaacaaccacctctacaaacaaatttccagccaatcaggagcctcgaacgacaatcactactttggctacagcaccccttgggggtattttgacttcaacagattccactgccacttttcaccacgtgactggcaaagactcatcaacaacaactggggattccgacccaagagactcaagttcaagctctttaacattcaagtcaaagaggtcacgcagaatgacggtacgacgacgattgccaataaccttaccagcacggttcaggtgtttactgactcggagtaccagctcccgtacgtcctcggctcggcgcatcaaggatgcctcccgccgttcccagcagacgtcttcatggtgccacagtatggatacctcaccctgaacaacgggagtcaggcagtaggacgctcttcattttactgcctggagtactttccttctcagatgctgcgtaccggtaacaactttaccttcagctacacttttgaggacgttcctttccacagcagctacgctcacagccagagtctggaccgtctcatgaatcctctcatcgaccagtacctgtattacttgagcagaacagacgctccaagtggaaccaccacgcagtcaaggcttcagttttctcaggccggagcgagtgacattcgggaccagtctaggaactggcttcctggaccctgttaccgccagcagcgagtatcaaagacatctgcggataacaacaacagtgaatactcgtggactggagctaccaagtaccacctcaatggcagagactctctggtgaatccgggcccggccatggcaagccacaaggacgatgaagaaaagttttttcctcagagcggggttctcatctttgggaagcaaggctcagagaaaacaagtgtggacattgaaaaggtcatgattacagacgaagaggaaatcaggacaaccaatcccgtggctacggagcagtatggttctgtatctaccaacctccagagaggcaacagacaagcagctaccgcagatgtcaacacacaaggcgttcttccaggcatggtctggcaggacagagatgtgtaccttcaggggcccatctgggcaaagattccacacacggacggacattttcacccctctcccctcatgggtggattcggacttaaacaccctcctccacagattctcatcaagaacaccccggtacctgcgaatccttcgaccaccttcagtgcggcaaagtttgcttccttcatcacacagtactccacgggacaggtcagcgtggagatcgagtgggagctgcagaaggaaaacagcaaacgctggaatcccgaagttcagtacacttccaactacaacaagtctgttaatgtggactttactgtggacactaatggcgtgtattcagagcctcgccccattggcaccagatacctgactcgtaatctgtaa

SEQ ID NO: 5206 - protein, 735 aa, Artificial Sequence
  Description of Artificial Sequence: Synthetic polypeptide
MAADGYLPDWLEDTLSEGIRQWWKLKPGPPPPKPAERHKDDSRGLVLPGYKYLGPFNGLDKGEPVNEADAAALEHDKAYDRQLDSGDNPYLKYNHADAEFQERLKEDTSFGGNLGRAVFQAKKRVLEPLGLVEEPVKTAPGKKRPVEHSPVEPDSSSGTGKAGQQPARKRLNFGQTGDADSVPDPQPLGQPPAAPSGLGTNTMATGSGAPMADNNEGADGVGNSSGNWHCDSTWMGDRVITTSTRTWALPTYNNHLYKQISSQSGASNDNHYFGYSTPWGYFDFNRFHCHFSPRDWQRLINNNWGFRPKRLKFKLFNIQVKEVTQNDGTTTIANNLTSTVQVFTDSEYQLPYVLGSAHQGCLPPFPADVFMVPQYGYLTLNNGSQAVGRSSFYCLEYFPSQMLRTGNNFTFSYTFEDVPFHSSYAHSQSLDRLMNPLIDQYLYYLSRTDAPSGTTTQSRLQFSQAGASDIRDQSRNWLPGPCYRQQRVSKTSADNNNSEYSWTGATKYHLNGRDSLVNPGPAMASHKDDEEKFFPQSGVLIFGKQGSEKTSVDIEKVMITDEEEIRTTNPVATEQYGSVSTNLQRGNRQAATADVNTQGVLPGMVWQDRDVYLQGPIWAKIPHTDGHFHPSPLMGGFGLKHPPPQILIKNTPVPANPSTTFSAAKFASFITQYSTGQVSVEIEWELQKENSKRWNPEVQYTSNYNKSVNVDFTVDTNGVYSEPRPIGTRYLTRNL

SEQ ID NO: 5207 - DNA, 2208 bp, Artificial Sequence
  Description of Artificial Sequence: Synthetic polynucleotide
atggctgccgatggttatcttccagattggctcgaggacactctctctgaaggaataagacagtggtggaagctcaaacctggcccaccaccaccaaagcccgcagagcggcataaggacgacagcaggggtcttgtgcttcctgggtacaagtacctcggacccttcaacggactcgacaagggagagccggtcaacgaggcagacgccgcggccctcgagcacgacaaagcctatgaccggcagctcgacagcggagacaacccgtacctcaagtacaaccacgccgacgcggagtttcaggagcgccttaaagaagatacgtcttttgggggcaacctcggacgagcagtcttccaggcgaaaaagagggttcttgaacctctgggcctggttgaggaacctgttaagacggctccgggaaaaaagaggccggtagagcactctcctgtggagccagactcctcctcgggaaccggaaaggcgggccagcagcctgcaagaaaaagattgaattttggtcagactggagacgcaaactcagtacctgacccccagcctctcggacagccaccagcagccccctctggtctgggaactaatacgatggctacaggcagtggcgcaccaatggcagacaataacgagggcgccgacggagtgggtaattcctcgggaaattggcattgcgattccacatggatgggcgacagagtcatcaccaccagcacccgaacctgggccctgcccacctacaacaaccacctctacaaacaaatttccagccaatcaggagcctcgaacgacaatcactactttggctacagcaccccttgggggtattttgacttcaacagattccactgccacttttcaccacgtgactggcaaagactcatcaacaacaactggggattccgacccaagagactcaagttcaagctctttaacattcaagtcaaagaggtcacgcagaatgacggtacgacgacgattgccaataaccttaccagcacggttcaggtgtttactgactcggagtaccagctcccgtacgtcctcggctcggcgcatcaaggatgcctcccgccgttcccagcagacgtcttcatggtgccacagtatggatacctcaccctgaacaacgggagtcgggcagtaggacgctcttcattttactgcctggagtactttccttctcagatgctgcgtaccggtaacaactttaccttcagctacacttttgaggacgttcctttccacagcagctacgctcacagccagagtctggaccgtctcatgaatcctctcatcgaccagtacctgtattacttgagcagaacagacactccaagtggaaccaccacgcagtcaaggcttcagttttctcaggccggagcgagtgacattcgggaccagtctaggaactggcttcctggaccctgttaccgccagcagcgagtatcaaagacatctgcggataacaacaacagtgaatactcgtggactggagctaccaagtaccacctcaatggcagagactctctggtgaatccgggcccggccatggcaagccacaaggacgatgaagaaaagttttttcctcagagcggggttctcatctttgggaagcaaggctcagagaaaacaagtgtggacattgaaaaggtcatgattacagacgaagaggaaatcaggacgaccaatcccgtggctacggagcagtatggttctgtatctaccaacctccagagaggcaacagacaagcagctaccgcagatgtcaacacacaaggcgttcttccaggcatggtctggcaggacagagatgtgtaccttcaggggcccatctgggcaaagattccacacacggacggacattttcacccctctcccctcatgggtggattcggacttaaacaccctcctccacagattctcatcaagaacaccccggtacctgcgaatccttcgaccaccttcagtgcggcaaagtttgcttccttcatcacacagtactccacgggacaggtcagcgtggagatcgagtgggagctgcagaaggaaaacagcaaacgctggaatcccgaagttcagtacacttccaactacaacaagtctgttaatgtggactttactgtggacactaatggcgtgtatacagagcctcgccccattggcaccagatacctgactcgtaatctgtaa

SEQ ID NO: 5208 - protein, 735 aa, Artificial Sequence
  Description of Artificial Sequence: Synthetic polypeptide
MAADGYLPDWLEDTLSEGIRQWWKLKPGPPPPKPAERHKDDSRGLVLPGYKYLGPFNGLDKGEPVNEADAAALEHDKAYDRQLDSGDNPYLKYNHADAEFQERLKEDTSFGGNLGRAVFQAKKRVLEPLGLVEEPVKTAPGKKRPVEHSPVEPDSSSGTGKAGQQPARKRLNFGQTGDANSVPDPQPLGQPPAAPSGLGTNTMATGSGAPMADNNEGADGVGNSSGNWHCDSTWMGDRVITTSTRTWALPTYNNHLYKQISSQSGASNDNHYFGYSTPWGYFDFNRFHCHFSPRDWQRLINNNWGFRPKRLKFKLFNIQVKEVTQNDGTTTIANNLTSTVQVFTDSEYQLPYVLGSAHQGCLPPFPADVFMVPQYGYLTLNNGSRAVGRSSFYCLEYFPSQMLRTGNNFTFSYTFEDVPFHSSYAHSQSLDRLMNPLIDQYLYYLSRTDTPSGTTTQSRLQFSQAGASDIRDQSRNWLPGPCYRQQRVSKTSADNNNSEYSWTGATKYHLNGRDSLVNPGPAMASHKDDEEKFFPQSGVLIFGKQGSEKTSVDIEKVMITDEEEIRTTNPVATEQYGSVSTNLQRGNRQAATADVNTQGVLPGMVWQDRDVYLQGPIWAKIPHTDGHFHPSPLMGGFGLKHPPPQILIKNTPVPANPSTTFSAAKFASFITQYSTGQVSVEIEWELQKENSKRWNPEVQYTSNYNKSVNVDFTVDTNGVYTEPRPIGTRYLTRNL

SEQ ID NO: 5209 - DNA, 2211 bp, Artificial Sequence
  Description of Artificial Sequence: Synthetic polynucleotide
atggctgccgatggttatcttccagattggctcgaggacactctctctgaaggaataagacagtggtggaagctcaaacctggcccaccaccaccaaagcccgcagagcggcataaggacgacagcaggggtcttgtgcttcctgggtacaagtacctcggacccttcaacggactcgacaagggagagccggtcaacgaggcagacgccgcggccctcgagcacgacaaggcctacgaccagcagctcaaagcgggtgacaatccgtacctgcggtataaccacgccgacgccgagtttcaggagcgtctgcaagaagatacgtcttttgggggcaacctcgggcgagcagtcttccaggccaagaagcgggttctcgaacctctcggtctggttgaggaaggcgctaagacggctcctggaaagaaacgtccggtagagcagtcgccacaagagccagactcctcctcgggcatcggcaagacaggccagcagcccgctaaaaagagactcaattttggtcagactggcgactcagagtcagtccccgacccacaacctctcggagaacctccagcaacccccgctgctgtgggacctactacaatggcttcaggcggtggcgcaccaatggcagacaataacgaaggcgccgacggagtgggtaatgcctcaggaaattggcattgcgattccacatggctgggcgacagagtcatcaccaccagcacccgaacatgggccttgcccacctataacaaccacctctacaagcaaatctccagtgcttcgacgggggccagcaacgacaaccactacttcggctacagcaccccctgggggtattttgactttaacagattccactgccacttttcaccacgtgactggcagcgactcatcaacaataactggggattccggcccaagagactcagcttcaagctcttcaacatccaggtcaaggaggtcacgacgaatgatggcgtcacaaccatcgctaataaccttaccagcacggttcaagtcttctcggactcggagtaccagcttccgtacgtcctcggctctgcgcaccagggctgcctccctccgttcccggcggacgtgttcatgattccgcaatacggctacctgacgctcaacaatggcagccaagccgtgggacgttcatccttttactgcctggaatatttcccttctcagatgctgagaacgggcaacaactttaccttcagctacacctttgaggaagtgcctttccacagcagctacgcgcacagccagagcctggaccggctgatgaatcctctcatcgatcaatacctgtattacctgaacagaactcaaaatcagtccggaagtgcccaaaacaaggacttgctgtttagccgtgggtctccagctggcatgtctgttcagcccaaaaactggctacctggaccctgttatcggcagcagcgcgtttctaaaacaaaaacagacaacaacaacagcaattttacctggactggtgcttcaaaatataacctcaatgggcgtgaatccatcatcaaccctggcactgctatggcctcacacaaagacgacgaagacaagttctttcccatgagcggtgtcatgatttttggaaaagagagcgccggagcttcaaacactgcattggacaatgtcatgattacggacgaagaggaaattaaagccactaaccctgtggccaccgaaagatttgggaccgtggcagtcaatttccagagcagcagcacagaccctgcgaccggagatgtgcatgctatgggagcattacctggcatggtgtggcaagatagagacgtgtacctgcagggtcccatttgggccaaaattcctcacacagatggacactttcacccgtctcctcttatgggcggctttggactcaagaacccgcctcctcagatcctcatcaaaaacacgcctgttcctgcgaatcctccggcggagttttcagctacaaagtttgcttcattcatcactcaatactccacaggacaagtgagcgtggaaattgaatgggagctgcagaaagaaaacagcaaacgctggaatcccgaagtgcagtatacatctaactatgcaaaatctgccaacgttgatttcactgtggacaacaatggactttatactgagcctcgccccattggcacccgttacctcacccgtcccctgtaa

SEQ ID NO: 5210 - protein, 736 aa, Artificial Sequence
  Description of Artificial Sequence: Synthetic polypeptide
MAADGYLPDWLEDTLSEGIRQWWKLKPGPPPPKPAERHKDDSRGLVLPGYKYLGPFNGLDKGEPVNEADAAALEHDKAYDQQLKAGDNPYLRYNHADAEFQERLQEDTSFGGNLGRAVFQAKKRVLEPLGLVEEGAKTAPGKKRPVEQSPQEPDSSSGIGKTGQQPAKKRLNFGQTGDSESVPDPQPLGEPPATPAAVGPTTMASGGGAPMADNNEGADGVGNASGNWHCDSTWLGDRVITTSTRTWALPTYNNHLYKQISSASTGASNDNHYFGYSTPWGYFDFNRFHCHFSPRDWQRLINNNWGFRPKRLSFKLFNIQVKEVTTNDGVTTIANNLTSTVQVFSDSEYQLPYVLGSAHQGCLPPFPADVFMIPQYGYLTLNNGSQAVGRSSFYCLEYFPSQMLRTGNNFTFSYTFEEVPFHSSYAHSQSLDRLMNPLIDQYLYYLNRTQNQSGSAQNKDLLFSRGSPAGMSVQPKNWLPGPCYRQQRVSKTKTDNNNSNFTWTGASKYNLNGRESIINPGTAMASHKDDEDKFFPMSGVMIFGKESAGASNTALDNVMITDEEEIKATNPVATERFGTVAVNFQSSSTDPATGDVHAMGALPGMVWQDRDVYLQGPIWAKIPHTDGHFHPSPLMGGFGLKNPPPQILIKNTPVPANPPAEFSATKFASFITQYSTGQVSVEIEWELQKENSKRWNPEVQYTSNYAKSANVDFTVDNNGLYTEPRPIGTRYLTRPL

SEQ ID NO: 5211 - protein, 735 aa, Artificial Sequence
  Description of Artificial Sequence: Synthetic polypeptide
MAADGYLPDWLEDTLSEGIRQWWKLKPGPPPPKPAERHKDDSRGLVLPGYKYLGPFNGLDKGEPVNEADAAALEHDKAYDRQLDSGDNPYLKYNHADAEFQERLKEDTSFGGNLGRAVFQAKKRVLEPLGLVEEPVKTAPGKKRPVEHSPVEPDSSSGTGKAGQQPARKRLNFGQTGDADSVPDPQPLGQPPAAPSGLGTNTMATGSGAPMADNNEGADGVGNSSGNWHCDSTWMGDRVITTSTRTWALPTYNNHLYKQISSQSGASNDNHYFGYSTPWGYFDFNRFHCHFSPRDWQRLINNNWGFRPKRLKFKLFNIQVKEVTQNDGTTTIANNLTSTVQVFTDSEYQLPYVLGSAHQGCLPPFPADVFMVPQYGYLTLNNGSQAVGRSSFYCLEYFPSQMLRTGNNFTFSYTFEDVPFHSSYAHSQSLDRLMNPLIDQYLYYLSRTDTPSGTTTQSRLQFSQAGASDIRNQSRNWLPGPCYRQQRVSKTSADNNNSEYSWTGATKYHLNGRDSLVNPGPAMASHKDDEEKFFPQSGVLIFGKQGSEKTSVDIEKVMITDEEEIRTTNPVATEQYGSVSTNLQRGNRQAATADVNTQGVLPGMVWQDRDVYLQGPIWAKIPHTDGHFHPSPLMGGFGLKHPPPQILIKNTPVPANPSTTFSAAKFASFITQYSTGQVSVEIEWELQKENSKRWNPEVQYTSNYNKSVNVDFTVDTNGVYSEPRPIGTRYLTRNQ

SEQ ID NO: 5212 - DNA, 2208 bp, Artificial Sequence
  Description of Artificial Sequence: Synthetic polynucleotide
atggctgccgatggttatcttccagattggctcgaggacactctctctgaaggaataagacagtggtggaagctcaaacctggcccaccaccaccaaagcccgcagagcggcataaggacgacagcaggggtcttgtgcttcctgggtacaagtacctcggacccttcaacggactcgacaagggagagccggtcaacgaggcagacgccgcggccctcgagcacgacaaagcctatgaccggcagctcgacagcggagacaacccgtacctcaagtacaaccacgccgacgcggagtttcaggaacgccttaaagaagatacgtcttttgggggcaacctcggacgagcagtcttccaggcgaaaaagagggttcttgaacctctgggcctggttgaggaacctgttaagacggctccgggaaaaaagaggccggtagagcactctcctgtggagccagactcctcctcgggaaccggaaaggcgggccagcagcctgcaagaaaaagattgaattttggtcagactggagacgcagactcagtacctgacccccagcctctcggacagccaccagcagccccctctggtctgggaactaatacgatggctacaggcagtggcgcaccaatggcagacaataacgagggcgccgacggagtgggtaattcctcgggaaattggcattgcgattccacatggatgggcgacagagtcatcaccaccagcacccgaacctgggccctgcccacctacaacaaccacctctacaaacaaatttccagccaatcaggagcctcgaacgacaatcactactttggctacagcaccccttgggggtattttgacttcaacagattccactgccacttttcaccacgtgactggcaaagactcatcaacaacaactggggattccgacccaagagactcaagttcaagctctttaacattcaagtcaaagaggtcacgcagaatgacggtacgacgacgattgccaataaccttaccagcacggttcaggtgtttactgactcggagtaccagctcccgtacgtcctcggctcggcgcatcaaggatgcctcccgccgttcccagcagacgtcttcatggtgccacagtatggatacctcaccctgaacaacgggagtcaggcagtaggacgctcttcattttactgcctggagtactttccttctcagatgctgcgtaccggtaacaactttaccttcagctacacttttgaggacgttcctttccacagcagctacgctcacagccagagtctggaccgtctcatgaatcctctcatcgaccagtacctgtattacttgagcagaacagacactccaagtggaaccaccacgcagtcaaggcttcagttttctcaggccggagcgagtgacattcggaaccagtctaggaactggcttcctggaccctgttaccgccagcagcgagtatcaaagacatctgcggataacaacaacagtgaatactcgtggactggagctaccaagtaccacctcaatggcagagactctctggtgaatccgggcccggccatggcaagccacaaggacgatgaagaaaagttttttcctcagagcggggttctcatctttgggaagcaaggctcagagaaaacaagtgtggacattgaaaaggtcatgattacagacgaagaggaaatcaggacaaccaatcccgtggctacggagcagtatggttctgtatctaccaacctccagagaggcaacagacaagcagctaccgcagatgtcaacacacaaggcgttcttccaggcatggtctggcaggacagagatgtgtaccttcaggggcccatctgggcaaagattccacacacggacggacattttcacccctctcccctcatgggtggattcggacttaaacaccctcctccacagattctcatcaagaacaccccggtacctgcgaatccttcgaccaccttcagtgcggcaaagtttgcttccttcatcacacagtactccacgggacaggtcagcgtggagatcgagtgggagctgcagaaggaaaacagcaaacgctggaatcccgaagttcagtacacttccaactacaacaagtctgttaatgtggactttactgtggacactaatggcgtgtattcagagcctcgccccattggcaccagatacctgactcgtaatcagtaa

SEQ ID NO: 5213 - DNA, 2208 bp, Artificial Sequence
  Description of Artificial Sequence: Synthetic polynucleotide
atggctgccgatggttatcttccagattggctcgaggacactctctctgaaggaataagacagtggtggaagctcaaacctggcccaccaccaccaaagcccgcagagcggcataaggacgacagcaggggtcttgtgcttcctgggtacaagtacctcggacccttcaacggactcgacaagggagagccggtcaacgaggcagacgccgcggccctcgagcacgacaaagcctatgaccggcagctcgacagcggagacaacccgtacctcaagtacaaccacgccgacgcggagtttcaggagcgccttaaagaagatacgtcttttgggggcaacctcggacgagcagtcttccaggcgaaaaagagggttcttgaacctctgggcctggttgaggaacctgttaagacggctccgggaaaaaagaggccggtagagcactctcctgtggagccagactcctcctcgggaaccggaaaggcgggccagcagcctgcaagaaaaagattgaattttggtcagactggagacgcagactcagtacctgatccccagcctctcggacagccaccagcagccccctctggtctgggaactaatacgatggctacaggcagtggcgcaccaatggcagacaataacgagggcgccgacggagtgggtaattcctcgggaaattggcattgcgattccacatggatgggcgacagagtcatcaccaccagcacccgaacctgggccctgcccacctacaacaaccacctctacaaacaaatttccagccaatcaggagcctcgaacgacaatcactactttggctacagcaccccttgggggtattttgacttcaacagattccactgccacttttcaccacgtgactggcaaagactcatcaacaacaactggggattccgacccaagagactcaagttcaagctctttaacattcaagtcaaagaggtcacgcagaatgacggtacgacgacgattgccaataaccttaccagcacggttcaggtgtttactgactcggagtaccagctcccgtatgtcctcggctcggcgcatcaaggatgcctcccgccgttcccagcagacgtcttcatggtgccacagtatggatacctcaccctgaacaacgggagtcaggcagtaggacgctcttcattttactgcctggagtactttccttctcagatgctgcgtaccggtaacaactttaccttcagctacacttttgaggacgttcctttccacagcagctacgctcacagccagagtctggaccgtctcatgaatcctctcatcgaccagtacctgtattacttgagcagaacagacactccaagtggaaccaccacgcagtcaaggcttcagttttctcaggccggagcgagtgacattcgggaccagtctaggaactggcttcctggaccctgttaccgccagcagcgagtatcaaagacatctgcggataacaacaacagtgaatactcgtggactggagctaccaagtaccacctcaatggcagagactctctggtgaatccgggcccggccatggcaagccacaaggacgatgaagaaaagttttttcctcagagcggggttctcatctttgggaagcaaggctcagagaaaacaagtgtggacattgaaaaggtcatgattacagacgaagaggaaatcaggacaaccaatcccgtggctacggagcagtatggttctgtatctaccaacctccagagaggcaacagacaagcagctaccgcagatgtcaacacacaaggcgttcttccaggcatggtctggcaggacagagatgtgtaccttcaggggcccatctgggcaaagattccacacacggacggacattttcacccctctcccctcatgggtggattcggacttaaacaccctcctccacagattctcatcaagaacaccccggtacctgcgaatccttcgaccaccttcagtgcggcaaagtttgcttccttcatcacacagtactccacgggacaggtcagcgtggagatcgagtgggagctgcagaaggaaaacagcaaacgctggaatcccgaagttcagtacacttccaactacaacaagtctgttaatgtggactttactgtggacactaatggcgtgtattcagagcctcgccccattggcaccagatacctgactcgtaatctgtaa

SEQ ID NO: 5214 - protein, 735 aa, Artificial Sequence
  Description of Artificial Sequence: Synthetic polypeptide
MAADGYLPDWLEDTLSEGIRQWWKLKPGPPPPKPAERHKDDSRGLVLPGYKYLGPFNGLDKGEPVNEADAAALEHDKAYDRQLDSGDNPYLKYNHADAEFQERLKEDTSFGGNLGRAVFQAKKRVLEPLGLVEEPVKTAPGKKRPVEHSPVEPDSSSGTGKAGQQPARKRLNFGQTGDADSVPDPQPLGQPPAAPSGLGTNTMATGSGAPMADNNEGADGVGNSSGNWHCDSTWMGDRVITTSTRTWALPTYNNHLYKQISSQSGASNDNHYFGYSTPWGYFDFNRFHCHFSPRDWQRLINNNWGFRPKRLKFKLFNIQVKEVTQNDGTTTIANNLTSTVQVFTDSEYQLPYVLGSAHQGCLPPFPADVFMVPQYGYLTLNNGSQAVGRSSFYCLEYFPSQMLRTGNNFTFSYTFEDVPFHSSYAHSQSLDRLMNPLIDQYLYYLSRTDTPSGTTTQSRLQFSQAGASDIRDQSRNWLPGPCYRQQRVSKTSADNNNSEYSWTGATKYHLNGRDSLVNPGPAMASHKDDEEKFFPQSGVLIFGKQGSEKTSVDIEKVMITDEEEIRTTNPVATEQYGSVSTNLQRGNRQAATADVNTQGVLPGMVWQDRDVYLQGPIWAKIPHTDGHFHPSPLMGGFGLKHPPPQILIKNTPVPANPSTTFSAAKFASFITQYSTGQVSVEIEWELQKENSKRWNPEVQYTSNYNKSVNVDFTVDTNGVYSEPRPIGTRYLTRNL

SEQ ID NO: 5215 - DNA, 2172 bp, Artificial Sequence
  Description of Artificial Sequence: Synthetic polynucleotide
atgtcttttgttgatcaccctccagattggttggaagaagttggtgaaggtcttcgcgagtttttgggccttgaagcgggcccaccgaaaccaaaacccaatcagcagcatcaagatcaagcccgtggtcttgtgctgcctggttataactatctcggacccggaaacggtctcgatcgaggagagcctgtcaacagggcagacgaggtcgcgcgagagcacgacatctcgtacaacgagcagcttgaggcgggagacaacccctacctcaagtacaaccacgcggacgccgagtttcaggagaagctcgccgacgacacatccttcgggggaaacctcggaaaggcagtctttcaggccaagaaaagggttctcgaaccttttggcctggttgaagagggtgctaagacggcccctaccggaaagcggatagacgaccactttccaaaaagaaagaaggctcggaccgaagaggactccaagccttccacctcgtcagacgccgaagctggacccagcggatcccagcagctgcaaatcccagcccaaccagcctcaagtttgggagctgatacaatgtctgcgggaggtggcggcccattgggcgacaataaccaaggtgccgatggagtgggcaatgcctcgggagattggcattgcgattccacgtggatgggggacagagtcgtcaccaagtccacccgaacctgggtgctgcccagctacaacaaccaccagtaccgagagatcaaaagcggctccgtcgacggaagcaacgccaacgcctactttggatacagcaccccctgggggtactttgactttaaccgcttccacagccactggagcccccgagactggcaaagactcatcaacaactactggggcttcagaccccggtccctcagagtcaaaatcttcaacattcaagtcaaagaggtcacggtgcaggactccaccaccaccatcgccaacaacctcacctccaccgtccaagtgtttacggacgacgactaccagctgccctacgtcgtcggcaacgggaccgagggatgcctgccggccttccctccgcaggtctttacgctgccgcagtacggttacgcgacgctgaaccgcgacaacacagaaaatcccaccgagaggagcagcttcttctgcctagagtactttcccagcaagatgctgagaacgggcaacaactttgagtttacctacaactttgaggaggtgcccttccactccagcttcgctcccagtcagaacctgttcaagctggccaacccgctggtggaccagtacttgtaccgcttcgtgagcacaaataacactggcggagtccagttcaacaagaacctggccgggagatacgccaacacctacaaaaactggttcccggggcccatgggccgaacccagggctggaacctgggctccggggtcaaccgcgccagtgtcagcgccttcgccacgaccaataggatggagctcgagggcgcgagttaccaggtgcccccgcagccgaacggcatgaccaacaacctccagggcagcaacacctatgccctggagaacactatgatcttcaacagccagccggcgaacccgggcaccaccgccacgtacctcgagggcaacatgctcatcaccagcgagagcgagacgcagccggtgaaccgcgtggcgtacaacgtcggcgggcagatggccaccaacaaccagagctccaccactgcccccgcgaccggcacgtacaacctccaggaaatcgtgcccggcagcgtgtggatggagagggacgtgtacctccaaggacccatctgggccaagatcccagagacgggggcgcactttcacccctctccggccatgggcggattcggactcaaacacccaccgcccatgatgctcatcaagaacacgcctgtgcccggaaatatcaccagcttctcggacgtgcccgtcagcagcttcatcacccagtacagcaccgggcaggtcaccgtggagatggagtgggagctcaagaaggaaaactccaagaggtggaacccagagatccagtacacaaacaactacaacgacccccagtttgtggactttgccccggacagcaccggggaatacagaaccaccagacctatcggaacccgataccttacccgacccctt

SEQ ID NO: 5216 - DNA, 2214 bp, Artificial Sequence
  Description of Artificial Sequence: Synthetic polynucleotide
atggctgccgatggttatcttccagattggctcgaggacaacctctctgagggcattcgcgagtggtgggcgctgaaacctggagccccgaagcccaaagccaaccagcaaaagcaggacgacggccggggtctggtgcttcctggctacaagtacctcggacccttcaacggactcgacaagggggagcccgtcaacgcggcggacgcagcggccctcgagcacgacaaggcctacgaccagcagctgcaggcgggtgacaatccgtacctgcggtataaccacgccgacgccgagtttcaggagcgtctgcaagaagatacgtcttttgggggcaacctcgggcgagcagtcttccaggccaagaagcgggttctcgaacctctcggtctggttgaggaaggcgctaagacggctcctggaaagaagagaccggtagagccatcaccccagcgttctccagactcctctacgggcatcggcaagaaaggccaacagcccgccagaaaaagactcaattttggtcagactggcgactcagagtcagttccagaccctcaacctctcggagaacctccagcagcgccctctggtgtgggacctaatacaatggctgcaggcggtggcgcaccaatggcagacaataacgaaggcgccgacggagtgggtagttcctcgggaaattggcattgcgattccacatggctgggcgacagagtcatcaccaccagcacccgaacctgggccctgcccacctacaacaaccacctctacaagcaaatctccaacgggacatcgggaggagccaccaacgacaacacctacttcggctacagcaccccctgggggtattttgactttaacagattccactgccacttttcaccacgtgactggcagcgactcatcaacaacaactggggattccggcccaagagactcagcttcaagctcttcaacatccaggtcaaggaggtcacgcagaatgaaggcaccaagaccatcgccaataacctcaccagcaccatccaggtgtttacggactcggagtaccagctgccgtacgttctcggctctgcccaccagggctgcctgcctccgttcccggcggacgtgttcatgattccccagtacggctacctaacactcaacaacggtagtcaggccgtgggacgctcctccttctactgcctggaatactttccttcgcagatgctgagaaccggcaacaacttccagtttacttacaccttcgaggacgtgcctttccacagcagctacgcccacagccagagcttggaccggctgatgaatcctctgattgaccagtacctgtactacttgtctcggactcaaacaacaggaggcacggcaaatacgcagactctgggcttcagccaaggtgggcctaatacaatggccaatcaggcaaagaactggctgccaggaccctgttaccgccaacaacgcgtctcaacgacaaccgggcaaaacaacaatagcaactttgcctggactgctgggaccaaataccatctgaatggaagaaattcattggctaatcctggcatcgctatggcaacacacaaagacgacgaggagcgtttttttcccagtaacgggatcctgatttttggcaaacaaaatgctgccagagacaatgcggattacagcgatgtcatgctcaccagcgaggaagaaatcaaaaccactaaccctgtggctacagaggaatacggtatcgtggcagataacttgcctgagcggacggcgatgagtcttccgggaactgtcaacagccagggggccttacccggtatggtctggcagaaccgggacgtgtacctgcagggtcccatctgggccaagattcctcacacggacggcaacttccacccgtctccgctgatgggcggctttggcctgaaacatcctccgcctcagatcctgatcaagaacacgcctgtacctgcggatcctccgaccaccttcaaccagtcaaagctgaactctttcatcacgcaatacagcaccggacaggtcagcgtggaaattgaatgggagctgcagaaggaaaacagcaagcgctggaaccccgagatccagtacacctccaactactacaaatctacaagtgtggactttgctgttaatacagaaggcgtgtactctgaaccccgccccattggcacccgttacctcacccgtaatctg

SEQ ID NO: 5217 - protein, 738 aa, Artificial Sequence
  Description of Artificial Sequence: Synthetic polypeptide
MAADGYLPDWLEDNLSEGIREWWALKPGAPKPKANQQKQDDGRGLVLPGYKYLGPFNGLDKGEPVNAADAAALEHDKAYDQQLQAGDNPYLRYNHADAEFQERLQEDTSFGGNLGRAVFQAKKRVLEPLGLVEEGAKTAPGKKRPVEPSPQRSPDSSTGIGKKGQQPARKRLNFGQTGDSESVPDPQPLGEPPAAPSGVGPNTMAAGGGAPMADNNEGADGVGSSSGNWHCDSTWLGDRVITTSTRTWALPTYNNHLYKQISNGTSGGATNDNTYFGYSTPWGYFDFNRFHCHFSPRDWQRLINNNWGFRPKRLSFKLFNIQVKEVTQNEGTKTIANNLTSTIQVFTDSEYQLPYVLGSAHQGCLPPFPADVFMIPQYGYLTLNNGSQAVGRSSFYCLEYFPSQMLRTGNNFQFTYTFEDVPFHSSYAHSQSLDRLMNPLIDQYLYYLSRTQTTGGTANTQTLGFSQGGPNTMANQAKNWLPGPCYRQQRVSTTTGQNNNSNFAWTAGTKYHLNGRNSLANPGIAMATHKDDEERFFPSNGILIFGKQNAARDNADYSDVMLTSEEEIKTTNPVATEEYGIVADNLPERTAMSLPGTVNSQGALPGMVWQNRDVYLQGPIWAKIPHTDGNFHPSPLMGGFGLKHPPPQILIKNTPVPADPPTTFNQSKLNSFITQYSTGQVSVEIEWELQKENSKRWNPEIQYTSNYYKSTSVDFAVNTEGVYSEPRPIGTRYLTRNL

SEQ ID NO: 5218 - DNA, 2214 bp, Artificial Sequence
  Description of Artificial Sequence: Synthetic polynucleotide
atggctgccgatggttatcttccagattggctcgaggacaacctctctgagggcattcgcgagtggtgggcgctgaaacctggagccccgaagcccaaagccaaccagcaaaagcaggacgacggccggggtctggtgcttcctggctacaagtacctcggacccttcaacggactcgacaagggggagcccgtcaacgcggcggacgcagcggccctcgagcacgacaaggcctacgaccagcagctgcaggcgggtgacaatccgtacctgcggtataaccacgccgacgccgagtttcaggagcgtctgcaagaagatacgtcttttgggggcaacctcgggcgagcagtcttccaggccaagaagcgggttctcgaacctctcggtctggttgaggaaggcgctaagacggctcctggaaagaagagaccggtagagccatcaccccagcgttctccagactcctctacgggcatcggcaagaaaggccaacagcccgccagaaaaagactcaattttggtcagactggcgactcagagtcagttccagaccctcaacctctcggagaacctccagcagcgccctctggtgtgggacctaatacaatggctgcaggcggtggcgcaccaatggcagacaataacgaaggcgccgacggagtgggtagttcctcgggaaattggcattgcgattccacatggctgggcgacagagtcatcaccaccagcacccgaacctgggccctgcccacctacaacaaccacctctacaagcaaatctccaacgggacatcgggaggagccaccaacgacaacacctacttcggctacagcaccccctgggggtattttgactttaacagattccactgccacttttcaccacgtgactggcagcgactcatcaacaacaactggggattccggcccaagagactcagcttcaagctcttcaacatccaggtcaaggaggtcacgcagaatgaaggcaccaagaccatcgccaataacctcaccagcaccatccaggtgtttacggactcggagtaccagctgccgtacgttctcggctctgcccaccagggctgcctgcctccgttcccggcggacgtgttcatgattccccagtacggctacctaacactcaacaacggtagtcaggccgtgggacgctcctccttctactgcctggaatactttccttcgcagatgctgagaaccggcaacaacttccagtttacttacaccttcgaggacgtgcctttccacagcagctacgcccacagccagagcttggaccggctgatgaatcctctgattgaccagtacctgtactacttgtctcggactcaaacaacaggaggcacggcaaatacgcagactctgggcttcagccaaggtgggcctaatacaatggccaatcaggcaaagaactggctgccaggaccctgttaccgccaacaacgcgtctcaacgacaaccgggcaaaacaacaatagcaactttgcctggactgctgggaccaaataccatctgaatggaagaaattcattggctaatcctggcatcgctatggcaacacacaaagacgacgaggagcgtttttttcccagtaacgggatcctgatttttggcaaacaaaatgctgccagagacaatgcggattacagcgatgtcatgctcaccagcgaggaagaaatcaaaaccactaaccctgtggctacagaggaatacggtatcgtggcagataacttgagttttagtcgtgcggttctttgtgatggaactgtcaacagccagggggccttacccggtatggtctggcagaaccgggacgtgtacctgcagggtcccatctgggccaagattcctcacacggacggcaacttccacccgtctccgctgatgggcggctttggcctgaaacatcctccgcctcagatcctgatcaagaacacgcctgtacctgcggatcctccgaccaccttcaaccagtcaaagctgaactctttcatcacgcaatacagcaccggacaggtcagcgtggaaattgaatgggagctgcagaaggaaaacagcaagcgctggaaccccgagatccagtacacctccaactactacaaatctacaagtgtggactttgctgttaatacagaaggcgtgtactctgaaccccgccccattggcacccgttacctcacccgtaatctg

SEQ ID NO: 5219 - protein, 738 aa, Artificial Sequence
  Description of Artificial Sequence: Synthetic polypeptide
MAADGYLPDWLEDNLSEGIREWWALKPGAPKPKANQQKQDDGRGLVLPGYKYLGPFNGLDKGEPVNAADAAALEHDKAYDQQLQAGDNPYLRYNHADAEFQERLQEDTSFGGNLGRAVFQAKKRVLEPLGLVEEGAKTAPGKKRPVEPSPQRSPDSSTGIGKKGQQPARKRLNFGQTGDSESVPDPQPLGEPPAAPSGVGPNTMAAGGGAPMADNNEGADGVGSSSGNWHCDSTWLGDRVITTSTRTWALPTYNNHLYKQISNGTSGGATNDNTYFGYSTPWGYFDFNRFHCHFSPRDWQRLINNNWGFRPKRLSFKLFNIQVKEVTQNEGTKTIANNLTSTIQVFTDSEYQLPYVLGSAHQGCLPPFPADVFMIPQYGYLTLNNGSQAVGRSSFYCLEYFPSQMLRTGNNFQFTYTFEDVPFHSSYAHSQSLDRLMNPLIDQYLYYLSRTQTTGGTANTQTLGFSQGGPNTMANQAKNWLPGPCYRQQRVSTTTGQNNNSNFAWTAGTKYHLNGRNSLANPGIAMATHKDDEERFFPSNGILIFGKQNAARDNADYSDVMLTSEEEIKTTNPVATEEYGIVADNLSFSRAVLCDGTVNSQGALPGMVWQNRDVYLQGPIWAKIPHTDGNFHPSPLMGGFGLKHPPPQILIKNTPVPADPPTTFNQSKLNSFITQYSTGQVSVEIEWELQKENSKRWNPEIQYTSNYYKSTSVDFAVNTEGVYSEPRPIGTRYLTRNL

SEQ ID NO: 5220 - DNA, 2215 bp, Artificial Sequence
  Description of Artificial Sequence: Synthetic polynucleotide
atggctgccgatggttatcttccagattggctcgaggacactctctctgaaggaataagacagtggtggaagctcaaacctggcccaccaccaccaaagcccgcagagcggcataaggacgacagcaggggtcttgtgcttcctgggtacaagtacctcggacccttcaacggactcgacaagggagagccggtcaacgaggcagacgccgcggccctcgagcacgacaaagcctacgaccggcagctcgacagcggagacaacccgtacctcaagtacaaccacgccgacgccgagttccaggagcggctcaaagaagatacgtcttttgggggcaacctcgggcgagcagtcttccaggccaaaaagaggcttcttgaacctcttggtctggttgaggaagcggctaagacggctcctggaaagaagaggcctgtagagcactctcctgtggagccagactcctcctcgggaaccggaaaggcgggccagcagcctgcaagaaaaagattgaattttggtcagactggagacgcagactcagtcccagaccctcaaccaatcggagaacctcccgcagccccctcaggtgtgggatctcttacaatggctgcaggcggtggcgcaccaatggcagacaataacgagggcgccgacggagtgggtaattcctcgggaaattggcattgcgattccacatggatgggcgacagagtcatcaccaccagcacccgaacctgggccctgcccacctacaacaaccacctctacaagcaaatctccaacagcacatctggaggatcttcaaatgacaacgcctacttcggctacagcaccccctgggggtattttgactttaacagattccactgccacttttcaccacgtgactggcagcgactcatcaacaacaactggggattccggcccaagagactcagcttcaagctcttcaacatccaggtcaaggaggtcacgcagaatgaaggcaccaagaccatcgccaataacctcaccagcaccatccaggtgtttacggactcggagtaccagctgccgtacgttctcggctctgcccaccagggctgcctgcctccgttcccggcggacgtgttcatgattccccagtacggctacctaacactcaacaacggtagtcaggccgtgggacgctcctccttctactgcctggaatactttccttcgcagatgctgagaaccggcaacaacttccagtttacttacaccttcgaggacgtgcctttccacagcagctacgcccacagccagagcttggaccggctgatgaatcctctgattgaccagtacctgtactacttgtctcggactcaaacaacaggaggcacgacaaatacgcagactctgggcttcagccaaggtgggcctaatacaatggccaatcaggcaaagaactggctgccaggaccctgttaccgccagcagcgagtatcaaagacatctgcggataacaacaacagtgaatactcgtggactggagctaccaagtaccacctcaatggcagagactctctggtgaatccgggcccggccatggcaagccacaaggacgatgaagaaaagtttttttcctcagagcggggttctcatctttgggaagcaaggctcagagaaaacaaatgtggacattgaaaaggtcatgattacagacgaagaggaaatcaggacaaccaatcccgtggctacggagcagtatggttctgtatctaccaacctccagagaggcaacagacaagcagctaccgcagatgtcaacacacaaggcgttcttccaggcatggtctggcaggacagagatgtgtaccttcaggggcccatctgggcaaagattccacacacggacggacattttcacccctctcccctcatgggtggattcggacttaaacaccctccgcctcagatcctgatcaagaacacgcctgtacctgcggatcctccgaccaccttcaaccagtcaaagctgaactctttcatcacccagtattctactggccaagtcagcgtggagatcgagtgggagctgcagaaggaaaacagcaagcgctggaaccccgagatccagtacacctccaactactacaaatctacaagtgtggactttgctgttaatacagaaggcgtgtactctgaaccccgccccattggcacccgttacctcacccgtaatctgtaa

SEQ ID NO: 5221 - protein, 737 aa, Artificial Sequence
  Description of Artificial Sequence: Synthetic polypeptide
MAADGYLPDWLEDTLSEGIRQWWKLKPGPPPPKPAERHKDDSRGLVLPGYKYLGPFNGLDKGEPVNEADAAALEHDKAYDRQLDSGDNPYLKYNHADAEFQERLKEDTSFGGNLGRAVFQAKKRLLEPLGLVEEAAKTAPGKKRPVEHSPVEPDSSSGTGKAGQQPARKRLNFGQTGDADSVPDPQPIGEPPAAPSGVGSLTMAAGGGAPMADNNEGADGVGNSSGNWHCDSTWMGDRVITTSTRTWALPTYNNHLYKQISNSTSGGSSNDNAYFGYSTPWGYFDFNRFHCHFSPRDWQRLINNNWGFRPKRLSFKLFNIQVKEVTQNEGTKTIANNLTSTIQVFTDSEYQLPYVLGSAHQGCLPPFPADVFMIPQYGYLTLNNGSQAVGRSSFYCLEYFPSQMLKTGNNFQFTYTFEDVPFHSSYAHSQSLDRLMNPLIDQYLYYLSRTQTTGGTTNTQTLGFSQGGPNTMANQAKNWLPGPCYRQQRVSKTSADNNNSEYSWTGATKYHLNGRDSLVNPGPAMASHKDDEEKFFPQSGVLIFGKQGSEKTNVDIEKVMITDEEEIRTTNPVATEQYGSVSTNLQRGNRQAATADVNTQGVLPGMVWQDRDVYLQGPIWAKIPHTDGHFHPSPLMGGFGLKHPPPQILIKNTPVPADPPTTFNQSKLNSFITQYSTGQVSVEIEWELQKENSKRWNPEIQYTSNYYKSTSVDFAVNTEGVYSEPRPIGTRYLTRNL

SEQ ID NO: 5222 - protein, 737 aa, Artificial Sequence
  Description of Artificial Sequence: Synthetic polypeptide
MAADGYLPDWLEDTLSEGIRQWWKLKPGPPPPKPAERHKDDSRGLVLPGYKYLGPFNGLDKGEPVNEADAAALEHDKAYDRQLDSGDNPYLKYNHADAEFQERLKEDTSFGGNLGRAVFQAKKRLLEPLGLVEEAAKTAPGKKRPVEHSPVEPDSSSGTGKAGQQPARKRLNFGQTGDADSVPDPQPIGEPPAAPSGVGSLTMAAGGGAPMADNNEGADGVGNSSGNWHCDSTWMGDRVITTSTRTWALPTYNNHLYKQISNSTSGGSSNDNAYFGYSTPWGYFDFNRFHCHFSPRDWQRLINNNWGFRPKRLSFKLFNIQVKEVTQNEGTKTIANNLTSTIQVFTDSEYQLPYVLGSAHQGCLPPFPADVFMIPQYGYLTLNNGSQAVGRSSFYCLEYFPSQMLKTGNNFQFTYTFEDVPFHSSYAHSQSLDRLMNPLIDQYLYYLSRTQTTGGTTNTQTLGFSQGGPNTMANQAKNWLPGPCYRQQRVSKTSADNNNSEYSWTGATKYHLNGRDSLVNPGPAMASHKDDEEKFFPQSGVLIFGKQGSEKTNVDIEKVMITDEEEIRTTNPVATEQYGSVSTNLQQGNTQAATADVNTQGVLPGMVWQDRDVYLQGPIWAKIPHTDGHFHPSPLMGGFGLKHPPPQILIKNTPVPADPPTTFNQSKLNSFITQYSTGQVSVEIEWELQKENSKRWNPEIQYTSNYYKSTSVDFAVNTEGVYSEPRPIGTRYLTRNL

SEQ ID NO: 5223 - protein, 737 aa, Artificial Sequence
  Description of Artificial Sequence: Synthetic polypeptide
MAADGYLPDWLEDTLSEGIRQWWKLKPGPPPPKPAERHKDDSRGLVLPGYKYLGPFNGLDKGEPVNEADAAALEHDKAYDRQLDSGDNPYLKYNHADAEFQERLKEDTSFGGNLGRAVFQAKKRLLEPLGLVEEAAKTAPGKKRPVEHSPVEPDSSSGTGKAGQQPARKRLNFGQTGDADSVPDPQPIGEPPAAPSGVGSLTMAAGGGAPMADNNEGADGVGNSSGNWHCDSTWMGDRVITTSTRTWALPTYNNHLYKQISNSTSGGSSNDNAYFGYSTPWGYFDFNRFHCHFSPRDWQRLINNNWGFRPKRLSFKLFNIQVKEVTQNEGTKTIANNLTSTIQVFTDSEYQLPYVLGSAHQGCLPPFPADVFMIPQYGYLTLNNGSQAVGRSSFYCLEYFPSQMLRTGNNFQFTYTFEDVPFHSSYAHSQSLDRLMNPLIDQYLYYLSRTQTTGGTTNTQTLGFSQGGPNTMANQAKNWLPGPCYRQQRVSKTSADNNNSEYSWTGATKYHLNGRDSLVNPGPAMASHKDDEEKFFPQSGVLIFGKQGSEKTNVDIEKVMITDEEEIRTTNPVATEQYGSVSTNLQQGNTQAATADVNTQGVLPGMVWQDRDVYLQGPIWAKIPHTDGHFHPSPLMGGFGLKHPPPQILIKNTPVPADPPTTFNQSKLNSFITQYSTGQVSVEIEWELQKENSKRWNPEIQYTSNYYKSTSVDFAVNTEGVYSEPRPIGTRYLTRNL

SEQ ID NO: 5224 - DNA, 2214 bp, Artificial Sequence
  Description of Artificial Sequence: Synthetic polynucleotide
atggctgccgatggttatcttccagattggctcgaggacaaccttagtgaaggaattcgcgagtggtgggctttgaaacctggagcccctcaacccaaggcaaatcaacaacatcaagacaacgctcgaggtcttgtgcttccgggttacaaataccttggacccggcaacggactcgacaagggggagccggtcaacgcagcagacgcggcggccctcgagcacgacaaggcctacgaccagcagctgcaggcgggtgacaatccgtacctgcggtataaccacgccgacgccgagtttcaggagcgtctgcaagaagatacgtcttttgggggcaaccttggcagagcagtcttccaggccaaaaagaggatccttgagcctcttggtctggttgaggaagcagctaaaacggctcctggaaagaagaggcctgtagatcagtctcctcaggaaccggactcatcatctggtgttggcaaatcgggcaaacagcctgccagaaaaagactaaatttcggtcagactggcgactcagagtcagtcccagaccctcaacctctcggagaaccaccagcagcccccacaagtttgggatctaatacaatggcttcaggcggtggcgcaccaatggcagacaataacgagggtgccgatggggtgggtagttcctcgggaaattggcattgcgattcccaatggctgggggacagagtcatcaccaccagcacccgaacctgggccctgcccacctacaacaatcacctctacaagcaaatctccaacgggacatcgggaggagccaccaacgacaacacctacttcggctacagcaccccctgggggtattttgactttaacagattccactgccacttttcaccacgtgactggcagcgactcatcaacaacaactggggattccggcccaagagactcagcttcaagctcttcaacatccaggtcaaggaggtcacgcagaatgaaggcaccaagaccatcgccaataacctcaccagcaccatccaggtgtttacggactcggagtaccagctgccgtacgttctcggctctgcgcaccagggctgcctccctccgttcccggcggacgtgttcatgattccgcaatacggctacctgacgctcaacaatggcagccaagccgtgggacgttcatccttttactgcctggaatatttcccttctcagatgctgagaacgggcaacaactttaccttcagctacacctttgaggaagtgcctttccacagcagctacgcgcacagccagagcttggaccggctgatgaatcctctgattgaccagtacctgtactacttgtctcggactcaaacaacaggaggcacggcaaatacgcagactctgggcttcagccaaggtgggcctaatacaatggccaatcaggcaaagaactggctgccaggaccctgttaccgccaacaacgcgtctcaacgacaaccgggcaaaacaacaatagcaactttgcctggactgctgggaccaaataccatctgaatggaagaaattcattggctaatcctggcatcgctatggcaacacacaaagacgacgaggagcgtttttttcccagtaacgggatcctgatttttggcaaacaaaatgctgccagagacaatgcggattacagcgatgtcatgctcaccagcgaggaagaaatcaaaaccactaaccctgtggctacagaggaatacggtatcgtggcagataacttgcagcagcaaaacacggctcctcaaattggaactgtcaacagccagggggccttacccggtatggtctggcagaaccgggacgtgtacctgcagggtcccatctgggccaagattcctcacacggacggcaacttccacccgtctccgctgatgggcggctttggcctgaaacatcctccgcctcagatcctgatcaagaacacgcctgtacctgcggatcctccgaccaccttcaaccagtcaaagctgaactctttcatcacgcaatacagcaccggacaggtcagcgtggagatcgagtgggagctgcagaaggaaaacagcaagcgctggaacccggagatccagtacacttccaactattacaagtctaataatgttgaatttgctgttaatactgaaggtgtatatagtgaaccccgccccattggcaccagatacctgactcgtaatctgtaa

SEQ ID NO: 5225 - protein, 737 aa, Artificial Sequence
  Description of Artificial Sequence: Synthetic polypeptide
MAADGYLPDWLEDNLSEGIREWWALKPGAPQPKANQQHQDNARGLVLPGYKYLGPGNGLDKGEPVNAADAAALEHDKAYDQQLQAGDNPYLRYNHADAEFQERLQEDTSFGGNLGRAVFQAKKRILEPLGLVEEAAKTAPGKKRPVDQSPQEPDSSSGVGKSGKQPARKRLNFGQTGDSESVPDPQPLGEPPAAPTSLGSNTMASGGGAPMADNNEGADGVGSSSGNWHCDSQWLGDRVITTSTRTWALPTYNNHLYKQISNGTSGGATNDNTYFGYSTPWGYFDFNRFHCHFSPRDWQRLINNNWGFRPKRLSFKLFNIQVKEVTQNEGTKTIANNLTSTIQVFTDSEYQLPYVLGSAHQGCLPPFPADVFMIPQYGYLTLNNGSQAVGRSSFYCLEYFPSQMLRTGNNFTFSYTFEEVPFHSSYAHSQSLDRLMNPLIDQYLYYLSRTQTTGGTANTQTLGFSQGGPNTMANQAKNWLPGPCYRQQRVSTTTGQNNNSNFAWTAGTKYHLNGRNSLANPGIAMATHKDDEERFFPSNGILIFGKQNAARDNADYSDVMLTSEEEIKTTNPVATEEYGIVADNLQQQNTAPQIGTVNSQGALPGMVWQNRDVYLQGPIWAKIPHTDGNFHPSPLMGGFGLKHPPPQILIKNTPVPADPPTTFNQSKLNSFITQYSTGQVSVEIEWELQKENSKRWNPEIQYTSNYYKSNNVEFAVNTEGVYSEPRPIGTRYLTRNL

SEQ ID NO: 5226 - DNA, 2211 bp, Artificial Sequence
  Description of Artificial Sequence: Synthetic polynucleotide
atggctgccgatggttatcttccagattggctcgaggacaacctctctgagggcattcgcgagtggtgggacttgaaacctggagccccgaagcccaaagccaaccagcaaaagcaggacgacggccggggtctggtgcttcctggctacaagtacctcggacccttcaacggactcgacaagggggagcccgtcaacgcggcggacgcagcggccctcgagcacgacaaggcctacgaccagcagctcaaagcgggtgacaatccgtacctgcggtataaccacgccgacgccgagtttcaggagcgtctgcaagaagatacgtcttttgggggcaacctcgggcgagcagtcttccaggccaagaagcgggttctcgaacctctcggtctggttgaggaaggcgctaagacggctcctggaaagaaacgtccggtagagcagtcgccacaagagccagactcctcctcgggcatcggcaagacaggccagcagcccgctaaaaagagactcaattttggtcagactggcgactcagagtcagtccccgacccacaacctctcggagaacctccagcaacccccgctgctgtgggacctactacaatggcttcaggcggtggcgcaccaatggcagacaataacgaaggcgccgacggagtgggtaatgcctcaggaaattggcattgcgattccacatggctgggcgacagagtcatcaccaccagcacccgaacatgggccttgcccacctataacaaccacctctacaagcaaatctccagtgcttcaacgggggccagcaacgacaaccactacttcggctacagcaccccctgggggtattttgatttcaacagattccactgccatttctcaccacgtgactggcagcgactcatcaacaacaattggggattccggcccaagagactcaacttcaagctcttcaacatccaagtcaaggaggtcacgacgaatgatggcgtcacgaccatcgctaataaccttaccagcacggttcaagtcttctcggactcggagtaccagctgccgtacgttctcggctctgcccaccagggctgcctgcctccgttcccggcggacgtgttcatgattccccagtacggctacctaacactcaacaacggtagtcaggccgtgggacgctcctccttctactgcctggaatactttccttcgcagatgctgagaaccggcaacaacttccagtttacttacaccttcgaggacgtgcctttccacagcagctacgcccacagccagagcttggaccggctgatgaatcctctgattgaccagtacctgtactacttgtctcggactcaaacaacaggaggcacggcaaatacgcagactctgggcttcagccaaggtgggcctaatacaatggccaatcaggcaaagaactggctgccaggaccctgttaccgccaacaacgcgtctcaacgacaaccgggcaaaacaacaatagcaattttacctggactggtgcttcaaaatataacctcaatgggcgtgaatccatcatcaaccctggcactgctatggcctcacacaaagacgacgaagacaagttctttcccatgagcggtgtcatgatttttggaaaagagagcgccggagcttcaaacactgcattggacaatgtcatgattacagacgaagaggaaattaaagccactaaccctgtggccaccgaaagatttgggaccgtggcagtcaatttccagagcagcagcacagaccctgcgaccggagatgtgcatgctatgggagcattacctggcatggtgtggcaagatagagacgtgtacctgcagggtcccatttgggccaaaattcctcacacagatggacactttcacccgtctcctcttatgggcggctttggactcaagaacccgcctcctcagatcctcatcaaaaacacgcctgttcctgcgaatcctccggcggagttttcagctacaaagtttgcttcattcatcacccaatactccacaggacaagtgagtgtggaaattgaatgggagctgcagaaagaaaacagcaagcgctggaatcccgaagtgcagtacacatccaattatgcaaaatctgccaacgttgattttactgtggacaacaatggactttatactgagcctcgccccattggcacccgttacctcacccgtcccctgtaa

SEQ ID NO: 5227 - protein, 736 aa, Artificial Sequence
  Description of Artificial Sequence: Synthetic polypeptide
MAADGYLPDWLEDNLSEGIREWWDLKPGAPKPKANQQKQDDGRGLVLPGYKYLGPFNGLDKGEPVNAADAAALEHDKAYDQQLKAGDNPYLRYNHADAEFQERLQEDTSFGGNLGRAVFQAKKRVLEPLGLVEEGAKTAPGKKRPVEQSPQEPDSSSGIGKTGQQPAKKRLNFGQTGDSESVPDPQPLGEPPATPAAVGPTTMASGGGAPMADNNEGADGVGNASGNWHCDSTWLGDRVITTSTRTWALPTYNNHLYKQISSASTGASNDNHYFGYSTPWGYFDFNRFHCHFSPRDWQRLINNNWGFRPKRLNFKLFNIQVKEVTTNDGVTTIANNLTSTVQVFSDSEYQLPYVLGSAHQGCLPPFPADVFMIPQYGYLTLNNGSQAVGRSSFYCLEYFPSQMLRTGNNFQFTYTFEDVPFHSSYAHSQSLDRLMNPLIDQYLYYLSRTQTTGGTANTQTLGFSQGGPNTMANQAKNWLPGPCYRQQRVSTTTGQNNNSNFTWTGASKYNLNGRESIINPGTAMASHKDDEDKFFPMSGVMIFGKESAGASNTALDNVMITDEEEIKATNPVATERFGTVAVNFQSSSTDPATGDVHAMGALPGMVWQDRDVYLQGPIWAKIPHTDGHFHPSPLMGGFGLKNPPPQILIKNTPVPANPPAEFSATKFASFITQYSTGQVSVEIEWELQKENSKRWNPEVQYTSNYAKSANVDFTVDNNGLYTEPRPIGTRYLTRPL

SEQ ID NO: 5228 - DNA, 2211 bp, Artificial Sequence
  Description of Artificial Sequence: Synthetic polynucleotide
atggctgctgacggttatcttccagattggctcgaggacaacctttctgaaggcattcgagagtggtgggcgctgcaacctggagcccctaaacccaaggcaaatcaacaacatcaggacaacgctcggggtcttgtgcttccgggttacaaatacctcggacccggcaacggactcgacaagggggaacccgtcaacgcagcggacgcggcagccctcgagcacgacaaggcctacgaccagcagctcaaggccggtgacaacccctacctcaagtacaaccacgccgacgccgagttccaggagcggctcaaagaagatacgtcttttgggggcaacctcgggcgagcagtcttccaggccaaaaagaggcttcttgaacctcttggtctggttgaggaagcggctaagacggctcctggaaagaagaggcctgtagatcagtctcctcaggaaccggactcatcatctggtgttggcaaatcgggcaaacagcctgccagaaaaagactaaatttcggtcagactggcgactcagagtcagtcccagaccctcaacctctcggagaaccaccagcagcccccacaagtttgggatctaatacaatggcttcaggcggtggcgcaccaatggcagacaataacgagggtgccgatggagtgggtaattcctcaggaaattggcattgcgattcccaatggctgggcgacagagtcatcaccaccagcaccagaacctgggccctgcccacttacaacaaccatctctacaagcaaatctccagccaatcaggagcttcaaacgacaaccactactttggctacagcaccccttgggggtattttgactttaacagattccactgccacttctcaccacgtgactggcagcgactcattaacaacaactggggattccggcccaagaaactcagcttcaagctcttcaacatccaagttaaagaggtcacgcagaacgatggcacgacgactattgccaataaccttaccagcacggttcaagtgtttacggactcggagtatcagctcccgtacgtgctcgggtcggcgcaccaaggctgtctcccgccgtttccagcggacgtcttcatggtccctcagtatggatacctcaccctgaacaacggaagtcaagcggtgggacgctcatccttttactgcctggagtacttcccttcgcagatgctaaggactggaaataacttccaattcagctataccttcgaggatgtaccttttcacagcagctacgctcacagccagagtttggatcgcttgatgaatcctcttattgatcagtatctgtactacctgaacagaacgcaaggaacaacctctggaacaaccaaccaatcacggctgctttttagccaggctgggcctcagtctatgtctttgcaggccagaaattggctacctgggccctgctaccggcaacagagactttcaaagactgctaacgacaacaacaacagtaactttccttggacagcggccagcaaatatcatctcaatggccgcgactcgctggtgaatccaggaccagctatggccagtcacaaggacgatgaagaaaaatttttccctatgcacggcaatctaatatttggcaaagaagggacaacggcaagtaacgcagaattagataatgtaatgattacggatgaagaagagattcgtaccaccaatcctgtggcaacagagcagtatggaactgtggcaaataacttgcagagctcaaatacagctcccacgactagaactgtcaatgatcagggggccttacctggcatggtgtggcaagatcgtgacgtgtaccttcaaggacctatctgggcaaagattcctcacacggatggacactttcatccttctcctctgatgggaggctttggactgaaacatccgcctcctcaaatcatgatcaaaaatactccggtaccggcaaatcctccgacgactttcagcccggccaagtttgcttcatttatcactcagtactccactggacaggtcagcgtggaaattgagtgggagctacagaaagaaaacagcaaacgttggaatccagagattcagtacacttccaactacaacaagtctgttaatgtggactttactgtagacactaatggtgtttatagtgaacctcgccccattggcacccgttaccttacccgtcccctgtaa

SEQ ID NO: 5229 - protein, 736 aa, Artificial Sequence
  Description of Artificial Sequence: Synthetic polypeptide
MAADGYLPDWLEDNLSEGIREWWALQPGAPKPKANQQHQDNARGLVLPGYKYLGPGNGLDKGEPVNAADAAALEHDKAYDQQLKAGDNPYLKYNHADAEFQERLKEDTSFGGNLGRAVFQAKKRLLEPLGLVEEAAKTAPGKKRPVDQSPQEPDSSSGVGKSGKQPARKRLNFGQTGDSESVPDPQPLGEPPAAPTSLGSNTMASGGGAPMADNNEGADGVGNSSGNWHCDSQWLGDRVITTSTRTWALPTYNNHLYKQISSQSGASNDNHYFGYSTPWGYFDFNRFHCHFSPRDWQRLINNNWGFRPKKLSFKLFNIQVKEVTQNDGTTTIANNLTSTVQVFTDSEYQLPYVLGSAHQGCLPPFPADVFMVPQYGYLTLNNGSQAVGRSSFYCLEYFPSQMLRTGNNFQFSYTFEDVPFHSSYAHSQSLDRLMNPLIDQYLYYLNRTQGTTSGTTNQSRLLFSQAGPQSMSLQARNWLPGPCYRQQRLSKTANDNNNSNFPWTAASKYHLNGRDSLVNPGPAMASHKDDEEKFFPMHGNLIFGKEGTTASNAELDNVMITDEEEIRTTNPVATEQYGTVANNLQSSNTAPTTRTVNDQGALPGMVWQDRDVYLQGPIWAKIPHTDGHFHPSPLMGGFGLKHPPPQIMIKNTPVPANPPTTFSPAKFASFITQYSTGQVSVEIEWELQKENSKRWNPEIQYTSNYNKSVNVDFTVDTNGVYSEPRPIGTRYLTRPL

SEQ ID NO: 5230 - DNA, 2211 bp, Artificial Sequence
  Description of Artificial Sequence: Synthetic polynucleotide
atggctgccgatggttatcttccagattggctcgaggacaaccttagtgaaggaattcgcgagtggtgggctttgaaacctggagcccctcaacccaaggcaaatcaacaacatcaagacaacgctcgaggtcttgtgcttccgggttacaaataccttggacccggcaacggactcgacaagggggagccggtcaacgcagcagacgcggcggccctcgagcacgacaaggcctacgaccagcagctcaaggccggagacaacccgtacctcaagtacaaccacgccgacgccgagttccaggagcggctcaaagaagatacgtcttttgggggcaacctcgggcgagcagtcttccaggccaaaaagaggcttcttgaacctcttggtctggttgaggaagcggctaagacggctcctggaaagaagagaccggtagagccatcaccccagcgttctccagactcctctacgggcatcggcaagaaaggccaacagcccgctaaaaagagactcaattttggtcagactggcgactcagagtcagtccccgacccacaacctctcggagaacctccagcaacccccgctgctgtgggacctactacaatggcttcaggcggtggcgcaccaatggcagacaataacgagggtgccgatggagtgggtaattcctcaggaaattggcattgcgattcccaatggctgggcgacagagtcatcaccaccagcaccagaacctgggccctgcccacttacaacaaccatctctacaagcaaatctccagccaatcaggagcttcaaacgacaaccactactttggctacagcaccccttgggggtattttgactttaacagattccactgccacttttcaccacgtgactggcaaagactcatcaacaacaactggggattccgacccaagagactcaacttcaagctcttcaacatccaagtcaaggaggtcacgacgaatgatggcgtcacgaccatcgctaataaccttaccagcacggttcaagtcttctcggactcggagtaccagttgccgtacgtcctcggctctgcgcaccagggctgcctccctccgttcccggcggacgtgttcatgattccgcagtacggctacctaacgctcaacaatggcagccaagccgtgggacgttcatccttttactgcctggaatatttcccttctcagatgctgagaacgggcaacaactttaccttcagctacacttttgaggacgttcctttccacagcagctacgctcacagccagagtctggaccgtctcatgaatcctctcatcgaccagtacctgtattacttgagcagaacaaacactccaagtggaaccaccacgcagtcaaggcttcagttttctcaggccggagcgagtgacattcgggaccagtctaggaactggcttcctggaccctgttaccgccagcagcgcgtttctaaaacaaaaacagacaacaacaacagcaattttacctggactggtgcttcaaaatataaccttaatgggcgtgaatctataatcaaccctggcactgctatggcctcacacaaagacgacgaagacaagttctttcccatgagcggtgtcatgatttttggaaaagagagcgccggagcttcaaacactgcattggacaatgtcatgattacagacgaagaggaaattaaagccactaaccctgtggccaccgaaagatttgggaccgtggcagtcaatttccagagcagcagcacagaccctgcgaccggagatgtgcatgttatgggagccttacctggaatggtgtggcaagacagagacgtatacctgcagggtcctatttgggccaaaattcctcacacggatggacactttcacccgtctcctcttatgggcggctttggactcaagaacccgcctcctcagatcctcatcaaaaacacgcctgttcctgcgaatcctccggcggagttttcagctacaaagtttgcttcattcatcacccaatactccacaggacaagtgagtgtggaaattgaatgggagctgcagaaagaaaacagcaagcgctggaatcccgaagtgcagtacacatccaattatgcaaaatctgccaacgttgattttactgtggacaacaatggactttatactgagcctcgccccattggcacccgttaccttacccgtcccctgtaa

SEQ ID NO: 5231 - protein, 736 aa, Artificial Sequence
  Description of Artificial Sequence: Synthetic polypeptide
MAADGYLPDWLEDNLSEGIREWWALKPGAPQPKANQQHQDNARGLVLPGYKYLGPGNGLDKGEPVNAADAAALEHDKAYDQQLKAGDNPYLKYNHADAEFQERLKEDTSFGGNLGRAVFQAKKRLLEPLGLVEEAAKTAPGKKRPVEPSPQRSPDSSTGIGKKGQQPAKKRLNFGQTGDSESVPDPQPLGEPPATPAAVGPTTMASGGGAPMADNNEGADGVGNSSGNWHCDSQWLGDRVITTSTRTWALPTYNNHLYKQISSQSGASNDNHYFGYSTPWGYFDFNRFHCHFSPRDWQRLINNNWGFRPKRLNFKLFNIQVKEVTTNDGVTTIANNLTSTVQVFSDSEYQLPYVLGSAHQGCLPPFPADVFMIPQYGYLTLNNGSQAVGRSSFYCLEYFPSQMLRTGNNFTFSYTFEDVPFHSSYAHSQSLDRLMNPLIDQYLYYLSRTNTPSGTTTQSRLQFSQAGASDIRDQSRNWLPGPCYRQQRVSKTKTDNNNSNFTWTGASKYNLNGRESIINPGTAMASHKDDEDKFFPMSGVMIFGKESAGASNTALDNVMITDEEEIKATNPVATERFGTVAVNFQSSSTDPATGDVHVMGALPGMVWQDRDVYLQGPIWAKIPHTDGHFHPSPLMGGFGLKNPPPQILIKNTPVPANPPAEFSATKFASFITQYSTGQVSVEIEWELQKENSKRWNPEVQYTSNYAKSANVDFTVDNNGLYTEPRPIGTRYLTRPL

SEQ ID NO: 5232 - DNA, 2211 bp, Artificial Sequence
  Description of Artificial Sequence: Synthetic polynucleotide
atggctgccgatggttatcttccagattggctcgaggacaacctctctgagggcattcgcgagtggtgggacttgaaacctggagcccctaaacccaaggcaaatcaacaacatcaggacaacgctcgaggtcttgtgcttccgggttacaaataccttggacccggcaacggactcgacaagggggagccggtcaacgcagcagacgcggcggccctcgagcacgacaaggcctacgaccagcagctcaaggccggagacaacccgtacctcaagtacaaccacgccgacgccgagttccaggagcggctcaaagaagatacgtcttttgggggcaacctcgggcgagcagtcttccaggccaaaaagaggcttcttgaacctcttggtctggttgaggaagcggctaagacggctcctggaaagaagagaccggtagagccatcaccccagcgttctccagactcctctacgggcatcggcaagaaaggccaacagcccgctaaaaagagactcaattttggtcagactggcgactcagagtcagtccccgacccacaacctctcggagaacctccagcaacccccgctgctgtgggacctactacaatggcttcaggcggtggcgcaccaatggcagacaataacgagggtgccgatggagtgggtaattcctcaggaaattggcattgcgattcccaatggctgggcgacagagtcatcaccaccagcaccagaacctgggccctgcccacttacaacaaccatctctacaagcaaatctccagccaatcaggagcttcaaacgacaaccactactttggctacagcaccccttgggggtattttgactttaacagattccactgccacttttcaccacgtgactggcaaagactcatcaacaacaactggggattccgacccaagagactcaacttcaagctcttcaacatccaagtcaaggaggtcacgacgaatgatggcgtcacgaccatcgctaataaccttaccagcacggttcaagtcttctcggactcggagtaccagttgccgtacgtcctcggctctgcgcaccagggctgcctccctccgttcccggcggacgtgttcatgattccgcagtacggctacctaacgctcaacaatggcagccaagccgtgggacgttcatccttttactgcctggaatatttcccttctcagatgctgagaacgggcaacaactttaccttcagctacacttttgaggacgttcctttccacagcagctacgctcacagccagagtctggaccgtctcatgaatcccctcatcgaccagtacctgtattacttgagcagaacaaacactccaagtggaaccaccacgcagtcaaggcttcagttttctcaggccggagcgagtgacattcgggaccagtctaggaactggcttcctggaccctgttaccggcagcagcgcgtttctaaaacaaaaacagacaacaacaacagcaactttacctggactggtgcttcaaaatataaccttaatgggcgtgaatctataatcaaccctggcactgctatggcctcacacaaagacgacgaagacaagttctttcccatgagcggtgtcatgatttttggaaaggagagcgccggagcttcaaacactgcattggacaatgtcatgatcacagacgaagaggaaatcaaagccactaaccccgtggccaccgaaagatttgggactgtggcagtcaatctccagagcagcagcacagaccctgcgaccggagatgtgcatgttatgggagccttacctggaatggtgtggcaagacagagacgtgtacctgcagggtcctatttgggccaaaattcctcacacggatggacactttcacccgtctcctctcatgggcggctttggacttaagcacccgcctcctcagatcctcatcaaaaacacgcctgttcctgcgaatcctccggcagagttttcggctacaaagtttgcttcattcatcacccagtattccacaggacaagtgagtgtggaaattgaatgggagctgcagaaagaaaacagcaagcgctggaatcccgaagtgcagtacacatccaattatgcaaaatctgccaacgttgattttactgtggacaacaatggactttatactgagcctcgccccattggcacccgttacctcacccgtcccctgtaa

SEQ ID NO: 5233 - protein, 736 aa, Artificial Sequence
  Description of Artificial Sequence: Synthetic polypeptide
MAADGYLPDWLEDNLSEGIREWWDLKPGAPKPKANQQHQDNARGLVLPGYKYLGPGNGLDKGEPVNAADAAALEHDKAYDQQLKAGDNPYLKYNHADAEFQERLKEDTSFGGNLGRAVFQAKKRLLEPLGLVEEAAKTAPGKKRPVEPSPQRSPDSSTGIGKKGQQPAKKRLNFGQTGDSESVPDPQPLGEPPATPAAVGPTTMASGGGAPMADNNEGADGVGNSSGNWHCDSQWLGDRVITTSTRTWALPTYNNHLYKQISSQSGASNDNHYFGYSTPWGYFDFNRFHCHFSPRDWQRLINNNWGFRPKRLNFKLFNIQVKEVTTNDGVTTIANNLTSTVQVFSDSEYQLPYVLGSAHQGCLPPFPADVFMIPQYGYLTLNNGSQAVGRSSFYCLEYFPSQMLRTGNNFTFSYTFEDVPFHSSYAHSQSLDRLMNPLIDQYLYYLSRTNTPSGTTTQSRLQFSQAGASDIRDQSRNWLPGPCYRQQRVSKTKTDNNNSNFTWTGASKYNLNGRESIINPGTAMASHKDDEDKFFPMSGVMIFGKESAGASNTALDNVMITDEEEIKATNPVATERFGTVAVNLQSSSTDPATGDVHVMGALPGMVWQDRDVYLQGPIWAKIPHTDGHFHPSPLMGGFGLKHPPPQILIKNTPVPANPPAEFSATKFASFITQYSTGQVSVEIEWELQKENSKRWNPEVQYTSNYAKSANVDFTVDNNGLYTEPRPIGTRYLTRPL

SEQ ID NO: 5234 - DNA, 2214 bp, Artificial Sequence
  Description of Artificial Sequence: Synthetic polynucleotide
atggctgccgatggttatcttccagattggctcgaggacaaccttagtgaaggaattcgcgagtggtgggctttgaaacctggagcccctcaacccaaggcaaatcaacaacatcaagacaacgctcgaggtcttgtgcttccgggttacaaataccttggacccggcaacggactcgacaagggggagccggtcaacgcagcagacgcggcggccctcgagcacgacaaggcctacgaccagcagctgcaggcgggtgacaatccgtacctgcggtataaccacgccgacgccgagtttcaggagcgtctgcaagaagatacgtcttttgggggcaaccttggcagagcagtcttccaggccaaaaagaggatccttgagcctcttggtctggttgaggaagcagctaaaacggctcctggaaagaagaggcctgtagatcagtctcctcaggaaccggactcatcatctggtgttggcaaatcgggcaaacagcctgccagaaaaagactaaatttcggtcagactggcgactcagagtcagtcccagaccctcaacctctcggagaaccaccagcagcccccacaagtttgggatctaatacaatggcttcaggcggtggcgcaccaatggcagacaataacgagggtgccgatggggtgggtagttcctcgggaaattggcattgcgattcccaatgactgggggacagagtcatcaccaccagcacccgaacctgggccctgcccacctacaacaatcacctctacaagcaaatctccaacgggacatcgggaggagccaccaacgacaacacctacttcggctacagcaccccctgggggtattttgactttaacagattccactgccacttttcaccacgtgactggcagcgactcatcaacaacaactggggattccggcccaagagactcagcttcaagctcttcaacatccaggtcaaggaggtcacgcagaatgaaggcaccaagaccatcgccaataacctcaccagcaccatccaggtgtttacggactcggagtaccagctgccgtacgttctcggctctgcgcaccagggctgcctccctccgttcccggcggacgtgttcatgattccgcaatacggctacctgacgctcaacaatggcagccaagccgtgggacgttcatccttttactgcctggaatatttcccttctcagatgctgagaacgggcaacaactttaccttcagctacacctttgaggaagtgcctttccacagcagctacgcgcacagccagagcttggaccggctgatgaatcctctgattgaccagtacctgtactacttgtctcggactcaaacaacaggaggcacggcaaatacgcagactctgggcttcagccaaggtgggcctaatacaatggccaatcaggcaaagaactggctgccaggaccctgttaccgccaacaacgcgtctcaacgacaaccgggcaaaacaacaatagcaactttgcctggactgctgggaccaaataccatctgaatggaagaaattcattggctaatcctggcatcgctatggcaacacacaaagacgacgaggagcgtttttttcccagtaacgggatcctgatttttggcaaacaaaatgctgccagagacaatgcggattacagcgatgtcatgctcaccagcgaggaagaaatcaaaaccactaaccctgtggctacagaggaatacggtatcgtggcagataacttgcagcagcaaaacacggctcctcaaattggaactgtcaacagccagggggccttacccggtatggtctggcagaaccgggacgtgtacctgcagggtcccatctgggccaagattcctcacacggacggcaacttccacccgtctccgctgatgggcggctttggcctgaaacatcctccgcctcagatcctgatcaagaacacgcctgtacctgcggatcctccgaccaccttcaaccagtcaaagctgaactctttcatcacgcaatacagcaccggacaggtcagcgtggagatcgagtgggagctgcagaaggaaaacagcaagcgctggaacccggagatccagtacacttccaactattacaagtctaataatgttgaatttgctgttaatactgaaggtgtatatagtgaaccccgccccattggcaccagatacctgactcgtaatctgtaa

SEQ ID NO: 5235 - protein, 736 aa, Artificial Sequence
  Description of Artificial Sequence: Synthetic polypeptide
MAADGYLPDWLEDNLSEGIREWWALKPGAPQPKANQQHQDNARGLVLPGYKYLGPGNGLDKGEPVNAADAAALEHDKAYDQQLQAGDNPYLRYNHADAEFQERLQEDTSFGGNLGRAVFQAKKRILEPLGLVEEAAKTAPGKKRPVDQSPQEPDSSSGVGKSGKQPARKRLNFGQTGDSESVPDPQPLGEPPAAPTSLGSNTMASGGGAPMADNNEGADGVGSSSGNWHCDSQLGDRVITTSTRTWALPTYNNHLYKQISNGTSGGATNDNTYFGYSTPWGYFDFNRFHCHFSPRDWQRLINNNWGFRPKRLSFKLFNIQVKEVTQNEGTKTIANNLTSTIQVFTDSEYQLPYVLGSAHQGCLPPFPADVFMIPQYGYLTLNNGSQAVGRSSFYCLEYFPSQMLRTGNNFTFSYTFEEVPFHSSYAHSQSLDRLMNPLIDQYLYYLSRTQTTGGTANTQTLGFSQGGPNTMANQAKNWLPGPCYRQQRVSTTTGQNNNSNFAWTAGTKYHLNGRNSLANPGIAMATHKDDEERFFPSNGILIFGKQNAARDNADYSDVMLTSEEEIKTTNPVATEEYGIVADNLQQQNTAPQIGTVNSQGALPGMVWQNRDVYLQGPIWAKIPHTDGNFHPSPLMGGFGLKHPPPQILIKNTPVPADPPTTFNQSKLNSFITQYSTGQVSVEIEWELQKENSKRWNPEIQYTSNYYKSNNVEFAVNTEGVYSEPRPIGTRYLTRNL

SEQ ID NO: 5236 - DNA, 2214 bp, Artificial Sequence
  Description of Artificial Sequence: Synthetic polynucleotide
atggctgccgatggttatcttccagattggctcgaggacaaccttagtgaaggaattcgcgagtggtgggctttgaaacctggagcccctcaacccaaggcaaatcaacaacatcaagacaacgctcgaggtcttgtgcttccgggttacaaataccttggacccggcaacggactcgacaagggggagccggtcaacgcagcagacgcggcggccctcgagcacgacaaggcctacgaccagcagctgcaggcgggtgacaatccgtacctgcggtataaccacgccgacgccgagtttcaggagcgtctgcaagaagatacgtcttttgggggcaaccttggcagagcagtcttccaggccaaaaagaggatccttgagcctcttggtctggttgaggaagcagctaaaacggctcctggaaagaagaggcctgtagatcagtctcctcaggaaccggactcatcatctggtgttggcaaatcgggcaaacagcctgccagaaaaagactaaatttcggtcagactggcgactcagagtcagtcccagaccctcaacctctcggagaaccaccagcagcccccacaagtttgggatctaatacaatggcttcaggcggtggcgcaccaatggcagacaataacgagggtgccgatggggtgggtagttcctcgggaaattggcattgcgattcccaatggctgggggacagagtcatcaccaccagcacccgaacctgggccctgcccacctacaacaatcacctctacaagcaaatctccaacgggacatcgggaggagccaccaacgacaacacctacttcggctacagcaccccctgggggtattttgactttaacagattccactgccacttttcaccacgtgactggcagcgactcatcaacaacaactggggattccggcccaagagactcagcttcaagctcttcaacatccaggtcaaggaggtcacgcagaatgaaggcaccaagaccatcgccaataacctcaccagcaccatccaggtgtttacggactcggagtaccagctgccgtacgttctcggctctgcgcaccagggctgcctccctccgttcccggcggacgtgttcatgattccgcaatacggctacctgacgctcaacaatggcagccaagccgtgggacgttcatccttttactgcctggaatatttcccttctcagatgctgagaacgggcaacaactttaccttcagctacacctttgaggaagtgccttttcacagcagctacgcgcacagccagagcttggaccggctgatgaatcctctgattgaccagtacctgtactacttgtctcggactcaaacaacaggaggcacggcaaatacgcagactctgggcttcagccaaggtgggcctaatacaatggccaatcaggcaaagaactggctgccaggaccctgttaccgccaacaacgcgtctcaacgacaaccgggcaaaacaacaatagcaactttgcctggactgctgggaccaaataccatctgaatggaagaaattcattggctaatcctggcatcgctatggcaacacacaaagacgacgaggagcgtttttttcccagtaacgggatcctgatttttggcaaacaaaatgctgccagagacaatgcggattacagcgatgtcatgctcaccagcgaggaagaaatcaaaaccactaaccctgtggctacagaggaatacggtatcgtggcagataacttgcagcagcaaaacacggctcctcaaattggaactgtcaacagccagggggccttacccggtatggtctggcagaaccgggacgtgtacctgcagggtcccatctgggccaagattcctcacacggacggcaacttccacccgtctccgctgatgggcggctttggcctgaaacatcctccgcctcagatcctgatcaagaacacgcctgtacctgcggatcctccgaccaccttcaaccagtcaaagctgaactctttcatcacgcaatacagcaccggacaggtcagcgtggagatcgagtgggagctgcagaaggaaaacagcaagcgctggaacccggagatccagtacacttccaactattacaagtctaataatgttgaatttgctgttaatactgaaggtgtatatagtgaaccccgccccattggcaccagatacctgactcgtaatctgtaa

SEQ ID NO: 5237 - protein, 737 aa, Artificial Sequence; identical to SEQ ID NO: 5225
  Description of Artificial Sequence: Synthetic polypeptide

SEQ ID NO: 5238 - DNA, 2211 bp, Artificial Sequence
  Description of Artificial Sequence: Synthetic polynucleotide
atggctgccgatggttatcttccagattggctcgaggacaacctctctgagggcattcgcgagtggtgggacttgaaacctggagcccctaaacccaaggcaaatcaacaacatcaggacaacgctcgaggtcttgtgcttccgggttacaaataccttggacccggcaacggactcgacaagggggagccggtcaacgcagcagacgcggcggccctcgagcacgacaaggcctacgaccagcagctcaaggccggagacaacccgtacctcaagtacaaccacgccgacgccgagttccaggagcggctcaaagaagatacgtcttttgggggcaacctcgggcgagcagtcttccaggccaaaaagaggcttcttgaacctcttggtctggttgaggaagcggctaagacggctcctggaaagaagagaccggtagagccatcaccccagcgttctccagactcctctacgggcatcggcaagaaaggccaacagcccgctaaaaagagactcaattttggtcagactggcgactcagagtcagtccccgacccacaacctctcggagaacctccagcaacccccgctgctgtgggacctactacaatggcttcaggcggtggcgcaccaatggcagacaataacgagggtgccgatggagtgggtaattcctcaggaaattggcattgcgattcccaatggctgggcgacagagtcatcaccaccagcaccagaacctgggccctgcccacttacaacaaccatctctacaagcaaatctccagccaatcaggagcttcaaacgacaaccactactttggctacagcaccccttgggggtattttgactttaacagattccactgccacttttcaccacgtgactggcaaagactcatcaacaacaactggggattccgacccaagagactcaacttcaagctcttcaacatccaagtcaaggaggtcacgacgaatgatggcgtcacgaccatcgctaataaccttaccagcacggttcaagtcttctcggactcggagtaccagttgccgtacgtcctcggctctgcgcaccagggctgcctccctccgttcccggcggacgtgttcatgattccgcagtacggctacctaacgctcaacaatggcagccaagccgtgggacgttcatccttttactgcctggaatatttcccttctcagatgctgagaacgggcaacaactttaccttcagctacacttttgaggacgttcctttccacagcagctacgctcacagccagagtctggaccgtctcatgaatcctctcatcgaccagtacctgtattacttgagcagaacaaacactccaagtggaaccaccacgcagtcaaggcttcagttttctcaggccggagcgagtgacattcgggaccagtctaggaactggcttcctggaccctgttaccgccagcagcgcgtttctaaaacaaaaacagacaacaacaacagcaattttacctggactggtgcttcaaaatataaccttaatgggcgtgaatctataatcaaccctggcactgctatggcctcacacaaagacgacgaagacaagttctttcccatgagcggtgtcatgatttttggaaaagagagcgccggagcttcaaacactgcattggacaatgtcatgattacagacgaagaggaaattaaagccactaaccctgtggccaccgaaagatttgggaccgtggcagtcaatttccagagcagcagcacagaccctgcgaccggagatgtgcatgctatgggagcattacctggcatggtgtggcaagatagagacgtgtacctgcagggtcccatttgggccaaaattcctcacacagatggacactttcacccgtctcctcttatgggcggctttggactcaagaacccgcctcctcagatcctcatcaaaaacacgcctgttcctgcgaatcctccggcggagttttcagctacaaagtttgcttcattcatcacccaatactccacaggacaagtgagtgtggaaattgaatgggagctgcagaaagaaaacagcaagcgctggaatcccgaagtgcagtacacatccaattatgcaaaatctgccaacgttgattttactgtggacaacaatggactttatactgagcctcgccccattggcacccgttaccttacccgtcccctgtaa

SEQ ID NO: 5239 - protein, 736 aa, Artificial Sequence
  Description of Artificial Sequence: Synthetic polypeptide
MAADGYLPDWLEDNLSEGIREWWDLKPGAPKPKANQQHQDNARGLVLPGYKYLGPGNGLDKGEPVNAADAAALEHDKAYDQQLKAGDNPYLKYNHADAEFQERLKEDTSFGGNLGRAVFQAKKRLLEPLGLVEEAAKTAPGKKRPVEPSPQRSPDSSTGIGKKGQQPAKKRLNFGQTGDSESVPDPQPLGEPPATPAAVGPTTMASGGGAPMADNNEGADGVGNSSGNWHCDSQWLGDRVITTSTRTWALPTYNNHLYKQISSQSGASNDNHYFGYSTPWGYFDFNRFHCHFSPRDWQRLINNNWGFRPKRLNFKLFNIQVKEVTTNDGVTTIANNLTSTVQVFSDSEYQLPYVLGSAHQGCLPPFPADVFMIPQYGYLTLNNGSQAVGRSSFYCLEYFPSQMLRTGNNFTFSYTFEDVPFHSSYAHSQSLDRLMNPLIDQYLYYLSRTNTPSGTTTQSRLQFSQAGASDIRDQSRNWLPGPCYRQQRVSKTKTDNNNSNFTWTGASKYNLNGRESIINPGTAMASHKDDEDKFFPMSGVMIFGKESAGASNTALDNVMITDEEEIKATNPVATERFGTVAVNFQSSSTDPATGDVHAMGALPGMVWQDRDVYLQGPIWAKIPHTDGHFHPSPLMGGFGLKNPPPQILIKNTPVPANPPAEFSATKFASFITQYSTGQVSVEIEWELQKENSKRWNPEVQYTSNYAKSANVDFTVDNNGLYTEPRPIGTRYLTRPL

SEQ ID NO: 5240 - DNA, 2211 bp, Artificial Sequence
  Description of Artificial Sequence: Synthetic polynucleotide
atggctgccgatggttatcttccagattggctcgaggacaaccttagtgaaggaattcgcgagtggtgggcgctgaaacctggagccccgaagcccaaagccaaccagcaaaagcaggacgacggccggggtctggtgcttccgggttacaaatacctcggacccggtaacggactcgacaaaggagagccggtcaacgaggcggacgcggcagccctcgagcacgacaaggcctacgaccagcagctcaaagcgggtgacaatccgtacctgcggtataaccacgccgacgccgagtttcaggagcgtctgcaagaagatacgtcttttgggggcaacctcgggcgagcagtcttccaggccaagaagcgggttctcgaacctctcggtctggttgaggaaggcgctaagacggctcccggaaagaaacgtccggtagagcagtcgccacaagagccagactcctctacgggcatcggcaagaaaggccaacagcccgccagaaaaagactcaatttcggtcagactggcgactcagagtcagttccagaccctcaacctctcggagaacctccagcagcgccctctggtgtgggacctactacaatggcttcaggcggtggcgcaccaatggcagacaataacgaaggcgccgacggagtgggtaatgcctcaggaaattggcattgcgattccacatggctgggcgacagagtcatcaccaccagcacccgaacatgggccttgcccacctataacaaccacctctacaagcaaatctccagtgcttcaacgggggccagcaacgacaacacctacttcggctacagcaccccctgggggtattttgatttcaacagattccactgccatttctcaccacgtgactggcagcgactcatcaacaacaattggggattccggcccaagagactcaacttcaaactcttcaacatccaagtcaaggaggtcacgacgaatgatggcgtcacgaccatcgctaataaccttaccagcacggttcaagtcttctcggactcggagtaccagttgccgtacgtcctcggctctgcgcaccagggctgcctccctccgttcccggcggacgtgttcatgattccgcagtacggctacctaacgctcaacaatggcagccaggcagtgggacggtcatccttttactgcctggaatatttcccatcgcagatgctgagaacgggcaataactttaccttcagctacaccttcgaggacgtgcctttccacagcagctacgcgcacagccagagcctggaccggctgatgaatcctctcatcgaccagtacctgtattacctgaacagaactcagaatcagtccggaagtgcccaaaacaaggacttgctgtttagccgggggtctccagctggcatgtctgttcagcccaaaaactggctacctggaccctgttatcggcagcagcgcgtttctaaaacaaaaacagacaacaacaacagcaattttacctggactggtgcttcaaaatataacctcaatgggcgtgaatccatcatcaaccctggcactgctatggcctcacacaaagacgacgaagacaagttctttcccatgagcggtgtcatgatttttggaaaagagagcgccggagcttcaaacactgcattggacaatgtcatgattacagacgaagaggaaattaaagccactaaccctgtggccaccgaaagatttgggaccgtggcagtcaatttccagagcagcagcacagaccctgcgaccggagatgtgcatgttatgggagccttacctggaatggtgtggcaagacagagacgtatacctgcagggtcctatttgggccaaaattcctcacacagatggacactttcacccgtctcctcttatgggcggctttggactcaagaacccgcctcctcagatcctcatcaaaaacacgcctgttcctgcgaatcctccggcagagttttcggctacaaagtttgcttcattcatcacccagtattccacaggacaagtgagcgtggagattgaatgggagctgcagaaagaaaacagcaaacgctggaatcccgaagtgcagtatacatctaactatgcaaaatctgccaacgttgatttcactgtggacaacaatggactttatactgagcctcgccccattggcacccgttacctcacccgtcccctgtaa

SEQ ID NO: 5241 - protein, 736 aa, Artificial Sequence
  Description of Artificial Sequence: Synthetic polypeptide
MAADGYLPDWLEDNLSEGIREWWALKPGAPKPKANQQKQDDGRGLVLPGYKYLGPGNGLDKGEPVNEADAAALEHDKAYDQQLKAGDNPYLRYNHADAEFQERLQEDTSFGGNLGRAVFQAKKRVLEPLGLVEEGAKTAPGKKRPVEQSPQEPDSSTGIGKKGQQPARKRLNFGQTGDSESVPDPQPLGEPPAAPSGVGPTTMASGGGAPMADNNEGADGVGNASGNWHCDSTWLGDRVITTSTRTWALPTYNNHLYKQISSASTGASNDNTYFGYSTPWGYFDFNRFHCHFSPRDWQRLINNNWGFRPKRLNFKLFNIQVKEVTTNDGVTTIANNLTSTVQVFSDSEYQLPYVLGSAHQGCLPPFPADVFMIPQYGYLTLNNGSQAVGRSSFYCLEYFPSQMLRTGNNFTFSYTFEDVPFHSSYAHSQSLDRLMNPLIDQYLYYLNRTQNQSGSAQNKDLLFSRGSPAGMSVQPKNWLPGPCYRQQRVSKTKTDNNNSNFTWTGASKYNLNGRESIINPGTAMASHKDDEDKFFPMSGVMIFGKESAGASNTALDNVMITDEEEIKATNPVATERFGTVAVNFQSSSTDPATGDVHVMGALPGMVWQDRDVYLQGPIWAKIPHTDGHFHPSPLMGGFGLKNPPPQILIKNTPVPANPPAEFSATKFASFITQYSTGQVSVEIEWELQKENSKRWNPEVQYTSNYAKSANVDFTVDNNGLYTEPRPIGTRYLTRPL

SEQ ID NO: 5242 - DNA, 2205 bp, Artificial Sequence
  Description of Artificial Sequence: Synthetic polynucleotide
atggctgctgacggttatcttccagattggctcgaggacaacctttctgaaggcattcgtgagtggtgggctctgaaacctggagtccctcaacccaaagcgaaccaacaacaccaggacaaccgtcggggtcttgtgcttccgggttacaaatacctcggacccggtaacggactcgacaaaggagagccggtcaacgaggcggacgcggcagccctcgaacacgacaaggcctacgaccagcagctcaaggccggagacaacccgtacctcaagtacaaccacgccgacgccgagttccaggagcggctcaaagaagatacgtcttttgggggcaacctcgggcgagcagtcttccaggccaaaaagaggcttcttgaacctcttggtctggttgaggaagcggctaagacggctcctggaaagaagaggcctgtagagcagtctcctcaggaaccggactcctccgcgggtattggcaaatcgggtgcacagcccgctaaaaagagactcaatttcggtcagactggcgacacagagtcagtcccagaccctcaaccaatcggagaacctcccgcagccccctcaggtgtgggatctcttacaatggcttcaggtggtggcgcaccagtggcagacaataacgaaggtgccgatggagtgggtagttcctcgggaaattggcattgcgattcccaatggctgggggacagagtcatcaccaccagcacccgaacctgggccctgcccacctacaacaaccacctctacaaacaaatttccagccaatcaggagcctcgaacgacaatcactactttggctacagcaccccttgggggtattttgacttcaacagattccactgccacttttcaccacgtgactggcagcgactcatcaacaacaactggggattccggcccaagagactcagcttcaagctcttcaacatccaggtcaaagaggttacggacaacaatggagtcaagaccatcgccaataaccttaccagcacggtccaggtcttcacggactcagactatcagctcccgtacgtgctcgggtcggctcacgagggctgcctcccgccgttcccagcggacgttttcatgattcctcagtacgggtatctgacgcttaatgatggaagccaggccgtgggtcgttcgtccttttactgcctggaatatttcccgtcgcaaatgctaagaacgggtaacaacttccagttcagctacgagtttgagaacgtacctttccatagcagctacgctcacagccaaagcctggaccgactaatgaatccactcatcgaccaatacttgtactatctctcaaagactattaacggttctggacagaatcaacaaacgctaaaattcagtgtggccggacccagcaacatggctgtccagggaagaaactacatacctggacccagctaccgacaacaacgtgtctcaaccactgtgactcaaaacaacaacagcgaatttgcttggcctggagcttcttcttgggctctcaatggacgtaatagcttgatgaatcctggacctgctatggccagccacaaagaaggagaggaccgtttctttcctttgtctggatctttaatttttggcaaacaaggaactggaagagacaacgtggatgcggacaaagtcatgataaccaacgaagaagaaattaaaactactaacccggtagcaacggagtcctatggacaagtggccacaaaccaccagagtgcccaagcacaggcgcagaccggctgggttcaaaaccaaggaatacttccgggtatggtttggcaggacagagatgtgtacctgcaaggacccatctgggccaagattcctcacacggacggcaacttccacccgtctccgctgatgggcggctttggcctgaaacatcctccgcctcagatcctgatcaagaacacgcctgtacctgcggatcctccgaccaccttcaaccagtcaaagctgaactctttcatcacgcaatacagcaccggacaggtcagcgtggaaattgaatgggagctgcagaaggaaaacagcaagcgctggaatcccgaagtgcagtatacatctaactatgcaaaatctgccaacgttgatttcactgtggacaacaatggactttatactgagcctcgccccattggcacccgttacctcacccgtcccctgtaa

SEQ ID NO: 5243 - protein, 734 aa, Artificial Sequence
  Description of Artificial Sequence: Synthetic polypeptide
MAADGYLPDWLEDNLSEGIREWWALKPGVPQPKANQQHQDNRRGLVLPGYKYLGPGNGLDKGEPVNEADAAALEHDKAYDQQLKAGDNPYLKYNHADAEFQERLKEDTSFGGNLGRAVFQAKKRLLEPLGLVEEAAKTAPGKKRPVEQSPQEPDSSAGIGKSGAQPAKKRLNFGQTGDTESVPDPQPIGEPPAAPSGVGSLTMASGGGAPVADNNEGADGVGSSSGNWHCDSQWLGDRVITTSTRTWALPTYNNHLYKQISSQSGASNDNHYFGYSTPWGYFDFNRFHCHFSPRDWQRLINNNWGFRPKRLSFKLFNIQVKEVTDNNGVKTIANNLTSTVQVFTDSDYQLPYVLGSAHEGCLPPFPADVFMIPQYGYLTLNDGSQAVGRSSFYCLEYFPSQMLRTGNNFQFSYEFENVPFHSSYAHSQSLDRLMNPLIDQYLYYLSKTINGSGQNQQTLKFSVAGPSNMAVQGRNYIPGPSYRQQRVSTTVTQNNNSEFAWPGASSWALNGRNSLMNPGPAMASHKEGEDRFFPLSGSLIFGKQGTGRDNVDADKVMITNEEEIKTTNPVATESYGQVATNHQSAQAQAQTGWVQNQGILPGMVWQDRDVYLQGPIWAKIPHTDGNFHPSPLMGGFGLKHPPPQILIKNTPVPADPPTTFNQSKLNSFITQYSTGQVSVEIEWELQKENSKRWNPEVQYTSNYAKSANVDFTVDNNGLYTEPRPIGTRYLTRPL

SEQ ID NO: 5244 - DNA, 2211 bp, Artificial Sequence
  Description of Artificial Sequence: Synthetic polynucleotide
atggctgccgatggttatcttccagattggctcgaggacaacctctctgagggcattcgcgagtggtgggcgctgaaacctggagccccgaagcccaaagccaaccagcaaaagcaggacgacggccggggtctggtgcttcctggctacaagtacctcggacccttcaacggactcgacaagggggagcccgtcaacgcggcggacgcagcggccctcgagcacgacaaggcctacgaccagcagctgcaggcgggtgacaatccgtacctgcggtataaccacgccgacgccgagtttcaggagcgtctgcaagaagatacgtcttttgggggcaacctcgggcgagcagtcttccaggccaagaagtgggttctcgaacctctcggtctggttgaggaaggcgctaagacggctcctggaaagaaacgtccggtagagcagtcgccacaagagccagactcctcctcgggcatcggcaagacaggccagcagcccgctaaaaagagactcaattttggtcagactggcgactcagagtcagtccccgacccacaacctctcggagaacctccagcaacccccgctgctgtgggacctactacaatggcttcaggcggtggcgcaccaatggcagacaataacgaaggcgccgacggagtgggtaatgcctcaggaaattggcattgcgattccacatggctgggcgacagagtcatcaccaccagcacccgcacctgggccttgcccacctacaataaccacctctacaagcaaatctccagtgcttcaacgggggccagcaacgacaaccactacttcggctacagcaccccctgggggtattttgatttcaacagattccactgccatttctcaccacgtgactggcagcgactcatcaacaacaattggggattccggcccaagagactcaacttcaagctcttcaacatccaagtcaaggaggtcacgacgaatgatggcgtcacaaccatcgctaataaccttaccagcacggttcaagtcttctcggactcggagtaccagcttccgtacgtcctcggctctgcgcaccagggctgcctccctccgttcccggcggacgtgttcatgattccgcaatacggctacctgacgctcaacaatggcagccaagccgtgggacgttcatccttttactgcctggaatatttcccttctcagatgctgagaacgggcaacaactttaccttcagctacacctttgaggaagtgcctttccacagcagctacgcgcacagccagagcctggaccggctgatgaatcctctcatcgaccaatacctgtattacctgaacagaactcaaaatcagtccggaagtgcccaaaacaaggacttgctgtttagccgtgggtctccagctggcatgtctgttcagcccaaaaactggctacctggaccctgttatcggcagcagcgcgtttctaaaacaaaaacagacaacaacaacagcaattttacctggactggtgcttcaaaatataacctcaatgggcgtgaatccatcatcaaccctggcactgctatggcctcacacaaagacgacgaagacaagttctttcccatgagcggtgtcatgatttttggaaaggagagcgccggagcttcaaacactgcattggacaatgtcatgatcaccgacgaagaggaaatcaaagccactaaccccgtggccaccgaaagatttgggactgtggcagtcaatctccagagcagcagcacagaccctgcgaccggagatgtgcatgttatgggagccttacctggcatggtgtggcaagatagagacgtgtacctgcagggtcccatttgggccaaaattcctcacacagatggacactttcacccgtctcctcttatgggcggctttggactcaagaacccgcctcctcagatcctcatcaaaaacacgcctgttcctgcgaatcctccggcggagttttcagctacaaagtttgcttcattcatcacccaatactccacaggacaagtgagtgtggaaattgaatgggagctgcagaaagaaaacagcaagcgctggaatcccgaagtgcagtacacatccaattatgcaaaatctgccaacgttgattttactgtggacaacaatggactttatactgagcctcgccccattggcacccgttacctcacccgtcccctgtaa

SEQ ID NO: 5245 - protein, 736 aa, Artificial Sequence
  Description of Artificial Sequence: Synthetic polypeptide
MAADGYLPDWLEDNLSEGIREWWALKPGAPKPKANQQKQDDGRGLVLPGYKYLGPFNGLDKGEPVNAADAAALEHDKAYDQQLQAGDNPYLRYNHADAEFQERLQEDTSFGGNLGRAVFQAKKWVLEPLGLVEEGAKTAPGKKRPVEQSPQEPDSSSGIGKTGQQPAKKRLNFGQTGDSESVPDPQPLGEPPATPAAVGPTTMASGGGAPMADNNEGADGVGNASGNWHCDSTWLGDRVITTSTRTWALPTYNNHLYKQISSASTGASNDNHYFGYSTPWGYFDFNRFHCHFSPRDWQRLINNNWGFRPKRLNFKLFNIQVKEVTTNDGVTTIANNLTSTVQVFSDSEYQLPYVLGSAHQGCLPPFPADVFMIPQYGYLTLNNGSQAVGRSSFYCLEYFPSQMLRTGNNFTFSYTFEEVPFHSSYAHSQSLDRLMNPLIDQYLYYLNRTQNQSGSAQNKDLLFSRGSPAGMSVQPKNWLPGPCYRQQRVSKTKTDNNNSNFTWTGASKYNLNGRESIINPGTAMASHKDDEDKFFPMSGVMIFGKESAGASNTALDNVMITDEEEIKATNPVATERFGTVAVNLQSSSTDPATGDVHVMGALPGMVWQDRDVYLQGPIWAKIPHTDGHFHPSPLMGGFGLKNPPPQILIKNTPVPANPPAEFSATKFASFITQYSTGQVSVEIEWELQKENSKRWNPEVQYTSNYAKSANVDFTVDNNGLYTEPRPIGTRYLTRPL

SEQ ID NO: 5246 - DNA, 2214 bp, Artificial Sequence
  Description of Artificial Sequence: Synthetic polynucleotide
atggctgccgatggttatcttccagattggctcgaggacaaccttagtgaaggaattcgcgagtggtgggctttgaaacctggagcccctcaacccaaggcaaatcaacaacatcaagacaacgctcgaggtcttgtgcttccgggttacaaataccttggacccggcaacggactcgacaagggggagccggtcaacgcagcagacgcggcggccctcgagcacgacaaggcctacgaccagcagctgcaggcgggtgacaatccgtacctgcggtataaccacgccgacgccgagtttcaggagcgtctgcaagaagatacgtcttttgggggcaaccttggcagagcagtcttccaggccaaaaagaggatccttgagcctcttggtctggttgaggaagcagctaaaacggctcctggaaagaagaggcctgtagatcagtctcctcaggaaccggactcatcatctggtgttggcaaatcgggcaaacagcctgccagaaaaagactaaatttcggtcagactggcgactcagagtcagtcccagaccctcaacctctcggagaaccaccagcagcccccacaagtttgggatctaatacaatggcttcaggcggtggcgcaccaatggcagacaataacgagggtgccgatggggtgggtagttcctcgggaaattggcattgcgattcccaatggctgggggacagagtcatcaccaccagcacccgaacctgggccctgcccacctacaacaatcacctctacaagcaaatctccaacgggacatcgggaggagccaccaacgacaacacctacttcggctacagcaccccctgggggtattttgactttaacagattccactgccacttttcaccacgtgactggcagcgactcatcaacaacaactggggattccggcccaagagactcagcttcaagctcttcaacatccaggtcaaggaggtcacgcagaatgaaggcaccaagaccatcgccaataacctcaccagcaccatccaggtgtttacggactcggagtaccagctgccgtacgttctcggctcggcgcaccagggctgcctccctccgttcccggcggacgtcttcatggtgccacagtatggatacctgacgctcaacaatggcagccaagccgtgggacgttcatccttttactgcctggaatatttcccttctcagatgctgagaacgggcaacaactttaccttcagctacacctttgaggaagtgcctttccacagcagctacgcgcacagccagagcttggaccggctgatgaatcctctgattgaccagtacctgtactacttgtctcggactcaaacaacaggaggcacggcaaatacgcagactctgggcttcagccaaggtgggcctaatacaatggccaatcaggcaaagaactggctgccaggaccctgttaccgccaacaacgcgtctcaacgacaaccgggcaaaacaacaatagcaactttgcctggactgctgggaccaaataccatctgaatggaagaaattcattggctaatcctggcatcgctatggcaacacacaaagacgacgaggagcgtttttttcccagtaacgggatcctgatttttggcaaacaaaatgctgccagagacaatgcggattacagcgatgtcatgctcaccagcgaggaagaaatcaaaaccactaaccctgtggctacagaggaatacggtatcgtggcagataacttgcagcagcaaaacacggctcctcaaattggaactgtcaacagccagggggacttacccggtatggtctggcagaaccgggacgtgtacctgcagggtcccatctgggccaagattcctcacacggacggcaacttccacccgtctccgctgatgggcggctttggcctgaaacatcctccgcctcagatcctgatcaagaacacgcctgtacctgcggatcctccgaccaccttcaaccagtcaaagctgaactctttcatcacgcaatacagcaccggacaggtcagcgtggagatcgagtgggagctgcagaaggaaaacagcaagcgctggaacccggagatccagtacacttccaactattacaagtctaataatgttgaatttgctgttaatactgaaggtgtatatagtgaaccccgccccattggcaccagatacctgactcgtaatctgtaa

SEQ ID NO: 5247 - protein, 737 aa, Artificial Sequence
  Description of Artificial Sequence: Synthetic polypeptide
MAADGYLPDWLEDNLSEGIREWWALKPGAPQPKANQQHQDNARGLVLPGYKYLGPGNGLDKGEPVNAADAAALEHDKAYDQQLQAGDNPYLRYNHADAEFQERLQEDTSFGGNLGRAVFQAKKRILEPLGLVEEAAKTAPGKKRPVDQSPQEPDSSSGVGKSGKQPARKRLNFGQTGDSESVPDPQPLGEPPAAPTSLGSNTMASGGGAPMADNNEGADGVGSSSGNWHCDSQWLGDRVITTSTRTWALPTYNNHLYKQISNGTSGGATNDNTYFGYSTPWGYFDFNRFHCHFSPRDWQRLINNNWGFRPKRLSFKLFNIQVKEVTQNEGTKTIANNLTSTIQVFTDSEYQLPYVLGSAHQGCLPPFPADVFMVPQYGYLTLNNGSQAVGRSSFYCLEYFPSQMLRTGNNFTFSYTFEEVPFHSSYAHSQSLDRLMNPLIDQYLYYLSRTQTTGGTANTQTLGFSQGGPNTMANQAKNWLPGPCYRQQRVSTTTGQNNNSNFAWTAGTKYHLNGRNSLANPGIAMATHKDDEERFFPSNGILIFGKQNAARDNADYSDVMLTSEEEIKTTNPVATEEYGIVADNLQQQNTAPQIGTVNSQGDLPGMVWQNRDVYLQGPIWAKIPHTDGNFHPSPLMGGFGLKHPPPQILIKNTPVPADPPTTFNQSKLNSFITQYSTGQVSVEIEWELQKENSKRWNPEIQYTSNYYKSNNVEFAVNTEGVYSEPRPIGTRYLTRNL

SEQ ID NO: 5248 - DNA, 2205 bp, Artificial Sequence
  Description of Artificial Sequence: Synthetic polynucleotide
atggctgctgacggttatcttccagattggctcgaggacaacctttctgaaggcattcgtgagtggtgggctctgaaacctggagtccctcaacccaaagcgaaccaacaacaccaggacaactgtcggggtcttgtgcttccgggttacaaatacctcggacccggtaacggactcgacaaaggagagccggtcaacgaggcggacgcggcagccctcgaacacgacaaggcctacgaccagcagctcaaggccggagacaacccgtacctcaagtacaaccacgccgacgccgagttccaggagcggctcaaagaagatacgtcttttgggggcaacctcgggcgagcagtcttccagaccaaaaagaggcttcttgaacctcttggtctggttgaggaagcggctaagacggctcctggaaagaagaggcctgtagagcagtctcctcaggaaccggactcctccgcgggtattggcaaatcgggtgcacagcccgctaaaaagagactcaatttcggtcagactggcgacacagagtcagtcccagaccctcaaccaatcggagaacctcccgcagccccctcaggtgtgggatctcttacaatggcttcaggtggtggcgcaccagtggcagacaataacgaaggtgccgatggagtgggtagttcctcgggaaattggcattgcgattcccaatggctgggggacagagtcatcaccaccagcacccgaacctgggccctgcccacctacaacaaccacctctacaaacaaatttccagccaatcaggagcctcgaacgacaatcactactttggctacagcaccccttgggggtattttgacttcaacagattccactgccacttttcaccacgtgactggcagcgactcatcaacaacaactggggattccggcccaagagactcagcttcaagctcttcaacatccaggtcaaagaggttacggacaacaatggagtcaagaccatcgccaataaccttaccagcacggtccaggtcttcacggactcagactatcagctcccgtacgtgctcgggtcggctcacgagggctgcctcccgccgttcccagcggacgttttcatgattcctcagtacgggtatctgacgcttaatgatggaagccaggccgtgggtcgttcgtccttttactgcctggaatatttcccgtcgcaaatgctaagaacgggtaacaacttccagttcagctacgagtttgagaacgtacctttccatagcagctacgctcacagccaaagcctggaccgactaatgaatccactcatcgaccaatacttgtactatctctcaaagactattaacggttctggacagaatcaacaaacgctaaaattcagtgtggccggacccagcaacatggctgtccagggaagaaactacatacctggacccagctaccgacaacaacgtgtctcaaccactgtgactcaaaacaacaacagcgaatttgcttggcctggagcttcttcttgggctctcaatggacgtaatagcttgatgaatcctggacctgctatggccagccacaaagaaggagaggaccgtttctttcctttgtctggatctttaatttttggcaaacaaggaactggaagagacaacgtggatgcggacaaagtcatgataaccaacgaagaagaaattaaaactactaacccggtagcaacggagtcctatggacaagtggccacaaaccaccagagtgcccaagcacaggcgcagaccggctgggttcaaaaccaaggaatacttccgggtatggtttggcaggacagagatgtgtacctgcaaggacccatctgggccaagattcctcacacggacggcaacttccacccgtctccgctgatgggcggctttggcctgaaacatcctccgcctcagatcctgatcaagaacacgcctgttcctgcgaatcctccggcggagttttcagctacaaagtttgcttcattcatcacccagtactccacaggacaagtgagtgtggaaattgaatgggagctgcagaaagaaaacagcaagcgctggaatcccgaagtgcagtacacatccaattatgcaaaatctgccaacgttgattttactgtggacaacaatggactttatactgagcctcgccccattggcacccgttaccttaccaaacctctgtaa

SEQ ID NO: 5249 - protein, 734 aa, Artificial Sequence
  Description of Artificial Sequence: Synthetic polypeptide
MAADGYLPDWLEDNLSEGIREWWALKPGVPQPKANQQHQDNCRGLVLPGYKYLGPGNGLDKGEPVNEADAAALEHDKAYDQQLKAGDNPYLKYNHADAEFQERLKEDTSFGGNLGRAVFQTKKRLLEPLGLVEEAAKTAPGKKRPVEQSPQEPDSSAGIGKSGAQPAKKRLNFGQTGDTESVPDPQPIGEPPAAPSGVGSLTMASGGGAPVADNNEGADGVGSSSGNWHCDSQWLGDRVITTSTRTWALPTYNNHLYKQISSQSGASNDNHYFGYSTPWGYFDFNRFHCHFSPRDWQRLINNNWGFRPKRLSFKLFNIQVKEVTDNNGVKTIANNLTSTVQVFTDSDYQLPYVLGSAHEGCLPPFPADVFMIPQYGYLTLNDGSQAVGRSSFYCLEYFPSQMLRTGNNFQFSYEFENVPFHSSYAHSQSLDRLMNPLIDQYLYYLSKTINGSGQNQQTLKFSVAGPSNMAVQGRNYIPGPSYRQQRVSTTVTQNNNSEFAWPGASSWALNGRNSLMNPGPAMASHKEGEDRFFPLSGSLIFGKQGTGRDNVDADKVMITNEEEIKTTNPVATESYGQVATNHQSAQAQAQTGWVQNQGILPGMVWQDRDVYLQGPIWAKIPHTDGNFHPSPLMGGFGLKHPPPQILIKNTPVPANPPAEFSATKFASFITQYSTGQVSVEIEWELQKENSKRWNPEVQYTSNYAKSANVDFTVDNNGLYTEPRPIGTRYLTKPL

SEQ ID NO: 5250 - DNA, 2211 bp, Artificial Sequence
  Description of Artificial Sequence: Synthetic polynucleotide
atggctgccgatggttatcttccagattggctcgaggacaacctctctgagggcattcgcgagtggtgggacttgaaacctggagcccctaaacccaaggcaaatcaacaacatcaggacaacgctcgaggtcttgtgcttccgggttacaaataccttggacccggcaacggactcgacaagggggagccggtcaacgcagcagacgcggcggccctcgagcacgacaaggcctacgaccagcagctcaaggccggagacaacccgtacctcaagtacaaccacgccgacgccgagttccaggagcggctcaaagaagatacgtcttttgggggcaacctcgggcgagcagtcttccaggccaaaaagaggcttcttgaacctcttggtctggttgaggaagcggctaagacggctcctggaaagaagagaccggtagagccatcaccccagcgttctccagactcctctacgggcatcggcaagaaaggccaacagcccgctaaaaagagactcaattttggtcagactggcgactcagagtcagtccccgacccacaacctctcggagaacctccagcaacccccgctgctgtgggacctactacaatggcttcaggcggtggcgcaccaatggcagacaataacgagggtgccgatggagtgggtaattcctcaggaaattggcattgcgattcccaatggctgggcgacagagtcatcaccaccagcaccagaacctgggccctgcccacttacaacaaccatctctacaagcaaatctccagccaatcaggagcttcaaacgacaaccactactttggctacagcaccccttgggggtattttgactttaacagattccactgccacttttcaccacgtgactggcaaagactcatcaacaacaactggggattccgacccaagagactcaacttcaagctcttcaacatccaagtcaaggaggtcacgacgaatgatggcgtcacgaccatcgctaataaccttaccagcacggttcaagtcttctcggactcggagtaccagttgccgtacgtcctcggctctgcgcaccagggctgcctccctccgttcccggcggacgtgttcatgattccgcagtacggctacctaacgctcaacaatggcagccaagccgtgggacgttcatccttttactgcctggaatatttcccttctcagatgctgagaacgggcaacaactttaccttcagctacacttttgaggacgttcctttccacagcagctacgctcacagccagagtctggaccgtctcatgaatcctctcatcgaccagtacctgtattacttgagcagaacaaacactccaagtggaaccaccacgcagtcaaggcttcagttttctcaggccggagcgagtgacattcgggaccagtctaggaactggcttcctggaccctgttaccgccagcagcgcgtttctaaaacaaaaacagacaacaacaacagcaattttacctggactggtgcttcaaaatataaccttaatgggcgtgaatctataatcaaccctggcactgctatggcctcacacaaagacgacgaagacaagttctttcccatgagcggtgtcatgatttttggaaaagagagcgccggagcttcaaacactgcattggacaatgtcatgatcacagacgaagaggaaatcaaagccactaaccccgtggccaccgaaagatttgggactgtggcagtcaatctccagagcagcagcacagaccctgcgaccggagatgtgcatgttatgggagcattacctggcatggtgtggcaagatagagacgtgtacctgcagggtcccatttgggccaaaattcctcacacagatggacactttcacccgtctcctcttatgggcggctttggactcaagaacccgcctcctcagatcctcatcaaaaacacgcctgttcctgcgaatcctccggcggagttttcagctacaaagtttgcttcattcatcacccaatactccacaggacaagtgagtgtggaaattgaatgggagctgcagaaagaaaacagcaagcgctggaatcccgaagtgcagtacacatccaattatgcaaaatctgccaacgttgattttactgtggacaacaatggactttatactgagcctcgccccattggcacccgttaccttacccgtcccctgtaa

SEQ ID NO: 5251 - protein, 736 aa, Artificial Sequence
  Description of Artificial Sequence: Synthetic polypeptide
MAADGYLPDWLEDNLSEGIREWWDLKPGAPKPKANQQHQDNARGLVLPGYKYLGPGNGLDKGEPVNAADAAALEHDKAYDQQLKAGDNPYLKYNHADAEFQERLKEDTSFGGNLGRAVFQAKKRLLEPLGLVEEAAKTAPGKKRPVEPSPQRSPDSSTGIGKKGQQPAKKRLNFGQTGDSESVPDPQPLGEPPATPAAVGPTTMASGGGAPMADNNEGADGVGNSSGNWHCDSQWLGDRVITTSTRTWALPTYNNHLYKQISSQSGASNDNHYFGYSTPWGYFDFNRFHCHFSPRDWQRLINNNWGFRPKRLNFKLFNIQVKEVTTNDGVTTIANNLTSTVQVFSDSEYQLPYVLGSAHQGCLPPFPADVFMIPQYGYLTLNNGSQAVGRSSFYCLEYFPSQMLRTGNNFTFSYTFEDVPFHSSYAHSQSLDRLMNPLIDQYLYYLSRTNTPSGTTTQSRLQFSQAGASDIRDQSRNWLPGPCYRQQRVSKTKTDNNNSNFTWTGASKYNLNGRESIINPGTAMASHKDDEDKFFPMSGVMIFGKESAGASNTALDNVMITDEEEIKATNPVATERFGTVAVNLQSSSTDPATGDVHVMGALPGMVWQDRDVYLQGPIWAKIPHTDGHFHPSPLMGGFGLKNPPPQILIKNTPVPANPPAEFSATKFASFITQYSTGQVSVEIEWELQKENSKRWNPEVQYTSNYAKSANVDFTVDNNGLYTEPRPIGTRYLTRPL

SEQ ID NO: 5252 - DNA, 2214 bp, Artificial Sequence; identical to SEQ ID NO: 5224
  Description of Artificial Sequence: Synthetic polynucleotide

SEQ ID NO: 5253 - protein, 737 aa, Artificial Sequence; identical to SEQ ID NO: 5225
  Description of Artificial Sequence: Synthetic polypeptide

SEQ ID NO: 5254 - DNA, 2205 bp, Artificial Sequence
  Description of Artificial Sequence: Synthetic polynucleotide
atggctgctgacggttatcttccagattggctcgaggacaacctttctgaaggcattcgtgagtggtgggctctgaaacctggagtccctcaacccaaagcgaaccaacaacaccaggacaaccgtcggggtcttgtgcttccgggttacaaatacctcggacccggtaacggactcgacaaaggagagccggtcaacgaggcggacgcggcagccctcgaacacgacaaggcctacgaccagcagctcaaggccggagacaacccgtacctcaagtacaaccacgccgacgccgagttccaggagcggctcaaagaagatacgtcttttgggggcaacctcgggcgagcagtcttccaggccaaaaagaggcttcttgaacctcttggtctggttgaggaagcggctaagacggctcctggaaagaagaggcctgtagagcagtctcctcaggaaccggactcctccgcgggtattggcaaatcgggtgcacagcccgctaaaaagagactcaatttcggtcagactggcgacacagagtcagtcccagaccctcaaccaatcggagaacctcccgcagccccctcaggtgtgggatctcttacaatggcttcaggtggtggcgcaccagtggcagacaataacgaaggtgccgatggagtgggtagttcctcgggaaattggcattgcgattcccaatggctgggggacagagtcatcaccaccagcacccgaacctgggccctgcccacctacaacaaccacctctacaaacaaatttccagccaatcaggagcctcgaacgacaatcactactttggctacagcaccccttgggggtattttgacttcaacagattccactgccacttttcaccacgtgactggcagcgactcatcaacaacaactggggattccggcccaagagactcagcttcaagctcttcaacatccaggtcaaagaggttacggacaacaatggagtcaagaccatcgccaataaccttaccagcacggtccaggtcttcacggactcagactatcagctcccgtacgtgctcgggtcggctcacgagggctgcctcccgccgttcccagcggacgttttcatgattcctcagtacgggtatctgacgcttaatgatggaagccaggccgtgggtcgttcgtccttttactgcctggaatatttcccgtcgcaaatgctaagaacgggtaacaacttccagttcagctacgagtttgagaacgtacctttccatagcagctacgctcacagccaaagcctggaccgactaatgaatccactcatcgaccaatacttgtactatctctcaaagactattaacggttctggacagaatcaacaaacgctaaaattcagtgtggccggacccagcaacatggctgtccagggaagaaactacatacctggacccagctaccgacaacaacgtgtctcaaccactgtgactcaaaacaacaacagcgaatttgcttggcctggagcttcttcttgggctctcaatggacgtaatagcttgatgaatcctggacctgctatggccagccacaaagaaggagaggaccgtttctttcctttgtctggatctttaatttttggcaaacaaggaactggaagagacaacgtggatgcggacaaagtcatgataaccaacgaagaagaaattaaaactactaacccggtagcaacggagtcctatggacaagtggccacaaaccaccagagtgcccaagcacaggcgcagaccggctgggttcaaaaccaaggaatacttccgggtatggtttggcaggacagagatgtgtacctgcaaggacccatttgggccaaaattcctcacacggacggcaactttcacccttctccgctgatgggagggtttggaatgaaacacccgcctcctcagatcctcatcaaaaacacacctgtacctgcggatcctccaacggccttcaacaaggacaagctgaactctttcatcacccagtattctactggccaagtcagcgtggagatcgagtgggagctgcagaaggaaaacagcaagcgctggaaccccgagatccagtacacctccaactactacaaatctacaagtgtggactttgctgttaatacagaaggcgtgtactctgaaccccgccccattggcacccgttacctcacccgtaatctgtaa

SEQ ID NO: 5255 - protein, 734 aa, Artificial Sequence
  Description of Artificial Sequence: Synthetic polypeptide
MAADGYLPDWLEDNLSEGIREWWALKPGVPQPKANQQHQDNRRGLVLPGYKYLGPGNGLDKGEPVNEADAAALEHDKAYDQQLKAGDNPYLKYNHADAEFQERLKEDTSFGGNLGRAVFQAKKRLLEPLGLVEEAAKTAPGKKRPVEQSPQEPDSSAGIGKSGAQPAKKRLNFGQTGDTESVPDPQPIGEPPAAPSGVGSLTMASGGGAPVADNNEGADGVGSSSGNWHCDSQWLGDRVITTSTRTWALPTYNNHLYKQISSQSGASNDNHYFGYSTPWGYFDFNRFHCHFSPRDWQRLINNNWGFRPKRLSFKLFNIQVKEVTDNNGVKTIANNLTSTVQVFTDSDYQLPYVLGSAHEGCLPPFPADVFMIPQYGYLTLNDGSQAVGRSSFYCLEYFPSQMLRTGNNFQFSYEFENVPFHSSYAHSQSLDRLMNPLIDQYLYYLSKTINGSGQNQQTLKFSVAGPSNMAVQGRNYIPGPSYRQQRVSTTVTQNNNSEFAWPGASSWALNGRNSLMNPGPAMASHKEGEDRFFPLSGSLIFGKQGTGRDNVDADKVMITNEEEIKTTNPVATESYGQVATNHQSAQAQAQTGWVQNQGILPGMVWQDRDVYLQGPIWAKIPHTDGNFHPSPLMGGFGMKHPPPQILIKNTPVPADPPTAFNKDKLNSFITQYSTGQVSVEIEWELQKENSKRWNPEIQYTSNYYKSTSVDFAVNTEGVYSEPRPIGTRYLTRNL

SEQ ID NO: 5256 - DNA, 2217 bp, Artificial Sequence
  Description of Artificial Sequence: Synthetic polynucleotide
atggctgccgatggttatcttccagattggctcgaggacaacctctctgagggcattcgcgagtggtgggcgctgaaacctggagccccgaagcccaaagccaaccagcaaaagcaggacgacggccggggtctggtgcttcctggctacaagtacctcggacccttcaacggactcgacaagggggagcccgtcaacgcggcggacgcagcggccctcgagcacgacaaggcctacgaccagcagctgcaggcgggtgacaatccgtacctgcggtataaccacgccgacgccgagtttcaggagcgtctgcaagaagatacgtcttttgggggcaacctcgggcgagcagtcttccaggccaagaagcgggttctcgaacctctcggtctggttgaggaaggcgctaagacggctcctggaaagaagagaccggtagagccatcaccccagcgttctccagactcctctacgggcatcggcaagaaaggccaacagcccgccagaaaaagactcaattttggtcagactggcgactcagagtcagttccagaccctcaacctctcggagaacctccagcagcgccctctggtgtgggacctaatacaatggctgcaggcggtggcgcaccaatggcagacaataacgaaggcgccgacggagtgggtagttcctcgggaaattggcattgcgattccacatggctgggcgacagagtcatcaccaccagcacccgaacctgggccctgcccacctacaacaaccacctctacaagcaaatctccaacgggacatcgggaggagccaccaacgacaacacctacttcggctacagcaccccctgggggtattttgactttaacagattccactgccacttttcaccacgtgactggcagcgactcatcaacaacaactggggattccggcccaagagactcagcttcaagctcttcaacatccaggtcaaggaggtcacgcagaatgaaggcaccaagaccatcgccaataacctcaccagcaccatccaggtgtttacggactcggagtaccagctgccgtacgttctcggctctgcccaccagggctgcctgcctccgttcccggcggacgtgttcatgattccccagtacggctacctaacactcaacaacggtagtcaggccgtgggacgctcctccttctactgcctggaatactttccttcgcagatgctgagaaccggcaacaacttccagtttacttacaccttcgaggacgtgcctttccacagcagctacgcccacagccagagcttggaccggctgatgaatcctctgattgaccagtacctgtactacttgtctcggactcaaacaacaggaggcacggcaaatacgcagactctgggcttcagccaaggtgggcctaatacaatggccaatcaggcaaagaactggctgccaggaccctgttaccgccaacaacgcgtctcaacgacaaccgggcaaaacaacaatagcaactttgcctggactgctgggaccaaataccatctgaatggaagaaattcattggctaatcctggcatcgctatggcaacacacaaagacgacgaggagcgtttttttcccagtaacgggatcctgatttttggcaaacaaaatgctgccagagacaatgcggattacagcgatgtcatgctcaccagcgaggaagaaatcaaaaccactaaccctgtggctacagaggaatacggtatcgtggcagataacttgcagcagcaaaacacggctcctcaaattggaactgtcaacagccagggggccttacccggtatggtctggcagaaccgggacgtgtacctgcagggtcccatctgggccaagattcctcacacggacggcaacttccacccctctcccctcatgggtggattcggacttaaacatcctccgcctcagatcctgatcaagaacacgcctgtacctgcggatcctccgaccaccttcaaccagtcaaagctgaactctttcatcacgcaatacagcaccggacaggtcagcgtggaaattgaatgggagctgcagaaggaaaacagcaagcgctggaaccccgagatccagtacacctccaactactacaaatctacaagtgtggactttgctgttaatacagaaggcgtgtactctgaaccccgccccattggcacccgttacctcacccgtaatctgtaa

SEQ ID NO: 5257 - protein, 738 aa, Artificial Sequence; identical to SEQ ID NO: 5159
  Description of Artificial Sequence: Synthetic polypeptide

SEQ ID NO: 5258 - DNA, 2211 bp, Artificial Sequence
  Description of Artificial Sequence: Synthetic polynucleotide
atggctgctgacggttatcttccagattggctcgaggacaacctttctgaaggcattcgagagtggtgggcgctgcaacctggagcccctaaacccaaggcaaatcaacaacatcaggacaacgctcggggtcttgtgcttccgggttacaaatacctcggacccggcaacggactcgacaagggggaacccgtcaacgcagcggacgcggcagccctcgagcacgacaaggcctacgaccagcagctcaaggccggtgacaacccctacctcaagtacaaccacgccgacgccgagttccaggagcggctcaaagaagatacgtcttttgggggcaacctcgggcgagcagtcttccaggccaaaaagaggcttcttgaacctcttggtctggttgaggaagcggctaagacggctcctggaaagaagaggcctgtagatcagtctcctcaggaaccggactcatcatctggtgttggcaaatcgggcaaacagcctgccagaaaaagactaaatttcggtcagactggcgactcagagtcagtcccagaccctcaacctctcggagaaccaccagcagcccccacaagtttgggatctaatacaatggcttcaggcggtggcgcaccaatggcagacaataacgagggtgccgatggagtgggtaattcctcaggaaattggcattgcgattcccaatggctgggcgacagagtcatcaccaccagcaccagaacctgggccctgcccacttacaacaaccatctctacaagcaaatctccagccaatcaggagcttcaaacgacaaccactactttggctacagcaccccttgggggtattttgactttaacagattccactgccacttctcaccacgtgactggcagcgactcattaacaacaactggggattccggcccaagaaactcagcttcaagctcttcaacatccaagttaaagaggtcacgcagaacgatggcacgacgactattgccaataaccttaccagcacggttcaggtgtttacggactcggagtatcagctcccgtacgtgctcgggtcggcgcaccaaggctgtctcccgccgtttccagcggacgtcttcatggtccctcagtatggatacctcaccctgaacaacggaagtcaagcggtgggacgctcatccttttactgcctggagtacttcccttcgcagatgctaaggactggaaataacttccaattcagctataccttcgaggatgtaccttttcacagcagctacgctcacagccagagtttggatcgcttgatgaatcctcttattgatcagtatctgtactacctgaacagaacgcaaggaacaacctctggaacaaccaaccaatcacggctgctttttagccaggctgggcctcagtctatgtctttgcaggccagaaattggctacctgggccctgctaccggcaacagagactttcaaagactgctaacgacaacaacaacagtaactttccttggacagcggccagcaaatatcatctcaatggccgcgactcgctggtgaatccaggaccagctatggccagtcacaaggacgatgaagaaaaatttttccctatgcacggcaatctaatatttggcaaagaagggacaacggcaagtaacgcagaattagataatgtaatgattacggatgaagaagagattcgtaccaccaatcctgtggcaacagagcagtatggaactgtggcaaataacttgcagagctcaaatacagctcccacgactagaactgtcaatgatcagggggccttacctggcatggtgtggcaagatcgtgacgtgtaccttcaaggacctatctgggcaaagattcctcacacggatggacactttcatccttctcctctgatgggaggctttggactgaaacatccgcctcctcaaatcatgatcaaaaatactccggtaccggcaaatcctccgacgactttcagcccggccaagtttgcttcatttatcactcagtactccactggacaggtcagcgtggaaattgagtgggagctacagaaagaaaacagcaaacgttggaatccagagattcagtacacttccaactacaacaagtctgttaatgtggactttactgtagacactaatggtgtttatagtgaacctcgccccattggcacccgttaccttacccgtcccctgtaa

SEQ ID NO: 5259 - protein, 736 aa, Artificial Sequence; identical to SEQ ID NO: 5229
  Description of Artificial Sequence: Synthetic polypeptide

SEQ ID NO: 5260 - DNA, 2211 bp, Artificial Sequence; identical to SEQ ID NO: 5228
  Description of Artificial Sequence: Synthetic polynucleotide

SEQ ID NO: 5261 - protein, 736 aa, Artificial Sequence; identical to SEQ ID NO: 5229
  Description of Artificial Sequence: Synthetic polypeptide

SEQ ID NO: 5262 - DNA, 2211 bp, Artificial Sequence
  Description of Artificial Sequence: Synthetic polynucleotide
atggctgctgacggttatcttccagattggctcgaggacaacctttctgaaggcattcgtgagtggtgggctctgaaacctggagtccctcaacccaaagcgaaccaacaacaccaggacaaccgtcggggtcttgtgcttccgggttacaaatacctcggacccggtaacggactcgacaaaggagagcccgtcaacgcggcggatgcagcggccctcgagcacgacaaggcctacgaccagcagctcaaagcgggtgacaatccgtacctgcggtataaccacgccgacgccgagtttcaggagcgtctgcaagaagatacgtcttttgggggcaacctcgggcgagcagtcttccaggccaagaagagggttctcgaaccttttggtctggttgaggaaggtgctaagacggctcctggaaagaaacgtccggtagagcagtcgccacaagagccagactcctcctcgggcatcggcaagacaggccagcagcccgctaaaaagagactcaattttggtcagactggcgactcagagtcagtccccgacccacaacctctcggagaacctccagcaacccccgctgctgtgggacctactacaatggcttcaggcggtggcgcaccaatggcagacaataacgaaggcgccgacggagtgggtaatgcctcaggaaattggcattgcgattccacatggctgggcgacagagtcatcaccaccagcacccgcacctgggccttgcccacctacaataaccacctctacaagcaaatctccagtgcttcaacgggggccagcaacgacaaccactacttcggctacagcaccccctgggggtattttgatttcaacagattccactgccatttctcaccacgtgactggcagcgactcatcaacaacaattggggattccggcccaagagactcaacttcaagctcttcaacatccaagtcaaggaggtcacgacgaatgatggcgtcacgaccatcgctaataaccttaccagcacggttcaagtcttctcggactcggagtaccagcttccgtacgtcctcggctctgcgcaccagggctgcctccctccgttcccggcggacgtgttcatgattccgcaatacggctacctgacgctcaacaatggcagccaagccgtgggacgttcatccttttactgcctggaatatttcccttctcagatgctgagaacgggcaacaactttaccttcagctacacctttgaggaagtgcctttccacagcagctacgcgcacagccagagcctggaccggctgatgaatcctctcatcgaccaatacctgtattacctgaacagaactcaaaatcagtccggaagtgcccaaaacaaggacttgctgtttagccgtgggtctccagctggcatgtctgttcagcccaaaaactggctacctggaccctgttatcggcagcagcgcgtttctaaaacaaaaacagacaacaacaacagcaattttacctggactggtgcttcaaaatataacctcaatgggcgtgaatccatcatcaaccctggcactgctatggcctcacacaaagacgacgaagacaagttctttcccatgagcggtgtcatgatttttggaaaagagagcgccggagcttcaaacactgcattggacaatgtcatgattacagacgaagaggaaattaaagccactaaccctgtggccaccgaaagatttgggaccgtggcagtcaatttccagagcagcagcacagaccctgcgaccggagatgtgcatgttatgggagccttacctggaatggtgtggcaagacagagacgtatacctgcagggtcctatttgggccaaaattcctcacacggatggacactttcacccgtctcctctcatgggcggctttggacttaagcacccgcctcctcagatcctcatcaaaaacacgcctgttcctgcgaatcctccggcagagttttcggctacaaagtttgcttcattcatcacccagtattccacaggacaagtgagcgtggagattgaatgggagctgcagaaagaaaacagcaaacgctggaatcccgaagtgcagtatacatctaactatgcaaaatctgccaacgttgatttcactgtggacaacaatggactttatactgagcctcgccccattggcacccgttacctcacccgtcccctgtaa

SEQ ID NO: 5263 - protein, 736 aa, Artificial Sequence
  Description of Artificial Sequence: Synthetic polypeptide
MAADGYLPDWLEDNLSEGIREWWALKPGVPQPKANQQHQDNRRGLVLPGYKYLGPGNGLDKGEPVNAADAAALEHDKAYDQQLKAGDNPYLRYNHADAEFQERLQEDTSFGGNLGRAVFQAKKRVLEPFGLVEEGAKTAPGKKRPVEQSPQEPDSSSGIGKTGQQPAKKRLNFGQTGDSESVPDPQPLGEPPATPAAVGPTTMASGGGAPMADNNEGADGVGNASGNWHCDSTWLGDRVITTSTRTWALPTYNNHLYKQISSASTGASNDNHYFGYSTPWGYFDFNRFHCHFSPRDWQRLINNNWGFRPKRLNFKLFNIQVKEVTTNDGVTTIANNLTSTVQVFSDSEYQLPYVLGSAHQGCLPPFPADVFMIPQYGYLTLNNGSQAVGRSSFYCLEYFPSQMLRTGNNFTFSYTFEEVPFHSSYAHSQSLDRLMNPLIDQYLYYLNRTQNQSGSAQNKDLLFSRGSPAGMSVQPKNWLPGPCYRQQRVSKTKTDNNNSNFTWTGASKYNLNGRESIINPGTAMASHKDDEDKFFPMSGVMIFGKESAGASNTALDNVMITDEEEIKATNPVATERFGTVAVNFQSSSTDPATGDVHVMGALPGMVWQDRDVYLQGPIWAKIPHTDGHFHPSPLMGGFGLKHPPPQILIKNTPVPANPPAEFSATKFASFITQYSTGQVSVEIEWELQKENSKRWNPEVQYTSNYAKSANVDFTVDNNGLYTEPRPIGTRYLTRPL

SEQ ID NO: 5264 - DNA, 2217 bp, Artificial Sequence
  Description of Artificial Sequence: Synthetic polynucleotide
atggctgccgatggttatcttccagattggctcgaggacaacctctctgagggcattcgcgagtggtgggacttgaaacctggagccccgaaacccaaagccaaccagcaaaagcaggacgacggccggggtctggtgcttcctggctacaagtacctcggacccttcaacggactcgacaagggggagcccgtcaacgcggcggatgcaacggccctcgagcacgacaaggcctacgaccagcagctgcaggcgggtgacaatccgtacctgcggtataaccacgccgacgccgagtttcaggagcgtctgcaagaagatacgtcttttgggggcaacctcgggcgagcagtcttccaggccaagaagcgggttctcgaacctctcggtctggttgaggaaggcgctaagacggctcctggaaagaagagaccggtagagccatcaccccagcgttctccagactcctctacgggcatcggcaagaaaggccaacagcccgccagaaaaagactcaattttggtcagactggcgactcagagtcagttccagaccctcaacctctcggagaaccaccagcagcccccacaagtttgggatctaatacaatggcttcaggcggtggcgcaccaatggcagacaataacgagggtgccgatggagtgggtaattcctcaggaaattggcattgcgattcccaatggctgggcgacagagtcatcaccaccagcacccgcacctgggccttgcccacctacaataaccacctctacaagcaaatctccagtgcttcaacgggggccagcaacgacaaccactacttcggctacagcaccccctgggggtattttgactttaaccgcttccactgccacttctcgccaagagactggcaaagactcatcaacaacaattggggattccggcccaagagactcaacttcaaactcttcaacatccaagtcaaggaggtcacgacgaatgatggcgtcacgaccatcgccaataacctcaccagcaccatccaggtgtttacggactcggagtaccagctgccgtacgttctcggctctgcccaccagggctgcctgcctccgttcccggcggacgtgttcatgattccccagtatggatacctcaccctgaacaacggaagtcaagcggtgggacgctcatccttttactgcctggagtacttcccttcgcagatgctaaggactggaaataacttccaattcagctataccttcgaggatgtaccttttcacagcagctacgctcacagccagagtttggatcgcttgatgaatcctcttattgatcagtatctgtactacctgaacagaacgcaaggaacaacctctggaacaaccaaccaatcacggctgctttttagccaggctgggcctcagtctatgtctttgcaggccagaaattggctacctgggccctgctaccggcaacagagactttcaaagactgctaacgacaacaacaacagtaactttccttggacagcagccagcaaatatcatctcaatggccgcgactcgctggtgaatccaggaccagctatggccagtcacaaggacgatgaagaaaaatttttccctatgcacggcaatctaatatttggcaaagaagggacaacggcaagtaacgcagaattagataatgtaatgattacggatgaagaagagattcgtaccaccaatcctgtggcaacagagcagtatggaactgtggcaaataacttgcagagctcaaatacagctcccacgactagaactgtcaatgatcagggggccttacctggcatggtgtggcaagatcgtgacgtgtaccttcaggggcccatctgggcaaagattccacacacggacggacattttcacccctctcccctcatgggtggattcggacttaaacaccctcctccgcagattctcatcaagaacaccccggtacctgcgaatccttcgaccaccttcagtgcggcaaagtttgcttccttcatcacacagtactccacgggacaggtcagcgtggagatcgagtgggagctgcagaaggaaaacagcaagcgctggaacccggagatccagtacacttccaactattacaagtctaataatgttgaatttgctgttaatactgaaggtgtatatagtgaaccccgccccattggcaccagatacctgactcgtaatctgtaa

SEQ ID NO: 5265 - protein, 738 aa, Artificial Sequence
  Description of Artificial Sequence: Synthetic polypeptide
MAADGYLPDWLEDNLSEGIREWWDLKPGAPKPKANQQKQDDGRGLVLPGYKYLGPFNGLDKGEPVNAADATALEHDKAYDQQLQAGDNPYLRYNHADAEFQERLQEDTSFGGNLGRAVFQAKKRVLEPLGLVEEGAKTAPGKKRPVEPSPQRSPDSSTGIGKKGQQPARKRLNFGQTGDSESVPDPQPLGEPPAAPTSLGSNTMASGGGAPMADNNEGADGVGNSSGNWHCDSQWLGDRVITTSTRTWALPTYNNHLYKQISSASTGASNDNHYFGYSTPWGYFDFNRFHCHFSPRDWQRLINNNWGFRPKRLNFKLFNIQVKEVTTNDGVTTIANNLTSTIQVFTDSEYQLPYVLGSAHQGCLPPFPADVFMIPQYGYLTLNNGSQAVGRSSFYCLEYFPSQMLRTGNNFQFSYTFEDVPFHSSYAHSQSLDRLMNPLIDQYLYYLNRTQGTTSGTTNQSRLLFSQAGPQSMSLQARNWLPGPCYRQQRLSKTANDNNNSNFPWTAASKYHLNGRDSLVNPGPAMASHKDDEEKFFPMHGNLIFGKEGTTASNAELDNVMITDEEEIRTTNPVATEQYGTVANNLQSSNTAPTTRTVNDQGALPGMVWQDRDVYLQGPIWAKIPHTDGHFHPSPLMGGFGLKHPPPQILIKNTPVPANPSTTFSAAKFASFITQYSTGQVSVEIEWELQKENSKRWNPEIQYTSNYYKSNNVEFAVNTEGVYSEPRPIGTRYLTRNL

SEQ ID NO: 5266 - DNA, 2208 bp, Artificial Sequence
  Description of Artificial Sequence: Synthetic polynucleotide
atggctgccgatggttatcttccagattggctcgaggacaaccttagtgaaggaattcgcgagtggtgggacttgaaacctggagccccgaagcccaaagccaaccagcaaaagcaggacgacggccggggtctggtgcttcctggctacaagtacctcggacccttcaacggactcgacaagggggagcccgtcaacgcggcggacgcagcggccctcgagcacgacaaggcctacgaccagcagctcaaagcgggtgacaatccgtacctgcggtataaccacgccgacgccgagtttcaggagcgtctgcaagaagatacgtcttttgggggcaacctcgggcgagcagtcttccaggccaagaagcgggttctcgaacctctcggtctggttgaggaaggtgctaagacggctcctggaaagaaacgtccggtagagcagtcgccacaagagccagactcctcctcgggcattggcaagacaggccagcagcccgctaaaaagagactcaattttggtcagactggcgactcagagtcagtccccgacccacaacctctcggagaacctccagcaacccccgctgctgtgggacctactacaatggcttcaggcggtggcgcaccaatggcagacaataacgaaggcgccgacggagtgggtaatgcctcaggaaattggcattgcgattccacatggctgggcgacagagtcatcaccaccagcacccgaacctgggccctgcccacctacaacaaccacctctacaaacaaatttccagccaatcaggagcctcgaacgacaatcactactttggctacagcaccccttgggggtattttgatttcaacagattccactgccacttttcaccacgtgactggcagcgactcatcaacaacaattggggattccggcccaagagactcagcttcaagctcttcaacatccaggtcaaggaggtcacgcagaatgaaggcaccaagaccatcgccaataaccttaccagcacggttcaagtgtttacggactcggagtatcagctcccgtacgtgctcggctcggcgcatcaaggatgcctcccgccgttcccagcagacgtcttcatggtgccacagtatggatacctcaccctgaacaacgggagtcaggcagtaggacgctcttcattttactgcctggagtactttccttctcagatgctgcgtaccggaaacaactttaccttcagctacacttttgaggacgttcctttccacagcagctacgctcacagccagagtctggaccgtctcatgaatcctctgattgaccagtacctgtattacttgagcagaacaaacactccaagtggaaccaccacgcagtcaaggcttcagttttctcaggccggagcgagtgacattcgggaccagtctaggaactggcttcctggaccctgttaccgccagcagcgagtatcaaagacatctgcggataacaacaacagtgaatactcgtggactggagctaccaagtaccacctcaatggcagagactctctggtgaatccgggcccggccatggcaagccacaaggactatgaagaaaagttttttcctcagagcggggttctcatctttgggaagcaaggctcagagaaaacaaatgtggacattgaaaaggtcatgattacagacgaagaggaaatcaggacaaccaatcccgtggctacggagcagtatggttctgtatctaccaacctccagagaggcaacagacaagcagctaccgcagatgtcaacacacaaggcgttcttccaggcatggtctggcaggacagagatgtgtaccttcaggggcccatctgggcaaagattccacacacggacggacattttcacccgtctccgctgatgggcggctttggcctgaaacatcctccgcctcagatcctgatcaagaacacgcctgtacctgcggatcctccgaccaccttcaaccagtcaaagctgaactctttcatcactcagtattctactggccaagtcagcgtggagatcgagtgggagctgcagaaggaaaacagcaagcgctggaaccccgagatccagtacacctccaactactacaaatctacaagtgtggactttgctgttaatacagaaggcgtgtactctgaaccccgccccattggcacccgttacctcacccgtaatctgtaa

SEQ ID NO: 5267 - protein, 735 aa, Artificial Sequence
  Description of Artificial Sequence: Synthetic polypeptide
MAADGYLPDWLEDNLSEGIREWWDLKPGAPKPKANQQKQDDGRGLVLPGYKYLGPFNGLDKGEPVNAADAAALEHDKAYDQQLKAGDNPYLRYNHADAEFQERLQEDTSFGGNLGRAVFQAKKRVLEPLGLVEEGAKTAPGKKRPVEQSPQEPDSSSGIGKTGQQPAKKRLNFGQTGDSESVPDPQPLGEPPATPAAVGPTTMASGGGAPMADNNEGADGVGNASGNWHCDSTWLGDRVITTSTRTWALPTYNNHLYKQISSQSGASNDNHYFGYSTPWGYFDFNRFHCHFSPRDWQRLINNNWGFRPKRLSFKLFNIQVKEVTQNEGTKTIANNLTSTVQVFTDSEYQLPYVLGSAHQGCLPPFPADVFMVPQYGYLTLNNGSQAVGRSSFYCLEYFPSQMLRTGNNFTFSYTFEDVPFHSSYAHSQSLDRLMNPLIDQYLYYLSRTNTPSGTTTQSRLQFSQAGASDIRDQSRNWLPGPCYRQQRVSKTSADNNNSEYSWTGATKYHLNGRDSLVNPGPAMASHKDYEEKFFPQSGVLIFGKQGSEKTNVDIEKVMITDEEEIRTTNPVATEQYGSVSTNLQRGNRQAATADVNTQGVLPGMVWQDRDVYLQGPIWAKIPHTDGHFHPSPLMGGFGLKHPPPQILIKNTPVPADPPTTFNQSKLNSFITQYSTGQVSVEIEWELQKENSKRWNPEIQYTSNYYKSTSVDFAVNTEGVYSEPRPIGTRYLTRNL

SEQ ID NO: 5268 - DNA, 2214 bp, Artificial Sequence
  Description of Artificial Sequence: Synthetic polynucleotide
atggctgccgatggttatcttccagattggctcgaggacaacctctctgagggcattcgcgagtggtgggacttgaaacctggagccccgaaacccaaagccaaccagcaaaagcaggacgacggccggggtctggtgcttcctggctacaagtacctcggacccttcaacggactcgacaagggggagcccgtcaacgcggcggatgcagcggccctcgagcacgacaaggcctacgaccagcagctcaaagcgggtgacaatccgtacctgcggtataaccacgccgacgccgagtttcaggagcgtctgcaagaagatacgtcttttgggggcaacctcgggcgagcagtcttccaggccaagaagagggttctcgaaccttttggtctggttgaggaaggtgctaagacggctcctggaaagaaacgtccggtagagcagtcgccacaagagccagactcctcctcgggcattggcaagacaggccagcagcctgcaagaaaaagattgaattttggtcagactggagacgcagactcagtacctgacccccagcctctcggacagccaccagcagccccctctggtctgggaactaatacgatggctacaggcagtggcgcaccaatggcagacaataacgagggcgccgacggagtgggtaattcctcgggaaattggcattgcgattcccaatggctgggggacagagtcatcaccaccagcacccgaacctgggccctgcccacctacaacaatcacctctacaagcaaatctccaacagcacatctggaggatcttcaaatgacaacgcctacttcggctacagcaccccctgggggtattttgatttcaacagattccactgccatttctcaccacgtgactggcagcgactcatcaacaacaattggggattccggcccaagagactcaacttcaagctcttcaacatccaggtcaaggaggtcacgcagaatgaaggcaccaagaccatcgccaataacctcaccagcaccatccaggtgtttacggactcggagtaccagctgccgtacgttctcggctctgcccaccagggctgcctgcctccgttcccggcggacgtgttcatgattccccagtacggctacctaacactcaacaacggtagtcaggccgtgggacgctcctccttctactgcctggaatactttccttcgcagatgctgagaaccggcaacaacttccagtttacttacaccttcgaggacgtgcctttccacagcagctacgcccacagccagagcttggaccggctgatgaatcctctgattgaccagtacctgtactacttgtctcggactcaaacaacaggaggcacgacaaatacgcagactctgggcttcagccaaggtgggcctaatacaatggccaatcaggcaaagaactggctgccaggaccctgttaccgccagcagcgagtatcaaagacatttgcggataacaacaacagtgaatactcgtggactggagctaccaagtaccacctcaatggcagagactctctggtgaatccgggcccggccatggcaagccacaaggacgatgaagaaaagttttttcctcagagcggggttctcatctttgggaagcaaggctcagagaaaacaaatgtggacattgaaaaggtcatgattacagacgaagaggaaatcaggacaaccaatcccgtggctacggagcagtatggttctgtatctaccaacctccagagaggcaacagacaagcagctaccgcagatgtcaacacacaaggcgttcttccaggcatggtctggcaggacagagatgtgtaccttcaggggcccatctgggcaaagattccacacacggacggacattttcacccctctcccctcatgggtggattcggacttaaacaccctccgcctcagatcctgatcaagaacacgcctgtacccgcggatcctccgaccaccttcaaccagtcaaagctgaactctttcatcacccagtattctactggccaagtcagcgtggagatcgagtgggagctgcagaaggaaaacagcaagcgctggaaccccgagatccagtacacctccaactactacaaatctacaagtgtggactttgctgttaatacagaaggcgtgtactctgaaccccgccccattggcacccgttacctcacccgtaatctgtaa

SEQ ID NO: 5269 - protein, 737 aa, Artificial Sequence
  Description of Artificial Sequence: Synthetic polypeptide
MAADGYLPDWLEDNLSEGIREWWDLKPGAPKPKANQQKQDDGRGLVLPGYKYLGPFNGLDKGEPVNAADAAALEHDKAYDQQLKAGDNPYLRYNHADAEFQERLQEDTSFGGNLGRAVFQAKKRVLEPFGLVEEGAKTAPGKKRPVEQSPQEPDSSSGIGKTGQQPARKRLNFGQTGDADSVPDPQPLGQPPAAPSGLGTNTMATGSGAPMADNNEGADGVGNSSGNWHCDSQWLGDRVITTSTRTWALPTYNNHLYKQISNSTSGGSSNDNAYFGYSTPWGYFDFNRFHCHFSPRDWQRLINNNWGFRPKRLNFKLFNIQVKEVTQNEGTKTIANNLTSTIQVFTDSEYQLPYVLGSAHQGCLPPFPADVFMIPQYGYLTLNNGSQAVGRSSFYCLEYFPSQMLRTGNNFQFTYTFEDVPFHSSYAHSQSLDRLMNPLIDQYLYYLSRTQTTGGTTNTQTLGFSQGGPNTMANQAKNWLPGPCYRQQRVSKTFADNNNSEYSWTGATKYHLNGRDSLVNPGPAMASHKDDEEKFFPQSGVLIFGKQGSEKTNVDIEKVMITDEEEIRTTNPVATEQYGSVSTNLQRGNRQAATADVNTQGVLPGMVWQDRDVYLQGPIWAKIPHTDGHFHPSPLMGGFGLKHPPPQILIKNTPVPADPPTTFNQSKLNSFITQYSTGQVSVEIEWELQKENSKRWNPEIQYTSNYYKSTSVDFAVNTEGVYSEPRPIGTRYLTRNL

SEQ ID NO: 5270 - DNA, 2217 bp, Artificial Sequence
  Description of Artificial Sequence: Synthetic polynucleotide
atggctgccgatggttatcttccagattggctcgaggacactctctctgaaggaataagacagtggtgggcgctgaaacctggagccccgaagcccaaagccaaccagcaaaagcaggacgacggccggggtctggtgcttcctggctacaagtacctcggacccttcaacggactcgacaagggggagcccgtcaacgcggcggatgcagcggccctcgagcacgacaaggcctacgaccagcagctcaaagcgggtgacaatccgtacctgcggtataaccacgccgacgccgagtttcaggagcgtctgcaagaagatacgtcttttgggggcaacctcgggcgagcagtcttccaggccaagaagcgggttctcgaacctctcggtctggttgaggaaggcgctaagacggctcctggaaagaagagaccggtagagccatcaccccagcgttctccagactcctctacgggcatcggcaagaaaggccaacagcccgccagaaaaagactcaattttggtcagactggcgactcagagtcagttccagaccctcaacctctcggagaaccaccagcagcccccacaagtttgggatctaatacaatggcttcaggcggtggcgcaccaatggcagacaataacgagggtgccgatggagtgggtaattcctcaggaaattggcattgcgattcccaatggctgggcgacagagtcatcaccaccagcacccgcacctgggccttgcccacctacaataaccacctctacaagcaaatctccagtgcttcaacgggggccagcaacgacaaccactacttcggctacagcaccccctgggggtattttgactttaaccgcttccactgccacttctcgccaagagactggcaaagactcatcaacaacaattggggattccggcccaagagactcaacttcaaactcttcaacatccaagtcaaggaggtcacgacgaatgatggcgtcacgaccatcgccaataacctcaccagcaccatccaggtgtttacggactcggagtaccagctgccgtacgttctcggctctgcccaccagggctgcctgcctccgttcccggcggacgtgttcatgattccccagtatggatacctcaccctgaacaacggaagtcaagcggtgggacgctcatccttttactgcctggagtacttcccttcgcagatgctaaggactggaaataacttccaattcagctataccttcgaggatgtaccttttcacagcagctacgctcacagccagagtttggatcgcttgatgaatcctcttattgatcagtatctgtactacctgaacagaacgcaaggaacaacctctggaacaaccaaccaatcacggctgctttttagccaggctgggcctcagtctatgtctttgcaggccagaaattggctacctgggccctgctaccggcaacagagactttcaaagactgctaacgacaacaacaacagtaactttccttggacagcagccagcaaatatcatctcaatggccgcgactcgctggtgaatccaggaccagctatggccagtcacaaggacgatgaagaaaaatttttccctatgcacggcaatctaatatttggcaaagaagggacaacggcaagtaacgcagaattagataatgtaatgattacggatgaagaagagattcgtaccaccaatcctgtggcaacagagcagtatggaactgtggcaaataacttgcagagctcaaatacagctcccacgactagaactgtcaatgatcagggggccttacctggcatggtgtggcaagatcgtgacgtgtaccttcaggggcccatctgggcaaagattccacacacggacggacattttcacccctctcccctcatgggtggattcggacttaaacaccctcctccgcagattctcatcaagaacaccccggtacctgcgaatccttcgaccaccttcagtgcggcaaagtttgcttccttcatcacacagtactccacgggacaggtcagcgtggagatcgagtgggagctgcagaaggaaaacagcaagcgctggaacccggagatccagtacacttccaactattacaagtctaataatgttgaatttgctgttaatactgaaggtgtatatagtgaaccccgccccattggcaccagatacctgactcgtaatctgtaa

SEQ ID NO: 5271 - protein, 738 aa, Artificial Sequence
  Description of Artificial Sequence: Synthetic polypeptide
MAADGYLPDWLEDTLSEGIRQWWALKPGAPKPKANQQKQDDGRGLVLPGYKYLGPFNGLDKGEPVNAADAAALEHDKAYDQQLKAGDNPYLRYNHADAEFQERLQEDTSFGGNLGRAVFQAKKRVLEPLGLVEEGAKTAPGKKRPVEPSPQRSPDSSTGIGKKGQQPARKRLNFGQTGDSESVPDPQPLGEPPAAPTSLGSNTMASGGGAPMADNNEGADGVGNSSGNWHCDSQWLGDRVITTSTRTWALPTYNNHLYKQISSASTGASNDNHYFGYSTPWGYFDFNRFHCHFSPRDWQRLINNNWGFRPKRLNFKLFNIQVKEVTTNDGVTTIANNLTSTIQVFTDSEYQLPYVLGSAHQGCLPPFPADVFMIPQYGYLTLNNGSQAVGRSSFYCLEYFPSQMLRTGNNFQFSYTFEDVPFHSSYAHSQSLDRLMNPLIDQYLYYLNRTQGTTSGTTNQSRLLFSQAGPQSMSLQARNWLPGPCYRQQRLSKTANDNNNSNFPWTAASKYHLNGRDSLVNPGPAMASHKDDEEKFFPMHGNLIFGKEGTTASNAELDNVMITDEEEIRTTNPVATEQYGTVANNLQSSNTAPTTRTVNDQGALPGMVWQDRDVYLQGPIWAKIPHTDGHFHPSPLMGGFGLKHPPPQILIKNTPVPANPSTTFSAAKFASFITQYSTGQVSVEIEWELQKENSKRWNPEIQYTSNYYKSNNVEFAVNTEGVYSEPRPIGTRYLTRNL

SEQ ID NO: 5272 - DNA, 2208 bp, Artificial Sequence; identical to SEQ ID NO: 5102
  Description of Artificial Sequence: Synthetic polynucleotide

SEQ ID NO: 5273 - protein, 735 aa, Artificial Sequence [sequence omitted]

SEQ ID NO: 5274 - DNA, 2208 bp, Artificial Sequence
  Description of Artificial Sequence: Synthetic polynucleotide
atggctgccgatggttatcttccagattggctcgaggacaacctctctgagggcattcgcgagtggtgggcgctgaaacctggagccccgaagcccaaagccaaccagcaaaagcaggacgacggccggggtctggtgcttcctggctacaagtacctcggacccttcaacggactcgacaagggggagcccgtcaacgcggcggacgccgcggccctcgagcacgacaaggcctacgaccagcagctgcaggcgggtgacaatccgtacctgcggtataaccacgccgacgccgagtttcaggagcgtctgcaagaagatacgtcttttgggggcaacctcgggcgagcagtcttccaggccaaaaagaggcttcttgaacctcttggtctggttgaggaagcagctaaaacggctcctggaaagaagaggcctgtagagcagtctcctcaggaaccggactcctccgcgggtattggcaaatcgggtgcacagcccgccaaaaagagactcaatttcggtcagactggcgactcagagtcagtcccagaccctcaacctctcggagaaccaccagcagcccccacaagtttgggatctaatacaatggcttcaggcggtggcgcaccaatggcagacaataacgaaggcgccgacggagtgggtaatgcctcaggaaattggcattgcgattccacatggctgggcgacagagtcatcaccaccagcacccgcacctgggccttgcccacctacagcaaccatctctacaagcaaatctccagccaatcaggagcttcaaacgacaacgactactttggctacagcaccccttgggggtattttgatttcaacagattccactgccacttttcaccacgtgactggcaaagactcatcaacaacaactggggattccgacccaagagactcaacttcaagctctttaacattcaagtcaaagaggtcacgcagaatgacggtacgacgacgattgccaataaccttaccagcacggttcaggtgtttactgactcggagtaccagctcccgtacgtcctcggctcggcgcatcaaggatgcctcccgccgttcccagcagacgtcttcatggtgccacagtatggatacctcaccctgaacaacgggagtcaggcagtaggacgctcttcattttactgcctggagtactttccttctcagatgctgcgtaccggaaacaactttaccttcagctacacttttgaggacgttcctttccacagcagctacgctcacagccagagtctggaccgtctcatgaatcctctcatcgaccagtacctgtattacttgagcagaacaaacactccaagtggaaccaccacgcagtcaaggcttcagttttctcaggccggagcgagtgacattcgggaccagtctaggaactggcttcctggaccctgttaccgccagcagcgagtatcaaagacatctgaggataacaacaacagtgaatactcgtggactggagctaccaagtaccacctcaatggcagagactctctggtgaatccgggcccggccatggcaagccacaaggacgatgaagaaaagttttttcctcagagcggggttctcatctttgggaagcaaggctcagagaaaacaaatgtggacattgaaaaggtcatgattacagacgaagaggaaatcaggacaaccaatcccgtggctacggagcagtatggttctgtatctaccaacctccagagaggcaacagacaagcagctaccgcagatgtcaacacacaaggcgttcttccaggcatggtctggcaggacagagatgtgtaccttcaggggcccatctgggcaaagattccacacacggacggacattttcacccctctcccctcatgggtggattcggacttaaacaccctcctccacagattctcatcaagaacaccccggtacctgcgaatccttcgaccaccttcagtgcggcaaagtttgcttccttcatcacacagtactccacgggacaggtcagcgtggagatcgagtgggagctgcagaaggaaaacagcaaacgctggaatcccgaaattcagtacacttccaactacaacaagtctgttaatgtggactttactgtggacactaatggcgtgtattcagagcctcgccccattggcaccagatacctgactcgtaatctgtaa

SEQ ID NO: 5275 - protein, 735 aa, Artificial Sequence
  Description of Artificial Sequence: Synthetic polypeptide
MAADGYLPDWLEDNLSEGIREWWALKPGAPKPKANQQKQDDGRGLVLPGYKYLGPFNGLDKGEPVNAADAAALEHDKAYDQQLQAGDNPYLRYNHADAEFQERLQEDTSFGGNLGRAVFQAKKRLLEPLGLVEEAAKTAPGKKRPVEQSPQEPDSSAGIGKSGAQPAKKRLNFGQTGDSESVPDPQPLGEPPAAPTSLGSNTMASGGGAPMADNNEGADGVGNASGNWHCDSTWLGDRVITTSTRTWALPTYSNHLYKQISSQSGASNDNDYFGYSTPWGYFDFNRFHCHFSPRDWQRLINNNWGFRPKRLNFKLFNIQVKEVTQNDGTTTIANNLTSTVQVFTDSEYQLPYVLGSAHQGCLPPFPADVFMVPQYGYLTLNNGSQAVGRSSFYCLEYFPSQMLRTGNNFTFSYTFEDVPFHSSYAHSQSLDRLMNPLIDQYLYYLSRTNTPSGTTTQSRLQFSQAGASDIRDQSRNWLPGPCYRQQRVSKTSEDNNNSEYSWTGATKYHLNGRDSLVNPGPAMASHKDDEEKFFPQSGVLIFGKQGSEKTNVDIEKVMITDEEEIRTTNPVATEQYGSVSTNLQRGNRQAATADVNTQGVLPGMVWQDRDVYLQGPIWAKIPHTDGHFHPSPLMGGFGLKHPPPQILIKNTPVPANPSTTFSAAKFASFITQYSTGQVSVEIEWELQKENSKRWNPEIQYTSNYNKSVNVDFTVDTNGVYSEPRPIGTRYLTRNL

SEQ ID NO: 5276 - DNA, 2208 bp, Artificial Sequence
  Description of Artificial Sequence: Synthetic polynucleotide
atggctgccgatggttatcttccagattggctcgaggacaacctctctgagggcattcgcgagtggtgggcgctgaaacctggagccccgaagcccaaagccaaccagcaaaagcaggacgacggccggggtctggtgcttcctggctacaagtacctcggacccttcaacggactcgacaagggggagcccgtcaacgcggcggacgcagcggccctcgagcacgacaaggcctacgaccagcagctgcaggcgggtgacaatccgtacctgcggtataaccacgccgacgccgagttccaggagcgtctgcaagaagatacgtcttttgggggcaacctcgggcgagcagtcttccaggccaagaagagggttctcgaaccttttggtctggttgaggaaggtgctaagacggctcctggaaagaaacgtccggtagagcagtcgccacaagagccagactcctcctcgggcattggcaagacaggccagcagcccgctaaaaagagactcaattttggtcagactggcgactcagagtcagtcccagaccctcaacctctcggagaaccaccagcagcccccacaagtttgggatctaatacaatggcttcaggcggtggcgcaccaatggcagacaataacgagggcgccgacggagtgggtaattcctcgggaaattggcattgcgattccacatggatgggcgacagagtcatcaccaccagcacccgaacctgggccctgcccacctacaacaaccacctctacaaacaaatttccagccaatcaggagcttcaaacgacaaccactactttggctacagcaccccttgggggtattttgactttaacagattccactgccacttttcaccacgtgactggcagcgactcattaacaacaactggggattccggcccaagaaactcaacttcaagctctttaacatccaggtcaaggaggtcacgcagaatgaaggcaccaagaccatcgccaataacctcaccagcaccatccaggtgtttacggactcggagtaccagctgccgtacgttctcggctctgcccaccagggctgcctgcctccgttcccggcggacgtgttcatgattccccagtacggctacctaacactcaacaacggtagtcaggccgtgggacgctcctccttctactgcctggaatactttccttcgcagatgctgagaaccggcaacaacttccagtttacttacaccttcgaggacgtgcctttccacagcagctacgcccacagccagagcttggaccggctgatgaatcctctgattgaccagtacctgtattacttgtctcggactcaaacaacaggaggcacgacaaatacgcagactctgggcttcagccaaggtgggcctaatacaatggccaatcaggcaaagaactggctgcctggaccctgttaccgccagcagcgagtatcaaagacatctgcggataacaacaacagtgaatactcgtggactggagctaccaagtaccacctcaatggcagagactctctggtgaatccgggcccggccatggcaagccacaaggacgatgaagaaaagttttttcctcagagcggggttctcatctttgggaagcaaggctcagagaaaacaaatgtggacattgaaaaggttatgattacagacgaagaggaaatcaggacaaccaatcccgtggctacggagcagtatggttctgtatctaccaacctccagagaggcaacagacaagcagctaccgcagatgtcaacacacagggcgttcttccaggcatggtctggcaggacagagatgtgtaccttcagggtcccatttgggccaaaattcctcacacagatggacactttcacccgtcccctcttatgggcggctttggactcaagaacccgcctcctcagatcctcatcaaaaacacgcctgttcctgcgaatcctccggcagagttttcagctacaaagtttgcttcattcatcacccaatactccacaggacaagtgagtgtggaaattgaatgggagctgcagaaagaaaacagcaagcgctggaatcccgaagtgcagtacacatccaattatgcaaaatctgccaacgttgattttactgtggacactaatggcgtgtattcagagcctcgccccattggcaccagatacctcacccgtaatctgtaa

SEQ ID NO: 5277 - protein, 735 aa, Artificial Sequence
  Description of Artificial Sequence: Synthetic polypeptide
MAADGYLPDWLEDNLSEGIREWWALKPGAPKPKANQQKQDDGRGLVLPGYKYLGPFNGLDKGEPVNAADAAALEHDKAYDQQLQAGDNPYLRYNHADAEFQERLQEDTSFGGNLGRAVFQAKKRVLEPFGLVEEGAKTAPGKKRPVEQSPQEPDSSSGIGKTGQQPAKKRLNFGQTGDSESVPDPQPLGEPPAAPTSLGSNTMASGGGAPMADNNEGADGVGNSSGNWHCDSTWMGDRVITTSTRTWALPTYNNHLYKQISSQSGASNDNHYFGYSTPWGYFDFNRFHCHFSPRDWQRLINNNWGFRPKKLNFKLFNIQVKEVTQNEGTKTIANNLTSTIQVFTDSEYQLPYVLGSAHQGCLPPFPADVFMIPQYGYLTLNNGSQAVGRSSFYCLEYFPSQMLRTGNNFQFTYTFEDVPFHSSYAHSQSLDRLMNPLIDQYLYYLSRTQTTGGTTNTQTLGFSQGGPNTMANQAKNWLPGPCYRQQRVSKTSADNNNSEYSWTGATKYHLNGRDSLVNPGPAMASHKDDEEKFFPQSGVLIFGKQGSEKTNVDIEKVMITDEEEIRTTNPVATEQYGSVSTNLQRGNRQAATADVNTQGVLPGMVWQDRDVYLQGPIWAKIPHTDGHFHPSPLMGGFGLKNPPPQILIKNTPVPANPPAEFSATKFASFITQYSTGQVSVEIEWELQKENSKRWNPEVQYTSNYAKSANVDFTVDTNGVYSEPRPIGTRYLTRNL

SEQ ID NO: 5278 - DNA, 2214 bp, Artificial Sequence; identical to SEQ ID NO: 5268
  Description of Artificial Sequence: Synthetic polynucleotide

SEQ ID NO: 5279 - protein, 737 aa, Artificial Sequence; identical to SEQ ID NO: 5269
  Description of Artificial Sequence: Synthetic polypeptide

SEQ ID NO: 5280 - protein, 736 aa, Artificial Sequence; identical to SEQ ID NO: 5093
  Description of Artificial Sequence: Synthetic polypeptide

SEQ ID NO: 5281 - protein, 736 aa, Artificial Sequence
  Description of Artificial Sequence: Synthetic polypeptide
MAADGYLPDWLEDNLSEGIREWWDLKPGAPKPKANQQKQDDGRGLVLPGYKYLGPFNGLDKGEPVNAADAAALEHDKAYDQQLKAGDNPYLRYNHADAEFQERLQEDTSFGGNLGRAVFQAKKRVLEPLGLVEEGAKTAPGKKRPVEQSPQEPDSSSGIGKTGQQPAKKRLNFGQTGDSESVPDPQPLGEPPAAPSGLGPNTMASGGGAPMADNNEGADGVGNSSGNWHCDSTWLGDRVITTSTRTWALPTYNNHLYKQISNGTSGGSTNDNTYFGYSTPWGYFDFNRFHCHFSPRDWQRLINNNWGFRPKRLNFKLFNIQVKEVTTNEGTKTIANNLTSTVQVFTDSEYQLPYVLGSAHQGCLPPFPADVFMVPQYGYLTLNNGSQALGRSSFYCLEYFPSQMLRTGNNFQFSYTFEDVPFHSSYAHSQSLDRLMNPLIDQYLYYLVRTQTTGTGGTQTLAFSQAGPSSMANQARNWVPGPCYRQQRVSTTTNQNNNSNFAWTGAAKFKLNGRDSLMNPGVAMASHKDDEDRFFPSSGVLIFGKQGAGNDGVDYSQVLITDEEEIKATNPVATEEYGAVAINNQRANTQAQTGLVHNQGVIPGMVWQNRDVYLQGPIWAKIPHTDGNFHPSPLMGGFGLKHPPPQILIKNTPVPADPPLTFNQAKLNSFITQYSTGQVSVEIEWELQKENSKRWNPEIQYTSNYYKSTNVDFAVNTEGVYSEPRPIGTRYLTRNL

SEQ ID NO: 5282 - protein, 736 aa, Artificial Sequence
  Description of Artificial Sequence: Synthetic polypeptide
MAADGYLPDWLEDNLSEGIREWWDLKPGAPKPKANQQKQDDGRGLVLPGYKYLGPFNGLDKGEPVNAADAAALEHDKAYDQQLKAGDNPYLRYNHADAEFQERLQEDTSFGGNLGRAVFQAKKRVLEPLGLVEEGAKTAPGKKRPVEQSPQEPDSSSGIGKTGQQPAKKRLNFGQTGDSESVPDPQPLGEPPAAPSGLGPNTMASGGGAPMADNNEGADGVGNSSGNWHCDSTWLGDRVITTSTRTWALPTYNNHLYKQISNGTSGGSTNDNTYFGYSTPWGYFDFNRFHCHFSPRDWQRLINNNWGFRPKRLNFKLFNIQVKEVTTNEGTKTIANNLTSTVQVFTDSEYQLPYVLGSAHQGCLPPFPADVFMVPQYGYLTLNNGSQALGRSSFYCLEYFPSQMLRTGNNFQFSYTFEDVPFHSSYAHSQSLDRLMNPLIDQYLYYLVRTQTTGTGGTQTLAFSQAGPSSMANQARNWVPGPCYRQQRVSTTTNQNNNSNFAWTGAAKFKLNGRDSLMNPGVAMASHKDDEDAFFPSSGVLIFGKQGAGNDGVDYSQVLITDEEEIKATNPVATEEYGAVAINNQAANTQAQTGLVHNQGVIPGMVWQNRDVYLQGPIWAKIPHTDGNFHPSPLMGGFGLKHPPPQILIKNTPVPADPPLTFNQAKLNSFITQYSTGQVSVEIEWELQKENSKRWNPEIQYTSNYYKSTNVDFAVNTEGVYSEPRPIGTRYLTRNL

SEQ ID NO: 5283 - protein, 538 aa, Artificial Sequence
  Description of Artificial Sequence: Synthetic polypeptide
MRAAAGGNGGDAGQGAEGVGNASGDWHCDSTWSESHVTTTSTRTWVLPTYNNHLYLRLGSSNASDTFNGFSTPWGYFDFNRFHCHFSPRDWQRLINNHWGLRPKSMQVRIFNIQVKEVTTSNGETTVSNNLTSTVQIFADSTYELPYVMDAGQEGSLPPFPNDVFMVPQYGYCGLVTGGSSQNQTDRNAFYCLEYFPSQMLRTGNNFEMVYKFENVPFHSMYAHSQSLDRLMNPLLDQYLWELQSTTSGGTLNQGNSATNFAKLTKTNFSGYRKNWLPGPMMKQQRFSKTASQNYKIPQGRNNSLLHYETRTTLDGRWSNFAPGTAMATAANDATDFSQAQLIFAGPNITGNTTTDANNLMFTSEDELRATNPRDTDLFGHLATNQQNATTVPTVDDVDGVGVYPGMVWQDRDIYYQGPIWAKIPHTDGHFHPSPLIGGFGLKSPPPQIFIKNTPVPANPATTFSPARINSFITQYSTGQVAVKIEWEIQKERSKRWNPEVQFTSNYGAQDSLLWAPDNAGAYKEPRAIGSRYLTNHL

SEQ ID NO: 5284 - protein, 736 aa, Artificial Sequence
  Description of Artificial Sequence: Synthetic polypeptide
MSFVDHPPDWLESIGDGFREFLGLEAGPPKPKANQQKQDNARGLVLPGYKYLGPGNGLDKGDPVNFADEVAREHDLSYQKQLEAGDNPYLKYNHADAEFQEKLASDTSFGGNLGKAVFQAKKRILEPLGLVETPDKTAPAAKKRPLEQSPQEPDSSSGVGKKGKQPARKRLNFDDEPGAGDGPPPEGPSSGAMSTETEMRAAAGGNGGDAGQGAEGVGNASGDWHCDSTWSESHVTTTSTRTWVLPTYNNHLYLRLGSSNASDTFNGFSTPWGYFDFNRFHCHFSPRDWQRLINNHWGLRPKSMQVRIFNIQVKEVTTSNGETTVSNNLTSTVHIFADSTYELPYVMDAGQEGSLPPFPNDVFMVPQYGYCGLVTGGSSQNQTDRNAFYCLEYFPSQMLRTGNNFEMVYKFENVPFHSMYAHSQSLDRLMNPLLDQYLWELQSTTSGGTLNQGNSATNFAKLTNKNFSGYRKNWLPGPMMKQQRFSKTASQNYKIPQGGNNSLLHYETRTTLDRRWSNFAPGTAMATAANDATDFSQAQLIFAGPNITGNTTTDANNLMFTSEDELRATNPRDTDLFGHLATNQQNATTVPTVDDVDGVGVYPGMVWQDRDIYYQGPIWAKIPHTDGHFHPSPLIGGFGLKSPPPQIFIKNTPVPANPATTFSPARINSFITQYSTGQVAVKIEWEIQKERSKRWNPEVQFTSNYGAQDSLLWAPDNAGAYKEPRAIGSRYLTNHL

SEQ ID NO: 5285 - protein, 736 aa, Artificial Sequence
  Description of Artificial Sequence: Synthetic polypeptide
MSFVDHPPDWLESIGDGFREFLGLEAGPPKPKANQQKQDNARGLVLPGYKYLGPGNGLDKGDPVNFADEVAREHDLSYQKQLEAGDNPYLKYNHADAEFQEKLASDTSFGGNLGKAVFQAKKRILEPLGLVETPDKTAPAAKKRPLEQSPQEPDSSSGVGKKGKQPARKRLNFDDEPGAGDGPPPEGPSSGAMSTETEMRAAAGGNGGDAGQGAEGVGNASGDWHCDSTWSESHVTTTSTRTWVLPTYNNHLYLRLGSSNASDTFNGFSTPWGYFDFNRFHCHFSPRDWQRLINNHWGLRPKSMQVRIFNIQVKEVTTSNGETTVSNNLTSTVQIFADSTYELPYVMDAGQEGSLPPFPNDVFMVPQYGYCGLVTGGSSQNQTDRNAFYCLEYFPSQMLRTGNNFEMVYKFENVPFHSMYAHSQSLDRLMNPLLDQYLWELQSTTSGGTLNQGNSATNFAKLTKTNFSGYRKNWLPGPMMKQQRFSKTASQNYKIPQGRNNSLLHYETRTTLDGRWSNFAPGTAMATAANDATDFSQAQLIFAGPNITGNTTTDANNLMFTSEDELRATNPRDTDLFGHLATNQQNATTVPTVDDVDGVGVYPGMVWQDRDIYYQGPIWAKIPHTDGHFHPSPLIGGFGLKSPPPQIFIKNTPVPANPATTFSPARINSFITQYSTGQVAVKIEWEIQKERSKRWNPEVQFTSNYGAQDSLLWAPDNAGAYKEPRAIGSRYLTNHL

SEQ ID NO: 5286 - DNA, 2214 bp, Artificial Sequence
  Description of Artificial Sequence: Synthetic polynucleotide
atggctgccgatggttatcttccagattggctcgaggacactctctctgaaggaataagacagtggtggaagctcaaacctggcccaccaccaccaaagcccgcagagcggcataaggacgacagcaggggtcttgtgcttcctgggtacaagtacctcggacccttcaacggactcgacaagggagagccggtcaacgaggcagacgccgcggccctcgagcacgacaaagcctacgaccggcagctcgacagcggagacaacccgtacctcaagtacaaccacgccgacgcggagtttcaggagcgccttaaagaagatacgtcttttgggggcaacctcgggcgagcagtcttccaggccaaaaagaggcttcttgaacctcttggtctggttgaggaagcggctaagacggctcctggaaagaagaggcctgtagagcagtctcctcaggaaccggactcctcctcgggcatcggcaagacaggccagcagcccgctaaaaagagactcaatttcggtcagactggcgacacagagtcagtcccagaccctcaaccaatcggagaacctcccgcagccccctcaggtgtgggatctcttacaatggcttcaggtggtggcgcaccagtggcagacaataacgaaggtgccgatggagtgggtagttcctcgggaaattggcattgcgattcccaatggctgggggacagagtcatcaccaccagcacccgaacctgggccctgcccacctacaacaatcacctctacaagcaaatctccaacgggacatcgggaggagccaccaacgacaacacctacttcggctacagcaccccctgggggtattttgactttaacagattccactgccacttttcaccacgtgactggcagcgactcatcaacaacaactggggattccggcccaagagactcagcttcaagctcttcaacatccaggtcaaggaggtcacgcagaatgaaggcaccaagaccatcgccaataaccttaccagcacggtccaggtcttcacggactcggagtaccagctgccgtacgttctcggctctgcccaccagggctgcctgcctccgttcccggcggacgtgttcatgattccccagtacggctacctaacactcaacaacggtagtcaggccgtgggacgctcctccttctactgcctggaatactttccttcgcagatgctgagaaccggcaacaacttccagtttacttacaccttcgaggacgtgcctttccacagcagctacgcccacagccagagcttggaccggctgatgaatcctctgattgaccagtacctgtactacttgtctcggactcaaacaacaggaggcacggcaaatacgcagactctgggcttcagccaaggtgggcctaatacaatggccaatcaggcaaagaactggctgccaggaccctgttaccgccaacaacgcgtctcaacgacaaccgggcaaaacaacaatagcaactttgcctggactgctgggaccaaataccatctgaatggaagaaattcattggctaatcctggcatcgctatggcaacacacaaagacgacaaggagcgtttttttcccagtaacgggatcctgatttttggcaaacaaaatgctgccagagacaatgcggattacagcgatgtcatgctcaccagcgaggaagaaatcaaaaccactaaccctgtggctacagaggaatacggtatcgtggcagataacttgcagcagcaaaacacggctcctcaaattggaactgtcaacagccagggggccttacccggtatggtttggcagaaccgggacgtgtacctgcagggtcccatctgggccaagattcctcacacggacggcaacttccacccgtctccgctgatgggcggctttggcctgaaacatcctccgcctcagatcctgatcaagaacacgcctgtacctgcggatcctccgaccaccttcaaccagtcaaagctgaactctttcatcacgcaatacagcaccggacaggtcagcgtggaaattgaatgggagctgcagaaggaaaacagcaagcgctggaaccccgagatccagtacacctccaactactacaaatctacaagtgtggactttgctgttaatacagaaggcgtgtactctgaaccccaccccattggcacccgttacctcacccgtcccctgtaa

SEQ ID NO: 5287 - protein, 737 aa, Artificial Sequence
  Description of Artificial Sequence: Synthetic polypeptide
MAADGYLPDWLEDTLSEGIRQWWKLKPGPPPPKPAERHKDDSRGLVLPGYKYLGPFNGLDKGEPVNEADAAALEHDKAYDRQLDSGDNPYLKYNHADAEFQERLKEDTSFGGNLGRAVFQAKKRLLEPLGLVEEAAKTAPGKKRPVEQSPQEPDSSSGIGKTGQQPAKKRLNFGQTGDTESVPDPQPIGEPPAAPSGVGSLTMASGGGAPVADNNEGADGVGSSSGNWHCDSQWLGDRVITTSTRTWALPTYNNHLYKQISNGTSGGATNDNTYFGYSTPWGYFDFNRFHCHFSPRDWQRLINNNWGFRPKRLSFKLFNIQVKEVTQNEGTKTIANNLTSTVQVFTDSEYQLPYVLGSAHQGCLPPFPADVFMIPQYGYLTLNNGSQAVGRSSFYCLEYFPSQMLRTGNNFQFTYTFEDVPFHSSYAHSQSLDRLMNPLIDQYLYYLSRTQTTGGTANTQTLGFSQGGPNTMANQAKNWLPGPCYRQQRVSTTTGQNNNSNFAWTAGTKYHLNGRNSLANPGIAMATHKDDKERFFPSNGILIFGKQNAARDNADYSDVMLTSEEEIKTTNPVATEEYGIVADNLQQQNTAPQIGTVNSQGALPGMVWQNRDVYLQGPIWAKIPHTDGNFHPSPLMGGFGLKHPPPQILIKNTPVPADPPTTFNQSKLNSFITQYSTGQVSVEIEWELQKENSKRWNPEIQYTSNYYKSTSVDFAVNTEGVYSEPHPIGTRYLTRPL

SEQ ID NO: 5288 - protein, 736 aa, Artificial Sequence
  Description of Artificial Sequence: Synthetic polypeptide
MAADGYLPDWLEDNLSEGIREWWDLKPGAPKPKANQQKQDDGRGLVLPGYKYLGPFNGLDKGEPVNAADAAALEHDKAYDQQLKAGDNPYLRYNHADAEFQERLQEDTSFGGNLGRAVFQAKKRVLEPLGLVEEGAKTAPGKKRPVEQSPQEPDSSSGIGKTGQQPAKKRLNFGQTGDTESVPDPQPIGEPPAAPSGVGSLTMASGGGAPVADNNEGADGVGSSSGNWHCDSQWLGDRVITTSTRTWALPTYNNHLYKQISSASTGASNDNHYFGYSTPWGYFDFNRFHCHFSPRDWQRLINNNWGFRPKRLNFKLFNIQVKEVTDNNGVKTIANNLTSTVQVFTDSDYQLPYVLGSAHQGCLPPFPADVFMIPQYGYLTLNNGSQAVGRSSFYCLEYFPSQMLRTGNNFQFTYTFEDVPFHSSYAHSQSLDRLMNPLIDQYLYYLSRTQTTGGTANTQTLGFSQGGPNTMANQAKNWLPGPCYRQQRVSTTTGQNNNSNFAWTAGTKYHLNGRNSLANPGIAMATHKDDKERFFPSNGILIFGKQNAARDNADYSDVMLTSEEEIKTTNPVATEEYGIVADNLQQQNTAPQIGTVNSQGALPGMVWQNRDVYLQGPIWAKIPHTDGNFHPSPLMGGFGLKHPPPQILIKNTPVPADPPTTFNQSKLNSFITQYSTGQVSVEIEWELQKENSKRWNPEIQYTSNYYKSTSVDFAVNTEGVYSEPHPIGTRYLTRPL

SEQ ID NO: 5289 - protein, 736 aa, Artificial Sequence
  Description of Artificial Sequence: Synthetic polypeptide
MAADGYLPDWLEDTLSEGIRQWWKLKPGPPPPKPAERHKDDSRGLVLPGYKYLGPFNGLDKGEPVNEADAAALEHDKAYDRQLDSGDNPYLKYNHADAEFQERLQGDTSFGGNLGRAVFQAKKRVLEPLGLVEEGAKTAPGKKRPVEQSPQEPDSSSGIGETGQQPAKKRLNFGQTGDSESVPDPQPLGEPPATPAAVGPTTMASGGGAPMADNNEGADGVGSSSGNWHCDSQWLGDRVITTSTRTWALPTYNNHLYKQISSASTGASNDNHYFGYSTPWGYFDFNRFHCHFSPRDWQRLINNNWGFRPKRLSFKLFNIQVKEVTDNNGVKTIANNLTSTVQVFTDSEYQLPYVLGSAHQGCLPPFPADVFMIPQYGYLTLNNGSQAVGRSSFYCLEYFPSQMLRTGNNFTFSYTFEDVPFHSSYAHSQSLDRLMNPLIDQYLYYLSRTQTTGGTANTQTLGFSQGGPNTMANQAKNWLPGPCYRQQRVSTTTGQNNNSNFAWTAGTKYHLNGRNSLANPGIAMATHKDDKERFFPSNGILIFGKQNAARDNADYSDVMLTSEEEIKTTNPVATEEYGIVADNLQQQNTAPQIGTVNSQGALPGMVWQNRDVYLQGPIWAKIPHTDGNFHPSPLMGGFGLKHPPPQILIKNTPVPADPPTTFNQSKLNSFITQYSTGQVSVEIEWELQKENSKRWNPEIQYTSNYYKSTSVDFAVNTEGVYSEPHPIGTRYLTRPL

SEQ ID NO: 5290 - DNA, 2181 bp, Artificial Sequence
  Description of Artificial Sequence: Synthetic polynucleotide
atgtcttttgttgatcaccctccagattggttggaagaagttggtgaaggtcttcgcgagtttttgggccttgaagcgggcccaccgaaaccaaaacccaatcagcagcatcaagatcaagcccgtggtcttgtgctgcctggttataactatctcggacccggaaacggtctcgatcgaggagagcctgtcaacagggcagacgaggtcgcgcgagagcacgacatctcgtacaacgagcagcttgaggcgggagacaacccctacctcaagtacaaccacgcggacgccgagtttcaggagaagctcgccgacgacacatccttcgggggaaacctcggaaaggcagtctttcaggccaagaaaagggttctcgaaccttttggcctggttgaagagggtgctaagacggcccctaccggaaagcggatagacgaccactttccaaaaagaaagaaggctcggaccgaagaggactccaagccttccacctcgtcagacgccgaagctggacccagcggatcccagcagctgcaaatcccagcacaaccagcctcaagtttgggagctgatacaatgtctgcgggaggtggcggcccattgggcgacaataaccaaggtgccgatggagtgggcaatgcctcgggagattggcattgcgattccacgtggatgggggacagagtcgtcaccaagtccacccgcacctgggtgctgcccagctacaacaaccaccagtaccgagagatcaaaagcggctccgtcgacggaagcaacgccaacgcctactttggatacagcaccccctgggggtactttgactttaaccgcttccacagccactggagcccccgagactggcaaagactcatcaacaactattggggcttcagaccccggtctctcagagtcaaaatcttcaacatccaagtcaaagaggtcacggtgcaggactccaccaccaccatcgccaacaacctcacctccaccgtccaagtgtttacggacgacgactaccaactcccgtacgtcgtcggcaacgggaccgagggatgcctgccggccttccccccgcaggtctttacgctgccgcagtacggctacgcgacgctgaaccgagacaacggagacaacccgacagagcggagcagcttcttttgcctagagtactttcccagcaagatgctgaggacgggcaacaactttgagtttacctacagctttgaagaggtgcccttccactgcagcttcgccccgagccagaacctctttaagctggccaacccgctggtggaccagtacctgtaccgcttcgtgagcacctcggccacgggcgccatccagttccaaaagaacctggcgggcagatacgccaacacctacaaaaactggttcccggggcccatgggccgaacccagggctggaacacgagctctggggtcagcagcaccaacagagtcagcgtcaacaacttttccgtctcaaaccggatgaacctggagggggccagctaccaagtgaacccccagcccaacgggatgacaaacacgctccaaggcagcaaccgctacgcgctggaaaacaccatgatcttcaacgctcaaaacgccacgccgggaactacctcggtgtacccagaggacaatctactgctgaccagcgagagcgagactcagcccgtcaaccgggtggcttacaacacgggcggtcagatggccaccaacgcccagaacgccaccacggctcccacggtcgggacctacaacctccaggaagtgcttcctggcagcgtatggatggagagggacgtgtacctccaaggacccatctgggccaagatcccagagacgggggcgcactttcacccctctccggccatgggcggattcggactcaaacacccgccgcccatgatgctcatcaaaaacacgccggtgcccggcaacatcaccagcttctcggacgtgcccgtcagcagcttcatcacccagtacagcaccgggcaggtcaccgtggagatggaatgggagctcaaaaaggaaaactccaagaggtggaacccagagatccagtacaccaacaactacaacgacccccagtttgtggactttgctccagacggctccggcgaatacagaaccaccagagccatcggaacccgatacctcacccgacccctt

SEQ ID NO: 5291 - protein, 726 aa, Artificial Sequence
  Description of Artificial Sequence: Synthetic polypeptide
MSFVDHPPDWLEEVGEGLREFLGLEAGPPKPKPNQQHQDQARGLVLPGYNYLGPGNGLDRGEPVNRADEVAREHDISYNEQLEAGDNPYLKYNHADAEFQEKLADDTSFGGNLGKAVFQAKKRVLEPFGLVEEGAKTAPTGKRIDDHFPKRKKARTEEDSKPSTSSDAEAGPSGSQQLQIPAQPASSLGADTMSAGGGGPLGDNNQGADGVGNASGDWHCDSTWMGDRVVTKSTRTWVLPSYNNHQYREIKSGSVDGSNANAYFGYSTPWGYFDFNRFHSHWSPRDWQRLINNYWGFRPRSLRVKIFNIQVKEVTVQDSTTTIANNLTSTVQVFTDDDYQLPYVVGNGTEGCLPAFPPQVFTLPQYGYATLNRDNGDNPTERSSFFCLEYFPSKMLRTGNNFEFTYSFEEVPFHCSFAPSQNLFKLANPLVDQYLYRFVSTSATGAIQFQKNLAGRYANTYKNWFPGPMGRTQGWNTSSGSSTNRVSVNNFSVSNRMNLEGASYQVNPQPNGMTNTLQGSNRYALENTMIFNAQNATPGTTSVYPEDNLLLTSESETQPVNRVAYNTGGQMATNAQNATTAPTVGTYNLQEVLPGSVWMERDVYLQGPIWAKIPETGAHFHPSPAMGGFGLKHPPPMMLIKNTPVPGNITSFSDVPVSSFITQYSTGQVTVEMEWELKKENSKRWNPEIQYTNNYNDPQFVDFAPDGSGEYRTTRAIGTRYLTRPL

SEQ ID NO: 5292 - protein, 735 aa, Artificial Sequence
  Description of Artificial Sequence: Synthetic polypeptide
MAADGYLPDWLEDTLSEGIRQWWKLKPGPPPPKPAERHKDDSRGLVLPGYKYLGPFNGLDKGEPVNEADAAALEHDKAYDRQLDSGDNPYLKYNHADAEFQERLKEDTSFGGNLGRAVFQAKKRILEPLGLVEEPVKTAPGKKRPVEHSPAEPDSSSGTGKSGQQPARKRLNFGQTGDADSVPDPQPLGQPPAAPSGLGTNTMASGSGAPMADNNEGADGVGNSSGNWHCDSTWMGDRVITTSTRTWALPTYNNHLYKQISSQSGASNDNHYFGYSTPWGYFDFNRFHCHFSPRDWQRLINNNWGFRPKRLSFKLFNIQVKEVTQNDGTTTIANNLTSTVQVFTDSEYQLPYVLGSAHQGCLPPFPADVFMVPQYGYLTLNNGSQAVGRSSFYCLEYFPSQMLRTGNNFTFSYTFEDVPFHSSYAHSQSLDRLMNPLIDQYLYYLSRTNTPSGTTTMSRLQFSQAGASDIRDQSRNWLPGPCYRQQRVSKTAADNNNSDYSWTGATKYHLNGRDSLVNPGPAMASHKDDEEKYFPQSGVLIFGKQDSGKTNVDIEKVMITDEEEIRTTNPVATEQYGSVSTNLQSGNTQAATSDVNTQGVLPGMVWQDRDVYLQGPIWAKIPHTDGHFHPSPLMGGFGLKHPPPQILIKNTPVPANPSTTFSAAKFASFITQYSTGQVSVEIEWELQKENSKRWNPEIQYTSNYNKSVNVDFTVDTNGVYSEPRPIGTRYLTRNL

SEQ ID NO: 5293 - DNA, 1803 bp, Bovine adeno-associated virus
acggcgcctgcggcaaaaaagaggcctctagagcagagtcctcaagagccagactcctcgagcggagttggcaagaaaggcaaacagcctgccagaaagagactcaactttgacgacgaacctggagccggagacgggcctcccccagaaggaccatcttccggagctatgtctactgagactgaaatgcgtgcagcagctggcggaaatggtggcgatgcgggacaaggtgccgagggagtgggtaatgcctccggtgattggcattgcgattccacttggtcagagagccacgtcaccaccacctcaacccgcacctgggtcctgccgacctacaacaaccacctgtacctgcggctcggctcgagcaacgccagcgacaccttcaacggattctccaccccctggggatactttgactttaaccgcttccactgccacttctcgccaagagactggcaaaggctcatcaacaaccactggggactgcgccccaaaagcatgcaagtccgcatcttcaacatccaagttaaggaggtcacgacgtctaacggggagacgaccgtatccaacaacctcaccagcacggtccagatctttgcggacagcacgtacgagctcccgtacgtgatggatgcaggtcaggagggcagcttgcctcctttccccaacgacgtgttcatggtgcctcagtacgggtactgcggactggtaaccggaggcagctctcaaaaccagacagacagaaatgccttctactgtctggagtactttcccagccagatgctgagaaccggaaacaactttgagatggtgtacaagtttgaaaacgtgcccttccactccatgtacgctcacagccagagcctggataggctgatgaacccgctgctggaccagtacctgtgggagctccagtctaccacctctggaggaactctcaaccagggcaattcagccaccaactttgccaagctgaccaaaacaaacttttctggctaccgcaaaaactggctcccggggcccatgatgaagcagcagagattctccaagactgccagtcaaaactacaagattccccagggaagaaacaacagtctgctccattatgagaccagaactaccctcgacggaagatggagcaattttgccccgggaacggccatggcaaccgcagccaacgacgccaccgacttctctcaggcccagctcatctttgcggggcccaacatcaccggcaacaccaccacagatgccaataacctgatgttcacttcagaagatgaacttagggccaccaacccccgggacactgacctgtttggccacctggcaaccaaccagcaaaacgccaccaccgttcctaccgtagacgacgtggacggagtcggcgtgtacccgggaatggtgtggcaggacagagacatttactaccaagggcccatttgggccaaaattccacacacggatggacactttcacccgtctcctctcattggcggatttggactgaaaagcccgcctccacaaatattcatcaaaaacactcctgtacccgccaatcccgcaacgaccttctctccggccagaatcaacagcttcatcacccagtacagcaccggacaggtggctgtcaaaatagaatgggaaatccagaaggagcggtccaagagatggaacccagaggtccagttcacgtccaactacggagcacaggactcgcttctctgggctcccgacaacgccggagcctacaaagagcccagggccattggatcccgatacctcaccaaccacctctag

SEQ ID NO: 5294 - DNA, 1617 bp, Bovine adeno-associated virus
atgcgtgcagcagctggcggaaatggtggcgatgcgggacaaggtgccgagggagtgggtaatgcctccggtgattggcattgcgattccacttggtcagagagccacgtcaccaccacctcaacccgcacctgggtcctgccgacctacaacaaccacctgtacctgcggctcggctcgagcaacgccagcgacaccttcaacggattctccaccccctggggatactttgactttaaccgcttccactgccacttctcgccaagagactggcaaaggctcatcaacaaccactggggactgcgccccaaaagcatgcaagtccgcatcttcaacatccaagttaaggaggtcacgacgtctaacggggagacgaccgtatccaacaacctcaccagcacggtccagatctttgcggacagcacgtacgagctcccgtacgtgatggatgcaggtcaggagggcagcttgcctcctttccccaacgacgtgttcatggtgcctcagtacgggtactgcggactggtaaccggaggcagctctcaaaaccagacagacagaaatgccttctactgtctggagtactttcccagccagatgctgagaaccggaaacaactttgagatggtgtacaagtttgaaaacgtgcccttccactccatgtacgctcacagccagagcctggataggctgatgaacccgctgctggaccagtacctgtgggagctccagtctaccacctctggaggaactctcaaccagggcaattcagccaccaactttgccaagctgaccaaaacaaacttttctggctaccgcaaaaactggctcccggggcccatgatgaagcagcagagattctccaagactgccagtcaaaactacaagattccccagggaagaaacaacagtctgctccattatgagaccagaactaccctcgacggaagatggagcaattttgccccgggaacggccatggcaaccgcagccaacgacgccaccgacttctctcaggcccagctcatctttgcggggcccaacatcaccggcaacaccaccacagatgccaataacctgatgttcacttcagaagatgaacttagggccaccaacccccgggacactgacctgtttggccacctggcaaccaaccagcaaaacgccaccaccgttcctaccgtagacgacgtggacggagtcggcgtgtacccgggaatggtgtggcaggacagagacatttactaccaagggcccatttgggccaaaattccacacacggatggacactttcacccgtctcctctcattggcggatttggactgaaaagcccgcctccacaaatattcatcaaaaacactcctgtacccgccaatcccgcaacgaccttctctccggccagaatcaacagcttcatcacccagtacagcaccggacaggtggctgtcaaaatagaatgggaaatccagaaggagcggtccaagagatggaacccagaggtccagttcacgtccaactacggagcacaggactcgcttctctgggctcccgacaacgccggagcctacaaagagcccagggccattggatcccgatacctcaccaaccacctctag

SEQ ID NO: 5295 - DNA, 1173 bp, Bovine adeno-associated virus
atggcgctggtaagctggctggtggaacatggcatcacttccgagaagcagtggattcaggagaatcaggagagctacctgtccttcaactccacgggaaactctcggagccagattaaagccgcgcttgacaacgcgtcaaaaattatgagtctgaccaaatctgcctcagactatctcgtgggacagactgttccagaggacatttctgaaaacagaatctggcagatttttgatctcaacggctacgacccggcatacgcgggctctgttctctacggctggtgcactcgcgcctttggaaagaggaacaccgtctggctgtatggacccgcgaccaccggaaagaccaacatcgcggaagccatctctcacaccgtgcccttttatggctgtgtgaactggactaatgagaactttccctttaatgactgtgtggaaaaaatgttgatctggtgggaggagggaaagatgaccagcaaggtggtggaacccgccaaggccatcttgggggggtctagagtacgagtggatcaaaaatgtaaatcctctgtacaagtagactctaccccggtgattatcacctccaatactaacatgtgtgtggtggtggatgggaactccacgacctttgaacaccagcagccgctggaagaccgcatgttcagatttgaactcatgcggcggctcccgccagattttggcaagattaccaagcaggaagtcaaagacttttttgcttgggcaaaggtcaaccaggtgccggtgactcacgagtttatggttcccaagaaagtggcgggaactgagagggcggagacttctagaaaacgcccactggatgacgtcaccaataccaactataaaagtccggagaagcgggcccggctctcagttgttcctgagacgcctcgcagttcagacgtgcctgtagagcccgctcctctgcgacctctcaactggtcttccaggtatgaatgcagatgtgactatcatgctaaatttgactctgtaacgggggaatgtgacgagtgtgaatatttgaatcggggcaaaaatggctgtatctttcataatgctacacattgtcaaatttgtcacgctgttcctccatgggaaaaggaaaatgtgtcagattttaatgattttgatgactgtaataaagagcagtaa

SEQ ID NO: 5296 - DNA, 1833 bp, Bovine adeno-associated virus
atggctaccttctatgaagtcattgttcgcgttccatttgatgtggaagagcacctgcctggaatttctgacaactttgtagactgggtaactggtcaaatttgggagctgcctcccgagtcagatttgaatttgactctgattgagcagcctcagctgacggtggctgacagaattcgccgcgtgttcctgtacgagtggaacaaattttccaagcaggagagcaaattctttgtgcagtttgaaaagggatctgaatattttcatctgcacacgctcgtggagacctccggcatctcttctatggtccttggccgctacgtgagtcagattcgcgcccagctggtgaaggtggtgttccagaacattgagccgcggattaacgactgggtcgccatcaccaaggtaaagaagggcggagccaataaggtggtggattctgggtatattcccgcctacctgctgccgaaggtccaaccagagcttcagtgggcgtggactaacctcgaagagtataaattggccgccctcaatctggaggagcgcaaacggctcgtcgctcagtttcagcttgagtcctcgcagcgctcgcaagaggcatcttcccagagggacgtttcggctgacccggtcatcaagagcaagacttcccagaaatacatggcgctggtaagctggctggtggaacatggcatcacttccgagaagcagtggattcaggagaatcaggagagctacctgtccttcaactccacgggaaactctcggagccagattaaagccgcgcttgacaacgcgtcaaaaattatgagtctgaccaaatctgcctcagactatctcgtgggacagactgttccagaggacatttctgaaaacagaatctggcagatttttgatctcaacggctacgacccggcatacgcgggctctgttctctacggctggtgcactcgcgcctttggaaagaggaacaccgtctggctgtatggacccgcgaccaccggaaagaccaacatcgcggaagccatctctcacaccgtgcccttttatggctgtgtgaactggactaatgagaactttccctttaatgactgtgtggaaaaaatgttgatctggtgggaggagggaaagatgaccagcaaggtggtggaacccgccaaggccatcttgggggggtctagagtacgagtggatcaaaaatgtaaatcctctgtacaagtagactctaccccggtgattatcacctccaatactaacatgtgtgtggtggtggatgggaactccacgacctttgaacaccagcagccgctggaagaccgcatgttcagatttgaactcatgcggcggctcccgccagattttggcaagattaccaagcaggaagtcaaagacttttttgcttgggcaaaggtcaaccaggtgccggtgactcacgagtttatggttcccaagaaagtggcgggaactgagagggcggagacttctagaaaacgcccactggatgacgtcaccaataccaactataaaagtccggagaagcgggcccggctctcagttgttcctgagacgcctcgcagttcagacgtgcctgtagagcccgctcctctgcgacctctcaactggtcttccaggtatgaatgcagatgtgactatcatgctaaatttgactctgtaacgggggaatgtgacgagtgtgaatatttgaatcggggcaaaaatggctgtatctttcataatgctacacattgtcaaatttgtcacgctgttcctccatgggaaaaggaaaatgtgtcagattttaatgattttgatgactgtaataaagagcagtaa

SEQ ID NO: 5297 - DNA, 2211 bp, Bovine adeno-associated virus
atgtcttttgttgaccaccctccagattggttggaatcgatcggcgacggctttcgtgaatttctcggccttgaggcgggtcccccgaaacccaaggccaatcaacagaagcaagataacgctcgaggtcttgtgcttcctgggtacaagtatcttggtcctgggaacggccttgataagggcgatcctgtcaattttgctgacgaggttgcccgagagcacgacctctcctaccagaaacagcttgaggcgggcgataacccttacctcaagtacaaccacgcggacgcagagtttcaggagaaactcgcttctgacacttcttttgggggaaaccttgggaaggctgttttccaggctaaaaagaggattctcgaacctcttggcctggttgagacgccggataaaacggcgcctgcggcaaaaaagaggcctctagagcagagtcctcaagagccagactcctcgagcggagttggcaagaaaggcaaacagcctgccagaaagagactcaactttgacgacgaacctggagccggagacgggcctcccccagaaggaccatcttccggagctatgtctactgagactgaaatgcgtgcagcagctggcggaaatggtggcgatgcgggacaaggtgccgagggagtgggtaatgcctccggtgattggcattgcgattccacttggtcagagagccacgtcaccaccacctcaacccgcacctgggtcctgccgacctacaacaaccacctgtacctgcggctcggctcgagcaacgccagcgacaccttcaacggattctccaccccctggggatactttgactttaaccgcttccactgccacttctcgccaagagactggcaaaggctcatcaacaaccactggggactgcgccccaaaagcatgcaagtccgcatcttcaacatccaagttaaggaggtcacgacgtctaacggggagacgaccgtatccaacaacctcaccagcacggtccagatctttgcggacagcacgtacgagctcccgtacgtgatggatgcaggtcaggagggcagcttgcctcctttccccaacgacgtgttcatggtgcctcagtacgggtactgcggactggtaaccggaggcagctctcaaaaccagacagacagaaatgccttctactgtctggagtactttcccagccagatgctgagaaccggaaacaactttgagatggtgtacaagtttgaaaacgtgcccttccactccatgtacgctcacagccagagcctggataggctgatgaacccgctgctggaccagtacctgtgggagctccagtctaccacctctggaggaactctcaaccagggcaattcagccaccaactttgccaagctgaccaaaacaaacttttctggctaccgcaaaaactggctcccggggcccatgatgaagcagcagagattctccaagactgccagtcaaaactacaagattccccagggaagaaacaacagtctgctccattatgagaccagaactaccctcgacggaagatggagcaattttgccccgggaacggccatggcaaccgcagccaacgacgccaccgacttctctcaggcccagctcatctttgcggggcccaacatcaccggcaacaccaccacagatgccaataacctgatgttcacttcagaagatgaacttagggccaccaacccccgggacactgacctgtttggccacctggcaaccaaccagcaaaacgccaccaccgttcctaccgtagacgacgtggacggagtcggcgtgtacccgggaatggtgtggcaggacagagacatttactaccaagggcccatttgggccaaaattccacacacggatggacactttcacccgtctcctctcattggcggatttggactgaaaagcccgcctccacaaatattcatcaaaaacactcctgtacccgccaatcccgcaacgaccttctctccggccagaatcaacagcttcatcacccagtacagcaccggacaggtggctgtcaaaatagaatgggaaatccagaaggagcggtccaagagatggaacccagaggtccagttcacgtccaactacggagcacaggactcgcttctctgggctcccgacaacgccggagcctacaaagagcccagggccattggatcccgatacctcaccaaccacctctag

SEQ ID NO: 5298 - DNA, 4694 bp, Bovine adeno-associated virus
gtggcactcccccccctgtcgcgttcgctcgttcgctggctcgattgggggggtggcagctcaaagagctgccagacgacggccctctgggccgtcgcccccccaatcgagccagcgaacgagcgaacgcgacaggggggggagtgccacactctctagcaagggggttttgtaggtggtgatgtcattgttgatgtcattatagttgtcacgcgatagttaatgattaacagtcatgtgatgtgtgttatccaataggatgaaagcgcgcgaatgagatctcgcgagacttccggggtataaaaggggtgagtgaacgagcccgccgccattctctgctctggactgctagaggaccctcgctgccatggctaccttctatgaagtcattgttcgcgttccatttgatgtggaagagcacctgcctggaatttctgacaactttgtagactgggtaactggtcaaatttgggagctgcctcccgagtcagatttgaatttgactctgattgagcagcctcagctgacggtggctgacagaattcgccgcgtgttcctgtacgagtggaacaaattttccaagcaggagagcaaattctttgtgcagtttgaaaagggatctgaatattttcatctgcacacgctcgtggagacctccggcatctcttctatggtccttggccgctacgtgagtcagattcgcgcccagctggtgaaggtggtgttccagaacattgagccgcggattaacgactgggtcgccatcaccaaggtaaagaagggcggagccaataaggtggtggattctgggtatattcccgcctacctgctgccgaaggtccaaccagagcttcagtgggcgtggactaacctcgaagagtataaattggccgccctcaatctggaggagcgcaaacggctcgtcgctcagtttcagcttgagtcctcgcagcgctcgcaagaggcatcttcccagagggacgtttcggctgacccggtcatcaagagcaagacttcccagaaatacatggcgctggtaagctggctggtggaacatggcatcacttccgagaagcagtggattcaggagaatcaggagagctacctgtccttcaactccacgggaaactctcggagccagattaaagccgcgcttgacaacgcgtcaaaaattatgagtctgaccaaatctgcctcagactatctcgtgggacagactgttccagaggacatttctgaaaacagaatctggcagatttttgatctcaacggctacgacccggcatacgcgggctctgttctctacggctggtgcactcgcgcctttggaaagaggaacaccgtctggctgtatggacccgcgaccaccggaaagaccaacatcgcggaagccatctctcacaccgtgcccttttatggctgtgtgaactggactaatgagaactttccctttaatgactgtgtggaaaaaatgttgatctggtgggaggagggaaagatgaccagcaaggtggtggaacccgccaaggccatcttgggggggtctagagtacgagtggatcaaaaatgtaaatcctctgtacaagtagactctaccccggtgattatcacctccaatactaacatgtgtgtggtggtggatgggaactccacgacctttgaacaccagcagccgctggaagaccgcatgttcagatttgaactcatgcggcggctcccgccagattttggcaagattaccaagcaggaagtcaaagacttttttgcttgggcaaaggtcaaccaggtgccggtgactcacgagtttatggttcccaagaaagtggcgggaactgagagggcggagacttctagaaaacgcccactggatgacgtcaccaataccaactataaaagtccggagaagcgggcccggctctcagttgttcctgagacgcctcgcagttcagacgtgcctgtagagcccgctcctctgcgacctctcaactggtcttccaggtatgaatgcagatgtgactatcatgctaaatttgactctgtaacgggggaatgtgacgagtgtgaatatttgaatcggggcaaaaatggctgtatctttcataatgctacacattgtcaaatttgtcacgctgttcctccatgggaaaaggaaaatgtgtcagattttaatgattttgatgactgtaataaagagcagtaaataaagtgagtagtcatgtcttttgttgaccaccctccagattggttggaatcgatcggcgacggctttcgtgaatttctcggccttgaggcgggtcccccgaaacccaaggccaatcaacagaagcaagataacgctcgaggtcttgtgcttcctgggtacaagtatcttggtcctgggaacggccttgataagggcgatcctgtcaattttgctgacgaggttgcccgagagcacgacctctcctaccagaaacagcttgaggcgggcgataacccttacctcaagtacaaccacgcggacgcagagtttcaggagaaactcgcttctgacacttcttttgggggaaaccttgggaaggctgttttccaggctaaaaagaggattctcgaacctcttggcctggttgagacgccggataaaacggcgcctgcggcaaaaaagaggcctctagagcagagtcctcaagagccagactcctcgagcggagttggcaagaaaggcaaacagcctgccagaaagagactcaactttgacgacgaacctggagccggagacgggcctcccccagaaggaccatcttccggagctatgtctactgagactgaaatgcgtgcagcagctggcggaaatggtggcgatgcgggacaaggtgccgagggagtgggtaatgcctccggtgattggcattgcgattccacttggtcagagagccacgtcaccaccacctcaacccgcacctgggtcctgccgacctacaacaaccacctgtacctgcggctcggctcgagcaacgccagcgacaccttcaacggattctccaccccctggggatactttgactttaaccgcttccactgccacttctcgccaagagactggcaaaggctcatcaacaaccactggggactgcgccccaaaagcatgcaagtccgcatcttcaacatccaagttaaggaggtcacgacgtctaacggggagacgaccgtatccaacaacctcaccagcacggtccagatctttgcggacagcacgtacgagctcccgtacgtgatggatgcaggtcaggagggcagcttgcctcctttccccaacgacgtgttcatggtgcctcagtacgggtactgcggactggtaaccggaggcagctctcaaaaccagacagacagaaatgccttctactgtctggagtactttcccagccagatgctgagaaccggaaacaactttgagatggtgtacaagtttgaaaacgtgcccttccactccatgtacgctcacagccagagcctggataggctgatgaacccgctgctggaccagtacctgtgggagctccagtctaccacctctggaggaactctcaaccagggcaattcagccaccaactttgccaagctgaccaaaacaaacttttctggctaccgcaaaaactggctcccggggcccatgatgaagcagcagagattctccaagactgccagtcaaaactacaagattccccagggaagaaacaacagtctgctccattatgagaccagaactaccctcgacggaagatggagcaattttgccccgggaacggccatggcaaccgcagccaacgacgccaccgacttctctcaggcccagctcatctttgcggggcccaacatcaccggcaacaccaccacagatgccaataacctgatgttcacttcagaagatgaacttagggccaccaacccccgggacactgacctgtttggccacctggcaaccaaccagcaaaacgccaccaccgttcctaccgtagacgacgtggacggagtcggcgtgtacccgggaatggtgtggcaggacagagacatttactaccaagggcccatttgggccaaaattccacacacggatggacactttcacccgtctcctctcattggcggatttggactgaaaagcccgcctccacaaatattcatcaaaaacactcctgtacccgccaatcccgcaacgaccttctctccggccagaatcaacagcttcatcacccagtacagcaccggacaggtggctgtcaaaatagaatgggaaatccagaaggagcggtccaagagatggaacccagaggtccagttcacgtccaactacggagcacaggactcgcttctctgggctcccgacaacgccggagcctacaaagagcccagggccattggatcccgatacctcaccaaccacctctagcccaattctgttgcataccctcaataaaccgtgtattcgtttcagtaaaatactgcctcttgtggtcattcggcgtacaacagcttacaacaacaacaaaacccccttgctagagagtgtggcactcccccccctgtcgcgttcgctcgttcgctggctcgattgggggggtggcagctcaaagagctgccagacgacggccctctgggccgtcgcccccccaatcgagccagcgaacgagcgaacgcgacaggggggggagtgccac

SEQ ID NO: 5299 - protein, 390 aa, Bovine adeno-associated virus
MALVSWLVEHGITSEKQWIQENQESYLSFNSTGNSRSQIKAALDNASKIMSLTKSASDYLVGQTVPEDISENRIWQIFDLNGYDPAYAGSVLYGWCTRAFGKRNTVWLYGPATTGKTNIAEAISHTVPFYGCVNWTNENFPFNDCVEKMLIWWEEGKMTSKVVEPAKAILGGSRVRVDQKCKSSVQVDSTPVIITSNTNMCVVVDGNSTTFEHQQPLEDRMFRFELMRRLPPDFGKITKQEVKDFFAWAKVNQVPVTHEFMVPKKVAGTERAETSRKRPLDDVTNTNYKSPEKRARLSVVPETPRSSDVPVEPAPLRPLNWSSRYECRCDYHAKFDSVTGECDECEYLNRGKNGCIFHNATHCQICHAVPPWEKENVSDFNDFDDCNKEQ

SEQ ID NO: 5300 - protein, 610 aa, Bovine adeno-associated virus
MATFYEVIVRVPFDVEEHLPGISDNFVDWVTGQIWELPPESDLNLTLIEQPQLTVADRIRRVFLYEWNKFSKQESKFFVQFEKGSEYFHLHTLVETSGISSMVLGRYVSQIRAQLVKVVFQNIEPRINDWVAITKVKKGGANKVVDSGYIPAYLLPKVQPELQWAWTNLEEYKLAALNLEERKRLVAQFQLESSQRSQEASSQRDVSADPVIKSKTSQKYMALVSWLVEHGITSEKQWIQENQESYLSFNSTGNSRSQIKAALDNASKIMSLTKSASDYLVGQTVPEDISENRIWQIFDLNGYDPAYAGSVLYGWCTRAFGKRNTVWLYGPATTGKTNIAEAISHTVPFYGCVNWTNENFPFNDCVEKMLIWWEEGKMTSKVVEPAKAILGGSRVRVDQKCKSSVQVDSTPVIITSNTNMCVVVDGNSTTFEHQQPLEDRMFRFELMRRLPPDFGKITKQEVKDFFAWAKVNQVPVTHEFMVPKKVAGTERAETSRKRPLDDVTNTNYKSPEKRARLSVVPETPRSSDVPVEPAPLRPLNWSSRYECRCDYHAKFDSVTGECDECEYLNRGKNGCIFHNATHCQICHAVPPWEKENVSDFNDFDDCNKEQ

SEQ ID NO: 5301 - protein, 736 aa, Bovine adeno-associated virus; identical to SEQ ID NO: 5285

SEQ ID NO: 5302 - protein, 600 aa, Bovine adeno-associated virus
TAPAAKKRPLEQSPQEPDSSSGVGKKGKQPARKRLNFDDEPGAGDGPPPEGPSSGAMSTETEMRAAAGGNGGDAGQGAEGVGNASGDWHCDSTWSESHVTTTSTRTWVLPTYNNHLYLRLGSSNASDTFNGFSTPWGYFDFNRFHCHFSPRDWQRLINNHWGLRPKSMQVRIFNIQVKEVTTSNGETTVSNNLTSTVQIFADSTYELPYVMDAGQEGSLPPFPNDVFMVPQYGYCGLVTGGSSQNQTDRNAFYCLEYFPSQMLRTGNNFEMVYKFENVPFHSMYAHSQSLDRLMNPLLDQYLWELQSTTSGGTLNQGNSATNFAKLTKTNFSGYRKNWLPGPMMKQQRFSKTASQNYKIPQGRNNSLLHYETRTTLDGRWSNFAPGTAMATAANDATDFSQAQLIFAGPNITGNTTTDANNLMFTSEDELRATNPRDTDLFGHLATNQQNATTVPTVDDVDGVGVYPGMVWQDRDIYYQGPIWAKIPHTDGHFHPSPLIGGFGLKSPPPQIFIKNTPVPANPATTFSPARINSFITQYSTGQVAVKIEWEIQKERSKRWNPEVQFTSNYGAQDSLLWAPDNAGAYKEPRAIGSRYLTNHL

SEQ ID NO: 5303 - DNA, 25305 bp, Homo sapiens
agcgacgtcgaggcgctcatggttgcaggcgggcgccgccgttcagttcagggtctgagcctggaggagtgagccaggcagtgagactggctcgggcgggccgggacgcgtcgttgcagcagcggctcccagctcccagccaggattccgcgcgccccttcacgcgccctgctcctgaacttcagctcctgcacagtcctccccaccgcaaggctcaaggcgccgccggcgtggaccgcgcacggcctctaggtctcctcgccaggacagcaacctctcccctggccctcatgggcaccgtcagctccaggcggtcctggtggccgctgccactgctgctgctgctgctgctgctcctgggtcccgcgggcgcccgtgcgcaggaggacgaggacggcgactacgaggagctggtgctagccttgcgttccgaggaggacggcctggccgaagcacccgagcacggaaccacagccaccttccaccgctgcgccaaggtgcgggtgtagggatgggaggccggggcgaacccgcagccgggacggtgcggtgctgtttcctctcgggcctcagtttccccccatgtaagagaggaagtggagtgcaggtcgccgagggctcttcgcttggcacgatcttggggactgcaggcaaggcggcgggggaggacgggtagtggggagcacggtggagagcggggacggccggctctttggggacttgctggggcgtgcggctgcgctattcagtgggaaggttcgcggggttgggagacccggaggccgaggaagggcgagcagagcactgccaggatatcctgcccagatttcccagtttctgcctcgccgcggcacaggtgggtgaaggagtgaatgcctggaacgtactgggaactgcaccaggcacagagaaagcgggcttgccattatagtgggttccgatttggtttggaaaacatgggcagcggagggtggagggcctggagagaaggccctacccgagacaggggcggggtgggaaggacggcagatgctgggagcacgaggcaatttctttatgacacagaactcatgctctagtattccatctgtttcagccgaagaaaagaaccagctgaaggggcaggggagaaggggcggaggtattctcgaggcccattggcgtcctttaggactcaggcagggaagggcccttggtgctctggagccggaggtggtgcgcctggtactgggaccccggagctgagcccggcgcctcagcccacctggctgtctgccgaccgtgtgcggggcgagtttgctcaacaactctgccagcttctggccctcaggctgtgggaagcttcttcccggggcgagaccactagctttttctaagtattaccagcccaggacttggctgaggttctgtgtcccccagcttggagtcagatgtggggttgaatcttggcttcctctcactagctgtggtgcttgacaagtcacttatccttgagcctccattgcctaatctttaaaagggaggtgacaatcgtccctacggctcagtggcagcagatggggagatgaagggaaagttctgttgaccatgagtgaacttacaatgcaagccccggggggatcacttgcagttttgtccctgtctgcagtgtgacctgttggtgacattgtctttgctccaaaccacagctcctggggcagaggggaaaattctgccactcacagctgcctgcccacgcttctgtctgagtgtgctgggtggcaggatggcaagtccttactcagctcagtatagccctcttccttgttccctgagcctttgactttctcgagggatgttgtggggttgtggccaggataagaaagggcatttcaagttaccactgctccaaaacaactgttctggaaatagtgagtaccccatcctgagaggtgagtaagcagaggctgtatgaccacctgaaccaagcccttgaggatgtttcttctctggtggaagtttggaacaggagcctcctcaagttcatttattcattcattcaatggttattttgtgggaatcgaatttagaatgaaaatattttttggcaagcagaaaataatttttagaccaatccttttcttttagtcatgagaaactgaggcccagagagaggaggtcaccccaggtgcattagaactgggtttccagaactgacactccactgcacagagtactctcccaattcattcaatttttatttagcggaaggcattttcagatgggtctttgaagcattagtaggagttcagcgatgatggtgtcatgagaattttattctaggattaggaggtaccatgaacaaagatacagagctgggaaaaccagaggtggaagataaggagcacatgtccacagttctttttcttttttttttgagatggagtttcgctcttgttgcccaggctggagtgcaatggtgcagtctcagctcactgcaacatctgtctcccgggttcaagtggttctcctgcctcagcctcccaagaagctgggattacaggtacctgccaccacgcccggctaatttttgtatttttagtagagaaggggtttcaccacgttggccaggctagtcgcaaactcctgacctcctcagtggatccgaggaggtgatcctcccgcctcagcctcccaaagtgctcgaattacaggtgtgagccaccacgcctggcctccacagttctttatccaccgtctgaaatgtaaaatgttacgaaaaccaaaagttttttttgtgatttatttgatggtagcacctgacgtgaactgacatgagattatttttaatttagttgtgtgaatatgcatattcatatattttgctgcatagattacagtatgcagctccagattcttccaagcagactctgattgcccattactgcctttctaaaatccaaacaagttctgaggttcaaaaccgttttggccctaaggctttgggtaaagggggtggactctgttctactctgactggagtccaagatgcatatatacagagatatgggtgatggggctgcaaggtaggttgaggtaggggccaaggaggagcatggagtttggacttgattcatgaggctgtggggagccagtgaaggttcttaagcaggtatgtctgcctgagagcagttggagcagacaagagctaaaaaccaaacaaatcaccatagatagtggctgctataatttgtttgtcccctccaaatctcatgtggaaatttggtcctcagtgttggaagtggggcctaatgggaggtgtttgggtcatgggggaggaacccctgtgaaaggcttggtgccgtccttgtgataatgagtaagttctcccgctatgatttcccttgaaggctgattattaaaaagagcttggcacctccctctcttctctcttgcttcttctcttgccatgtgattgatctctgcacatgtaggctccccttcaccttctgccatcagtgaaagcagcttaaggccctcaccagaagcagatgctggtgccatgcttcctggagagcttgcagaatcatgagctgaataaatcccttttccttgtaaattactcaccttcaggtattcctttatatagcaacacaaaaggactaagacagtggccttgacttttctctctctttaagaagtgttgcctttgctcacttagtcatcccttctgcctgcatttgtagagcatctggatgggagatttatataaccgtcactcttgactttcccagcaggcctatgtcataggtactgtggtctctacaatacagcagaggtatctgaggctccgagaggttgagtgacttgctcatggctgcacaaccagtaaatattggagctggaattcaggtccacggtttcctggctccaaagcccatgattttttccctcaatttattctgactggggcatgggggagggggtggcctttgggcagggccaccaggagcgaccaggcccgtagagagctgggtgcaggtacagaggaaaacctgttgtcgagtgtggcccgtagttcccatttttgcctgaatggcacatttgaaagtgttatataaccatgtgaataataatagttggcctatatgagttctttaatttgctttttggtccgcatttggtaacttctttatcatctactatactctgttgtgtctcttttgttgtaatttgtaagtaggggtgagataaagtacacctagggtttgctgggtttcttccatgtcatcatgttcctccttgcatggggccaggatccgtggaggttgcctggcacctacgtggtggtgctgaaggaggagacccacctctcgcagtcagagcgcactgcccgccgcctgcaggcccaggctgcccgccggggatacctcaccaagatcctgcatgtcttccatggccttcttcctggcttcctggtgaagatgagtggcgacctgctggagctggtgagccaccctttttgggaatggcacttcctgatagggctgggccactgcatatacactggggactgtgcttagtaggcccattgctgaaaatcagaaggggacagcaagtatgtattgagcacttatcgggtaccaagcacagtaactactggctttctgtatagaattccctttaagcctggccatgccccagtggtacgtctatcttcatttgaaagacgaggagactgaagttcagaggggaccacacagacagctaggggtagagcctggatcaaacccattggtctgcctgccagccattcttgtgccaatgcatctgctgcctacggaaacctgtagggacaaggccctgggatgttcagtggagcctgagtcattttataaaaaagcatgactctagggtccaaaattcctttgaagctgttgctatccagagtgaagtcccttctttaggacagggtggccctcctccctcctggatgtcacatcttcggtggaggggcagaaaggggactgggtattctcctcaccctggccctagtgcttcaaatcttaaaaaaacgtttttatttgtgcttctgcaccaccttctagcccacctcgtttcctggcctctaacttgatgagagcgtgtgtcattttcacactgattctccacatggcaggcggtgcttcttagcctcctgcagacagtgaggccccacggtcttgtccaaggtcacacagcgtgtaatgggcagggtcagagtctggagtctggacctgggtctcctagctgcactgcactgctgccccatgggttaatcagctcagcataccgtggctgaacagctacctcataccaaggcctgtggcgccatgacagggattgacagggtccctgccttggaaacccgtagtctaagtagaggagactgacaagtcaatgccttccatcagtctgctcaacacacgtttaccaagtgcctactgtgtgctgcagaggcgaagatgacacagctcaggcctttcccttgagcttacagttcaggaggagagactgaccagtgactgccagtacagttgactatgggacaatgtgctcagccttggggagagacgaagaaggtacccgtatagcaccagatgacaggcacgagccccacaggccagggcagctgctcagaggagagtaggccaagcagaaggcaaacagaaggctgcaggcatttgccatcgagagctggacttcaaactgggcatcataccagcctgggttcgagtcctgcccagccccttattggctgtctaaccctgagcaaatcccttcacctctctgagcctcattcctctatctgtaaaccagttataataattggaacattcatttaaggactaaatgaggtcgtgaagcattcagcagatgctaggtacggaaactcgctgaagtgggggcaggttaagaagcctctggggatacgaaggcatccagggactagttgtggcaggaggctgttaccacttaggtctgaagggtaaggagagggaatagctttccctctgcccagttggagccggtggcatggaggagaggctgcctgtggggaatcacccgagggttcaccgctgccatgcgcagggagtcaggaggtagggagggagtggggcagatgcacaccatttttttttttttttgagactctgttgcccagactggagtgcagtggtgccatatctgcacctctgcctcccgggttcaagctcactgcaacctctgcctcccgggttcaagcgattctcctgcctcagcctcccgagtagctgggactacaggtgtgtgccaccatgcctggctaatttttgtatttttaatagagatggggtttcaccatgttggccaggctggtctcgaactctcgacctcaggtgatcccccacctcggcctcccaaagtgctgggattacaggcgtgagtcaccgctcccagctgctgatgcactcttgtccttctaactcctgctagtgcctcccattggctgagcccaactggaagctttgcaagggagctggtgctgcagtttgcactgagcaggctggagaaggctggagaatagactaggggacaaaccgaattgccagtgctgttatgtcatgatttaggcatggagtccagggcctgagcttcactccatgtccatcctgcccagagccttggcacagcctggctcccagacaagatgtcaagttcagaatccttcctaaaaggaatcctctatgccagaccgtgttgcagggatatgggagtgctgggctcccagcctgatcaaggagcgagaaaactcaggctcctagtctgtcctccggggcactagcagggacaaggtgggaggctgctgggctgggatgtggggacaggtttgatcaggtaaggccaggctgtggctgtgtttgctgctgtccaaatggcttaagcagagtcccccggcctctctggcttctgcaggccttgaagttgccccatgtcgactacatcgaggaggactcctctgtctttgcccagagcatcccgtggaacctggagcggattacccctccacggtaccgggcggatgaataccagccccccggtaagacccccatctgtgccctgccccaccccatctgagctgaatccatttgctctgccctggcctggcctccctgctggtggtttccacttctcggggggctttgggactcagcacctccactgacccctttttttctgtcccatccccatcccctgcagcccccactgcctgccttcctgttgccccacaaatgcaaaagtcttgccttaaatgatcctcttttccttcttttctcttgttttccttttctcaccatttggaatggcccagcaggctgcacttaccttggaaggagggttcatctgatggtgactctacctagggcccccaggcctctataactcccagtgccctgcagactggaccagatcctttaatgggatagacacaaccctgtctgggatgcctctgcctaccttcctgttttgctgctccacctgcctccagctccgtttggcttcctggggctccctgcctgggccactttgtgtcttccctctaggcctttctttccactgttccctctgcctggtgtggcctggctatggaagggagggaggaggagcggccatggaaaacggtctgcattctagcagggacttgcaggtggcaattcagtcggggaagactctagatgcacctggcctgaggagagaatgaagggttctagttggactgtgttaagtttgaggtgcccatggtgtgaggtctggagctcagcgcagagatgatgcaatgtggtgggtccatgcaacatggtgccaggacgcagagcttggggtgaactcagctttcaccccttaccggttctcgtgggatcttgggaagccactttcttctatgagctttgtcgttcttgtctgtaaaatgggcacataaccctgtccctgtccttctcacaggttgctgtgagactccaatgagttgaaggatgtgcagatgcttttggaagtgaaaagttggggggctactgtgtgactttgcatacacccaaactgtgtgaccttgcatatgtctgagttgctgccattgcaacagatcagagctggtgggctgggtgtggagaaagggtttgtgtgggggacatcctctggcaagggtggcagcagcagaagtgaggggcctggtcggtcatgtgtgctgacccggcctgggcagcctgtggccagggagaggacagctcctctgtaggaagagcctgttcctttccaaccaggtgagacctcttcagtggagccctggagccccctgtactccacatcagtgcctcagggacctcccggagcaggctaatatcagagaccaagagggacactggcagaggatcacagagaccccagtccaggcagggactgagaagatcttgccccctaagttagtttcctagcactgctgtgacaaattaccaccccctcggttggaacaagttgattctctgcagtcctggaggccagaagcctgaatcagtgtcggcaggaccactttctcccggggggctccagggagaagcttctcttgcctcttccgtgtcccaacagcggcagcacaccaatcccagcctctgtcttcacacagccttctctgtgtctctctcctcttcattgtctcataaggacacttgtcattggatttagggcccactggatcctccaggatgatctcatgtggggaaccttaaccacatctgcaaggaccctttttccaaataaggtcacagccacaggttgtgggggttaggatgtgagtgtatctctttggcagccactgttccctcctctcccttgggccagaagcagacgtggggccctttcttccccataggatgcccatggattgccccccttcccgcttcccccgagtgtctgtgggaggtggcaggaatggcaggcaggggtgtggaaccccttctggagtcatatcaagggcttggctggaggaagtcctcctggagctgttgggctggcatggggcaggctggctgggcccagcagcagcttcttcattcatggggaggccacaagcatgggccctagagctggctgccgccctcaaacccagaccctgcactcttaactgtgtgaccttgcatacgtcactcaccctctctgatcttcaggttcctctgcaaaagggaggtaatgataaccctcactctggggggctgtttggagggttaaatcagttattgctgtagcatgcatttctctgtcaggtattgagtgaggtgctgtgattttagccctgcatttttcttttcttaccattcaataataacgttttgagcacccactgtgcgccaggcaccatattaggtgctggggatacaaatgtgaatgaaatgaatgtggtctcttcccccaacagtgtatccagaagattaatccattccttaaacaaatgctacttgacacagattagttctggataggctgagagctctgaaggagtgcaggcagctgcgagcctgtgtatccagcagaaggatcaggaaaggattcctggaggaagcgctgttctagccaagacctacgggggcattattaaccaggcaaaggggacggtgtccaagcagtggaatgaacgtggattgaagctgtgaggcaggagggagtgtggcctgtgcagaagggaccgaggctggtgagaccaggagggcctgggtggcctccaggtcagatgtgaaaggaagaacttggccacagtctgagcttctcaggcgtatggcagggctgcctggtgagagggaatgagctccctgctctggaggtatgcaagcaggactgggctctcacctgccagaggccacagagctttccagaggctggaagaggccactccaaggcctctttgcccctgagagtggtggctcttcttgaggccaccttgccacgctgtcacagggaactagcagcccctgcctcacccgggggtttggaagatagagggaggcctaggaagggccctgtgtctcatccgagctgggcccctttccagcctctcactggaaggaagcccaaggatgttcctgtgggggcttttaccaggcccacctgccctctgctggccatgcttgcagcctcctgaccctgtcccagcaggacagtgggctggtgtgagcgggcaggaaccgcctgcacttagaaggtgtggggctgcctccccgagcttccatctgccgctggggccacaccccaggcccagggatgggaccccacagtggtcacatcatcttgcagcagaacccaggtacagctcctggagcagatggtggtcccaagcacgggtgggaccagaaaggactctcacctgggctaactcagctgcagcctcagttccctcctcacacacgacgaggaacatggactggaagcctgcccagcaggccttctgctcgatgtgcgttgtgtggcttacgtccagggagggaagcagcctctgtgctgtcttctagataagcctgtattccccgggctgtctgccaatgtatccagttgtcccgtcagcctggaagctctgagggaaaaccttgggctgcttcctgagcacctgtatcccctgcagccagcccggggcctctgctaggagcagactgagcatggcttatgggcctggcaccatctggcctctgcccaccttgctggccttgtcttgtgtctgccccttcgacattccatagcccagctcaatatctagtggttcctctagggtggcgagcactgtttggtctccagatgtcttcaggtcggagctcacagcgctctcagccaccccttcccagtgtagcaccgggcacatggtagatgcctattgatgagtgaaagctcctaacacactcagagagcaaggactccgcctcatcccacagcctgggaggagaggcagactgccaaggacctgctcagcatgctacagaagaaaccaaagtgcccacgggactgatcagtggagcttcctgccgagactggaggccttagggcagggtagacagtgtgtgtgcaggctggggactcacagttcggactgtgcccagacctactagcatagtgggtgggtgggaggatgcgggactgggggccgaccttgcctgaaattcatgtgggatctcagagcagccactgaattgctctgtagggggctaaatagtggcccccacagatacacacacccagacagagcctgtgagccagaccttatttggagaaaaggtctttgtagatgtaattaagcatctcaagatggcatcatctggattatgcggtgggctgtaagtcctgtgatgtgtctttatgagagaaaggcagagggagatttgacacacacaggaggggccacgtggagacagaggtggagattggagaaatgtggccacaagccagggaacaccagcagccaccagaagccggaagacgtgaggcagggttcttcccagagccttcgctgctgagtctgggaatttgtgaccgaagccataagaagtgggtacacgccctgagcctcccacacttgctcacctgtcctgagatgagaatctctactctgcagcatatttggaggatcactgcgggggccacagaggtgctgttcagatggcacttcagaagactcaggagaccctggggcaggagcagtttgactgacagcccagagggctgccctctgattccacctgaggccctgcttttcctggctgcaggggttccagggccaggccatttccgctggcgcaggactctgctagcagcaacctgcctgaagtcttcctttggcctggctgagagtttctgagacctgcgctggagcggaggtgcttccttccttgcttcctttcttcctctctcccttctccatccagcaggctggacctgcctggcatctgtgagctctccctactttctcctataccctaacctttgtcctgcatgggcgactcccccagtgagtctcttgcagcttttaccccagtgcctgcttcttggagaatccaaactgatccagttagggatgataaagtgtagggtaggcgctcggtgactgttttctctgaggttgtgactcgtgtgaggcagaagcagtccccgtgagccctcctggtatcttgtggagtggagaacgcttggacctggagccaggaggcccagacatacatcctgtccgagctgcagcttcctgtctctaaaatgagccggccagcgcaggtggccagacatcactgttattctcctttgagtctttaaatcttgttgtctttcttgcagactcggtgagctgtgaaaggctataataggggctttattttacactttgatactattttttgaacattcatattattgttagatattgatattcatatgaaggagcaggatgacttgggtccttcttggcagtagcattgccagctgatggccttggacagttacctgccctctctaggcctccctttccttgtctatgaaatacattatagaataggatgtagtgtgtgaggattttttggaggttaaacgagtgaatatatttaaggcgctttcaccagtgcctgggatgtgctctgtagtttctgtgtgttaactataaggttgactttatgctcattccctcctctcccacaaatgtcgccttggaaagacggaggcagcctggtggaggtgtatctcctagacaccagcatacagagtgaccaccgggaaatcgagggcagggtcatggtcaccgacttcgagaatgtgcccgaggaggacgggacccgcttccacagacaggtaagcacggccgtctgatgggagggctgcctctgcccatatccccatcctggaggtgggtggggactgccaccccagagcgttgcagctgtactcctgggttgcaccccccccagctgtcactgtcccctccctgccatcagttgtgggaagggcgttcatccatccagccacctgctgatttgttatagggtggagggggggtctttctcatgtggtccttgtgttcgtcgagcaggccagcaagtgtgacagtcatggcacccacctggcaggggtggtcagcggccgggatgccggcgtggccaagggtgccagcatgcgcagcctgcgcgtgctcaactgccaagggaagggcacggttagcggcaccctcataggtaagtgatggccccagacgctggtctctctccatctggacctggcctgggaggtggcttgggctgggcccagggagagctaatgtctcctaaccaagaatgctgtggcagcctctgccgcagagccagagaaccagagtgccaaggctggcagggttcccagtggccacgagtgcagatgaagaaacccaggccccaagagggtcatgcaggtagcccagggagttcagccttgaccctgggtcaatgacctttccacagttccacactgctccccttttaaaatccggtgatgtctttatgtcttttgttatgttatcttcaatgtggagggactcgaggtgatctaagcaaactttttctatcttctgcttgcatacctctgagaccaggggactcactcacttgcatgactgggccctgcaggtcacactggccaggcagatgtggtggaggaactggcagaggactttttctagactgtgactacatttagtccacccagcggcccccctatgaagtccagttgagaactaggactctgggggccggtggacagagaagagggagggttctctcccttactgacttccttctgtggccagacattgagcaaggcctctgtacagcatgtcctggggctggccttgccgtagctgctaaatagttgacgaaaccagtccagagaggggaggtgactgccagggtcgcacagctcaagctggggaactcgctgggaaaactgtcagctctgggcagcagcttgacttccactgtaagccccagcccccagggtcaaacactggctctggtgctggcagaggcagcccactagcctgtttcaaaggctgagaaggcccaggagtctgccctgtgctccaccagttctgccctgagactttcctacagagtacaggttttgatgttcagttttaaaggcaagaatcaataaccttctgccccatcaggtgaccccttgtgcctgtcccacccctttattgactgacctcggctcagtcaggtcagttcctgaaggtcagtgtgtggaggggaggctgttctttcccagaaaggccttccccaggcctggtgctctggcctctggaggacttcctggagaagtcccttctttggggtcccagtcagtgtatgggaagcccttattgcatgacctggcacggggcaggggctcaacagtcactattgccttccttgccactgccatttcctcctctgtaagcaggtgattgtgtgtccagtctgagcacagagataagcacacagcaggtgcttaataactagcagctgtaggctgggcgcggtggctcatgcctgtaatcccagcactttgggaggccgaggtgggcagatcacctgaggtcaggagttcgagaccagcctgttcaacatggtgaaaccccgtctctactaaaaatacaaaaattagccaggcatggtggtgggtgtctgtatcccagctacttgggaggctaaggcaggagaatcgcttgaacccaggaggtggaggttgcagtgagctgagatcgtgccactgcaatccagcctgagtgatagagcgagattccatctcaaaaataaataagtaaataactagcagctgtaaatgtggctgttgttcttcacctccacactcagtgccactccactccctccctccgtggtgtgaggggcctcactagctgtctcctaggaggagcatggctgtgagattccagctccatccttggccacggctcctggagacatcttagaggccaggatccagaaggctcccacacctcatttgacaggggagaagctgtcagttccaggtccccttgcacatcagggccagagctgcgttaggcctccagtctccaggccactgggccagagctcacaggctggcagagggttagaactgttactggtggctgggtgcagtggctcacgcctgtaatcttagcactttgggagggcaaggcgggaggatcatgaggtcaggacatcgagaccatccttgctaacacggtgaagccccgtctctactaaaactacaaaaaattagccgggcgtggtggcaggcgcctgtagtcccagctactcaggaggctgaggcaggagaatggcgtgaacccgggaggcggagcttgcagtgagccgagattgcgccactgcactccagcctgggcaatagagcgagactccgtctggaaagaaaaaaaaaaaaaagagctgttactgttgacagtagcatgaggtagaccatggcctgcaccaaaatgggggagtggagtgccactgaggccagaaggaaccacaccctcaagggtggggagttatggtatggggggtcctaggcatggagtcttttaattctttagacaatcctgggagcaactgtccctgtttcacagagggcggggccacacagctggtgagtgggcagccaagactctgttcaagtttgtgtgggtccaacacttgcggccacggtggaggggcatctgagccaggcctcagagagtggcgggggaagttgggtggggaagtgtgcccttctcattcctctgaggctcatcctcttggtgcctctctttcatggaaagggataataaggttattgtgaggatcccctgagttcgtatattcagacgcttagacagagccaggcacagagaagggcccggggttggctagtttgattgctggtgtaattgctaatatcttccagtttgtattggtcaaggttctgcagagaagcagaaccagtaggatgtatatattaagagtttcaagctcatgtgaccgtgcgggctggcaagtctgaaatccgcagggcaggccaggcaggctggcaattcctgcagaatttgatgttgcaatactgagtcctaaggcagtcctggggcagaattccttcttccctgggaggcctcagtctgttctcttaaggccttcaactgattaaatgaggcctgcccaagttatagagagtaacctgccttactccgtcttctgatttaaatgttagtcacatctaaaaaatattttcgcagcagcatttccactggcttttgaccaaacatcaggccacaaagttgatccccaaaattaaccatcactctgtgcctgtaagggaggggctgggaaaggggagcaggtctccccaaggggtgaccttggctttgttcctcccaggcctggagtttattcggaaaagccagctggtccagcctgtggggccactggtggtgctgctgcccctggcgggtgggtacagccgcgtcctcaacgccgcctgccagcgcctggcgagggctggggtcgtgctggtcaccgctgccggcaacttccgggacgatgcctgcctctactccccagcctcagctcccgaggtaggtgctggggctgctgccccaaggcgcgggtagggggcggagggcggagggcggagggagggcgggcgggcaggcgggcttcttgtggcacgtgggcttcttgtggcacgttcctggaggccgaacccttctggctttggaaggagtcgtcagagacccccgccatgcgggaggctggggaggaaggggctcgaaacctccatcatcgcagagtctgaatagcagtggccccgccatgcgcccacgtagcggcgcctacgtagccacgcccccacaccccgtcctggccactctccctcctgaaggtcttctggtacccgccccctccccatctccatccccaggccctgcgtcctctgcccaatactctttgggcctccctgttgtccagctctctccgcggctccatgactgacaacttgagcaaggctaatgtgaatgggagcggttgagggctcagacctctcacccgaggaacatccacagagtgtgccgcatgcccggtgcagtgtggctgcggggacacagacacggagcctcggccctgaggagctggggggcagtgaccgtccctcctctgacccaccactcctccagtgtcaggacactgcgggtatctaggggaaggaatcttgttccacttcaagtctggaacttcaagtctgtgtgtgtgcgtgcgcgcgcgcgcgttgggggtgggggttgcagagcagatgcgtacctgacagcggtaacctaggtcccccctggcctatcaaggcttccctggcggccgaatttaaaggcatcaagcaaacaaagcccaacacatctctgccttgtcctctcagtttccccccgtggcacttagaaccacttgatacaccgaatagtttcctatctcccccactaggatgtaaactccacaggggcattgggaatgctgcctggctatggtagggacagaggggagcaccagggcggggcaggggtgccagagttctgcctgggcagtcagattttccttaggaggggacatttgagtgggacccaaacaggtgtatagcagttgtccagcccagctggcaaggcctgagtctgcctctgcaacccctctcttgggctcctttctctgccacccacctcctcacctttccaggtcatcacagttggggccaccaatgcccaagaccagccggtgaccctggggactttggggaccaactttggccgctgtgtggacctctttgccccaggggaggacatcattggtgcctccagcgactgcagcacctgctttgtgtcacagagtgggacatcacaggctgctgcccacgtggctggtaagtcaccaccccactgcctcggccaccgtgatgctaacagcccctttggcagtcagggtctgtgccgggacctccagtgccaggctctgtgcagggggaccagagatgaagtaggcctgatggtgccttcaaggacactcagtctgatgagggaggcgagtgcacagaggaaacacgaggtcagggctgtattagagggagcccagaggaggcacctgcccagcccgagggtcagagaaggcatcttggaggagggacatttgatcgggagcttgatggatgaataggagttcacctggccgataagacagcaactaccaaggcttagaggtgtgagaggaggctgtcttacctcactgagtaaggactgcaggcggcttaccttcgagaagagagcttagtgtctgtgtgcacgtgtgtttgtgtgtatgtgtgtgcgtgtgtgcactggcaggagtcccctgctggggcaggagggccgggccatcaccatctttcaccattcacccctgcaccaggcattgcagccatgatgctgtctgccgagccggagctcaccctggccgagttgaggcagagactgatccacttctctgccaaagatgtcatcaatgaggcctggttccctgaggaccagcgggtactgacccccaacctggtggccgccctgccccccagcacccatggggcaggtaagcaggatggcagggtgggcaagtccaggctggggcttgggaggtctgtgtgaccttgacagtctctcccttctcccttgtctgtgtaaggaggatgacgccaccttaaataggattaaatgagaatggggctctgaaagggctgtgcaatattttcataacgtgtttttatagagacagttgagtatgttctttaagccctcctctctcctaccatgaactaaagatttctgtggaggtcccctcactcccagcaccccctcctcatcccaggccctttttgcaggttggcagctgttttgcaggactgtatggtcagcacactcggggcctacacggatggccacagccgtcgcccgctgcgccccagatgaggagctgctgagctgctccagtttctccaggagtgggaagcggcggggcgagcgcatggaggtgactgtacccctccttcgtgtgtgtgtgtgtgtgtgtgtgtgtgtgtgtgtgtgtgtgtgtgtgtgtgtcagtgctgggccctcagggacccccagcaagcccctccatcctccagactccagctcttctgtaagcttacagggctggccagaccaggagtggggcactcctcacttcacgcggctgggggctgctggagagagccacagcgggaagggtttcctagaggctgcaggacagtgctggatggattttcaatgctcacctgggtgtgagcgtgcggcagggccgcgtgagggtcagcgatctgctactctggactcagccatctctaggcccctctcactcaggtgctccatggttctgggagctgagaaatctcaaaccagcaaaaaagtggaattgatgttgatgctacaggatagtgcacagatgccatctggttgcagcattttggtggaagggcagtgcccagctaggagagtgaggaggggcaggcatttctggcttgaggagatggggtcttaatgctcgtgtgagaggcagagtgggtggagtggagctggctggatccttgctttggcctcctggatttctctctatctccattttgaaaccactctgtgtttggaagaacttttgagtattcagagctgcccactggcagaacagtcttccttgggcaggagtgagctccttgtccccagaaggctgggtctggctggcccctggcagggacactgatgagggtgcttgagttgatcctgtctagtccctttctgtgttttcaaagcccattctaaagcagattcccatttccgtctttgactctaaggcccaagggggcaagctggtctgccgggcccacaacgcttttgggggtgagggtgtctacgccattgccaggtgctgcctgctaccccaggccaactgcagcgtccacacagctccaccagctgaggccagcatggggacccgtgtccactgccaccaacagggccacgtcctcacaggtaggaggctgggcttgccctggggtgaggaggggtctctttctccttatgcacccactgcccgcgaggcttggtcctcacaagtgtgatccatgagactcaagcctgacttgcagttccatactctggttctgccacttccatgccctttgagcctgggcaggtgaccttacttctcctcatctcagcttcctcctccataagagggaaaaaggtattacctgcctcattgtgttgcaaggagatgggcagcatctagggcactggcctggagtatcgcaggtgctttgcctaaggtggtgcagtccaggagaggcagctccagagagaggcccccggctggggctgaaaggagggcagacctcggtttgaatttcaccctgccgctctatagctgtgtgacttgggcaaattacttaacatctctgtatgaggaaatgatgagtgctaagcacttagcttagtgccgggacaatataaattctagctatcgttactattgttttcatcacccgttgctttaaaatccagcctctggtataggcaactattgacgggctaccctgtgtcgaaaacatgcccaggcaggtagcaggaagtcacagatggggacctcttggggcatcaagggatggtgccctgaggctgagctgttctggttgggtggagcatgagaggtctgggaagacagtgggactccagcctggaataagaggctcagagttgattctcgtctgagcacgtccaggggaaccactgagggtttgggaacaggagagtgagggtgagaacctggttctgggcacagcaggctggcatgtaggatggatgttcaggaaagatgagcatagtcaggtggctggtgcccttgtccaggggagaggctccgtcaggttcaggggtcctggcttggagggaagtccgccatgctctaatcacgctcccctttggaagtgctcagccgatgagctcacaggcacatgtcagtttgaagtcatggaatctgactccatgaagcgcacctcaaagagcaccattttgcagctaagggaactgcaggctggacatgctgagtggctgccccgagcccttgcagctaggacatagagaatgctagtaaccacaaccctaccatgttcagagcacatgccaggctccatgctggggcttcgcacgtgtcatcttcacagtgtccctgtgagtaggtgtggtttctctttccatcttacaaatgagtaaacagagcctcagtgtagctaagtaaccactattttaggtttcttagccaatgggtgtgtctgactcctaagcccatggagggcattctgaggtggttcagacagaccccggcttacccttgaacttctgcctgctggctgcatagggaggggctggggggagtttgagcatctcaggccatagagcccctgcctcactgtctccatctctgggtggaaagatggtgttttccctgagaaactaaggctcagagaggttgaatggctctcccaaggtcacacagctggtcagctgcagagttgagaacacaggagtcctggtgctcaggccagcatctctttttttctttgagttgtttctaggtttcctagctcttgcctcagaccttaaagagagagggtctgatggggatgggcactggagacggagcatcccagcatttcacatctgagctggctttcctctgccccaggctgcagctcccactgggaggtggaggaccttggcacccacaagccgcctgtgctgaggccacgaggtcagcccaaccagtgcgtgggccacagggaggccagcatccacgcttcctgctgccatgccccaggtctggaatgcaaagtcaaggagcatggaatcccggcccctcaggagcaggtgaagaggcccgtgaggccgggtgggtggggtgctgcgtgtctctcctgcacagcttttctgtgtcagtttgtgccaccaccataccgccatgcatcagggtggcggtttgccaggtagatgctgtgggcagcttccgccattgtgtggacagcatgtatatgtgtctctgtgtggctgggtctgtttttgcttttgtccagatcagtaaggtttgctacctgggtaccccactccacttggagtagaatgtgcataaatatggcataaagaaatgcaatatgcatgcatttattgattgatctatttttttctgagatggggtcttgctgtgttgcccaggctggtctcaaattcctgggctcaagcaatcctctggtctcagcctccccaagtgttgggattataggcatgagccgctgcacctggcctctctgatctatttaacaaacctgctgggagggtctcagggtcaggagcagcactgggctctgaggacacagagctcactcagccgtgacccagagggggtgcctgagctgcatgctgaaggttgttagcatgaccagcaaggcaagaaaaggccctgccgagattagcaaggcatgtgccaagccctggaatgtgacagccgggccttctagaaacctgagtgtataactctccttaaaagccagtaggagctcctcaaaaggcagccctaaggagtccactcttaaatgaactcagagtcagttttaaaatgcaagtctgtgttgattctggtctggatggtgcattcctcgagagcaaaagacagtcttggtcttggatccacttgccctgggtacactgagggctgctaggttccaggtgctcttcctggcactggggagggatacaggcccaagagacatgctgttctccctcctggagcatctattttagtggaggaagacagaaaacaaaccattaatatagagtactgaaaagatgcgatggagaaaactatagcaaggaagggaatggggtgggagagaggtcaggagaggtctcgctgacaaggtggacgaaacaggccatgaggcagagaacatgttccaggcaaagcaaaggcccccaggtggggatgtgcagggagtaccaggaaaccagagaggtgggaatagttatgagatggggggtgcctcagaggggacagggccaagtcaggtgagacctgagggtcacagtcagcagtgagctggggccatgcaggggtctggcctcagaggagtgtggtctggcctggatctgaacctctcactgtggcctagctgctgagctgagaagagatgacaaggaccttgggcagaagcagggagactggagggaggcggtggagggtccaggcgttggggcggggctcaggctggagtctgaagggagcctgcaggcctggtgggtggatgtgggtgggagagggggaggatggcaccaaggctcgggcccctggacagatggagttgccattaagtgggatggggcaggctatggggccatcagtttcagagggatgagtttggcactggcatggtaggcatctgtctatctccacggccctcaaaccaggcatgaagcaggagctcacgtgtttggtcagccatggtgcagaaccgcctgggtgggaggtgcggggtgggagatacacggttgtgtcccaaatgggctctgagccagcgagggccgtctgcactttggcctcacagaaggatgtcggagggagaaatgaagtgtgggtgggggtcccgggccacgctagacatgtgctttcttttcctcgggctctggcaggtgaccgtggcctgcgaggagggctggaccctgactggctgcagtgccctccctgggacctcccacgtcctgggggcctacgccgtagacaacacgtgtgtagtcaggagccgggacgtcagcactacaggcagcaccagcgaaggggccgtgacagccgttgccatctgctgccggagccggcacctggcgcaggcctcccaggagctccagtgacagccccatcccaggatgggtgtctggggagggtcaagggctggggctgagctttaaaatggttccgacttgtccctctctcagccctccatggcctggcacgaggggatggggatgcttccgcctttccggggctgctggcctggcccttgagtggggcagcctccttgcctggaactcactcactctgggtgcctcctccccaggtggaggtgccaggaagctccctccctcactgtggggcatttcaccattcaaacaggtcgagctgtgctcgggtgctgccagctgctcccaatgtgccgatgtccgtgggcagaatgacttttattgagctcttgttccgtgccaggcattcaatcctcaggtctccaccaaggaggcaggattcttcccatggataggggagggggcggtaggggctgcagggacaaacatcgttggggggtgagtgtgaaaggtgctgatggccctcatctccagctaactgtggagaagcccctgggggctccctgattaatggaggcttagctttctggatggcatctagccagaggctggagacaggtgcgcccctggtggtcacaggctgtgccttggtttcctgagccacctttactctgctctatgccaggctgtgctagcaacacccaaaggtggcctgcggggagccatcacctaggactgactcggcagtgtgcagtggtgcatgcactgtctcagccaacccgctccactacccggcagggtacacattcgcacccctacttcacagaggaagaaacctggaaccagagggggcgtgcctgccaagctcacacagcaggaactgagccagaaacgcagattgggctggctctgaagccaagcctcttcttacttcacccggctgggctcctcatttttacgggtaacagtgaggctgggaaggggaacacagaccaggaagctcggtgagtgatggcagaacgatgcctgcaggcatggaactttttccgttatcacccaggcctgattcactggcctggcggagatgcttctaaggcatggtcgggggagagggccaacaactgtccctccttgagcaccagccccacccaagcaagcagacatttatcttttgggtctgtcctctctgttgcctttttacagccaacttttctagacctgttttgcttttgtaacttgaagatatttattctgggttttgtagcatttttattaatatggtgactttttaaaataaaaacaaacaaacgttgtcctaa

SEQ ID NO: 5304 - DNA, 35305 bp, Homo sapiens
tctcttataattccatttggggtctgtaccttaaatcttatgttgtttatgcagagacaaacattatatatacaaatgtaaccactttattgaaatgggatcataacatgctgtttaaaagttattgatgttggacatctttccatgtcaatatataaacctccatttatttctttttaccagctgccaaatatcccaccatatgaacagactaaaatctgtccctccattgatgaatgtttggattgctgaacccctggaagaaattcaataagagcaaacagaagtgtaatatatgacaccctggcagatcaaagtgagagttttattagaggagacagtaaagctggtggagcggggagagctaagtgaatcaacatgttgcagtcggagccaggactcataccaccccaagaggcaggaggcagcgcagccagaagggcactgaggagccatggccacagctccctgtggctcccagcagcgggaccagatgcaaacttcccaccccaccacatgtctgggcttcctataccctgttcagtctttactgagtcagaagctgttttaagagctgagcacacccattttacagcagagcttcttacggaaaagcgtgctgctgtcctggaccctttgtccatcctgggccattgggccagctccagcctcatccttgaatggtgggtgtacatcgctggggtccttgctagattatattagggcctccacacactttagttgctctccgtttgcacaatgatttctatatcattagtacctctttgtccacttgcctaattatttccttaggataaattcctaagaaatcaaatagctaggtcagtatatagcacattttcacagtttgctactgactagagatattaaaggtacaaaaacagccagaattagatgtagagtcgcaagggagttttgttactaagacgtcatttctaatcagggagaaaaaatgagttacggaataaacggtattggaacaataggctagccttctggagaaaaataacctcactccttatacaaaagtaaatcccagtggaagccaagatattaaaaaaagatttaaaaaaggaggacaatttttatatgatcttgataaggaggaggcctttctaagcacagtacaaaatcaagaagtcatgaaataaaaggctgataagtttgactccatgaaaattaaaattttctatggaaaaaaatacaataaagtcaaaaatcaatcaacaaactggaaaatagatttgcaacatacataagagacagcaggctaattttggtattatacataaaaagctattacaaatcatcaaacaaaagctccacagccaaaatgaaaaaatgaagagacagttcaaagacaaacaaatgtagataattgtttaacttaaggaaaggtcaaaatatttggcaactctgtgttggcctgggtgtgaccatgagcggtagttgccagtggtattcacaaatataccctttctcctccttctgggcacttggtgtgattgcagtttcctacatttgaccttaggtgtggtcatgtgtctcgcttaggagaaggaaatgtgaacggaagtgttgtgggtcacttttgtgtggaagctgcatggagtcacctctttgctttccgtcagcctcagtgttcagcaatgttctgaatgatggttgctttatcagtctggttctggggtgagggtaatgaagtagtgaagcaaagtccttgatggacatgtgaggtgagacagaaataaacctttgacatttcaagcccctgagatttggggcgtgcatgtgctggaagcagaacctagcctattctgatggattcctccagcactgctcgtgggaagacatcatcaatatagagcattcatgtgccctttatctcgaaattccacttccaggaatttatgaaacagatactctcacatgtgcaaacagctatggataaggacagacatggcaacttggattgcaatagcaaaagacagaaacaaccaacggaaacaccaaccaataggaaattggctaaagacattgtgaaacatacatagaatgaaataatctgcaaccagaaaaataaggcagtagatgtatgtgtaccagtgtggtttttattccgagattagggctaggttaagacgtcagattaagttgtccctctccaccccaccaatataaataaaaagttaaaagtaaatcataaactatttttacaattttaaaaagtgggttaaagagcccatccaagtagttttataaaagtagactatctccgaaaagatacccaataaataggtatattactttcctggggctgttataacaagtttctacaaatttgctggcttcaaataacaaaaacgtattctcttgcagttatggaagccagaagtatggaatgaagggttgcagggtggtgccctctcccaaagctctaggggaggaacattccttgcttcttccagctcctttgggggctcctggcattccttggcttatgtcggcacagctctaatcggcgcctccattgttacataggtgtttctgtgtctcaagtatctctcccctttctcttctgatatcagtcattggatttagggaccatcctaaacccaggataatctcctcatgagatccttaggtcaattacatctgcaaagatctcatttccaaataaggtcacattcaaaagtaccaggggttagtcttagacttatctttttgggggacacgattcaacccactaccgtgggtaacagtggttttccctcagaaggtggtggttcaggagtgggaggaagatgaacttttcactgtatatcctttcaaactattcacgttttaaaaaaaacattttcatgtaaatttaaaaaaattgaacattcacacaaaaagatgccccctcccttgcaaaaaagagtatgcccgttcaaaatgttgaaatgtacactcacagcaatggtggctgcagactccaagtttctgaggttggagaaggtagccagggagcataaaagtgagttctatctactcattcagtctatgaggggaaggcaatggctagaaaagcattttgagggacagtaaaagtggcatttttagagggaggaagccttgaggatgcttgtggggtgaagggaaagaataactcaggaagaggcatttagggataagaggaggagaggagatagtggaggtaggtgatccctgcggaggccagattggggcaggggagtgtcagctgagtataagaggatggtcccctctgccctgaaggaggaaggcaggaggggaaaaggatgggtgttgacccagaaagcacttgtggtggaggggaggccccagaagaggcttctgacttaccctgattgctggtacctctcaggggagctggctgcttatttgctggccagggtgtgggggaacccatttgagaagagggagaaggtgacacaattcctttgggcaacttatgggaggggtaattggtgagggatgaaagccctgccaagtggcaggaggcccagctggggctgcccctcataagagtgcagtggaggatatgggatgagaagtgactgcccctctggttccatctgtcgcagagcccagggtgcttccttcctcccccacctccctcagaacacacccactgcatgctggacagcagcccccttcctgggcctggggacatccatgtccctctgtgcacaggcttcatcattctctgggtgcacggtaacgaccccggtaggtgagaggccaaggtcccaaaggggagcagcagggaaagttagctcccatctattcttgctccaggggaggcctttgatgaggaagctgccaaaagcacattgcaaatacaattccaattacaggcaacaggaaggagaaccacctctgccacctctgtcagcaaaccatgagctcctactctgtgctgcgatggcgggctcgatggggataactctgaccttacctcatggagtcactgtcaacccactggttgcactgtctttgtgcactggctctctggagtgaggtctttgcaaacaaagtggaaagagcatcaactttggactccagcacctagattcagagcaggccatttcactcggaatctgctgtgcatctgcaagggaggatcataaattcgcctttgtttcttcccagtatcgacagcccttccagaaagagcaagcctcatgtcatgccacatgtacaatctgaggccaggagctctctttccccttttcatcctcctgcctggtacacaataggtgtttactggatgcttgtccagttgatttcttgaacatggtgtgtaaaaggaatctttgcaaattgaatcttctggaaagctgagcttgtgcctaccatagaattctgaatgtacctatatgacgtctttgcaaacttaaaacctgaatctttgtagtataaatcccttgaaatgcatgtaggctggacatcaaaagcaagcaatctcttcaaggagcagctagttggtaaggtcagtgtgcagggtgcataaagggcagaggccggagggggtccaggctaagtttagaaggctgccaggttaaggccagtggaaagaattcggtgggcagcgaggagtccacagtaggattgattcagaagtctcactggtcagcaggagacaaggtggacccaggaaacactgaaaaggtgggcccggcagaacttggagtctggcatcccacgcagggtgagaggcgggagaggaggagcccctagggcgccggcctgccttccagcccagttaggatttgggagttttttcttccctctgcgcgtaatctgacgctgtttggggagggcgaggccgaaacctgatcctccagtccgggggttccgttaatgtttaatcagataggatcgtccgatggggctctggtggcgtgatctgcgcgccccaggcgtcaagcacccacaccctagaaggtttccgcagcgacgtcgaggcgctcatggttgcaggcgggcgccgccgttcagttcagggtctgagcctggaggagtgagccaggcagtgagactggctcgggcgggccgggacgcgtcgttgcagcagcggctcccagctcccagccaggattccgcgcgccccttcacgcgccctgctcctgaacttcagctcctgcacagtcctccccaccgcaaggctcaaggcgccgccggcgtggaccgcgcacggcctctaggtctcctcgccaggacagcaacctctcccctggccctcatgggcaccgtcagctccaggcggtcctggtggccgctgccactgctgctgctgctgctgctgctcctgggtcccgcgggcgcccgtgcgcaggaggacgaggacggcgactacgaggagctggtgctagccttgcgttccgaggaggacggcctggccgaagcacccgagcacggaaccacagccaccttccaccgctgcgccaaggtgcgggtgtagggatgggaggccggggcgaacccgcagccgggacggtgcggtgctgtttcctctcgggcctcagtttccccccatgtaagagaggaagtggagtgcaggtcgccgagggctcttcgcttggcacgatcttggggactgcaggcaaggcggcgggggaggacgggtagtggggagcacggtggagagcggggacggccggctctttggggacttgctggggcgtgcggctgcgctattcagtgggaaggttcgcggggttgggagacccggaggccgaggaagggcgagcagagcactgccaggatatcctgcccagatttcccagtttctgcctcgccgcggcacaggtgggtgaaggagtgaatgcctggaacgtactgggaactgcaccaggcacagagaaagcgggcttgccattatagtgggttccgatttggtttggaaaacatgggcagcggagggtggagggcctggagagaaggccctacccgagacaggggcggggtgggaaggacggcagatgctgggagcacgaggcaatttctttatgacacagaactcatgctctagtattccatctgtttcagccgaagaaaagaaccagctgaaggggcaggggagaaggggcggaggtattctcgaggcccattggcgtcctttaggactcaggcagggaagggcccttggtgctctggagccggaggtggtgcgcctggtactgggaccccggagctgagcccggcgcctcagcccacctggctgtctgccgaccgtgtgcggggcgagtttgctcaacaactctgccagcttctggccctcaggctgtgggaagcttcttcccggggcgagaccactagctttttctaagtattaccagcccaggacttggctgaggttctgtgtcccccagcttggagtcagatgtggggttgaatcttggcttcctctcactagctgtggtgcttgacaagtcacttatccttgagcctccattgcctaatctttaaaagggaggtgacaatcgtccctacggctcagtggcagcagatggggagatgaagggaaagttctgttgaccatgagtgaacttacaatgcaagccccggggggatcacttgcagttttgtccctgtctgcagtgtgacctgttggtgacattgtctttgctccaaaccacagctcctggggcagaggggaaaattctgccactcacagctgcctgcccacgcttctgtctgagtgtgctgggtggcaggatggcaagtccttactcagctcagtatagccctcttccttgttccctgagcctttgactttctcgagggatgttgtggggttgtggccaggataagaaagggcatttcaagttaccactgctccaaaacaactgttctggaaatagtgagtaccccatcctgagaggtgagtaagcagaggctgtatgaccacctgaaccaagcccttgaggatgtttcttctctggtggaagtttggaacaggagcctcctcaagttcatttattcattcattcaatggttattttgtgggaatcgaatttagaatgaaaatattttttggcaagcagaaaataatttttagaccaatccttttcttttagtcatgagaaactgaggcccagagagaggaggtcaccccaggtgcattagaactgggtttccagaactgacactccactgcacagagtactctcccaattcattcaatttttatttagcggaaggcattttcagatgggtctttgaagcattagtaggagttcagcgatgatggtgtcatgagaattttattctaggattaggaggtaccatgaacaaagatacagagctgggaaaaccagaggtggaagataaggagcacatgtccacagttctttttcttttttttttgagatggagtttcgctcttgttgcccaggctggagtgcaatggtgcagtctcagctcactgcaacatctgtctcccgggttcaagtggttctcctgcctcagcctcccaagaagctgggattacaggtacctgccaccacgcccggctaatttttgtatttttagtagagaaggggtttcaccacgttggccaggctagtcgcaaactcctgacctcctcagtggatccgaggaggtgatcctcccgcctcagcctcccaaagtgctcgaattacaggtgtgagccaccacgcctggcctccacagttctttatccaccgtctgaaatgtaaaatgttacgaaaaccaaaagttttttttgtgatttatttgatggtagcacctgacgtgaactgacatgagattatttttaatttagttgtgtgaatatgcatattcatatattttgctgcatagattacagtatgcagctccagattcttccaagcagactctgattgcccattactgcctttctaaaatccaaacaagttctgaggttcaaaaccgttttggccctaaggctttgggtaaagggggtggactctgttctactctgactggagtccaagatgcatatatacagagatatgggtgatggggctgcaaggtaggttgaggtaggggccaaggaggagcatggagtttggacttgattcatgaggctgtggggagccagtgaaggttcttaagcaggtatgtctgcctgagagcagttggagcagacaagagctaaaaaccaaacaaatcaccatagatagtggctgctataatttgtttgtcccctccaaatctcatgtggaaatttggtcctcagtgttggaagtggggcctaatgggaggtgtttgggtcatgggggaggaacccctgtgaaaggcttggtgccgtccttgtgataatgagtaagttctcccgctatgatttcccttgaaggctgattattaaaaagagcttggcacctccctctcttctctcttgcttcttctcttgccatgtgattgatctctgcacatgtaggctccccttcaccttctgccatcagtgaaagcagcttaaggccctcaccagaagcagatgctggtgccatgcttcctggagagcttgcagaatcatgagctgaataaatcccttttccttgtaaattactcaccttcaggtattcctttatatagcaacacaaaaggactaagacagtggccttgacttttctctctctttaagaagtgttgcctttgctcacttagtcatcccttctgcctgcatttgtagagcatctggatgggagatttatataaccgtcactcttgactttcccagcaggcctatgtcataggtactgtggtctctacaatacagcagaggtatctgaggctccgagaggttgagtgacttgctcatggctgcacaaccagtaaatattggagctggaattcaggtccacggtttcctggctccaaagcccatgattttttccctcaatttattctgactggggcatgggggagggggtggcctttgggcagggccaccaggagcgaccaggcccgtagagagctgggtgcaggtacagaggaaaacctgttgtcgagtgtggcccgtagttcccatttttgcctgaatggcacatttgaaagtgttatataaccatgtgaataataatagttggcctatatgagttctttaatttgctttttggtccgcatttggtaacttctttatcatctactatactctgttgtgtctcttttgttgtaatttgtaagtaggggtgagataaagtacacctagggtttgctgggtttcttccatgtcatcatgttcctccttgcatggggccaggatccgtggaggttgcctggcacctacgtggtggtgctgaaggaggagacccacctctcgcagtcagagcgcactgcccgccgcctgcaggcccaggctgcccgccggggatacctcaccaagatcctgcatgtcttccatggccttcttcctggcttcctggtgaagatgagtggcgacctgctggagctggtgagccaccctttttgggaatggcacttcctgatagggctgggccactgcatatacactggggactgtgcttagtaggcccattgctgaaaatcagaaggggacagcaagtatgtattgagcacttatcgggtaccaagcacagtaactactggctttctgtatagaattccctttaagcctggccatgccccagtggtacgtctatcttcatttgaaagacgaggagactgaagttcagaggggaccacacagacagctaggggtagagcctggatcaaacccattggtctgcctgccagccattcttgtgccaatgcatctgctgcctacggaaacctgtagggacaaggccctgggatgttcagtggagcctgagtcattttataaaaaagcatgactctagggtccaaaattcctttgaagctgttgctatccagagtgaagtcccttctttaggacagggtggccctcctccctcctggatgtcacatcttcggtggaggggcagaaaggggactgggtattctcctcaccctggccctagtgcttcaaatcttaaaaaaacgtttttatttgtgcttctgcaccaccttctagcccacctcgtttcctggcctctaacttgatgagagcgtgtgtcattttcacactgattctccacatggcaggcggtgcttcttagcctcctgcagacagtgaggccccacggtcttgtccaaggtcacacagcgtgtaatgggcagggtcagagtctggagtctggacctgggtctcctagctgcactgcactgctgccccatgggttaatcagctcagcataccgtggctgaacagctacctcataccaaggcctgtggcgccatgacagggattgacagggtccctgccttggaaacccgtagtctaagtagaggagactgacaagtcaatgccttccatcagtctgctcaacacacgtttaccaagtgcctactgtgtgctgcagaggcgaagatgacacagctcaggcctttcccttgagcttacagttcaggaggagagactgaccagtgactgccagtacagttgactatgggacaatgtgctcagccttggggagagacgaagaaggtacccgtatagcaccagatgacaggcacgagccccacaggccagggcagctgctcagaggagagtaggccaagcagaaggcaaacagaaggctgcaggcatttgccatcgagagctggacttcaaactgggcatcataccagcctgggttcgagtcctgcccagccccttattggctgtctaaccctgagcaaatcccttcacctctctgagcctcattcctctatctgtaaaccagttataataattggaacattcatttaaggactaaatgaggtcgtgaagcattcagcagatgctaggtacggaaactcgctgaagtgggggcaggttaagaagcctctggggatacgaaggcatccagggactagttgtggcaggaggctgttaccacttaggtctgaagggtaaggagagggaatagctttccctctgcccagttggagccggtggcatggaggagaggctgcctgtggggaatcacccgagggttcaccgctgccatgcgcagggagtcaggaggtagggagggagtggggcagatgcacaccatttttttttttttttgagactctgttgcccagactggagtgcagtggtgccatatctgcacctctgcctcccgggttcaagctcactgcaacctctgcctcccgggttcaagcgattctcctgcctcagcctcccgagtagctgggactacaggtgtgtgccaccatgcctggctaatttttgtatttttaatagagatggggtttcaccatgttggccaggctggtctcgaactctcgacctcaggtgatcccccacctcggcctcccaaagtgctgggattacaggcgtgagtcaccgctcccagctgctgatgcactcttgtccttctaactcctgctagtgcctcccattggctgagcccaactggaagctttgcaagggagctggtgctgcagtttgcactgagcaggctggagaaggctggagaatagactaggggacaaaccgaattgccagtgctgttatgtcatgatttaggcatggagtccagggcctgagcttcactccatgtccatcctgcccagagccttggcacagcctggctcccagacaagatgtcaagttcagaatccttcctaaaaggaatcctctatgccagaccgtgttgcagggatatgggagtgctgggctcccagcctgatcaaggagcgagaaaactcaggctcctagtctgtcctccggggcactagcagggacaaggtgggaggctgctgggctgggatgtggggacaggtttgatcaggtaaggccaggctgtggctgtgtttgctgctgtccaaatggcttaagcagagtcccccggcctctctggcttctgcaggccttgaagttgccccatgtcgactacatcgaggaggactcctctgtctttgcccagagcatcccgtggaacctggagcggattacccctccacggtaccgggcggatgaataccagccccccggtaagacccccatctgtgccctgccccaccccatctgagctgaatccatttgctctgccctggcctggcctccctgctggtggtttccacttctcggggggctttgggactcagcacctccactgacccctttttttctgtcccatccccatcccctgcagcccccactgcctgccttcctgttgccccacaaatgcaaaagtcttgccttaaatgatcctcttttccttcttttctcttgttttccttttctcaccatttggaatggcccagcaggctgcacttaccttggaaggagggttcatctgatggtgactctacctagggcccccaggcctctataactcccagtgccctgcagactggaccagatcctttaatgggatagacacaaccctgtctgggatgcctctgcctaccttcctgttttgctgctccacctgcctccagctccgtttggcttcctggggctccctgcctgggccactttgtgtcttccctctaggcctttctttccactgttccctctgcctggtgtggcctggctatggaagggagggaggaggagcggccatggaaaacggtctgcattctagcagggacttgcaggtggcaattcagtcggggaagactctagatgcacctggcctgaggagagaatgaagggttctagttggactgtgttaagtttgaggtgcccatggtgtgaggtctggagctcagcgcagagatgatgcaatgtggtgggtccatgcaacatggtgccaggacgcagagcttggggtgaactcagctttcaccccttaccggttctcgtgggatcttgggaagccactttcttctatgagctttgtcgttcttgtctgtaaaatgggcacataaccctgtccctgtccttctcacaggttgctgtgagactccaatgagttgaaggatgtgcagatgcttttggaagtgaaaagttggggggctactgtgtgactttgcatacacccaaactgtgtgaccttgcatatgtctgagttgctgccattgcaacagatcagagctggtgggctgggtgtggagaaagggtttgtgtgggggacatcctctggcaagggtggcagcagcagaagtgaggggcctggtcggtcatgtgtgctgacccggcctgggcagcctgtggccagggagaggacagctcctctgtaggaagagcctgttcctttccaaccaggtgagacctcttcagtggagccctggagccccctgtactccacatcagtgcctcagggacctcccggagcaggctaatatcagagaccaagagggacactggcagaggatcacagagaccccagtccaggcagggactgagaagatcttgccccctaagttagtttcctagcactgctgtgacaaattaccaccccctcggttggaacaagttgattctctgcagtcctggaggccagaagcctgaatcagtgtcggcaggaccactttctcccggggggctccagggagaagcttctcttgcctcttccgtgtcccaacagcggcagcacaccaatcccagcctctgtcttcacacagccttctctgtgtctctctcctcttcattgtctcataaggacacttgtcattggatttagggcccactggatcctccaggatgatctcatgtggggaaccttaaccacatctgcaaggaccctttttccaaataaggtcacagccacaggttgtgggggttaggatgtgagtgtatctctttggcagccactgttccctcctctcccttgggccagaagcagacgtggggccctttcttccccataggatgcccatggattgccccccttcccgcttcccccgagtgtctgtgggaggtggcaggaatggcaggcaggggtgtggaaccccttctggagtcatatcaagggcttggctggaggaagtcctcctggagctgttgggctggcatggggcaggctggctgggcccagcagcagcttcttcattcatggggaggccacaagcatgggccctagagctggctgccgccctcaaacccagaccctgcactcttaactgtgtgaccttgcatacgtcactcaccctctctgatcttcaggttcctctgcaaaagggaggtaatgataaccctcactctggggggctgtttggagggttaaatcagttattgctgtagcatgcatttctctgtcaggtattgagtgaggtgctgtgattttagccctgcatttttcttttcttaccattcaataataacgttttgagcacccactgtgcgccaggcaccatattaggtgctggggatacaaatgtgaatgaaatgaatgtggtctcttcccccaacagtgtatccagaagattaatccattccttaaacaaatgctacttgacacagattagttctggataggctgagagctctgaaggagtgcaggcagctgcgagcctgtgtatccagcagaaggatcaggaaaggattcctggaggaagcgctgttctagccaagacctacgggggcattattaaccaggcaaaggggacggtgtccaagcagtggaatgaacgtggattgaagctgtgaggcaggagggagtgtggcctgtgcagaagggaccgaggctggtgagaccaggagggcctgggtggcctccaggtcagatgtgaaaggaagaacttggccacagtctgagcttctcaggcgtatggcagggctgcctggtgagagggaatgagctccctgctctggaggtatgcaagcaggactgggctctcacctgccagaggccacagagctttccagaggctggaagaggccactccaaggcctctttgcccctgagagtggtggctcttcttgaggccaccttgccacgctgtcacagggaactagcagcccctgcctcacccgggggtttggaagatagagggaggcctaggaagggccctgtgtctcatccgagctgggcccctttccagcctctcactggaaggaagcccaaggatgttcctgtgggggcttttaccaggcccacctgccctctgctggccatgcttgcagcctcctgaccctgtcccagcaggacagtgggctggtgtgagcgggcaggaaccgcctgcacttagaaggtgtggggctgcctccccgagcttccatctgccgctggggccacaccccaggcccagggatgggaccccacagtggtcacatcatcttgcagcagaacccaggtacagctcctggagcagatggtggtcccaagcacgggtgggaccagaaaggactctcacctgggctaactcagctgcagcctcagttccctcctcacacacgacgaggaacatggactggaagcctgcccagcaggccttctgctcgatgtgcgttgtgtggcttacgtccagggagggaagcagcctctgtgctgtcttctagataagcctgtattccccgggctgtctgccaatgtatccagttgtcccgtcagcctggaagctctgagggaaaaccttgggctgcttcctgagcacctgtatcccctgcagccagcccggggcctctgctaggagcagactgagcatggcttatgggcctggcaccatctggcctctgcccaccttgctggccttgtcttgtgtctgccccttcgacattccatagcccagctcaatatctagtggttcctctagggtggcgagcactgtttggtctccagatgtcttcaggtcggagctcacagcgctctcagccaccccttcccagtgtagcaccgggcacatggtagatgcctattgatgagtgaaagctcctaacacactcagagagcaaggactccgcctcatcccacagcctgggaggagaggcagactgccaaggacctgctcagcatgctacagaagaaaccaaagtgcccacgggactgatcagtggagcttcctgccgagactggaggccttagggcagggtagacagtgtgtgtgcaggctggggactcacagttcggactgtgcccagacctactagcatagtgggtgggtgggaggatgcgggactgggggccgaccttgcctgaaattcatgtgggatctcagagcagccactgaattgctctgtagggggctaaatagtggcccccacagatacacacacccagacagagcctgtgagccagaccttatttggagaaaaggtctttgtagatgtaattaagcatctcaagatggcatcatctggattatgcggtgggctgtaagtcctgtgatgtgtctttatgagagaaaggcagagggagatttgacacacacaggaggggccacgtggagacagaggtggagattggagaaatgtggccacaagccagggaacaccagcagccaccagaagccggaagacgtgaggcagggttcttcccagagccttcgctgctgagtctgggaatttgtgaccgaagccataagaagtgggtacacgccctgagcctcccacacttgctcacctgtcctgagatgagaatctctactctgcagcatatttggaggatcactgcgggggccacagaggtgctgttcagatggcacttcagaagactcaggagaccctggggcaggagcagtttgactgacagcccagagggctgccctctgattccacctgaggccctgcttttcctggctgcaggggttccagggccaggccatttccgctggcgcaggactctgctagcagcaacctgcctgaagtcttcctttggcctggctgagagtttctgagacctgcgctggagcggaggtgcttccttccttgcttcctttcttcctctctcccttctccatccagcaggctggacctgcctggcatctgtgagctctccctactttctcctataccctaacctttgtcctgcatgggcgactcccccagtgagtctcttgcagcttttaccccagtgcctgcttcttggagaatccaaactgatccagttagggatgataaagtgtagggtaggcgctcggtgactgttttctctgaggttgtgactcgtgtgaggcagaagcagtccccgtgagccctcctggtatcttgtggagtggagaacgcttggacctggagccaggaggcccagacatacatcctgtccgagctgcagcttcctgtctctaaaatgagccggccagcgcaggtggccagacatcactgttattctcctttgagtctttaaatcttgttgtctttcttgcagactcggtgagctgtgaaaggctataataggggctttattttacactttgatactattttttgaacattcatattattgttagatattgatattcatatgaaggagcaggatgacttgggtccttcttggcagtagcattgccagctgatggccttggacagttacctgccctctctaggcctccctttccttgtctatgaaatacattatagaataggatgtagtgtgtgaggattttttggaggttaaacgagtgaatatatttaaggcgctttcaccagtgcctgggatgtgctctgtagtttctgtgtgttaactataaggttgactttatgctcattccctcctctcccacaaatgtcgccttggaaagacggaggcagcctggtggaggtgtatctcctagacaccagcatacagagtgaccaccgggaaatcgagggcagggtcatggtcaccgacttcgagaatgtgcccgaggaggacgggacccgcttccacagacaggtaagcacggccgtctgatgggagggctgcctctgcccatatccccatcctggaggtgggtggggactgccaccccagagcgttgcagctgtactcctgggttgcaccccccccagctgtcactgtcccctccctgccatcagttgtgggaagggcgttcatccatccagccacctgctgatttgttatagggtggagggggggtctttctcatgtggtccttgtgttcgtcgagcaggccagcaagtgtgacagtcatggcacccacctggcaggggtggtcagcggccgggatgccggcgtggccaagggtgccagcatgcgcagcctgcgcgtgctcaactgccaagggaagggcacggttagcggcaccctcataggtaagtgatggccccagacgctggtctctctccatctggacctggcctgggaggtggcttgggctgggcccagggagagctaatgtctcctaaccaagaatgctgtggcagcctctgccgcagagccagagaaccagagtgccaaggctggcagggttcccagtggccacgagtgcagatgaagaaacccaggccccaagagggtcatgcaggtagcccagggagttcagccttgaccctgggtcaatgacctttccacagttccacactgctccccttttaaaatccggtgatgtctttatgtcttttgttatgttatcttcaatgtggagggactcgaggtgatctaagcaaactttttctatcttctgcttgcatacctctgagaccaggggactcactcacttgcatgactgggccctgcaggtcacactggccaggcagatgtggtggaggaactggcagaggactttttctagactgtgactacatttagtccacccagcggcccccctatgaagtccagttgagaactaggactctgggggccggtggacagagaagagggagggttctctcccttactgacttccttctgtggccagacattgagcaaggcctctgtacagcatgtcctggggctggccttgccgtagctgctaaatagttgacgaaaccagtccagagaggggaggtgactgccagggtcgcacagctcaagctggggaactcgctgggaaaactgtcagctctgggcagcagcttgacttccactgtaagccccagcccccagggtcaaacactggctctggtgctggcagaggcagcccactagcctgtttcaaaggctgagaaggcccaggagtctgccctgtgctccaccagttctgccctgagactttcctacagagtacaggttttgatgttcagttttaaaggcaagaatcaataaccttctgccccatcaggtgaccccttgtgcctgtcccacccctttattgactgacctcggctcagtcaggtcagttcctgaaggtcagtgtgtggaggggaggctgttctttcccagaaaggccttccccaggcctggtgctctggcctctggaggacttcctggagaagtcccttctttggggtcccagtcagtgtatgggaagcccttattgcatgacctggcacggggcaggggctcaacagtcactattgccttccttgccactgccatttcctcctctgtaagcaggtgattgtgtgtccagtctgagcacagagataagcacacagcaggtgcttaataactagcagctgtaggctgggcgcggtggctcatgcctgtaatcccagcactttgggaggccgaggtgggcagatcacctgaggtcaggagttcgagaccagcctgttcaacatggtgaaaccccgtctctactaaaaatacaaaaattagccaggcatggtggtgggtgtctgtatcccagctacttgggaggctaaggcaggagaatcgcttgaacccaggaggtggaggttgcagtgagctgagatcgtgccactgcaatccagcctgagtgatagagcgagattccatctcaaaaataaataagtaaataactagcagctgtaaatgtggctgttgttcttcacctccacactcagtgccactccactccctccctccgtggtgtgaggggcctcactagctgtctcctaggaggagcatggctgtgagattccagctccatccttggccacggctcctggagacatcttagaggccaggatccagaaggctcccacacctcatttgacaggggagaagctgtcagttccaggtccccttgcacatcagggccagagctgcgttaggcctccagtctccaggccactgggccagagctcacaggctggcagagggttagaactgttactggtggctgggtgcagtggctcacgcctgtaatcttagcactttgggagggcaaggcgggaggatcatgaggtcaggacatcgagaccatccttgctaacacggtgaagccccgtctctactaaaactacaaaaaattagccgggcgtggtggcaggcgcctgtagtcccagctactcaggaggctgaggcaggagaatggcgtgaacccgggaggcggagcttgcagtgagccgagattgcgccactgcactccagcctgggcaatagagcgagactccgtctggaaagaaaaaaaaaaaaaagagctgttactgttgacagtagcatgaggtagaccatggcctgcaccaaaatgggggagtggagtgccactgaggccagaaggaaccacaccctcaagggtggggagttatggtatggggggtcctaggcatggagtcttttaattctttagacaatcctgggagcaactgtccctgtttcacagagggcggggccacacagctggtgagtgggcagccaagactctgttcaagtttgtgtgggtccaacacttgcggccacggtggaggggcatctgagccaggcctcagagagtggcgggggaagttgggtggggaagtgtgcccttctcattcctctgaggctcatcctcttggtgcctctctttcatggaaagggataataaggttattgtgaggatcccctgagttcgtatattcagacgcttagacagagccaggcacagagaagggcccggggttggctagtttgattgctggtgtaattgctaatatcttccagtttgtattggtcaaggttctgcagagaagcagaaccagtaggatgtatatattaagagtttcaagctcatgtgaccgtgcgggctggcaagtctgaaatccgcagggcaggccaggcaggctggcaattcctgcagaatttgatgttgcaatactgagtcctaaggcagtcctggggcagaattccttcttccctgggaggcctcagtctgttctcttaaggccttcaactgattaaatgaggcctgcccaagttatagagagtaacctgccttactccgtcttctgatttaaatgttagtcacatctaaaaaatattttcgcagcagcatttccactggcttttgaccaaacatcaggccacaaagttgatccccaaaattaaccatcactctgtgcctgtaagggaggggctgggaaaggggagcaggtctccccaaggggtgaccttggctttgttcctcccaggcctggagtttattcggaaaagccagctggtccagcctgtggggccactggtggtgctgctgcccctggcgggtgggtacagccgcgtcctcaacgccgcctgccagcgcctggcgagggctggggtcgtgctggtcaccgctgccggcaacttccgggacgatgcctgcctctactccccagcctcagctcccgaggtaggtgctggggctgctgccccaaggcgcgggtagggggcggagggcggagggcggagggagggcgggcgggcaggcgggcttcttgtggcacgtgggcttcttgtggcacgttcctggaggccgaacccttctggctttggaaggagtcgtcagagacccccgccatgcgggaggctggggaggaaggggctcgaaacctccatcatcgcagagtctgaatagcagtggccccgccatgcgcccacgtagcggcgcctacgtagccacgcccccacaccccgtcctggccactctccctcctgaaggtcttctggtacccgccccctccccatctccatccccaggccctgcgtcctctgcccaatactctttgggcctccctgttgtccagctctctccgcggctccatgactgacaacttgagcaaggctaatgtgaatgggagcggttgagggctcagacctctcacccgaggaacatccacagagtgtgccgcatgcccggtgcagtgtggctgcggggacacagacacggagcctcggccctgaggagctggggggcagtgaccgtccctcctctgacccaccactcctccagtgtcaggacactgcgggtatctaggggaaggaatcttgttccacttcaagtctggaacttcaagtctgtgtgtgtgcgtgcgcgcgcgcgcgttgggggtgggggttgcagagcagatgcgtacctgacagcggtaacctaggtcccccctggcctatcaaggcttccctggcggccgaatttaaaggcatcaagcaaacaaagcccaacacatctctgccttgtcctctcagtttccccccgtggcacttagaaccacttgatacaccgaatagtttcctatctcccccactaggatgtaaactccacaggggcattgggaatgctgcctggctatggtagggacagaggggagcaccagggcggggcaggggtgccagagttctgcctgggcagtcagattttccttaggaggggacatttgagtgggacccaaacaggtgtatagcagttgtccagcccagctggcaaggcctgagtctgcctctgcaacccctctcttgggctcctttctctgccacccacctcctcacctttccaggtcatcacagttggggccaccaatgcccaagaccagccggtgaccctggggactttggggaccaactttggccgctgtgtggacctctttgccccaggggaggacatcattggtgcctccagcgactgcagcacctgctttgtgtcacagagtgggacatcacaggctgctgcccacgtggctggtaagtcaccaccccactgcctcggccaccgtgatgctaacagcccctttggcagtcagggtctgtgccgggacctccagtgccaggctctgtgcagggggaccagagatgaagtaggcctgatggtgccttcaaggacactcagtctgatgagggaggcgagtgcacagaggaaacacgaggtcagggctgtattagagggagcccagaggaggcacctgcccagcccgagggtcagagaaggcatcttggaggagggacatttgatcgggagcttgatggatgaataggagttcacctggccgataagacagcaactaccaaggcttagaggtgtgagaggaggctgtcttacctcactgagtaaggactgcaggcggcttaccttcgagaagagagcttagtgtctgtgtgcacgtgtgtttgtgtgtatgtgtgtgcgtgtgtgcactggcaggagtcccctgctggggcaggagggccgggccatcaccatctttcaccattcacccctgcaccaggcattgcagccatgatgctgtctgccgagccggagctcaccctggccgagttgaggcagagactgatccacttctctgccaaagatgtcatcaatgaggcctggttccctgaggaccagcgggtactgacccccaacctggtggccgccctgccccccagcacccatggggcaggtaagcaggatggcagggtgggcaagtccaggctggggcttgggaggtctgtgtgaccttgacagtctctcccttctcccttgtctgtgtaaggaggatgacgccaccttaaataggattaaatgagaatggggctctgaaagggctgtgcaatattttcataacgtgtttttatagagacagttgagtatgttctttaagccctcctctctcctaccatgaactaaagatttctgtggaggtcccctcactcccagcaccccctcctcatcccaggccctttttgcaggttggcagctgttttgcaggactgtatggtcagcacactcggggcctacacggatggccacagccgtcgcccgctgcgccccagatgaggagctgctgagctgctccagtttctccaggagtgggaagcggcggggcgagcgcatggaggtgactgtacccctccttcgtgtgtgtgtgtgtgtgtgtgtgtgtgtgtgtgtgtgtgtgtgtgtgtgtgtcagtgctgggccctcagggacccccagcaagcccctccatcctccagactccagctcttctgtaagcttacagggctggccagaccaggagtggggcactcctcacttcacgcggctgggggctgctggagagagccacagcgggaagggtttcctagaggctgcaggacagtgctggatggattttcaatgctcacctgggtgtgagcgtgcggcagggccgcgtgagggtcagcgatctgctactctggactcagccatctctaggcccctctcactcaggtgctccatggttctgggagctgagaaatctcaaaccagcaaaaaagtggaattgatgttgatgctacaggatagtgcacagatgccatctggttgcagcattttggtggaagggcagtgcccagctaggagagtgaggaggggcaggcatttctggcttgaggagatggggtcttaatgctcgtgtgagaggcagagtgggtggagtggagctggctggatccttgctttggcctcctggatttctctctatctccattttgaaaccactctgtgtttggaagaacttttgagtattcagagctgcccactggcagaacagtcttccttgggcaggagtgagctccttgtccccagaaggctgggtctggctggcccctggcagggacactgatgagggtgcttgagttgatcctgtctagtccctttctgtgttttcaaagcccattctaaagcagattcccatttccgtctttgactctaaggcccaagggggcaagctggtctgccgggcccacaacgcttttgggggtgagggtgtctacgccattgccaggtgctgcctgctaccccaggccaactgcagcgtccacacagctccaccagctgaggccagcatggggacccgtgtccactgccaccaacagggccacgtcctcacaggtaggaggctgggcttgccctggggtgaggaggggtctctttctccttatgcacccactgcccgcgaggcttggtcctcacaagtgtgatccatgagactcaagcctgacttgcagttccatactctggttctgccacttccatgccctttgagcctgggcaggtgaccttacttctcctcatctcagcttcctcctccataagagggaaaaaggtattacctgcctcattgtgttgcaaggagatgggcagcatctagggcactggcctggagtatcgcaggtgctttgcctaaggtggtgcagtccaggagaggcagctccagagagaggcccccggctggggctgaaaggagggcagacctcggtttgaatttcaccctgccgctctatagctgtgtgacttgggcaaattacttaacatctctgtatgaggaaatgatgagtgctaagcacttagcttagtgccgggacaatataaattctagctatcgttactattgttttcatcacccgttgctttaaaatccagcctctggtataggcaactattgacgggctaccctgtgtcgaaaacatgcccaggcaggtagcaggaagtcacagatggggacctcttggggcatcaagggatggtgccctgaggctgagctgttctggttgggtggagcatgagaggtctgggaagacagtgggactccagcctggaataagaggctcagagttgattctcgtctgagcacgtccaggggaaccactgagggtttgggaacaggagagtgagggtgagaacctggttctgggcacagcaggctggcatgtaggatggatgttcaggaaagatgagcatagtcaggtggctggtgcccttgtccaggggagaggctccgtcaggttcaggggtcctggcttggagggaagtccgccatgctctaatcacgctcccctttggaagtgctcagccgatgagctcacaggcacatgtcagtttgaagtcatggaatctgactccatgaagcgcacctcaaagagcaccattttgcagctaagggaactgcaggctggacatgctgagtggctgccccgagcccttgcagctaggacatagagaatgctagtaaccacaaccctaccatgttcagagcacatgccaggctccatgctggggcttcgcacgtgtcatcttcacagtgtccctgtgagtaggtgtggtttctctttccatcttacaaatgagtaaacagagcctcagtgtagctaagtaaccactattttaggtttcttagccaatgggtgtgtctgactcctaagcccatggagggcattctgaggtggttcagacagaccccggcttacccttgaacttctgcctgctggctgcatagggaggggctggggggagtttgagcatctcaggccatagagcccctgcctcactgtctccatctctgggtggaaagatggtgttttccctgagaaactaaggctcagagaggttgaatggctctcccaaggtcacacagctggtcagctgcagagttgagaacacaggagtcctggtgctcaggccagcatctctttttttctttgagttgtttctaggtttcctagctcttgcctcagaccttaaagagagagggtctgatggggatgggcactggagacggagcatcccagcatttcacatctgagctggctttcctctgccccaggctgcagctcccactgggaggtggaggaccttggcacccacaagccgcctgtgctgaggccacgaggtcagcccaaccagtgcgtgggccacagggaggccagcatccacgcttcctgctgccatgccccaggtctggaatgcaaagtcaaggagcatggaatcccggcccctcaggagcaggtgaagaggcccgtgaggccgggtgggtggggtgctgcgtgtctctcctgcacagcttttctgtgtcagtttgtgccaccaccataccgccatgcatcagggtggcggtttgccaggtagatgctgtgggcagcttccgccattgtgtggacagcatgtatatgtgtctctgtgtggctgggtctgtttttgcttttgtccagatcagtaaggtttgctacctgggtaccccactccacttggagtagaatgtgcataaatatggcataaagaaatgcaatatgcatgcatttattgattgatctatttttttctgagatggggtcttgctgtgttgcccaggctggtctcaaattcctgggctcaagcaatcctctggtctcagcctccccaagtgttgggattataggcatgagccgctgcacctggcctctctgatctatttaacaaacctgctgggagggtctcagggtcaggagcagcactgggctctgaggacacagagctcactcagccgtgacccagagggggtgcctgagctgcatgctgaaggttgttagcatgaccagcaaggcaagaaaaggccctgccgagattagcaaggcatgtgccaagccctggaatgtgacagccgggccttctagaaacctgagtgtataactctccttaaaagccagtaggagctcctcaaaaggcagccctaaggagtccactcttaaatgaactcagagtcagttttaaaatgcaagtctgtgttgattctggtctggatggtgcattcctcgagagcaaaagacagtcttggtcttggatccacttgccctgggtacactgagggctgctaggttccaggtgctcttcctggcactggggagggatacaggcccaagagacatgctgttctccctcctggagcatctattttagtggaggaagacagaaaacaaaccattaatatagagtactgaaaagatgcgatggagaaaactatagcaaggaagggaatggggtgggagagaggtcaggagaggtctcgctgacaaggtggacgaaacaggccatgaggcagagaacatgttccaggcaaagcaaaggcccccaggtggggatgtgcagggagtaccaggaaaccagagaggtgggaatagttatgagatggggggtgcctcagaggggacagggccaagtcaggtgagacctgagggtcacagtcagcagtgagctggggccatgcaggggtctggcctcagaggagtgtggtctggcctggatctgaacctctcactgtggcctagctgctgagctgagaagagatgacaaggaccttgggcagaagcagggagactggagggaggcggtggagggtccaggcgttggggcggggctcaggctggagtctgaagggagcctgcaggcctggtgggtggatgtgggtgggagagggggaggatggcaccaaggctcgggcccctggacagatggagttgccattaagtgggatggggcaggctatggggccatcagtttcagagggatgagtttggcactggcatggtaggcatctgtctatctccacggccctcaaaccaggcatgaagcaggagctcacgtgtttggtcagccatggtgcagaaccgcctgggtgggaggtgcggggtgggagatacacggttgtgtcccaaatgggctctgagccagcgagggccgtctgcactttggcctcacagaaggatgtcggagggagaaatgaagtgtgggtgggggtcccgggccacgctagacatgtgctttcttttcctcgggctctggcaggtgaccgtggcctgcgaggagggctggaccctgactggctgcagtgccctccctgggacctcccacgtcctgggggcctacgccgtagacaacacgtgtgtagtcaggagccgggacgtcagcactacaggcagcaccagcgaaggggccgtgacagccgttgccatctgctgccggagccggcacctggcgcaggcctcccaggagctccagtgacagccccatcccaggatgggtgtctggggagggtcaagggctggggctgagctttaaaatggttccgacttgtccctctctcagccctccatggcctggcacgaggggatggggatgcttccgcctttccggggctgctggcctggcccttgagtggggcagcctccttgcctggaactcactcactctgggtgcctcctccccaggtggaggtgccaggaagctccctccctcactgtggggcatttcaccattcaaacaggtcgagctgtgctcgggtgctgccagctgctcccaatgtgccgatgtccgtgggcagaatgacttttattgagctcttgttccgtgccaggcattcaatcctcaggtctccaccaaggaggcaggattcttcccatggataggggagggggcggtaggggctgcagggacaaacatcgttggggggtgagtgtgaaaggtgctgatggccctcatctccagctaactgtggagaagcccctgggggctccctgattaatggaggcttagctttctggatggcatctagccagaggctggagacaggtgcgcccctggtggtcacaggctgtgccttggtttcctgagccacctttactctgctctatgccaggctgtgctagcaacacccaaaggtggcctgcggggagccatcacctaggactgactcggcagtgtgcagtggtgcatgcactgtctcagccaacccgctccactacccggcagggtacacattcgcacccctacttcacagaggaagaaacctggaaccagagggggcgtgcctgccaagctcacacagcaggaactgagccagaaacgcagattgggctggctctgaagccaagcctcttcttacttcacccggctgggctcctcatttttacgggtaacagtgaggctgggaaggggaacacagaccaggaagctcggtgagtgatggcagaacgatgcctgcaggcatggaactttttccgttatcacccaggcctgattcactggcctggcggagatgcttctaaggcatggtcgggggagagggccaacaactgtccctccttgagcaccagccccacccaagcaagcagacatttatcttttgggtctgtcctctctgttgcctttttacagccaacttttctagacctgttttgcttttgtaacttgaagatatttattctgggttttgtagcatttttattaatatggtgactttttaaaataaaaacaaacaaacgttgtcctaactcttgcatagacttgactgcctagggtgatgccttgcttatactaggaactgggtaagtttgttgaatagttgagtaagccaagtatttgatgagtacttttatcttgagtacaagtattgggcaagtactggtgatgtgaacttactccttgtgcctatcctaggaatgaaatgaatgtcttcctgcagctcccctgaccaccctgacagtcaaagtgcctcctccttggtgacaggtgccctacagcactctagatgctctgttgtcctgacctcccaatgcccttttcattcttttctccccagtacctggcacacagcctggcccgagtatttacggaataagttacagtgccagatgcttctgtaatgagccagtgctaagtccatggcttttttcatgatttaaaattcagaacagtctcagattgggtgcaatggctcacacctgtaatctcagtactttgggaggctgaggcaggaggattgcttgtgtttaggaattcaagaccctgggcaacagtgagaccccgtctctataaaaaaatttaaaagattagcgaggtgtggtagcacatgcctgtggtcccggctactcaggaggctgatatgggaggcttgcttgagctgggaggctgagggtgcagtgagctgtaattacatcatcactgcactgcagcctgggttacagagtgcataatgatcccattcaatgtgggacctccaggccctccactctaaggctggtgaatatagctgtcttaagcaagttctctctctctctagacagcccatgtcataaggaatctcaggcaaaattcctcccagattacattttctgacaattcagtgtcatatatggaaagcattcaagagttgacagatggcaatggcttgaacacccaactgtgttatctctgcccgttggaacctaggcctgtggtgcaaccctagactctctctccttcccctccacagaatcaagtatcagctggttagagatccacaccctgacagctctgtgatgttggaacaacttggttcttgcagagggttagcaggtggtcaccagggatcggggaggaaggggtgtggcttgcaggaaggcgaaaatctggactagcaaatagggaaggggacccatgtgagcaacgctggccactaggaatgagactgagacctgtgggatctagcaagaagcccagtgtgaccagcgacacgatctatgctggggaccacttgggagagccaaaagctttggtggagatgaatggagaccatcaacctaagttcagcatcctcctctaagctttgcagatgaatcctgaaatggtcagcccctccagagaaaagaacagcaacaggctcagaggacccacagtcccctttattagtgtaaagtactaagaggaatcaacagcatttagcaccaggcacaggctcgtgttcccccgcccactacggctgtgttctgatatatgaagaatggcggcaagactccaactctgtttttgaaaaatttattttatactcttagaagctaagaactttgccacacatgaaccaaatttagaattaaggttcttccctagtgtatctacttccttttgaaattttataaacaagattttatacacaagaggtagcagaggaaaattccagtctgcttgttccaagctcagaaggtaactgcacacacctcgatgttagcagggaaggtggggcaggacagggtaagtctgatgatacggcactctagttcctaaaactgactgtagttgtcagtgaccgtgtgaggactccaggagaagtcgtggtgagatgcccgctgggatgcttgttttctttcccaggatgccttcaacgggcagaatcggccatcttaagatcggcctcactaagggagcttcttgagaacacacagcattattgagttaattgtgcaattcctgctctgtttgcagaccattttgaaaggtttataaaaacatcttcatccaaaaaattggcagtaaaaatgacaactcttccaaggtaagcctgtcataactgtcactgttgtactacattaaaaaaagtcatcagcaggttcattgactgtagctgtcagcaatcaagtggttaccagcaaagtgaaaacgatggtcattgcagcaacaatataagcaacatgatctgaagcgtataatatacacggtggacgatcctgatgaagctttacagtgaggacggcaggtgctaggggtgcggaaggcgttgtttccataggaaataaggggactagaagtggcaatttcactcctgattttgggctcctgagagtgcagtcgccagcgatgatatcccagtgtggatcatcgccagcatttcaaggtcatgtcccacacaatctcttggtgaggatgtgggcggagagaaggtgagaatagggtaggggaaacagtaggacaggaagtattcacgtactcaaaaccaatggtagaacatcacatttcaaactgcaagaccattggaaccgtctgaagtttgccactcgcctctgtccgtttctctaagggtacagttctgctcttaagtgctggcccttccatcttctcagtgtgtttgacaaaggccactgccaacctccagcaagtcacagaataacaatgaagtctgacagcacagaaaccctcactgccagagaatgaaaagactgggccatggcgagagcacagtaatgagatgccatctgcctggccacatgcccacacaatgccacagcagccagacaggcacttcagggctggctgcgcctctgtgacttggcaaatctgacagtgaaaacctggcacttcctaaggctccctagttctgtgcatggtgagatgaaaataaggcaggacctgtaactaaaggcaaaacagggccgaaaatgtgagcaattcaaaatacaaaatgtacaaaatatatatgaaatatgtgggtgtaaacctctcccccacaccataaaagggagctggtataaatgagtgaatggtgctatactttggaaatacgactaaatggatggttattcaattgctttatatttatttctgggaaaataaatcttaaaccttgactgacttttcagtgttaattagtcatgttgaggagaaacaaattctcaaattccttctctgcattacaataactatgaaactcacaagcagtgtgtaccaactcaaatagttaacttcatatacaaccaataccaagggtttcagtaattatgttttaagcaaaagcaaacgattgcagatcacatgatttaagactacagtttattcaatatgtctccaagcattaaaaagataattctgtgaagttaaactcagtaaaattatatcttaaagtgcttttattttgctgtttttaaaatctgtttggggaacaactcataacttctttaagtaattgatgtcaaataatgcaccctgtacttctggagaacacagcattttcaaaattgctcttttcaatctaattatatcagaaaaatatcttcaagagcttagtatttcccaatttttgatcctgatcctggtaacctttcatcaagatccaagcttatgcatagggttctcatctagacccatctgaaattctatacaaatagggagacatattaaatacaaaggtctgtgtaaattgacttaattactattttacaatgaaaaggaattttattacatctttacatcattttaaattggatattcctgtttaatattactgcaagattaaaaatttgcccccacatatctaaaagcagcttgctttttcttaaaatataaaaaccaaaggaatttcttttgtagcatcgtagagaaagcaacagctttatgctcactcttgtatgttcgtgtaacaaaaaagtctgccactggctctatttccgaaaatctccacagaaatgtgaatccacatatagaccacgctcccgggacagctgatccacatgccggagttctcccactgccaaacagctcccaaaccttctagtggcttaaaaatgctttccttgagaaatacacgatccgcccaagtcacagcagctttcccagtccaatctccaggctcttccaaagggttcgagattctgattccaagaaggtgctgagcatccagtattgtgtcttgactcctctcaggctgggcatgttcctctagggatcaacatcatcaaggtcacttctcaactcaccaatcatcatgggagattctgaaccctgcagaaaagaaaaggaagttaaagttcatacggttagagaaaaggttttctatgctgacttgtgttctgcaatttaaacatgtcttcatctggcaacttaatgcaatgtttatcaaagggtaataaaatgtgataactattacatctaatatttgacaattcatgattatgtaaaacatgtacatttctatgatctcatttagtcagtgaaacaacccagcgacttgtctaaagtcacaatgctactctgcacccatgtgagaacgcagagcagtgataaagctgggagaggcattgatggccattgtgcccgcttcacgttgggcactgtgtgagcctccctgccctgcacctgccaaatatgggctctgggtcactcctgggtctgaaggctacctctgttaccatctgtgtggcctttggcttacacacttggcgaatcgttctgaatactcaccgtgtgccatggggctgatctagttggagctggggtggggaggagcaaggacagtctctctaaagtgacaacctaagctgagtgagagttgggggtgagtaggggggccctgaggtggaaggaagagagtacatttgataaataaaattcagaaaatgggccaggcacagtcgcttatgcctgtaatcccagctacttgggaggctgaggcaaggagaatcgctggaacctgggagaaggaggtagcagtgaggtgagattgcaccactgcactccagcctgggtg

SEQ ID NO: 5305 - DNA, 20 bp, Artificial Sequence
  Description of Artificial Sequence: Synthetic oligonucleotide
  Target: PCSK9; (-) strand; PAM type: NAAAAC; PAM sequence: TAAAAC
agctttactgtctcctctaa

SEQ ID NO: 5306 - DNA, 20 bp, Artificial Sequence
  Description of Artificial Sequence: Synthetic oligonucleotide
  Target: PCSK9; (-) strand; PAM type: NAAAAC; PAM sequence: TAAAAC
aaatgggtgtgctcagctct

SEQ ID NO: 5307 - DNA, 20 bp, Artificial Sequence
  Description of Artificial Sequence: Synthetic oligonucleotide
  Target: PCSK9; (-) strand; PAM type: NAAAAC; PAM sequence: CAAAAC
tagaaatgacgtcttagtaa

SEQ ID NO: 5308 - DNA, 20 bp, Artificial Sequence
  Description of Artificial Sequence: Synthetic oligonucleotide
  Target: PCSK9; (-) strand; PAM type: NAAAAC; PAM sequence: AAAAAC
cctagccctaatctcggaat

SEQ ID NO: 5309 - DNA, 20 bp, Artificial Sequence
  Description of Artificial Sequence: Synthetic oligonucleotide
  Target: PCSK9; (-) strand; PAM type: NAAAAC; PAM sequence: TAAAAC
tcggagatagtctactttta

SEQ ID NO: 5310 - DNA, 20 bp, Artificial Sequence
  Description of Artificial Sequence: Synthetic oligonucleotide
  Target: PCSK9; (-) strand; PAM type: NAAAAC; PAM sequence: GAAAAC
tgaaccaccaccttctgagg

SEQ ID NO: 5311 - DNA, 20 bp, Artificial Sequence
  Description of Artificial Sequence: Synthetic oligonucleotide
  Target: PCSK9; (-) strand; PAM type: NAAAAC; PAM sequence: TAAAAC
ttacatgaaaatgttttttt

SEQ ID NO: 5312 - DNA, 20 bp, Artificial Sequence
  Description of Artificial Sequence: Synthetic oligonucleotide
  Target: PCSK9; (-) strand; PAM type: NAAAAC; PAM sequence: AAAAAC
gattacgcgcagagggaaga

SEQ ID NO: 5313 - DNA, 20 bp, Artificial Sequence
  Description of Artificial Sequence: Synthetic oligonucleotide
  Target: PCSK9; (-) strand; PAM type: NAAAAC; PAM sequence: CAAAAC
ggtcacactgcagacaggga

SEQ ID NO: 5314 - DNA, 20 bp, Artificial Sequence
  Description of Artificial Sequence: Synthetic oligonucleotide
  Target: PCSK9; (-) strand; PAM type: NAAAAC; PAM sequence: AAAAAC
accatcaaataaatcacaaa

SEQ ID NO: 5315 - DNA, 20 bp, Artificial Sequence
  Description of Artificial Sequence: Synthetic oligonucleotide
  Target: PCSK9; (-) strand; PAM type: NAAAAC; PAM sequence: CAAAAC
tttacccaaagccttagggc

SEQ ID NO: 5316 - DNA, 20 bp, Artificial Sequence
  Description of Artificial Sequence: Synthetic oligonucleotide
  Target: PCSK9; (-) strand; PAM type: NAAAAC; PAM sequence: AAAAAC
ggtggtgcagaagcacaaat

SEQ ID NO: 5317 - DNA, 20 bp, Artificial Sequence
  Description of Artificial Sequence: Synthetic oligonucleotide
  Target: PCSK9; (-) strand; PAM type: NAAAAC; PAM sequence: GAAAAC
attccaaatggtgagaaaag

SEQ ID NO: 5318 - DNA, 20 bp, Artificial Sequence
  Description of Artificial Sequence: Synthetic oligonucleotide
  Target: PCSK9; (-) strand; PAM type: NAAAAC; PAM sequence: CAAAAC
gctggaggcaggtggagcag

SEQ ID NO: 5319 - DNA, 20 bp, Artificial Sequence
  Description of Artificial Sequence: Synthetic oligonucleotide
  Target: PCSK9; (-) strand; PAM type: NAAAAC; PAM sequence: CAAAAC
cctggcgcacagtgggtgct

SEQ ID NO: 5320 - DNA, 20 bp, Artificial Sequence
  Description of Artificial Sequence: Synthetic oligonucleotide
  Target: PCSK9; (-) strand; PAM type: NAAAAC; PAM sequence: GAAAAC
acacgagtcacaacctcaga

SEQ ID NO: 5321 - DNA, 20 bp, Artificial Sequence
  Description of Artificial Sequence: Synthetic oligonucleotide
  Target: PCSK9; (-) strand; PAM type: NAAAAC; PAM sequence: CAAAAC
ttgcctttaaaactgaacat

SEQ ID NO: 5322 - DNA, 20 bp, Artificial Sequence
  Description of Artificial Sequence: Synthetic oligonucleotide
  Target: PCSK9; (-) strand; PAM type: NAAAAC; PAM sequence: TAAAAC
aggttattgattcttgcctt

SEQ ID NO: 5323 - DNA, 20 bp, Artificial Sequence
  Description of Artificial Sequence: Synthetic oligonucleotide
  Target: PCSK9; (-) strand; PAM type: NAAAAC; PAM sequence: AAAAAC
acatactcaactgtctctat

SEQ ID NO: 5324 - DNA, 20 bp, Artificial Sequence
  Description of Artificial Sequence: Synthetic oligonucleotide
  Target: PCSK9; (-) strand; PAM type: NAAAAC; PAM sequence: CAAAAC
gtgctgaccatacagtcctg

SEQ ID NO: 5325 - DNA, 20 bp, Artificial Sequence
  Description of Artificial Sequence: Synthetic oligonucleotide
  Target: PCSK9; (-) strand; PAM type: NAAAAC; PAM sequence: GAAAAC
tctgctttagaatgggcttt

SEQ ID NO: 5326 - DNA, 20 bp, Artificial Sequence
  Description of Artificial Sequence: Synthetic oligonucleotide
  Target: PCSK9; (-) strand; PAM type: NAAAAC; PAM sequence: GAAAAC
attttaaagcaacgggtgat

SEQ ID NO: 5327 - DNA, 20 bp, Artificial Sequence
  Description of Artificial Sequence: Synthetic oligonucleotide
  Target: PCSK9; (-) strand; PAM type: NAAAAC; PAM sequence: GAAAAC
ctgagccttagtttctcagg

SEQ ID NO: 5328 - DNA, 20 bp, Artificial Sequence
  Description of Artificial Sequence: Synthetic oligonucleotide
  Target: PCSK9; (-) strand; PAM type: NAAAAC; PAM sequence: AAAAAC
ttactgatctggacaaaagc

SEQ ID NO: 5329 - DNA, 20 bp, Artificial Sequence
  Description of Artificial Sequence: Synthetic oligonucleotide
  Target: PCSK9; (-) strand; PAM type: NAAAAC; PAM sequence: TAAAAC
atcaacacagacttgcattt

SEQ ID NO: 5330 - DNA, 20 bp, Artificial Sequence
  Description of Artificial Sequence: Synthetic oligonucleotide
  Target: PCSK9; (-) strand; PAM type: NAAAAC; PAM sequence: CAAAAC
atatcttcaagttacaaaag

SEQ ID NO: 5331 - DNA, 20 bp, Artificial Sequence
  Description of Artificial Sequence: Synthetic oligonucleotide
  Target: PCSK9; (-) strand; PAM type: NAAAAC; PAM sequence: CAAAAC
ccatattaataaaaatgcta

SEQ ID NO: 5332 - DNA, 20 bp, Artificial Sequence
  Description of Artificial Sequence: Synthetic oligonucleotide
  Target: PCSK9; (-) strand; PAM type: NAAAAC; PAM sequence: AAAAAC
gagtataaaataaatttttc

SEQ ID NO: 5333 - DNA, 20 bp, Artificial Sequence
  Description of Artificial Sequence: Synthetic oligonucleotide
  Target: PCSK9; (-) strand; PAM type: NAAAAC; PAM sequence: GAAAAC
gttgaaggcatcctgggaaa

SEQ ID NO: 5334 - DNA, 20 bp, Artificial Sequence
  Description of Artificial Sequence: Synthetic oligonucleotide
  Target: PCSK9; (-) strand; PAM type: NAAAAC; PAM sequence: TAAAAC
tgcaatcgtttgcttttgct

SEQ ID NO: 5335 - DNA, 20 bp, Artificial Sequence
  Description of Artificial Sequence: Synthetic oligonucleotide
  Target: PCSK9; (-) strand; PAM type: NAAAAC; PAM sequence: AAAAAC
ttgttccccaaacagatttt

SEQ ID NO: 5336 - DNA, 20 bp, Artificial Sequence
  Description of Artificial Sequence: Synthetic oligonucleotide
  Target: PCSK9; (-) strand; PAM type: NAAAAC; PAM sequence: GAAAAC
gcagaacacaagtcagcata

SEQ ID NO: 5337 - DNA, 20 bp, Artificial Sequence
  Description of Artificial Sequence: Synthetic oligonucleotide
  Target: PCSK9; (+) strand; PAM type: NAAAAC; PAM sequence: AAAAAC
actagagatattaaaggtac

SEQ ID NO: 5338 - DNA, 20 bp, Artificial Sequence
  Description of Artificial Sequence: Synthetic oligonucleotide
  Target: PCSK9; (+) strand; PAM type: NAAAAC; PAM sequence: AAAAAC
atttgctggcttcaaataac

SEQ ID NO: 5339 - DNA, 20 bp, Artificial Sequence
  Description of Artificial Sequence: Synthetic oligonucleotide
  Target: PCSK9; (+) strand; PAM type: NAAAAC; PAM sequence: AAAAAC
caaactattcacgttttaaa

SEQ ID NO: 5340 - DNA, 20 bp, Artificial Sequence
  Description of Artificial Sequence: Synthetic oligonucleotide
  Target: PCSK9; (+) strand; PAM type: NAAAAC; PAM sequence: TAAAAC
atatgacgtctttgcaaact

SEQ ID NO: 5341 - DNA, 20 bp, Artificial Sequence
  Description of Artificial Sequence: Synthetic oligonucleotide
  Target: PCSK9; (+) strand; PAM type: NAAAAC; PAM sequence: GAAAAC
gtgggttccgatttggtttg

SEQ ID NO: 5342 - DNA, 20 bp, Artificial Sequence
  Description of Artificial Sequence: Synthetic oligonucleotide
  Target: PCSK9; (+) strand; PAM type: NAAAAC; PAM sequence: CAAAAC
atttcaagttaccactgctc

SEQ ID NO: 5343 - DNA, 20 bp, Artificial Sequence
  Description of Artificial Sequence: Synthetic oligonucleotide
  Target: PCSK9; (+) strand; PAM type: NAAAAC; PAM sequence: GAAAAC
gaacaaagatacagagctgg

SEQ ID NO: 5344 - DNA, 20 bp, Artificial Sequence
  Description of Artificial Sequence: Synthetic oligonucleotide
  Target: PCSK9; (+) strand; PAM type: NAAAAC; PAM sequence: GAAAAC
tctgaaatgtaaaatgttac

SEQ ID NO: 5345 - DNA, 20 bp, Artificial Sequence
  Description of Artificial Sequence: Synthetic oligonucleotide
  Target: PCSK9; (+) strand; PAM type: NAAAAC; PAM sequence: CAAAAC
tccaaacaagttctgaggtt

SEQ ID NO: 5346 - DNA, 20 bp, Artificial Sequence
  Description of Artificial Sequence: Synthetic oligonucleotide
  Target: PCSK9; (+) strand; PAM type: NAAAAC; PAM sequence: AAAAAC
agttggagcagacaagagct

SEQ ID NO: 5347 - DNA, 20 bp, Artificial Sequence
  Description of Artificial Sequence: Synthetic oligonucleotide
  Target: PCSK9; (+) strand; PAM type: NAAAAC; PAM sequence: GAAAAC
agctgggtgcaggtacagag

SEQ ID NO: 5348 - DNA, 20 bp, Artificial Sequence
  Description of Artificial Sequence: Synthetic oligonucleotide
  Target: PCSK9; (+) strand; PAM type: NAAAAC; PAM sequence: AAAAAC
cctagtgcttcaaatcttaa

SEQ ID NO: 5349 - DNA, 20 bp, Artificial Sequence
  Description of Artificial Sequence: Synthetic oligonucleotide
  Target: PCSK9; (+) strand; PAM type: NAAAAC; PAM sequence: GAAAAC
ccagcctgatcaaggagcga

SEQ ID NO: 5350 - DNA, 20 bp, Artificial Sequence
  Description of Artificial Sequence: Synthetic oligonucleotide
  Target: PCSK9; (+) strand; PAM type: NAAAAC; PAM sequence: GAAAAC
agggaggaggagcggccatg

SEQ ID NO: 5351 - DNA, 20 bp, Artificial Sequence
  Description of Artificial Sequence: Synthetic oligonucleotide
  Target: PCSK9; (+) strand; PAM type: NAAAAC; PAM sequence: GAAAAC
tcagcctggaagctctgagg

SEQ ID NO: 5352 - DNA, 20 bp, Artificial Sequence
  Description of Artificial Sequence: Synthetic oligonucleotide
  Target: PCSK9; (+) strand; PAM type: NAAAAC; PAM sequence: GAAAAC
caagctggggaactcgctgg

SEQ ID NO: 5353 - DNA, 20 bp, Artificial Sequence
  Description of Artificial Sequence: Synthetic oligonucleotide
  Target: PCSK9; (+) strand; PAM type: NAAAAC; PAM sequence: TAAAAC
cggtgaagccccgtctctac

SEQ ID NO: 5354 - DNA, 20 bp, Artificial Sequence
  Description of Artificial Sequence: Synthetic oligonucleotide
  Target: PCSK9; (+) strand; PAM type: NAAAAC; PAM sequence: GAAAAC
ttgacgggctaccctgtgtc

SEQ ID NO: 5355 - DNA, 20 bp, Artificial Sequence
  Description of Artificial Sequence: Synthetic oligonucleotide
  Target: PCSK9; (+) strand; PAM type: NAAAAC; PAM sequence: GAAAAC
tattttagtggaggaagaca

SEQ ID NO: 5356 - DNA, 20 bp, Artificial Sequence
  Description of Artificial Sequence: Synthetic oligonucleotide
  Target: PCSK9; (+) strand; PAM type: NAAAAC; PAM sequence: GAAAAC
tactgaaaagatgcgatgga

SEQ ID NO: 5357 - DNA, 20 bp, Artificial Sequence
  Description of Artificial Sequence: Synthetic oligonucleotide
  Target: PCSK9; (+) strand; PAM type: NAAAAC; PAM sequence: AAAAAC
atatggtgactttttaaaat

SEQ ID NO: 5358 - DNA, 20 bp, Artificial Sequence
  Description of Artificial Sequence: Synthetic oligonucleotide
  Target: PCSK9; (+) strand; PAM type: NAAAAC; PAM sequence: TAAAAC
tgatacggcactctagttcc

SEQ ID NO: 5359 - DNA, 20 bp, Artificial Sequence
  Description of Artificial Sequence: Synthetic oligonucleotide
  Target: PCSK9; (+) strand; PAM type: NAAAAC; PAM sequence: AAAAAC
gaccattttgaaaggtttat

SEQ ID NO: 5360 - DNA, 20 bp, Artificial Sequence
  Description of Artificial Sequence: Synthetic oligonucleotide
  Target: PCSK9; (+) strand; PAM type: NAAAAC; PAM sequence: GAAAAC
caagtggttaccagcaaagt

SEQ ID NO: 5361 - DNA, 20 bp, Artificial Sequence
  Description of Artificial Sequence: Synthetic oligonucleotide
  Target: PCSK9; (+) strand; PAM type: NAAAAC; PAM sequence: CAAAAC
acaggaagtattcacgtact

SEQ ID NO: 5362 - DNA, 20 bp, Artificial Sequence
  Description of Artificial Sequence: Synthetic oligonucleotide
  Target: PCSK9; (+) strand; PAM type: NAAAAC; PAM sequence: GAAAAC
gacttggcaaatctgacagt

SEQ ID NO: 5363 - DNA, 20 bp, Artificial Sequence
  Description of Artificial Sequence: Synthetic oligonucleotide
  Target: PCSK9; (+) strand; PAM type: NAAAAC; PAM sequence: CAAAAC
gcaggacctgtaactaaagg

SEQ ID NO: 5364 - DNA, 20 bp, Artificial Sequence
  Description of Artificial Sequence: Synthetic oligonucleotide
  Target: PCSK9; (+) strand; PAM type: NAAAAC; PAM sequence: AAAAAC
cttgctttttcttaaaatat

SEQ ID NO: 5365 - DNA, 20 bp, Artificial Sequence
  Description of Artificial Sequence: Synthetic oligonucleotide
  Target: PCSK9; (+) strand; PAM type: NAAAAC; PAM sequence: TAAAAC
tttgacaattcatgattatg

SEQ ID NO: 5366 - DNA, 20 bp, Artificial Sequence
  Description of Artificial Sequence: Synthetic oligonucleotide
  Target: PCSK9; (-) strand; PAM type: NNAGAAW; PAM sequence: AAAGAAA
ggatatttggcagctggtaa

SEQ ID NO: 5367 - DNA, 20 bp, Artificial Sequence
  Description of Artificial Sequence: Synthetic oligonucleotide
  Target: PCSK9; (-) strand; PAM type: NNAGAAW; PAM sequence: ATAGAAA
gacaaagaggtactaatgat

SEQ ID NO: 5368 - DNA, 20 bp, Artificial Sequence
  Description of Artificial Sequence: Synthetic oligonucleotide
  Target: PCSK9; (-) strand; PAM type: NNAGAAW; PAM sequence: TTAGAAA
aactcattttttctccctga

SEQ ID NO: 5369 - DNA, 20 bp, Artificial Sequence
  Description of Artificial Sequence: Synthetic oligonucleotide
  Target: PCSK9; (-) strand; PAM type: NNAGAAW; PAM sequence: TTAGAAA
ttcttgattttgtactgtgc

SEQ ID NO: 5370 - DNA, 20 bp, Artificial Sequence
  Description of Artificial Sequence: Synthetic oligonucleotide
  Target: PCSK9; (-) strand; PAM type: NNAGAAW; PAM sequence: ATAGAAA
actttattgtatttttttcc

SEQ ID NO: 5371 - DNA, 20 bp, Artificial Sequence
  Description of Artificial Sequence: Synthetic oligonucleotide
  Target: PCSK9; (-) strand; PAM type: NNAGAAW; PAM sequence: GGAGAAA
acaccaagtgcccagaagga

SEQ ID NO: 5372 - DNA, 20 bp, Artificial Sequence
  Description of Artificial Sequence: Synthetic oligonucleotide
  Target: PCSK9; (-) strand; PAM type: NNAGAAW; PAM sequence: TCAGAAT
agcagtgctggaggaatcca

SEQ ID NO: 5373 - DNA, 20 bp, Artificial Sequence
  Description of Artificial Sequence: Synthetic oligonucleotide
  Target: PCSK9; (-) strand; PAM type: NNAGAAW; PAM sequence: GTAGAAA
tatttgaagccagcaaattt

SEQ ID NO: 5374 - DNA, 20 bp, Artificial Sequence
  Description of Artificial Sequence: Synthetic oligonucleotide
  Target: PCSK9; (-) strand; PAM type: NNAGAAW; PAM sequence: AGAGAAT
ttctggcttccataactgca

SEQ ID NO: 5375 - DNA, 20 bp, Artificial Sequence
  Description of Artificial Sequence: Synthetic oligonucleotide
  Target: PCSK9; (-) strand; PAM type: NNAGAAW; PAM sequence: ACAGAAA
aggggagagatacttgagac

SEQ ID NO: 5376 - DNA, 20 bp, Artificial Sequence
  Description of Artificial Sequence: Synthetic oligonucleotide
  Target: PCSK9; (-) strand; PAM type: NNAGAAW; PAM sequence: AGAGAAA
atccaatgactgatatcaga

SEQ ID NO: 5377 - DNA, 20 bp, Artificial Sequence
  Description of Artificial Sequence: Synthetic oligonucleotide
  Target: PCSK9; (-) strand; PAM type: NNAGAAW; PAM sequence: TCAGAAA
cctggctaccttctccaacc

SEQ ID NO: 5378 - DNA, 20 bp, Artificial Sequence
  Description of Artificial Sequence: Synthetic oligonucleotide
  Target: PCSK9; (-) strand; PAM type: NNAGAAW; PAM sequence: AGAGAAT
ggggtcgttaccgtgcaccc

SEQ ID NO: 5379 - DNA, 20 bp, Artificial Sequence
  Description of Artificial Sequence: Synthetic oligonucleotide
  Target: PCSK9; (-) strand; PAM type: NNAGAAW; PAM sequence: CAAGAAT
atcaaaggcctcccctggag

SEQ ID NO: 5380 - DNA, 20 bp, Artificial Sequence
  Description of Artificial Sequence: Synthetic oligonucleotide
  Target: PCSK9; (-) strand; PAM type: NNAGAAW; PAM sequence: GAAGAAA
ggaagggctgtcgatactgg

SEQ ID NO: 5381 - DNA, 20 bp, Artificial Sequence
  Description of Artificial Sequence: Synthetic oligonucleotide
  Target: PCSK9; (-) strand; PAM type: NNAGAAW; PAM sequence: CAAGAAA
ttccttttacacaccatgtt

SEQ ID NO: 5382 - DNA, 20 bp, Artificial Sequence
  Description of Artificial Sequence: Synthetic oligonucleotide
  Target: PCSK9; (-) strand; PAM type: NNAGAAW; PAM sequence: TCAGAAT
aagacgtcatataggtacat

SEQ ID NO: 5383 - DNA, 20 bp, Artificial Sequence
  Description of Artificial Sequence: Synthetic oligonucleotide
  Target: PCSK9; (-) strand; PAM type: NNAGAAW; PAM sequence: GAAGAAA
cgtcagattacgcgcagagg

SEQ ID NO: 5384 - DNA, 20 bp, Artificial Sequence
  Description of Artificial Sequence: Synthetic oligonucleotide
  Target: PCSK9; (-) strand; PAM type: NNAGAAW; PAM sequence: GCAGAAA
cccacctgtgccgcggcgag

SEQ ID NO: 5385 - DNA, 20 bp, Artificial Sequence
  Description of Artificial Sequence: Synthetic oligonucleotide
  Target: PCSK9; (-) strand; PAM type: NNAGAAW; PAM sequence: AAAGAAA
gagcatgagttctgtgtcat

SEQ ID NO: 5386 - DNA, 20 bp, Artificial Sequence
  Description of Artificial Sequence: Synthetic oligonucleotide
  Target: PCSK9; (-) strand; PAM type: NNAGAAW; PAM sequence: CGAGAAT
taaaggacgccaatgggcct

SEQ ID NO: 5387 - DNA, 20 bp, Artificial Sequence
  Description of Artificial Sequence: Synthetic oligonucleotide
  Target: PCSK9; (-) strand; PAM type: NNAGAAW; PAM sequence: TTAGAAA
aagtcctgggctggtaatac

SEQ ID NO: 5388 - DNA, 20 bp, Artificial Sequence
  Description of Artificial Sequence: Synthetic oligonucleotide
  Target: PCSK9; (-) strand; PAM type: NNAGAAW; PAM sequence: GCAGAAT
tgggcaggcagctgtgagtg

SEQ ID NO: 5389 - DNA, 20 bp, Artificial Sequence
  Description of Artificial Sequence: Synthetic oligonucleotide
  Target: PCSK9; (-) strand; PAM type: NNAGAAW; PAM sequence: CGAGAAA
cacaaccccacaacatccct

SEQ ID NO: 5390 - DNA, 20 bp, Artificial Sequence
  Description of Artificial Sequence: Synthetic oligonucleotide
  Target: PCSK9; (-) strand; PAM type: NNAGAAW; PAM sequence: GAAGAAA
tgttccaaacttccaccaga

SEQ ID NO: 5391 - DNA, 20 bp, Artificial Sequence
  Description of Artificial Sequence: Synthetic oligonucleotide
  Target: PCSK9; (-) strand; PAM type: NNAGAAW; PAM sequence: AAAGAAA
gcctcagtttctcatgacta

SEQ ID NO: 5392 - DNA, 20 bp, Artificial Sequence
  Description of Artificial Sequence: Synthetic oligonucleotide
  Target: PCSK9; (-) strand; PAM type: NNAGAAW; PAM sequence: CTAGAAT
gttcatggtacctcctaatc

SEQ ID NO: 5393 - DNA, 20 bp, Artificial Sequence
  Description of Artificial Sequence: Synthetic oligonucleotide
  Target: PCSK9; (-) strand; PAM type: NNAGAAW; PAM sequence: AAAGAAA
gaaactccatctcaaaaaaa

SEQ ID NO: 5394 - DNA, 20 bp, Artificial Sequence
  Description of Artificial Sequence: Synthetic oligonucleotide
  Target: PCSK9; (-) strand; PAM type: NNAGAAW; PAM sequence: GAAGAAT
gggcaatcagagtctgcttg

SEQ ID NO: 5395 - DNA, 20 bp, Artificial Sequence
  Description of Artificial Sequence: Synthetic oligonucleotide
  Target: PCSK9; (-) strand; PAM type: NNAGAAW; PAM sequence: TTAGAAA
cctcagaacttgtttggatt

SEQ ID NO: 5396 - DNA, 20 bp, Artificial Sequence
  Description of Artificial Sequence: Synthetic oligonucleotide
  Target: PCSK9; (-) strand; PAM type: NNAGAAW; PAM sequence: AGAGAAA
aggcaacacttcttaaagag

SEQ ID NO: 5397 - DNA, 20 bp, Artificial Sequence
  Description of Artificial Sequence: Synthetic oligonucleotide
  Target: PCSK9; (-) strand; PAM type: NNAGAAW; PAM sequence: TCAGAAT
ccccctcccccatgccccag

SEQ ID NO: 5398 - DNA, 20 bp, Artificial Sequence
  Description of Artificial Sequence: Synthetic oligonucleotide
  Target: PCSK9; (-) strand; PAM type: NNAGAAW; PAM sequence: GAAGAAA
aggaggaacatgatgacatg

SEQ ID NO: 5399 - DNA, 20 bp, Artificial Sequence
  Description of Artificial Sequence: Synthetic oligonucleotide
  Target: PCSK9; (-) strand; PAM type: NNAGAAW; PAM sequence: ACAGAAA
aggcttaaagggaattctat

SEQ ID NO: 5400 - DNA, 20 bp, Artificial Sequence
  Description of Artificial Sequence: Synthetic oligonucleotide
  Target: PCSK9; (-) strand; PAM type: NNAGAAW; PAM sequence: CAAGAAT
aggcagcagatgcattggca

SEQ ID NO: 5401 - DNA, 20 bp, Artificial Sequence
  Description of Artificial Sequence: Synthetic oligonucleotide
  Target: PCSK9; (-) strand; PAM type: NNAGAAW; PAM sequence: GGAGAAT
aagcactagggccagggtga

SEQ ID NO: 5402 - DNA, 20 bp, Artificial Sequence
  Description of Artificial Sequence: Synthetic oligonucleotide
  Target: PCSK9; (-) strand; PAM type: NNAGAAW; PAM sequence: GGAGAAT
agaagcaccgcctgccatgt

SEQ ID NO: 5403 - DNA, 20 bp, Artificial Sequence
  Description of Artificial Sequence: Synthetic oligonucleotide
  Target: PCSK9; (-) strand; PAM type: NNAGAAW; PAM sequence: GGAGAAT
ctactcgggaggctgaggca

SEQ ID NO: 5404 - DNA, 20 bp, Artificial Sequence
  Description of Artificial Sequence: Synthetic oligonucleotide
  Target: PCSK9; (-) strand; PAM type: NNAGAAW; PAM sequence: ACAGAAA
ctgcaggggatggggatggg

SEQ ID NO: 5405 - DNA, 20 bp, Artificial Sequence
  Description of Artificial Sequence: Synthetic oligonucleotide
  Target: PCSK9; (-) strand; PAM type: NNAGAAW; PAM sequence: AGAGAAA
atggtgagaaaaggaaaaca

SEQ ID NO: 5406 - DNA, 20 bp, Artificial Sequence
  Description of Artificial Sequence: Synthetic oligonucleotide
  Target: PCSK9; (-) strand; PAM type: NNAGAAW; PAM sequence: TGAGAAA
tgctgggccattccaaatgg

SEQ ID NO: 5407 - DNA, 20 bp, Artificial Sequence
  Description of Artificial Sequence: Synthetic oligonucleotide
  Target: PCSK9; (-) strand; PAM type: NNAGAAW; PAM sequence: AAAGAAA
ccaggcagagggaacagtgg

SEQ ID NO: 5408 - DNA, 20 bp, Artificial Sequence
  Description of Artificial Sequence: Synthetic oligonucleotide
  Target: PCSK9; (-) strand; PAM type: NNAGAAW; PAM sequence: CTAGAAT
ttgccacctgcaagtccctg

SEQ ID NO: 5409 - DNA, 20 bp, Artificial Sequence
  Description of Artificial Sequence: Synthetic oligonucleotide
  Target: PCSK9; (-) strand; PAM type: NNAGAAW; PAM sequence: GAAGAAA
caagaacgacaaagctcata

SEQ ID NO: 5410 - DNA, 20 bp, Artificial Sequence
  Description of Artificial Sequence: Synthetic oligonucleotide
  Target: PCSK9; (-) strand; PAM type: NNAGAAW; PAM sequence: AGAGAAT
cttctggcctccaggactgc

SEQ ID NO: 5411 - DNA, 20 bp, Artificial Sequence
  Description of Artificial Sequence: Synthetic oligonucleotide
  Target: PCSK9; (-) strand; PAM type: NNAGAAW; PAM sequence: GGAGAAA
cttctccctggagccccccg

SEQ ID NO: 5412 - DNA, 20 bp, Artificial Sequence
  Description of Artificial Sequence: Synthetic oligonucleotide
  Target: PCSK9; (-) strand; PAM type: NNAGAAW; PAM sequence: GAAGAAA
atccatgggcatcctatggg

SEQ ID NO: 5413 - DNA, 20 bp, Artificial Sequence
  Description of Artificial Sequence: Synthetic oligonucleotide
  Target: PCSK9; (-) strand; PAM type: NNAGAAW; PAM sequence: AGAGAAA
cacctcactcaatacctgac

SEQ ID NO: 5414 - DNA, 20 bp, Artificial Sequence
  Description of Artificial Sequence: Synthetic oligonucleotide
  Target: PCSK9; (-) strand; PAM type: NNAGAAW; PAM sequence: AAAGAAA
gttattattgaatggtaaga

SEQ ID NO: 5415 - DNA, 20 bp, Artificial Sequence
  Description of Artificial Sequence: Synthetic oligonucleotide
  Target: PCSK9; (-) strand; PAM type: NNAGAAW; PAM sequence: TAAGAAA
aaaacgttattattgaatgg

SEQ ID NO: 5416 - DNA, 20 bp, Artificial Sequence
  Description of Artificial Sequence: Synthetic oligonucleotide
  Target: PCSK9; (-) strand; PAM type: NNAGAAW; PAM sequence: TCAGAAA
cctccgctccagcgcaggtc

SEQ ID NO: 5417 - DNA, 20 bp, Artificial Sequence
  Description of Artificial Sequence: Synthetic oligonucleotide
  Target: PCSK9; (-) strand; PAM type: NNAGAAW; PAM sequence: GAAGAAA
tggatggagaagggagagag

SEQ ID NO: 5418 - DNA, 20 bp, Artificial Sequence
  Description of Artificial Sequence: Synthetic oligonucleotide
  Target: PCSK9; (-) strand; PAM type: NNAGAAW; PAM sequence: GGAGAAA
aggacaaaggttagggtata

SEQ ID NO: 5419 - DNA, 20 bp, Artificial Sequence
  Description of Artificial Sequence: Synthetic oligonucleotide
  Target: PCSK9; (-) strand; PAM type: NNAGAAW; PAM sequence: AGAGAAA
ctcacacgagtcacaacctc

SEQ ID NO: 5420 - DNA, 20 bp, Artificial Sequence
  Description of Artificial Sequence: Synthetic oligonucleotide
  Target: PCSK9; (-) strand; PAM type: NNAGAAW; PAM sequence: GGAGAAT
acaagatttaaagactcaaa

SEQ ID NO: 5421 - DNA, 20 bp, Artificial Sequence
  Description of Artificial Sequence: Synthetic oligonucleotide
  Target: PCSK9; (-) strand; PAM type: NNAGAAW; PAM sequence: CAAGAAA
ttcacagctcaccgagtctg

SEQ ID NO: 5422 - DNA, 20 bp, Artificial Sequence
  Description of Artificial Sequence: Synthetic oligonucleotide
  Target: PCSK9; (-) strand; PAM type: NNAGAAW; PAM sequence: ACAGAAA
gtcaaccttatagttaacac

SEQ ID NO: 5423 - DNA, 20 bp, Artificial Sequence
  Description of Artificial Sequence: Synthetic oligonucleotide
  Target: PCSK9; (-) strand; PAM type: NNAGAAW; PAM sequence: TGAGAAA
cgacgaacacaaggaccaca

SEQ ID NO: 5424 - DNA, 20 bp, Artificial Sequence
  Description of Artificial Sequence: Synthetic oligonucleotide
  Target: PCSK9; (-) strand; PAM type: NNAGAAW; PAM sequence: ATAGAAA
cagaggtatgcaagcagaag

SEQ ID NO: 5425 - DNA, 20 bp, Artificial Sequence
  Description of Artificial Sequence: Synthetic oligonucleotide
  Target: PCSK9; (-) strand; PAM type: NNAGAAW; PAM sequence: CTAGAAA
ggactaaatgtagtcacagt

SEQ ID NO: 5426 - DNA, 20 bp, Artificial Sequence
  Description of Artificial Sequence: Synthetic oligonucleotide
  Target: PCSK9; (-) strand; PAM type: NNAGAAW; PAM sequence: AAAGAAT
agttgctcccaggattgtct

SEQ ID NO: 5427 - DNA, 20 bp, Artificial Sequence
  Description of Artificial Sequence: Synthetic oligonucleotide
  Target: PCSK9; (-) strand; PAM type: NNAGAAW; PAM sequence: AGAGAAA
aaggtgaggaggtgggtggc

SEQ ID NO: 5428 - DNA, 20 bp, Artificial Sequence
  Description of Artificial Sequence: Synthetic oligonucleotide
  Target: PCSK9; (-) strand; PAM type: NNAGAAW; PAM sequence: ACAGAAA
ctgggagtgaggggacctcc

SEQ ID NO: 5429 - DNA, 20 bp, Artificial Sequence
  Description of Artificial Sequence: Synthetic oligonucleotide
  Target: PCSK9; (-) strand; PAM type: NNAGAAW; PAM sequence: GGAGAAA
ccccgccgcttcccactcct

SEQ ID NO: 5430 - DNA, 20 bp, Artificial Sequence
  Description of Artificial Sequence: Synthetic oligonucleotide
  Target: PCSK9; (-) strand; PAM type: NNAGAAW; PAM sequence: CCAGAAA
taagaccccatctcctcaag

SEQ ID NO: 5431 - DNA, 20 bp, Artificial Sequence
  Description of Artificial Sequence: Synthetic oligonucleotide
  Target: PCSK9; (-) strand; PAM type: NNAGAAW; PAM sequence: AGAGAAA
tggtttcaaaatggagatag

SEQ ID NO: 5432 - DNA, 20 bp, Artificial Sequence
  Description of Artificial Sequence: Synthetic oligonucleotide
  Target: PCSK9; (-) strand; PAM type: NNAGAAW; PAM sequence: ACAGAAA
ttagaatgggctttgaaaac

SEQ ID NO: 5433 - DNA, 20 bp, Artificial Sequence
  Description of Artificial Sequence: Synthetic oligonucleotide
  Target: PCSK9; (-) strand; PAM type: NNAGAAW; PAM sequence: TTAGAAT
gacggaaatgggaatctgct

SEQ ID NO: 5434 - DNA, 20 bp, Artificial Sequence
  Description of Artificial Sequence: Synthetic oligonucleotide
  Target: PCSK9; (-) strand; PAM type: NNAGAAW; PAM sequence: GGAGAAA
cgcgggcagtgggtgcataa

SEQ ID NO: 5435 - DNA, 20 bp, Artificial Sequence
  Description of Artificial Sequence: Synthetic oligonucleotide
  Target: PCSK9; (-) strand; PAM type: NNAGAAW; PAM sequence: CTAGAAT
gaaaacaatagtaacgatag

SEQ ID NO: 5436 - DNA, 20 bp, Artificial Sequence
  Description of Artificial Sequence: Synthetic oligonucleotide
  Target: PCSK9; (-) strand; PAM type: NNAGAAW; PAM sequence: CGAGAAT
ttcccctggacgtgctcaga

SEQ ID NO: 5437 - DNA, 20 bp, Artificial Sequence
  Description of Artificial Sequence: Synthetic oligonucleotide
  Target: PCSK9; (-) strand; PAM type: NNAGAAW; PAM sequence: AGAGAAA
tactcatttgtaagatggaa

SEQ ID NO: 5438 - DNA, 20 bp, Artificial Sequence
  Description of Artificial Sequence: Synthetic oligonucleotide
  Target: PCSK9; (-) strand; PAM type: NNAGAAW; PAM sequence: TAAGAAA
agtcagacacacccattggc

SEQ ID NO: 5439 - DNA, 20 bp, Artificial Sequence
  Description of Artificial Sequence: Synthetic oligonucleotide
  Target: PCSK9; (-) strand; PAM type: NNAGAAW; PAM sequence: TCAGAAT
cggggtctgtctgaaccacc

SEQ ID NO: 5440 - DNA, 20 bp, Artificial Sequence
  Description of Artificial Sequence: Synthetic oligonucleotide
  Target: PCSK9; (-) strand; PAM type: NNAGAAW; PAM sequence: AAAGAAA
aggaaacctagaaacaactc

SEQ ID NO: 5441 - DNA, 20 bp, Artificial Sequence
  Description of Artificial Sequence: Synthetic oligonucleotide
  Target: PCSK9; (-) strand; PAM type: NNAGAAW; PAM sequence: CTAGAAA
tgaggcaagagctaggaaac

SEQ ID NO: 5442 - DNA, 20 bp, Artificial Sequence
  Description of Artificial Sequence: Synthetic oligonucleotide
  Target: PCSK9; (-) strand; PAM type: NNAGAAW; PAM sequence: ACAGAAA
tggtggtggcacaaactgac

SEQ ID NO: 5443 - DNA, 20 bp, Artificial Sequence
  Description of Artificial Sequence: Synthetic oligonucleotide
  Target: PCSK9; (-) strand; PAM type: NNAGAAW; PAM sequence: TCAGAAA
caacacagcaagaccccatc

SEQ ID NO: 5444 - DNA, 20 bp, Artificial Sequence
  Description of Artificial Sequence: Synthetic oligonucleotide
  Target: PCSK9; (-) strand; PAM type: NNAGAAW; PAM sequence: CCAGAAT
cgaggaatgcaccatccaga

SEQ ID NO: 5445 - DNA, 20 bp, Artificial Sequence
  Description of Artificial Sequence: Synthetic oligonucleotide
  Target: PCSK9; (-) strand; PAM type: NNAGAAW; PAM sequence: AAAGAAA
cacctgccagagcccgagga

SEQ ID NO: 5446 - DNA, 20 bp, Artificial Sequence
  Description of Artificial Sequence: Synthetic oligonucleotide
  Target: PCSK9; (-) strand; PAM type: NNAGAAW; PAM sequence: GAAGAAT
gccccctcccctatccatgg

SEQ ID NO: 5447 - DNA, 20 bp, Artificial Sequence
  Description of Artificial Sequence: Synthetic oligonucleotide
  Target: PCSK9; (-) strand; PAM type: NNAGAAW; PAM sequence: CCAGAAA
agcctctggctagatgccat

SEQ ID NO: 5448 - DNA, 20 bp, Artificial Sequence
  Description of Artificial Sequence: Synthetic oligonucleotide
  Target: PCSK9; (-) strand; PAM type: NNAGAAW; PAM sequence: CTAGAAA
gttacaaaagcaaaacaggt

SEQ ID NO: 5449 - DNA, 20 bp, Artificial Sequence
  Description of Artificial Sequence: Synthetic oligonucleotide
  Target: PCSK9; (-) strand; PAM type: NNAGAAW; PAM sequence: CCAGAAT
taataaaaatgctacaaaac

SEQ ID NO: 5450 - DNA, 20 bp, Artificial Sequence
  Description of Artificial Sequence: Synthetic oligonucleotide
  Target: PCSK9; (-) strand; PAM type: NNAGAAW; PAM sequence: AAAGAAT
tgtgccaggtactggggaga

SEQ ID NO: 5451 - DNA, 20 bp, Artificial Sequence
  Description of Artificial Sequence: Synthetic oligonucleotide
  Target: PCSK9; (-) strand; PAM type: NNAGAAW; PAM sequence: GGAGAAA
ggctgtgtgccaggtactgg

SEQ ID NO: 5452 - DNA, 20 bp, Artificial Sequence
  Description of Artificial Sequence: Synthetic oligonucleotide
  Target: PCSK9; (-) strand; PAM type: NNAGAAW; PAM sequence: TCAGAAA
ccatatatgacactgaattg

SEQ ID NO: 5453 - DNA, 20 bp, Artificial Sequence
  Description of Artificial Sequence: Synthetic oligonucleotide
  Target: PCSK9; (-) strand; PAM type: NNAGAAW; PAM sequence: AAAGAAA
cccgttgaaggcatcctggg

SEQ ID NO: 5454 - DNA, 20 bp, Artificial Sequence
  Description of Artificial Sequence: Synthetic oligonucleotide
  Target: PCSK9; (-) strand; PAM type: NNAGAAW; PAM sequence: AGAGAAA
aagagcagaactgtaccctt

SEQ ID NO: 5455 - DNA, 20 bp, Artificial Sequence
  Description of Artificial Sequence: Synthetic oligonucleotide
  Target: PCSK9; (-) strand; PAM type: NNAGAAW; PAM sequence: CCAGAAA
aaggtttaagatttattttc

SEQ ID NO: 5456 - DNA, 20 bp, Artificial Sequence
  Description of Artificial Sequence: Synthetic oligonucleotide
  Target: PCSK9; (-) strand; PAM type: NNAGAAW; PAM sequence: TGAGAAT
tgtaatgcagagaaggaatt

SEQ ID NO: 5457 - DNA, 20 bp, Artificial Sequence
  Description of Artificial Sequence: Synthetic oligonucleotide
  Target: PCSK9; (-) strand; PAM type: NNAGAAW; PAM sequence: ACAGAAT
attttactgagtttaacttc

SEQ ID NO: 5458 - DNA, 20 bp, Artificial Sequence
  Description of Artificial Sequence: Synthetic oligonucleotide
  Target: PCSK9; (-) strand; PAM type: NNAGAAW; PAM sequence: ATAGAAT
taatatgtctccctatttgt

SEQ ID NO: 5459 - DNA, 20 bp, Artificial Sequence
  Description of Artificial Sequence: Synthetic oligonucleotide
  Target: PCSK9; (-) strand; PAM type: NNAGAAW; PAM sequence: TAAGAAA
ttcctttggtttttatattt

SEQ ID NO: 5460 - DNA, 20 bp, Artificial Sequence
  Description of Artificial Sequence: Synthetic oligonucleotide
  Target: PCSK9; (-) strand; PAM type: NNAGAAW; PAM sequence: AAAGAAA
gctttctctacgatgctaca

SEQ ID NO: 5461 - DNA, 20 bp, Artificial Sequence
  Description of Artificial Sequence: Synthetic oligonucleotide
  Target: PCSK9; (-) strand; PAM type: NNAGAAW; PAM sequence: TCAGAAT
tgctcagcaccttcttggaa

SEQ ID NO: 5462 - DNA, 20 bp, Artificial Sequence
  Description of Artificial Sequence: Synthetic oligonucleotide
  Target: PCSK9; (-) strand; PAM type: NNAGAAW; PAM sequence: TCAGAAT
ccttttcttttctgcagggt

SEQ ID NO: 5463 - DNA, 20 bp, Artificial Sequence
  Description of Artificial Sequence: Synthetic oligonucleotide
  Target: PCSK9; (-) strand; PAM type: NNAGAAW; PAM sequence: ATAGAAA
attgcagaacacaagtcagc

SEQ ID NO: 5464 - DNA, 20 bp, Artificial Sequence
  Description of Artificial Sequence: Synthetic oligonucleotide
  Target: PCSK9; (-) strand; PAM type: NNAGAAW; PAM sequence: ATAGAAA
ttcactgactaaatgagatc

SEQ ID NO: 5465 - DNA, 20 bp, Artificial Sequence
  Description of Artificial Sequence: Synthetic oligonucleotide
  Target: PCSK9; (+) strand; PAM type: NNAGAAW; PAM sequence: GAAGAAA
tttggattgctgaacccctg

SEQ ID NO: 5466 - DNA, 20 bp, Artificial Sequence
  Description of Artificial Sequence: Synthetic oligonucleotide
  Target: PCSK9; (+) strand; PAM type: NNAGAAW; PAM sequence: TAAGAAA
atttccttaggataaattcc

SEQ ID NO: 5467 - DNA, 20 bp, Artificial Sequence
  Description of Artificial Sequence: Synthetic oligonucleotide
  Target: PCSK9; (+) strand; PAM type: NNAGAAW; PAM sequence: CCAGAAT
tattaaaggtacaaaaacag

SEQ ID NO: 5468 - DNA, 20 bp, Artificial Sequence
  Description of Artificial Sequence: Synthetic oligonucleotide
  Target: PCSK9; (+) strand; PAM type: NNAGAAW; PAM sequence: GGAGAAA
aagacgtcatttctaatcag

SEQ ID NO: 5469 - DNA, 20 bp, Artificial Sequence
  Description of Artificial Sequence: Synthetic oligonucleotide
  Target: PCSK9; (+) strand; PAM type: NNAGAAW; PAM sequence: GGAGAAA
gaacaataggctagccttct

SEQ ID NO: 5470 - DNA, 20 bp, Artificial Sequence
  Description of Artificial Sequence: Synthetic oligonucleotide
  Target: PCSK9; (+) strand; PAM type: NNAGAAW; PAM sequence: ACAGAAA
tgatggacatgtgaggtgag

SEQ ID NO: 5471 - DNA, 20 bp, Artificial Sequence
  Description of Artificial Sequence: Synthetic oligonucleotide
  Target: PCSK9; (+) strand; PAM type: NNAGAAW; PAM sequence: ACAGAAA
ttggattgcaatagcaaaag

SEQ ID NO: 5472 - DNA, 20 bp, Artificial Sequence
  Description of Artificial Sequence: Synthetic oligonucleotide
  Target: PCSK9; (+) strand; PAM type: NNAGAAW; PAM sequence: ATAGAAT
aaagacattgtgaaacatac

SEQ ID NO: 5473 - DNA, 20 bp, Artificial Sequence
  Description of Artificial Sequence: Synthetic oligonucleotide
  Target: PCSK9; (+) strand; PAM type: NNAGAAW; PAM sequence: CCAGAAA
tagaatgaaataatctgcaa

SEQ ID NO: 5474 - DNA, 20 bp, Artificial Sequence
  Description of Artificial Sequence: Synthetic oligonucleotide
  Target: PCSK9; (+) strand; PAM type: NNAGAAW; PAM sequence: CTAGAAA
ctatgaggggaaggcaatgg

SEQ ID NO: 5475 - DNA, 20 bp, Artificial Sequence
  Description of Artificial Sequence: Synthetic oligonucleotide
  Target: PCSK9; (+) strand; PAM type: NNAGAAW; PAM sequence: AAAGAAT
gatgcttgtggggtgaaggg

SEQ ID NO: 5476 - DNA, 20 bp, Artificial Sequence
  Description of Artificial Sequence: Synthetic oligonucleotide
  Target: PCSK9; (+) strand; PAM type: NNAGAAW; PAM sequence: CCAGAAA
ggaaaaggatgggtgttgac

SEQ ID NO: 5477 - DNA, 20 bp, Artificial Sequence
  Description of Artificial Sequence: Synthetic oligonucleotide
  Target: PCSK9; (+) strand; PAM type: NNAGAAW; PAM sequence: CCAGAAA
tcccagtatcgacagccctt

SEQ ID NO: 5478 - DNA, 20 bp, Artificial Sequence
  Description of Artificial Sequence: Synthetic oligonucleotide
  Target: PCSK9; (+) strand; PAM type: NNAGAAW; PAM sequence: ATAGAAT
aagctgagcttgtgcctacc

SEQ ID NO: 5479 - DNA, 20 bp, Artificial Sequence
  Description of Artificial Sequence: Synthetic oligonucleotide
  Target: PCSK9; (+) strand; PAM type: NNAGAAW; PAM sequence: AAAGAAT
tgccaggttaaggccagtgg

SEQ ID NO: 5480 - DNA, 20 bp, Artificial Sequence
  Description of Artificial Sequence: Synthetic oligonucleotide
  Target: PCSK9; (+) strand; PAM type: NNAGAAW; PAM sequence: AGAGAAA
ctgggaactgcaccaggcac

SEQ ID NO: 5481 - DNA, 20 bp, Artificial Sequence
  Description of Artificial Sequence: Synthetic oligonucleotide
  Target: PCSK9; (+) strand; PAM type: NNAGAAW; PAM sequence: GAAGAAA
gtattccatctgtttcagcc

SEQ ID NO: 5482 - DNA, 20 bp, Artificial Sequence
  Description of Artificial Sequence: Synthetic oligonucleotide
  Target: PCSK9; (+) strand; PAM type: NNAGAAW; PAM sequence: TAAGAAA
ttgtggggttgtggccagga

SEQ ID NO: 5483 - DNA, 20 bp, Artificial Sequence
  Description of Artificial Sequence: Synthetic oligonucleotide
  Target: PCSK9; (+) strand; PAM type: NNAGAAW; PAM sequence: TTAGAAT
ttattttgtgggaatcgaat

SEQ ID NO: 5484 - DNA, 20 bp, Artificial Sequence
  Description of Artificial Sequence: Synthetic oligonucleotide
  Target: PCSK9; (+) strand; PAM type: NNAGAAW; PAM sequence: GCAGAAA
atgaaaatattttttggcaa

SEQ ID NO: 5485 - DNA, 20 bp, Artificial Sequence
  Description of Artificial Sequence: Synthetic oligonucleotide
  Target: PCSK9; (+) strand; PAM type: NNAGAAW; PAM sequence: TGAGAAA
caatccttttcttttagtca

SEQ ID NO: 5486 - DNA, 20 bp, Artificial Sequence
  Description of Artificial Sequence: Synthetic oligonucleotide
  Target: PCSK9; (+) strand; PAM type: NNAGAAW; PAM sequence: TGAGAAT
gttcagcgatgatggtgtca

SEQ ID NO: 5487 - DNA, 20 bp, Artificial Sequence
  Description of Artificial Sequence: Synthetic oligonucleotide
  Target: PCSK9; (+) strand; PAM type: NNAGAAW; PAM sequence: GCAGAAT
ccatgcttcctggagagctt

SEQ ID NO: 5488 - DNA, 20 bp, Artificial Sequence
  Description of Artificial Sequence: Synthetic oligonucleotide
  Target: PCSK9; (+) strand; PAM type: NNAGAAW; PAM sequence: ATAGAAT
agtaactactggctttctgt

SEQ ID NO: 5489 - DNA, 20 bp, Artificial Sequence
  Description of Artificial Sequence: Synthetic oligonucleotide
  Target: PCSK9; (+) strand; PAM type: NNAGAAW; PAM sequence: GCAGAAA
gtcacatcttcggtggaggg

SEQ ID NO: 5490 - DNA, 20 bp, Artificial Sequence
  Description of Artificial Sequence: Synthetic oligonucleotide
  Target: PCSK9; (+) strand; PAM type: NNAGAAW; PAM sequence: GGAGAAT
tgagcaggctggagaaggct

SEQ ID NO: 5491 - DNA, 20 bp, Artificial Sequence
  Description of Artificial Sequence: Synthetic oligonucleotide
  Target: PCSK9; (+) strand; PAM type: NNAGAAW; PAM sequence: TCAGAAT
tcccagacaagatgtcaagt

SEQ ID NO: 5492 - DNA, 20 bp, Artificial Sequence
  Description of Artificial Sequence: Synthetic oligonucleotide
  Target: PCSK9; (+) strand; PAM type: NNAGAAW; PAM sequence: CGAGAAA
ctcccagcctgatcaaggag

SEQ ID NO: 5493 - DNA, 20 bp, Artificial Sequence
  Description of Artificial Sequence: Synthetic oligonucleotide
  Target: PCSK9; (+) strand; PAM type: NNAGAAW; PAM sequence: AGAGAAT
tagatgcacctggcctgagg

SEQ ID NO: 5494 - DNA, 20 bp, Artificial Sequence
  Description of Artificial Sequence: Synthetic oligonucleotide
  Target: PCSK9; (+) strand; PAM type: NNAGAAW; PAM sequence: GGAGAAA
agagctggtgggctgggtgt

SEQ ID NO: 5495 - DNA, 20 bp, Artificial Sequence
  Description of Artificial Sequence: Synthetic oligonucleotide
  Target: PCSK9; (+) strand; PAM type: NNAGAAW; PAM sequence: CCAGAAA
ggtcccaagcacgggtggga

SEQ ID NO: 5496 - DNA, 20 bp, Artificial Sequence
  Description of Artificial Sequence: Synthetic oligonucleotide
  Target: PCSK9; (+) strand; PAM type: NNAGAAW; PAM sequence: GAAGAAA
gacctgctcagcatgctaca

SEQ ID NO: 5497 - DNA, 20 bp, Artificial Sequence
  Description of Artificial Sequence: Synthetic oligonucleotide
  Target: PCSK9; (+) strand; PAM type: NNAGAAW; PAM sequence: GGAGAAA
ctgtgagccagaccttattt

SEQ ID NO: 5498 - DNA, 20 bp, Artificial Sequence
  Description of Artificial Sequence: Synthetic oligonucleotide
  Target: PCSK9; (+) strand; PAM type: NNAGAAW; PAM sequence: AGAGAAA
tcctgtgatgtgtctttatg

SEQ ID NO: 5499 - DNA, 20 bp, Artificial Sequence
  Description of Artificial Sequence: Synthetic oligonucleotide
  Target: PCSK9; (+) strand; PAM type: NNAGAAW; PAM sequence: GGAGAAA
tggagacagaggtggagatt

SEQ ID NO: 5500 - DNA, 20 bp, Artificial Sequence
  Description of Artificial Sequence: Synthetic oligonucleotide
  Target: PCSK9; (+) strand; PAM type: NNAGAAW; PAM sequence: TGAGAAT
cttgctcacctgtcctgaga

SEQ ID NO: 5501 - DNA, 20 bp, Artificial Sequence
  Description of Artificial Sequence: Synthetic oligonucleotide
  Target: PCSK9; (+) strand; PAM type: NNAGAAW; PAM sequence: GGAGAAT
taccccagtgcctgcttctt

SEQ ID NO: 5502 - DNA, 20 bp, Artificial Sequence
  Description of Artificial Sequence: Synthetic oligonucleotide
  Target: PCSK9; (+) strand; PAM type: NNAGAAW; PAM sequence: ATAGAAT
ccttgtctatgaaatacatt

SEQ ID NO: 5503 - DNA, 20 bp, Artificial Sequence
  Description of Artificial Sequence: Synthetic oligonucleotide
  Target: PCSK9; (+) strand; PAM type: NNAGAAW; PAM sequence: CGAGAAT
agggtcatggtcaccgactt

SEQ ID NO: 5504 - DNA, 20 bp, Artificial Sequence
  Description of Artificial Sequence: Synthetic oligonucleotide
  Target: PCSK9; (+) strand; PAM type: NNAGAAW; PAM sequence: CAAGAAT
gagagctaatgtctcctaac

SEQ ID NO: 5505 - DNA, 20 bp, Artificial Sequence
  Description of Artificial Sequence: Synthetic oligonucleotide
  Target: PCSK9; (+) strand; PAM type: NNAGAAW; PAM sequence: GAAGAAA
cagtggccacgagtgcagat

SEQ ID NO: 5506 - DNA, 20 bp, Artificial Sequence
  Description of Artificial Sequence: Synthetic oligonucleotide
  Target: PCSK9; (+) strand; PAM type: NNAGAAW; PAM sequence: CAAGAAT
ttgatgttcagttttaaagg

SEQ ID NO: 5507 - DNA, 20 bp, Artificial Sequence
  Description of Artificial Sequence: Synthetic oligonucleotide
  Target: PCSK9; (+) strand; PAM type: NNAGAAW; PAM sequence: CCAGAAA
ggaggggaggctgttctttc

SEQ ID NO: 5508 - DNA, 20 bp, Artificial Sequence
  Description of Artificial Sequence: Synthetic oligonucleotide
  Target: PCSK9; (+) strand; PAM type: NNAGAAW; PAM sequence: GGAGAAT
ctacttgggaggctaaggca

SEQ ID NO: 5509 - DNA, 20 bp, Artificial Sequence
  Description of Artificial Sequence: Synthetic oligonucleotide
  Target: PCSK9; (+) strand; PAM type: NNAGAAW; PAM sequence: GGAGAAT
ctactcaggaggctgaggca

SEQ ID NO: 5510 - DNA, 20 bp, Artificial Sequence
  Description of Artificial Sequence: Synthetic oligonucleotide
  Target: PCSK9; (+) strand; PAM type: NNAGAAW; PAM sequence: AAAGAAA
tagagcgagactccgtctgg

SEQ ID NO: 5511 - DNA, 20 bp, Artificial Sequence
  Description of Artificial Sequence: Synthetic oligonucleotide
  Target: PCSK9; (+) strand; PAM type: NNAGAAW; PAM sequence: GCAGAAT
caggcaggctggcaattcct

SEQ ID NO: 5512 - DNA, 20 bp, Artificial Sequence
  Description of Artificial Sequence: Synthetic oligonucleotide
  Target: PCSK9; (+) strand; PAM type: NNAGAAW; PAM sequence: GCAGAAT
agtcctaaggcagtcctggg

SEQ ID NO: 5513 - DNA, 20 bp, Artificial Sequence
  Description of Artificial Sequence: Synthetic oligonucleotide
  Target: PCSK9; (+) strand; PAM type: NNAGAAW; PAM sequence: TGAGAAT
ccaccttaaataggattaaa

SEQ ID NO: 5514 - DNA, 20 bp, Artificial Sequence
  Description of Artificial Sequence: Synthetic oligonucleotide
  Target: PCSK9; (+) strand; PAM type: NNAGAAW; PAM sequence: TGAGAAA
tgctccatggttctgggagc

SEQ ID NO: 5515 - DNA, 20 bp, Artificial Sequence
  Description of Artificial Sequence: Synthetic oligonucleotide
  Target: PCSK9; (+) strand; PAM type: NNAGAAW; PAM sequence: AGAGAAT
agcccttgcagctaggacat

SEQ ID NO: 5516 - DNA, 20 bp, Artificial Sequence
  Description of Artificial Sequence: Synthetic oligonucleotide
  Target: PCSK9; (+) strand; PAM type: NNAGAAW; PAM sequence: TGAGAAA
tggaaagatggtgttttccc

SEQ ID NO: 5517 - DNA, 20 bp, Artificial Sequence
  Description of Artificial Sequence: Synthetic oligonucleotide
  Target: PCSK9; (+) strand; PAM type: NNAGAAW; PAM sequence: GTAGAAT
ggtaccccactccacttgga

SEQ ID NO: 5518 - DNA, 20 bp, Artificial Sequence
  Description of Artificial Sequence: Synthetic oligonucleotide
  Target: PCSK9; (+) strand; PAM type: NNAGAAW; PAM sequence: AAAGAAA
aatgtgcataaatatggcat

SEQ ID NO: 5519 - DNA, 20 bp, Artificial Sequence
  Description of Artificial Sequence: Synthetic oligonucleotide
  Target: PCSK9; (+) strand; PAM type: NNAGAAW; PAM sequence: CAAGAAA
tgttagcatgaccagcaagg

SEQ ID NO: 5520 - DNA, 20 bp, Artificial Sequence
  Description of Artificial Sequence: Synthetic oligonucleotide
  Target: PCSK9; (+) strand; PAM type: NNAGAAW; PAM sequence: CTAGAAA
gaatgtgacagccgggcctt

SEQ ID NO: 5521 - DNA, 20 bp, Artificial Sequence
  Description of Artificial Sequence: Synthetic oligonucleotide
  Target: PCSK9; (+) strand; PAM type: NNAGAAW; PAM sequence: ACAGAAA
atctattttagtggaggaag

SEQ ID NO: 5522 - DNA, 20 bp, Artificial Sequence
  Description of Artificial Sequence: Synthetic oligonucleotide
  Target: PCSK9; (+) strand; PAM type: NNAGAAW; PAM sequence: GGAGAAA
gagtactgaaaagatgcgat

SEQ ID NO: 5523 - DNA, 20 bp, Artificial Sequence
  Description of Artificial Sequence: Synthetic oligonucleotide
  Target: PCSK9; (+) strand; PAM type: NNAGAAW; PAM sequence: GGAGAAA
ctcacagaaggatgtcggag

SEQ ID NO: 5524 - DNA, 20 bp, Artificial Sequence
  Description of Artificial Sequence: Synthetic oligonucleotide
  Target: PCSK9; (+) strand; PAM type: NNAGAAW; PAM sequence: GCAGAAT
caatgtgccgatgtccgtgg

SEQ ID NO: 5525 - DNA, 20 bp, Artificial Sequence
  Description of Artificial Sequence: Synthetic oligonucleotide
  Target: PCSK9; (+) strand; PAM type: NNAGAAW; PAM sequence: GAAGAAA
cgcacccctacttcacagag

SEQ ID NO: 5526 - DNA, 20 bp, Artificial Sequence
  Description of Artificial Sequence: Synthetic oligonucleotide
  Target: PCSK9; (+) strand; PAM type: NNAGAAW; PAM sequence: CCAGAAA
ctcacacagcaggaactgag

SEQ ID NO: 5527 - DNA, 20 bp, Artificial Sequence
  Description of Artificial Sequence: Synthetic oligonucleotide
  Target: PCSK9; (+) strand; PAM type: NNAGAAW; PAM sequence: ACAGAAT
actctctctccttcccctcc

SEQ ID NO: 5528 - DNA, 20 bp, Artificial Sequence
  Description of Artificial Sequence: Synthetic oligonucleotide
  Target: PCSK9; (+) strand; PAM type: NNAGAAW; PAM sequence: AGAGAAA
ctgaaatggtcagcccctcc

SEQ ID NO: 5529 - DNA, 20 bp, Artificial Sequence
  Description of Artificial Sequence: Synthetic oligonucleotide
  Target: PCSK9; (+) strand; PAM type: NNAGAAW; PAM sequence: GAAGAAT
acggctgtgttctgatatat

SEQ ID NO: 5530 - DNA, 20 bp, Artificial Sequence
  Description of Artificial Sequence: Synthetic oligonucleotide
  Target: PCSK9; (+) strand; PAM type: NNAGAAW; PAM sequence: TTAGAAT
ttgccacacatgaaccaaat

SEQ ID NO: 5531 - DNA, 20 bp, Artificial Sequence
  Description of Artificial Sequence: Synthetic oligonucleotide
  Target: PCSK9; (+) strand; PAM type: NNAGAAW; PAM sequence: GCAGAAT
tcccaggatgccttcaacgg

SEQ ID NO: 5532 - DNA, 20 bp, Artificial Sequence
  Description of Artificial Sequence: Synthetic oligonucleotide
  Target: PCSK9; (+) strand; PAM type: NNAGAAW; PAM sequence: TGAGAAT
ggatgtgggcggagagaagg

SEQ ID NO: 5533 - DNA, 20 bp, Artificial Sequence
  Description of Artificial Sequence: Synthetic oligonucleotide
  Target: PCSK9; (+) strand; PAM type: NNAGAAW; PAM sequence: ACAGAAT
ctgccaacctccagcaagtc

SEQ ID NO: 5534 - DNA, 20 bp, Artificial Sequence
  Description of Artificial Sequence: Synthetic oligonucleotide
  Target: PCSK9; (+) strand; PAM type: NNAGAAW; PAM sequence: ACAGAAA
taacaatgaagtctgacagc

SEQ ID NO: 5535 - DNA, 20 bp, Artificial Sequence
  Description of Artificial Sequence: Synthetic oligonucleotide
  Target: PCSK9; (+) strand; PAM type: NNAGAAW; PAM sequence: AGAGAAT
gcacagaaaccctcactgcc

SEQ ID NO: 5536 - DNA, 20 bp, Artificial Sequence
  Description of Artificial Sequence: Synthetic oligonucleotide
  Target: PCSK9; (+) strand; PAM type: NNAGAAW; PAM sequence: GGAGAAA
gtgttaattagtcatgttga

SEQ ID NO: 5537 - DNA, 20 bp, Artificial Sequence
  Description of Artificial Sequence: Synthetic oligonucleotide
  Target: PCSK9; (+) strand; PAM type: NNAGAAW; PAM sequence: TCAGAAA
ctcttttcaatctaattata

SEQ ID NO: 5538 - DNA, 20 bp, Artificial Sequence
  Description of Artificial Sequence: Synthetic oligonucleotide
  Target: PCSK9; (+) strand; PAM type: NNAGAAW; PAM sequence: AGAGAAA
aatttcttttgtagcatcgt

SEQ ID NO: 5539 - DNA, 20 bp, Artificial Sequence
  Description of Artificial Sequence: Synthetic oligonucleotide
  Target: PCSK9; (+) strand; PAM type: NNAGAAW; PAM sequence: ACAGAAA
ctctatttccgaaaatctcc

SEQ ID NO: 5540 - DNA, 20 bp, Artificial Sequence
  Description of Artificial Sequence: Synthetic oligonucleotide
  Target: PCSK9; (+) strand; PAM type: NNAGAAW; PAM sequence: TGAGAAA
tggcttaaaaatgctttcct

SEQ ID NO: 5541 - DNA, 20 bp, Artificial Sequence
  Description of Artificial Sequence: Synthetic oligonucleotide
  Target: PCSK9; (+) strand; PAM type: NNAGAAW; PAM sequence: GCAGAAA
catgggagattctgaaccct

SEQ ID NO: 5542 - DNA, 20 bp, Artificial Sequence
  Description of Artificial Sequence: Synthetic oligonucleotide
  Target: PCSK9; (+) strand; PAM type: NNAGAAW; PAM sequence: AAAGAAA
gagattctgaaccctgcaga

SEQ ID NO: 5543 - DNA, 20 bp, Artificial Sequence
  Description of Artificial Sequence: Synthetic oligonucleotide
  Target: PCSK9; (+) strand; PAM type: NNAGAAW; PAM sequence: AGAGAAA
aagttaaagttcatacggtt

SEQ ID NO: 5544 - DNA, 20 bp, Artificial Sequence
  Description of Artificial Sequence: Synthetic oligonucleotide
  Target: PCSK9; (+) strand; PAM type: NNAGAAW; PAM sequence: TCAGAAA
gtacatttgataaataaaat

SEQ ID NO: 5545 - DNA, 20 bp, Artificial Sequence
  Description of Artificial Sequence: Synthetic oligonucleotide
  Target: PCSK9; (+) strand; PAM type: NNAGAAW; PAM sequence: GGAGAAT
tacttgggaggctgaggcaa

SEQ ID NO: 5546 - DNA, 20 bp, Artificial Sequence
  Description of Artificial Sequence: Synthetic oligonucleotide
  Target: PCSK9; (-) strand; PAM type: NNGRRT; PAM sequence: TGGAAT
tttaaggtacagaccccaaa

SEQ ID NO: 5547 - DNA, 20 bp, Artificial Sequence
  Description of Artificial Sequence: Synthetic oligonucleotide
  Target: PCSK9; (-) strand; PAM type: NNGRRT; PAM sequence: TGGGAT
attttagtctgttcatatgg

SEQ ID NO: 5548 - DNA, 20 bp, Artificial Sequence
  Description of Artificial Sequence: Synthetic oligonucleotide
  Target: PCSK9; (-) strand; PAM type: NNGRRT; PAM sequence: AGGGGT
gctcttattgaatttcttcc

SEQ ID NO: 5549 - DNA, 20 bp, Artificial Sequence
  Description of Artificial Sequence: Synthetic oligonucleotide
  Target: PCSK9; (-) strand; PAM type: NNGRRT; PAM sequence: TTGAAT
tacacttctgtttgctctta

SEQ ID NO: 5550 - DNA, 20 bp, Artificial Sequence
  Description of Artificial Sequence: Synthetic oligonucleotide
  Target: PCSK9; (-) strand; PAM type: NNGRRT; PAM sequence: CAGGGT
aaactctcactttgatctgc

SEQ ID NO: 5551 - DNA, 20 bp, Artificial Sequence
  Description of Artificial Sequence: Synthetic oligonucleotide
  Target: PCSK9; (-) strand; PAM type: NNGRRT; PAM sequence: ATGAGT
ctcctgcctcttggggtggt

SEQ ID NO: 5552 - DNA, 20 bp, Artificial Sequence
  Description of Artificial Sequence: Synthetic oligonucleotide
  Target: PCSK9; (-) strand; PAM type: NNGRRT; PAM sequence: TGGGGT
ctgcgctgcctcctgcctct

SEQ ID NO: 5553 - DNA, 20 bp, Artificial Sequence
  Description of Artificial Sequence: Synthetic oligonucleotide
  Target: PCSK9; (-) strand; PAM type: NNGRRT; PAM sequence: TGGGGT
taggaagcccagacatgtgg

SEQ ID NO: 5554 - DNA, 20 bp, Artificial Sequence
  Description of Artificial Sequence: Synthetic oligonucleotide
  Target: PCSK9; (-) strand; PAM type: NNGRRT; PAM sequence: CAGGGT
ctgactcagtaaagactgaa

SEQ ID NO: 5555 - DNA, 20 bp, Artificial Sequence
  Description of Artificial Sequence: Synthetic oligonucleotide
  Target: PCSK9; (-) strand; PAM type: NNGRRT; PAM sequence: ATGGGT
gtaagaagctctgctgtaaa

SEQ ID NO: 5556 - DNA, 20 bp, Artificial Sequence
  Description of Artificial Sequence: Synthetic oligonucleotide
  Target: PCSK9; (-) strand; PAM type: NNGRRT; PAM sequence: AAGGGT
ccaatggcccaggatggaca

SEQ ID NO: 5557 - DNA, 20 bp, Artificial Sequence
  Description of Artificial Sequence: Synthetic oligonucleotide
  Target: PCSK9; (-) strand; PAM type: NNGRRT; PAM sequence: CAGGAT
ctggagctggcccaatggcc

SEQ ID NO: 5558 - DNA, 20 bp, Artificial Sequence
  Description of Artificial Sequence: Synthetic oligonucleotide
  Target: PCSK9; (-) strand; PAM type: NNGRRT; PAM sequence: AAGGAT
gcgatgtacacccaccattc

SEQ ID NO: 5559 - DNA, 20 bp, Artificial Sequence
  Description of Artificial Sequence: Synthetic oligonucleotide
  Target: PCSK9; (-) strand; PAM type: NNGRRT; PAM sequence: AGGAAT
acctagctatttgatttctt

SEQ ID NO: 5560 - DNA, 20 bp, Artificial Sequence
  Description of Artificial Sequence: Synthetic oligonucleotide
  Target: PCSK9; (-) strand; PAM type: NNGRRT; PAM sequence: AGGAGT
ctgggatttacttttgtata

SEQ ID NO: 5561 - DNA, 20 bp, Artificial Sequence
  Description of Artificial Sequence: Synthetic oligonucleotide
  Target: PCSK9; (-) strand; PAM type: NNGRRT; PAM sequence: TGGGAT
tttaatatcttggcttccac

SEQ ID NO: 5562 - DNA, 20 bp, Artificial Sequence
  Description of Artificial Sequence: Synthetic oligonucleotide
  Target: PCSK9; (-) strand; PAM type: NNGRRT; PAM sequence: TGGAGT
atagaaaattttaattttca

SEQ ID NO: 5563 - DNA, 20 bp, Artificial Sequence
  Description of Artificial Sequence: Synthetic oligonucleotide
  Target: PCSK9; (-) strand; PAM type: NNGRRT; PAM sequence: CAGAGT
tggtcacacccaggccaaca

SEQ ID NO: 5564 - DNA, 20 bp, Artificial Sequence
  Description of Artificial Sequence: Synthetic oligonucleotide
  Target: PCSK9; (-) strand; PAM type: NNGRRT; PAM sequence: GTGAAT
ggaggagaaagggtatattt

SEQ ID NO: 5565 - DNA, 20 bp, Artificial Sequence
  Description of Artificial Sequence: Synthetic oligonucleotide
  Target: PCSK9; (-) strand; PAM type: NNGRRT; PAM sequence: AAGGGT
aagtgcccagaaggaggaga

SEQ ID NO: 5566 - DNA, 20 bp, Artificial Sequence
  Description of Artificial Sequence: Synthetic oligonucleotide
  Target: PCSK9; (-) strand; PAM type: NNGRRT; PAM sequence: CAGAAT
gcagtgctggaggaatccat

SEQ ID NO: 5567 - DNA, 20 bp, Artificial Sequence
  Description of Artificial Sequence: Synthetic oligonucleotide
  Target: PCSK9; (-) strand; PAM type: NNGRRT; PAM sequence: AGGAAT
cttcccacgagcagtgctgg

SEQ ID NO: 5568 - DNA, 20 bp, Artificial Sequence
  Description of Artificial Sequence: Synthetic oligonucleotide
  Target: PCSK9; (-) strand; PAM type: NNGRRT; PAM sequence: ATGAAT
aatttcgagataaagggcac

SEQ ID NO: 5569 - DNA, 20 bp, Artificial Sequence
  Description of Artificial Sequence: Synthetic oligonucleotide
  Target: PCSK9; (-) strand; PAM type: NNGRRT; PAM sequence: TGGAAT
gtttcataaattcctggaag

SEQ ID NO: 5570 - DNA, 20 bp, Artificial Sequence
  Description of Artificial Sequence: Synthetic oligonucleotide
  Target: PCSK9; (-) strand; PAM type: NNGRRT; PAM sequence: GAGAGT
ccatagctgtttgcacatgt

SEQ ID NO: 5571 - DNA, 20 bp, Artificial Sequence
  Description of Artificial Sequence: Synthetic oligonucleotide
  Target: PCSK9; (-) strand; PAM type: NNGRRT; PAM sequence: CGGAAT
tcttaacctagccctaatct

SEQ ID NO: 5572 - DNA, 20 bp, Artificial Sequence
  Description of Artificial Sequence: Synthetic oligonucleotide
  Target: PCSK9; (-) strand; PAM type: NNGRRT; PAM sequence: TGGGGT
taactttttatttatattgg

SEQ ID NO: 5573 - DNA, 20 bp, Artificial Sequence
  Description of Artificial Sequence: Synthetic oligonucleotide
  Target: PCSK9; (-) strand; PAM type: NNGRRT; PAM sequence: TTGGAT
gtctacttttataaaactac

SEQ ID NO: 5574 - DNA, 20 bp, Artificial Sequence
  Description of Artificial Sequence: Synthetic oligonucleotide
  Target: PCSK9; (-) strand; PAM type: NNGRRT; PAM sequence: TTGGGT
gaaagtaatatacctattta

SEQ ID NO: 5575 - DNA, 20 bp, Artificial Sequence
  Description of Artificial Sequence: Synthetic oligonucleotide
  Target: PCSK9; (-) strand; PAM type: NNGRRT; PAM sequence: GAGAAT
tctggcttccataactgcaa

SEQ ID NO: 5576 - DNA, 20 bp, Artificial Sequence
  Description of Artificial Sequence: Synthetic oligonucleotide
  Target: PCSK9; (-) strand; PAM type: NNGRRT; PAM sequence: AGGAAT
caaaggagctggaagaagca

SEQ ID NO: 5577 - DNA, 20 bp, Artificial Sequence
  Description of Artificial Sequence: Synthetic oligonucleotide
  Target: PCSK9; (-) strand; PAM type: NNGRRT; PAM sequence: AGGAAT
agctgtgccgacataagcca

SEQ ID NO: 5578 - DNA, 20 bp, Artificial Sequence
  Description of Artificial Sequence: Synthetic oligonucleotide
  Target: PCSK9; (-) strand; PAM type: NNGRRT; PAM sequence: TAGGAT
tgaggagattatcctgggtt

SEQ ID NO: 5579 - DNA, 20 bp, Artificial Sequence
  Description of Artificial Sequence: Synthetic oligonucleotide
  Target: PCSK9; (-) strand; PAM type: NNGRRT; PAM sequence: CTGGGT
gatctcatgaggagattatc

SEQ ID NO: 5580 - DNA, 20 bp, Artificial Sequence
  Description of Artificial Sequence: Synthetic oligonucleotide
  Target: PCSK9; (-) strand; PAM type: NNGRRT; PAM sequence: AAGGAT
tttgcagatgtaattgacct

SEQ ID NO: 5581 - DNA, 20 bp, Artificial Sequence
  Description of Artificial Sequence: Synthetic oligonucleotide
  Target: PCSK9; (-) strand; PAM type: NNGRRT; PAM sequence: TTGAAT
aagactaacccctggtactt

SEQ ID NO: 5582 - DNA, 20 bp, Artificial Sequence
  Description of Artificial Sequence: Synthetic oligonucleotide
  Target: PCSK9; (-) strand; PAM type: NNGRRT; PAM sequence: TTGAAT
ctgttacccacggtagtggg

SEQ ID NO: 5583 - DNA, 20 bp, Artificial Sequence
  Description of Artificial Sequence: Synthetic oligonucleotide
  Target: PCSK9; (-) strand; PAM type: NNGRRT; PAM sequence: GTGGGT
aaccactgttacccacggta

SEQ ID NO: 5584 - DNA, 20 bp, Artificial Sequence
  Description of Artificial Sequence: Synthetic oligonucleotide
  Target: PCSK9; (-) strand; PAM type: NNGRRT; PAM sequence: AAGGAT
ttaaaacgtgaatagtttga

SEQ ID NO: 5585 - DNA, 20 bp, Artificial Sequence
  Description of Artificial Sequence: Synthetic oligonucleotide
  Target: PCSK9; (-) strand; PAM type: NNGRRT; PAM sequence: GTGAAT
gaaaatgttttttttaaaac

SEQ ID NO: 5586 - DNA, 20 bp, Artificial Sequence
  Description of Artificial Sequence: Synthetic oligonucleotide
  Target: PCSK9; (-) strand; PAM type: NNGRRT; PAM sequence: GTGAAT
gggagggggcatctttttgt

SEQ ID NO: 5587 - DNA, 20 bp, Artificial Sequence
  Description of Artificial Sequence: Synthetic oligonucleotide
  Target: PCSK9; (-) strand; PAM type: NNGRRT; PAM sequence: GTGAGT
agtctgcagccaccattgct

SEQ ID NO: 5588 - DNA, 20 bp, Artificial Sequence
  Description of Artificial Sequence: Synthetic oligonucleotide
  Target: PCSK9; (-) strand; PAM type: NNGRRT; PAM sequence: TGGAGT
cttctccaacctcagaaact

SEQ ID NO: 5589 - DNA, 20 bp, Artificial Sequence
  Description of Artificial Sequence: Synthetic oligonucleotide
  Target: PCSK9; (-) strand; PAM type: NNGRRT; PAM sequence: ATGAGT
gccttcccctcatagactga

SEQ ID NO: 5590 - DNA, 20 bp, Artificial Sequence
  Description of Artificial Sequence: Synthetic oligonucleotide
  Target: PCSK9; (-) strand; PAM type: NNGRRT; PAM sequence: CTGAAT
cattgccttcccctcataga

SEQ ID NO: 5591 - DNA, 20 bp, Artificial Sequence
  Description of Artificial Sequence: Synthetic oligonucleotide
  Target: PCSK9; (-) strand; PAM type: NNGRRT; PAM sequence: CTGAGT
ttatccctaaatgcctcttc

SEQ ID NO: 5592 - DNA, 20 bp, Artificial Sequence
  Description of Artificial Sequence: Synthetic oligonucleotide
  Target: PCSK9; (-) strand; PAM type: NNGRRT; PAM sequence: AGGGAT
tgccccaatctggcctccgc

SEQ ID NO: 5593 - DNA, 20 bp, Artificial Sequence
  Description of Artificial Sequence: Synthetic oligonucleotide
  Target: PCSK9; (-) strand; PAM type: NNGRRT; PAM sequence: CTGGGT
ccctccaccacaagtgcttt

SEQ ID NO: 5594 - DNA, 20 bp, Artificial Sequence
  Description of Artificial Sequence: Synthetic oligonucleotide
  Target: PCSK9; (-) strand; PAM type: NNGRRT; PAM sequence: CAGGGT
ccctgagaggtaccagcaat

SEQ ID NO: 5595 - DNA, 20 bp, Artificial Sequence
  Description of Artificial Sequence: Synthetic oligonucleotide
  Target: PCSK9; (-) strand; PAM type: NNGRRT; PAM sequence: ATGGGT
caccttctccctcttctcaa

SEQ ID NO: 5596 - DNA, 20 bp, Artificial Sequence
  Description of Artificial Sequence: Synthetic oligonucleotide
  Target: PCSK9; (-) strand; PAM type: NNGRRT; PAM sequence: AGGAAT
ccctcccataagttgcccaa

SEQ ID NO: 5597 - DNA, 20 bp, Artificial Sequence
  Description of Artificial Sequence: Synthetic oligonucleotide
  Target: PCSK9; (-) strand; PAM type: NNGRRT; PAM sequence: GTGGGT
gggctgctgtccagcatgca

SEQ ID NO: 5598 - DNA, 20 bp, Artificial Sequence
  Description of Artificial Sequence: Synthetic oligonucleotide
  Target: PCSK9; (-) strand; PAM type: NNGRRT; PAM sequence: ATGGAT
aagcctgtgcacagagggac

SEQ ID NO: 5599 - DNA, 20 bp, Artificial Sequence
  Description of Artificial Sequence: Synthetic oligonucleotide
  Target: PCSK9; (-) strand; PAM type: NNGRRT; PAM sequence: GAGAAT
gggtcgttaccgtgcaccca

SEQ ID NO: 5600 - DNA, 20 bp, Artificial Sequence
  Description of Artificial Sequence: Synthetic oligonucleotide
  Target: PCSK9; (-) strand; PAM type: NNGRRT; PAM sequence: CGGGGT
gaccttggcctctcacctac

SEQ ID NO: 5601 - DNA, 20 bp, Artificial Sequence
  Description of Artificial Sequence: Synthetic oligonucleotide
  Target: PCSK9; (-) strand; PAM type: NNGRRT; PAM sequence: AAGAAT
tcaaaggcctcccctggagc

SEQ ID NO: 5602 - DNA, 20 bp, Artificial Sequence
  Description of Artificial Sequence: Synthetic oligonucleotide
  Target: PCSK9; (-) strand; PAM type: NNGRRT; PAM sequence: TGGAAT
tccttcctgttgcctgtaat

SEQ ID NO: 5603 - DNA, 20 bp, Artificial Sequence
  Description of Artificial Sequence: Synthetic oligonucleotide
  Target: PCSK9; (-) strand; PAM type: NNGRRT; PAM sequence: CAGAGT
tcgagcccgccatcgcagca

SEQ ID NO: 5604 - DNA, 20 bp, Artificial Sequence
  Description of Artificial Sequence: Synthetic oligonucleotide
  Target: PCSK9; (-) strand; PAM type: NNGRRT; PAM sequence: CAGAGT
gtgactccatgaggtaaggt

SEQ ID NO: 5605 - DNA, 20 bp, Artificial Sequence
  Description of Artificial Sequence: Synthetic oligonucleotide
  Target: PCSK9; (-) strand; PAM type: NNGRRT; PAM sequence: GTGGGT
gcacaaagacagtgcaacca

SEQ ID NO: 5606 - DNA, 20 bp, Artificial Sequence
  Description of Artificial Sequence: Synthetic oligonucleotide
  Target: PCSK9; (-) strand; PAM type: NNGRRT; PAM sequence: TGGAGT
cctgctctgaatctaggtgc

SEQ ID NO: 5607 - DNA, 20 bp, Artificial Sequence
  Description of Artificial Sequence: Synthetic oligonucleotide
  Target: PCSK9; (-) strand; PAM type: NNGRRT; PAM sequence: CTGAAT
tccgagtgaaatggcctgct

SEQ ID NO: 5608 - DNA, 20 bp, Artificial Sequence
  Description of Artificial Sequence: Synthetic oligonucleotide
  Target: PCSK9; (-) strand; PAM type: NNGRRT; PAM sequence: CCGAGT
ttgcagatgcacagcagatt

SEQ ID NO: 5609 - DNA, 20 bp, Artificial Sequence
  Description of Artificial Sequence: Synthetic oligonucleotide
  Target: PCSK9; (-) strand; PAM type: NNGRRT; PAM sequence: GCGAAT
gatactgggaagaaacaaag

SEQ ID NO: 5610 - DNA, 20 bp, Artificial Sequence
  Description of Artificial Sequence: Synthetic oligonucleotide
  Target: PCSK9; (-) strand; PAM type: NNGRRT; PAM sequence: GAGGAT
acctattgtgtaccaggcag

SEQ ID NO: 5611 - DNA, 20 bp, Artificial Sequence
  Description of Artificial Sequence: Synthetic oligonucleotide
  Target: PCSK9; (-) strand; PAM type: NNGRRT; PAM sequence: CAGAAT
agacgtcatataggtacatt

SEQ ID NO: 5612 - DNA, 20 bp, Artificial Sequence
  Description of Artificial Sequence: Synthetic oligonucleotide
  Target: PCSK9; (-) strand; PAM type: NNGRRT; PAM sequence: AGGGAT
tccagcctacatgcatttca

SEQ ID NO: 5613 - DNA, 20 bp, Artificial Sequence
  Description of Artificial Sequence: Synthetic oligonucleotide
  Target: PCSK9; (-) strand; PAM type: NNGRRT; PAM sequence: CCGAAT
tgtggactcctcgctgccca

SEQ ID NO: 5614 - DNA, 20 bp, Artificial Sequence
  Description of Artificial Sequence: Synthetic oligonucleotide
  Target: PCSK9; (-) strand; PAM type: NNGRRT; PAM sequence: CTGAAT
cctgctgaccagtgagactt

SEQ ID NO: 5615 - DNA, 20 bp, Artificial Sequence
  Description of Artificial Sequence: Synthetic oligonucleotide
  Target: PCSK9; (-) strand; PAM type: NNGRRT; PAM sequence: CTGGGT
gcccaccttttcagtgtttc

SEQ ID NO: 5616 - DNA, 20 bp, Artificial Sequence
  Description of Artificial Sequence: Synthetic oligonucleotide
  Target: PCSK9; (-) strand; PAM type: NNGRRT; PAM sequence: TGGGAT
ctcccgcctctcaccctgcg

SEQ ID NO: 5617 - DNA, 20 bp, Artificial Sequence
  Description of Artificial Sequence: Synthetic oligonucleotide
  Target: PCSK9; (-) strand; PAM type: NNGRRT; PAM sequence: GAGGAT
ttaacggaacccccggactg

SEQ ID NO: 5618 - DNA, 20 bp, Artificial Sequence
  Description of Artificial Sequence: Synthetic oligonucleotide
  Target: PCSK9; (-) strand; PAM type: NNGRRT; PAM sequence: GTGGGT
ctgcggaaaccttctagggt

SEQ ID NO: 5619 - DNA, 20 bp, Artificial Sequence
  Description of Artificial Sequence: Synthetic oligonucleotide
  Target: PCSK9; (-) strand; PAM type: NNGRRT; PAM sequence: TAGGGT
acgtcgctgcggaaaccttc

SEQ ID NO: 5620 - DNA, 20 bp, Artificial Sequence
  Description of Artificial Sequence: Synthetic oligonucleotide
  Target: PCSK9; (-) strand; PAM type: NNGRRT; PAM sequence: CGGAAT
agggcgcgtgaaggggcgcg

SEQ ID NO: 5621 - DNA, 20 bp, Artificial Sequence
  Description of Artificial Sequence: Synthetic oligonucleotide
  Target: PCSK9; (-) strand; PAM type: NNGRRT; PAM sequence: TCGGGT
aggtggctgtggttccgtgc

SEQ ID NO: 5622 - DNA, 20 bp, Artificial Sequence
  Description of Artificial Sequence: Synthetic oligonucleotide
  Target: PCSK9; (-) strand; PAM type: NNGRRT; PAM sequence: GCGGGT
agcaccgcaccgtcccggct

SEQ ID NO: 5623 - DNA, 20 bp, Artificial Sequence
  Description of Artificial Sequence: Synthetic oligonucleotide
  Target: PCSK9; (-) strand; PAM type: NNGRRT; PAM sequence: CTGAAT
caaccccgcgaaccttccca

SEQ ID NO: 5624 - DNA, 20 bp, Artificial Sequence
  Description of Artificial Sequence: Synthetic oligonucleotide
  Target: PCSK9; (-) strand; PAM type: NNGRRT; PAM sequence: CCGGGT
tgctcgcccttcctcggcct

SEQ ID NO: 5625 - DNA, 20 bp, Artificial Sequence
  Description of Artificial Sequence: Synthetic oligonucleotide
  Target: PCSK9; (-) strand; PAM type: NNGRRT; PAM sequence: CAGGAT
cagaaactgggaaatctggg

SEQ ID NO: 5626 - DNA, 20 bp, Artificial Sequence
  Description of Artificial Sequence: Synthetic oligonucleotide
  Target: PCSK9; (-) strand; PAM type: NNGRRT; PAM sequence: TCGGGT
cttcccaccccgcccctgtc

SEQ ID NO: 5627 - DNA, 20 bp, Artificial Sequence
  Description of Artificial Sequence: Synthetic oligonucleotide
  Target: PCSK9; (-) strand; PAM type: NNGRRT; PAM sequence: ATGAGT
aacagatggaatactagagc

SEQ ID NO: 5628 - DNA, 20 bp, Artificial Sequence
  Description of Artificial Sequence: Synthetic oligonucleotide
  Target: PCSK9; (-) strand; PAM type: NNGRRT; PAM sequence: TGGAAT
ttttcttcggctgaaacaga

SEQ ID NO: 5629 - DNA, 20 bp, Artificial Sequence
  Description of Artificial Sequence: Synthetic oligonucleotide
  Target: PCSK9; (-) strand; PAM type: NNGRRT; PAM sequence: GAGAAT
aaaggacgccaatgggcctc

SEQ ID NO: 5630 - DNA, 20 bp, Artificial Sequence
  Description of Artificial Sequence: Synthetic oligonucleotide
  Target: PCSK9; (-) strand; PAM type: NNGRRT; PAM sequence: CTGAGT
caccaagggcccttccctgc

SEQ ID NO: 5631 - DNA, 20 bp, Artificial Sequence
  Description of Artificial Sequence: Synthetic oligonucleotide
  Target: PCSK9; (-) strand; PAM type: NNGRRT; PAM sequence: CGGGGT
tgaggcgccgggctcagctc

SEQ ID NO: 5632 - DNA, 20 bp, Artificial Sequence
  Description of Artificial Sequence: Synthetic oligonucleotide
  Target: PCSK9; (-) strand; PAM type: NNGRRT; PAM sequence: CAGAGT
gcctgagggccagaagctgg

SEQ ID NO: 5633 - DNA, 20 bp, Artificial Sequence
  Description of Artificial Sequence: Synthetic oligonucleotide
  Target: PCSK9; (-) strand; PAM type: NNGRRT; PAM sequence: AAGGAT
agattaggcaatggaggctc

SEQ ID NO: 5634 - DNA, 20 bp, Artificial Sequence
  Description of Artificial Sequence: Synthetic oligonucleotide
  Target: PCSK9; (-) strand; PAM type: NNGRRT; PAM sequence: CAGAAT
gggcaggcagctgtgagtgg

SEQ ID NO: 5635 - DNA, 20 bp, Artificial Sequence
  Description of Artificial Sequence: Synthetic oligonucleotide
  Target: PCSK9; (-) strand; PAM type: NNGRRT; PAM sequence: GTGAGT
agaagcgtgggcaggcagct

SEQ ID NO: 5636 - DNA, 20 bp, Artificial Sequence
  Description of Artificial Sequence: Synthetic oligonucleotide
  Target: PCSK9; (-) strand; PAM type: NNGRRT; PAM sequence: CTGAGT
aggaagagggctatactgag

SEQ ID NO: 5637 - DNA, 20 bp, Artificial Sequence
  Description of Artificial Sequence: Synthetic oligonucleotide
  Target: PCSK9; (-) strand; PAM type: NNGRRT; PAM sequence: TGGGGT
tgcttactcacctctcagga

SEQ ID NO: 5638 - DNA, 20 bp, Artificial Sequence
  Description of Artificial Sequence: Synthetic oligonucleotide
  Target: PCSK9; (-) strand; PAM type: NNGRRT; PAM sequence: CAGGAT
gcctctgcttactcacctct

SEQ ID NO: 5639 - DNA, 20 bp, Artificial Sequence
  Description of Artificial Sequence: Synthetic oligonucleotide
  Target: PCSK9; (-) strand; PAM type: NNGRRT; PAM sequence: ATGAAT
acaaaataaccattgaatga

SEQ ID NO: 5640 - DNA, 20 bp, Artificial Sequence
  Description of Artificial Sequence: Synthetic oligonucleotide
  Target: PCSK9; (-) strand; PAM type: NNGRRT; PAM sequence: ATGAAT
tcccacaaaataaccattga

SEQ ID NO: 5641 - DNA, 20 bp, Artificial Sequence
  Description of Artificial Sequence: Synthetic oligonucleotide
  Target: PCSK9; (-) strand; PAM type: NNGRRT; PAM sequence: TTGAAT
cgattcccacaaaataacca

SEQ ID NO: 5642 - DNA, 20 bp, Artificial Sequence
  Description of Artificial Sequence: Synthetic oligonucleotide
  Target: PCSK9; (-) strand; PAM type: NNGRRT; PAM sequence: AAGGAT
gtttctcatgactaaaagaa

SEQ ID NO: 5643 - DNA, 20 bp, Artificial Sequence
  Description of Artificial Sequence: Synthetic oligonucleotide
  Target: PCSK9; (-) strand; PAM type: NNGRRT; PAM sequence: TGGGGT
aaacccagttctaatgcacc

SEQ ID NO: 5644 - DNA, 20 bp, Artificial Sequence
  Description of Artificial Sequence: Synthetic oligonucleotide
  Target: PCSK9; (-) strand; PAM type: NNGRRT; PAM sequence: TGGAGT
tgggagagtactctgtgcag

SEQ ID NO: 5645 - DNA, 20 bp, Artificial Sequence
  Description of Artificial Sequence: Synthetic oligonucleotide
  Target: PCSK9; (-) strand; PAM type: NNGRRT; PAM sequence: GAGAGT
ataaaaattgaatgaattgg

SEQ ID NO: 5646 - DNA, 20 bp, Artificial Sequence
  Description of Artificial Sequence: Synthetic oligonucleotide
  Target: PCSK9; (-) strand; PAM type: NNGRRT; PAM sequence: ATGAAT
ttccgctaaataaaaattga

SEQ ID NO: 5647 - DNA, 20 bp, Artificial Sequence
  Description of Artificial Sequence: Synthetic oligonucleotide
  Target: PCSK9; (-) strand; PAM type: NNGRRT; PAM sequence: TTGAAT
tgccttccgctaaataaaaa

SEQ ID NO: 5648 - DNA, 20 bp, Artificial Sequence
  Description of Artificial Sequence: Synthetic oligonucleotide
  Target: PCSK9; (-) strand; PAM type: NNGRRT; PAM sequence: TAGAAT
ttcatggtacctcctaatcc

SEQ ID NO: 5649 - DNA, 20 bp, Artificial Sequence
  Description of Artificial Sequence: Synthetic oligonucleotide
  Target: PCSK9; (-) strand; PAM type: NNGRRT; PAM sequence: AGGAGT
tcggatccactgaggaggtc

SEQ ID NO: 5650 - DNA, 20 bp, Artificial Sequence
  Description of Artificial Sequence: Synthetic oligonucleotide
  Target: PCSK9; (-) strand; PAM type: NNGRRT; PAM sequence: TCGGAT
gaggcgggaggatcacctcc

SEQ ID NO: 5651 - DNA, 20 bp, Artificial Sequence
  Description of Artificial Sequence: Synthetic oligonucleotide
  Target: PCSK9; (-) strand; PAM type: NNGRRT; PAM sequence: GAGGAT
actttgggaggctgaggcgg

SEQ ID NO: 5652 - DNA, 20 bp, Artificial Sequence
  Description of Artificial Sequence: Synthetic oligonucleotide
  Target: PCSK9; (-) strand; PAM type: NNGRRT; PAM sequence: GTGGAT
aacattttacatttcagacg

SEQ ID NO: 5653 - DNA, 20 bp, Artificial Sequence
  Description of Artificial Sequence: Synthetic oligonucleotide
  Target: PCSK9; (-) strand; PAM type: NNGRRT; PAM sequence: ATGAAT
taatctatgcagcaaaatat

SEQ ID NO: 5654 - DNA, 20 bp, Artificial Sequence
  Description of Artificial Sequence: Synthetic oligonucleotide
  Target: PCSK9; (-) strand; PAM type: NNGRRT; PAM sequence: AAGAAT
ggcaatcagagtctgcttgg

SEQ ID NO: 5655 - DNA, 20 bp, Artificial Sequence
  Description of Artificial Sequence: Synthetic oligonucleotide
  Target: PCSK9; (-) strand; PAM type: NNGRRT; PAM sequence: CAGAGT
gaaaggcagtaatgggcaat

SEQ ID NO: 5656 - DNA, 20 bp, Artificial Sequence
  Description of Artificial Sequence: Synthetic oligonucleotide
  Target: PCSK9; (-) strand; PAM type: NNGRRT; PAM sequence: TTGGAT
ttttgaacctcagaacttgt

SEQ ID NO: 5657 - DNA, 20 bp, Artificial Sequence
  Description of Artificial Sequence: Synthetic oligonucleotide
  Target: PCSK9; (-) strand; PAM type: NNGRRT; PAM sequence: CAGAGT
ggactccagtcagagtagaa

SEQ ID NO: 5658 - DNA, 20 bp, Artificial Sequence
  Description of Artificial Sequence: Synthetic oligonucleotide
  Target: PCSK9; (-) strand; PAM type: NNGRRT; PAM sequence: CAGAGT
tatgcatcttggactccagt

SEQ ID NO: 5659 - DNA, 20 bp, Artificial Sequence
  Description of Artificial Sequence: Synthetic oligonucleotide
  Target: PCSK9; (-) strand; PAM type: NNGRRT; PAM sequence: ATGAAT
cactggctccccacagcctc

SEQ ID NO: 5660 - DNA, 20 bp, Artificial Sequence
  Description of Artificial Sequence: Synthetic oligonucleotide
  Target: PCSK9; (-) strand; PAM type: NNGRRT; PAM sequence: AGGGGT
gacggcaccaagcctttcac

SEQ ID NO: 5661 - DNA, 20 bp, Artificial Sequence
  Description of Artificial Sequence: Synthetic oligonucleotide
  Target: PCSK9; (-) strand; PAM type: NNGRRT; PAM sequence: AGGGAT
gtgagtaatttacaaggaaa

SEQ ID NO: 5662 - DNA, 20 bp, Artificial Sequence
  Description of Artificial Sequence: Synthetic oligonucleotide
  Target: PCSK9; (-) strand; PAM type: NNGRRT; PAM sequence: GTGAGT
atataaaggaatacctgaag

SEQ ID NO: 5663 - DNA, 20 bp, Artificial Sequence
  Description of Artificial Sequence: Synthetic oligonucleotide
  Target: PCSK9; (-) strand; PAM type: NNGRRT; PAM sequence: AGGAAT
ccttttgtgttgctatataa

SEQ ID NO: 5664 - DNA, 20 bp, Artificial Sequence
  Description of Artificial Sequence: Synthetic oligonucleotide
  Target: PCSK9; (-) strand; PAM type: NNGRRT; PAM sequence: AGGGAT
gctctacaaatgcaggcaga

SEQ ID NO: 5665 - DNA, 20 bp, Artificial Sequence
  Description of Artificial Sequence: Synthetic oligonucleotide
  Target: PCSK9; (-) strand; PAM type: NNGRRT; PAM sequence: AAGAGT
ataggcctgctgggaaagtc

SEQ ID NO: 5666 - DNA, 20 bp, Artificial Sequence
  Description of Artificial Sequence: Synthetic oligonucleotide
  Target: PCSK9; (-) strand; PAM type: NNGRRT; PAM sequence: CTGAAT
ggagccaggaaaccgtggac

SEQ ID NO: 5667 - DNA, 20 bp, Artificial Sequence
  Description of Artificial Sequence: Synthetic oligonucleotide
  Target: PCSK9; (-) strand; PAM type: NNGRRT; PAM sequence: CAGAAT
cccctcccccatgccccagt

SEQ ID NO: 5668 - DNA, 20 bp, Artificial Sequence
  Description of Artificial Sequence: Synthetic oligonucleotide
  Target: PCSK9; (-) strand; PAM type: NNGRRT; PAM sequence: CAGAGT
ttacaacaaaagagacacaa

SEQ ID NO: 5669 - DNA, 20 bp, Artificial Sequence
  Description of Artificial Sequence: Synthetic oligonucleotide
  Target: PCSK9; (-) strand; PAM type: NNGRRT; PAM sequence: ACGGAT
gtaggtgccaggcaacctcc

SEQ ID NO: 5670 - DNA, 20 bp, Artificial Sequence
  Description of Artificial Sequence: Synthetic oligonucleotide
  Target: PCSK9; (-) strand; PAM type: NNGRRT; PAM sequence: GTGGGT
gtgcgctctgactgcgagag

SEQ ID NO: 5671 - DNA, 20 bp, Artificial Sequence
  Description of Artificial Sequence: Synthetic oligonucleotide
  Target: PCSK9; (-) strand; PAM type: NNGRRT; PAM sequence: CAGGAT
agaaggccatggaagacatg

SEQ ID NO: 5672 - DNA, 20 bp, Artificial Sequence
  Description of Artificial Sequence: Synthetic oligonucleotide
  Target: PCSK9; (-) strand; PAM type: NNGRRT; PAM sequence: AAGGGT
caggaagtgccattcccaaa

SEQ ID NO: 5673 - DNA, 20 bp, Artificial Sequence
  Description of Artificial Sequence: Synthetic oligonucleotide
  Target: PCSK9; (-) strand; PAM type: NNGRRT; PAM sequence: GGGAAT
ggggcatggccaggcttaaa

SEQ ID NO: 5674 - DNA, 20 bp, Artificial Sequence
  Description of Artificial Sequence: Synthetic oligonucleotide
  Target: PCSK9; (-) strand; PAM type: NNGRRT; PAM sequence: ATGGGT
aatggctggcaggcagacca

SEQ ID NO: 5675 - DNA, 20 bp, Artificial Sequence
  Description of Artificial Sequence: Synthetic oligonucleotide
  Target: PCSK9; (-) strand; PAM type: NNGRRT; PAM sequence: AAGAAT
ggcagcagatgcattggcac

SEQ ID NO: 5676 - DNA, 20 bp, Artificial Sequence
  Description of Artificial Sequence: Synthetic oligonucleotide
  Target: PCSK9; (-) strand; PAM type: NNGRRT; PAM sequence: TAGAGT
ttcaaaggaattttggaccc

SEQ ID NO: 5677 - DNA, 20 bp, Artificial Sequence
  Description of Artificial Sequence: Synthetic oligonucleotide
  Target: PCSK9; (-) strand; PAM type: NNGRRT; PAM sequence: AGGAAT
ctggatagcaacagcttcaa

SEQ ID NO: 5678 - DNA, 20 bp, Artificial Sequence
  Description of Artificial Sequence: Synthetic oligonucleotide
  Target: PCSK9; (-) strand; PAM type: NNGRRT; PAM sequence: CTGGAT
cctaaagaagggacttcact

SEQ ID NO: 5679 - DNA, 20 bp, Artificial Sequence
  Description of Artificial Sequence: Synthetic oligonucleotide
  Target: PCSK9; (-) strand; PAM type: NNGRRT; PAM sequence: GAGAAT
agcactagggccagggtgag

SEQ ID NO: 5680 - DNA, 20 bp, Artificial Sequence
  Description of Artificial Sequence: Synthetic oligonucleotide
  Target: PCSK9; (-) strand; PAM type: NNGRRT; PAM sequence: CAGGGT
aagatttgaagcactagggc

SEQ ID NO: 5681 - DNA, 20 bp, Artificial Sequence
  Description of Artificial Sequence: Synthetic oligonucleotide
  Target: PCSK9; (-) strand; PAM type: NNGRRT; PAM sequence: GAGAAT
gaagcaccgcctgccatgtg

SEQ ID NO: 5682 - DNA, 20 bp, Artificial Sequence
  Description of Artificial Sequence: Synthetic oligonucleotide
  Target: PCSK9; (-) strand; PAM type: NNGRRT; PAM sequence: ACGGGT
cagtctcctctacttagact

SEQ ID NO: 5683 - DNA, 20 bp, Artificial Sequence
  Description of Artificial Sequence: Synthetic oligonucleotide
  Target: PCSK9; (-) strand; PAM type: NNGRRT; PAM sequence: ACGGGT
tgcctgtcatctggtgctat

SEQ ID NO: 5684 - DNA, 20 bp, Artificial Sequence
  Description of Artificial Sequence: Synthetic oligonucleotide
  Target: PCSK9; (-) strand; PAM type: NNGRRT; PAM sequence: CAGGGT
gagaggtgaagggatttgct

SEQ ID NO: 5685 - DNA, 20 bp, Artificial Sequence
  Description of Artificial Sequence: Synthetic oligonucleotide
  Target: PCSK9; (-) strand; PAM type: NNGRRT; PAM sequence: AGGGAT
aatgaggctcagagaggtga

SEQ ID NO: 5686 - DNA, 20 bp, Artificial Sequence
  Description of Artificial Sequence: Synthetic oligonucleotide
  Target: PCSK9; (-) strand; PAM type: NNGRRT; PAM sequence: AGGAAT
tataactggtttacagatag

SEQ ID NO: 5687 - DNA, 20 bp, Artificial Sequence
  Description of Artificial Sequence: Synthetic oligonucleotide
  Target: PCSK9; (-) strand; PAM type: NNGRRT; PAM sequence: ATGAAT
cgacctcatttagtccttaa

SEQ ID NO: 5688 - DNA, 20 bp, Artificial Sequence
  Description of Artificial Sequence: Synthetic oligonucleotide
  Target: PCSK9; (-) strand; PAM type: NNGRRT; PAM sequence: CTGAAT
gtttccgtacctagcatctg

SEQ ID NO: 5689 - DNA, 20 bp, Artificial Sequence
  Description of Artificial Sequence: Synthetic oligonucleotide
  Target: PCSK9; (-) strand; PAM type: NNGRRT; PAM sequence: GCGAGT
cttaacctgcccccacttca

SEQ ID NO: 5690 - DNA, 20 bp, Artificial Sequence
  Description of Artificial Sequence: Synthetic oligonucleotide
  Target: PCSK9; (-) strand; PAM type: NNGRRT; PAM sequence: CTGGAT
cctcctgccacaactagtcc

SEQ ID NO: 5691 - DNA, 20 bp, Artificial Sequence
  Description of Artificial Sequence: Synthetic oligonucleotide
  Target: PCSK9; (-) strand; PAM type: NNGRRT; PAM sequence: TCGGGT
cgcatggcagcggtgaaccc

SEQ ID NO: 5692 - DNA, 20 bp, Artificial Sequence
  Description of Artificial Sequence: Synthetic oligonucleotide
  Target: PCSK9; (-) strand; PAM type: NNGRRT; PAM sequence: CAGAGT
ctgcactccagtctgggcaa

SEQ ID NO: 5693 - DNA, 20 bp, Artificial Sequence
  Description of Artificial Sequence: Synthetic oligonucleotide
  Target: PCSK9; (-) strand; PAM type: NNGRRT; PAM sequence: GAGAAT
tactcgggaggctgaggcag

SEQ ID NO: 5694 - DNA, 20 bp, Artificial Sequence
  Description of Artificial Sequence: Synthetic oligonucleotide
  Target: PCSK9; (-) strand; PAM type: NNGRRT; PAM sequence: GAGAGT
gtgggggatcacctgaggtc

SEQ ID NO: 5695 - DNA, 20 bp, Artificial Sequence
  Description of Artificial Sequence: Synthetic oligonucleotide
  Target: PCSK9; (-) strand; PAM type: NNGRRT; PAM sequence: GGGGAT
cactttgggaggccgaggtg

SEQ ID NO: 5696 - DNA, 20 bp, Artificial Sequence
  Description of Artificial Sequence: Synthetic oligonucleotide
  Target: PCSK9; (-) strand; PAM type: NNGRRT; PAM sequence: AAGAGT
ctagcaggagttagaaggac

SEQ ID NO: 5697 - DNA, 20 bp, Artificial Sequence
  Description of Artificial Sequence: Synthetic oligonucleotide
  Target: PCSK9; (-) strand; PAM type: NNGRRT; PAM sequence: AGGAGT
agccaatgggaggcactagc

SEQ ID NO: 5698 - DNA, 20 bp, Artificial Sequence
  Description of Artificial Sequence: Synthetic oligonucleotide
  Target: PCSK9; (-) strand; PAM type: NNGRRT; PAM sequence: TGGAGT
ggctctgggcaggatggaca

SEQ ID NO: 5699 - DNA, 20 bp, Artificial Sequence
  Description of Artificial Sequence: Synthetic oligonucleotide
  Target: PCSK9; (-) strand; PAM type: NNGRRT; PAM sequence: CAGGAT
ggctgtgccaaggctctggg

SEQ ID NO: 5700 - DNA, 20 bp, Artificial Sequence
  Description of Artificial Sequence: Synthetic oligonucleotide
  Target: PCSK9; (-) strand; PAM type: NNGRRT; PAM sequence: AAGGAT
catagaggattccttttagg

SEQ ID NO: 5701 - DNA, 20 bp, Artificial Sequence
  Description of Artificial Sequence: Synthetic oligonucleotide
  Target: PCSK9; (-) strand; PAM type: NNGRRT; PAM sequence: GAGGAT
ctgcaacacggtctggcata

SEQ ID NO: 5702 - DNA, 20 bp, Artificial Sequence
  Description of Artificial Sequence: Synthetic oligonucleotide
  Target: PCSK9; (-) strand; PAM type: NNGRRT; PAM sequence: CTGAGT
ccggaggacagactaggagc

SEQ ID NO: 5703 - DNA, 20 bp, Artificial Sequence
  Description of Artificial Sequence: Synthetic oligonucleotide
  Target: PCSK9; (-) strand; PAM type: NNGRRT; PAM sequence: AGGAGT
gatgctctgggcaaagacag

SEQ ID NO: 5704 - DNA, 20 bp, Artificial Sequence
  Description of Artificial Sequence: Synthetic oligonucleotide
  Target: PCSK9; (-) strand; PAM type: NNGRRT; PAM sequence: CGGGAT
gtaatccgctccaggttcca

SEQ ID NO: 5705 - DNA, 20 bp, Artificial Sequence
  Description of Artificial Sequence: Synthetic oligonucleotide
  Target: PCSK9; (-) strand; PAM type: NNGRRT; PAM sequence: AGGGGT
tcatccgcccggtaccgtgg

SEQ ID NO: 5706 - DNA, 20 bp, Artificial Sequence
  Description of Artificial Sequence: Synthetic oligonucleotide
  Target: PCSK9; (-) strand; PAM type: NNGRRT; PAM sequence: GGGGGT
gggtggggcagggcacagat

SEQ ID NO: 5707 - DNA, 20 bp, Artificial Sequence
  Description of Artificial Sequence: Synthetic oligonucleotide
  Target: PCSK9; (-) strand; PAM type: NNGRRT; PAM sequence: TGGGGT
gcaaatggattcagctcaga

SEQ ID NO: 5708 - DNA, 20 bp, Artificial Sequence
  Description of Artificial Sequence: Synthetic oligonucleotide
  Target: PCSK9; (-) strand; PAM type: NNGRRT; PAM sequence: ATGGAT
gccaggccagggcagagcaa

SEQ ID NO: 5709 - DNA, 20 bp, Artificial Sequence
  Description of Artificial Sequence: Synthetic oligonucleotide
  Target: PCSK9; (-) strand; PAM type: NNGRRT; PAM sequence: CTGAGT
aaaaggggtcagtggaggtg

SEQ ID NO: 5710 - DNA, 20 bp, Artificial Sequence
  Description of Artificial Sequence: Synthetic oligonucleotide
  Target: PCSK9; (-) strand; PAM type: NNGRRT; PAM sequence: AGGGGT
tggggatgggacagaaaaaa

SEQ ID NO: 5711 - DNA, 20 bp, Artificial Sequence
  Description of Artificial Sequence: Synthetic oligonucleotide
  Target: PCSK9; (-) strand; PAM type: NNGRRT; PAM sequence: GGGGAT
cagtgggggctgcaggggat

SEQ ID NO: 5712 - DNA, 20 bp, Artificial Sequence
  Description of Artificial Sequence: Synthetic oligonucleotide
  Target: PCSK9; (-) strand; PAM type: NNGRRT; PAM sequence: GGGGAT
ggcaggcagtgggggctgca

SEQ ID NO: 5713 - DNA, 20 bp, Artificial Sequence
  Description of Artificial Sequence: Synthetic oligonucleotide
  Target: PCSK9; (-) strand; PAM type: NNGRRT; PAM sequence: GAGGAT
acaagagaaaagaaggaaaa

SEQ ID NO: 5714 - DNA, 20 bp, Artificial Sequence
  Description of Artificial Sequence: Synthetic oligonucleotide
  Target: PCSK9; (-) strand; PAM type: NNGRRT; PAM sequence: TAGAGT
agaggcctgggggccctagg

SEQ ID NO: 5715 - DNA, 20 bp, Artificial Sequence
  Description of Artificial Sequence: Synthetic oligonucleotide
  Target: PCSK9; (-) strand; PAM type: NNGRRT; PAM sequence: GGGAGT
ggtccagtctgcagggcact

SEQ ID NO: 5716 - DNA, 20 bp, Artificial Sequence
  Description of Artificial Sequence: Synthetic oligonucleotide
  Target: PCSK9; (-) strand; PAM type: NNGRRT; PAM sequence: AAGGAT
gggttgtgtctatcccatta

SEQ ID NO: 5717 - DNA, 20 bp, Artificial Sequence
  Description of Artificial Sequence: Synthetic oligonucleotide
  Target: PCSK9; (-) strand; PAM type: NNGRRT; PAM sequence: CAGGGT
gtaggcagaggcatcccaga

SEQ ID NO: 5718 - DNA, 20 bp, Artificial Sequence
  Description of Artificial Sequence: Synthetic oligonucleotide
  Target: PCSK9; (-) strand; PAM type: NNGRRT; PAM sequence: TAGAAT
tgccacctgcaagtccctgc

SEQ ID NO: 5719 - DNA, 20 bp, Artificial Sequence
  Description of Artificial Sequence: Synthetic oligonucleotide
  Target: PCSK9; (-) strand; PAM type: NNGRRT; PAM sequence: CTGAAT
gcatctagagtcttccccga

SEQ ID NO: 5720 - DNA, 20 bp, Artificial Sequence
  Description of Artificial Sequence: Synthetic oligonucleotide
  Target: PCSK9; (-) strand; PAM type: NNGRRT; PAM sequence: TAGAGT
ctcctcaggccaggtgcatc

SEQ ID NO: 5721 - DNA, 20 bp, Artificial Sequence
  Description of Artificial Sequence: Synthetic oligonucleotide
  Target: PCSK9; (-) strand; PAM type: NNGRRT; PAM sequence: CTGAGT
gaaccggtaaggggtgaaag

SEQ ID NO: 5722 - DNA, 20 bp, Artificial Sequence
  Description of Artificial Sequence: Synthetic oligonucleotide
  Target: PCSK9; (-) strand; PAM type: NNGRRT; PAM sequence: AGGGGT
agatcccacgagaaccggta

SEQ ID NO: 5723 - DNA, 20 bp, Artificial Sequence
  Description of Artificial Sequence: Synthetic oligonucleotide
  Target: PCSK9; (-) strand; PAM type: NNGRRT; PAM sequence: CAGGGT
acctgtgagaaggacaggga

SEQ ID NO: 5724 - DNA, 20 bp, Artificial Sequence
  Description of Artificial Sequence: Synthetic oligonucleotide
  Target: PCSK9; (-) strand; PAM type: NNGRRT; PAM sequence: TGGAGT
ctgcacatccttcaactcat

SEQ ID NO: 5725 - DNA, 20 bp, Artificial Sequence
  Description of Artificial Sequence: Synthetic oligonucleotide
  Target: PCSK9; (-) strand; PAM type: NNGRRT; PAM sequence: TTGGGT
catatgcaaggtcacacagt

SEQ ID NO: 5726 - DNA, 20 bp, Artificial Sequence
  Description of Artificial Sequence: Synthetic oligonucleotide
  Target: PCSK9; (-) strand; PAM type: NNGRRT; PAM sequence: GAGGAT
tgctgctgccacccttgcca

SEQ ID NO: 5727 - DNA, 20 bp, Artificial Sequence
  Description of Artificial Sequence: Synthetic oligonucleotide
  Target: PCSK9; (-) strand; PAM type: NNGRRT; PAM sequence: CCGGGT
ctggccacaggctgcccagg

SEQ ID NO: 5728 - DNA, 20 bp, Artificial Sequence
  Description of Artificial Sequence: Synthetic oligonucleotide
  Target: PCSK9; (-) strand; PAM type: NNGRRT; PAM sequence: TGGAGT
aggtccctgaggcactgatg

SEQ ID NO: 5729 - DNA, 20 bp, Artificial Sequence
  Description of Artificial Sequence: Synthetic oligonucleotide
  Target: PCSK9; (-) strand; PAM type: NNGRRT; PAM sequence: TGGGGT
ttctcagtccctgcctggac

SEQ ID NO: 5730 - DNA, 20 bp, Artificial Sequence
  Description of Artificial Sequence: Synthetic oligonucleotide
  Target: PCSK9; (-) strand; PAM type: NNGRRT; PAM sequence: GGGGGT
aatcaacttgttccaaccga

SEQ ID NO: 5731 - DNA, 20 bp, Artificial Sequence
  Description of Artificial Sequence: Synthetic oligonucleotide
  Target: PCSK9; (-) strand; PAM type: NNGRRT; PAM sequence: GAGAAT
ttctggcctccaggactgca

SEQ ID NO: 5732 - DNA, 20 bp, Artificial Sequence
  Description of Artificial Sequence: Synthetic oligonucleotide
  Target: PCSK9; (-) strand; PAM type: NNGRRT; PAM sequence: TGGGAT
ggctgtgtgaagacagaggc

SEQ ID NO: 5733 - DNA, 20 bp, Artificial Sequence
  Description of Artificial Sequence: Synthetic oligonucleotide
  Target: PCSK9; (-) strand; PAM type: NNGRRT; PAM sequence: GAGGAT
ccccacatgagatcatcctg

SEQ ID NO: 5734 - DNA, 20 bp, Artificial Sequence
  Description of Artificial Sequence: Synthetic oligonucleotide
  Target: PCSK9; (-) strand; PAM type: NNGRRT; PAM sequence: AAGGGT
gctgtgaccttatttggaaa

SEQ ID NO: 5735 - DNA, 20 bp, Artificial Sequence
  Description of Artificial Sequence: Synthetic oligonucleotide
  Target: PCSK9; (-) strand; PAM type: NNGRRT; PAM sequence: AGGGGT
gcccttgatatgactccaga

SEQ ID NO: 5736 - DNA, 20 bp, Artificial Sequence
  Description of Artificial Sequence: Synthetic oligonucleotide
  Target: PCSK9; (-) strand; PAM type: NNGRRT; PAM sequence: ATGAAT
cccatgcttgtggcctcccc

SEQ ID NO: 5737 - DNA, 20 bp, Artificial Sequence
  Description of Artificial Sequence: Synthetic oligonucleotide
  Target: PCSK9; (-) strand; PAM type: NNGRRT; PAM sequence: CTGGGT
cacagttaagagtgcagggt

SEQ ID NO: 5738 - DNA, 20 bp, Artificial Sequence
  Description of Artificial Sequence: Synthetic oligonucleotide
  Target: PCSK9; (-) strand; PAM type: NNGRRT; PAM sequence: CAGGGT
aggtcacacagttaagagtg

SEQ ID NO: 5739 - DNA, 20 bp, Artificial Sequence
  Description of Artificial Sequence: Synthetic oligonucleotide
  Target: PCSK9; (-) strand; PAM type: NNGRRT; PAM sequence: AAGAGT
gtatgcaaggtcacacagtt

SEQ ID NO: 5740 - DNA, 20 bp, Artificial Sequence
  Description of Artificial Sequence: Synthetic oligonucleotide
  Target: PCSK9; (-) strand; PAM type: NNGRRT; PAM sequence: GTGAGT
gaacctgaagatcagagagg

SEQ ID NO: 5741 - DNA, 20 bp, Artificial Sequence
  Description of Artificial Sequence: Synthetic oligonucleotide
  Target: PCSK9; (-) strand; PAM type: NNGRRT; PAM sequence: GAGGGT
agaggaacctgaagatcaga

SEQ ID NO: 5742 - DNA, 20 bp, Artificial Sequence
  Description of Artificial Sequence: Synthetic oligonucleotide
  Target: PCSK9; (-) strand; PAM type: NNGRRT; PAM sequence: GAGGGT
tccaaacagccccccagagt

SEQ ID NO: 5743 - DNA, 20 bp, Artificial Sequence
  Description of Artificial Sequence: Synthetic oligonucleotide
  Target: PCSK9; (-) strand; PAM type: NNGRRT; PAM sequence: CAGAGT
taaccctccaaacagccccc

SEQ ID NO: 5744 - DNA, 20 bp, Artificial Sequence
  Description of Artificial Sequence: Synthetic oligonucleotide
  Target: PCSK9; (-) strand; PAM type: NNGRRT; PAM sequence: TTGAAT
gggtgctcaaaacgttatta

SEQ ID NO: 5745 - DNA, 20 bp, Artificial Sequence
  Description of Artificial Sequence: Synthetic oligonucleotide
  Target: PCSK9; (-) strand; PAM type: NNGRRT; PAM sequence: GTGGGT
aatatggtgcctggcgcaca

SEQ ID NO: 5746 - DNA, 20 bp, Artificial Sequence
  Description of Artificial Sequence: Synthetic oligonucleotide
  Target: PCSK9; (-) strand; PAM type: NNGRRT; PAM sequence: CTGGAT
ttaaggaatggattaatctt

SEQ ID NO: 5747 - DNA, 20 bp, Artificial Sequence
  Description of Artificial Sequence: Synthetic oligonucleotide
  Target: PCSK9; (-) strand; PAM type: NNGRRT; PAM sequence: ATGGAT
aagtagcatttgtttaagga

SEQ ID NO: 5748 - DNA, 20 bp, Artificial Sequence
  Description of Artificial Sequence: Synthetic oligonucleotide
  Target: PCSK9; (-) strand; PAM type: NNGRRT; PAM sequence: AGGAAT
tgtcaagtagcatttgttta

SEQ ID NO: 5749 - DNA, 20 bp, Artificial Sequence
  Description of Artificial Sequence: Synthetic oligonucleotide
  Target: PCSK9; (-) strand; PAM type: NNGRRT; PAM sequence: CTGGAT
atcctttcctgatccttctg

SEQ ID NO: 5750 - DNA, 20 bp, Artificial Sequence
  Description of Artificial Sequence: Synthetic oligonucleotide
  Target: PCSK9; (-) strand; PAM type: NNGRRT; PAM sequence: AGGAAT
gctagaacagcgcttcctcc

SEQ ID NO: 5751 - DNA, 20 bp, Artificial Sequence
  Description of Artificial Sequence: Synthetic oligonucleotide
  Target: PCSK9; (-) strand; PAM type: NNGRRT; PAM sequence: TGGAGT
tctcaggggcaaagaggcct

SEQ ID NO: 5752 - DNA, 20 bp, Artificial Sequence
  Description of Artificial Sequence: Synthetic oligonucleotide
  Target: PCSK9; (-) strand; PAM type: NNGRRT; PAM sequence: CCGGGT
tccctctatcttccaaaccc

SEQ ID NO: 5753 - DNA, 20 bp, Artificial Sequence
  Description of Artificial Sequence: Synthetic oligonucleotide
  Target: PCSK9; (-) strand; PAM type: NNGRRT; PAM sequence: TCGGAT
aggctggaaaggggcccagc

SEQ ID NO: 5754 - DNA, 20 bp, Artificial Sequence
  Description of Artificial Sequence: Synthetic oligonucleotide
  Target: PCSK9; (-) strand; PAM type: NNGRRT; PAM sequence: CAGGGT
agcccactgtcctgctggga

SEQ ID NO: 5755 - DNA, 20 bp, Artificial Sequence
  Description of Artificial Sequence: Synthetic oligonucleotide
  Target: PCSK9; (-) strand; PAM type: NNGRRT; PAM sequence: TGGGGT
tggggtcccatccctgggcc

SEQ ID NO: 5756 - DNA, 20 bp, Artificial Sequence
  Description of Artificial Sequence: Synthetic oligonucleotide
  Target: PCSK9; (-) strand; PAM type: NNGRRT; PAM sequence: TGGGGT
gcaagatgatgtgaccactg

SEQ ID NO: 5757 - DNA, 20 bp, Artificial Sequence
  Description of Artificial Sequence: Synthetic oligonucleotide
  Target: PCSK9; (-) strand; PAM type: NNGRRT; PAM sequence: CTGGGT
atctgctccaggagctgtac

SEQ ID NO: 5758 - DNA, 20 bp, Artificial Sequence
  Description of Artificial Sequence: Synthetic oligonucleotide
  Target: PCSK9; (-) strand; PAM type: NNGRRT; PAM sequence: GAGAGT
gcagctgagttagcccaggt

SEQ ID NO: 5759 - DNA, 20 bp, Artificial Sequence
  Description of Artificial Sequence: Synthetic oligonucleotide
  Target: PCSK9; (-) strand; PAM type: NNGRRT; PAM sequence: CTGAGT
ggagggaactgaggctgcag

SEQ ID NO: 5760 - DNA, 20 bp, Artificial Sequence
  Description of Artificial Sequence: Synthetic oligonucleotide
  Target: PCSK9; (-) strand; PAM type: NNGRRT; PAM sequence: GGGAAT
atacattggcagacagcccg

SEQ ID NO: 5761 - DNA, 20 bp, Artificial Sequence
  Description of Artificial Sequence: Synthetic oligonucleotide
  Target: PCSK9; (-) strand; PAM type: NNGRRT; PAM sequence: CTGGAT
cttccaggctgacgggacaa

SEQ ID NO: 5762 - DNA, 20 bp, Artificial Sequence
  Description of Artificial Sequence: Synthetic oligonucleotide
  Target: PCSK9; (-) strand; PAM type: NNGRRT; PAM sequence: GGGGAT
gaggccccgggctggctgca

SEQ ID NO: 5763 - DNA, 20 bp, Artificial Sequence
  Description of Artificial Sequence: Synthetic oligonucleotide
  Target: PCSK9; (-) strand; PAM type: NNGRRT; PAM sequence: TGGAAT
ctagatattgagctgggcta

SEQ ID NO: 5764 - DNA, 20 bp, Artificial Sequence
  Description of Artificial Sequence: Synthetic oligonucleotide
  Target: PCSK9; (-) strand; PAM type: NNGRRT; PAM sequence: AGGGGT
tgcccggtgctacactggga

SEQ ID NO: 5765 - DNA, 20 bp, Artificial Sequence
  Description of Artificial Sequence: Synthetic oligonucleotide
  Target: PCSK9; (-) strand; PAM type: NNGRRT; PAM sequence: CTGAGT
tgaggcggagtccttgctct

SEQ ID NO: 5766 - DNA, 20 bp, Artificial Sequence
  Description of Artificial Sequence: Synthetic oligonucleotide
  Target: PCSK9; (-) strand; PAM type: NNGRRT; PAM sequence: CGGAGT
tcccaggctgtgggatgagg

SEQ ID NO: 5767 - DNA, 20 bp, Artificial Sequence
  Description of Artificial Sequence: Synthetic oligonucleotide
  Target: PCSK9; (-) strand; PAM type: NNGRRT; PAM sequence: TGGGAT
ctgcctctcctcccaggctg

SEQ ID NO: 5768 - DNA, 20 bp, Artificial Sequence
  Description of Artificial Sequence: Synthetic oligonucleotide
  Target: PCSK9; (-) strand; PAM type: NNGRRT; PAM sequence: GTGAGT
gtctgggcacagtccgaact

SEQ ID NO: 5769 - DNA, 20 bp, Artificial Sequence
  Description of Artificial Sequence: Synthetic oligonucleotide
  Target: PCSK9; (-) strand; PAM type: NNGRRT; PAM sequence: ATGAAT
tggctgctctgagatcccac

SEQ ID NO: 5770 - DNA, 20 bp, Artificial Sequence
  Description of Artificial Sequence: Synthetic oligonucleotide
  Target: PCSK9; (-) strand; PAM type: NNGRRT; PAM sequence: CTGGGT
gtctggctcacaggctctgt

SEQ ID NO: 5771 - DNA, 20 bp, Artificial Sequence
  Description of Artificial Sequence: Synthetic oligonucleotide
  Target: PCSK9; (-) strand; PAM type: NNGRRT; PAM sequence: CAGAGT
gtgatcctccaaatatgctg

SEQ ID NO: 5772 - DNA, 20 bp, Artificial Sequence
  Description of Artificial Sequence: Synthetic oligonucleotide
  Target: PCSK9; (-) strand; PAM type: NNGRRT; PAM sequence: CTGAGT
tgctcctgccccagggtctc

SEQ ID NO: 5773 - DNA, 20 bp, Artificial Sequence
  Description of Artificial Sequence: Synthetic oligonucleotide
  Target: PCSK9; (-) strand; PAM type: NNGRRT; PAM sequence: CAGGGT
cagtcaaactgctcctgccc

SEQ ID NO: 5774 - DNA, 20 bp, Artificial Sequence
  Description of Artificial Sequence: Synthetic oligonucleotide
  Target: PCSK9; (-) strand; PAM type: NNGRRT; PAM sequence: TGGAAT
aggaaaagcagggcctcagg

SEQ ID NO: 5775 - DNA, 20 bp, Artificial Sequence
  Description of Artificial Sequence: Synthetic oligonucleotide
  Target: PCSK9; (-) strand; PAM type: NNGRRT; PAM sequence: CAGAGT
ttcaggcaggttgctgctag

SEQ ID NO: 5776 - DNA, 20 bp, Artificial Sequence
  Description of Artificial Sequence: Synthetic oligonucleotide
  Target: PCSK9; (-) strand; PAM type: NNGRRT; PAM sequence: CTGGAT
tgccaggcaggtccagcctg

SEQ ID NO: 5777 - DNA, 20 bp, Artificial Sequence
  Description of Artificial Sequence: Synthetic oligonucleotide
  Target: PCSK9; (-) strand; PAM type: NNGRRT; PAM sequence: TAGGGT
cgcccatgcaggacaaaggt

SEQ ID NO: 5778 - DNA, 20 bp, Artificial Sequence
  Description of Artificial Sequence: Synthetic oligonucleotide
  Target: PCSK9; (-) strand; PAM type: NNGRRT; PAM sequence: GGGAGT
agctgcaagagactcactgg

SEQ ID NO: 5779 - DNA, 20 bp, Artificial Sequence
  Description of Artificial Sequence: Synthetic oligonucleotide
  Target: PCSK9; (-) strand; PAM type: NNGRRT; PAM sequence: TGGGGT
attctccaagaagcaggcac

SEQ ID NO: 5780 - DNA, 20 bp, Artificial Sequence
  Description of Artificial Sequence: Synthetic oligonucleotide
  Target: PCSK9; (-) strand; PAM type: NNGRRT; PAM sequence: TTGGAT
tcatccctaactggatcagt

SEQ ID NO: 5781 - DNA, 20 bp, Artificial Sequence
  Description of Artificial Sequence: Synthetic oligonucleotide
  Target: PCSK9; (-) strand; PAM type: NNGRRT; PAM sequence: CTGGAT
ctacactttatcatccctaa

SEQ ID NO: 5782 - DNA, 20 bp, Artificial Sequence
  Description of Artificial Sequence: Synthetic oligonucleotide
  Target: PCSK9; (-) strand; PAM type: NNGRRT; PAM sequence: ACGAGT
ggggactgcttctgcctcac

SEQ ID NO: 5783 - DNA, 20 bp, Artificial Sequence
  Description of Artificial Sequence: Synthetic oligonucleotide
  Target: PCSK9; (-) strand; PAM type: NNGRRT; PAM sequence: CAGGAT
acaggaagctgcagctcgga

SEQ ID NO: 5784 - DNA, 20 bp, Artificial Sequence
  Description of Artificial Sequence: Synthetic oligonucleotide
  Target: PCSK9; (-) strand; PAM type: NNGRRT; PAM sequence: GAGAAT
caagatttaaagactcaaag

SEQ ID NO: 5785 - DNA, 20 bp, Artificial Sequence
  Description of Artificial Sequence: Synthetic oligonucleotide
  Target: PCSK9; (-) strand; PAM type: NNGRRT; PAM sequence: CCGAGT
ttatagcctttcacagctca

SEQ ID NO: 5786 - DNA, 20 bp, Artificial Sequence
  Description of Artificial Sequence: Synthetic oligonucleotide
  Target: PCSK9; (-) strand; PAM type: NNGRRT; PAM sequence: ATGAAT
tatcaatatctaacaataat

SEQ ID NO: 5787 - DNA, 20 bp, Artificial Sequence
  Description of Artificial Sequence: Synthetic oligonucleotide
  Target: PCSK9; (-) strand; PAM type: NNGRRT; PAM sequence: ATGAAT
aagtcatcctgctccttcat

SEQ ID NO: 5788 - DNA, 20 bp, Artificial Sequence
  Description of Artificial Sequence: Synthetic oligonucleotide
  Target: PCSK9; (-) strand; PAM type: NNGRRT; PAM sequence: GGGAAT
gcgacatttgtgggagagga

SEQ ID NO: 5789 - DNA, 20 bp, Artificial Sequence
  Description of Artificial Sequence: Synthetic oligonucleotide
  Target: PCSK9; (-) strand; PAM type: NNGRRT; PAM sequence: GCGGGT
gtgcttacctgtctgtggaa

SEQ ID NO: 5790 - DNA, 20 bp, Artificial Sequence
  Description of Artificial Sequence: Synthetic oligonucleotide
  Target: PCSK9; (-) strand; PAM type: NNGRRT; PAM sequence: GGGGAT
tccccacccacctccaggat

SEQ ID NO: 5791 - DNA, 20 bp, Artificial Sequence
  Description of Artificial Sequence: Synthetic oligonucleotide
  Target: PCSK9; (-) strand; PAM type: NNGRRT; PAM sequence: CAGGAT
tggcagtccccacccacctc

SEQ ID NO: 5792 - DNA, 20 bp, Artificial Sequence
  Description of Artificial Sequence: Synthetic oligonucleotide
  Target: PCSK9; (-) strand; PAM type: NNGRRT; PAM sequence: TGGGGT
ggagtacagctgcaacgctc

SEQ ID NO: 5793 - DNA, 20 bp, Artificial Sequence
  Description of Artificial Sequence: Synthetic oligonucleotide
  Target: PCSK9; (-) strand; PAM type: NNGRRT; PAM sequence: AGGAGT
agctggggggggtgcaaccc

SEQ ID NO: 5794 - DNA, 20 bp, Artificial Sequence
  Description of Artificial Sequence: Synthetic oligonucleotide
  Target: PCSK9; (-) strand; PAM type: NNGRRT; PAM sequence: GGGGGT
aggggacagtgacagctggg

SEQ ID NO: 5795 - DNA, 20 bp, Artificial Sequence
  Description of Artificial Sequence: Synthetic oligonucleotide
  Target: PCSK9; (-) strand; PAM type: NNGRRT; PAM sequence: ATGGAT
acaaatcagcaggtggctgg

SEQ ID NO: 5796 - DNA, 20 bp, Artificial Sequence
  Description of Artificial Sequence: Synthetic oligonucleotide
  Target: PCSK9; (-) strand; PAM type: NNGRRT; PAM sequence: CTGGAT
tataacaaatcagcaggtgg

SEQ ID NO: 5797 - DNA, 20 bp, Artificial Sequence
  Description of Artificial Sequence: Synthetic oligonucleotide
  Target: PCSK9; (-) strand; PAM type: NNGRRT; PAM sequence: GTGGGT
ccgctgaccacccctgccag

SEQ ID NO: 5798 - DNA, 20 bp, Artificial Sequence
  Description of Artificial Sequence: Synthetic oligonucleotide
  Target: PCSK9; (-) strand; PAM type: NNGRRT; PAM sequence: GAGGGT
tggggccatcacttacctat

SEQ ID NO: 5799 - DNA, 20 bp, Artificial Sequence
  Description of Artificial Sequence: Synthetic oligonucleotide
  Target: PCSK9; (-) strand; PAM type: NNGRRT; PAM sequence: CTGGGT
ctgcatgaccctcttggggc

SEQ ID NO: 5800 - DNA, 20 bp, Artificial Sequence
  Description of Artificial Sequence: Synthetic oligonucleotide
  Target: PCSK9; (-) strand; PAM type: NNGRRT; PAM sequence: CAGGGT
ctgtggaaaggtcattgacc

SEQ ID NO: 5801 - DNA, 20 bp, Artificial Sequence
  Description of Artificial Sequence: Synthetic oligonucleotide
  Target: PCSK9; (-) strand; PAM type: NNGRRT; PAM sequence: CCGGAT
caaaagacataaagacatca

SEQ ID NO: 5802 - DNA, 20 bp, Artificial Sequence
  Description of Artificial Sequence: Synthetic oligonucleotide
  Target: PCSK9; (-) strand; PAM type: NNGRRT; PAM sequence: TCGAGT
aaaagtttgcttagatcacc

SEQ ID NO: 5803 - DNA, 20 bp, Artificial Sequence
  Description of Artificial Sequence: Synthetic oligonucleotide
  Target: PCSK9; (-) strand; PAM type: NNGRRT; PAM sequence: GTGAGT
gggcccagtcatgcaagtga

SEQ ID NO: 5804 - DNA, 20 bp, Artificial Sequence
  Description of Artificial Sequence: Synthetic oligonucleotide
  Target: PCSK9; (-) strand; PAM type: NNGRRT; PAM sequence: GTGAGT
tgcagggcccagtcatgcaa

SEQ ID NO: 5805 - DNA, 20 bp, Artificial Sequence
  Description of Artificial Sequence: Synthetic oligonucleotide
  Target: PCSK9; (-) strand; PAM type: NNGRRT; PAM sequence: CTGGGT
tggacttcataggggggccg

SEQ ID NO: 5806 - DNA, 20 bp, Artificial Sequence
  Description of Artificial Sequence: Synthetic oligonucleotide
  Target: PCSK9; (-) strand; PAM type: NNGRRT; PAM sequence: CAGAGT
cttctctgtccaccggcccc

SEQ ID NO: 5807 - DNA, 20 bp, Artificial Sequence
  Description of Artificial Sequence: Synthetic oligonucleotide
  Target: PCSK9; (-) strand; PAM type: NNGRRT; PAM sequence: GCGAGT
cagagctgacagttttccca

SEQ ID NO: 5808 - DNA, 20 bp, Artificial Sequence
  Description of Artificial Sequence: Synthetic oligonucleotide
  Target: PCSK9; (-) strand; PAM type: NNGRRT; PAM sequence: AGGGGT
aaaggggtgggacaggcaca

SEQ ID NO: 5809 - DNA, 20 bp, Artificial Sequence
  Description of Artificial Sequence: Synthetic oligonucleotide
  Target: PCSK9; (-) strand; PAM type: NNGRRT; PAM sequence: AGGGGT
gagccgaggtcagtcaataa

SEQ ID NO: 5810 - DNA, 20 bp, Artificial Sequence
  Description of Artificial Sequence: Synthetic oligonucleotide
  Target: PCSK9; (-) strand; PAM type: NNGRRT; PAM sequence: TGGGAT
acctcggcctcccaaagtgc

SEQ ID NO: 5811 - DNA, 20 bp, Artificial Sequence
  Description of Artificial Sequence: Synthetic oligonucleotide
  Target: PCSK9; (-) strand; PAM type: NNGRRT; PAM sequence: CGGGGT
ttttgtatttttagtagaga

SEQ ID NO: 5812 - DNA, 20 bp, Artificial Sequence
  Description of Artificial Sequence: Synthetic oligonucleotide
  Target: PCSK9; (-) strand; PAM type: NNGRRT; PAM sequence: TGGGAT
gccttagcctcccaagtagc

SEQ ID NO: 5813 - DNA, 20 bp, Artificial Sequence
  Description of Artificial Sequence: Synthetic oligonucleotide
  Target: PCSK9; (-) strand; PAM type: NNGRRT; PAM sequence: CTGGGT
ctcactgcaacctccacctc

SEQ ID NO: 5814 - DNA, 20 bp, Artificial Sequence
  Description of Artificial Sequence: Synthetic oligonucleotide
  Target: PCSK9; (-) strand; PAM type: NNGRRT; PAM sequence: CTGGAT
atctcgctctatcactcagg

SEQ ID NO: 5815 - DNA, 20 bp, Artificial Sequence
  Description of Artificial Sequence: Synthetic oligonucleotide
  Target: PCSK9; (-) strand; PAM type: NNGRRT; PAM sequence: TGGAAT
ttacttatttatttttgaga

SEQ ID NO: 5816 - DNA, 20 bp, Artificial Sequence
  Description of Artificial Sequence: Synthetic oligonucleotide
  Target: PCSK9; (-) strand; PAM type: NNGRRT; PAM sequence: CTGAGT
agggagggagtggagtggca

SEQ ID NO: 5817 - DNA, 20 bp, Artificial Sequence
  Description of Artificial Sequence: Synthetic oligonucleotide
  Target: PCSK9; (-) strand; PAM type: NNGRRT; PAM sequence: TGGAGT
cacaccacggagggagggag

SEQ ID NO: 5818 - DNA, 20 bp, Artificial Sequence
  Description of Artificial Sequence: Synthetic oligonucleotide
  Target: PCSK9; (-) strand; PAM type: NNGRRT; PAM sequence: GGGAGT
cccctcacaccacggaggga

SEQ ID NO: 5819 - DNA, 20 bp, Artificial Sequence
  Description of Artificial Sequence: Synthetic oligonucleotide
  Target: PCSK9; (-) strand; PAM type: NNGRRT; PAM sequence: TGGAAT
gccgtggccaaggatggagc

SEQ ID NO: 5820 - DNA, 20 bp, Artificial Sequence
  Description of Artificial Sequence: Synthetic oligonucleotide
  Target: PCSK9; (-) strand; PAM type: NNGRRT; PAM sequence: AAGGAT
tgtctccaggagccgtggcc

SEQ ID NO: 5821 - DNA, 20 bp, Artificial Sequence
  Description of Artificial Sequence: Synthetic oligonucleotide
  Target: PCSK9; (-) strand; PAM type: NNGRRT; PAM sequence: CTGGAT
aaatgaggtgtgggagcctt

SEQ ID NO: 5822 - DNA, 20 bp, Artificial Sequence
  Description of Artificial Sequence: Synthetic oligonucleotide
  Target: PCSK9; (-) strand; PAM type: NNGRRT; PAM sequence: AAGGAT
cggggcttcaccgtgttagc

SEQ ID NO: 5823 - DNA, 20 bp, Artificial Sequence
  Description of Artificial Sequence: Synthetic oligonucleotide
  Target: PCSK9; (-) strand; PAM type: NNGRRT; PAM sequence: CTGAGT
cattctcctgcctcagcctc

SEQ ID NO: 5824 - DNA, 20 bp, Artificial Sequence
  Description of Artificial Sequence: Synthetic oligonucleotide
  Target: PCSK9; (-) strand; PAM type: NNGRRT; PAM sequence: CCGGGT
ctcactgcaagctccgcctc

SEQ ID NO: 5825 - DNA, 20 bp, Artificial Sequence
  Description of Artificial Sequence: Synthetic oligonucleotide
  Target: PCSK9; (-) strand; PAM type: NNGRRT; PAM sequence: TGGAGT
tctcgctctattgcccaggc

SEQ ID NO: 5826 - DNA, 20 bp, Artificial Sequence
  Description of Artificial Sequence: Synthetic oligonucleotide
  Target: PCSK9; (-) strand; PAM type: NNGRRT; PAM sequence: CGGAGT
tttttttttttctttccaga

SEQ ID NO: 5827 - DNA, 20 bp, Artificial Sequence
  Description of Artificial Sequence: Synthetic oligonucleotide
  Target: PCSK9; (-) strand; PAM type: NNGRRT; PAM sequence: GAGGGT
taccataactccccaccctt

SEQ ID NO: 5828 - DNA, 20 bp, Artificial Sequence
  Description of Artificial Sequence: Synthetic oligonucleotide
  Target: PCSK9; (-) strand; PAM type: NNGRRT; PAM sequence: AAGAAT
gttgctcccaggattgtcta

SEQ ID NO: 5829 - DNA, 20 bp, Artificial Sequence
  Description of Artificial Sequence: Synthetic oligonucleotide
  Target: PCSK9; (-) strand; PAM type: NNGRRT; PAM sequence: CAGGAT
gaaacagggacagttgctcc

SEQ ID NO: 5830 - DNA, 20 bp, Artificial Sequence
  Description of Artificial Sequence: Synthetic oligonucleotide
  Target: PCSK9; (-) strand; PAM type: NNGRRT; PAM sequence: CAGAGT
tggacccacacaaacttgaa

SEQ ID NO: 5831 - DNA, 20 bp, Artificial Sequence
  Description of Artificial Sequence: Synthetic oligonucleotide
  Target: PCSK9; (-) strand; PAM type: NNGRRT; PAM sequence: AGGAAT
accaagaggatgagcctcag

SEQ ID NO: 5832 - DNA, 20 bp, Artificial Sequence
  Description of Artificial Sequence: Synthetic oligonucleotide
  Target: PCSK9; (-) strand; PAM type: NNGRRT; PAM sequence: GAGGAT
ccatgaaagagaggcaccaa

SEQ ID NO: 5833 - DNA, 20 bp, Artificial Sequence
  Description of Artificial Sequence: Synthetic oligonucleotide
  Target: PCSK9; (-) strand; PAM type: NNGRRT; PAM sequence: GGGGAT
cgtctgaatatacgaactca

SEQ ID NO: 5834 - DNA, 20 bp, Artificial Sequence
  Description of Artificial Sequence: Synthetic oligonucleotide
  Target: PCSK9; (-) strand; PAM type: NNGRRT; PAM sequence: CTGAAT
gcctggctctgtctaagcgt

SEQ ID NO: 5835 - DNA, 20 bp, Artificial Sequence
  Description of Artificial Sequence: Synthetic oligonucleotide
  Target: PCSK9; (-) strand; PAM type: NNGRRT; PAM sequence: GCGGAT
cagcctgcctggcctgccct

SEQ ID NO: 5836 - DNA, 20 bp, Artificial Sequence
  Description of Artificial Sequence: Synthetic oligonucleotide
  Target: PCSK9; (-) strand; PAM type: NNGRRT; PAM sequence: AGGAAT
attgcaacatcaaattctgc

SEQ ID NO: 5837 - DNA, 20 bp, Artificial Sequence
  Description of Artificial Sequence: Synthetic oligonucleotide
  Target: PCSK9; (-) strand; PAM type: NNGRRT; PAM sequence: AGGAAT
ctgaggcctcccagggaaga

SEQ ID NO: 5838 - DNA, 20 bp, Artificial Sequence
  Description of Artificial Sequence: Synthetic oligonucleotide
  Target: PCSK9; (-) strand; PAM type: NNGRRT; PAM sequence: CGGAGT
ctaacatttaaatcagaaga

SEQ ID NO: 5839 - DNA, 20 bp, Artificial Sequence
  Description of Artificial Sequence: Synthetic oligonucleotide
  Target: PCSK9; (-) strand; PAM type: NNGRRT; PAM sequence: GGGGAT
acagagtgatggttaatttt

SEQ ID NO: 5840 - DNA, 20 bp, Artificial Sequence
  Description of Artificial Sequence: Synthetic oligonucleotide
  Target: PCSK9; (-) strand; PAM type: NNGRRT; PAM sequence: CAGAGT
cagcccctcccttacaggca

SEQ ID NO: 5841 - DNA, 20 bp, Artificial Sequence
  Description of Artificial Sequence: Synthetic oligonucleotide
  Target: PCSK9; (-) strand; PAM type: NNGRRT; PAM sequence: CCGAAT
ggctggaccagctggctttt

SEQ ID NO: 5842 - DNA, 20 bp, Artificial Sequence
  Description of Artificial Sequence: Synthetic oligonucleotide
  Target: PCSK9; (-) strand; PAM type: NNGRRT; PAM sequence: GGGAGT
tacctcgggagctgaggctg

SEQ ID NO: 5843 - DNA, 20 bp, Artificial Sequence
  Description of Artificial Sequence: Synthetic oligonucleotide
  Target: PCSK9; (-) strand; PAM type: NNGRRT; PAM sequence: AAGGGT
acgactccttccaaagccag

SEQ ID NO: 5844 - DNA, 20 bp, Artificial Sequence
  Description of Artificial Sequence: Synthetic oligonucleotide
  Target: PCSK9; (-) strand; PAM type: NNGRRT; PAM sequence: GGGGGT
tccccagcctcccgcatggc

SEQ ID NO: 5845 - DNA, 20 bp, Artificial Sequence
  Description of Artificial Sequence: Synthetic oligonucleotide
  Target: PCSK9; (-) strand; PAM type: NNGRRT; PAM sequence: CGGGGT
aggagggagagtggccagga

SEQ ID NO: 5846 - DNA, 20 bp, Artificial Sequence
  Description of Artificial Sequence: Synthetic oligonucleotide
  Target: PCSK9; (-) strand; PAM type: NNGRRT; PAM sequence: GAGAGT
accagaagaccttcaggagg

SEQ ID NO: 5847 - DNA, 20 bp, Artificial Sequence
  Description of Artificial Sequence: Synthetic oligonucleotide
  Target: PCSK9; (-) strand; PAM type: NNGRRT; PAM sequence: GCGGGT
gggatggagatggggagggg

SEQ ID NO: 5848 - DNA, 20 bp, Artificial Sequence
  Description of Artificial Sequence: Synthetic oligonucleotide
  Target: PCSK9; (-) strand; PAM type: NNGRRT; PAM sequence: GGGGAT
gggcagaggacgcagggcct

SEQ ID NO: 5849 - DNA, 20 bp, Artificial Sequence
  Description of Artificial Sequence: Synthetic oligonucleotide
  Target: PCSK9; (-) strand; PAM type: NNGRRT; PAM sequence: AAGAGT
ctggacaacagggaggccca

SEQ ID NO: 5850 - DNA, 20 bp, Artificial Sequence
  Description of Artificial Sequence: Synthetic oligonucleotide
  Target: PCSK9; (-) strand; PAM type: NNGRRT; PAM sequence: TCGGGT
gcacactctgtggatgttcc

SEQ ID NO: 5851 - DNA, 20 bp, Artificial Sequence
  Description of Artificial Sequence: Synthetic oligonucleotide
  Target: PCSK9; (-) strand; PAM type: NNGRRT; PAM sequence: GTGGAT
ccgggcatgcggcacactct

SEQ ID NO: 5852 - DNA, 20 bp, Artificial Sequence
  Description of Artificial Sequence: Synthetic oligonucleotide
  Target: PCSK9; (-) strand; PAM type: NNGRRT; PAM sequence: GTGGGT
gtcctgacactggaggagtg

SEQ ID NO: 5853 - DNA, 20 bp, Artificial Sequence
  Description of Artificial Sequence: Synthetic oligonucleotide
  Target: PCSK9; (-) strand; PAM type: NNGRRT; PAM sequence: AGGAGT
ccgcagtgtcctgacactgg

SEQ ID NO: 5854 - DNA, 20 bp, Artificial Sequence
  Description of Artificial Sequence: Synthetic oligonucleotide
  Target: PCSK9; (-) strand; PAM type: NNGRRT; PAM sequence: TGGAGT
cagcattcccaatgcccctg

SEQ ID NO: 5855 - DNA, 20 bp, Artificial Sequence
  Description of Artificial Sequence: Synthetic oligonucleotide
  Target: PCSK9; (-) strand; PAM type: NNGRRT; PAM sequence: TTGGGT
gacaactgctatacacctgt

SEQ ID NO: 5856 - DNA, 20 bp, Artificial Sequence
  Description of Artificial Sequence: Synthetic oligonucleotide
  Target: PCSK9; (-) strand; PAM type: NNGRRT; PAM sequence: AGGGGT
cagagaaaggagcccaagag

SEQ ID NO: 5857 - DNA, 20 bp, Artificial Sequence
  Description of Artificial Sequence: Synthetic oligonucleotide
  Target: PCSK9; (-) strand; PAM type: NNGRRT; PAM sequence: GTGGGT
tgacctggaaaggtgaggag

SEQ ID NO: 5858 - DNA, 20 bp, Artificial Sequence
  Description of Artificial Sequence: Synthetic oligonucleotide
  Target: PCSK9; (-) strand; PAM type: NNGRRT; PAM sequence: CAGGGT
aagttggtccccaaagtccc

SEQ ID NO: 5859 - DNA, 20 bp, Artificial Sequence
  Description of Artificial Sequence: Synthetic oligonucleotide
  Target: PCSK9; (-) strand; PAM type: NNGRRT; PAM sequence: TGGGGT
catcacggtggccgaggcag

SEQ ID NO: 5860 - DNA, 20 bp, Artificial Sequence
  Description of Artificial Sequence: Synthetic oligonucleotide
  Target: PCSK9; (-) strand; PAM type: NNGRRT; PAM sequence: CTGAGT
cactcgcctccctcatcaga

SEQ ID NO: 5861 - DNA, 20 bp, Artificial Sequence
  Description of Artificial Sequence: Synthetic oligonucleotide
  Target: PCSK9; (-) strand; PAM type: NNGRRT; PAM sequence: GTGAAT
ctgcaatgcctggtgcaggg

SEQ ID NO: 5862 - DNA, 20 bp, Artificial Sequence
  Description of Artificial Sequence: Synthetic oligonucleotide
  Target: PCSK9; (-) strand; PAM type: NNGRRT; PAM sequence: AGGGGT
atggctgcaatgcctggtgc

SEQ ID NO: 5863 - DNA, 20 bp, Artificial Sequence
  Description of Artificial Sequence: Synthetic oligonucleotide
  Target: PCSK9; (-) strand; PAM type: NNGRRT; PAM sequence: CAGGGT
agtctctgcctcaactcggc

SEQ ID NO: 5864 - DNA, 20 bp, Artificial Sequence
  Description of Artificial Sequence: Synthetic oligonucleotide
  Target: PCSK9; (-) strand; PAM type: NNGRRT; PAM sequence: GTGGAT
atgacatctttggcagagaa

SEQ ID NO: 5865 - DNA, 20 bp, Artificial Sequence
  Description of Artificial Sequence: Synthetic oligonucleotide
  Target: PCSK9; (-) strand; PAM type: NNGRRT; PAM sequence: GGGGGT
ggcagggcggccaccaggtt

SEQ ID NO: 5866 - DNA, 20 bp, Artificial Sequence
  Description of Artificial Sequence: Synthetic oligonucleotide
  Target: PCSK9; (-) strand; PAM type: NNGRRT; PAM sequence: ATGGGT
ccatcctgcttacctgcccc

SEQ ID NO: 5867 - DNA, 20 bp, Artificial Sequence
  Description of Artificial Sequence: Synthetic oligonucleotide
  Target: PCSK9; (-) strand; PAM type: NNGRRT; PAM sequence: GGGAGT
tgggatgaggagggggtgct

SEQ ID NO: 5868 - DNA, 20 bp, Artificial Sequence
  Description of Artificial Sequence: Synthetic oligonucleotide
  Target: PCSK9; (-) strand; PAM type: NNGRRT; PAM sequence: GGGGGT
aaaagggcctgggatgagga

SEQ ID NO: 5869 - DNA, 20 bp, Artificial Sequence
  Description of Artificial Sequence: Synthetic oligonucleotide
  Target: PCSK9; (-) strand; PAM type: NNGRRT; PAM sequence: TGGGAT
gccaacctgcaaaaagggcc

SEQ ID NO: 5870 - DNA, 20 bp, Artificial Sequence
  Description of Artificial Sequence: Synthetic oligonucleotide
  Target: PCSK9; (-) strand; PAM type: NNGRRT; PAM sequence: CCGAGT
tgtggccatccgtgtaggcc

SEQ ID NO: 5871 - DNA, 20 bp, Artificial Sequence
  Description of Artificial Sequence: Synthetic oligonucleotide
  Target: PCSK9; (-) strand; PAM type: NNGRRT; PAM sequence: AGGGGT
cacacacacacacacgaagg

SEQ ID NO: 5872 - DNA, 20 bp, Artificial Sequence
  Description of Artificial Sequence: Synthetic oligonucleotide
  Target: PCSK9; (-) strand; PAM type: NNGRRT; PAM sequence: GGGGGT
ggaggatggaggggcttgct

SEQ ID NO: 5873 - DNA, 20 bp, Artificial Sequence
  Description of Artificial Sequence: Synthetic oligonucleotide
  Target: PCSK9; (-) strand; PAM type: NNGRRT; PAM sequence: GAGGAT
tacagaagagctggagtctg

SEQ ID NO: 5874 - DNA, 20 bp, Artificial Sequence
  Description of Artificial Sequence: Synthetic oligonucleotide
  Target: PCSK9; (-) strand; PAM type: NNGRRT; PAM sequence: TGGAGT
ctgtaagcttacagaagagc

SEQ ID NO: 5875 - DNA, 20 bp, Artificial Sequence
  Description of Artificial Sequence: Synthetic oligonucleotide
  Target: PCSK9; (-) strand; PAM type: NNGRRT; PAM sequence: AGGAGT
gcccccagccgcgtgaagtg

SEQ ID NO: 5876 - DNA, 20 bp, Artificial Sequence
  Description of Artificial Sequence: Synthetic oligonucleotide
  Target: PCSK9; (-) strand; PAM type: NNGRRT; PAM sequence: CAGAGT
ggcctagagatggctgagtc

SEQ ID NO: 5877 - DNA, 20 bp, Artificial Sequence
  Description of Artificial Sequence: Synthetic oligonucleotide
  Target: PCSK9; (-) strand; PAM type: NNGRRT; PAM sequence: CTGAGT
tgagaggggcctagagatgg

SEQ ID NO: 5878 - DNA, 20 bp, Artificial Sequence
  Description of Artificial Sequence: Synthetic oligonucleotide
  Target: PCSK9; (-) strand; PAM type: NNGRRT; PAM sequence: CTGAGT
ctcccagaaccatggagcac

SEQ ID NO: 5879 - DNA, 20 bp, Artificial Sequence
  Description of Artificial Sequence: Synthetic oligonucleotide
  Target: PCSK9; (-) strand; PAM type: NNGRRT; PAM sequence: AAGGAT
gaaatccaggaggccaaagc

SEQ ID NO: 5880 - DNA, 20 bp, Artificial Sequence
  Description of Artificial Sequence: Synthetic oligonucleotide
  Target: PCSK9; (-) strand; PAM type: NNGRRT; PAM sequence: CAGAGT
ctcaaaagttcttccaaaca

SEQ ID NO: 5881 - DNA, 20 bp, Artificial Sequence
  Description of Artificial Sequence: Synthetic oligonucleotide
  Target: PCSK9; (-) strand; PAM type: NNGRRT; PAM sequence: CTGAAT
tgttctgccagtgggcagct

SEQ ID NO: 5882 - DNA, 20 bp, Artificial Sequence
  Description of Artificial Sequence: Synthetic oligonucleotide
  Target: PCSK9; (-) strand; PAM type: NNGRRT; PAM sequence: CAGGAT
aaacacagaaagggactaga

SEQ ID NO: 5883 - DNA, 20 bp, Artificial Sequence
  Description of Artificial Sequence: Synthetic oligonucleotide
  Target: PCSK9; (-) strand; PAM type: NNGRRT; PAM sequence: TAGAAT
acggaaatgggaatctgctt

SEQ ID NO: 5884 - DNA, 20 bp, Artificial Sequence
  Description of Artificial Sequence: Synthetic oligonucleotide
  Target: PCSK9; (-) strand; PAM type: NNGRRT; PAM sequence: GGGAAT
ttagagtcaaagacggaaat

SEQ ID NO: 5885 - DNA, 20 bp, Artificial Sequence
  Description of Artificial Sequence: Synthetic oligonucleotide
  Target: PCSK9; (-) strand; PAM type: NNGRRT; PAM sequence: TAGAGT
cagcttgcccccttgggcct

SEQ ID NO: 5886 - DNA, 20 bp, Artificial Sequence
  Description of Artificial Sequence: Synthetic oligonucleotide
  Target: PCSK9; (-) strand; PAM type: NNGRRT; PAM sequence: TGGGGT
tgtggacgctgcagttggcc

SEQ ID NO: 5887 - DNA, 20 bp, Artificial Sequence
  Description of Artificial Sequence: Synthetic oligonucleotide
  Target: PCSK9; (-) strand; PAM type: NNGRRT; PAM sequence: ACGGGT
ccctgttggtggcagtggac

SEQ ID NO: 5888 - DNA, 20 bp, Artificial Sequence
  Description of Artificial Sequence: Synthetic oligonucleotide
  Target: PCSK9; (-) strand; PAM type: NNGRRT; PAM sequence: GTGGGT
aggaccaagcctcgcgggca

SEQ ID NO: 5889 - DNA, 20 bp, Artificial Sequence
  Description of Artificial Sequence: Synthetic oligonucleotide
  Target: PCSK9; (-) strand; PAM type: NNGRRT; PAM sequence: ATGGAT
gcaagtcaggcttgagtctc

SEQ ID NO: 5890 - DNA, 20 bp, Artificial Sequence
  Description of Artificial Sequence: Synthetic oligonucleotide
  Target: PCSK9; (-) strand; PAM type: NNGRRT; PAM sequence: TTGAGT
tatggaactgcaagtcaggc

SEQ ID NO: 5891 - DNA, 20 bp, Artificial Sequence
  Description of Artificial Sequence: Synthetic oligonucleotide
  Target: PCSK9; (-) strand; PAM type: NNGRRT; PAM sequence: CAGAGT
gggcatggaagtggcagaac

SEQ ID NO: 5892 - DNA, 20 bp, Artificial Sequence
  Description of Artificial Sequence: Synthetic oligonucleotide
  Target: PCSK9; (-) strand; PAM type: NNGRRT; PAM sequence: CAGGGT
gtcacacagctatagagcgg

SEQ ID NO: 5893 - DNA, 20 bp, Artificial Sequence
  Description of Artificial Sequence: Synthetic oligonucleotide
  Target: PCSK9; (-) strand; PAM type: NNGRRT; PAM sequence: TAGAAT
aaaacaatagtaacgatagc

SEQ ID NO: 5894 - DNA, 20 bp, Artificial Sequence
  Description of Artificial Sequence: Synthetic oligonucleotide
  Target: PCSK9; (-) strand; PAM type: NNGRRT; PAM sequence: ACGGGT
agaggctggattttaaagca

SEQ ID NO: 5895 - DNA, 20 bp, Artificial Sequence
  Description of Artificial Sequence: Synthetic oligonucleotide
  Target: PCSK9; (-) strand; PAM type: NNGRRT; PAM sequence: CTGGAT
atagttgcctataccagagg

SEQ ID NO: 5896 - DNA, 20 bp, Artificial Sequence
  Description of Artificial Sequence: Synthetic oligonucleotide
  Target: PCSK9; (-) strand; PAM type: NNGRRT; PAM sequence: CAGGGT
gcctgggcatgttttcgaca

SEQ ID NO: 5897 - DNA, 20 bp, Artificial Sequence
  Description of Artificial Sequence: Synthetic oligonucleotide
  Target: PCSK9; (-) strand; PAM type: NNGRRT; PAM sequence: TGGAGT
ctgagcctcttattccaggc

SEQ ID NO: 5898 - DNA, 20 bp, Artificial Sequence
  Description of Artificial Sequence: Synthetic oligonucleotide
  Target: PCSK9; (-) strand; PAM type: NNGRRT; PAM sequence: GAGAAT
tcccctggacgtgctcagac

SEQ ID NO: 5899 - DNA, 20 bp, Artificial Sequence
  Description of Artificial Sequence: Synthetic oligonucleotide
  Target: PCSK9; (-) strand; PAM type: NNGRRT; PAM sequence: TGGAGT
gctctttgaggtgcgcttca

SEQ ID NO: 5900 - DNA, 20 bp, Artificial Sequence
  Description of Artificial Sequence: Synthetic oligonucleotide
  Target: PCSK9; (-) strand; PAM type: NNGRRT; PAM sequence: TAGGGT
ggcatgtgctctgaacatgg

SEQ ID NO: 5901 - DNA, 20 bp, Artificial Sequence
  Description of Artificial Sequence: Synthetic oligonucleotide
  Target: PCSK9; (-) strand; PAM type: NNGRRT; PAM sequence: AGGAGT
agaatgccctccatgggctt

SEQ ID NO: 5902 - DNA, 20 bp, Artificial Sequence
  Description of Artificial Sequence: Synthetic oligonucleotide
  Target: PCSK9; (-) strand; PAM type: NNGRRT; PAM sequence: CAGAAT
ggggtctgtctgaaccacct

SEQ ID NO: 5903 - DNA, 20 bp, Artificial Sequence
  Description of Artificial Sequence: Synthetic oligonucleotide
  Target: PCSK9; (-) strand; PAM type: NNGRRT; PAM sequence: CGGGGT
gcagaagttcaagggtaagc

SEQ ID NO: 5904 - DNA, 20 bp, Artificial Sequence
  Description of Artificial Sequence: Synthetic oligonucleotide
  Target: PCSK9; (-) strand; PAM type: NNGRRT; PAM sequence: AAGGGT
cagccagcaggcagaagttc

SEQ ID NO: 5905 - DNA, 20 bp, Artificial Sequence
  Description of Artificial Sequence: Synthetic oligonucleotide
  Target: PCSK9; (-) strand; PAM type: NNGRRT; PAM sequence: TGGGAT
ccagctcagatgtgaaatgc

SEQ ID NO: 5906 - DNA, 20 bp, Artificial Sequence
  Description of Artificial Sequence: Synthetic oligonucleotide
  Target: PCSK9; (-) strand; PAM type: NNGRRT; PAM sequence: GTGGGT
ggcctcagcacaggcggctt

SEQ ID NO: 5907 - DNA, 20 bp, Artificial Sequence
  Description of Artificial Sequence: Synthetic oligonucleotide
  Target: PCSK9; (-) strand; PAM type: NNGRRT; PAM sequence: GTGGAT
ggggcatggcagcaggaagc

SEQ ID NO: 5908 - DNA, 20 bp, Artificial Sequence
  Description of Artificial Sequence: Synthetic oligonucleotide
  Target: PCSK9; (-) strand; PAM type: NNGRRT; PAM sequence: CGGGAT
ttcacctgctcctgaggggc

SEQ ID NO: 5909 - DNA, 20 bp, Artificial Sequence
  Description of Artificial Sequence: Synthetic oligonucleotide
  Target: PCSK9; (-) strand; PAM type: NNGRRT; PAM sequence: TGGGGT
acattctactccaagtggag

SEQ ID NO: 5910 - DNA, 20 bp, Artificial Sequence
  Description of Artificial Sequence: Synthetic oligonucleotide
  Target: PCSK9; (-) strand; PAM type: NNGRRT; PAM sequence: TGGAGT
tatgcacattctactccaag

SEQ ID NO: 5911 - DNA, 20 bp, Artificial Sequence
  Description of Artificial Sequence: Synthetic oligonucleotide
  Target: PCSK9; (-) strand; PAM type: NNGRRT; PAM sequence: AGGAAT
ccagaggattgcttgagccc

SEQ ID NO: 5912 - DNA, 20 bp, Artificial Sequence
  Description of Artificial Sequence: Synthetic oligonucleotide
  Target: PCSK9; (-) strand; PAM type: NNGRRT; PAM sequence: GAGGAT
acttggggaggctgagacca

SEQ ID NO: 5913 - DNA, 20 bp, Artificial Sequence
  Description of Artificial Sequence: Synthetic oligonucleotide
  Target: PCSK9; (-) strand; PAM type: NNGRRT; PAM sequence: CTGAGT
gcaccccctctgggtcacgg

SEQ ID NO: 5914 - DNA, 20 bp, Artificial Sequence
  Description of Artificial Sequence: Synthetic oligonucleotide
  Target: PCSK9; (-) strand; PAM type: NNGRRT; PAM sequence: CTGGGT
atgcagctcaggcaccccct

SEQ ID NO: 5915 - DNA, 20 bp, Artificial Sequence
  Description of Artificial Sequence: Synthetic oligonucleotide
  Target: PCSK9; (-) strand; PAM type: NNGRRT; PAM sequence: GAGAGT
agctcctactggcttttaag

SEQ ID NO: 5916 - DNA, 20 bp, Artificial Sequence
  Description of Artificial Sequence: Synthetic oligonucleotide
  Target: PCSK9; (-) strand; PAM type: NNGRRT; PAM sequence: AAGAGT
aactgactctgagttcattt

SEQ ID NO: 5917 - DNA, 20 bp, Artificial Sequence
  Description of Artificial Sequence: Synthetic oligonucleotide
  Target: PCSK9; (-) strand; PAM type: NNGRRT; PAM sequence: CTGAGT
cttgcattttaaaactgact

SEQ ID NO: 5918 - DNA, 20 bp, Artificial Sequence
  Description of Artificial Sequence: Synthetic oligonucleotide
  Target: PCSK9; (-) strand; PAM type: NNGRRT; PAM sequence: CAGAAT
gaggaatgcaccatccagac

SEQ ID NO: 5919 - DNA, 20 bp, Artificial Sequence
  Description of Artificial Sequence: Synthetic oligonucleotide
  Target: PCSK9; (-) strand; PAM type: NNGRRT; PAM sequence: AGGAAT
aagactgtcttttgctctcg

SEQ ID NO: 5920 - DNA, 20 bp, Artificial Sequence
  Description of Artificial Sequence: Synthetic oligonucleotide
  Target: PCSK9; (-) strand; PAM type: NNGRRT; PAM sequence: GTGGAT
cctcagtgtacccagggcaa

SEQ ID NO: 5921 - DNA, 20 bp, Artificial Sequence
  Description of Artificial Sequence: Synthetic oligonucleotide
  Target: PCSK9; (-) strand; PAM type: NNGRRT; PAM sequence: CAGGGT
gggagggcactgcagccagt

SEQ ID NO: 5922 - DNA, 20 bp, Artificial Sequence
  Description of Artificial Sequence: Synthetic oligonucleotide
  Target: PCSK9; (-) strand; PAM type: NNGRRT; PAM sequence: TGGGAT
ccctccccagacacccatcc

SEQ ID NO: 5923 - DNA, 20 bp, Artificial Sequence
  Description of Artificial Sequence: Synthetic oligonucleotide
  Target: PCSK9; (-) strand; PAM type: NNGRRT; PAM sequence: GTGAGT
ggaggaggcacccagagtga

SEQ ID NO: 5924 - DNA, 20 bp, Artificial Sequence
  Description of Artificial Sequence: Synthetic oligonucleotide
  Target: PCSK9; (-) strand; PAM type: NNGRRT; PAM sequence: GTGAGT
ctggggaggaggcacccaga

SEQ ID NO: 5925 - DNA, 20 bp, Artificial Sequence
  Description of Artificial Sequence: Synthetic oligonucleotide
  Target: PCSK9; (-) strand; PAM type: NNGRRT; PAM sequence: CAGAGT
ccacctggggaggaggcacc

SEQ ID NO: 5926 - DNA, 20 bp, Artificial Sequence
  Description of Artificial Sequence: Synthetic oligonucleotide
  Target: PCSK9; (-) strand; PAM type: NNGRRT; PAM sequence: TTGAAT
ccgagcacagctcgacctgt

SEQ ID NO: 5927 - DNA, 20 bp, Artificial Sequence
  Description of Artificial Sequence: Synthetic oligonucleotide
  Target: PCSK9; (-) strand; PAM type: NNGRRT; PAM sequence: TTGAAT
ccttggtggagacctgagga

SEQ ID NO: 5928 - DNA, 20 bp, Artificial Sequence
  Description of Artificial Sequence: Synthetic oligonucleotide
  Target: PCSK9; (-) strand; PAM type: NNGRRT; PAM sequence: GAGGAT
tgcctccttggtggagacct

SEQ ID NO: 5929 - DNA, 20 bp, Artificial Sequence
  Description of Artificial Sequence: Synthetic oligonucleotide
  Target: PCSK9; (-) strand; PAM type: NNGRRT; PAM sequence: AAGAAT
ccccctcccctatccatggg

SEQ ID NO: 5930 - DNA, 20 bp, Artificial Sequence
  Description of Artificial Sequence: Synthetic oligonucleotide
  Target: PCSK9; (-) strand; PAM type: NNGRRT; PAM sequence: CAGAGT
tagcacagcctggcatagag

SEQ ID NO: 5931 - DNA, 20 bp, Artificial Sequence
  Description of Artificial Sequence: Synthetic oligonucleotide
  Target: PCSK9; (-) strand; PAM type: NNGRRT; PAM sequence: TTGGGT
tggctccccgcaggccacct

SEQ ID NO: 5932 - DNA, 20 bp, Artificial Sequence
  Description of Artificial Sequence: Synthetic oligonucleotide
  Target: PCSK9; (-) strand; PAM type: NNGRRT; PAM sequence: CCGAGT
gcatgcaccactgcacactg

SEQ ID NO: 5933 - DNA, 20 bp, Artificial Sequence
  Description of Artificial Sequence: Synthetic oligonucleotide
  Target: PCSK9; (-) strand; PAM type: NNGRRT; PAM sequence: GCGGGT
gtaccctgccgggtagtgga

SEQ ID NO: 5934 - DNA, 20 bp, Artificial Sequence
  Description of Artificial Sequence: Synthetic oligonucleotide
  Target: PCSK9; (-) strand; PAM type: NNGRRT; PAM sequence: CCGGGT
gggtgcgaatgtgtaccctg

SEQ ID NO: 5935 - DNA, 20 bp, Artificial Sequence
  Description of Artificial Sequence: Synthetic oligonucleotide
  Target: PCSK9; (-) strand; PAM type: NNGRRT; PAM sequence: GCGAAT
ttcctctgtgaagtaggggt

SEQ ID NO: 5936 - DNA, 20 bp, Artificial Sequence
  Description of Artificial Sequence: Synthetic oligonucleotide
  Target: PCSK9; (-) strand; PAM type: NNGRRT; PAM sequence: AGGGGT
ggtttcttcctctgtgaagt

SEQ ID NO: 5937 - DNA, 20 bp, Artificial Sequence
  Description of Artificial Sequence: Synthetic oligonucleotide
  Target: PCSK9; (-) strand; PAM type: NNGRRT; PAM sequence: CCGGGT
cgtaaaaatgaggagcccag

SEQ ID NO: 5938 - DNA, 20 bp, Artificial Sequence
  Description of Artificial Sequence: Synthetic oligonucleotide
  Target: PCSK9; (-) strand; PAM type: NNGRRT; PAM sequence: CTGGGT
gccaggccagtgaatcaggc

SEQ ID NO: 5939 - DNA, 20 bp, Artificial Sequence
  Description of Artificial Sequence: Synthetic oligonucleotide
  Target: PCSK9; (-) strand; PAM type: NNGRRT; PAM sequence: GTGAAT
gaagcatctccgccaggcca

SEQ ID NO: 5940 - DNA, 20 bp, Artificial Sequence
  Description of Artificial Sequence: Synthetic oligonucleotide
  Target: PCSK9; (-) strand; PAM type: NNGRRT; PAM sequence: TTGGGT
aaagataaatgtctgcttgc

SEQ ID NO: 5941 - DNA, 20 bp, Artificial Sequence
  Description of Artificial Sequence: Synthetic oligonucleotide
  Target: PCSK9; (-) strand; PAM type: NNGRRT; PAM sequence: CAGAAT
aataaaaatgctacaaaacc

SEQ ID NO: 5942 - DNA, 20 bp, Artificial Sequence
  Description of Artificial Sequence: Synthetic oligonucleotide
  Target: PCSK9; (-) strand; PAM type: NNGRRT; PAM sequence: AAGAGT
ctaggcagtcaagtctatgc

SEQ ID NO: 5943 - DNA, 20 bp, Artificial Sequence
  Description of Artificial Sequence: Synthetic oligonucleotide
  Target: PCSK9; (-) strand; PAM type: NNGRRT; PAM sequence: AGGAGT
tcattcctaggataggcaca

SEQ ID NO: 5944 - DNA, 20 bp, Artificial Sequence
  Description of Artificial Sequence: Synthetic oligonucleotide
  Target: PCSK9; (-) strand; PAM type: NNGRRT; PAM sequence: TAGGAT
gaagacattcatttcattcc

SEQ ID NO: 5945 - DNA, 20 bp, Artificial Sequence
  Description of Artificial Sequence: Synthetic oligonucleotide
  Target: PCSK9; (-) strand; PAM type: NNGRRT; PAM sequence: CAGGGT
ggaggaggcactttgactgt

SEQ ID NO: 5946 - DNA, 20 bp, Artificial Sequence
  Description of Artificial Sequence: Synthetic oligonucleotide
  Target: PCSK9; (-) strand; PAM type: NNGRRT; PAM sequence: TAGAGT
ggtcaggacaacagagcatc

SEQ ID NO: 5947 - DNA, 20 bp, Artificial Sequence
  Description of Artificial Sequence: Synthetic oligonucleotide
  Target: PCSK9; (-) strand; PAM type: NNGRRT; PAM sequence: AAGAAT
gtgccaggtactggggagaa

SEQ ID NO: 5948 - DNA, 20 bp, Artificial Sequence
  Description of Artificial Sequence: Synthetic oligonucleotide
  Target: PCSK9; (-) strand; PAM type: NNGRRT; PAM sequence: CTGAAT
gcacccaatctgagactgtt

SEQ ID NO: 5949 - DNA, 20 bp, Artificial Sequence
  Description of Artificial Sequence: Synthetic oligonucleotide
  Target: PCSK9; (-) strand; PAM type: NNGRRT; PAM sequence: TTGAAT
tctcactgttgcccagggtc

SEQ ID NO: 5950 - DNA, 20 bp, Artificial Sequence
  Description of Artificial Sequence: Synthetic oligonucleotide
  Target: PCSK9; (-) strand; PAM type: NNGRRT; PAM sequence: CAGGGT
gacggggtctcactgttgcc

SEQ ID NO: 5951 - DNA, 20 bp, Artificial Sequence
  Description of Artificial Sequence: Synthetic oligonucleotide
  Target: PCSK9; (-) strand; PAM type: NNGRRT; PAM sequence: CGGGGT
tttaaatttttttatagaga

SEQ ID NO: 5952 - DNA, 20 bp, Artificial Sequence
  Description of Artificial Sequence: Synthetic oligonucleotide
  Target: PCSK9; (-) strand; PAM type: NNGRRT; PAM sequence: CTGAGT
aagcctcccatatcagcctc

SEQ ID NO: 5953 - DNA, 20 bp, Artificial Sequence
  Description of Artificial Sequence: Synthetic oligonucleotide
  Target: PCSK9; (-) strand; PAM type: NNGRRT; PAM sequence: TGGGAT
cctggaggtcccacattgaa

SEQ ID NO: 5954 - DNA, 20 bp, Artificial Sequence
  Description of Artificial Sequence: Synthetic oligonucleotide
  Target: PCSK9; (-) strand; PAM type: NNGRRT; PAM sequence: TTGAAT
gagggcctggaggtcccaca

SEQ ID NO: 5955 - DNA, 20 bp, Artificial Sequence
  Description of Artificial Sequence: Synthetic oligonucleotide
  Target: PCSK9; (-) strand; PAM type: NNGRRT; PAM sequence: TAGAGT
acagctatattcaccagcct

SEQ ID NO: 5956 - DNA, 20 bp, Artificial Sequence
  Description of Artificial Sequence: Synthetic oligonucleotide
  Target: PCSK9; (-) strand; PAM type: NNGRRT; PAM sequence: AGGAAT
gtcagaaaatgtaatctggg

SEQ ID NO: 5957 - DNA, 20 bp, Artificial Sequence
  Description of Artificial Sequence: Synthetic oligonucleotide
  Target: PCSK9; (-) strand; PAM type: NNGRRT; PAM sequence: CTGAAT
aatgctttccatatatgaca

SEQ ID NO: 5958 - DNA, 20 bp, Artificial Sequence
  Description of Artificial Sequence: Synthetic oligonucleotide
  Target: PCSK9; (-) strand; PAM type: NNGRRT; PAM sequence: TTGAAT
ccattgccatctgtcaactc

SEQ ID NO: 5959 - DNA, 20 bp, Artificial Sequence
  Description of Artificial Sequence: Synthetic oligonucleotide
  Target: PCSK9; (-) strand; PAM type: NNGRRT; PAM sequence: TTGGGT
aacgggcagagataacacag

SEQ ID NO: 5960 - DNA, 20 bp, Artificial Sequence
  Description of Artificial Sequence: Synthetic oligonucleotide
  Target: PCSK9; (-) strand; PAM type: NNGRRT; PAM sequence: TAGGGT
gaggggaaggagagagagtc

SEQ ID NO: 5961 - DNA, 20 bp, Artificial Sequence
  Description of Artificial Sequence: Synthetic oligonucleotide
  Target: PCSK9; (-) strand; PAM type: NNGRRT; PAM sequence: GAGAGT
ttctgtggaggggaaggaga

SEQ ID NO: 5962 - DNA, 20 bp, Artificial Sequence
  Description of Artificial Sequence: Synthetic oligonucleotide
  Target: PCSK9; (-) strand; PAM type: NNGRRT; PAM sequence: GTGGAT
catcacagagctgtcagggt

SEQ ID NO: 5963 - DNA, 20 bp, Artificial Sequence
  Description of Artificial Sequence: Synthetic oligonucleotide
  Target: PCSK9; (-) strand; PAM type: NNGRRT; PAM sequence: CAGGGT
ttccaacatcacagagctgt

SEQ ID NO: 5964 - DNA, 20 bp, Artificial Sequence
  Description of Artificial Sequence: Synthetic oligonucleotide
  Target: PCSK9; (-) strand; PAM type: NNGRRT; PAM sequence: ATGGGT
tagtggccagcgttgctcac

SEQ ID NO: 5965 - DNA, 20 bp, Artificial Sequence
  Description of Artificial Sequence: Synthetic oligonucleotide
  Target: PCSK9; (-) strand; PAM type: NNGRRT; PAM sequence: GAGGAT
ttcatctgcaaagcttagag

SEQ ID NO: 5966 - DNA, 20 bp, Artificial Sequence
  Description of Artificial Sequence: Synthetic oligonucleotide
  Target: PCSK9; (-) strand; PAM type: NNGRRT; PAM sequence: CAGGAT
tctggaggggctgaccattt

SEQ ID NO: 5967 - DNA, 20 bp, Artificial Sequence
  Description of Artificial Sequence: Synthetic oligonucleotide
  Target: PCSK9; (-) strand; PAM type: NNGRRT; PAM sequence: GTGGGT
ttacactaataaaggggact

SEQ ID NO: 5968 - DNA, 20 bp, Artificial Sequence
  Description of Artificial Sequence: Synthetic oligonucleotide
  Target: PCSK9; (-) strand; PAM type: NNGRRT; PAM sequence: TGGAGT
aaatttttcaaaaacagagt

SEQ ID NO: 5969 - DNA, 20 bp, Artificial Sequence
  Description of Artificial Sequence: Synthetic oligonucleotide
  Target: PCSK9; (-) strand; PAM type: NNGRRT; PAM sequence: CAGAGT
taaaataaatttttcaaaaa

SEQ ID NO: 5970 - DNA, 20 bp, Artificial Sequence
  Description of Artificial Sequence: Synthetic oligonucleotide
  Target: PCSK9; (-) strand; PAM type: NNGRRT; PAM sequence: AAGAGT
tggcaaagttcttagcttct

SEQ ID NO: 5971 - DNA, 20 bp, Artificial Sequence
  Description of Artificial Sequence: Synthetic oligonucleotide
  Target: PCSK9; (-) strand; PAM type: NNGRRT; PAM sequence: TGGAAT
tgagcttggaacaagcagac

SEQ ID NO: 5972 - DNA, 20 bp, Artificial Sequence
  Description of Artificial Sequence: Synthetic oligonucleotide
  Target: PCSK9; (-) strand; PAM type: NNGRRT; PAM sequence: TAGAGT
ctacagtcagttttaggaac

SEQ ID NO: 5973 - DNA, 20 bp, Artificial Sequence
  Description of Artificial Sequence: Synthetic oligonucleotide
  Target: PCSK9; (-) strand; PAM type: NNGRRT; PAM sequence: TGGAGT
catctcaccacgacttctcc

SEQ ID NO: 5974 - DNA, 20 bp, Artificial Sequence
  Description of Artificial Sequence: Synthetic oligonucleotide
  Target: PCSK9; (-) strand; PAM type: NNGRRT; PAM sequence: AGGAAT
aaatggtctgcaaacagagc

SEQ ID NO: 5975 - DNA, 20 bp, Artificial Sequence
  Description of Artificial Sequence: Synthetic oligonucleotide
  Target: PCSK9; (-) strand; PAM type: NNGRRT; PAM sequence: TTGGAT
tcatttttactgccaatttt

SEQ ID NO: 5976 - DNA, 20 bp, Artificial Sequence
  Description of Artificial Sequence: Synthetic oligonucleotide
  Target: PCSK9; (-) strand; PAM type: NNGRRT; PAM sequence: AAGAGT
ttatgacaggcttaccttgg

SEQ ID NO: 5977 - DNA, 20 bp, Artificial Sequence
  Description of Artificial Sequence: Synthetic oligonucleotide
  Target: PCSK9; (-) strand; PAM type: NNGRRT; PAM sequence: CAGGAT
tcctcactgtaaagcttcat

SEQ ID NO: 5978 - DNA, 20 bp, Artificial Sequence
  Description of Artificial Sequence: Synthetic oligonucleotide
  Target: PCSK9; (-) strand; PAM type: NNGRRT; PAM sequence: AGGAGT
actctcaggagcccaaaatc

SEQ ID NO: 5979 - DNA, 20 bp, Artificial Sequence
  Description of Artificial Sequence: Synthetic oligonucleotide
  Target: PCSK9; (-) strand; PAM type: NNGRRT; PAM sequence: TGGGAT
atgctggcgatgatccacac

SEQ ID NO: 5980 - DNA, 20 bp, Artificial Sequence
  Description of Artificial Sequence: Synthetic oligonucleotide
  Target: PCSK9; (-) strand; PAM type: NNGRRT; PAM sequence: GTGAAT
ctaccattggttttgagtac

SEQ ID NO: 5981 - DNA, 20 bp, Artificial Sequence
  Description of Artificial Sequence: Synthetic oligonucleotide
  Target: PCSK9; (-) strand; PAM type: NNGRRT; PAM sequence: TTGAGT
gtgatgttctaccattggtt

SEQ ID NO: 5982 - DNA, 20 bp, Artificial Sequence
  Description of Artificial Sequence: Synthetic oligonucleotide
  Target: PCSK9; (-) strand; PAM type: NNGRRT; PAM sequence: GCGAGT
ccttagagaaacggacagag

SEQ ID NO: 5983 - DNA, 20 bp, Artificial Sequence
  Description of Artificial Sequence: Synthetic oligonucleotide
  Target: PCSK9; (-) strand; PAM type: NNGRRT; PAM sequence: GAGGGT
tcttttcattctctggcagt

SEQ ID NO: 5984 - DNA, 20 bp, Artificial Sequence
  Description of Artificial Sequence: Synthetic oligonucleotide
  Target: PCSK9; (-) strand; PAM type: NNGRRT; PAM sequence: TTGAAT
tattttgtacattttgtatt

SEQ ID NO: 5985 - DNA, 20 bp, Artificial Sequence
  Description of Artificial Sequence: Synthetic oligonucleotide
  Target: PCSK9; (-) strand; PAM type: NNGRRT; PAM sequence: TTGAAT
cagaaataaatataaagcaa

SEQ ID NO: 5986 - DNA, 20 bp, Artificial Sequence
  Description of Artificial Sequence: Synthetic oligonucleotide
  Target: PCSK9; (-) strand; PAM type: NNGRRT; PAM sequence: GAGAAT
gtaatgcagagaaggaattt

SEQ ID NO: 5987 - DNA, 20 bp, Artificial Sequence
  Description of Artificial Sequence: Synthetic oligonucleotide
  Target: PCSK9; (-) strand; PAM type: NNGRRT; PAM sequence: AGGAAT
tagttattgtaatgcagaga

SEQ ID NO: 5988 - DNA, 20 bp, Artificial Sequence
  Description of Artificial Sequence: Synthetic oligonucleotide
  Target: PCSK9; (-) strand; PAM type: NNGRRT; PAM sequence: GTGAGT
tgagttggtacacactgctt

SEQ ID NO: 5989 - DNA, 20 bp, Artificial Sequence
  Description of Artificial Sequence: Synthetic oligonucleotide
  Target: PCSK9; (-) strand; PAM type: NNGRRT; PAM sequence: TTGAGT
ttgtatatgaagttaactat

SEQ ID NO: 5990 - DNA, 20 bp, Artificial Sequence
  Description of Artificial Sequence: Synthetic oligonucleotide
  Target: PCSK9; (-) strand; PAM type: NNGRRT; PAM sequence: TTGAAT
ttttaatgcttggagacata

SEQ ID NO: 5991 - DNA, 20 bp, Artificial Sequence
  Description of Artificial Sequence: Synthetic oligonucleotide
  Target: PCSK9; (-) strand; PAM type: NNGRRT; PAM sequence: CAGAAT
ttttactgagtttaacttca

SEQ ID NO: 5992 - DNA, 20 bp, Artificial Sequence
  Description of Artificial Sequence: Synthetic oligonucleotide
  Target: PCSK9; (-) strand; PAM type: NNGRRT; PAM sequence: CTGAGT
cactttaagatataatttta

SEQ ID NO: 5993 - DNA, 20 bp, Artificial Sequence
  Description of Artificial Sequence: Synthetic oligonucleotide
  Target: PCSK9; (-) strand; PAM type: NNGRRT; PAM sequence: ATGAGT
atcaattacttaaagaagtt

SEQ ID NO: 5994 - DNA, 20 bp, Artificial Sequence
  Description of Artificial Sequence: Synthetic oligonucleotide
  Target: PCSK9; (-) strand; PAM type: NNGRRT; PAM sequence: CAGGGT
tgctgtgttctccagaagta

SEQ ID NO: 5995 - DNA, 20 bp, Artificial Sequence
  Description of Artificial Sequence: Synthetic oligonucleotide
  Target: PCSK9; (-) strand; PAM type: NNGRRT; PAM sequence: CAGGAT
tgatgaaaggttaccaggat

SEQ ID NO: 5996 - DNA, 20 bp, Artificial Sequence
  Description of Artificial Sequence: Synthetic oligonucleotide
  Target: PCSK9; (-) strand; PAM type: NNGRRT; PAM sequence: CAGGAT
ggatcttgatgaaaggttac

SEQ ID NO: 5997 - DNA, 20 bp, Artificial Sequence
  Description of Artificial Sequence: Synthetic oligonucleotide
  Target: PCSK9; (-) strand; PAM type: NNGRRT; PAM sequence: TTGGAT
tgagaaccctatgcataagc

SEQ ID NO: 5998 - DNA, 20 bp, Artificial Sequence
  Description of Artificial Sequence: Synthetic oligonucleotide
  Target: PCSK9; (-) strand; PAM type: NNGRRT; PAM sequence: ATGGGT
ctatttgtatagaatttcag

SEQ ID NO: 5999 - DNA, 20 bp, Artificial Sequence
  Description of Artificial Sequence: Synthetic oligonucleotide
  Target: PCSK9; (-) strand; PAM type: NNGRRT; PAM sequence: TAGAAT
aatatgtctccctatttgta

SEQ ID NO: 6000 - DNA, 20 bp, Artificial Sequence
  Description of Artificial Sequence: Synthetic oligonucleotide
  Target: PCSK9; (-) strand; PAM type: NNGRRT; PAM sequence: AGGAAT
atcttgcagtaatattaaac

SEQ ID NO: 6001 - DNA, 20 bp, Artificial Sequence
  Description of Artificial Sequence: Synthetic oligonucleotide
  Target: PCSK9; (-) strand; PAM type: NNGRRT; PAM sequence: AAGAGT
tttttgttacacgaacatac

SEQ ID NO: 6002 - DNA, 20 bp, Artificial Sequence
  Description of Artificial Sequence: Synthetic oligonucleotide
  Target: PCSK9; (-) strand; PAM type: NNGRRT; PAM sequence: GTGGAT
cccgggagcgtggtctatat

SEQ ID NO: 6003 - DNA, 20 bp, Artificial Sequence
  Description of Artificial Sequence: Synthetic oligonucleotide
  Target: PCSK9; (-) strand; PAM type: NNGRRT; PAM sequence: GTGGAT
cagtgggagaactccggcat

SEQ ID NO: 6004 - DNA, 20 bp, Artificial Sequence
  Description of Artificial Sequence: Synthetic oligonucleotide
  Target: PCSK9; (-) strand; PAM type: NNGRRT; PAM sequence: GCGGAT
ggaaagctgctgtgacttgg

SEQ ID NO: 6005 - DNA, 20 bp, Artificial Sequence
  Description of Artificial Sequence: Synthetic oligonucleotide
  Target: PCSK9; (-) strand; PAM type: NNGRRT; PAM sequence: CAGAAT
gctcagcaccttcttggaat

SEQ ID NO: 6006 - DNA, 20 bp, Artificial Sequence
  Description of Artificial Sequence: Synthetic oligonucleotide
  Target: PCSK9; (-) strand; PAM type: NNGRRT; PAM sequence: TGGAAT
ctggatgctcagcaccttct

SEQ ID NO: 6007 - DNA, 20 bp, Artificial Sequence
  Description of Artificial Sequence: Synthetic oligonucleotide
  Target: PCSK9; (-) strand; PAM type: NNGRRT; PAM sequence: CTGGAT
agaggagtcaagacacaata

SEQ ID NO: 6008 - DNA, 20 bp, Artificial Sequence
  Description of Artificial Sequence: Synthetic oligonucleotide
  Target: PCSK9; (-) strand; PAM type: NNGRRT; PAM sequence: AGGAGT
aggaacatgcccagcctgag

SEQ ID NO: 6009 - DNA, 20 bp, Artificial Sequence
  Description of Artificial Sequence: Synthetic oligonucleotide
  Target: PCSK9; (-) strand; PAM type: NNGRRT; PAM sequence: GTGAGT
agaatctcccatgatgattg

SEQ ID NO: 6010 - DNA, 20 bp, Artificial Sequence
  Description of Artificial Sequence: Synthetic oligonucleotide
  Target: PCSK9; (-) strand; PAM type: NNGRRT; PAM sequence: CAGAAT
cttttcttttctgcagggtt

SEQ ID NO: 6011 - DNA, 20 bp, Artificial Sequence
  Description of Artificial Sequence: Synthetic oligonucleotide
  Target: PCSK9; (-) strand; PAM type: NNGRRT; PAM sequence: CAGGGT
taacttccttttcttttctg

SEQ ID NO: 6012 - DNA, 20 bp, Artificial Sequence
  Description of Artificial Sequence: Synthetic oligonucleotide
  Target: PCSK9; (-) strand; PAM type: NNGRRT; PAM sequence: ATGAAT
tgtacatgttttacataatc

SEQ ID NO: 6013 - DNA, 20 bp, Artificial Sequence
  Description of Artificial Sequence: Synthetic oligonucleotide
  Target: PCSK9; (-) strand; PAM type: NNGRRT; PAM sequence: CTGGGT
ttgtgactttagacaagtcg

SEQ ID NO: 6014 - DNA, 20 bp, Artificial Sequence
  Description of Artificial Sequence: Synthetic oligonucleotide
  Target: PCSK9; (-) strand; PAM type: NNGRRT; PAM sequence: CAGAGT
tctgcgttctcacatgggtg

SEQ ID NO: 6015 - DNA, 20 bp, Artificial Sequence
  Description of Artificial Sequence: Synthetic oligonucleotide
  Target: PCSK9; (-) strand; PAM type: NNGRRT; PAM sequence: ATGGGT
tcactgctctgcgttctcac

SEQ ID NO: 6016 - DNA, 20 bp, Artificial Sequence
  Description of Artificial Sequence: Synthetic oligonucleotide
  Target: PCSK9; (-) strand; PAM type: NNGRRT; PAM sequence: AGGAGT
cagaggtagccttcagaccc

SEQ ID NO: 6017 - DNA, 20 bp, Artificial Sequence
  Description of Artificial Sequence: Synthetic oligonucleotide
  Target: PCSK9; (-) strand; PAM type: NNGRRT; PAM sequence: GTGAGT
gatcagccccatggcacacg

SEQ ID NO: 6018 - DNA, 20 bp, Artificial Sequence
  Description of Artificial Sequence: Synthetic oligonucleotide
  Target: PCSK9; (-) strand; PAM type: NNGRRT; PAM sequence: CTGAAT
gactgtgcctggcccatttt

SEQ ID NO: 6019 - DNA, 20 bp, Artificial Sequence
  Description of Artificial Sequence: Synthetic oligonucleotide
  Target: PCSK9; (-) strand; PAM type: NNGRRT; PAM sequence: TGGGAT
gcctcagcctcccaagtagc

SEQ ID NO: 6020 - DNA, 20 bp, Artificial Sequence
  Description of Artificial Sequence: Synthetic oligonucleotide
  Target: PCSK9; (+) strand; PAM type: NNGRRT; PAM sequence: TGGGAT
atgtaaccactttattgaaa

SEQ ID NO: 6021 - DNA, 20 bp, Artificial Sequence
  Description of Artificial Sequence: Synthetic oligonucleotide
  Target: PCSK9; (+) strand; PAM type: NNGRRT; PAM sequence: ATGAAT
taaaatctgtccctccattg

SEQ ID NO: 6022 - DNA, 20 bp, Artificial Sequence
  Description of Artificial Sequence: Synthetic oligonucleotide
  Target: PCSK9; (+) strand; PAM type: NNGRRT; PAM sequence: TTGGAT
gtccctccattgatgaatgt

SEQ ID NO: 6023 - DNA, 20 bp, Artificial Sequence
  Description of Artificial Sequence: Synthetic oligonucleotide
  Target: PCSK9; (+) strand; PAM type: NNGRRT; PAM sequence: GAGAGT
acaccctggcagatcaaagt

SEQ ID NO: 6024 - DNA, 20 bp, Artificial Sequence
  Description of Artificial Sequence: Synthetic oligonucleotide
  Target: PCSK9; (+) strand; PAM type: NNGRRT; PAM sequence: GTGAAT
ggtggagcggggagagctaa

SEQ ID NO: 6025 - DNA, 20 bp, Artificial Sequence
  Description of Artificial Sequence: Synthetic oligonucleotide
  Target: PCSK9; (+) strand; PAM type: NNGRRT; PAM sequence: CTGAGT
tataccctgttcagtcttta

SEQ ID NO: 6026 - DNA, 20 bp, Artificial Sequence
  Description of Artificial Sequence: Synthetic oligonucleotide
  Target: PCSK9; (+) strand; PAM type: NNGRRT; PAM sequence: TTGAAT
ggccagctccagcctcatcc

SEQ ID NO: 6027 - DNA, 20 bp, Artificial Sequence
  Description of Artificial Sequence: Synthetic oligonucleotide
  Target: PCSK9; (+) strand; PAM type: NNGRRT; PAM sequence: GTGGGT
tccagcctcatccttgaatg

SEQ ID NO: 6028 - DNA, 20 bp, Artificial Sequence
  Description of Artificial Sequence: Synthetic oligonucleotide
  Target: PCSK9; (+) strand; PAM type: NNGRRT; PAM sequence: TGGGGT
gaatggtgggtgtacatcgc

SEQ ID NO: 6029 - DNA, 20 bp, Artificial Sequence
  Description of Artificial Sequence: Synthetic oligonucleotide
  Target: PCSK9; (+) strand; PAM type: NNGRRT; PAM sequence: TAGGAT
cacttgcctaattatttcct

SEQ ID NO: 6030 - DNA, 20 bp, Artificial Sequence
  Description of Artificial Sequence: Synthetic oligonucleotide
  Target: PCSK9; (+) strand; PAM type: NNGRRT; PAM sequence: CAGAAT
attaaaggtacaaaaacagc

SEQ ID NO: 6031 - DNA, 20 bp, Artificial Sequence
  Description of Artificial Sequence: Synthetic oligonucleotide
  Target: PCSK9; (+) strand; PAM type: NNGRRT; PAM sequence: TAGAGT
aaaacagccagaattagatg

SEQ ID NO: 6032 - DNA, 20 bp, Artificial Sequence
  Description of Artificial Sequence: Synthetic oligonucleotide
  Target: PCSK9; (+) strand; PAM type: NNGRRT; PAM sequence: GGGAGT
aattagatgtagagtcgcaa

SEQ ID NO: 6033 - DNA, 20 bp, Artificial Sequence
  Description of Artificial Sequence: Synthetic oligonucleotide
  Target: PCSK9; (+) strand; PAM type: NNGRRT; PAM sequence: ATGAGT
tttctaatcagggagaaaaa

SEQ ID NO: 6034 - DNA, 20 bp, Artificial Sequence
  Description of Artificial Sequence: Synthetic oligonucleotide
  Target: PCSK9; (+) strand; PAM type: NNGRRT; PAM sequence: CGGAAT
cagggagaaaaaatgagtta

SEQ ID NO: 6035 - DNA, 20 bp, Artificial Sequence
  Description of Artificial Sequence: Synthetic oligonucleotide
  Target: PCSK9; (+) strand; PAM type: NNGRRT; PAM sequence: CTGGGT
tttggcaactctgtgttggc

SEQ ID NO: 6036 - DNA, 20 bp, Artificial Sequence
  Description of Artificial Sequence: Synthetic oligonucleotide
  Target: PCSK9; (+) strand; PAM type: NNGRRT; PAM sequence: GTGGGT
gaaatgtgaacggaagtgtt

SEQ ID NO: 6037 - DNA, 20 bp, Artificial Sequence
  Description of Artificial Sequence: Synthetic oligonucleotide
  Target: PCSK9; (+) strand; PAM type: NNGRRT; PAM sequence: TGGAGT
acttttgtgtggaagctgca

SEQ ID NO: 6038 - DNA, 20 bp, Artificial Sequence
  Description of Artificial Sequence: Synthetic oligonucleotide
  Target: PCSK9; (+) strand; PAM type: NNGRRT; PAM sequence: CTGAAT
cctcagtgttcagcaatgtt

SEQ ID NO: 6039 - DNA, 20 bp, Artificial Sequence
  Description of Artificial Sequence: Synthetic oligonucleotide
  Target: PCSK9; (+) strand; PAM type: NNGRRT; PAM sequence: TGGGGT
ttgctttatcagtctggttc

SEQ ID NO: 6040 - DNA, 20 bp, Artificial Sequence
  Description of Artificial Sequence: Synthetic oligonucleotide
  Target: PCSK9; (+) strand; PAM type: NNGRRT; PAM sequence: GAGGGT
tatcagtctggttctggggt

SEQ ID NO: 6041 - DNA, 20 bp, Artificial Sequence
  Description of Artificial Sequence: Synthetic oligonucleotide
  Target: PCSK9; (+) strand; PAM type: NNGRRT; PAM sequence: ATGGAT
gcagaacctagcctattctg

SEQ ID NO: 6042 - DNA, 20 bp, Artificial Sequence
  Description of Artificial Sequence: Synthetic oligonucleotide
  Target: PCSK9; (+) strand; PAM type: NNGRRT; PAM sequence: AGGAAT
tatctcgaaattccacttcc

SEQ ID NO: 6043 - DNA, 20 bp, Artificial Sequence
  Description of Artificial Sequence: Synthetic oligonucleotide
  Target: PCSK9; (+) strand; PAM type: NNGRRT; PAM sequence: ATGGAT
tctcacatgtgcaaacagct

SEQ ID NO: 6044 - DNA, 20 bp, Artificial Sequence
  Description of Artificial Sequence: Synthetic oligonucleotide
  Target: PCSK9; (+) strand; PAM type: NNGRRT; PAM sequence: TTGGAT
ataaggacagacatggcaac

SEQ ID NO: 6045 - DNA, 20 bp, Artificial Sequence
  Description of Artificial Sequence: Synthetic oligonucleotide
  Target: PCSK9; (+) strand; PAM type: NNGRRT; PAM sequence: TAGAAT
aagacattgtgaaacataca

SEQ ID NO: 6046 - DNA, 20 bp, Artificial Sequence
  Description of Artificial Sequence: Synthetic oligonucleotide
  Target: PCSK9; (+) strand; PAM type: NNGRRT; PAM sequence: GTGGGT
tatttttacaattttaaaaa

SEQ ID NO: 6047 - DNA, 20 bp, Artificial Sequence
  Description of Artificial Sequence: Synthetic oligonucleotide
  Target: PCSK9; (+) strand; PAM type: NNGRRT; PAM sequence: TGGAAT
agttatggaagccagaagta

SEQ ID NO: 6048 - DNA, 20 bp, Artificial Sequence
  Description of Artificial Sequence: Synthetic oligonucleotide
  Target: PCSK9; (+) strand; PAM type: NNGRRT; PAM sequence: AAGGGT
gaagccagaagtatggaatg

SEQ ID NO: 6049 - DNA, 20 bp, Artificial Sequence
  Description of Artificial Sequence: Synthetic oligonucleotide
  Target: PCSK9; (+) strand; PAM type: NNGRRT; PAM sequence: CAGGGT
aagtatggaatgaagggttg

SEQ ID NO: 6050 - DNA, 20 bp, Artificial Sequence
  Description of Artificial Sequence: Synthetic oligonucleotide
  Target: PCSK9; (+) strand; PAM type: NNGRRT; PAM sequence: TTGGAT
ttctcttctgatatcagtca

SEQ ID NO: 6051 - DNA, 20 bp, Artificial Sequence
  Description of Artificial Sequence: Synthetic oligonucleotide
  Target: PCSK9; (+) strand; PAM type: NNGRRT; PAM sequence: CAGGAT
tttagggaccatcctaaacc

SEQ ID NO: 6052 - DNA, 20 bp, Artificial Sequence
  Description of Artificial Sequence: Synthetic oligonucleotide
  Target: PCSK9; (+) strand; PAM type: NNGRRT; PAM sequence: AGGGGT
aggtcacattcaaaagtacc

SEQ ID NO: 6053 - DNA, 20 bp, Artificial Sequence
  Description of Artificial Sequence: Synthetic oligonucleotide
  Target: PCSK9; (+) strand; PAM type: NNGRRT; PAM sequence: GTGGGT
acacgattcaacccactacc

SEQ ID NO: 6054 - DNA, 20 bp, Artificial Sequence
  Description of Artificial Sequence: Synthetic oligonucleotide
  Target: PCSK9; (+) strand; PAM type: NNGRRT; PAM sequence: AGGAGT
ccctcagaaggtggtggttc

SEQ ID NO: 6055 - DNA, 20 bp, Artificial Sequence
  Description of Artificial Sequence: Synthetic oligonucleotide
  Target: PCSK9; (+) strand; PAM type: NNGRRT; PAM sequence: AAGAGT
atgccccctcccttgcaaaa

SEQ ID NO: 6056 - DNA, 20 bp, Artificial Sequence
  Description of Artificial Sequence: Synthetic oligonucleotide
  Target: PCSK9; (+) strand; PAM type: NNGRRT; PAM sequence: GTGAGT
ggtagccagggagcataaaa

SEQ ID NO: 6057 - DNA, 20 bp, Artificial Sequence
  Description of Artificial Sequence: Synthetic oligonucleotide
  Target: PCSK9; (+) strand; PAM type: NNGRRT; PAM sequence: GAGGAT
ttttagagggaggaagcctt

SEQ ID NO: 6058 - DNA, 20 bp, Artificial Sequence
  Description of Artificial Sequence: Synthetic oligonucleotide
  Target: PCSK9; (+) strand; PAM type: NNGRRT; PAM sequence: TGGGGT
ggaagccttgaggatgcttg

SEQ ID NO: 6059 - DNA, 20 bp, Artificial Sequence
  Description of Artificial Sequence: Synthetic oligonucleotide
  Target: PCSK9; (+) strand; PAM type: NNGRRT; PAM sequence: AAGAAT
atgcttgtggggtgaaggga

SEQ ID NO: 6060 - DNA, 20 bp, Artificial Sequence
  Description of Artificial Sequence: Synthetic oligonucleotide
  Target: PCSK9; (+) strand; PAM type: NNGRRT; PAM sequence: AGGGAT
taactcaggaagaggcattt

SEQ ID NO: 6061 - DNA, 20 bp, Artificial Sequence
  Description of Artificial Sequence: Synthetic oligonucleotide
  Target: PCSK9; (+) strand; PAM type: NNGRRT; PAM sequence: GGGAGT
cggaggccagattggggcag

SEQ ID NO: 6062 - DNA, 20 bp, Artificial Sequence
  Description of Artificial Sequence: Synthetic oligonucleotide
  Target: PCSK9; (+) strand; PAM type: NNGRRT; PAM sequence: CTGAGT
ttggggcaggggagtgtcag

SEQ ID NO: 6063 - DNA, 20 bp, Artificial Sequence
  Description of Artificial Sequence: Synthetic oligonucleotide
  Target: PCSK9; (+) strand; PAM type: NNGRRT; PAM sequence: GAGGAT
ggagtgtcagctgagtataa

SEQ ID NO: 6064 - DNA, 20 bp, Artificial Sequence
  Description of Artificial Sequence: Synthetic oligonucleotide
  Target: PCSK9; (+) strand; PAM type: NNGRRT; PAM sequence: AAGGAT
ggaggaaggcaggaggggaa

SEQ ID NO: 6065 - DNA, 20 bp, Artificial Sequence
  Description of Artificial Sequence: Synthetic oligonucleotide
  Target: PCSK9; (+) strand; PAM type: NNGRRT; PAM sequence: ATGGGT
gaaggcaggaggggaaaagg

SEQ ID NO: 6066 - DNA, 20 bp, Artificial Sequence
  Description of Artificial Sequence: Synthetic oligonucleotide
  Target: PCSK9; (+) strand; PAM type: NNGRRT; PAM sequence: CAGGGT
ctggctgcttatttgctggc

SEQ ID NO: 6067 - DNA, 20 bp, Artificial Sequence
  Description of Artificial Sequence: Synthetic oligonucleotide
  Target: PCSK9; (+) strand; PAM type: NNGRRT; PAM sequence: AGGGGT
tcctttgggcaacttatggg

SEQ ID NO: 6068 - DNA, 20 bp, Artificial Sequence
  Description of Artificial Sequence: Synthetic oligonucleotide
  Target: PCSK9; (+) strand; PAM type: NNGRRT; PAM sequence: AGGGAT
tatgggaggggtaattggtg

SEQ ID NO: 6069 - DNA, 20 bp, Artificial Sequence
  Description of Artificial Sequence: Synthetic oligonucleotide
  Target: PCSK9; (+) strand; PAM type: NNGRRT; PAM sequence: AAGAGT
cagctggggctgcccctcat

SEQ ID NO: 6070 - DNA, 20 bp, Artificial Sequence
  Description of Artificial Sequence: Synthetic oligonucleotide
  Target: PCSK9; (+) strand; PAM type: NNGRRT; PAM sequence: GAGGAT
cccctcataagagtgcagtg

SEQ ID NO: 6071 - DNA, 20 bp, Artificial Sequence
  Description of Artificial Sequence: Synthetic oligonucleotide
  Target: PCSK9; (+) strand; PAM type: NNGRRT; PAM sequence: TGGGAT
taagagtgcagtggaggata

SEQ ID NO: 6072 - DNA, 20 bp, Artificial Sequence
  Description of Artificial Sequence: Synthetic oligonucleotide
  Target: PCSK9; (+) strand; PAM type: NNGRRT; PAM sequence: CAGGGT
gttccatctgtcgcagagcc

SEQ ID NO: 6073 - DNA, 20 bp, Artificial Sequence
  Description of Artificial Sequence: Synthetic oligonucleotide
  Target: PCSK9; (+) strand; PAM type: NNGRRT; PAM sequence: CTGGGT
tgcacaggcttcatcattct

SEQ ID NO: 6074 - DNA, 20 bp, Artificial Sequence
  Description of Artificial Sequence: Synthetic oligonucleotide
  Target: PCSK9; (+) strand; PAM type: NNGRRT; PAM sequence: GGGGAT
gctgcgatggcgggctcgat

SEQ ID NO: 6075 - DNA, 20 bp, Artificial Sequence
  Description of Artificial Sequence: Synthetic oligonucleotide
  Target: PCSK9; (+) strand; PAM type: NNGRRT; PAM sequence: TGGAGT
ataactctgaccttacctca

SEQ ID NO: 6076 - DNA, 20 bp, Artificial Sequence
  Description of Artificial Sequence: Synthetic oligonucleotide
  Target: PCSK9; (+) strand; PAM type: NNGRRT; PAM sequence: TGGAGT
gtctttgtgcactggctctc

SEQ ID NO: 6077 - DNA, 20 bp, Artificial Sequence
  Description of Artificial Sequence: Synthetic oligonucleotide
  Target: PCSK9; (+) strand; PAM type: NNGRRT; PAM sequence: CGGAAT
tcagagcaggccatttcact

SEQ ID NO: 6078 - DNA, 20 bp, Artificial Sequence
  Description of Artificial Sequence: Synthetic oligonucleotide
  Target: PCSK9; (+) strand; PAM type: NNGRRT; PAM sequence: GAGGAT
tctgctgtgcatctgcaagg

SEQ ID NO: 6079 - DNA, 20 bp, Artificial Sequence
  Description of Artificial Sequence: Synthetic oligonucleotide
  Target: PCSK9; (+) strand; PAM type: NNGRRT; PAM sequence: CTGGAT
tggtacacaataggtgttta

SEQ ID NO: 6080 - DNA, 20 bp, Artificial Sequence
  Description of Artificial Sequence: Synthetic oligonucleotide
  Target: PCSK9; (+) strand; PAM type: NNGRRT; PAM sequence: AGGAAT
tcttgaacatggtgtgtaaa

SEQ ID NO: 6081 - DNA, 20 bp, Artificial Sequence
  Description of Artificial Sequence: Synthetic oligonucleotide
  Target: PCSK9; (+) strand; PAM type: NNGRRT; PAM sequence: TTGAAT
gtaaaaggaatctttgcaaa

SEQ ID NO: 6082 - DNA, 20 bp, Artificial Sequence
  Description of Artificial Sequence: Synthetic oligonucleotide
  Target: PCSK9; (+) strand; PAM type: NNGRRT; PAM sequence: TAGAAT
agctgagcttgtgcctacca

SEQ ID NO: 6083 - DNA, 20 bp, Artificial Sequence
  Description of Artificial Sequence: Synthetic oligonucleotide
  Target: PCSK9; (+) strand; PAM type: NNGRRT; PAM sequence: CTGAAT
cttgtgcctaccatagaatt

SEQ ID NO: 6084 - DNA, 20 bp, Artificial Sequence
  Description of Artificial Sequence: Synthetic oligonucleotide
  Target: PCSK9; (+) strand; PAM type: NNGRRT; PAM sequence: CTGAAT
cgtctttgcaaacttaaaac

SEQ ID NO: 6085 - DNA, 20 bp, Artificial Sequence
  Description of Artificial Sequence: Synthetic oligonucleotide
  Target: PCSK9; (+) strand; PAM type: NNGRRT; PAM sequence: CAGGGT
tagttggtaaggtcagtgtg

SEQ ID NO: 6086 - DNA, 20 bp, Artificial Sequence
  Description of Artificial Sequence: Synthetic oligonucleotide
  Target: PCSK9; (+) strand; PAM type: NNGRRT; PAM sequence: GGGGGT
cataaagggcagaggccgga

SEQ ID NO: 6087 - DNA, 20 bp, Artificial Sequence
  Description of Artificial Sequence: Synthetic oligonucleotide
  Target: PCSK9; (+) strand; PAM type: NNGRRT; PAM sequence: AAGAAT
gccaggttaaggccagtgga

SEQ ID NO: 6088 - DNA, 20 bp, Artificial Sequence
  Description of Artificial Sequence: Synthetic oligonucleotide
  Target: PCSK9; (+) strand; PAM type: NNGRRT; PAM sequence: AGGAGT
aaagaattcggtgggcagcg

SEQ ID NO: 6089 - DNA, 20 bp, Artificial Sequence
  Description of Artificial Sequence: Synthetic oligonucleotide
  Target: PCSK9; (+) strand; PAM type: NNGRRT; PAM sequence: TAGGAT
gggcagcgaggagtccacag

SEQ ID NO: 6090 - DNA, 20 bp, Artificial Sequence
  Description of Artificial Sequence: Synthetic oligonucleotide
  Target: PCSK9; (+) strand; PAM type: NNGRRT; PAM sequence: TGGAGT
aaggtgggcccggcagaact

SEQ ID NO: 6091 - DNA, 20 bp, Artificial Sequence
  Description of Artificial Sequence: Synthetic oligonucleotide
  Target: PCSK9; (+) strand; PAM type: NNGRRT; PAM sequence: CAGGGT
ttggagtctggcatcccacg

SEQ ID NO: 6092 - DNA, 20 bp, Artificial Sequence
  Description of Artificial Sequence: Synthetic oligonucleotide
  Target: PCSK9; (+) strand; PAM type: NNGRRT; PAM sequence: TAGGAT
ggcctgccttccagcccagt

SEQ ID NO: 6093 - DNA, 20 bp, Artificial Sequence
  Description of Artificial Sequence: Synthetic oligonucleotide
  Target: PCSK9; (+) strand; PAM type: NNGRRT; PAM sequence: GGGAGT
ttccagcccagttaggattt

SEQ ID NO: 6094 - DNA, 20 bp, Artificial Sequence
  Description of Artificial Sequence: Synthetic oligonucleotide
  Target: PCSK9; (+) strand; PAM type: NNGRRT; PAM sequence: GGGGGT
gaaacctgatcctccagtcc

SEQ ID NO: 6095 - DNA, 20 bp, Artificial Sequence
  Description of Artificial Sequence: Synthetic oligonucleotide
  Target: PCSK9; (+) strand; PAM type: NNGRRT; PAM sequence: TAGGAT
tccgttaatgtttaatcaga

SEQ ID NO: 6096 - DNA, 20 bp, Artificial Sequence
  Description of Artificial Sequence: Synthetic oligonucleotide
  Target: PCSK9; (+) strand; PAM type: NNGRRT; PAM sequence: CAGGGT
gcgggcgccgccgttcagtt

SEQ ID NO: 6097 - DNA, 20 bp, Artificial Sequence
  Description of Artificial Sequence: Synthetic oligonucleotide
  Target: PCSK9; (+) strand; PAM type: NNGRRT; PAM sequence: AGGAGT
agttcagggtctgagcctgg

SEQ ID NO: 6098 - DNA, 20 bp, Artificial Sequence
  Description of Artificial Sequence: Synthetic oligonucleotide
  Target: PCSK9; (+) strand; PAM type: NNGRRT; PAM sequence: CAGGAT
agcggctcccagctcccagc

SEQ ID NO: 6099 - DNA, 20 bp, Artificial Sequence
  Description of Artificial Sequence: Synthetic oligonucleotide
  Target: PCSK9; (+) strand; PAM type: NNGRRT; PAM sequence: CTGGGT
tgctgctgctgctgctgctc

SEQ ID NO: 6100 - DNA, 20 bp, Artificial Sequence
  Description of Artificial Sequence: Synthetic oligonucleotide
  Target: PCSK9; (+) strand; PAM type: NNGRRT; PAM sequence: GCGGGT
ttccaccgctgcgccaaggt

SEQ ID NO: 6101 - DNA, 20 bp, Artificial Sequence
  Description of Artificial Sequence: Synthetic oligonucleotide
  Target: PCSK9; (+) strand; PAM type: NNGRRT; PAM sequence: AGGGAT
ctgcgccaaggtgcgggtgt

SEQ ID NO: 6102 - DNA, 20 bp, Artificial Sequence
  Description of Artificial Sequence: Synthetic oligonucleotide
  Target: PCSK9; (+) strand; PAM type: NNGRRT; PAM sequence: TGGAGT
cccccatgtaagagaggaag

SEQ ID NO: 6103 - DNA, 20 bp, Artificial Sequence
  Description of Artificial Sequence: Synthetic oligonucleotide
  Target: PCSK9; (+) strand; PAM type: NNGRRT; PAM sequence: ACGGGT
aggcaaggcggcgggggagg

SEQ ID NO: 6104 - DNA, 20 bp, Artificial Sequence
  Description of Artificial Sequence: Synthetic oligonucleotide
  Target: PCSK9; (+) strand; PAM type: NNGRRT; PAM sequence: CGGGGT
ctattcagtgggaaggttcg

SEQ ID NO: 6105 - DNA, 20 bp, Artificial Sequence
  Description of Artificial Sequence: Synthetic oligonucleotide
  Target: PCSK9; (+) strand; PAM type: NNGRRT; PAM sequence: CAGGAT
aagggcgagcagagcactgc

SEQ ID NO: 6106 - DNA, 20 bp, Artificial Sequence
  Description of Artificial Sequence: Synthetic oligonucleotide
  Target: PCSK9; (+) strand; PAM type: NNGRRT; PAM sequence: GTGGGT
tctgcctcgccgcggcacag

SEQ ID NO: 6107 - DNA, 20 bp, Artificial Sequence
  Description of Artificial Sequence: Synthetic oligonucleotide
  Target: PCSK9; (+) strand; PAM type: NNGRRT; PAM sequence: AGGAGT
gccgcggcacaggtgggtga

SEQ ID NO: 6108 - DNA, 20 bp, Artificial Sequence
  Description of Artificial Sequence: Synthetic oligonucleotide
  Target: PCSK9; (+) strand; PAM type: NNGRRT; PAM sequence: GTGAAT
cggcacaggtgggtgaagga

SEQ ID NO: 6109 - DNA, 20 bp, Artificial Sequence
  Description of Artificial Sequence: Synthetic oligonucleotide
  Target: PCSK9; (+) strand; PAM type: NNGRRT; PAM sequence: GTGGGT
aaagcgggcttgccattata

SEQ ID NO: 6110 - DNA, 20 bp, Artificial Sequence
  Description of Artificial Sequence: Synthetic oligonucleotide
  Target: PCSK9; (+) strand; PAM type: NNGRRT; PAM sequence: GAGGGT
tttggaaaacatgggcagcg

SEQ ID NO: 6111 - DNA, 20 bp, Artificial Sequence
  Description of Artificial Sequence: Synthetic oligonucleotide
  Target: PCSK9; (+) strand; PAM type: NNGRRT; PAM sequence: CGGGGT
ggccctacccgagacagggg

SEQ ID NO: 6112 - DNA, 20 bp, Artificial Sequence
  Description of Artificial Sequence: Synthetic oligonucleotide
  Target: PCSK9; (+) strand; PAM type: NNGRRT; PAM sequence: GCGAGT
gtctgccgaccgtgtgcggg

SEQ ID NO: 6113 - DNA, 20 bp, Artificial Sequence
  Description of Artificial Sequence: Synthetic oligonucleotide
  Target: PCSK9; (+) strand; PAM type: NNGRRT; PAM sequence: TGGAGT
aggttctgtgtcccccagct

SEQ ID NO: 6114 - DNA, 20 bp, Artificial Sequence
  Description of Artificial Sequence: Synthetic oligonucleotide
  Target: PCSK9; (+) strand; PAM type: NNGRRT; PAM sequence: TGGGGT
ccccagcttggagtcagatg

SEQ ID NO: 6115 - DNA, 20 bp, Artificial Sequence
  Description of Artificial Sequence: Synthetic oligonucleotide
  Target: PCSK9; (+) strand; PAM type: NNGRRT; PAM sequence: TTGAAT
gcttggagtcagatgtgggg

SEQ ID NO: 6116 - DNA, 20 bp, Artificial Sequence
  Description of Artificial Sequence: Synthetic oligonucleotide
  Target: PCSK9; (+) strand; PAM type: NNGRRT; PAM sequence: ATGAGT
aagggaaagttctgttgacc

SEQ ID NO: 6117 - DNA, 20 bp, Artificial Sequence
  Description of Artificial Sequence: Synthetic oligonucleotide
  Target: PCSK9; (+) strand; PAM type: NNGRRT; PAM sequence: GGGGAT
acttacaatgcaagccccgg

SEQ ID NO: 6118 - DNA, 20 bp, Artificial Sequence
  Description of Artificial Sequence: Synthetic oligonucleotide
  Target: PCSK9; (+) strand; PAM type: NNGRRT; PAM sequence: CTGAGT
ctgcctgcccacgcttctgt

SEQ ID NO: 6119 - DNA, 20 bp, Artificial Sequence
  Description of Artificial Sequence: Synthetic oligonucleotide
  Target: PCSK9; (+) strand; PAM type: NNGRRT; PAM sequence: CTGGGT
cacgcttctgtctgagtgtg

SEQ ID NO: 6120 - DNA, 20 bp, Artificial Sequence
  Description of Artificial Sequence: Synthetic oligonucleotide
  Target: PCSK9; (+) strand; PAM type: NNGRRT; PAM sequence: CAGGAT
tgtctgagtgtgctgggtgg

SEQ ID NO: 6121 - DNA, 20 bp, Artificial Sequence
  Description of Artificial Sequence: Synthetic oligonucleotide
  Target: PCSK9; (+) strand; PAM type: NNGRRT; PAM sequence: AGGGAT
ctgagcctttgactttctcg

SEQ ID NO: 6122 - DNA, 20 bp, Artificial Sequence
  Description of Artificial Sequence: Synthetic oligonucleotide
  Target: PCSK9; (+) strand; PAM type: NNGRRT; PAM sequence: TGGGGT
gactttctcgagggatgttg

SEQ ID NO: 6123 - DNA, 20 bp, Artificial Sequence
  Description of Artificial Sequence: Synthetic oligonucleotide
  Target: PCSK9; (+) strand; PAM type: NNGRRT; PAM sequence: CAGGAT
ggatgttgtggggttgtggc

SEQ ID NO: 6124 - DNA, 20 bp, Artificial Sequence
  Description of Artificial Sequence: Synthetic oligonucleotide
  Target: PCSK9; (+) strand; PAM type: NNGRRT; PAM sequence: GTGAGT
aaacaactgttctggaaata

SEQ ID NO: 6125 - DNA, 20 bp, Artificial Sequence
  Description of Artificial Sequence: Synthetic oligonucleotide
  Target: PCSK9; (+) strand; PAM type: NNGRRT; PAM sequence: GTGAGT
tgagtaccccatcctgagag

SEQ ID NO: 6126 - DNA, 20 bp, Artificial Sequence
  Description of Artificial Sequence: Synthetic oligonucleotide
  Target: PCSK9; (+) strand; PAM type: NNGRRT; PAM sequence: GAGGAT
accacctgaaccaagccctt

SEQ ID NO: 6127 - DNA, 20 bp, Artificial Sequence
  Description of Artificial Sequence: Synthetic oligonucleotide
  Target: PCSK9; (+) strand; PAM type: NNGRRT; PAM sequence: GGGAAT
tcattcaatggttattttgt

SEQ ID NO: 6128 - DNA, 20 bp, Artificial Sequence
  Description of Artificial Sequence: Synthetic oligonucleotide
  Target: PCSK9; (+) strand; PAM type: NNGRRT; PAM sequence: TCGAAT
caatggttattttgtgggaa

SEQ ID NO: 6129 - DNA, 20 bp, Artificial Sequence
  Description of Artificial Sequence: Synthetic oligonucleotide
  Target: PCSK9; (+) strand; PAM type: NNGRRT; PAM sequence: TAGAAT
tattttgtgggaatcgaatt

SEQ ID NO: 6130 - DNA, 20 bp, Artificial Sequence
  Description of Artificial Sequence: Synthetic oligonucleotide
  Target: PCSK9; (+) strand; PAM type: NNGRRT; PAM sequence: CTGGGT
tcaccccaggtgcattagaa

SEQ ID NO: 6131 - DNA, 20 bp, Artificial Sequence
  Description of Artificial Sequence: Synthetic oligonucleotide
  Target: PCSK9; (+) strand; PAM type: NNGRRT; PAM sequence: CAGAGT
agaactgacactccactgca

SEQ ID NO: 6132 - DNA, 20 bp, Artificial Sequence
  Description of Artificial Sequence: Synthetic oligonucleotide
  Target: PCSK9; (+) strand; PAM type: NNGRRT; PAM sequence: ATGGGT
ttagcggaaggcattttcag

SEQ ID NO: 6133 - DNA, 20 bp, Artificial Sequence
  Description of Artificial Sequence: Synthetic oligonucleotide
  Target: PCSK9; (+) strand; PAM type: NNGRRT; PAM sequence: AGGAGT
tgggtctttgaagcattagt

SEQ ID NO: 6134 - DNA, 20 bp, Artificial Sequence
  Description of Artificial Sequence: Synthetic oligonucleotide
  Target: PCSK9; (+) strand; PAM type: NNGRRT; PAM sequence: GAGAAT
ttcagcgatgatggtgtcat

SEQ ID NO: 6135 - DNA, 20 bp, Artificial Sequence
  Description of Artificial Sequence: Synthetic oligonucleotide
  Target: PCSK9; (+) strand; PAM type: NNGRRT; PAM sequence: TAGGAT
gtgtcatgagaattttattc

SEQ ID NO: 6136 - DNA, 20 bp, Artificial Sequence
  Description of Artificial Sequence: Synthetic oligonucleotide
  Target: PCSK9; (+) strand; PAM type: NNGRRT; PAM sequence: TGGAGT
tttttcttttttttttgaga

SEQ ID NO: 6137 - DNA, 20 bp, Artificial Sequence
  Description of Artificial Sequence: Synthetic oligonucleotide
  Target: PCSK9; (+) strand; PAM type: NNGRRT; PAM sequence: TGGAGT
ttcgctcttgttgcccaggc

SEQ ID NO: 6138 - DNA, 20 bp, Artificial Sequence
  Description of Artificial Sequence: Synthetic oligonucleotide
  Target: PCSK9; (+) strand; PAM type: NNGRRT; PAM sequence: CCGGGT
ctcactgcaacatctgtctc

SEQ ID NO: 6139 - DNA, 20 bp, Artificial Sequence
  Description of Artificial Sequence: Synthetic oligonucleotide
  Target: PCSK9; (+) strand; PAM type: NNGRRT; PAM sequence: TGGGAT
gcctcagcctcccaagaagc

SEQ ID NO: 6140 - DNA, 20 bp, Artificial Sequence
  Description of Artificial Sequence: Synthetic oligonucleotide
  Target: PCSK9; (+) strand; PAM type: NNGRRT; PAM sequence: AGGGGT
ttttgtatttttagtagaga

SEQ ID NO: 6141 - DNA, 20 bp, Artificial Sequence
  Description of Artificial Sequence: Synthetic oligonucleotide
  Target: PCSK9; (+) strand; PAM type: NNGRRT; PAM sequence: GTGGAT
gcaaactcctgacctcctca

SEQ ID NO: 6142 - DNA, 20 bp, Artificial Sequence
  Description of Artificial Sequence: Synthetic oligonucleotide
  Target: PCSK9; (+) strand; PAM type: NNGRRT; PAM sequence: TCGAAT
gcctcagcctcccaaagtgc

SEQ ID NO: 6143 - DNA, 20 bp, Artificial Sequence
  Description of Artificial Sequence: Synthetic oligonucleotide
  Target: PCSK9; (+) strand; PAM type: NNGRRT; PAM sequence: GTGAAT
attatttttaatttagttgt

SEQ ID NO: 6144 - DNA, 20 bp, Artificial Sequence
  Description of Artificial Sequence: Synthetic oligonucleotide
  Target: PCSK9; (+) strand; PAM type: NNGRRT; PAM sequence: TTGGGT
accgttttggccctaaggct

SEQ ID NO: 6145 - DNA, 20 bp, Artificial Sequence
  Description of Artificial Sequence: Synthetic oligonucleotide
  Target: PCSK9; (+) strand; PAM type: NNGRRT; PAM sequence: GGGGGT
gccctaaggctttgggtaaa

SEQ ID NO: 6146 - DNA, 20 bp, Artificial Sequence
  Description of Artificial Sequence: Synthetic oligonucleotide
  Target: PCSK9; (+) strand; PAM type: NNGRRT; PAM sequence: TGGAGT
ggactctgttctactctgac

SEQ ID NO: 6147 - DNA, 20 bp, Artificial Sequence
  Description of Artificial Sequence: Synthetic oligonucleotide
  Target: PCSK9; (+) strand; PAM type: NNGRRT; PAM sequence: ATGGGT
agatgcatatatacagagat

SEQ ID NO: 6148 - DNA, 20 bp, Artificial Sequence
  Description of Artificial Sequence: Synthetic oligonucleotide
  Target: PCSK9; (+) strand; PAM type: NNGRRT; PAM sequence: TGGAGT
gtaggggccaaggaggagca

SEQ ID NO: 6149 - DNA, 20 bp, Artificial Sequence
  Description of Artificial Sequence: Synthetic oligonucleotide
  Target: PCSK9; (+) strand; PAM type: NNGRRT; PAM sequence: TTGGGT
tggggcctaatgggaggtgt

SEQ ID NO: 6150 - DNA, 20 bp, Artificial Sequence
  Description of Artificial Sequence: Synthetic oligonucleotide
  Target: PCSK9; (+) strand; PAM type: NNGRRT; PAM sequence: ATGAGT
ttggtgccgtccttgtgata

SEQ ID NO: 6151 - DNA, 20 bp, Artificial Sequence
  Description of Artificial Sequence: Synthetic oligonucleotide
  Target: PCSK9; (+) strand; PAM type: NNGRRT; PAM sequence: CAGAAT
catgcttcctggagagcttg

SEQ ID NO: 6152 - DNA, 20 bp, Artificial Sequence
  Description of Artificial Sequence: Synthetic oligonucleotide
  Target: PCSK9; (+) strand; PAM type: NNGRRT; PAM sequence: CTGAAT
agagcttgcagaatcatgag

SEQ ID NO: 6153 - DNA, 20 bp, Artificial Sequence
  Description of Artificial Sequence: Synthetic oligonucleotide
  Target: PCSK9; (+) strand; PAM type: NNGRRT; PAM sequence: CTGGAT
tgcctgcatttgtagagcat

SEQ ID NO: 6154 - DNA, 20 bp, Artificial Sequence
  Description of Artificial Sequence: Synthetic oligonucleotide
  Target: PCSK9; (+) strand; PAM type: NNGRRT; PAM sequence: TTGAGT
gtatctgaggctccgagagg

SEQ ID NO: 6155 - DNA, 20 bp, Artificial Sequence
  Description of Artificial Sequence: Synthetic oligonucleotide
  Target: PCSK9; (+) strand; PAM type: NNGRRT; PAM sequence: TGGAAT
caaccagtaaatattggagc

SEQ ID NO: 6156 - DNA, 20 bp, Artificial Sequence
  Description of Artificial Sequence: Synthetic oligonucleotide
  Target: PCSK9; (+) strand; PAM type: NNGRRT; PAM sequence: GGGGGT
tctgactggggcatggggga

SEQ ID NO: 6157 - DNA, 20 bp, Artificial Sequence
  Description of Artificial Sequence: Synthetic oligonucleotide
  Target: PCSK9; (+) strand; PAM type: NNGRRT; PAM sequence: CTGGGT
gcgaccaggcccgtagagag

SEQ ID NO: 6158 - DNA, 20 bp, Artificial Sequence
  Description of Artificial Sequence: Synthetic oligonucleotide
  Target: PCSK9; (+) strand; PAM type: NNGRRT; PAM sequence: TCGAGT
gtacagaggaaaacctgttg

SEQ ID NO: 6159 - DNA, 20 bp, Artificial Sequence
  Description of Artificial Sequence: Synthetic oligonucleotide
  Target: PCSK9; (+) strand; PAM type: NNGRRT; PAM sequence: CTGAAT
cccgtagttcccatttttgc

SEQ ID NO: 6160 - DNA, 20 bp, Artificial Sequence
  Description of Artificial Sequence: Synthetic oligonucleotide
  Target: PCSK9; (+) strand; PAM type: NNGRRT; PAM sequence: GTGAAT
tgaaagtgttatataaccat

SEQ ID NO: 6161 - DNA, 20 bp, Artificial Sequence
  Description of Artificial Sequence: Synthetic oligonucleotide
  Target: PCSK9; (+) strand; PAM type: NNGRRT; PAM sequence: ATGAGT
aataataatagttggcctat

SEQ ID NO: 6162 - DNA, 20 bp, Artificial Sequence
  Description of Artificial Sequence: Synthetic oligonucleotide
  Target: PCSK9; (+) strand; PAM type: NNGRRT; PAM sequence: AGGGGT
ttttgttgtaatttgtaagt

SEQ ID NO: 6163 - DNA, 20 bp, Artificial Sequence
  Description of Artificial Sequence: Synthetic oligonucleotide
  Target: PCSK9; (+) strand; PAM type: NNGRRT; PAM sequence: TAGGGT
ggggtgagataaagtacacc

SEQ ID NO: 6164 - DNA, 20 bp, Artificial Sequence
  Description of Artificial Sequence: Synthetic oligonucleotide
  Target: PCSK9; (+) strand; PAM type: NNGRRT; PAM sequence: CTGGGT
taaagtacacctagggtttg

SEQ ID NO: 6165 - DNA, 20 bp, Artificial Sequence
  Description of Artificial Sequence: Synthetic oligonucleotide
  Target: PCSK9; (+) strand; PAM type: NNGRRT; PAM sequence: CAGGAT
tgttcctccttgcatggggc

SEQ ID NO: 6166 - DNA, 20 bp, Artificial Sequence
  Description of Artificial Sequence: Synthetic oligonucleotide
  Target: PCSK9; (+) strand; PAM type: NNGRRT; PAM sequence: GGGGAT
gcaggcccaggctgcccgcc

SEQ ID NO: 6167 - DNA, 20 bp, Artificial Sequence
  Description of Artificial Sequence: Synthetic oligonucleotide
  Target: PCSK9; (+) strand; PAM type: NNGRRT; PAM sequence: ATGAGT
ttcctggcttcctggtgaag

SEQ ID NO: 6168 - DNA, 20 bp, Artificial Sequence
  Description of Artificial Sequence: Synthetic oligonucleotide
  Target: PCSK9; (+) strand; PAM type: NNGRRT; PAM sequence: GGGAAT
gctggtgagccacccttttt

SEQ ID NO: 6169 - DNA, 20 bp, Artificial Sequence
  Description of Artificial Sequence: Synthetic oligonucleotide
  Target: PCSK9; (+) strand; PAM type: NNGRRT; PAM sequence: TCGGGT
aagtatgtattgagcactta

SEQ ID NO: 6170 - DNA, 20 bp, Artificial Sequence
  Description of Artificial Sequence: Synthetic oligonucleotide
  Target: PCSK9; (+) strand; PAM type: NNGRRT; PAM sequence: TAGAAT
gtaactactggctttctgta

SEQ ID NO: 6171 - DNA, 20 bp, Artificial Sequence
  Description of Artificial Sequence: Synthetic oligonucleotide
  Target: PCSK9; (+) strand; PAM type: NNGRRT; PAM sequence: AGGGGT
aggggaccacacagacagct

SEQ ID NO: 6172 - DNA, 20 bp, Artificial Sequence
  Description of Artificial Sequence: Synthetic oligonucleotide
  Target: PCSK9; (+) strand; PAM type: NNGRRT; PAM sequence: CTGGAT
cagacagctaggggtagagc

SEQ ID NO: 6173 - DNA, 20 bp, Artificial Sequence
  Description of Artificial Sequence: Synthetic oligonucleotide
  Target: PCSK9; (+) strand; PAM type: NNGRRT; PAM sequence: TGGGAT
aacctgtagggacaaggccc

SEQ ID NO: 6174 - DNA, 20 bp, Artificial Sequence
  Description of Artificial Sequence: Synthetic oligonucleotide
  Target: PCSK9; (+) strand; PAM type: NNGRRT; PAM sequence: CTGAGT
cctgggatgttcagtggagc

SEQ ID NO: 6175 - DNA, 20 bp, Artificial Sequence
  Description of Artificial Sequence: Synthetic oligonucleotide
  Target: PCSK9; (+) strand; PAM type: NNGRRT; PAM sequence: TAGGGT
tttataaaaaagcatgactc

SEQ ID NO: 6176 - DNA, 20 bp, Artificial Sequence
  Description of Artificial Sequence: Synthetic oligonucleotide
  Target: PCSK9; (+) strand; PAM type: NNGRRT; PAM sequence: CAGAGT
cctttgaagctgttgctatc

SEQ ID NO: 6177 - DNA, 20 bp, Artificial Sequence
  Description of Artificial Sequence: Synthetic oligonucleotide
  Target: PCSK9; (+) strand; PAM type: NNGRRT; PAM sequence: CAGGGT
gtgaagtcccttctttagga

SEQ ID NO: 6178 - DNA, 20 bp, Artificial Sequence
  Description of Artificial Sequence: Synthetic oligonucleotide
  Target: PCSK9; (+) strand; PAM type: NNGRRT; PAM sequence: CTGGAT
cagggtggccctcctccctc

SEQ ID NO: 6179 - DNA, 20 bp, Artificial Sequence
  Description of Artificial Sequence: Synthetic oligonucleotide
  Target: PCSK9; (+) strand; PAM type: NNGRRT; PAM sequence: CTGGGT
gtggaggggcagaaagggga

SEQ ID NO: 6180 - DNA, 20 bp, Artificial Sequence
  Description of Artificial Sequence: Synthetic oligonucleotide
  Target: PCSK9; (+) strand; PAM type: NNGRRT; PAM sequence: CAGGGT
gtcacacagcgtgtaatggg

SEQ ID NO: 6181 - DNA, 20 bp, Artificial Sequence
  Description of Artificial Sequence: Synthetic oligonucleotide
  Target: PCSK9; (+) strand; PAM type: NNGRRT; PAM sequence: CAGAGT
cagcgtgtaatgggcagggt

SEQ ID NO: 6182 - DNA, 20 bp, Artificial Sequence
  Description of Artificial Sequence: Synthetic oligonucleotide
  Target: PCSK9; (+) strand; PAM type: NNGRRT; PAM sequence: TGGAGT
taatgggcagggtcagagtc

SEQ ID NO: 6183 - DNA, 20 bp, Artificial Sequence
  Description of Artificial Sequence: Synthetic oligonucleotide
  Target: PCSK9; (+) strand; PAM type: NNGRRT; PAM sequence: CTGGGT
tcagagtctggagtctggac

SEQ ID NO: 6184 - DNA, 20 bp, Artificial Sequence
  Description of Artificial Sequence: Synthetic oligonucleotide
  Target: PCSK9; (+) strand; PAM type: NNGRRT; PAM sequence: ATGGGT
ctgcactgcactgctgcccc

SEQ ID NO: 6185 - DNA, 20 bp, Artificial Sequence
  Description of Artificial Sequence: Synthetic oligonucleotide
  Target: PCSK9; (+) strand; PAM type: NNGRRT; PAM sequence: AGGGAT
aaggcctgtggcgccatgac

SEQ ID NO: 6186 - DNA, 20 bp, Artificial Sequence
  Description of Artificial Sequence: Synthetic oligonucleotide
  Target: PCSK9; (+) strand; PAM type: NNGRRT; PAM sequence: CAGGGT
ggcgccatgacagggattga

SEQ ID NO: 6187 - DNA, 20 bp, Artificial Sequence
  Description of Artificial Sequence: Synthetic oligonucleotide
  Target: PCSK9; (+) strand; PAM type: NNGRRT; PAM sequence: GAGAGT
gccagggcagctgctcagag

SEQ ID NO: 6188 - DNA, 20 bp, Artificial Sequence
  Description of Artificial Sequence: Synthetic oligonucleotide
  Target: PCSK9; (+) strand; PAM type: NNGRRT; PAM sequence: CTGGGT
aaactgggcatcataccagc

SEQ ID NO: 6189 - DNA, 20 bp, Artificial Sequence
  Description of Artificial Sequence: Synthetic oligonucleotide
  Target: PCSK9; (+) strand; PAM type: NNGRRT; PAM sequence: TCGAGT
ggcatcataccagcctgggt

SEQ ID NO: 6190 - DNA, 20 bp, Artificial Sequence
  Description of Artificial Sequence: Synthetic oligonucleotide
  Target: PCSK9; (+) strand; PAM type: NNGRRT; PAM sequence: GGGGAT
gggcaggttaagaagcctct

SEQ ID NO: 6191 - DNA, 20 bp, Artificial Sequence
  Description of Artificial Sequence: Synthetic oligonucleotide
  Target: PCSK9; (+) strand; PAM type: NNGRRT; PAM sequence: AAGGGT
gctgttaccacttaggtctg

SEQ ID NO: 6192 - DNA, 20 bp, Artificial Sequence
  Description of Artificial Sequence: Synthetic oligonucleotide
  Target: PCSK9; (+) strand; PAM type: NNGRRT; PAM sequence: GGGAAT
aggtctgaagggtaaggaga

SEQ ID NO: 6193 - DNA, 20 bp, Artificial Sequence
  Description of Artificial Sequence: Synthetic oligonucleotide
  Target: PCSK9; (+) strand; PAM type: NNGRRT; PAM sequence: GGGAAT
tggaggagaggctgcctgtg

SEQ ID NO: 6194 - DNA, 20 bp, Artificial Sequence
  Description of Artificial Sequence: Synthetic oligonucleotide
  Target: PCSK9; (+) strand; PAM type: NNGRRT; PAM sequence: GAGGGT
ctgcctgtggggaatcaccc

SEQ ID NO: 6195 - DNA, 20 bp, Artificial Sequence
  Description of Artificial Sequence: Synthetic oligonucleotide
  Target: PCSK9; (+) strand; PAM type: NNGRRT; PAM sequence: GGGAGT
gttcaccgctgccatgcgca

SEQ ID NO: 6196 - DNA, 20 bp, Artificial Sequence
  Description of Artificial Sequence: Synthetic oligonucleotide
  Target: PCSK9; (+) strand; PAM type: NNGRRT; PAM sequence: GGGAGT
agggagtcaggaggtaggga

SEQ ID NO: 6197 - DNA, 20 bp, Artificial Sequence
  Description of Artificial Sequence: Synthetic oligonucleotide
  Target: PCSK9; (+) strand; PAM type: NNGRRT; PAM sequence: TGGAGT
tgagactctgttgcccagac

SEQ ID NO: 6198 - DNA, 20 bp, Artificial Sequence
  Description of Artificial Sequence: Synthetic oligonucleotide
  Target: PCSK9; (+) strand; PAM type: NNGRRT; PAM sequence: CCGGGT
catatctgcacctctgcctc

SEQ ID NO: 6199 - DNA, 20 bp, Artificial Sequence
  Description of Artificial Sequence: Synthetic oligonucleotide
  Target: PCSK9; (+) strand; PAM type: NNGRRT; PAM sequence: CCGGGT
ctcactgcaacctctgcctc

SEQ ID NO: 6200 - DNA, 20 bp, Artificial Sequence
  Description of Artificial Sequence: Synthetic oligonucleotide
  Target: PCSK9; (+) strand; PAM type: NNGRRT; PAM sequence: CCGAGT
gattctcctgcctcagcctc

SEQ ID NO: 6201 - DNA, 20 bp, Artificial Sequence
  Description of Artificial Sequence: Synthetic oligonucleotide
  Target: PCSK9; (+) strand; PAM type: NNGRRT; PAM sequence: TGGGGT
ttttgtatttttaatagaga

SEQ ID NO: 6202 - DNA, 20 bp, Artificial Sequence
  Description of Artificial Sequence: Synthetic oligonucleotide
  Target: PCSK9; (+) strand; PAM type: NNGRRT; PAM sequence: TGGGAT
acctcggcctcccaaagtgc

SEQ ID NO: 6203 - DNA, 20 bp, Artificial Sequence
  Description of Artificial Sequence: Synthetic oligonucleotide
  Target: PCSK9; (+) strand; PAM type: NNGRRT; PAM sequence: GTGAGT
aaagtgctgggattacaggc

SEQ ID NO: 6204 - DNA, 20 bp, Artificial Sequence
  Description of Artificial Sequence: Synthetic oligonucleotide
  Target: PCSK9; (+) strand; PAM type: NNGRRT; PAM sequence: GAGAAT
gagcaggctggagaaggctg

SEQ ID NO: 6205 - DNA, 20 bp, Artificial Sequence
  Description of Artificial Sequence: Synthetic oligonucleotide
  Target: PCSK9; (+) strand; PAM type: NNGRRT; PAM sequence: CCGAAT
agaatagactaggggacaaa

SEQ ID NO: 6206 - DNA, 20 bp, Artificial Sequence
  Description of Artificial Sequence: Synthetic oligonucleotide
  Target: PCSK9; (+) strand; PAM type: NNGRRT; PAM sequence: TGGAGT
gttatgtcatgatttaggca

SEQ ID NO: 6207 - DNA, 20 bp, Artificial Sequence
  Description of Artificial Sequence: Synthetic oligonucleotide
  Target: PCSK9; (+) strand; PAM type: NNGRRT; PAM sequence: CAGAAT
cccagacaagatgtcaagtt

SEQ ID NO: 6208 - DNA, 20 bp, Artificial Sequence
  Description of Artificial Sequence: Synthetic oligonucleotide
  Target: PCSK9; (+) strand; PAM type: NNGRRT; PAM sequence: AGGAAT
agttcagaatccttcctaaa

SEQ ID NO: 6209 - DNA, 20 bp, Artificial Sequence
  Description of Artificial Sequence: Synthetic oligonucleotide
  Target: PCSK9; (+) strand; PAM type: NNGRRT; PAM sequence: AGGGAT
tctatgccagaccgtgttgc

SEQ ID NO: 6210 - DNA, 20 bp, Artificial Sequence
  Description of Artificial Sequence: Synthetic oligonucleotide
  Target: PCSK9; (+) strand; PAM type: NNGRRT; PAM sequence: GGGAGT
agaccgtgttgcagggatat

SEQ ID NO: 6211 - DNA, 20 bp, Artificial Sequence
  Description of Artificial Sequence: Synthetic oligonucleotide
  Target: PCSK9; (+) strand; PAM type: NNGRRT; PAM sequence: TGGGAT
aaggtgggaggctgctgggc

SEQ ID NO: 6212 - DNA, 20 bp, Artificial Sequence
  Description of Artificial Sequence: Synthetic oligonucleotide
  Target: PCSK9; (+) strand; PAM type: NNGRRT; PAM sequence: CAGAGT
tgctgtccaaatggcttaag

SEQ ID NO: 6213 - DNA, 20 bp, Artificial Sequence
  Description of Artificial Sequence: Synthetic oligonucleotide
  Target: PCSK9; (+) strand; PAM type: NNGRRT; PAM sequence: GCGGAT
agcatcccgtggaacctgga

SEQ ID NO: 6214 - DNA, 20 bp, Artificial Sequence
  Description of Artificial Sequence: Synthetic oligonucleotide
  Target: PCSK9; (+) strand; PAM type: NNGRRT; PAM sequence: GCGGAT
ttacccctccacggtaccgg

SEQ ID NO: 6215 - DNA, 20 bp, Artificial Sequence
  Description of Artificial Sequence: Synthetic oligonucleotide
  Target: PCSK9; (+) strand; PAM type: NNGRRT; PAM sequence: ATGAAT
ccctccacggtaccgggcgg

SEQ ID NO: 6216 - DNA, 20 bp, Artificial Sequence
  Description of Artificial Sequence: Synthetic oligonucleotide
  Target: PCSK9; (+) strand; PAM type: NNGRRT; PAM sequence: CTGAAT
cctgccccaccccatctgag

SEQ ID NO: 6217 - DNA, 20 bp, Artificial Sequence
  Description of Artificial Sequence: Synthetic oligonucleotide
  Target: PCSK9; (+) strand; PAM type: NNGRRT; PAM sequence: TGGAAT
gttttccttttctcaccatt

SEQ ID NO: 6218 - DNA, 20 bp, Artificial Sequence
  Description of Artificial Sequence: Synthetic oligonucleotide
  Target: PCSK9; (+) strand; PAM type: NNGRRT; PAM sequence: GAGGGT
ggctgcacttaccttggaag

SEQ ID NO: 6219 - DNA, 20 bp, Artificial Sequence
  Description of Artificial Sequence: Synthetic oligonucleotide
  Target: PCSK9; (+) strand; PAM type: NNGRRT; PAM sequence: TGGGAT
gactggaccagatcctttaa

SEQ ID NO: 6220 - DNA, 20 bp, Artificial Sequence
  Description of Artificial Sequence: Synthetic oligonucleotide
  Target: PCSK9; (+) strand; PAM type: NNGRRT; PAM sequence: TGGGAT
gggatagacacaaccctgtc

SEQ ID NO: 6221 - DNA, 20 bp, Artificial Sequence
  Description of Artificial Sequence: Synthetic oligonucleotide
  Target: PCSK9; (+) strand; PAM type: NNGRRT; PAM sequence: GAGAAT
agatgcacctggcctgagga

SEQ ID NO: 6222 - DNA, 20 bp, Artificial Sequence
  Description of Artificial Sequence: Synthetic oligonucleotide
  Target: PCSK9; (+) strand; PAM type: NNGRRT; PAM sequence: AAGGGT
cctggcctgaggagagaatg

SEQ ID NO: 6223 - DNA, 20 bp, Artificial Sequence
  Description of Artificial Sequence: Synthetic oligonucleotide
  Target: PCSK9; (+) strand; PAM type: NNGRRT; PAM sequence: GTGGGT
cgcagagatgatgcaatgtg

SEQ ID NO: 6224 - DNA, 20 bp, Artificial Sequence
  Description of Artificial Sequence: Synthetic oligonucleotide
  Target: PCSK9; (+) strand; PAM type: NNGRRT; PAM sequence: TGGGGT
tggtgccaggacgcagagct

SEQ ID NO: 6225 - DNA, 20 bp, Artificial Sequence
  Description of Artificial Sequence: Synthetic oligonucleotide
  Target: PCSK9; (+) strand; PAM type: NNGRRT; PAM sequence: TGGGAT
tcaccccttaccggttctcg

SEQ ID NO: 6226 - DNA, 20 bp, Artificial Sequence
  Description of Artificial Sequence: Synthetic oligonucleotide
  Target: PCSK9; (+) strand; PAM type: NNGRRT; PAM sequence: ATGAGT
caggttgctgtgagactcca

SEQ ID NO: 6227 - DNA, 20 bp, Artificial Sequence
  Description of Artificial Sequence: Synthetic oligonucleotide
  Target: PCSK9; (+) strand; PAM type: NNGRRT; PAM sequence: AAGGAT
tgtgagactccaatgagttg

SEQ ID NO: 6228 - DNA, 20 bp, Artificial Sequence
  Description of Artificial Sequence: Synthetic oligonucleotide
  Target: PCSK9; (+) strand; PAM type: NNGRRT; PAM sequence: CTGAGT
ctgtgtgaccttgcatatgt

SEQ ID NO: 6229 - DNA, 20 bp, Artificial Sequence
  Description of Artificial Sequence: Synthetic oligonucleotide
  Target: PCSK9; (+) strand; PAM type: NNGRRT; PAM sequence: CTGGGT
aacagatcagagctggtggg

SEQ ID NO: 6230 - DNA, 20 bp, Artificial Sequence
  Description of Artificial Sequence: Synthetic oligonucleotide
  Target: PCSK9; (+) strand; PAM type: NNGRRT; PAM sequence: AAGGGT
tggtgggctgggtgtggaga

SEQ ID NO: 6231 - DNA, 20 bp, Artificial Sequence
  Description of Artificial Sequence: Synthetic oligonucleotide
  Target: PCSK9; (+) strand; PAM type: NNGRRT; PAM sequence: AAGGGT
tgtgggggacatcctctggc

SEQ ID NO: 6232 - DNA, 20 bp, Artificial Sequence
  Description of Artificial Sequence: Synthetic oligonucleotide
  Target: PCSK9; (+) strand; PAM type: NNGRRT; PAM sequence: GAGGAT
gaccaagagggacactggca

SEQ ID NO: 6233 - DNA, 20 bp, Artificial Sequence
  Description of Artificial Sequence: Synthetic oligonucleotide
  Target: PCSK9; (+) strand; PAM type: NNGRRT; PAM sequence: CTGAAT
cagtcctggaggccagaagc

SEQ ID NO: 6234 - DNA, 20 bp, Artificial Sequence
  Description of Artificial Sequence: Synthetic oligonucleotide
  Target: PCSK9; (+) strand; PAM type: NNGRRT; PAM sequence: TTGGAT
tctcataaggacacttgtca

SEQ ID NO: 6235 - DNA, 20 bp, Artificial Sequence
  Description of Artificial Sequence: Synthetic oligonucleotide
  Target: PCSK9; (+) strand; PAM type: NNGRRT; PAM sequence: CTGGAT
gtcattggatttagggccca

SEQ ID NO: 6236 - DNA, 20 bp, Artificial Sequence
  Description of Artificial Sequence: Synthetic oligonucleotide
  Target: PCSK9; (+) strand; PAM type: NNGRRT; PAM sequence: CAGGAT
ttagggcccactggatcctc

SEQ ID NO: 6237 - DNA, 20 bp, Artificial Sequence
  Description of Artificial Sequence: Synthetic oligonucleotide
  Target: PCSK9; (+) strand; PAM type: NNGRRT; PAM sequence: GGGGGT
aggtcacagccacaggttgt

SEQ ID NO: 6238 - DNA, 20 bp, Artificial Sequence
  Description of Artificial Sequence: Synthetic oligonucleotide
  Target: PCSK9; (+) strand; PAM type: NNGRRT; PAM sequence: TAGGAT
cagccacaggttgtgggggt

SEQ ID NO: 6239 - DNA, 20 bp, Artificial Sequence
  Description of Artificial Sequence: Synthetic oligonucleotide
  Target: PCSK9; (+) strand; PAM type: NNGRRT; PAM sequence: GTGAGT
caggttgtgggggttaggat

SEQ ID NO: 6240 - DNA, 20 bp, Artificial Sequence
  Description of Artificial Sequence: Synthetic oligonucleotide
  Target: PCSK9; (+) strand; PAM type: NNGRRT; PAM sequence: TAGGAT
gtggggccctttcttcccca

SEQ ID NO: 6241 - DNA, 20 bp, Artificial Sequence
  Description of Artificial Sequence: Synthetic oligonucleotide
  Target: PCSK9; (+) strand; PAM type: NNGRRT; PAM sequence: ATGGAT
ttcttccccataggatgccc

SEQ ID NO: 6242 - DNA, 20 bp, Artificial Sequence
  Description of Artificial Sequence: Synthetic oligonucleotide
  Target: PCSK9; (+) strand; PAM type: NNGRRT; PAM sequence: CCGAGT
tgccccccttcccgcttccc

SEQ ID NO: 6243 - DNA, 20 bp, Artificial Sequence
  Description of Artificial Sequence: Synthetic oligonucleotide
  Target: PCSK9; (+) strand; PAM type: NNGRRT; PAM sequence: AGGAAT
gagtgtctgtgggaggtggc

SEQ ID NO: 6244 - DNA, 20 bp, Artificial Sequence
  Description of Artificial Sequence: Synthetic oligonucleotide
  Target: PCSK9; (+) strand; PAM type: NNGRRT; PAM sequence: AGGGGT
aggtggcaggaatggcaggc

SEQ ID NO: 6245 - DNA, 20 bp, Artificial Sequence
  Description of Artificial Sequence: Synthetic oligonucleotide
  Target: PCSK9; (+) strand; PAM type: NNGRRT; PAM sequence: TGGAGT
caggggtgtggaaccccttc

SEQ ID NO: 6246 - DNA, 20 bp, Artificial Sequence
  Description of Artificial Sequence: Synthetic oligonucleotide
  Target: PCSK9; (+) strand; PAM type: NNGRRT; PAM sequence: GAGGGT
tcactctggggggctgtttg

SEQ ID NO: 6247 - DNA, 20 bp, Artificial Sequence
  Description of Artificial Sequence: Synthetic oligonucleotide
  Target: PCSK9; (+) strand; PAM type: NNGRRT; PAM sequence: TTGAGT
atgcatttctctgtcaggta

SEQ ID NO: 6248 - DNA, 20 bp, Artificial Sequence
  Description of Artificial Sequence: Synthetic oligonucleotide
  Target: PCSK9; (+) strand; PAM type: NNGRRT; PAM sequence: GGGGAT
caggcaccatattaggtgct

SEQ ID NO: 6249 - DNA, 20 bp, Artificial Sequence
  Description of Artificial Sequence: Synthetic oligonucleotide
  Target: PCSK9; (+) strand; PAM type: NNGRRT; PAM sequence: GTGAAT
taggtgctggggatacaaat

SEQ ID NO: 6250 - DNA, 20 bp, Artificial Sequence
  Description of Artificial Sequence: Synthetic oligonucleotide
  Target: PCSK9; (+) strand; PAM type: NNGRRT; PAM sequence: ATGAAT
gggatacaaatgtgaatgaa

SEQ ID NO: 6251 - DNA, 20 bp, Artificial Sequence
  Description of Artificial Sequence: Synthetic oligonucleotide
  Target: PCSK9; (+) strand; PAM type: NNGRRT; PAM sequence: CTGGAT
ctacttgacacagattagtt

SEQ ID NO: 6252 - DNA, 20 bp, Artificial Sequence
  Description of Artificial Sequence: Synthetic oligonucleotide
  Target: PCSK9; (+) strand; PAM type: NNGRRT; PAM sequence: AGGAGT
ggataggctgagagctctga

SEQ ID NO: 6253 - DNA, 20 bp, Artificial Sequence
  Description of Artificial Sequence: Synthetic oligonucleotide
  Target: PCSK9; (+) strand; PAM type: NNGRRT; PAM sequence: AAGGAT
cgagcctgtgtatccagcag

SEQ ID NO: 6254 - DNA, 20 bp, Artificial Sequence
  Description of Artificial Sequence: Synthetic oligonucleotide
  Target: PCSK9; (+) strand; PAM type: NNGRRT; PAM sequence: AAGGAT
atccagcagaaggatcagga

SEQ ID NO: 6255 - DNA, 20 bp, Artificial Sequence
  Description of Artificial Sequence: Synthetic oligonucleotide
  Target: PCSK9; (+) strand; PAM type: NNGRRT; PAM sequence: TGGAAT
aggggacggtgtccaagcag

SEQ ID NO: 6256 - DNA, 20 bp, Artificial Sequence
  Description of Artificial Sequence: Synthetic oligonucleotide
  Target: PCSK9; (+) strand; PAM type: NNGRRT; PAM sequence: GTGGAT
gtccaagcagtggaatgaac

SEQ ID NO: 6257 - DNA, 20 bp, Artificial Sequence
  Description of Artificial Sequence: Synthetic oligonucleotide
  Target: PCSK9; (+) strand; PAM type: NNGRRT; PAM sequence: GGGAGT
attgaagctgtgaggcagga

SEQ ID NO: 6258 - DNA, 20 bp, Artificial Sequence
  Description of Artificial Sequence: Synthetic oligonucleotide
  Target: PCSK9; (+) strand; PAM type: NNGRRT; PAM sequence: CTGGGT
gctggtgagaccaggagggc

SEQ ID NO: 6259 - DNA, 20 bp, Artificial Sequence
  Description of Artificial Sequence: Synthetic oligonucleotide
  Target: PCSK9; (+) strand; PAM type: NNGRRT; PAM sequence: GGGAAT
ggcagggctgcctggtgaga

SEQ ID NO: 6260 - DNA, 20 bp, Artificial Sequence
  Description of Artificial Sequence: Synthetic oligonucleotide
  Target: PCSK9; (+) strand; PAM type: NNGRRT; PAM sequence: GAGAGT
tccaaggcctctttgcccct

SEQ ID NO: 6261 - DNA, 20 bp, Artificial Sequence
  Description of Artificial Sequence: Synthetic oligonucleotide
  Target: PCSK9; (+) strand; PAM type: NNGRRT; PAM sequence: GGGGGT
tagcagcccctgcctcaccc

SEQ ID NO: 6262 - DNA, 20 bp, Artificial Sequence
  Description of Artificial Sequence: Synthetic oligonucleotide
  Target: PCSK9; (+) strand; PAM type: NNGRRT; PAM sequence: AAGGAT
ctctcactggaaggaagccc

SEQ ID NO: 6263 - DNA, 20 bp, Artificial Sequence
  Description of Artificial Sequence: Synthetic oligonucleotide
  Target: PCSK9; (+) strand; PAM type: NNGRRT; PAM sequence: AGGGAT
tggggccacaccccaggccc

SEQ ID NO: 6264 - DNA, 20 bp, Artificial Sequence
  Description of Artificial Sequence: Synthetic oligonucleotide
  Target: PCSK9; (+) strand; PAM type: NNGRRT; PAM sequence: ACGGGT
agcagatggtggtcccaagc

SEQ ID NO: 6265 - DNA, 20 bp, Artificial Sequence
  Description of Artificial Sequence: Synthetic oligonucleotide
  Target: PCSK9; (+) strand; PAM type: NNGRRT; PAM sequence: TAGGGT
tcaatatctagtggttcctc

SEQ ID NO: 6266 - DNA, 20 bp, Artificial Sequence
  Description of Artificial Sequence: Synthetic oligonucleotide
  Target: PCSK9; (+) strand; PAM type: NNGRRT; PAM sequence: ATGAGT
cacatggtagatgcctattg

SEQ ID NO: 6267 - DNA, 20 bp, Artificial Sequence
  Description of Artificial Sequence: Synthetic oligonucleotide
  Target: PCSK9; (+) strand; PAM type: NNGRRT; PAM sequence: CAGGGT
cgagactggaggccttaggg

SEQ ID NO: 6268 - DNA, 20 bp, Artificial Sequence
  Description of Artificial Sequence: Synthetic oligonucleotide
  Target: PCSK9; (+) strand; PAM type: NNGRRT; PAM sequence: GTGGGT
tgcccagacctactagcata

SEQ ID NO: 6269 - DNA, 20 bp, Artificial Sequence
  Description of Artificial Sequence: Synthetic oligonucleotide
  Target: PCSK9; (+) strand; PAM type: NNGRRT; PAM sequence: GTGGGT
cagacctactagcatagtgg

SEQ ID NO: 6270 - DNA, 20 bp, Artificial Sequence
  Description of Artificial Sequence: Synthetic oligonucleotide
  Target: PCSK9; (+) strand; PAM type: NNGRRT; PAM sequence: GAGGAT
ctagcatagtgggtgggtgg

SEQ ID NO: 6271 - DNA, 20 bp, Artificial Sequence
  Description of Artificial Sequence: Synthetic oligonucleotide
  Target: PCSK9; (+) strand; PAM type: NNGRRT; PAM sequence: TGGGAT
gaccttgcctgaaattcatg

SEQ ID NO: 6272 - DNA, 20 bp, Artificial Sequence
  Description of Artificial Sequence: Synthetic oligonucleotide
  Target: PCSK9; (+) strand; PAM type: NNGRRT; PAM sequence: CTGAAT
gtgggatctcagagcagcca

SEQ ID NO: 6273 - DNA, 20 bp, Artificial Sequence
  Description of Artificial Sequence: Synthetic oligonucleotide
  Target: PCSK9; (+) strand; PAM type: NNGRRT; PAM sequence: CTGGAT
gcatctcaagatggcatcat

SEQ ID NO: 6274 - DNA, 20 bp, Artificial Sequence
  Description of Artificial Sequence: Synthetic oligonucleotide
  Target: PCSK9; (+) strand; PAM type: NNGRRT; PAM sequence: CAGGGT
agaagccggaagacgtgagg

SEQ ID NO: 6275 - DNA, 20 bp, Artificial Sequence
  Description of Artificial Sequence: Synthetic oligonucleotide
  Target: PCSK9; (+) strand; PAM type: NNGRRT; PAM sequence: CTGAGT
tcttcccagagccttcgctg

SEQ ID NO: 6276 - DNA, 20 bp, Artificial Sequence
  Description of Artificial Sequence: Synthetic oligonucleotide
  Target: PCSK9; (+) strand; PAM type: NNGRRT; PAM sequence: GGGAAT
gagccttcgctgctgagtct

SEQ ID NO: 6277 - DNA, 20 bp, Artificial Sequence
  Description of Artificial Sequence: Synthetic oligonucleotide
  Target: PCSK9; (+) strand; PAM type: NNGRRT; PAM sequence: GTGGGT
tgtgaccgaagccataagaa

SEQ ID NO: 6278 - DNA, 20 bp, Artificial Sequence
  Description of Artificial Sequence: Synthetic oligonucleotide
  Target: PCSK9; (+) strand; PAM type: NNGRRT; PAM sequence: GAGAAT
ttgctcacctgtcctgagat

SEQ ID NO: 6279 - DNA, 20 bp, Artificial Sequence
  Description of Artificial Sequence: Synthetic oligonucleotide
  Target: PCSK9; (+) strand; PAM type: NNGRRT; PAM sequence: GAGGAT
tctactctgcagcatatttg

SEQ ID NO: 6280 - DNA, 20 bp, Artificial Sequence
  Description of Artificial Sequence: Synthetic oligonucleotide
  Target: PCSK9; (+) strand; PAM type: NNGRRT; PAM sequence: AGGGGT
gccctgcttttcctggctgc

SEQ ID NO: 6281 - DNA, 20 bp, Artificial Sequence
  Description of Artificial Sequence: Synthetic oligonucleotide
  Target: PCSK9; (+) strand; PAM type: NNGRRT; PAM sequence: GAGAGT
agtcttcctttggcctggct

SEQ ID NO: 6282 - DNA, 20 bp, Artificial Sequence
  Description of Artificial Sequence: Synthetic oligonucleotide
  Target: PCSK9; (+) strand; PAM type: NNGRRT; PAM sequence: GTGAGT
ctgcatgggcgactccccca

SEQ ID NO: 6283 - DNA, 20 bp, Artificial Sequence
  Description of Artificial Sequence: Synthetic oligonucleotide
  Target: PCSK9; (+) strand; PAM type: NNGRRT; PAM sequence: GAGAAT
accccagtgcctgcttcttg

SEQ ID NO: 6284 - DNA, 20 bp, Artificial Sequence
  Description of Artificial Sequence: Synthetic oligonucleotide
  Target: PCSK9; (+) strand; PAM type: NNGRRT; PAM sequence: AGGGAT
gaatccaaactgatccagtt

SEQ ID NO: 6285 - DNA, 20 bp, Artificial Sequence
  Description of Artificial Sequence: Synthetic oligonucleotide
  Target: PCSK9; (+) strand; PAM type: NNGRRT; PAM sequence: TAGGGT
cagttagggatgataaagtg

SEQ ID NO: 6286 - DNA, 20 bp, Artificial Sequence
  Description of Artificial Sequence: Synthetic oligonucleotide
  Target: PCSK9; (+) strand; PAM type: NNGRRT; PAM sequence: TGGAGT
tgagccctcctggtatcttg

SEQ ID NO: 6287 - DNA, 20 bp, Artificial Sequence
  Description of Artificial Sequence: Synthetic oligonucleotide
  Target: PCSK9; (+) strand; PAM type: NNGRRT; PAM sequence: TTGAGT
gacatcactgttattctcct

SEQ ID NO: 6288 - DNA, 20 bp, Artificial Sequence
  Description of Artificial Sequence: Synthetic oligonucleotide
  Target: PCSK9; (+) strand; PAM type: NNGRRT; PAM sequence: CAGGAT
ttgatattcatatgaaggag

SEQ ID NO: 6289 - DNA, 20 bp, Artificial Sequence
  Description of Artificial Sequence: Synthetic oligonucleotide
  Target: PCSK9; (+) strand; PAM type: NNGRRT; PAM sequence: TTGGGT
atatgaaggagcaggatgac

SEQ ID NO: 6290 - DNA, 20 bp, Artificial Sequence
  Description of Artificial Sequence: Synthetic oligonucleotide
  Target: PCSK9; (+) strand; PAM type: NNGRRT; PAM sequence: TAGAAT
cttgtctatgaaatacatta

SEQ ID NO: 6291 - DNA, 20 bp, Artificial Sequence
  Description of Artificial Sequence: Synthetic oligonucleotide
  Target: PCSK9; (+) strand; PAM type: NNGRRT; PAM sequence: TAGGAT
ctatgaaatacattatagaa

SEQ ID NO: 6292 - DNA, 20 bp, Artificial Sequence
  Description of Artificial Sequence: Synthetic oligonucleotide
  Target: PCSK9; (+) strand; PAM type: NNGRRT; PAM sequence: GAGGAT
tagaataggatgtagtgtgt

SEQ ID NO: 6293 - DNA, 20 bp, Artificial Sequence
  Description of Artificial Sequence: Synthetic oligonucleotide
  Target: PCSK9; (+) strand; PAM type: NNGRRT; PAM sequence: ACGAGT
gaggattttttggaggttaa

SEQ ID NO: 6294 - DNA, 20 bp, Artificial Sequence
  Description of Artificial Sequence: Synthetic oligonucleotide
  Target: PCSK9; (+) strand; PAM type: NNGRRT; PAM sequence: GTGAAT
attttttggaggttaaacga

SEQ ID NO: 6295 - DNA, 20 bp, Artificial Sequence
  Description of Artificial Sequence: Synthetic oligonucleotide
  Target: PCSK9; (+) strand; PAM type: NNGRRT; PAM sequence: TGGGAT
aaggcgctttcaccagtgcc

SEQ ID NO: 6296 - DNA, 20 bp, Artificial Sequence
  Description of Artificial Sequence: Synthetic oligonucleotide
  Target: PCSK9; (+) strand; PAM type: NNGRRT; PAM sequence: CAGAGT
atctcctagacaccagcata

SEQ ID NO: 6297 - DNA, 20 bp, Artificial Sequence
  Description of Artificial Sequence: Synthetic oligonucleotide
  Target: PCSK9; (+) strand; PAM type: NNGRRT; PAM sequence: CAGGGT
gaccaccgggaaatcgaggg

SEQ ID NO: 6298 - DNA, 20 bp, Artificial Sequence
  Description of Artificial Sequence: Synthetic oligonucleotide
  Target: PCSK9; (+) strand; PAM type: NNGRRT; PAM sequence: GAGAAT
gggtcatggtcaccgacttc

SEQ ID NO: 6299 - DNA, 20 bp, Artificial Sequence
  Description of Artificial Sequence: Synthetic oligonucleotide
  Target: PCSK9; (+) strand; PAM type: NNGRRT; PAM sequence: GTGGGT
cccatatccccatcctggag

SEQ ID NO: 6300 - DNA, 20 bp, Artificial Sequence
  Description of Artificial Sequence: Synthetic oligonucleotide
  Target: PCSK9; (+) strand; PAM type: NNGRRT; PAM sequence: CTGGGT
agagcgttgcagctgtactc

SEQ ID NO: 6301 - DNA, 20 bp, Artificial Sequence
  Description of Artificial Sequence: Synthetic oligonucleotide
  Target: PCSK9; (+) strand; PAM type: NNGRRT; PAM sequence: TAGGGT
agccacctgctgatttgtta

SEQ ID NO: 6302 - DNA, 20 bp, Artificial Sequence
  Description of Artificial Sequence: Synthetic oligonucleotide
  Target: PCSK9; (+) strand; PAM type: NNGRRT; PAM sequence: GGGGGT
gatttgttatagggtggagg

SEQ ID NO: 6303 - DNA, 20 bp, Artificial Sequence
  Description of Artificial Sequence: Synthetic oligonucleotide
  Target: PCSK9; (+) strand; PAM type: NNGRRT; PAM sequence: AGGGGT
agtcatggcacccacctggc

SEQ ID NO: 6304 - DNA, 20 bp, Artificial Sequence
  Description of Artificial Sequence: Synthetic oligonucleotide
  Target: PCSK9; (+) strand; PAM type: NNGRRT; PAM sequence: CGGGAT
tggcaggggtggtcagcggc

SEQ ID NO: 6305 - DNA, 20 bp, Artificial Sequence
  Description of Artificial Sequence: Synthetic oligonucleotide
  Target: PCSK9; (+) strand; PAM type: NNGRRT; PAM sequence: AAGGGT
gccgggatgccggcgtggcc

SEQ ID NO: 6306 - DNA, 20 bp, Artificial Sequence
  Description of Artificial Sequence: Synthetic oligonucleotide
  Target: PCSK9; (+) strand; PAM type: NNGRRT; PAM sequence: AAGAAT
agagctaatgtctcctaacc

SEQ ID NO: 6307 - DNA, 20 bp, Artificial Sequence
  Description of Artificial Sequence: Synthetic oligonucleotide
  Target: PCSK9; (+) strand; PAM type: NNGRRT; PAM sequence: CAGAGT
ctgccgcagagccagagaac

SEQ ID NO: 6308 - DNA, 20 bp, Artificial Sequence
  Description of Artificial Sequence: Synthetic oligonucleotide
  Target: PCSK9; (+) strand; PAM type: NNGRRT; PAM sequence: CAGGGT
aaccagagtgccaaggctgg

SEQ ID NO: 6309 - DNA, 20 bp, Artificial Sequence
  Description of Artificial Sequence: Synthetic oligonucleotide
  Target: PCSK9; (+) strand; PAM type: NNGRRT; PAM sequence: ACGAGT
tggcagggttcccagtggcc

SEQ ID NO: 6310 - DNA, 20 bp, Artificial Sequence
  Description of Artificial Sequence: Synthetic oligonucleotide
  Target: PCSK9; (+) strand; PAM type: NNGRRT; PAM sequence: GAGGGT
tgaagaaacccaggccccaa

SEQ ID NO: 6311 - DNA, 20 bp, Artificial Sequence
  Description of Artificial Sequence: Synthetic oligonucleotide
  Target: PCSK9; (+) strand; PAM type: NNGRRT; PAM sequence: GGGAGT
agggtcatgcaggtagccca

SEQ ID NO: 6312 - DNA, 20 bp, Artificial Sequence
  Description of Artificial Sequence: Synthetic oligonucleotide
  Target: PCSK9; (+) strand; PAM type: NNGRRT; PAM sequence: CTGGGT
cagggagttcagccttgacc

SEQ ID NO: 6313 - DNA, 20 bp, Artificial Sequence
  Description of Artificial Sequence: Synthetic oligonucleotide
  Target: PCSK9; (+) strand; PAM type: NNGRRT; PAM sequence: GAGGGT
gccggtggacagagaagagg

SEQ ID NO: 6314 - DNA, 20 bp, Artificial Sequence
  Description of Artificial Sequence: Synthetic oligonucleotide
  Target: PCSK9; (+) strand; PAM type: NNGRRT; PAM sequence: CAGGGT
cagagaggggaggtgactgc

SEQ ID NO: 6315 - DNA, 20 bp, Artificial Sequence
  Description of Artificial Sequence: Synthetic oligonucleotide
  Target: PCSK9; (+) strand; PAM type: NNGRRT; PAM sequence: CAGGGT
ccactgtaagccccagcccc

SEQ ID NO: 6316 - DNA, 20 bp, Artificial Sequence
  Description of Artificial Sequence: Synthetic oligonucleotide
  Target: PCSK9; (+) strand; PAM type: NNGRRT; PAM sequence: AGGAGT
ttcaaaggctgagaaggccc

SEQ ID NO: 6317 - DNA, 20 bp, Artificial Sequence
  Description of Artificial Sequence: Synthetic oligonucleotide
  Target: PCSK9; (+) strand; PAM type: NNGRRT; PAM sequence: CAGAGT
tctgccctgagactttccta

SEQ ID NO: 6318 - DNA, 20 bp, Artificial Sequence
  Description of Artificial Sequence: Synthetic oligonucleotide
  Target: PCSK9; (+) strand; PAM type: NNGRRT; PAM sequence: AAGAAT
tgatgttcagttttaaaggc

SEQ ID NO: 6319 - DNA, 20 bp, Artificial Sequence
  Description of Artificial Sequence: Synthetic oligonucleotide
  Target: PCSK9; (+) strand; PAM type: NNGRRT; PAM sequence: TGGGGT
tcctggagaagtcccttctt

SEQ ID NO: 6320 - DNA, 20 bp, Artificial Sequence
  Description of Artificial Sequence: Synthetic oligonucleotide
  Target: PCSK9; (+) strand; PAM type: NNGRRT; PAM sequence: AGGAGT
tgggcagatcacctgaggtc

SEQ ID NO: 6321 - DNA, 20 bp, Artificial Sequence
  Description of Artificial Sequence: Synthetic oligonucleotide
  Target: PCSK9; (+) strand; PAM type: NNGRRT; PAM sequence: GTGGGT
aaaattagccaggcatggtg

SEQ ID NO: 6322 - DNA, 20 bp, Artificial Sequence
  Description of Artificial Sequence: Synthetic oligonucleotide
  Target: PCSK9; (+) strand; PAM type: NNGRRT; PAM sequence: GAGAAT
tacttgggaggctaaggcag

SEQ ID NO: 6323 - DNA, 20 bp, Artificial Sequence
  Description of Artificial Sequence: Synthetic oligonucleotide
  Target: PCSK9; (+) strand; PAM type: NNGRRT; PAM sequence: CTGAGT
tcgtgccactgcaatccagc

SEQ ID NO: 6324 - DNA, 20 bp, Artificial Sequence
  Description of Artificial Sequence: Synthetic oligonucleotide
  Target: PCSK9; (+) strand; PAM type: NNGRRT; PAM sequence: CAGGAT
cctggagacatcttagaggc

SEQ ID NO: 6325 - DNA, 20 bp, Artificial Sequence
  Description of Artificial Sequence: Synthetic oligonucleotide
  Target: PCSK9; (+) strand; PAM type: NNGRRT; PAM sequence: GAGGGT
ccagagctcacaggctggca

SEQ ID NO: 6326 - DNA, 20 bp, Artificial Sequence
  Description of Artificial Sequence: Synthetic oligonucleotide
  Target: PCSK9; (+) strand; PAM type: NNGRRT; PAM sequence: CTGGGT
gttagaactgttactggtgg

SEQ ID NO: 6327 - DNA, 20 bp, Artificial Sequence
  Description of Artificial Sequence: Synthetic oligonucleotide
  Target: PCSK9; (+) strand; PAM type: NNGRRT; PAM sequence: GAGGAT
actttgggagggcaaggcgg

SEQ ID NO: 6328 - DNA, 20 bp, Artificial Sequence
  Description of Artificial Sequence: Synthetic oligonucleotide
  Target: PCSK9; (+) strand; PAM type: NNGRRT; PAM sequence: GAGAAT
tactcaggaggctgaggcag

SEQ ID NO: 6329 - DNA, 20 bp, Artificial Sequence
  Description of Artificial Sequence: Synthetic oligonucleotide
  Target: PCSK9; (+) strand; PAM type: NNGRRT; PAM sequence: GGGAGT
catggcctgcaccaaaatgg

SEQ ID NO: 6330 - DNA, 20 bp, Artificial Sequence
  Description of Artificial Sequence: Synthetic oligonucleotide
  Target: PCSK9; (+) strand; PAM type: NNGRRT; PAM sequence: TGGAGT
cctgcaccaaaatgggggag

SEQ ID NO: 6331 - DNA, 20 bp, Artificial Sequence
  Description of Artificial Sequence: Synthetic oligonucleotide
  Target: PCSK9; (+) strand; PAM type: NNGRRT; PAM sequence: AAGGGT
ccagaaggaaccacaccctc

SEQ ID NO: 6332 - DNA, 20 bp, Artificial Sequence
  Description of Artificial Sequence: Synthetic oligonucleotide
  Target: PCSK9; (+) strand; PAM type: NNGRRT; PAM sequence: GGGAGT
gaaccacaccctcaagggtg

SEQ ID NO: 6333 - DNA, 20 bp, Artificial Sequence
  Description of Artificial Sequence: Synthetic oligonucleotide
  Target: PCSK9; (+) strand; PAM type: NNGRRT; PAM sequence: GGGGGT
gggtggggagttatggtatg

SEQ ID NO: 6334 - DNA, 20 bp, Artificial Sequence
  Description of Artificial Sequence: Synthetic oligonucleotide
  Target: PCSK9; (+) strand; PAM type: NNGRRT; PAM sequence: TGGAGT
ggtatggggggtcctaggca

SEQ ID NO: 6335 - DNA, 20 bp, Artificial Sequence
  Description of Artificial Sequence: Synthetic oligonucleotide
  Target: PCSK9; (+) strand; PAM type: NNGRRT; PAM sequence: GTGAGT
agggcggggccacacagctg

SEQ ID NO: 6336 - DNA, 20 bp, Artificial Sequence
  Description of Artificial Sequence: Synthetic oligonucleotide
  Target: PCSK9; (+) strand; PAM type: NNGRRT; PAM sequence: GTGGGT
aagactctgttcaagtttgt

SEQ ID NO: 6337 - DNA, 20 bp, Artificial Sequence
  Description of Artificial Sequence: Synthetic oligonucleotide
  Target: PCSK9; (+) strand; PAM type: NNGRRT; PAM sequence: GAGAGT
ggcatctgagccaggcctca

SEQ ID NO: 6338 - DNA, 20 bp, Artificial Sequence
  Description of Artificial Sequence: Synthetic oligonucleotide
  Target: PCSK9; (+) strand; PAM type: NNGRRT; PAM sequence: TTGGGT
tcagagagtggcgggggaag

SEQ ID NO: 6339 - DNA, 20 bp, Artificial Sequence
  Description of Artificial Sequence: Synthetic oligonucleotide
  Target: PCSK9; (+) strand; PAM type: NNGRRT; PAM sequence: AGGGAT
ggtgcctctctttcatggaa

SEQ ID NO: 6340 - DNA, 20 bp, Artificial Sequence
  Description of Artificial Sequence: Synthetic oligonucleotide
  Target: PCSK9; (+) strand; PAM type: NNGRRT; PAM sequence: GAGGAT
agggataataaggttattgt

SEQ ID NO: 6341 - DNA, 20 bp, Artificial Sequence
  Description of Artificial Sequence: Synthetic oligonucleotide
  Target: PCSK9; (+) strand; PAM type: NNGRRT; PAM sequence: CTGAGT
aaggttattgtgaggatccc

SEQ ID NO: 6342 - DNA, 20 bp, Artificial Sequence
  Description of Artificial Sequence: Synthetic oligonucleotide
  Target: PCSK9; (+) strand; PAM type: NNGRRT; PAM sequence: CGGGGT
gccaggcacagagaagggcc

SEQ ID NO: 6343 - DNA, 20 bp, Artificial Sequence
  Description of Artificial Sequence: Synthetic oligonucleotide
  Target: PCSK9; (+) strand; PAM type: NNGRRT; PAM sequence: TAGGAT
ctgcagagaagcagaaccag

SEQ ID NO: 6344 - DNA, 20 bp, Artificial Sequence
  Description of Artificial Sequence: Synthetic oligonucleotide
  Target: PCSK9; (+) strand; PAM type: NNGRRT; PAM sequence: AAGAGT
accagtaggatgtatatatt

SEQ ID NO: 6345 - DNA, 20 bp, Artificial Sequence
  Description of Artificial Sequence: Synthetic oligonucleotide
  Target: PCSK9; (+) strand; PAM type: NNGRRT; PAM sequence: CAGAAT
aggcaggctggcaattcctg

SEQ ID NO: 6346 - DNA, 20 bp, Artificial Sequence
  Description of Artificial Sequence: Synthetic oligonucleotide
  Target: PCSK9; (+) strand; PAM type: NNGRRT; PAM sequence: CTGAGT
cagaatttgatgttgcaata

SEQ ID NO: 6347 - DNA, 20 bp, Artificial Sequence
  Description of Artificial Sequence: Synthetic oligonucleotide
  Target: PCSK9; (+) strand; PAM type: NNGRRT; PAM sequence: CAGAAT
gtcctaaggcagtcctgggg

SEQ ID NO: 6348 - DNA, 20 bp, Artificial Sequence
  Description of Artificial Sequence: Synthetic oligonucleotide
  Target: PCSK9; (+) strand; PAM type: NNGRRT; PAM sequence: GAGAGT
tgaggcctgcccaagttata

SEQ ID NO: 6349 - DNA, 20 bp, Artificial Sequence
  Description of Artificial Sequence: Synthetic oligonucleotide
  Target: PCSK9; (+) strand; PAM type: NNGRRT; PAM sequence: AGGGGT
aaggggagcaggtctcccca

SEQ ID NO: 6350 - DNA, 20 bp, Artificial Sequence
  Description of Artificial Sequence: Synthetic oligonucleotide
  Target: PCSK9; (+) strand; PAM type: NNGRRT; PAM sequence: TGGAGT
ggctttgttcctcccaggcc

SEQ ID NO: 6351 - DNA, 20 bp, Artificial Sequence
  Description of Artificial Sequence: Synthetic oligonucleotide
  Target: PCSK9; (+) strand; PAM type: NNGRRT; PAM sequence: GCGGGT
tggtggtgctgctgcccctg

SEQ ID NO: 6352 - DNA, 20 bp, Artificial Sequence
  Description of Artificial Sequence: Synthetic oligonucleotide
  Target: PCSK9; (+) strand; PAM type: NNGRRT; PAM sequence: GTGGGT
ggtgctgctgcccctggcgg

SEQ ID NO: 6353 - DNA, 20 bp, Artificial Sequence
  Description of Artificial Sequence: Synthetic oligonucleotide
  Target: PCSK9; (+) strand; PAM type: NNGRRT; PAM sequence: TGGGGT
tgccagcgcctggcgagggc

SEQ ID NO: 6354 - DNA, 20 bp, Artificial Sequence
  Description of Artificial Sequence: Synthetic oligonucleotide
  Target: PCSK9; (+) strand; PAM type: NNGRRT; PAM sequence: GCGGGT
tggggctgctgccccaaggc

SEQ ID NO: 6355 - DNA, 20 bp, Artificial Sequence
  Description of Artificial Sequence: Synthetic oligonucleotide
  Target: PCSK9; (+) strand; PAM type: NNGRRT; PAM sequence: AGGAGT
cgaacccttctggctttgga

SEQ ID NO: 6356 - DNA, 20 bp, Artificial Sequence
  Description of Artificial Sequence: Synthetic oligonucleotide
  Target: PCSK9; (+) strand; PAM type: NNGRRT; PAM sequence: CAGAGT
gctcgaaacctccatcatcg

SEQ ID NO: 6357 - DNA, 20 bp, Artificial Sequence
  Description of Artificial Sequence: Synthetic oligonucleotide
  Target: PCSK9; (+) strand; PAM type: NNGRRT; PAM sequence: CTGAAT
aacctccatcatcgcagagt

SEQ ID NO: 6358 - DNA, 20 bp, Artificial Sequence
  Description of Artificial Sequence: Synthetic oligonucleotide
  Target: PCSK9; (+) strand; PAM type: NNGRRT; PAM sequence: GTGAAT
acaacttgagcaaggctaat

SEQ ID NO: 6359 - DNA, 20 bp, Artificial Sequence
  Description of Artificial Sequence: Synthetic oligonucleotide
  Target: PCSK9; (+) strand; PAM type: NNGRRT; PAM sequence: CAGAGT
tctcacccgaggaacatcca

SEQ ID NO: 6360 - DNA, 20 bp, Artificial Sequence
  Description of Artificial Sequence: Synthetic oligonucleotide
  Target: PCSK9; (+) strand; PAM type: NNGRRT; PAM sequence: GCGGGT
tcctccagtgtcaggacact

SEQ ID NO: 6361 - DNA, 20 bp, Artificial Sequence
  Description of Artificial Sequence: Synthetic oligonucleotide
  Target: PCSK9; (+) strand; PAM type: NNGRRT; PAM sequence: AGGAAT
cactgcgggtatctagggga

SEQ ID NO: 6362 - DNA, 20 bp, Artificial Sequence
  Description of Artificial Sequence: Synthetic oligonucleotide
  Target: PCSK9; (+) strand; PAM type: NNGRRT; PAM sequence: GGGGGT
tgcgtgcgcgcgcgcgcgtt

SEQ ID NO: 6363 - DNA, 20 bp, Artificial Sequence
  Description of Artificial Sequence: Synthetic oligonucleotide
  Target: PCSK9; (+) strand; PAM type: NNGRRT; PAM sequence: GGGGGT
cgcgcgcgcgcgttgggggt

SEQ ID NO: 6364 - DNA, 20 bp, Artificial Sequence
  Description of Artificial Sequence: Synthetic oligonucleotide
  Target: PCSK9; (+) strand; PAM type: NNGRRT; PAM sequence: CCGAAT
tatcaaggcttccctggcgg

SEQ ID NO: 6365 - DNA, 20 bp, Artificial Sequence
  Description of Artificial Sequence: Synthetic oligonucleotide
  Target: PCSK9; (+) strand; PAM type: NNGRRT; PAM sequence: CCGAAT
acttagaaccacttgataca

SEQ ID NO: 6366 - DNA, 20 bp, Artificial Sequence
  Description of Artificial Sequence: Synthetic oligonucleotide
  Target: PCSK9; (+) strand; PAM type: NNGRRT; PAM sequence: TAGGAT
tagtttcctatctcccccac

SEQ ID NO: 6367 - DNA, 20 bp, Artificial Sequence
  Description of Artificial Sequence: Synthetic oligonucleotide
  Target: PCSK9; (+) strand; PAM type: NNGRRT; PAM sequence: GGGAAT
gtaaactccacaggggcatt

SEQ ID NO: 6368 - DNA, 20 bp, Artificial Sequence
  Description of Artificial Sequence: Synthetic oligonucleotide
  Target: PCSK9; (+) strand; PAM type: NNGRRT; PAM sequence: AGGGGT
ggggagcaccagggcggggc

SEQ ID NO: 6369 - DNA, 20 bp, Artificial Sequence
  Description of Artificial Sequence: Synthetic oligonucleotide
  Target: PCSK9; (+) strand; PAM type: NNGRRT; PAM sequence: CAGAGT
ccagggcggggcaggggtgc

SEQ ID NO: 6370 - DNA, 20 bp, Artificial Sequence
  Description of Artificial Sequence: Synthetic oligonucleotide
  Target: PCSK9; (+) strand; PAM type: NNGRRT; PAM sequence: TTGAGT
ttttccttaggaggggacat

SEQ ID NO: 6371 - DNA, 20 bp, Artificial Sequence
  Description of Artificial Sequence: Synthetic oligonucleotide
  Target: PCSK9; (+) strand; PAM type: NNGRRT; PAM sequence: CTGAGT
tccagcccagctggcaaggc

SEQ ID NO: 6372 - DNA, 20 bp, Artificial Sequence
  Description of Artificial Sequence: Synthetic oligonucleotide
  Target: PCSK9; (+) strand; PAM type: NNGRRT; PAM sequence: CAGAGT
gcagcacctgctttgtgtca

SEQ ID NO: 6373 - DNA, 20 bp, Artificial Sequence
  Description of Artificial Sequence: Synthetic oligonucleotide
  Target: PCSK9; (+) strand; PAM type: NNGRRT; PAM sequence: CAGGGT
ctaacagcccctttggcagt

SEQ ID NO: 6374 - DNA, 20 bp, Artificial Sequence
  Description of Artificial Sequence: Synthetic oligonucleotide
  Target: PCSK9; (+) strand; PAM type: NNGRRT; PAM sequence: GCGAGT
cactcagtctgatgagggag

SEQ ID NO: 6375 - DNA, 20 bp, Artificial Sequence
  Description of Artificial Sequence: Synthetic oligonucleotide
  Target: PCSK9; (+) strand; PAM type: NNGRRT; PAM sequence: GAGGGT
aggaggcacctgcccagccc

SEQ ID NO: 6376 - DNA, 20 bp, Artificial Sequence
  Description of Artificial Sequence: Synthetic oligonucleotide
  Target: PCSK9; (+) strand; PAM type: NNGRRT; PAM sequence: ATGGAT
gacatttgatcgggagcttg

SEQ ID NO: 6377 - DNA, 20 bp, Artificial Sequence
  Description of Artificial Sequence: Synthetic oligonucleotide
  Target: PCSK9; (+) strand; PAM type: NNGRRT; PAM sequence: ATGAAT
tttgatcgggagcttgatgg

SEQ ID NO: 6378 - DNA, 20 bp, Artificial Sequence
  Description of Artificial Sequence: Synthetic oligonucleotide
  Target: PCSK9; (+) strand; PAM type: NNGRRT; PAM sequence: AGGAGT
cgggagcttgatggatgaat

SEQ ID NO: 6379 - DNA, 20 bp, Artificial Sequence
  Description of Artificial Sequence: Synthetic oligonucleotide
  Target: PCSK9; (+) strand; PAM type: NNGRRT; PAM sequence: CTGAGT
gaggaggctgtcttacctca

SEQ ID NO: 6380 - DNA, 20 bp, Artificial Sequence
  Description of Artificial Sequence: Synthetic oligonucleotide
  Target: PCSK9; (+) strand; PAM type: NNGRRT; PAM sequence: AGGAGT
gtgtgcgtgtgtgcactggc

SEQ ID NO: 6381 - DNA, 20 bp, Artificial Sequence
  Description of Artificial Sequence: Synthetic oligonucleotide
  Target: PCSK9; (+) strand; PAM type: NNGRRT; PAM sequence: CCGAGT
cgagccggagctcaccctgg

SEQ ID NO: 6382 - DNA, 20 bp, Artificial Sequence
  Description of Artificial Sequence: Synthetic oligonucleotide
  Target: PCSK9; (+) strand; PAM type: NNGRRT; PAM sequence: GCGGGT
gcctggttccctgaggacca

SEQ ID NO: 6383 - DNA, 20 bp, Artificial Sequence
  Description of Artificial Sequence: Synthetic oligonucleotide
  Target: PCSK9; (+) strand; PAM type: NNGRRT; PAM sequence: CAGGAT
gcacccatggggcaggtaag

SEQ ID NO: 6384 - DNA, 20 bp, Artificial Sequence
  Description of Artificial Sequence: Synthetic oligonucleotide
  Target: PCSK9; (+) strand; PAM type: NNGRRT; PAM sequence: CAGGGT
ggggcaggtaagcaggatgg

SEQ ID NO: 6385 - DNA, 20 bp, Artificial Sequence
  Description of Artificial Sequence: Synthetic oligonucleotide
  Target: PCSK9; (+) strand; PAM type: NNGRRT; PAM sequence: GAGGAT
ttctcccttgtctgtgtaag

SEQ ID NO: 6386 - DNA, 20 bp, Artificial Sequence
  Description of Artificial Sequence: Synthetic oligonucleotide
  Target: PCSK9; (+) strand; PAM type: NNGRRT; PAM sequence: TAGGAT
gaggatgacgccaccttaaa

SEQ ID NO: 6387 - DNA, 20 bp, Artificial Sequence
  Description of Artificial Sequence: Synthetic oligonucleotide
  Target: PCSK9; (+) strand; PAM type: NNGRRT; PAM sequence: GAGAAT
caccttaaataggattaaat

SEQ ID NO: 6388 - DNA, 20 bp, Artificial Sequence
  Description of Artificial Sequence: Synthetic oligonucleotide
  Target: PCSK9; (+) strand; PAM type: NNGRRT; PAM sequence: TTGAGT
acgtgtttttatagagacag

SEQ ID NO: 6389 - DNA, 20 bp, Artificial Sequence
  Description of Artificial Sequence: Synthetic oligonucleotide
  Target: PCSK9; (+) strand; PAM type: NNGRRT; PAM sequence: ACGGAT
tcagcacactcggggcctac

SEQ ID NO: 6390 - DNA, 20 bp, Artificial Sequence
  Description of Artificial Sequence: Synthetic oligonucleotide
  Target: PCSK9; (+) strand; PAM type: NNGRRT; PAM sequence: AGGAGT
tgagctgctccagtttctcc

SEQ ID NO: 6391 - DNA, 20 bp, Artificial Sequence
  Description of Artificial Sequence: Synthetic oligonucleotide
  Target: PCSK9; (+) strand; PAM type: NNGRRT; PAM sequence: AGGAGT
cttacagggctggccagacc

SEQ ID NO: 6392 - DNA, 20 bp, Artificial Sequence
  Description of Artificial Sequence: Synthetic oligonucleotide
  Target: PCSK9; (+) strand; PAM type: NNGRRT; PAM sequence: AAGGGT
ctggagagagccacagcggg

SEQ ID NO: 6393 - DNA, 20 bp, Artificial Sequence
  Description of Artificial Sequence: Synthetic oligonucleotide
  Target: PCSK9; (+) strand; PAM type: NNGRRT; PAM sequence: CTGGAT
ctagaggctgcaggacagtg

SEQ ID NO: 6394 - DNA, 20 bp, Artificial Sequence
  Description of Artificial Sequence: Synthetic oligonucleotide
  Target: PCSK9; (+) strand; PAM type: NNGRRT; PAM sequence: ATGGAT
aggctgcaggacagtgctgg

SEQ ID NO: 6395 - DNA, 20 bp, Artificial Sequence
  Description of Artificial Sequence: Synthetic oligonucleotide
  Target: PCSK9; (+) strand; PAM type: NNGRRT; PAM sequence: CTGGGT
gatggattttcaatgctcac

SEQ ID NO: 6396 - DNA, 20 bp, Artificial Sequence
  Description of Artificial Sequence: Synthetic oligonucleotide
  Target: PCSK9; (+) strand; PAM type: NNGRRT; PAM sequence: GAGGGT
agcgtgcggcagggccgcgt

SEQ ID NO: 6397 - DNA, 20 bp, Artificial Sequence
  Description of Artificial Sequence: Synthetic oligonucleotide
  Target: PCSK9; (+) strand; PAM type: NNGRRT; PAM sequence: TGGAAT
atctcaaaccagcaaaaaag

SEQ ID NO: 6398 - DNA, 20 bp, Artificial Sequence
  Description of Artificial Sequence: Synthetic oligonucleotide
  Target: PCSK9; (+) strand; PAM type: NNGRRT; PAM sequence: CAGGAT
tggaattgatgttgatgcta

SEQ ID NO: 6399 - DNA, 20 bp, Artificial Sequence
  Description of Artificial Sequence: Synthetic oligonucleotide
  Target: PCSK9; (+) strand; PAM type: NNGRRT; PAM sequence: GAGAGT
gaagggcagtgcccagctag

SEQ ID NO: 6400 - DNA, 20 bp, Artificial Sequence
  Description of Artificial Sequence: Synthetic oligonucleotide
  Target: PCSK9; (+) strand; PAM type: NNGRRT; PAM sequence: TGGGGT
gcatttctggcttgaggaga

SEQ ID NO: 6401 - DNA, 20 bp, Artificial Sequence
  Description of Artificial Sequence: Synthetic oligonucleotide
  Target: PCSK9; (+) strand; PAM type: NNGRRT; PAM sequence: CAGAGT
cttaatgctcgtgtgagagg

SEQ ID NO: 6402 - DNA, 20 bp, Artificial Sequence
  Description of Artificial Sequence: Synthetic oligonucleotide
  Target: PCSK9; (+) strand; PAM type: NNGRRT; PAM sequence: GTGGGT
atgctcgtgtgagaggcaga

SEQ ID NO: 6403 - DNA, 20 bp, Artificial Sequence
  Description of Artificial Sequence: Synthetic oligonucleotide
  Target: PCSK9; (+) strand; PAM type: NNGRRT; PAM sequence: TGGAGT
cgtgtgagaggcagagtggg

SEQ ID NO: 6404 - DNA, 20 bp, Artificial Sequence
  Description of Artificial Sequence: Synthetic oligonucleotide
  Target: PCSK9; (+) strand; PAM type: NNGRRT; PAM sequence: CTGGAT
agtgggtggagtggagctgg

SEQ ID NO: 6405 - DNA, 20 bp, Artificial Sequence
  Description of Artificial Sequence: Synthetic oligonucleotide
  Target: PCSK9; (+) strand; PAM type: NNGRRT; PAM sequence: CTGGAT
tggatccttgctttggcctc

SEQ ID NO: 6406 - DNA, 20 bp, Artificial Sequence
  Description of Artificial Sequence: Synthetic oligonucleotide
  Target: PCSK9; (+) strand; PAM type: NNGRRT; PAM sequence: TTGAGT
ctctgtgtttggaagaactt

SEQ ID NO: 6407 - DNA, 20 bp, Artificial Sequence
  Description of Artificial Sequence: Synthetic oligonucleotide
  Target: PCSK9; (+) strand; PAM type: NNGRRT; PAM sequence: AGGAGT
cagaacagtcttccttgggc

SEQ ID NO: 6408 - DNA, 20 bp, Artificial Sequence
  Description of Artificial Sequence: Synthetic oligonucleotide
  Target: PCSK9; (+) strand; PAM type: NNGRRT; PAM sequence: CTGGGT
agctccttgtccccagaagg

SEQ ID NO: 6409 - DNA, 20 bp, Artificial Sequence
  Description of Artificial Sequence: Synthetic oligonucleotide
  Target: PCSK9; (+) strand; PAM type: NNGRRT; PAM sequence: GAGGGT
cccctggcagggacactgat

SEQ ID NO: 6410 - DNA, 20 bp, Artificial Sequence
  Description of Artificial Sequence: Synthetic oligonucleotide
  Target: PCSK9; (+) strand; PAM type: NNGRRT; PAM sequence: TTGAGT
agggacactgatgagggtgc

SEQ ID NO: 6411 - DNA, 20 bp, Artificial Sequence
  Description of Artificial Sequence: Synthetic oligonucleotide
  Target: PCSK9; (+) strand; PAM type: NNGRRT; PAM sequence: GGGGGT
gccgggcccacaacgctttt

SEQ ID NO: 6412 - DNA, 20 bp, Artificial Sequence
  Description of Artificial Sequence: Synthetic oligonucleotide
  Target: PCSK9; (+) strand; PAM type: NNGRRT; PAM sequence: GAGGGT
cccacaacgcttttgggggt

SEQ ID NO: 6413 - DNA, 20 bp, Artificial Sequence
  Description of Artificial Sequence: Synthetic oligonucleotide
  Target: PCSK9; (+) strand; PAM type: NNGRRT; PAM sequence: TGGGGT
gtaggaggctgggcttgccc

SEQ ID NO: 6414 - DNA, 20 bp, Artificial Sequence
  Description of Artificial Sequence: Synthetic oligonucleotide
  Target: PCSK9; (+) strand; PAM type: NNGRRT; PAM sequence: AGGGGT
gggcttgccctggggtgagg

SEQ ID NO: 6415 - DNA, 20 bp, Artificial Sequence
  Description of Artificial Sequence: Synthetic oligonucleotide
  Target: PCSK9; (+) strand; PAM type: NNGRRT; PAM sequence: TGGAGT
cagcatctagggcactggcc

SEQ ID NO: 6416 - DNA, 20 bp, Artificial Sequence
  Description of Artificial Sequence: Synthetic oligonucleotide
  Target: PCSK9; (+) strand; PAM type: NNGRRT; PAM sequence: TTGAAT
aaaggagggcagacctcggt

SEQ ID NO: 6417 - DNA, 20 bp, Artificial Sequence
  Description of Artificial Sequence: Synthetic oligonucleotide
  Target: PCSK9; (+) strand; PAM type: NNGRRT; PAM sequence: ATGAGT
catctctgtatgaggaaatg

SEQ ID NO: 6418 - DNA, 20 bp, Artificial Sequence
  Description of Artificial Sequence: Synthetic oligonucleotide
  Target: PCSK9; (+) strand; PAM type: NNGRRT; PAM sequence: AGGGAT
ggggacctcttggggcatca

SEQ ID NO: 6419 - DNA, 20 bp, Artificial Sequence
  Description of Artificial Sequence: Synthetic oligonucleotide
  Target: PCSK9; (+) strand; PAM type: NNGRRT; PAM sequence: TTGGGT
ctgaggctgagctgttctgg

SEQ ID NO: 6420 - DNA, 20 bp, Artificial Sequence
  Description of Artificial Sequence: Synthetic oligonucleotide
  Target: PCSK9; (+) strand; PAM type: NNGRRT; PAM sequence: TGGAAT
aagacagtgggactccagcc

SEQ ID NO: 6421 - DNA, 20 bp, Artificial Sequence
  Description of Artificial Sequence: Synthetic oligonucleotide
  Target: PCSK9; (+) strand; PAM type: NNGRRT; PAM sequence: CAGAGT
ccagcctggaataagaggct

SEQ ID NO: 6422 - DNA, 20 bp, Artificial Sequence
  Description of Artificial Sequence: Synthetic oligonucleotide
  Target: PCSK9; (+) strand; PAM type: NNGRRT; PAM sequence: GAGGGT
gcacgtccaggggaaccact

SEQ ID NO: 6423 - DNA, 20 bp, Artificial Sequence
  Description of Artificial Sequence: Synthetic oligonucleotide
  Target: PCSK9; (+) strand; PAM type: NNGRRT; PAM sequence: GAGAGT
cactgagggtttgggaacag

SEQ ID NO: 6424 - DNA, 20 bp, Artificial Sequence
  Description of Artificial Sequence: Synthetic oligonucleotide
  Target: PCSK9; (+) strand; PAM type: NNGRRT; PAM sequence: GAGGGT
gggtttgggaacaggagagt

SEQ ID NO: 6425 - DNA, 20 bp, Artificial Sequence
  Description of Artificial Sequence: Synthetic oligonucleotide
  Target: PCSK9; (+) strand; PAM type: NNGRRT; PAM sequence: TAGGAT
gggcacagcaggctggcatg

SEQ ID NO: 6426 - DNA, 20 bp, Artificial Sequence
  Description of Artificial Sequence: Synthetic oligonucleotide
  Target: PCSK9; (+) strand; PAM type: NNGRRT; PAM sequence: ATGGAT
acagcaggctggcatgtagg

SEQ ID NO: 6427 - DNA, 20 bp, Artificial Sequence
  Description of Artificial Sequence: Synthetic oligonucleotide
  Target: PCSK9; (+) strand; PAM type: NNGRRT; PAM sequence: AGGGGT
ggagaggctccgtcaggttc

SEQ ID NO: 6428 - DNA, 20 bp, Artificial Sequence
  Description of Artificial Sequence: Synthetic oligonucleotide
  Target: PCSK9; (+) strand; PAM type: NNGRRT; PAM sequence: TGGAAT
cacatgtcagtttgaagtca

SEQ ID NO: 6429 - DNA, 20 bp, Artificial Sequence
  Description of Artificial Sequence: Synthetic oligonucleotide
  Target: PCSK9; (+) strand; PAM type: NNGRRT; PAM sequence: CTGAGT
ggaactgcaggctggacatg

SEQ ID NO: 6430 - DNA, 20 bp, Artificial Sequence
  Description of Artificial Sequence: Synthetic oligonucleotide
  Target: PCSK9; (+) strand; PAM type: NNGRRT; PAM sequence: GAGAAT
gcccttgcagctaggacata

SEQ ID NO: 6431 - DNA, 20 bp, Artificial Sequence
  Description of Artificial Sequence: Synthetic oligonucleotide
  Target: PCSK9; (+) strand; PAM type: NNGRRT; PAM sequence: GTGAGT
gtcatcttcacagtgtccct

SEQ ID NO: 6432 - DNA, 20 bp, Artificial Sequence
  Description of Artificial Sequence: Synthetic oligonucleotide
  Target: PCSK9; (+) strand; PAM type: NNGRRT; PAM sequence: ATGAGT
tttctctttccatcttacaa

SEQ ID NO: 6433 - DNA, 20 bp, Artificial Sequence
  Description of Artificial Sequence: Synthetic oligonucleotide
  Target: PCSK9; (+) strand; PAM type: NNGRRT; PAM sequence: ATGGGT
tattttaggtttcttagcca

SEQ ID NO: 6434 - DNA, 20 bp, Artificial Sequence
  Description of Artificial Sequence: Synthetic oligonucleotide
  Target: PCSK9; (+) strand; PAM type: NNGRRT; PAM sequence: GGGAGT
ctgcatagggaggggctggg

SEQ ID NO: 6435 - DNA, 20 bp, Artificial Sequence
  Description of Artificial Sequence: Synthetic oligonucleotide
  Target: PCSK9; (+) strand; PAM type: NNGRRT; PAM sequence: CTGGGT
ctgcctcactgtctccatct

SEQ ID NO: 6436 - DNA, 20 bp, Artificial Sequence
  Description of Artificial Sequence: Synthetic oligonucleotide
  Target: PCSK9; (+) strand; PAM type: NNGRRT; PAM sequence: TTGAAT
gaaactaaggctcagagagg

SEQ ID NO: 6437 - DNA, 20 bp, Artificial Sequence
  Description of Artificial Sequence: Synthetic oligonucleotide
  Target: PCSK9; (+) strand; PAM type: NNGRRT; PAM sequence: CAGAGT
gtcacacagctggtcagctg

SEQ ID NO: 6438 - DNA, 20 bp, Artificial Sequence
  Description of Artificial Sequence: Synthetic oligonucleotide
  Target: PCSK9; (+) strand; PAM type: NNGRRT; PAM sequence: AGGAGT
agctgcagagttgagaacac

SEQ ID NO: 6439 - DNA, 20 bp, Artificial Sequence
  Description of Artificial Sequence: Synthetic oligonucleotide
  Target: PCSK9; (+) strand; PAM type: NNGRRT; PAM sequence: TTGAGT
gccagcatctctttttttct

SEQ ID NO: 6440 - DNA, 20 bp, Artificial Sequence
  Description of Artificial Sequence: Synthetic oligonucleotide
  Target: PCSK9; (+) strand; PAM type: NNGRRT; PAM sequence: GAGGGT
tgcctcagaccttaaagaga

SEQ ID NO: 6441 - DNA, 20 bp, Artificial Sequence
  Description of Artificial Sequence: Synthetic oligonucleotide
  Target: PCSK9; (+) strand; PAM type: NNGRRT; PAM sequence: GGGGAT
ttaaagagagagggtctgat

SEQ ID NO: 6442 - DNA, 20 bp, Artificial Sequence
  Description of Artificial Sequence: Synthetic oligonucleotide
  Target: PCSK9; (+) strand; PAM type: NNGRRT; PAM sequence: TGGAAT
ctgctgccatgccccaggtc

SEQ ID NO: 6443 - DNA, 20 bp, Artificial Sequence
  Description of Artificial Sequence: Synthetic oligonucleotide
  Target: PCSK9; (+) strand; PAM type: NNGRRT; PAM sequence: TGGAAT
gaatgcaaagtcaaggagca

SEQ ID NO: 6444 - DNA, 20 bp, Artificial Sequence
  Description of Artificial Sequence: Synthetic oligonucleotide
  Target: PCSK9; (+) strand; PAM type: NNGRRT; PAM sequence: CCGGGT
aggtgaagaggcccgtgagg

SEQ ID NO: 6445 - DNA, 20 bp, Artificial Sequence
  Description of Artificial Sequence: Synthetic oligonucleotide
  Target: PCSK9; (+) strand; PAM type: NNGRRT; PAM sequence: GTGGGT
gaagaggcccgtgaggccgg

SEQ ID NO: 6446 - DNA, 20 bp, Artificial Sequence
  Description of Artificial Sequence: Synthetic oligonucleotide
  Target: PCSK9; (+) strand; PAM type: NNGRRT; PAM sequence: TGGGGT
ggcccgtgaggccgggtggg

SEQ ID NO: 6447 - DNA, 20 bp, Artificial Sequence
  Description of Artificial Sequence: Synthetic oligonucleotide
  Target: PCSK9; (+) strand; PAM type: NNGRRT; PAM sequence: CAGGGT
accaccataccgccatgcat

SEQ ID NO: 6448 - DNA, 20 bp, Artificial Sequence
  Description of Artificial Sequence: Synthetic oligonucleotide
  Target: PCSK9; (+) strand; PAM type: NNGRRT; PAM sequence: CTGGGT
gtatatgtgtctctgtgtgg

SEQ ID NO: 6449 - DNA, 20 bp, Artificial Sequence
  Description of Artificial Sequence: Synthetic oligonucleotide
  Target: PCSK9; (+) strand; PAM type: NNGRRT; PAM sequence: CTGGGT
agatcagtaaggtttgctac

SEQ ID NO: 6450 - DNA, 20 bp, Artificial Sequence
  Description of Artificial Sequence: Synthetic oligonucleotide
  Target: PCSK9; (+) strand; PAM type: NNGRRT; PAM sequence: TGGAGT
cctgggtaccccactccact

SEQ ID NO: 6451 - DNA, 20 bp, Artificial Sequence
  Description of Artificial Sequence: Synthetic oligonucleotide
  Target: PCSK9; (+) strand; PAM type: NNGRRT; PAM sequence: TAGAAT
gtaccccactccacttggag

SEQ ID NO: 6452 - DNA, 20 bp, Artificial Sequence
  Description of Artificial Sequence: Synthetic oligonucleotide
  Target: PCSK9; (+) strand; PAM type: NNGRRT; PAM sequence: TGGGGT
tgatctatttttttctgaga

SEQ ID NO: 6453 - DNA, 20 bp, Artificial Sequence
  Description of Artificial Sequence: Synthetic oligonucleotide
  Target: PCSK9; (+) strand; PAM type: NNGRRT; PAM sequence: TGGGAT
gtctcagcctccccaagtgt

SEQ ID NO: 6454 - DNA, 20 bp, Artificial Sequence
  Description of Artificial Sequence: Synthetic oligonucleotide
  Target: PCSK9; (+) strand; PAM type: NNGRRT; PAM sequence: GAGGGT
ctatttaacaaacctgctgg

SEQ ID NO: 6455 - DNA, 20 bp, Artificial Sequence
  Description of Artificial Sequence: Synthetic oligonucleotide
  Target: PCSK9; (+) strand; PAM type: NNGRRT; PAM sequence: CAGGGT
caaacctgctgggagggtct

SEQ ID NO: 6456 - DNA, 20 bp, Artificial Sequence
  Description of Artificial Sequence: Synthetic oligonucleotide
  Target: PCSK9; (+) strand; PAM type: NNGRRT; PAM sequence: GGGGGT
tcactcagccgtgacccaga

SEQ ID NO: 6457 - DNA, 20 bp, Artificial Sequence
  Description of Artificial Sequence: Synthetic oligonucleotide
  Target: PCSK9; (+) strand; PAM type: NNGRRT; PAM sequence: TGGAAT
gcaaggcatgtgccaagccc

SEQ ID NO: 6458 - DNA, 20 bp, Artificial Sequence
  Description of Artificial Sequence: Synthetic oligonucleotide
  Target: PCSK9; (+) strand; PAM type: NNGRRT; PAM sequence: CTGAGT
cagccgggccttctagaaac

SEQ ID NO: 6459 - DNA, 20 bp, Artificial Sequence
  Description of Artificial Sequence: Synthetic oligonucleotide
  Target: PCSK9; (+) strand; PAM type: NNGRRT; PAM sequence: AGGAGT
ctcctcaaaaggcagcccta

SEQ ID NO: 6460 - DNA, 20 bp, Artificial Sequence
  Description of Artificial Sequence: Synthetic oligonucleotide
  Target: PCSK9; (+) strand; PAM type: NNGRRT; PAM sequence: CAGAGT
agtccactcttaaatgaact

SEQ ID NO: 6461 - DNA, 20 bp, Artificial Sequence
  Description of Artificial Sequence: Synthetic oligonucleotide
  Target: PCSK9; (+) strand; PAM type: NNGRRT; PAM sequence: CTGGAT
aagtctgtgttgattctggt

SEQ ID NO: 6462 - DNA, 20 bp, Artificial Sequence
  Description of Artificial Sequence: Synthetic oligonucleotide
  Target: PCSK9; (+) strand; PAM type: NNGRRT; PAM sequence: TTGGAT
agcaaaagacagtcttggtc

SEQ ID NO: 6463 - DNA, 20 bp, Artificial Sequence
  Description of Artificial Sequence: Synthetic oligonucleotide
  Target: PCSK9; (+) strand; PAM type: NNGRRT; PAM sequence: CTGGGT
tggtcttggatccacttgcc

SEQ ID NO: 6464 - DNA, 20 bp, Artificial Sequence
  Description of Artificial Sequence: Synthetic oligonucleotide
  Target: PCSK9; (+) strand; PAM type: NNGRRT; PAM sequence: AGGGAT
tgctcttcctggcactgggg

SEQ ID NO: 6465 - DNA, 20 bp, Artificial Sequence
  Description of Artificial Sequence: Synthetic oligonucleotide
  Target: PCSK9; (+) strand; PAM type: NNGRRT; PAM sequence: TAGAGT
cagaaaacaaaccattaata

SEQ ID NO: 6466 - DNA, 20 bp, Artificial Sequence
  Description of Artificial Sequence: Synthetic oligonucleotide
  Target: PCSK9; (+) strand; PAM type: NNGRRT; PAM sequence: GGGAAT
gagaaaactatagcaaggaa

SEQ ID NO: 6467 - DNA, 20 bp, Artificial Sequence
  Description of Artificial Sequence: Synthetic oligonucleotide
  Target: PCSK9; (+) strand; PAM type: NNGRRT; PAM sequence: TGGGGT
aactatagcaaggaagggaa

SEQ ID NO: 6468 - DNA, 20 bp, Artificial Sequence
  Description of Artificial Sequence: Synthetic oligonucleotide
  Target: PCSK9; (+) strand; PAM type: NNGRRT; PAM sequence: GGGGAT
caaagcaaaggcccccaggt

SEQ ID NO: 6469 - DNA, 20 bp, Artificial Sequence
  Description of Artificial Sequence: Synthetic oligonucleotide
  Target: PCSK9; (+) strand; PAM type: NNGRRT; PAM sequence: GGGAGT
cccccaggtggggatgtgca

SEQ ID NO: 6470 - DNA, 20 bp, Artificial Sequence
  Description of Artificial Sequence: Synthetic oligonucleotide
  Target: PCSK9; (+) strand; PAM type: NNGRRT; PAM sequence: GGGAAT
taccaggaaaccagagaggt

SEQ ID NO: 6471 - DNA, 20 bp, Artificial Sequence
  Description of Artificial Sequence: Synthetic oligonucleotide
  Target: PCSK9; (+) strand; PAM type: NNGRRT; PAM sequence: GGGGGT
gtgggaatagttatgagatg

SEQ ID NO: 6472 - DNA, 20 bp, Artificial Sequence
  Description of Artificial Sequence: Synthetic oligonucleotide
  Target: PCSK9; (+) strand; PAM type: NNGRRT; PAM sequence: GAGGGT
ggccaagtcaggtgagacct

SEQ ID NO: 6473 - DNA, 20 bp, Artificial Sequence
  Description of Artificial Sequence: Synthetic oligonucleotide
  Target: PCSK9; (+) strand; PAM type: NNGRRT; PAM sequence: AGGGGT
gcagtgagctggggccatgc

SEQ ID NO: 6474 - DNA, 20 bp, Artificial Sequence
  Description of Artificial Sequence: Synthetic oligonucleotide
  Target: PCSK9; (+) strand; PAM type: NNGRRT; PAM sequence: AGGAGT
atgcaggggtctggcctcag

SEQ ID NO: 6475 - DNA, 20 bp, Artificial Sequence
  Description of Artificial Sequence: Synthetic oligonucleotide
  Target: PCSK9; (+) strand; PAM type: NNGRRT; PAM sequence: CTGGAT
tcagaggagtgtggtctggc

SEQ ID NO: 6476 - DNA, 20 bp, Artificial Sequence
  Description of Artificial Sequence: Synthetic oligonucleotide
  Target: PCSK9; (+) strand; PAM type: NNGRRT; PAM sequence: GAGGGT
gagactggagggaggcggtg

SEQ ID NO: 6477 - DNA, 20 bp, Artificial Sequence
  Description of Artificial Sequence: Synthetic oligonucleotide
  Target: PCSK9; (+) strand; PAM type: NNGRRT; PAM sequence: TGGAGT
cgttggggcggggctcaggc

SEQ ID NO: 6478 - DNA, 20 bp, Artificial Sequence
  Description of Artificial Sequence: Synthetic oligonucleotide
  Target: PCSK9; (+) strand; PAM type: NNGRRT; PAM sequence: GTGGGT
gaagggagcctgcaggcctg

SEQ ID NO: 6479 - DNA, 20 bp, Artificial Sequence
  Description of Artificial Sequence: Synthetic oligonucleotide
  Target: PCSK9; (+) strand; PAM type: NNGRRT; PAM sequence: GTGGAT
ggagcctgcaggcctggtgg

SEQ ID NO: 6480 - DNA, 20 bp, Artificial Sequence
  Description of Artificial Sequence: Synthetic oligonucleotide
  Target: PCSK9; (+) strand; PAM type: NNGRRT; PAM sequence: GTGGGT
tgcaggcctggtgggtggat

SEQ ID NO: 6481 - DNA, 20 bp, Artificial Sequence
  Description of Artificial Sequence: Synthetic oligonucleotide
  Target: PCSK9; (+) strand; PAM type: NNGRRT; PAM sequence: GAGGAT
ggatgtgggtgggagagggg

SEQ ID NO: 6482 - DNA, 20 bp, Artificial Sequence
  Description of Artificial Sequence: Synthetic oligonucleotide
  Target: PCSK9; (+) strand; PAM type: NNGRRT; PAM sequence: TGGAGT
ggctcgggcccctggacaga

SEQ ID NO: 6483 - DNA, 20 bp, Artificial Sequence
  Description of Artificial Sequence: Synthetic oligonucleotide
  Target: PCSK9; (+) strand; PAM type: NNGRRT; PAM sequence: TGGGAT
cagatggagttgccattaag

SEQ ID NO: 6484 - DNA, 20 bp, Artificial Sequence
  Description of Artificial Sequence: Synthetic oligonucleotide
  Target: PCSK9; (+) strand; PAM type: NNGRRT; PAM sequence: AGGGAT
tatggggccatcagtttcag

SEQ ID NO: 6485 - DNA, 20 bp, Artificial Sequence
  Description of Artificial Sequence: Synthetic oligonucleotide
  Target: PCSK9; (+) strand; PAM type: NNGRRT; PAM sequence: ATGAGT
gggccatcagtttcagaggg

SEQ ID NO: 6486 - DNA, 20 bp, Artificial Sequence
  Description of Artificial Sequence: Synthetic oligonucleotide
  Target: PCSK9; (+) strand; PAM type: NNGRRT; PAM sequence: CTGGGT
cagccatggtgcagaaccgc

SEQ ID NO: 6487 - DNA, 20 bp, Artificial Sequence
  Description of Artificial Sequence: Synthetic oligonucleotide
  Target: PCSK9; (+) strand; PAM type: NNGRRT; PAM sequence: CGGGGT
aaccgcctgggtgggaggtg

SEQ ID NO: 6488 - DNA, 20 bp, Artificial Sequence
  Description of Artificial Sequence: Synthetic oligonucleotide
  Target: PCSK9; (+) strand; PAM type: NNGRRT; PAM sequence: AAGGAT
tctgcactttggcctcacag

SEQ ID NO: 6489 - DNA, 20 bp, Artificial Sequence
  Description of Artificial Sequence: Synthetic oligonucleotide
  Target: PCSK9; (+) strand; PAM type: NNGRRT; PAM sequence: GTGGGT
gtcggagggagaaatgaagt

SEQ ID NO: 6490 - DNA, 20 bp, Artificial Sequence
  Description of Artificial Sequence: Synthetic oligonucleotide
  Target: PCSK9; (+) strand; PAM type: NNGRRT; PAM sequence: GGGGGT
gggagaaatgaagtgtgggt

SEQ ID NO: 6491 - DNA, 20 bp, Artificial Sequence
  Description of Artificial Sequence: Synthetic oligonucleotide
  Target: PCSK9; (+) strand; PAM type: NNGRRT; PAM sequence: CAGGAT
ctccagtgacagccccatcc

SEQ ID NO: 6492 - DNA, 20 bp, Artificial Sequence
  Description of Artificial Sequence: Synthetic oligonucleotide
  Target: PCSK9; (+) strand; PAM type: NNGRRT; PAM sequence: ATGGGT
agtgacagccccatcccagg

SEQ ID NO: 6493 - DNA, 20 bp, Artificial Sequence
  Description of Artificial Sequence: Synthetic oligonucleotide
  Target: PCSK9; (+) strand; PAM type: NNGRRT; PAM sequence: GAGGGT
tcccaggatgggtgtctggg

SEQ ID NO: 6494 - DNA, 20 bp, Artificial Sequence
  Description of Artificial Sequence: Synthetic oligonucleotide
  Target: PCSK9; (+) strand; PAM type: NNGRRT; PAM sequence: GGGGAT
ccctccatggcctggcacga

SEQ ID NO: 6495 - DNA, 20 bp, Artificial Sequence
  Description of Artificial Sequence: Synthetic oligonucleotide
  Target: PCSK9; (+) strand; PAM type: NNGRRT; PAM sequence: GGGGAT
atggcctggcacgaggggat

SEQ ID NO: 6496 - DNA, 20 bp, Artificial Sequence
  Description of Artificial Sequence: Synthetic oligonucleotide
  Target: PCSK9; (+) strand; PAM type: NNGRRT; PAM sequence: TTGAGT
cggggctgctggcctggccc

SEQ ID NO: 6497 - DNA, 20 bp, Artificial Sequence
  Description of Artificial Sequence: Synthetic oligonucleotide
  Target: PCSK9; (+) strand; PAM type: NNGRRT; PAM sequence: CTGGGT
ttgcctggaactcactcact

SEQ ID NO: 6498 - DNA, 20 bp, Artificial Sequence
  Description of Artificial Sequence: Synthetic oligonucleotide
  Target: PCSK9; (+) strand; PAM type: NNGRRT; PAM sequence: TCGGGT
tcaaacaggtcgagctgtgc

SEQ ID NO: 6499 - DNA, 20 bp, Artificial Sequence
  Description of Artificial Sequence: Synthetic oligonucleotide
  Target: PCSK9; (+) strand; PAM type: NNGRRT; PAM sequence: CAGAAT
aatgtgccgatgtccgtggg

SEQ ID NO: 6500 - DNA, 20 bp, Artificial Sequence
  Description of Artificial Sequence: Synthetic oligonucleotide
  Target: PCSK9; (+) strand; PAM type: NNGRRT; PAM sequence: CAGGAT
tcaggtctccaccaaggagg

SEQ ID NO: 6501 - DNA, 20 bp, Artificial Sequence
  Description of Artificial Sequence: Synthetic oligonucleotide
  Target: PCSK9; (+) strand; PAM type: NNGRRT; PAM sequence: ATGGAT
aaggaggcaggattcttccc

SEQ ID NO: 6502 - DNA, 20 bp, Artificial Sequence
  Description of Artificial Sequence: Synthetic oligonucleotide
  Target: PCSK9; (+) strand; PAM type: NNGRRT; PAM sequence: GGGGGT
tgcagggacaaacatcgttg

SEQ ID NO: 6503 - DNA, 20 bp, Artificial Sequence
  Description of Artificial Sequence: Synthetic oligonucleotide
  Target: PCSK9; (+) strand; PAM type: NNGRRT; PAM sequence: GTGAGT
gggacaaacatcgttggggg

SEQ ID NO: 6504 - DNA, 20 bp, Artificial Sequence
  Description of Artificial Sequence: Synthetic oligonucleotide
  Target: PCSK9; (+) strand; PAM type: NNGRRT; PAM sequence: CTGGAT
attaatggaggcttagcttt

SEQ ID NO: 6505 - DNA, 20 bp, Artificial Sequence
  Description of Artificial Sequence: Synthetic oligonucleotide
  Target: PCSK9; (+) strand; PAM type: NNGRRT; PAM sequence: CAGGGT
caacccgctccactacccgg

SEQ ID NO: 6506 - DNA, 20 bp, Artificial Sequence
  Description of Artificial Sequence: Synthetic oligonucleotide
  Target: PCSK9; (+) strand; PAM type: NNGRRT; PAM sequence: ACGGGT
cggctgggctcctcattttt

SEQ ID NO: 6507 - DNA, 20 bp, Artificial Sequence
  Description of Artificial Sequence: Synthetic oligonucleotide
  Target: PCSK9; (+) strand; PAM type: NNGRRT; PAM sequence: GTGAGT
aacacagaccaggaagctcg

SEQ ID NO: 6508 - DNA, 20 bp, Artificial Sequence
  Description of Artificial Sequence: Synthetic oligonucleotide
  Target: PCSK9; (+) strand; PAM type: NNGRRT; PAM sequence: TTGGGT
agcaagcagacatttatctt

SEQ ID NO: 6509 - DNA, 20 bp, Artificial Sequence
  Description of Artificial Sequence: Synthetic oligonucleotide
  Target: PCSK9; (+) strand; PAM type: NNGRRT; PAM sequence: CTGGGT
gtaacttgaagatatttatt

SEQ ID NO: 6510 - DNA, 20 bp, Artificial Sequence
  Description of Artificial Sequence: Synthetic oligonucleotide
  Target: PCSK9; (+) strand; PAM type: NNGRRT; PAM sequence: TAGGGT
cttgcatagacttgactgcc

SEQ ID NO: 6511 - DNA, 20 bp, Artificial Sequence
  Description of Artificial Sequence: Synthetic oligonucleotide
  Target: PCSK9; (+) strand; PAM type: NNGRRT; PAM sequence: CTGGGT
tgccttgcttatactaggaa

SEQ ID NO: 6512 - DNA, 20 bp, Artificial Sequence
  Description of Artificial Sequence: Synthetic oligonucleotide
  Target: PCSK9; (+) strand; PAM type: NNGRRT; PAM sequence: TTGAAT
ctaggaactgggtaagtttg

SEQ ID NO: 6513 - DNA, 20 bp, Artificial Sequence
  Description of Artificial Sequence: Synthetic oligonucleotide
  Target: PCSK9; (+) strand; PAM type: NNGRRT; PAM sequence: TTGAGT
tgggtaagtttgttgaatag

SEQ ID NO: 6514 - DNA, 20 bp, Artificial Sequence
  Description of Artificial Sequence: Synthetic oligonucleotide
  Target: PCSK9; (+) strand; PAM type: NNGRRT; PAM sequence: ATGAGT
ttgagtaagccaagtatttg

SEQ ID NO: 6515 - DNA, 20 bp, Artificial Sequence
  Description of Artificial Sequence: Synthetic oligonucleotide
  Target: PCSK9; (+) strand; PAM type: NNGRRT; PAM sequence: TTGAGT
atttgatgagtacttttatc

SEQ ID NO: 6516 - DNA, 20 bp, Artificial Sequence
  Description of Artificial Sequence: Synthetic oligonucleotide
  Target: PCSK9; (+) strand; PAM type: NNGRRT; PAM sequence: AGGAAT
ttactccttgtgcctatcct

SEQ ID NO: 6517 - DNA, 20 bp, Artificial Sequence
  Description of Artificial Sequence: Synthetic oligonucleotide
  Target: PCSK9; (+) strand; PAM type: NNGRRT; PAM sequence: ATGAAT
gtgcctatcctaggaatgaa

SEQ ID NO: 6518 - DNA, 20 bp, Artificial Sequence
  Description of Artificial Sequence: Synthetic oligonucleotide
  Target: PCSK9; (+) strand; PAM type: NNGRRT; PAM sequence: CCGAGT
tacctggcacacagcctggc

SEQ ID NO: 6519 - DNA, 20 bp, Artificial Sequence
  Description of Artificial Sequence: Synthetic oligonucleotide
  Target: PCSK9; (+) strand; PAM type: NNGRRT; PAM sequence: CGGAAT
cagcctggcccgagtattta

SEQ ID NO: 6520 - DNA, 20 bp, Artificial Sequence
  Description of Artificial Sequence: Synthetic oligonucleotide
  Target: PCSK9; (+) strand; PAM type: NNGRRT; PAM sequence: TTGGGT
aaattcagaacagtctcaga

SEQ ID NO: 6521 - DNA, 20 bp, Artificial Sequence
  Description of Artificial Sequence: Synthetic oligonucleotide
  Target: PCSK9; (+) strand; PAM type: NNGRRT; PAM sequence: GAGGAT
actttgggaggctgaggcag

SEQ ID NO: 6522 - DNA, 20 bp, Artificial Sequence
  Description of Artificial Sequence: Synthetic oligonucleotide
  Target: PCSK9; (+) strand; PAM type: NNGRRT; PAM sequence: AGGAAT
caggaggattgcttgtgttt

SEQ ID NO: 6523 - DNA, 20 bp, Artificial Sequence
  Description of Artificial Sequence: Synthetic oligonucleotide
  Target: PCSK9; (+) strand; PAM type: NNGRRT; PAM sequence: GAGGGT
cttgcttgagctgggaggct

SEQ ID NO: 6524 - DNA, 20 bp, Artificial Sequence
  Description of Artificial Sequence: Synthetic oligonucleotide
  Target: PCSK9; (+) strand; PAM type: NNGRRT; PAM sequence: CTGGGT
catcatcactgcactgcagc

SEQ ID NO: 6525 - DNA, 20 bp, Artificial Sequence
  Description of Artificial Sequence: Synthetic oligonucleotide
  Target: PCSK9; (+) strand; PAM type: NNGRRT; PAM sequence: CAGAGT
ctgcactgcagcctgggtta

SEQ ID NO: 6526 - DNA, 20 bp, Artificial Sequence
  Description of Artificial Sequence: Synthetic oligonucleotide
  Target: PCSK9; (+) strand; PAM type: NNGRRT; PAM sequence: GTGAAT
ggccctccactctaaggctg

SEQ ID NO: 6527 - DNA, 20 bp, Artificial Sequence
  Description of Artificial Sequence: Synthetic oligonucleotide
  Target: PCSK9; (+) strand; PAM type: NNGRRT; PAM sequence: AGGAAT
tctagacagcccatgtcata

SEQ ID NO: 6528 - DNA, 20 bp, Artificial Sequence
  Description of Artificial Sequence: Synthetic oligonucleotide
  Target: PCSK9; (+) strand; PAM type: NNGRRT; PAM sequence: AAGAGT
gtcatatatggaaagcattc

SEQ ID NO: 6529 - DNA, 20 bp, Artificial Sequence
  Description of Artificial Sequence: Synthetic oligonucleotide
  Target: PCSK9; (+) strand; PAM type: NNGRRT; PAM sequence: CAGAAT
ctctctctccttcccctcca

SEQ ID NO: 6530 - DNA, 20 bp, Artificial Sequence
  Description of Artificial Sequence: Synthetic oligonucleotide
  Target: PCSK9; (+) strand; PAM type: NNGRRT; PAM sequence: GAGGGT
ggaacaacttggttcttgca

SEQ ID NO: 6531 - DNA, 20 bp, Artificial Sequence
  Description of Artificial Sequence: Synthetic oligonucleotide
  Target: PCSK9; (+) strand; PAM type: NNGRRT; PAM sequence: AGGGAT
agggttagcaggtggtcacc

SEQ ID NO: 6532 - DNA, 20 bp, Artificial Sequence
  Description of Artificial Sequence: Synthetic oligonucleotide
  Target: PCSK9; (+) strand; PAM type: NNGRRT; PAM sequence: AGGGGT
tcaccagggatcggggagga

SEQ ID NO: 6533 - DNA, 20 bp, Artificial Sequence
  Description of Artificial Sequence: Synthetic oligonucleotide
  Target: PCSK9; (+) strand; PAM type: NNGRRT; PAM sequence: AGGAAT
tgtgagcaacgctggccact

SEQ ID NO: 6534 - DNA, 20 bp, Artificial Sequence
  Description of Artificial Sequence: Synthetic oligonucleotide
  Target: PCSK9; (+) strand; PAM type: NNGRRT; PAM sequence: TGGGAT
aggaatgagactgagacctg

SEQ ID NO: 6535 - DNA, 20 bp, Artificial Sequence
  Description of Artificial Sequence: Synthetic oligonucleotide
  Target: PCSK9; (+) strand; PAM type: NNGRRT; PAM sequence: ATGAAT
agccaaaagctttggtggag

SEQ ID NO: 6536 - DNA, 20 bp, Artificial Sequence
  Description of Artificial Sequence: Synthetic oligonucleotide
  Target: PCSK9; (+) strand; PAM type: NNGRRT; PAM sequence: ATGAAT
tcctcctctaagctttgcag

SEQ ID NO: 6537 - DNA, 20 bp, Artificial Sequence
  Description of Artificial Sequence: Synthetic oligonucleotide
  Target: PCSK9; (+) strand; PAM type: NNGRRT; PAM sequence: AGGAAT
tattagtgtaaagtactaag

SEQ ID NO: 6538 - DNA, 20 bp, Artificial Sequence
  Description of Artificial Sequence: Synthetic oligonucleotide
  Target: PCSK9; (+) strand; PAM type: NNGRRT; PAM sequence: AAGAAT
cggctgtgttctgatatatg

SEQ ID NO: 6539 - DNA, 20 bp, Artificial Sequence
  Description of Artificial Sequence: Synthetic oligonucleotide
  Target: PCSK9; (+) strand; PAM type: NNGRRT; PAM sequence: TAGAAT
tgccacacatgaaccaaatt

SEQ ID NO: 6540 - DNA, 20 bp, Artificial Sequence
  Description of Artificial Sequence: Synthetic oligonucleotide
  Target: PCSK9; (+) strand; PAM type: NNGRRT; PAM sequence: CAGGGT
gcagggaaggtggggcagga

SEQ ID NO: 6541 - DNA, 20 bp, Artificial Sequence
  Description of Artificial Sequence: Synthetic oligonucleotide
  Target: PCSK9; (+) strand; PAM type: NNGRRT; PAM sequence: TGGGAT
agtcgtggtgagatgcccgc

SEQ ID NO: 6542 - DNA, 20 bp, Artificial Sequence
  Description of Artificial Sequence: Synthetic oligonucleotide
  Target: PCSK9; (+) strand; PAM type: NNGRRT; PAM sequence: CAGGAT
gggatgcttgttttctttcc

SEQ ID NO: 6543 - DNA, 20 bp, Artificial Sequence
  Description of Artificial Sequence: Synthetic oligonucleotide
  Target: PCSK9; (+) strand; PAM type: NNGRRT; PAM sequence: CAGAAT
cccaggatgccttcaacggg

SEQ ID NO: 6544 - DNA, 20 bp, Artificial Sequence
  Description of Artificial Sequence: Synthetic oligonucleotide
  Target: PCSK9; (+) strand; PAM type: NNGRRT; PAM sequence: TTGAGT
cttgagaacacacagcatta

SEQ ID NO: 6545 - DNA, 20 bp, Artificial Sequence
  Description of Artificial Sequence: Synthetic oligonucleotide
  Target: PCSK9; (+) strand; PAM type: NNGRRT; PAM sequence: AGGGGT
cagtgaggacggcaggtgct

SEQ ID NO: 6546 - DNA, 20 bp, Artificial Sequence
  Description of Artificial Sequence: Synthetic oligonucleotide
  Target: PCSK9; (+) strand; PAM type: NNGRRT; PAM sequence: GAGAGT
actcctgattttgggctcct

SEQ ID NO: 6547 - DNA, 20 bp, Artificial Sequence
  Description of Artificial Sequence: Synthetic oligonucleotide
  Target: PCSK9; (+) strand; PAM type: NNGRRT; PAM sequence: GTGGAT
gccagcgatgatatcccagt

SEQ ID NO: 6548 - DNA, 20 bp, Artificial Sequence
  Description of Artificial Sequence: Synthetic oligonucleotide
  Target: PCSK9; (+) strand; PAM type: NNGRRT; PAM sequence: GAGGAT
gtcccacacaatctcttggt

SEQ ID NO: 6549 - DNA, 20 bp, Artificial Sequence
  Description of Artificial Sequence: Synthetic oligonucleotide
  Target: PCSK9; (+) strand; PAM type: NNGRRT; PAM sequence: GAGAAT
gatgtgggcggagagaaggt

SEQ ID NO: 6550 - DNA, 20 bp, Artificial Sequence
  Description of Artificial Sequence: Synthetic oligonucleotide
  Target: PCSK9; (+) strand; PAM type: NNGRRT; PAM sequence: TAGGGT
gggcggagagaaggtgagaa

SEQ ID NO: 6551 - DNA, 20 bp, Artificial Sequence
  Description of Artificial Sequence: Synthetic oligonucleotide
  Target: PCSK9; (+) strand; PAM type: NNGRRT; PAM sequence: AAGGGT
tcgcctctgtccgtttctct

SEQ ID NO: 6552 - DNA, 20 bp, Artificial Sequence
  Description of Artificial Sequence: Synthetic oligonucleotide
  Target: PCSK9; (+) strand; PAM type: NNGRRT; PAM sequence: CAGAAT
tgccaacctccagcaagtca

SEQ ID NO: 6553 - DNA, 20 bp, Artificial Sequence
  Description of Artificial Sequence: Synthetic oligonucleotide
  Target: PCSK9; (+) strand; PAM type: NNGRRT; PAM sequence: GAGAAT
cacagaaaccctcactgcca

SEQ ID NO: 6554 - DNA, 20 bp, Artificial Sequence
  Description of Artificial Sequence: Synthetic oligonucleotide
  Target: PCSK9; (+) strand; PAM type: NNGRRT; PAM sequence: GTGGGT
acaaaatatatatgaaatat

SEQ ID NO: 6555 - DNA, 20 bp, Artificial Sequence
  Description of Artificial Sequence: Synthetic oligonucleotide
  Target: PCSK9; (+) strand; PAM type: NNGRRT; PAM sequence: ATGAGT
ataaaagggagctggtataa

SEQ ID NO: 6556 - DNA, 20 bp, Artificial Sequence
  Description of Artificial Sequence: Synthetic oligonucleotide
  Target: PCSK9; (+) strand; PAM type: NNGRRT; PAM sequence: GTGAAT
aagggagctggtataaatga

SEQ ID NO: 6557 - DNA, 20 bp, Artificial Sequence
  Description of Artificial Sequence: Synthetic oligonucleotide
  Target: PCSK9; (+) strand; PAM type: NNGRRT; PAM sequence: ATGGAT
tactttggaaatacgactaa

SEQ ID NO: 6558 - DNA, 20 bp, Artificial Sequence
  Description of Artificial Sequence: Synthetic oligonucleotide
  Target: PCSK9; (+) strand; PAM type: NNGRRT; PAM sequence: AAGGGT
cttcatatacaaccaatacc

SEQ ID NO: 6559 - DNA, 20 bp, Artificial Sequence
  Description of Artificial Sequence: Synthetic oligonucleotide
  Target: PCSK9; (+) strand; PAM type: NNGRRT; PAM sequence: TAGGGT
tcaagatccaagcttatgca

SEQ ID NO: 6560 - DNA, 20 bp, Artificial Sequence
  Description of Artificial Sequence: Synthetic oligonucleotide
  Target: PCSK9; (+) strand; PAM type: NNGRRT; PAM sequence: AGGAAT
attactattttacaatgaaa

SEQ ID NO: 6561 - DNA, 20 bp, Artificial Sequence
  Description of Artificial Sequence: Synthetic oligonucleotide
  Target: PCSK9; (+) strand; PAM type: NNGRRT; PAM sequence: TTGGAT
catctttacatcattttaaa

SEQ ID NO: 6562 - DNA, 20 bp, Artificial Sequence
  Description of Artificial Sequence: Synthetic oligonucleotide
  Target: PCSK9; (+) strand; PAM type: NNGRRT; PAM sequence: AGGAAT
tcttaaaatataaaaaccaa

SEQ ID NO: 6563 - DNA, 20 bp, Artificial Sequence
  Description of Artificial Sequence: Synthetic oligonucleotide
  Target: PCSK9; (+) strand; PAM type: NNGRRT; PAM sequence: GTGAAT
ccgaaaatctccacagaaat

SEQ ID NO: 6564 - DNA, 20 bp, Artificial Sequence
  Description of Artificial Sequence: Synthetic oligonucleotide
  Target: PCSK9; (+) strand; PAM type: NNGRRT; PAM sequence: CGGAGT
gggacagctgatccacatgc

SEQ ID NO: 6565 - DNA, 20 bp, Artificial Sequence
  Description of Artificial Sequence: Synthetic oligonucleotide
  Target: PCSK9; (+) strand; PAM type: NNGRRT; PAM sequence: AAGGGT
ccaatctccaggctcttcca

SEQ ID NO: 6566 - DNA, 20 bp, Artificial Sequence
  Description of Artificial Sequence: Synthetic oligonucleotide
  Target: PCSK9; (+) strand; PAM type: NNGRRT; PAM sequence: AGGGAT
caggctgggcatgttcctct

SEQ ID NO: 6567 - DNA, 20 bp, Artificial Sequence
  Description of Artificial Sequence: Synthetic oligonucleotide
  Target: PCSK9; (+) strand; PAM type: NNGRRT; PAM sequence: AAGGGT
acttaatgcaatgtttatca

SEQ ID NO: 6568 - DNA, 20 bp, Artificial Sequence
  Description of Artificial Sequence: Synthetic oligonucleotide
  Target: PCSK9; (+) strand; PAM type: NNGRRT; PAM sequence: CTGGGT
gcacctgccaaatatgggct

SEQ ID NO: 6569 - DNA, 20 bp, Artificial Sequence
  Description of Artificial Sequence: Synthetic oligonucleotide
  Target: PCSK9; (+) strand; PAM type: NNGRRT; PAM sequence: CTGGGT
atatgggctctgggtcactc

SEQ ID NO: 6570 - DNA, 20 bp, Artificial Sequence
  Description of Artificial Sequence: Synthetic oligonucleotide
  Target: PCSK9; (+) strand; PAM type: NNGRRT; PAM sequence: GCGAAT
gcctttggcttacacacttg

SEQ ID NO: 6571 - DNA, 20 bp, Artificial Sequence
  Description of Artificial Sequence: Synthetic oligonucleotide
  Target: PCSK9; (+) strand; PAM type: NNGRRT; PAM sequence: CTGAAT
tacacacttggcgaatcgtt

SEQ ID NO: 6572 - DNA, 20 bp, Artificial Sequence
  Description of Artificial Sequence: Synthetic oligonucleotide
  Target: PCSK9; (+) strand; PAM type: NNGRRT; PAM sequence: TGGGGT
ggggctgatctagttggagc

SEQ ID NO: 6573 - DNA, 20 bp, Artificial Sequence
  Description of Artificial Sequence: Synthetic oligonucleotide
  Target: PCSK9; (+) strand; PAM type: NNGRRT; PAM sequence: CTGAGT
ctctaaagtgacaacctaag

SEQ ID NO: 6574 - DNA, 20 bp, Artificial Sequence
  Description of Artificial Sequence: Synthetic oligonucleotide
  Target: PCSK9; (+) strand; PAM type: NNGRRT; PAM sequence: GAGAGT
agtgacaacctaagctgagt

SEQ ID NO: 6575 - DNA, 20 bp, Artificial Sequence
  Description of Artificial Sequence: Synthetic oligonucleotide
  Target: PCSK9; (+) strand; PAM type: NNGRRT; PAM sequence: GGGGGT
acctaagctgagtgagagtt

SEQ ID NO: 6576 - DNA, 20 bp, Artificial Sequence
  Description of Artificial Sequence: Synthetic oligonucleotide
  Target: PCSK9; (+) strand; PAM type: NNGRRT; PAM sequence: GTGAGT
aagctgagtgagagttgggg

SEQ ID NO: 6577 - DNA, 20 bp, Artificial Sequence
  Description of Artificial Sequence: Synthetic oligonucleotide
  Target: PCSK9; (+) strand; PAM type: NNGRRT; PAM sequence: GAGAGT
gggccctgaggtggaaggaa

SEQ ID NO: 6578 - DNA, 20 bp, Artificial Sequence
  Description of Artificial Sequence: Synthetic oligonucleotide
  Target: PCSK9; (+) strand; PAM type: NNGRRT; PAM sequence: GAGAAT
acttgggaggctgaggcaag

SEQ ID NO: 6579 - DNA, 20 bp, Artificial Sequence
  Description of Artificial Sequence: Synthetic oligonucleotide
  Target: PCSK9; (+) strand; PAM type: NNGRRT; PAM sequence: CTGGGT
ttgcaccactgcactccagc

SEQ ID NO: 6580 - DNA, 20 bp, Artificial Sequence
  Description of Artificial Sequence: Synthetic oligonucleotide
  Target: PCSK9; (-) strand; PAM type: NNNNGHTT; PAM sequence: ATAAGATT
tttgtctctgcataaacaac

SEQ ID NO: 6581 - DNA, 20 bp, Artificial Sequence
  Description of Artificial Sequence: Synthetic oligonucleotide
  Target: PCSK9; (-) strand; PAM type: NNNNGHTT; PAM sequence: TAATGTTT
agtggttacatttgtatata

SEQ ID NO: 6582 - DNA, 20 bp, Artificial Sequence
  Description of Artificial Sequence: Synthetic oligonucleotide
  Target: PCSK9; (-) strand; PAM type: NNNNGHTT; PAM sequence: GGAGGTTT
gctggtaaaaagaaataaat

SEQ ID NO: 6583 - DNA, 20 bp, Artificial Sequence
  Description of Artificial Sequence: Synthetic oligonucleotide
  Target: PCSK9; (-) strand; PAM type: NNNNGHTT; PAM sequence: GACAGATT
caaacattcatcaatggagg

SEQ ID NO: 6584 - DNA, 20 bp, Artificial Sequence
  Description of Artificial Sequence: Synthetic oligonucleotide
  Target: PCSK9; (-) strand; PAM type: NNNNGHTT; PAM sequence: TTCTGTTT
cagggtgtcatatattacac

SEQ ID NO: 6585 - DNA, 20 bp, Artificial Sequence
  Description of Artificial Sequence: Synthetic oligonucleotide
  Target: PCSK9; (-) strand; PAM type: NNNNGHTT; PAM sequence: ACCAGCTT
cacttagctctccccgctcc

SEQ ID NO: 6586 - DNA, 20 bp, Artificial Sequence
  Description of Artificial Sequence: Synthetic oligonucleotide
  Target: PCSK9; (-) strand; PAM type: NNNNGHTT; PAM sequence: TGTTGATT
tcctggctccgactgcaaca

SEQ ID NO: 6587 - DNA, 20 bp, Artificial Sequence
  Description of Artificial Sequence: Synthetic oligonucleotide
  Target: PCSK9; (-) strand; PAM type: NNNNGHTT; PAM sequence: GGAAGTTT
cccagacatgtggtggggtg

SEQ ID NO: 6588 - DNA, 20 bp, Artificial Sequence
  Description of Artificial Sequence: Synthetic oligonucleotide
  Target: PCSK9; (-) strand; PAM type: NNNNGHTT; PAM sequence: AACAGCTT
tgggtgtgctcagctcttaa

SEQ ID NO: 6589 - DNA, 20 bp, Artificial Sequence
  Description of Artificial Sequence: Synthetic oligonucleotide
  Target: PCSK9; (-) strand; PAM type: NNNNGHTT; PAM sequence: GCACGCTT
acaaagggtccaggacagca

SEQ ID NO: 6590 - DNA, 20 bp, Artificial Sequence
  Description of Artificial Sequence: Synthetic oligonucleotide
  Target: PCSK9; (-) strand; PAM type: NNNNGHTT; PAM sequence: ATTTGATT
tgctatatactgacctagct

SEQ ID NO: 6591 - DNA, 20 bp, Artificial Sequence
  Description of Artificial Sequence: Synthetic oligonucleotide
  Target: PCSK9; (-) strand; PAM type: NNNNGHTT; PAM sequence: GGCTGTTT
gcgactctacatctaattct

SEQ ID NO: 6592 - DNA, 20 bp, Artificial Sequence
  Description of Artificial Sequence: Synthetic oligonucleotide
  Target: PCSK9; (-) strand; PAM type: NNNNGHTT; PAM sequence: CCCTGATT
ttccgtaactcattttttct

SEQ ID NO: 6593 - DNA, 20 bp, Artificial Sequence
  Description of Artificial Sequence: Synthetic oligonucleotide
  Target: PCSK9; (-) strand; PAM type: NNNNGHTT; PAM sequence: TACCGTTT
aggctagcctattgttccaa

SEQ ID NO: 6594 - DNA, 20 bp, Artificial Sequence
  Description of Artificial Sequence: Synthetic oligonucleotide
  Target: PCSK9; (-) strand; PAM type: NNNNGHTT; PAM sequence: CTGGGATT
ttttaatatcttggcttcca

SEQ ID NO: 6595 - DNA, 20 bp, Artificial Sequence
  Description of Artificial Sequence: Synthetic oligonucleotide
  Target: PCSK9; (-) strand; PAM type: NNNNGHTT; PAM sequence: CTTGGCTT
tttaaatctttttttaatat

SEQ ID NO: 6596 - DNA, 20 bp, Artificial Sequence
  Description of Artificial Sequence: Synthetic oligonucleotide
  Target: PCSK9; (-) strand; PAM type: NNNNGHTT; PAM sequence: CTGTGCTT
catgacttcttgattttgta

SEQ ID NO: 6597 - DNA, 20 bp, Artificial Sequence
  Description of Artificial Sequence: Synthetic oligonucleotide
  Target: PCSK9; (-) strand; PAM type: NNNNGHTT; PAM sequence: TCTTGATT
cagccttttatttcatgact

SEQ ID NO: 6598 - DNA, 20 bp, Artificial Sequence
  Description of Artificial Sequence: Synthetic oligonucleotide
  Target: PCSK9; (-) strand; PAM type: NNNNGHTT; PAM sequence: GATTGATT
aatctattttccagtttgtt

SEQ ID NO: 6599 - DNA, 20 bp, Artificial Sequence
  Description of Artificial Sequence: Synthetic oligonucleotide
  Target: PCSK9; (-) strand; PAM type: NNNNGHTT; PAM sequence: TGTTGATT
tgcaaatctattttccagtt

SEQ ID NO: 6600 - DNA, 20 bp, Artificial Sequence
  Description of Artificial Sequence: Synthetic oligonucleotide
  Target: PCSK9; (-) strand; PAM type: NNNNGHTT; PAM sequence: TCCAGTTT
tgtatgttgcaaatctattt

SEQ ID NO: 6601 - DNA, 20 bp, Artificial Sequence
  Description of Artificial Sequence: Synthetic oligonucleotide
  Target: PCSK9; (-) strand; PAM type: NNNNGHTT; PAM sequence: AATAGCTT
gcttttgtttgatgatttgt

SEQ ID NO: 6602 - DNA, 20 bp, Artificial Sequence
  Description of Artificial Sequence: Synthetic oligonucleotide
  Target: PCSK9; (-) strand; PAM type: NNNNGHTT; PAM sequence: TGATGATT
ttggctgtggagcttttgtt

SEQ ID NO: 6603 - DNA, 20 bp, Artificial Sequence
  Description of Artificial Sequence: Synthetic oligonucleotide
  Target: PCSK9; (-) strand; PAM type: NNNNGHTT; PAM sequence: TTTTGTTT
tttcattttggctgtggagc

SEQ ID NO: 6604 - DNA, 20 bp, Artificial Sequence
  Description of Artificial Sequence: Synthetic oligonucleotide
  Target: PCSK9; (-) strand; PAM type: NNNNGHTT; PAM sequence: TGGAGCTT
tcattttttcattttggctg

SEQ ID NO: 6605 - DNA, 20 bp, Artificial Sequence
  Description of Artificial Sequence: Synthetic oligonucleotide
  Target: PCSK9; (-) strand; PAM type: NNNNGHTT; PAM sequence: ATTTGTTT
taagttaaacaattatctac

SEQ ID NO: 6606 - DNA, 20 bp, Artificial Sequence
  Description of Artificial Sequence: Synthetic oligonucleotide
  Target: PCSK9; (-) strand; PAM type: NNNNGHTT; PAM sequence: TGCAGCTT
aaagcaaagaggtgactcca

SEQ ID NO: 6607 - DNA, 20 bp, Artificial Sequence
  Description of Artificial Sequence: Synthetic oligonucleotide
  Target: PCSK9; (-) strand; PAM type: NNNNGHTT; PAM sequence: CTTTGCTT
cctcacatgtccatcaagga

SEQ ID NO: 6608 - DNA, 20 bp, Artificial Sequence
  Description of Artificial Sequence: Synthetic oligonucleotide
  Target: PCSK9; (-) strand; PAM type: NNNNGHTT; PAM sequence: AAAGGTTT
tctcaggggcttgaaatgtc

SEQ ID NO: 6609 - DNA, 20 bp, Artificial Sequence
  Description of Artificial Sequence: Synthetic oligonucleotide
  Target: PCSK9; (-) strand; PAM type: NNNNGHTT; PAM sequence: AGGGGCTT
acatgcacgccccaaatctc

SEQ ID NO: 6610 - DNA, 20 bp, Artificial Sequence
  Description of Artificial Sequence: Synthetic oligonucleotide
  Target: PCSK9; (-) strand; PAM type: NNNNGHTT; PAM sequence: TTCTGCTT
atccatcagaataggctagg

SEQ ID NO: 6611 - DNA, 20 bp, Artificial Sequence
  Description of Artificial Sequence: Synthetic oligonucleotide
  Target: PCSK9; (-) strand; PAM type: NNNNGHTT; PAM sequence: ATCTGTTT
ctgtttgcacatgtgagagt

SEQ ID NO: 6612 - DNA, 20 bp, Artificial Sequence
  Description of Artificial Sequence: Synthetic oligonucleotide
  Target: PCSK9; (-) strand; PAM type: NNNNGHTT; PAM sequence: AGCTGTTT
ccatgtctgtccttatccat

SEQ ID NO: 6613 - DNA, 20 bp, Artificial Sequence
  Description of Artificial Sequence: Synthetic oligonucleotide
  Target: PCSK9; (-) strand; PAM type: NNNNGHTT; PAM sequence: GGTTGTTT
tattggttggtgtttccgtt

SEQ ID NO: 6614 - DNA, 20 bp, Artificial Sequence
  Description of Artificial Sequence: Synthetic oligonucleotide
  Target: PCSK9; (-) strand; PAM type: NNNNGHTT; PAM sequence: TGGTGTTT
ttagccaatttcctattggt

SEQ ID NO: 6615 - DNA, 20 bp, Artificial Sequence
  Description of Artificial Sequence: Synthetic oligonucleotide
  Target: PCSK9; (-) strand; PAM type: NNNNGHTT; PAM sequence: GTATGTTT
tgcagattatttcattctat

SEQ ID NO: 6616 - DNA, 20 bp, Artificial Sequence
  Description of Artificial Sequence: Synthetic oligonucleotide
  Target: PCSK9; (-) strand; PAM type: NNNNGHTT; PAM sequence: TGCAGATT
tactgccttatttttctggt

SEQ ID NO: 6617 - DNA, 20 bp, Artificial Sequence
  Description of Artificial Sequence: Synthetic oligonucleotide
  Target: PCSK9; (-) strand; PAM type: NNNNGHTT; PAM sequence: TTATGATT
tttaaaattgtaaaaatagt

SEQ ID NO: 6618 - DNA, 20 bp, Artificial Sequence
  Description of Artificial Sequence: Synthetic oligonucleotide
  Target: PCSK9; (-) strand; PAM type: NNNNGHTT; PAM sequence: AATAGTTT
ccactttttaaaattgtaaa

SEQ ID NO: 6619 - DNA, 20 bp, Artificial Sequence
  Description of Artificial Sequence: Synthetic oligonucleotide
  Target: PCSK9; (-) strand; PAM type: NNNNGHTT; PAM sequence: ATACGTTT
gcttccataactgcaagaga

SEQ ID NO: 6620 - DNA, 20 bp, Artificial Sequence
  Description of Artificial Sequence: Synthetic oligonucleotide
  Target: PCSK9; (-) strand; PAM type: NNNNGHTT; PAM sequence: TCTGGCTT
gcaacccttcattccatact

SEQ ID NO: 6621 - DNA, 20 bp, Artificial Sequence
  Description of Artificial Sequence: Synthetic oligonucleotide
  Target: PCSK9; (-) strand; PAM type: NNNNGHTT; PAM sequence: TAGAGCTT
agcaaggaatgttcctcccc

SEQ ID NO: 6622 - DNA, 20 bp, Artificial Sequence
  Description of Artificial Sequence: Synthetic oligonucleotide
  Target: PCSK9; (-) strand; PAM type: NNNNGHTT; PAM sequence: CGCCGATT
cacctatgtaacaatggagg

SEQ ID NO: 6623 - DNA, 20 bp, Artificial Sequence
  Description of Artificial Sequence: Synthetic oligonucleotide
  Target: PCSK9; (-) strand; PAM type: NNNNGHTT; PAM sequence: CTGGGTTT
gatctcatgaggagattatc

SEQ ID NO: 6624 - DNA, 20 bp, Artificial Sequence
  Description of Artificial Sequence: Synthetic oligonucleotide
  Target: PCSK9; (-) strand; PAM type: NNNNGHTT; PAM sequence: AGGAGATT
attgacctaaggatctcatg

SEQ ID NO: 6625 - DNA, 20 bp, Artificial Sequence
  Description of Artificial Sequence: Synthetic oligonucleotide
  Target: PCSK9; (-) strand; PAM type: NNNNGHTT; PAM sequence: AATAGTTT
aatgttttttttaaaacgtg

SEQ ID NO: 6626 - DNA, 20 bp, Artificial Sequence
  Description of Artificial Sequence: Synthetic oligonucleotide
  Target: PCSK9; (-) strand; PAM type: NNNNGHTT; PAM sequence: AAATGTTT
atttttttaaatttacatga

SEQ ID NO: 6627 - DNA, 20 bp, Artificial Sequence
  Description of Artificial Sequence: Synthetic oligonucleotide
  Target: PCSK9; (-) strand; PAM type: NNNNGHTT; PAM sequence: AAATGCTT
gccacttttactgtccctca

SEQ ID NO: 6628 - DNA, 20 bp, Artificial Sequence
  Description of Artificial Sequence: Synthetic oligonucleotide
  Target: PCSK9; (-) strand; PAM type: NNNNGHTT; PAM sequence: CAAGGCTT
cttcaccccacaagcatcct

SEQ ID NO: 6629 - DNA, 20 bp, Artificial Sequence
  Description of Artificial Sequence: Synthetic oligonucleotide
  Target: PCSK9; (-) strand; PAM type: NNNNGHTT; PAM sequence: AAGTGCTT
tggggcctcccctccaccac

SEQ ID NO: 6630 - DNA, 20 bp, Artificial Sequence
  Description of Artificial Sequence: Synthetic oligonucleotide
  Target: PCSK9; (-) strand; PAM type: NNNNGHTT; PAM sequence: CAGGGCTT
ctgggcctcctgccacttgg

SEQ ID NO: 6631 - DNA, 20 bp, Artificial Sequence
  Description of Artificial Sequence: Synthetic oligonucleotide
  Target: PCSK9; (-) strand; PAM type: NNNNGHTT; PAM sequence: GGCAGCTT
tgtatttgcaatgtgctttt

SEQ ID NO: 6632 - DNA, 20 bp, Artificial Sequence
  Description of Artificial Sequence: Synthetic oligonucleotide
  Target: PCSK9; (-) strand; PAM type: NNNNGHTT; PAM sequence: ATGTGCTT
taattggaattgtatttgca

SEQ ID NO: 6633 - DNA, 20 bp, Artificial Sequence
  Description of Artificial Sequence: Synthetic oligonucleotide
  Target: PCSK9; (-) strand; PAM type: NNNNGHTT; PAM sequence: CATGGTTT
cgcagcacagagtaggagct

SEQ ID NO: 6634 - DNA, 20 bp, Artificial Sequence
  Description of Artificial Sequence: Synthetic oligonucleotide
  Target: PCSK9; (-) strand; PAM type: NNNNGHTT; PAM sequence: CTTTGTTT
caaagttgatgctctttcca

SEQ ID NO: 6635 - DNA, 20 bp, Artificial Sequence
  Description of Artificial Sequence: Synthetic oligonucleotide
  Target: PCSK9; (-) strand; PAM type: NNNNGHTT; PAM sequence: AGCAGATT
atcctcccttgcagatgcac

SEQ ID NO: 6636 - DNA, 20 bp, Artificial Sequence
  Description of Artificial Sequence: Synthetic oligonucleotide
  Target: PCSK9; (-) strand; PAM type: NNNNGHTT; PAM sequence: TGAGGCTT
attgtacatgtggcatgaca

SEQ ID NO: 6637 - DNA, 20 bp, Artificial Sequence
  Description of Artificial Sequence: Synthetic oligonucleotide
  Target: PCSK9; (-) strand; PAM type: NNNNGHTT; PAM sequence: CTCAGATT
ggggaaagagagctcctggc

SEQ ID NO: 6638 - DNA, 20 bp, Artificial Sequence
  Description of Artificial Sequence: Synthetic oligonucleotide
  Target: PCSK9; (-) strand; PAM type: NNNNGHTT; PAM sequence: CAAAGATT
tttccagaagattcaatttg

SEQ ID NO: 6639 - DNA, 20 bp, Artificial Sequence
  Description of Artificial Sequence: Synthetic oligonucleotide
  Target: PCSK9; (-) strand; PAM type: NNNNGHTT; PAM sequence: AGAAGATT
aggcacaagctcagctttcc

SEQ ID NO: 6640 - DNA, 20 bp, Artificial Sequence
  Description of Artificial Sequence: Synthetic oligonucleotide
  Target: PCSK9; (-) strand; PAM type: NNNNGHTT; PAM sequence: CTCAGCTT
aattctatggtaggcacaag

SEQ ID NO: 6641 - DNA, 20 bp, Artificial Sequence
  Description of Artificial Sequence: Synthetic oligonucleotide
  Target: PCSK9; (-) strand; PAM type: NNNNGHTT; PAM sequence: TTAAGTTT
atactacaaagattcaggtt

SEQ ID NO: 6642 - DNA, 20 bp, Artificial Sequence
  Description of Artificial Sequence: Synthetic oligonucleotide
  Target: PCSK9; (-) strand; PAM type: NNNNGHTT; PAM sequence: TCAGGTTT
gggatttatactacaaagat

SEQ ID NO: 6643 - DNA, 20 bp, Artificial Sequence
  Description of Artificial Sequence: Synthetic oligonucleotide
  Target: PCSK9; (-) strand; PAM type: NNNNGHTT; PAM sequence: CAAAGATT
atttcaagggatttatacta

SEQ ID NO: 6644 - DNA, 20 bp, Artificial Sequence
  Description of Artificial Sequence: Synthetic oligonucleotide
  Target: PCSK9; (-) strand; PAM type: NNNNGHTT; PAM sequence: AAGGGATT
gtccagcctacatgcatttc

SEQ ID NO: 6645 - DNA, 20 bp, Artificial Sequence
  Description of Artificial Sequence: Synthetic oligonucleotide
  Target: PCSK9; (-) strand; PAM type: NNNNGHTT; PAM sequence: GCTTGCTT
agctgctccttgaagagatt

SEQ ID NO: 6646 - DNA, 20 bp, Artificial Sequence
  Description of Artificial Sequence: Synthetic oligonucleotide
  Target: PCSK9; (-) strand; PAM type: NNNNGHTT; PAM sequence: GATTGCTT
aactagctgctccttgaaga

SEQ ID NO: 6647 - DNA, 20 bp, Artificial Sequence
  Description of Artificial Sequence: Synthetic oligonucleotide
  Target: PCSK9; (-) strand; PAM type: NNNNGHTT; PAM sequence: AAGAGATT
taccaactagctgctccttg

SEQ ID NO: 6648 - DNA, 20 bp, Artificial Sequence
  Description of Artificial Sequence: Synthetic oligonucleotide
  Target: PCSK9; (-) strand; PAM type: NNNNGHTT; PAM sequence: CAGTGTTT
ttctgccgggcccacctttt

SEQ ID NO: 6649 - DNA, 20 bp, Artificial Sequence
  Description of Artificial Sequence: Synthetic oligonucleotide
  Target: PCSK9; (-) strand; PAM type: NNNNGHTT; PAM sequence: GTCAGATT
cctcgccctccccaaacagc

SEQ ID NO: 6650 - DNA, 20 bp, Artificial Sequence
  Description of Artificial Sequence: Synthetic oligonucleotide
  Target: PCSK9; (-) strand; PAM type: NNNNGHTT; PAM sequence: TCAGGTTT
ggaacccccggactggagga

SEQ ID NO: 6651 - DNA, 20 bp, Artificial Sequence
  Description of Artificial Sequence: Synthetic oligonucleotide
  Target: PCSK9; (-) strand; PAM type: NNNNGHTT; PAM sequence: ATCTGATT
gagccccatcggacgatcct

SEQ ID NO: 6652 - DNA, 20 bp, Artificial Sequence
  Description of Artificial Sequence: Synthetic oligonucleotide
  Target: PCSK9; (-) strand; PAM type: NNNNGHTT; PAM sequence: GGGTGCTT
gcggaaaccttctagggtgt

SEQ ID NO: 6653 - DNA, 20 bp, Artificial Sequence
  Description of Artificial Sequence: Synthetic oligonucleotide
  Target: PCSK9; (-) strand; PAM type: NNNNGHTT; PAM sequence: GGGTGCTT
gtggctgtggttccgtgctc

SEQ ID NO: 6654 - DNA, 20 bp, Artificial Sequence
  Description of Artificial Sequence: Synthetic oligonucleotide
  Target: PCSK9; (-) strand; PAM type: NNNNGHTT; PAM sequence: GCCCGCTT
ggaacccactataatggcaa

SEQ ID NO: 6655 - DNA, 20 bp, Artificial Sequence
  Description of Artificial Sequence: Synthetic oligonucleotide
  Target: PCSK9; (-) strand; PAM type: NNNNGHTT; PAM sequence: CCATGTTT
ggccctccaccctccgctgc

SEQ ID NO: 6656 - DNA, 20 bp, Artificial Sequence
  Description of Artificial Sequence: Synthetic oligonucleotide
  Target: PCSK9; (-) strand; PAM type: NNNNGHTT; PAM sequence: AGAAGCTT
ctagtggtctcgccccggga

SEQ ID NO: 6657 - DNA, 20 bp, Artificial Sequence
  Description of Artificial Sequence: Synthetic oligonucleotide
  Target: PCSK9; (-) strand; PAM type: NNNNGHTT; PAM sequence: CCAAGATT
ccacagctagtgagaggaag

SEQ ID NO: 6658 - DNA, 20 bp, Artificial Sequence
  Description of Artificial Sequence: Synthetic oligonucleotide
  Target: PCSK9; (-) strand; PAM type: NNNNGHTT; PAM sequence: TAAAGATT
gacgattgtcacctcccttt

SEQ ID NO: 6659 - DNA, 20 bp, Artificial Sequence
  Description of Artificial Sequence: Synthetic oligonucleotide
  Target: PCSK9; (-) strand; PAM type: NNNNGHTT; PAM sequence: GGACGATT
ctgctgccactgagccgtag

SEQ ID NO: 6660 - DNA, 20 bp, Artificial Sequence
  Description of Artificial Sequence: Synthetic oligonucleotide
  Target: PCSK9; (-) strand; PAM type: NNNNGHTT; PAM sequence: CGGGGCTT
aaaactgcaagtgatccccc

SEQ ID NO: 6661 - DNA, 20 bp, Artificial Sequence
  Description of Artificial Sequence: Synthetic oligonucleotide
  Target: PCSK9; (-) strand; PAM type: NNNNGHTT; PAM sequence: TGTGGTTT
ttcccctctgccccaggagc

SEQ ID NO: 6662 - DNA, 20 bp, Artificial Sequence
  Description of Artificial Sequence: Synthetic oligonucleotide
  Target: PCSK9; (-) strand; PAM type: NNNNGHTT; PAM sequence: AGTTGTTT
gtactcactatttccagaac

SEQ ID NO: 6663 - DNA, 20 bp, Artificial Sequence
  Description of Artificial Sequence: Synthetic oligonucleotide
  Target: PCSK9; (-) strand; PAM type: NNNNGHTT; PAM sequence: CTCTGCTT
ggttcaggtggtcatacagc

SEQ ID NO: 6664 - DNA, 20 bp, Artificial Sequence
  Description of Artificial Sequence: Synthetic oligonucleotide
  Target: PCSK9; (-) strand; PAM type: NNNNGHTT; PAM sequence: AAGGGCTT
accagagaagaaacatcctc

SEQ ID NO: 6665 - DNA, 20 bp, Artificial Sequence
  Description of Artificial Sequence: Synthetic oligonucleotide
  Target: PCSK9; (-) strand; PAM type: NNNNGHTT; PAM sequence: ATTCGATT
aaaaaatattttcattctaa

SEQ ID NO: 6666 - DNA, 20 bp, Artificial Sequence
  Description of Artificial Sequence: Synthetic oligonucleotide
  Target: PCSK9; (-) strand; PAM type: NNNNGHTT; PAM sequence: TTCTGCTT
ggattggtctaaaaattatt

SEQ ID NO: 6667 - DNA, 20 bp, Artificial Sequence
  Description of Artificial Sequence: Synthetic oligonucleotide
  Target: PCSK9; (-) strand; PAM type: NNNNGHTT; PAM sequence: AAAGGATT
agtttctcatgactaaaaga

SEQ ID NO: 6668 - DNA, 20 bp, Artificial Sequence
  Description of Artificial Sequence: Synthetic oligonucleotide
  Target: PCSK9; (-) strand; PAM type: NNNNGHTT; PAM sequence: CTCAGTTT
gtgacctcctctctctgggc

SEQ ID NO: 6669 - DNA, 20 bp, Artificial Sequence
  Description of Artificial Sequence: Synthetic oligonucleotide
  Target: PCSK9; (-) strand; PAM type: NNNNGHTT; PAM sequence: TAATGCTT
catcatcgctgaactcctac

SEQ ID NO: 6670 - DNA, 20 bp, Artificial Sequence
  Description of Artificial Sequence: Synthetic oligonucleotide
  Target: PCSK9; (-) strand; PAM type: NNNNGHTT; PAM sequence: TCTGGTTT
tgtgctccttatcttccacc

SEQ ID NO: 6671 - DNA, 20 bp, Artificial Sequence
  Description of Artificial Sequence: Synthetic oligonucleotide
  Target: PCSK9; (-) strand; PAM type: NNNNGHTT; PAM sequence: CCCAGCTT
tggtggcaggtacctgtaat

SEQ ID NO: 6672 - DNA, 20 bp, Artificial Sequence
  Description of Artificial Sequence: Synthetic oligonucleotide
  Target: PCSK9; (-) strand; PAM type: NNNNGHTT; PAM sequence: AGGAGTTT
tcggatccactgaggaggtc

SEQ ID NO: 6673 - DNA, 20 bp, Artificial Sequence
  Description of Artificial Sequence: Synthetic oligonucleotide
  Target: PCSK9; (-) strand; PAM type: NNNNGHTT; PAM sequence: TTTGGTTT
aataaatcacaaaaaaaact

SEQ ID NO: 6674 - DNA, 20 bp, Artificial Sequence
  Description of Artificial Sequence: Synthetic oligonucleotide
  Target: PCSK9; (-) strand; PAM type: NNNNGHTT; PAM sequence: GTCTGCTT
ggcagtaatgggcaatcaga

SEQ ID NO: 6675 - DNA, 20 bp, Artificial Sequence
  Description of Artificial Sequence: Synthetic oligonucleotide
  Target: PCSK9; (-) strand; PAM type: NNNNGHTT; PAM sequence: TTTGGATT
gttttgaacctcagaacttg

SEQ ID NO: 6676 - DNA, 20 bp, Artificial Sequence
  Description of Artificial Sequence: Synthetic oligonucleotide
  Target: PCSK9; (-) strand; PAM type: NNNNGHTT; PAM sequence: ACTTGTTT
aaacggttttgaacctcaga

SEQ ID NO: 6677 - DNA, 20 bp, Artificial Sequence
  Description of Artificial Sequence: Synthetic oligonucleotide
  Target: PCSK9; (-) strand; PAM type: NNNNGHTT; PAM sequence: AACGGTTT
acccaaagccttagggccaa

SEQ ID NO: 6678 - DNA, 20 bp, Artificial Sequence
  Description of Artificial Sequence: Synthetic oligonucleotide
  Target: PCSK9; (-) strand; PAM type: NNNNGHTT; PAM sequence: ACCTGCTT
aactgctctcaggcagacat

SEQ ID NO: 6679 - DNA, 20 bp, Artificial Sequence
  Description of Artificial Sequence: Synthetic oligonucleotide
  Target: PCSK9; (-) strand; PAM type: NNNNGHTT; PAM sequence: TTTGGTTT
ccactatctatggtgatttg

SEQ ID NO: 6680 - DNA, 20 bp, Artificial Sequence
  Description of Artificial Sequence: Synthetic oligonucleotide
  Target: PCSK9; (-) strand; PAM type: NNNNGHTT; PAM sequence: ATTTGTTT
agcagccactatctatggtg

SEQ ID NO: 6681 - DNA, 20 bp, Artificial Sequence
  Description of Artificial Sequence: Synthetic oligonucleotide
  Target: PCSK9; (-) strand; PAM type: NNNNGHTT; PAM sequence: TGGTGATT
attatagcagccactatcta

SEQ ID NO: 6682 - DNA, 20 bp, Artificial Sequence
  Description of Artificial Sequence: Synthetic oligonucleotide
  Target: PCSK9; (-) strand; PAM type: NNNNGHTT; PAM sequence: ATGAGATT
actgaggaccaaatttccac

SEQ ID NO: 6683 - DNA, 20 bp, Artificial Sequence
  Description of Artificial Sequence: Synthetic oligonucleotide
  Target: PCSK9; (-) strand; PAM type: NNNNGHTT; PAM sequence: AGCTGCTT
tgcttctggtgagggcctta

SEQ ID NO: 6684 - DNA, 20 bp, Artificial Sequence
  Description of Artificial Sequence: Synthetic oligonucleotide
  Target: PCSK9; (-) strand; PAM type: NNNNGHTT; PAM sequence: ATCTGCTT
ccaggaagcatggcaccagc

SEQ ID NO: 6685 - DNA, 20 bp, Artificial Sequence
  Description of Artificial Sequence: Synthetic oligonucleotide
  Target: PCSK9; (-) strand; PAM type: NNNNGHTT; PAM sequence: TCATGATT
ggaaaagggatttattcagc

SEQ ID NO: 6686 - DNA, 20 bp, Artificial Sequence
  Description of Artificial Sequence: Synthetic oligonucleotide
  Target: PCSK9; (-) strand; PAM type: NNNNGHTT; PAM sequence: AAGGGATT
ggtgagtaatttacaaggaa

SEQ ID NO: 6687 - DNA, 20 bp, Artificial Sequence
  Description of Artificial Sequence: Synthetic oligonucleotide
  Target: PCSK9; (-) strand; PAM type: NNNNGHTT; PAM sequence: ATGGGCTT
ataaattgagggaaaaaatc

SEQ ID NO: 6688 - DNA, 20 bp, Artificial Sequence
  Description of Artificial Sequence: Synthetic oligonucleotide
  Target: PCSK9; (-) strand; PAM type: NNNNGHTT; PAM sequence: ACAGGTTT
actacgggccacactcgaca

SEQ ID NO: 6689 - DNA, 20 bp, Artificial Sequence
  Description of Artificial Sequence: Synthetic oligonucleotide
  Target: PCSK9; (-) strand; PAM type: NNNNGHTT; PAM sequence: TTCTGATT
aatacatacttgctgtcccc

SEQ ID NO: 6690 - DNA, 20 bp, Artificial Sequence
  Description of Artificial Sequence: Synthetic oligonucleotide
  Target: PCSK9; (-) strand; PAM type: NNNNGHTT; PAM sequence: CTGTGCTT
atacagaaagccagtagtta

SEQ ID NO: 6691 - DNA, 20 bp, Artificial Sequence
  Description of Artificial Sequence: Synthetic oligonucleotide
  Target: PCSK9; (-) strand; PAM type: NNNNGHTT; PAM sequence: CCAGGCTT
gacgtaccactggggcatgg

SEQ ID NO: 6692 - DNA, 20 bp, Artificial Sequence
  Description of Artificial Sequence: Synthetic oligonucleotide
  Target: PCSK9; (-) strand; PAM type: NNNNGHTT; PAM sequence: ATGGGTTT
aatggctggcaggcagacca

SEQ ID NO: 6693 - DNA, 20 bp, Artificial Sequence
  Description of Artificial Sequence: Synthetic oligonucleotide
  Target: PCSK9; (-) strand; PAM type: NNNNGHTT; PAM sequence: ACAGGTTT
catcccagggccttgtccct

SEQ ID NO: 6694 - DNA, 20 bp, Artificial Sequence
  Description of Artificial Sequence: Synthetic oligonucleotide
  Target: PCSK9; (-) strand; PAM type: NNNNGHTT; PAM sequence: TCATGCTT
aggaattttggaccctagag

SEQ ID NO: 6695 - DNA, 20 bp, Artificial Sequence
  Description of Artificial Sequence: Synthetic oligonucleotide
  Target: PCSK9; (-) strand; PAM type: NNNNGHTT; PAM sequence: AACAGCTT
gggacttcactctggatagc

SEQ ID NO: 6696 - DNA, 20 bp, Artificial Sequence
  Description of Artificial Sequence: Synthetic oligonucleotide
  Target: PCSK9; (-) strand; PAM type: NNNNGHTT; PAM sequence: TTAAGATT
gcacaaataaaaacgttttt

SEQ ID NO: 6697 - DNA, 20 bp, Artificial Sequence
  Description of Artificial Sequence: Synthetic oligonucleotide
  Target: PCSK9; (-) strand; PAM type: NNNNGHTT; PAM sequence: AAACGTTT
tggtgcagaagcacaaataa

SEQ ID NO: 6698 - DNA, 20 bp, Artificial Sequence
  Description of Artificial Sequence: Synthetic oligonucleotide
  Target: PCSK9; (-) strand; PAM type: NNNNGHTT; PAM sequence: AGCTGATT
tgttcagccacggtatgctg

SEQ ID NO: 6699 - DNA, 20 bp, Artificial Sequence
  Description of Artificial Sequence: Synthetic oligonucleotide
  Target: PCSK9; (-) strand; PAM type: NNNNGHTT; PAM sequence: ACGGGTTT
cagtctcctctacttagact

SEQ ID NO: 6700 - DNA, 20 bp, Artificial Sequence
  Description of Artificial Sequence: Synthetic oligonucleotide
  Target: PCSK9; (-) strand; PAM type: NNNNGHTT; PAM sequence: TTCTGCTT
cctgcagccttctgtttgcc

SEQ ID NO: 6701 - DNA, 20 bp, Artificial Sequence
  Description of Artificial Sequence: Synthetic oligonucleotide
  Target: PCSK9; (-) strand; PAM type: NNNNGHTT; PAM sequence: TTCTGTTT
gatggcaaatgcctgcagcc

SEQ ID NO: 6702 - DNA, 20 bp, Artificial Sequence
  Description of Artificial Sequence: Synthetic oligonucleotide
  Target: PCSK9; (-) strand; PAM type: NNNNGHTT; PAM sequence: CCCAGTTT
gaacccaggctggtatgatg

SEQ ID NO: 6703 - DNA, 20 bp, Artificial Sequence
  Description of Artificial Sequence: Synthetic oligonucleotide
  Target: PCSK9; (-) strand; PAM type: NNNNGHTT; PAM sequence: AAGGGATT
gaatgaggctcagagaggtg

SEQ ID NO: 6704 - DNA, 20 bp, Artificial Sequence
  Description of Artificial Sequence: Synthetic oligonucleotide
  Target: PCSK9; (-) strand; PAM type: NNNNGHTT; PAM sequence: ACTGGTTT
tgaatgttccaattattata

SEQ ID NO: 6705 - DNA, 20 bp, Artificial Sequence
  Description of Artificial Sequence: Synthetic oligonucleotide
  Target: PCSK9; (-) strand; PAM type: NNNNGHTT; PAM sequence: GAATGCTT
ttccgtacctagcatctgct

SEQ ID NO: 6706 - DNA, 20 bp, Artificial Sequence
  Description of Artificial Sequence: Synthetic oligonucleotide
  Target: PCSK9; (-) strand; PAM type: NNNNGHTT; PAM sequence: GCGAGTTT
cttaacctgcccccacttca

SEQ ID NO: 6707 - DNA, 20 bp, Artificial Sequence
  Description of Artificial Sequence: Synthetic oligonucleotide
  Target: PCSK9; (-) strand; PAM type: NNNNGHTT; PAM sequence: AGAGGCTT
ctggatgccttcgtatcccc

SEQ ID NO: 6708 - DNA, 20 bp, Artificial Sequence
  Description of Artificial Sequence: Synthetic oligonucleotide
  Target: PCSK9; (-) strand; PAM type: NNNNGHTT; PAM sequence: GGGTGATT
catggcagcggtgaaccctc

SEQ ID NO: 6709 - DNA, 20 bp, Artificial Sequence
  Description of Artificial Sequence: Synthetic oligonucleotide
  Target: PCSK9; (-) strand; PAM type: NNNNGHTT; PAM sequence: GTGAGCTT
cccgggaggcagaggttgca

SEQ ID NO: 6710 - DNA, 20 bp, Artificial Sequence
  Description of Artificial Sequence: Synthetic oligonucleotide
  Target: PCSK9; (-) strand; PAM type: NNNNGHTT; PAM sequence: AATCGCTT
tcgggaggctgaggcaggag

SEQ ID NO: 6711 - DNA, 20 bp, Artificial Sequence
  Description of Artificial Sequence: Synthetic oligonucleotide
  Target: PCSK9; (-) strand; PAM type: NNNNGHTT; PAM sequence: CAAAGCTT
ctgcagcaccagctcccttg

SEQ ID NO: 6712 - DNA, 20 bp, Artificial Sequence
  Description of Artificial Sequence: Synthetic oligonucleotide
  Target: PCSK9; (-) strand; PAM type: NNNNGHTT; PAM sequence: TTCGGTTT
tgacataacagcactggcaa

SEQ ID NO: 6713 - DNA, 20 bp, Artificial Sequence
  Description of Artificial Sequence: Synthetic oligonucleotide
  Target: PCSK9; (-) strand; PAM type: NNNNGHTT; PAM sequence: GAAGGATT
gcatagaggattccttttag

SEQ ID NO: 6714 - DNA, 20 bp, Artificial Sequence
  Description of Artificial Sequence: Synthetic oligonucleotide
  Target: PCSK9; (-) strand; PAM type: NNNNGHTT; PAM sequence: AGAGGATT
cctgcaacacggtctggcat

SEQ ID NO: 6715 - DNA, 20 bp, Artificial Sequence
  Description of Artificial Sequence: Synthetic oligonucleotide
  Target: PCSK9; (-) strand; PAM type: NNNNGHTT; PAM sequence: CTGAGTTT
ccggaggacagactaggagc

SEQ ID NO: 6716 - DNA, 20 bp, Artificial Sequence
  Description of Artificial Sequence: Synthetic oligonucleotide
  Target: PCSK9; (-) strand; PAM type: NNNNGHTT; PAM sequence: CTCTGCTT
aagccagagaggccggggga

SEQ ID NO: 6717 - DNA, 20 bp, Artificial Sequence
  Description of Artificial Sequence: Synthetic oligonucleotide
  Target: PCSK9; (-) strand; PAM type: NNNNGHTT; PAM sequence: AATGGATT
ggccaggccagggcagagca

SEQ ID NO: 6718 - DNA, 20 bp, Artificial Sequence
  Description of Artificial Sequence: Synthetic oligonucleotide
  Target: PCSK9; (-) strand; PAM type: NNNNGHTT; PAM sequence: GACCGTTT
caagtccctgctagaatgca

SEQ ID NO: 6719 - DNA, 20 bp, Artificial Sequence
  Description of Artificial Sequence: Synthetic oligonucleotide
  Target: PCSK9; (-) strand; PAM type: NNNNGHTT; PAM sequence: AGTGGCTT
cgacaaagctcatagaagaa

SEQ ID NO: 6720 - DNA, 20 bp, Artificial Sequence
  Description of Artificial Sequence: Synthetic oligonucleotide
  Target: PCSK9; (-) strand; PAM type: NNNNGHTT; PAM sequence: CACAGTTT
ctcagacatatgcaaggtca

SEQ ID NO: 6721 - DNA, 20 bp, Artificial Sequence
  Description of Artificial Sequence: Synthetic oligonucleotide
  Target: PCSK9; (-) strand; PAM type: NNNNGHTT; PAM sequence: TCAGGCTT
gtggtcctgccgacactgat

SEQ ID NO: 6722 - DNA, 20 bp, Artificial Sequence
  Description of Artificial Sequence: Synthetic oligonucleotide
  Target: PCSK9; (-) strand; PAM type: NNNNGHTT; PAM sequence: CACTGATT
ggagaaagtggtcctgccga

SEQ ID NO: 6723 - DNA, 20 bp, Artificial Sequence
  Description of Artificial Sequence: Synthetic oligonucleotide
  Target: PCSK9; (-) strand; PAM type: NNNNGHTT; PAM sequence: AGAAGCTT
tgggacacggaagaggcaag

SEQ ID NO: 6724 - DNA, 20 bp, Artificial Sequence
  Description of Artificial Sequence: Synthetic oligonucleotide
  Target: PCSK9; (-) strand; PAM type: NNNNGHTT; PAM sequence: CTGGGATT
aggctgtgtgaagacagagg

SEQ ID NO: 6725 - DNA, 20 bp, Artificial Sequence
  Description of Artificial Sequence: Synthetic oligonucleotide
  Target: PCSK9; (-) strand; PAM type: NNNNGHTT; PAM sequence: GTCTGCTT
tggggaagaaagggccccac

SEQ ID NO: 6726 - DNA, 20 bp, Artificial Sequence
  Description of Artificial Sequence: Synthetic oligonucleotide
  Target: PCSK9; (-) strand; PAM type: NNNNGHTT; PAM sequence: CCATGCTT
gcggcagccagctctagggc

SEQ ID NO: 6727 - DNA, 20 bp, Artificial Sequence
  Description of Artificial Sequence: Synthetic oligonucleotide
  Target: PCSK9; (-) strand; PAM type: NNNNGHTT; PAM sequence: CTGGGTTT
cacagttaagagtgcagggt

SEQ ID NO: 6728 - DNA, 20 bp, Artificial Sequence
  Description of Artificial Sequence: Synthetic oligonucleotide
  Target: PCSK9; (-) strand; PAM type: NNNNGHTT; PAM sequence: AACTGATT
gaaatgcatgctacagcaat

SEQ ID NO: 6729 - DNA, 20 bp, Artificial Sequence
  Description of Artificial Sequence: Synthetic oligonucleotide
  Target: PCSK9; (-) strand; PAM type: NNNNGHTT; PAM sequence: AATGGATT
caagtagcatttgtttaagg

SEQ ID NO: 6730 - DNA, 20 bp, Artificial Sequence
  Description of Artificial Sequence: Synthetic oligonucleotide
  Target: PCSK9; (-) strand; PAM type: NNNNGHTT; PAM sequence: ATTTGTTT
actaatctgtgtcaagtagc

SEQ ID NO: 6731 - DNA, 20 bp, Artificial Sequence
  Description of Artificial Sequence: Synthetic oligonucleotide
  Target: PCSK9; (-) strand; PAM type: NNNNGHTT; PAM sequence: CAGCGCTT
cccgtaggtcttggctagaa

SEQ ID NO: 6732 - DNA, 20 bp, Artificial Sequence
  Description of Artificial Sequence: Synthetic oligonucleotide
  Target: PCSK9; (-) strand; PAM type: NNNNGHTT; PAM sequence: CACTGCTT
gcttcaatccacgttcattc

SEQ ID NO: 6733 - DNA, 20 bp, Artificial Sequence
  Description of Artificial Sequence: Synthetic oligonucleotide
  Target: PCSK9; (-) strand; PAM type: NNNNGHTT; PAM sequence: CACAGCTT
ggccacactccctcctgcct

SEQ ID NO: 6734 - DNA, 20 bp, Artificial Sequence
  Description of Artificial Sequence: Synthetic oligonucleotide
  Target: PCSK9; (-) strand; PAM type: NNNNGHTT; PAM sequence: TCCTGCTT
tctggcaggtgagagcccag

SEQ ID NO: 6735 - DNA, 20 bp, Artificial Sequence
  Description of Artificial Sequence: Synthetic oligonucleotide
  Target: PCSK9; (-) strand; PAM type: NNNNGHTT; PAM sequence: TTGGGCTT
aagcccccacaggaacatcc

SEQ ID NO: 6736 - DNA, 20 bp, Artificial Sequence
  Description of Artificial Sequence: Synthetic oligonucleotide
  Target: PCSK9; (-) strand; PAM type: NNNNGHTT; PAM sequence: CCGTGCTT
agagtcctttctggtcccac

SEQ ID NO: 6737 - DNA, 20 bp, Artificial Sequence
  Description of Artificial Sequence: Synthetic oligonucleotide
  Target: PCSK9; (-) strand; PAM type: NNNNGHTT; PAM sequence: GCAGGCTT
tcgagcagaaggcctgctgg

SEQ ID NO: 6738 - DNA, 20 bp, Artificial Sequence
  Description of Artificial Sequence: Synthetic oligonucleotide
  Target: PCSK9; (-) strand; PAM type: NNNNGHTT; PAM sequence: GGCTGCTT
tatctagaagacagcacaga

SEQ ID NO: 6739 - DNA, 20 bp, Artificial Sequence
  Description of Artificial Sequence: Synthetic oligonucleotide
  Target: PCSK9; (-) strand; PAM type: NNNNGHTT; PAM sequence: ACAGGCTT
tggcagacagcccggggaat

SEQ ID NO: 6740 - DNA, 20 bp, Artificial Sequence
  Description of Artificial Sequence: Synthetic oligonucleotide
  Target: PCSK9; (-) strand; PAM type: NNNNGHTT; PAM sequence: CAGAGCTT
agcagcccaaggttttccct

SEQ ID NO: 6741 - DNA, 20 bp, Artificial Sequence
  Description of Artificial Sequence: Synthetic oligonucleotide
  Target: PCSK9; (-) strand; PAM type: NNNNGHTT; PAM sequence: CAAGGTTT
caggtgctcaggaagcagcc

SEQ ID NO: 6742 - DNA, 20 bp, Artificial Sequence
  Description of Artificial Sequence: Synthetic oligonucleotide
  Target: PCSK9; (-) strand; PAM type: NNNNGHTT; PAM sequence: AGGAGCTT
ccttgctctctgagtgtgtt

SEQ ID NO: 6743 - DNA, 20 bp, Artificial Sequence
  Description of Artificial Sequence: Synthetic oligonucleotide
  Target: PCSK9; (-) strand; PAM type: NNNNGHTT; PAM sequence: TTTGGTTT
ctgatcagtcccgtgggcac

SEQ ID NO: 6744 - DNA, 20 bp, Artificial Sequence
  Description of Artificial Sequence: Synthetic oligonucleotide
  Target: PCSK9; (-) strand; PAM type: NNNNGHTT; PAM sequence: AGATGCTT
atccagatgatgccatcttg

SEQ ID NO: 6745 - DNA, 20 bp, Artificial Sequence
  Description of Artificial Sequence: Synthetic oligonucleotide
  Target: PCSK9; (-) strand; PAM type: NNNNGHTT; PAM sequence: CCTGGCTT
tctggtggctgctggtgttc

SEQ ID NO: 6746 - DNA, 20 bp, Artificial Sequence
  Description of Artificial Sequence: Synthetic oligonucleotide
  Target: PCSK9; (-) strand; PAM type: NNNNGHTT; PAM sequence: TCCGGCTT
aagaaccctgcctcacgtct

SEQ ID NO: 6747 - DNA, 20 bp, Artificial Sequence
  Description of Artificial Sequence: Synthetic oligonucleotide
  Target: PCSK9; (-) strand; PAM type: NNNNGHTT; PAM sequence: TATGGCTT
cagggcgtgtacccacttct

SEQ ID NO: 6748 - DNA, 20 bp, Artificial Sequence
  Description of Artificial Sequence: Synthetic oligonucleotide
  Target: PCSK9; (-) strand; PAM type: NNNNGHTT; PAM sequence: TAGAGATT
cctccaaatatgctgcagag

SEQ ID NO: 6749 - DNA, 20 bp, Artificial Sequence
  Description of Artificial Sequence: Synthetic oligonucleotide
  Target: PCSK9; (-) strand; PAM type: NNNNGHTT; PAM sequence: TTTGGATT
atcatccctaactggatcag

SEQ ID NO: 6750 - DNA, 20 bp, Artificial Sequence
  Description of Artificial Sequence: Synthetic oligonucleotide
  Target: PCSK9; (-) strand; PAM type: NNNNGHTT; PAM sequence: ATCAGTTT
actttatcatccctaactgg

SEQ ID NO: 6751 - DNA, 20 bp, Artificial Sequence
  Description of Artificial Sequence: Synthetic oligonucleotide
  Target: PCSK9; (-) strand; PAM type: NNNNGHTT; PAM sequence: GACTGCTT
ataccaggagggctcacggg

SEQ ID NO: 6752 - DNA, 20 bp, Artificial Sequence
  Description of Artificial Sequence: Synthetic oligonucleotide
  Target: PCSK9; (-) strand; PAM type: NNNNGHTT; PAM sequence: ACAAGATT
ccgagtctgcaagaaagaca

SEQ ID NO: 6753 - DNA, 20 bp, Artificial Sequence
  Description of Artificial Sequence: Synthetic oligonucleotide
  Target: PCSK9; (-) strand; PAM type: NNNNGHTT; PAM sequence: ACTCGTTT
aaagcgccttaaatatattc

SEQ ID NO: 6754 - DNA, 20 bp, Artificial Sequence
  Description of Artificial Sequence: Synthetic oligonucleotide
  Target: PCSK9; (-) strand; PAM type: NNNNGHTT; PAM sequence: CCTCGATT
gtcggtgaccatgaccctgc

SEQ ID NO: 6755 - DNA, 20 bp, Artificial Sequence
  Description of Artificial Sequence: Synthetic oligonucleotide
  Target: PCSK9; (-) strand; PAM type: NNNNGHTT; PAM sequence: CCGTGCTT
gcagccctcccatcagacgg

SEQ ID NO: 6756 - DNA, 20 bp, Artificial Sequence
  Description of Artificial Sequence: Synthetic oligonucleotide
  Target: PCSK9; (-) strand; PAM type: NNNNGHTT; PAM sequence: CTGGGTTT
ctgcatgaccctcttggggc

SEQ ID NO: 6757 - DNA, 20 bp, Artificial Sequence
  Description of Artificial Sequence: Synthetic oligonucleotide
  Target: PCSK9; (-) strand; PAM type: NNNNGHTT; PAM sequence: ACCGGATT
acaaaagacataaagacatc

SEQ ID NO: 6758 - DNA, 20 bp, Artificial Sequence
  Description of Artificial Sequence: Synthetic oligonucleotide
  Target: PCSK9; (-) strand; PAM type: NNNNGHTT; PAM sequence: GTTTGCTT
gcaagcagaagatagaaaaa

SEQ ID NO: 6759 - DNA, 20 bp, Artificial Sequence
  Description of Artificial Sequence: Synthetic oligonucleotide
  Target: PCSK9; (-) strand; PAM type: NNNNGHTT; PAM sequence: AAAAGTTT
gtatgcaagcagaagataga

SEQ ID NO: 6760 - DNA, 20 bp, Artificial Sequence
  Description of Artificial Sequence: Synthetic oligonucleotide
  Target: PCSK9; (-) strand; PAM type: NNNNGHTT; PAM sequence: ACTGGTTT
cagtcacctcccctctctgg

SEQ ID NO: 6761 - DNA, 20 bp, Artificial Sequence
  Description of Artificial Sequence: Synthetic oligonucleotide
  Target: PCSK9; (-) strand; PAM type: NNNNGHTT; PAM sequence: CCCAGCTT
acagttttcccagcgagttc

SEQ ID NO: 6762 - DNA, 20 bp, Artificial Sequence
  Description of Artificial Sequence: Synthetic oligonucleotide
  Target: PCSK9; (-) strand; PAM type: NNNNGHTT; PAM sequence: GACAGTTT
tcaagctgctgcccagagct

SEQ ID NO: 6763 - DNA, 20 bp, Artificial Sequence
  Description of Artificial Sequence: Synthetic oligonucleotide
  Target: PCSK9; (-) strand; PAM type: NNNNGHTT; PAM sequence: TGGGGCTT
cagtgtttgaccctgggggc

SEQ ID NO: 6764 - DNA, 20 bp, Artificial Sequence
  Description of Artificial Sequence: Synthetic oligonucleotide
  Target: PCSK9; (-) strand; PAM type: NNNNGHTT; PAM sequence: CAGTGTTT
gcctctgccagcaccagagc

SEQ ID NO: 6765 - DNA, 20 bp, Artificial Sequence
  Description of Artificial Sequence: Synthetic oligonucleotide
  Target: PCSK9; (-) strand; PAM type: NNNNGHTT; PAM sequence: TATTGATT
cacctgatggggcagaaggt

SEQ ID NO: 6766 - DNA, 20 bp, Artificial Sequence
  Description of Artificial Sequence: Synthetic oligonucleotide
  Target: PCSK9; (-) strand; PAM type: NNNNGHTT; PAM sequence: AAGGGCTT
cccgtgccaggtcatgcaat

SEQ ID NO: 6767 - DNA, 20 bp, Artificial Sequence
  Description of Artificial Sequence: Synthetic oligonucleotide
  Target: PCSK9; (-) strand; PAM type: NNNNGHTT; PAM sequence: ACCTGCTT
ctcagactggacacacaatc

SEQ ID NO: 6768 - DNA, 20 bp, Artificial Sequence
  Description of Artificial Sequence: Synthetic oligonucleotide
  Target: PCSK9; (-) strand; PAM type: NNNNGHTT; PAM sequence: GTGTGCTT
ctagttattaagcacctgct

SEQ ID NO: 6769 - DNA, 20 bp, Artificial Sequence
  Description of Artificial Sequence: Synthetic oligonucleotide
  Target: PCSK9; (-) strand; PAM type: NNNNGHTT; PAM sequence: CTGGGATT
cacctcggcctcccaaagtg

SEQ ID NO: 6770 - DNA, 20 bp, Artificial Sequence
  Description of Artificial Sequence: Synthetic oligonucleotide
  Target: PCSK9; (-) strand; PAM type: NNNNGHTT; PAM sequence: CGGGGTTT
ttttgtatttttagtagaga

SEQ ID NO: 6771 - DNA, 20 bp, Artificial Sequence
  Description of Artificial Sequence: Synthetic oligonucleotide
  Target: PCSK9; (-) strand; PAM type: NNNNGHTT; PAM sequence: AAGCGATT
aacctccacctcctgggttc

SEQ ID NO: 6772 - DNA, 20 bp, Artificial Sequence
  Description of Artificial Sequence: Synthetic oligonucleotide
  Target: PCSK9; (-) strand; PAM type: NNNNGHTT; PAM sequence: GCTGGATT
aatctcgctctatcactcag

SEQ ID NO: 6773 - DNA, 20 bp, Artificial Sequence
  Description of Artificial Sequence: Synthetic oligonucleotide
  Target: PCSK9; (-) strand; PAM type: NNNNGHTT; PAM sequence: GACAGCTT
gtgcaaggggacctggaact

SEQ ID NO: 6774 - DNA, 20 bp, Artificial Sequence
  Description of Artificial Sequence: Synthetic oligonucleotide
  Target: PCSK9; (-) strand; PAM type: NNNNGHTT; PAM sequence: CTAAGATT
cgccttgccctcccaaagtg

SEQ ID NO: 6775 - DNA, 20 bp, Artificial Sequence
  Description of Artificial Sequence: Synthetic oligonucleotide
  Target: PCSK9; (-) strand; PAM type: NNNNGHTT; PAM sequence: CGGGGCTT
ttttgtagttttagtagaga

SEQ ID NO: 6776 - DNA, 20 bp, Artificial Sequence
  Description of Artificial Sequence: Synthetic oligonucleotide
  Target: PCSK9; (-) strand; PAM type: NNNNGHTT; PAM sequence: TGTAGTTT
accacgcccggctaattttt

SEQ ID NO: 6777 - DNA, 20 bp, Artificial Sequence
  Description of Artificial Sequence: Synthetic oligonucleotide
  Target: PCSK9; (-) strand; PAM type: NNNNGHTT; PAM sequence: CCAGGATT
tgaaacagggacagttgctc

SEQ ID NO: 6778 - DNA, 20 bp, Artificial Sequence
  Description of Artificial Sequence: Synthetic oligonucleotide
  Target: PCSK9; (-) strand; PAM type: NNNNGHTT; PAM sequence: TTCTGCTT
taatatatacatcctactgg

SEQ ID NO: 6779 - DNA, 20 bp, Artificial Sequence
  Description of Artificial Sequence: Synthetic oligonucleotide
  Target: PCSK9; (-) strand; PAM type: NNNNGHTT; PAM sequence: ATGAGCTT
ttgccagcccgcacggtcac

SEQ ID NO: 6780 - DNA, 20 bp, Artificial Sequence
  Description of Artificial Sequence: Synthetic oligonucleotide
  Target: PCSK9; (-) strand; PAM type: NNNNGHTT; PAM sequence: TGCGGATT
ccagcctgcctggcctgccc

SEQ ID NO: 6781 - DNA, 20 bp, Artificial Sequence
  Description of Artificial Sequence: Synthetic oligonucleotide
  Target: PCSK9; (-) strand; PAM type: NNNNGHTT; PAM sequence: TGATGTTT
tggggatcaactttgtggcc

SEQ ID NO: 6782 - DNA, 20 bp, Artificial Sequence
  Description of Artificial Sequence: Synthetic oligonucleotide
  Target: PCSK9; (-) strand; PAM type: NNNNGHTT; PAM sequence: GCTGGCTT
tggccccacaggctggacca

SEQ ID NO: 6783 - DNA, 20 bp, Artificial Sequence
  Description of Artificial Sequence: Synthetic oligonucleotide
  Target: PCSK9; (-) strand; PAM type: NNNNGHTT; PAM sequence: GGAGGTTT
tattcagactctgcgatgat

SEQ ID NO: 6784 - DNA, 20 bp, Artificial Sequence
  Description of Artificial Sequence: Synthetic oligonucleotide
  Target: PCSK9; (-) strand; PAM type: NNNNGHTT; PAM sequence: ACAAGATT
agttccagacttgaagtgga

SEQ ID NO: 6785 - DNA, 20 bp, Artificial Sequence
  Description of Artificial Sequence: Synthetic oligonucleotide
  Target: PCSK9; (-) strand; PAM type: NNNNGHTT; PAM sequence: GTTTGCTT
gcagagatgtgttgggcttt

SEQ ID NO: 6786 - DNA, 20 bp, Artificial Sequence
  Description of Artificial Sequence: Synthetic oligonucleotide
  Target: PCSK9; (-) strand; PAM type: NNNNGHTT; PAM sequence: CTTTGTTT
caaggcagagatgtgttggg

SEQ ID NO: 6787 - DNA, 20 bp, Artificial Sequence
  Description of Artificial Sequence: Synthetic oligonucleotide
  Target: PCSK9; (-) strand; PAM type: NNNNGHTT; PAM sequence: TTGGGCTT
gaggacaaggcagagatgtg

SEQ ID NO: 6788 - DNA, 20 bp, Artificial Sequence
  Description of Artificial Sequence: Synthetic oligonucleotide
  Target: PCSK9; (-) strand; PAM type: NNNNGHTT; PAM sequence: TGGAGTTT
cagcattcccaatgcccctg

SEQ ID NO: 6789 - DNA, 20 bp, Artificial Sequence
  Description of Artificial Sequence: Synthetic oligonucleotide
  Target: PCSK9; (-) strand; PAM type: NNNNGHTT; PAM sequence: ACCTGTTT
gggctggacaactgctatac

SEQ ID NO: 6790 - DNA, 20 bp, Artificial Sequence
  Description of Artificial Sequence: Synthetic oligonucleotide
  Target: PCSK9; (-) strand; PAM type: NNNNGHTT; PAM sequence: TCGTGTTT
cctctaatacagccctgacc

SEQ ID NO: 6791 - DNA, 20 bp, Artificial Sequence
  Description of Artificial Sequence: Synthetic oligonucleotide
  Target: PCSK9; (-) strand; PAM type: NNNNGHTT; PAM sequence: TCCTGCTT
tggacttgcccaccctgcca

SEQ ID NO: 6792 - DNA, 20 bp, Artificial Sequence
  Description of Artificial Sequence: Synthetic oligonucleotide
  Target: PCSK9; (-) strand; PAM type: NNNNGHTT; PAM sequence: GAGGGCTT
tagttcatggtaggagagag

SEQ ID NO: 6793 - DNA, 20 bp, Artificial Sequence
  Description of Artificial Sequence: Synthetic oligonucleotide
  Target: PCSK9; (-) strand; PAM type: NNNNGHTT; PAM sequence: CGCCGCTT
tcacctccatgcgctcgccc

SEQ ID NO: 6794 - DNA, 20 bp, Artificial Sequence
  Description of Artificial Sequence: Synthetic oligonucleotide
  Target: PCSK9; (-) strand; PAM type: NNNNGHTT; PAM sequence: AGGGGCTT
agctggagtctggaggatgg

SEQ ID NO: 6795 - DNA, 20 bp, Artificial Sequence
  Description of Artificial Sequence: Synthetic oligonucleotide
  Target: PCSK9; (-) strand; PAM type: NNNNGHTT; PAM sequence: GTAAGCTT
ctcctggtctggccagccct

SEQ ID NO: 6796 - DNA, 20 bp, Artificial Sequence
  Description of Artificial Sequence: Synthetic oligonucleotide
  Target: PCSK9; (-) strand; PAM type: NNNNGHTT; PAM sequence: TTGAGATT
aattccacttttttgctggt

SEQ ID NO: 6797 - DNA, 20 bp, Artificial Sequence
  Description of Artificial Sequence: Synthetic oligonucleotide
  Target: PCSK9; (-) strand; PAM type: NNNNGHTT; PAM sequence: GCTGGTTT
aacatcaattccactttttt

SEQ ID NO: 6798 - DNA, 20 bp, Artificial Sequence
  Description of Artificial Sequence: Synthetic oligonucleotide
  Target: PCSK9; (-) strand; PAM type: NNNNGHTT; PAM sequence: AGTGGTTT
aaaagttcttccaaacacag

SEQ ID NO: 6799 - DNA, 20 bp, Artificial Sequence
  Description of Artificial Sequence: Synthetic oligonucleotide
  Target: PCSK9; (-) strand; PAM type: NNNNGHTT; PAM sequence: ATGGGCTT
aaatgggaatctgctttaga

SEQ ID NO: 6800 - DNA, 20 bp, Artificial Sequence
  Description of Artificial Sequence: Synthetic oligonucleotide
  Target: PCSK9; (-) strand; PAM type: NNNNGHTT; PAM sequence: ATCTGCTT
agtcaaagacggaaatggga

SEQ ID NO: 6801 - DNA, 20 bp, Artificial Sequence
  Description of Artificial Sequence: Synthetic oligonucleotide
  Target: PCSK9; (-) strand; PAM type: NNNNGHTT; PAM sequence: ACCAGCTT
aagcgttgtgggcccggcag

SEQ ID NO: 6802 - DNA, 20 bp, Artificial Sequence
  Description of Artificial Sequence: Synthetic oligonucleotide
  Target: PCSK9; (-) strand; PAM type: NNNNGHTT; PAM sequence: TCAGGCTT
ccagagtatggaactgcaag

SEQ ID NO: 6803 - DNA, 20 bp, Artificial Sequence
  Description of Artificial Sequence: Synthetic oligonucleotide
  Target: PCSK9; (-) strand; PAM type: NNNNGHTT; PAM sequence: AAGTGCTT
tattgtcccggcactaagct

SEQ ID NO: 6804 - DNA, 20 bp, Artificial Sequence
  Description of Artificial Sequence: Synthetic oligonucleotide
  Target: PCSK9; (-) strand; PAM type: NNNNGHTT; PAM sequence: GCTGGATT
aatagttgcctataccagag

SEQ ID NO: 6805 - DNA, 20 bp, Artificial Sequence
  Description of Artificial Sequence: Synthetic oligonucleotide
  Target: PCSK9; (-) strand; PAM type: NNNNGHTT; PAM sequence: GCATGTTT
acttcctgctacctgcctgg

SEQ ID NO: 6806 - DNA, 20 bp, Artificial Sequence
  Description of Artificial Sequence: Synthetic oligonucleotide
  Target: PCSK9; (-) strand; PAM type: NNNNGHTT; PAM sequence: GCGTGATT
ctgagcacttccaaagggga

SEQ ID NO: 6807 - DNA, 20 bp, Artificial Sequence
  Description of Artificial Sequence: Synthetic oligonucleotide
  Target: PCSK9; (-) strand; PAM type: NNNNGHTT; PAM sequence: GTCAGATT
tttgaggtgcgcttcatgga

SEQ ID NO: 6808 - DNA, 20 bp, Artificial Sequence
  Description of Artificial Sequence: Synthetic oligonucleotide
  Target: PCSK9; (-) strand; PAM type: NNNNGHTT; PAM sequence: GTGCGCTT
gcaaaatggtgctctttgag

SEQ ID NO: 6809 - DNA, 20 bp, Artificial Sequence
  Description of Artificial Sequence: Synthetic oligonucleotide
  Target: PCSK9; (-) strand; PAM type: NNNNGHTT; PAM sequence: CTCTGTTT
gttacttagctacactgagg

SEQ ID NO: 6810 - DNA, 20 bp, Artificial Sequence
  Description of Artificial Sequence: Synthetic oligonucleotide
  Target: PCSK9; (-) strand; PAM type: NNNNGHTT; PAM sequence: ATGGGCTT
accacctcagaatgccctcc

SEQ ID NO: 6811 - DNA, 20 bp, Artificial Sequence
  Description of Artificial Sequence: Synthetic oligonucleotide
  Target: PCSK9; (-) strand; PAM type: NNNNGHTT; PAM sequence: CTTAGTTT
gccattcaacctctctgagc

SEQ ID NO: 6812 - DNA, 20 bp, Artificial Sequence
  Description of Artificial Sequence: Synthetic oligonucleotide
  Target: PCSK9; (-) strand; PAM type: NNNNGHTT; PAM sequence: GGCGGCTT
gacctcgtggcctcagcaca

SEQ ID NO: 6813 - DNA, 20 bp, Artificial Sequence
  Description of Artificial Sequence: Synthetic oligonucleotide
  Target: PCSK9; (-) strand; PAM type: NNNNGHTT; PAM sequence: CCGGGATT
cttcacctgctcctgagggg

SEQ ID NO: 6814 - DNA, 20 bp, Artificial Sequence
  Description of Artificial Sequence: Synthetic oligonucleotide
  Target: PCSK9; (-) strand; PAM type: NNNNGHTT; PAM sequence: GATTGCTT
tggggaggctgagaccagag

SEQ ID NO: 6815 - DNA, 20 bp, Artificial Sequence
  Description of Artificial Sequence: Synthetic oligonucleotide
  Target: PCSK9; (-) strand; PAM type: NNNNGHTT; PAM sequence: AGAGGATT
cacttggggaggctgagacc

SEQ ID NO: 6816 - DNA, 20 bp, Artificial Sequence
  Description of Artificial Sequence: Synthetic oligonucleotide
  Target: PCSK9; (-) strand; PAM type: NNNNGHTT; PAM sequence: GCAGGTTT
ctgaccctgagaccctccca

SEQ ID NO: 6817 - DNA, 20 bp, Artificial Sequence
  Description of Artificial Sequence: Synthetic oligonucleotide
  Target: PCSK9; (-) strand; PAM type: NNNNGHTT; PAM sequence: CAGGGCTT
aaggcccggctgtcacattc

SEQ ID NO: 6818 - DNA, 20 bp, Artificial Sequence
  Description of Artificial Sequence: Synthetic oligonucleotide
  Target: PCSK9; (-) strand; PAM type: NNNNGHTT; PAM sequence: TCAGGTTT
ttttaaggagagttatacac

SEQ ID NO: 6819 - DNA, 20 bp, Artificial Sequence
  Description of Artificial Sequence: Synthetic oligonucleotide
  Target: PCSK9; (-) strand; PAM type: NNNNGHTT; PAM sequence: ACTGGCTT
ctgccttttgaggagctcct

SEQ ID NO: 6820 - DNA, 20 bp, Artificial Sequence
  Description of Artificial Sequence: Synthetic oligonucleotide
  Target: PCSK9; (-) strand; PAM type: NNNNGHTT; PAM sequence: GTTTGTTT
ttcagtactctatattaatg

SEQ ID NO: 6821 - DNA, 20 bp, Artificial Sequence
  Description of Artificial Sequence: Synthetic oligonucleotide
  Target: PCSK9; (-) strand; PAM type: NNNNGHTT; PAM sequence: AATGGTTT
tcttttcagtactctatatt

SEQ ID NO: 6822 - DNA, 20 bp, Artificial Sequence
  Description of Artificial Sequence: Synthetic oligonucleotide
  Target: PCSK9; (-) strand; PAM type: NNNNGHTT; PAM sequence: TATAGTTT
caccccattcccttccttgc

SEQ ID NO: 6823 - DNA, 20 bp, Artificial Sequence
  Description of Artificial Sequence: Synthetic oligonucleotide
  Target: PCSK9; (-) strand; PAM type: NNNNGHTT; PAM sequence: GCCTGTTT
aacatgttctctgcctcatg

SEQ ID NO: 6824 - DNA, 20 bp, Artificial Sequence
  Description of Artificial Sequence: Synthetic oligonucleotide
  Target: PCSK9; (-) strand; PAM type: NNNNGHTT; PAM sequence: CTTTGCTT
gcacatccccacctgggggc

SEQ ID NO: 6825 - DNA, 20 bp, Artificial Sequence
  Description of Artificial Sequence: Synthetic oligonucleotide
  Target: PCSK9; (-) strand; PAM type: NNNNGHTT; PAM sequence: TCTGGTTT
ctcataactattcccacctc

SEQ ID NO: 6826 - DNA, 20 bp, Artificial Sequence
  Description of Artificial Sequence: Synthetic oligonucleotide
  Target: PCSK9; (-) strand; PAM type: NNNNGHTT; PAM sequence: CCCTGCTT
ccaccgcctccctccagtct

SEQ ID NO: 6827 - DNA, 20 bp, Artificial Sequence
  Description of Artificial Sequence: Synthetic oligonucleotide
  Target: PCSK9; (-) strand; PAM type: NNNNGHTT; PAM sequence: CCTGGTTT
acgtgagctcctgcttcatg

SEQ ID NO: 6828 - DNA, 20 bp, Artificial Sequence
  Description of Artificial Sequence: Synthetic oligonucleotide
  Target: PCSK9; (-) strand; PAM type: NNNNGHTT; PAM sequence: TCCTGCTT
ggctgaccaaacacgtgagc

SEQ ID NO: 6829 - DNA, 20 bp, Artificial Sequence
  Description of Artificial Sequence: Synthetic oligonucleotide
  Target: PCSK9; (-) strand; PAM type: NNNNGHTT; PAM sequence: GGGAGCTT
aaatgccccacagtgaggga

SEQ ID NO: 6830 - DNA, 20 bp, Artificial Sequence
  Description of Artificial Sequence: Synthetic oligonucleotide
  Target: PCSK9; (-) strand; PAM type: NNNNGHTT; PAM sequence: ACCTGTTT
cagcacccgagcacagctcg

SEQ ID NO: 6831 - DNA, 20 bp, Artificial Sequence
  Description of Artificial Sequence: Synthetic oligonucleotide
  Target: PCSK9; (-) strand; PAM type: NNNNGHTT; PAM sequence: TGAGGATT
ctgcctccttggtggagacc

SEQ ID NO: 6832 - DNA, 20 bp, Artificial Sequence
  Description of Artificial Sequence: Synthetic oligonucleotide
  Target: PCSK9; (-) strand; PAM type: NNNNGHTT; PAM sequence: CGATGTTT
ctttcacactcaccccccaa

SEQ ID NO: 6833 - DNA, 20 bp, Artificial Sequence
  Description of Artificial Sequence: Synthetic oligonucleotide
  Target: PCSK9; (-) strand; PAM type: NNNNGHTT; PAM sequence: AGGGGCTT
ccattaatcagggagccccc

SEQ ID NO: 6834 - DNA, 20 bp, Artificial Sequence
  Description of Artificial Sequence: Synthetic oligonucleotide
  Target: PCSK9; (-) strand; PAM type: NNNNGHTT; PAM sequence: CCAGGTTT
caggcacgccccctctggtt

SEQ ID NO: 6835 - DNA, 20 bp, Artificial Sequence
  Description of Artificial Sequence: Synthetic oligonucleotide
  Target: PCSK9; (-) strand; PAM type: NNNNGHTT; PAM sequence: GTGAGCTT
tctggctcagttcctgctgt

SEQ ID NO: 6836 - DNA, 20 bp, Artificial Sequence
  Description of Artificial Sequence: Synthetic oligonucleotide
  Target: PCSK9; (-) strand; PAM type: NNNNGHTT; PAM sequence: CTGCGTTT
ggcttcagagccagcccaat

SEQ ID NO: 6837 - DNA, 20 bp, Artificial Sequence
  Description of Artificial Sequence: Synthetic oligonucleotide
  Target: PCSK9; (-) strand; PAM type: NNNNGHTT; PAM sequence: CTTGGCTT
ccgggtgaagtaagaagagg

SEQ ID NO: 6838 - DNA, 20 bp, Artificial Sequence
  Description of Artificial Sequence: Synthetic oligonucleotide
  Target: PCSK9; (-) strand; PAM type: NNNNGHTT; PAM sequence: AGAGGCTT
cccagccgggtgaagtaaga

SEQ ID NO: 6839 - DNA, 20 bp, Artificial Sequence
  Description of Artificial Sequence: Synthetic oligonucleotide
  Target: PCSK9; (-) strand; PAM type: NNNNGHTT; PAM sequence: CCGAGCTT
catcgttctgccatcactca

SEQ ID NO: 6840 - DNA, 20 bp, Artificial Sequence
  Description of Artificial Sequence: Synthetic oligonucleotide
  Target: PCSK9; (-) strand; PAM type: NNNNGHTT; PAM sequence: GCTTGCTT
gacccaaaagataaatgtct

SEQ ID NO: 6841 - DNA, 20 bp, Artificial Sequence
  Description of Artificial Sequence: Synthetic oligonucleotide
  Target: PCSK9; (-) strand; PAM type: NNNNGHTT; PAM sequence: GTCTGCTT
gacagacccaaaagataaat

SEQ ID NO: 6842 - DNA, 20 bp, Artificial Sequence
  Description of Artificial Sequence: Synthetic oligonucleotide
  Target: PCSK9; (-) strand; PAM type: NNNNGHTT; PAM sequence: GTTTGTTT
caagagttaggacaacgttt

SEQ ID NO: 6843 - DNA, 20 bp, Artificial Sequence
  Description of Artificial Sequence: Synthetic oligonucleotide
  Target: PCSK9; (-) strand; PAM type: NNNNGHTT; PAM sequence: GTTTGTTT
tatgcaagagttaggacaac

SEQ ID NO: 6844 - DNA, 20 bp, Artificial Sequence
  Description of Artificial Sequence: Synthetic oligonucleotide
  Target: PCSK9; (-) strand; PAM type: NNNNGHTT; PAM sequence: CAACGTTT
agtctatgcaagagttagga

SEQ ID NO: 6845 - DNA, 20 bp, Artificial Sequence
  Description of Artificial Sequence: Synthetic oligonucleotide
  Target: PCSK9; (-) strand; PAM type: NNNNGHTT; PAM sequence: CTTGGCTT
ataaaagtactcatcaaata

SEQ ID NO: 6846 - DNA, 20 bp, Artificial Sequence
  Description of Artificial Sequence: Synthetic oligonucleotide
  Target: PCSK9; (-) strand; PAM type: NNNNGHTT; PAM sequence: CTGAGATT
tgcctcagcctcccaaagta

SEQ ID NO: 6847 - DNA, 20 bp, Artificial Sequence
  Description of Artificial Sequence: Synthetic oligonucleotide
  Target: PCSK9; (-) strand; PAM type: NNNNGHTT; PAM sequence: ACTTGCTT
gctgtctagagagagagaga

SEQ ID NO: 6848 - DNA, 20 bp, Artificial Sequence
  Description of Artificial Sequence: Synthetic oligonucleotide
  Target: PCSK9; (-) strand; PAM type: NNNNGHTT; PAM sequence: CTGAGATT
taatctgggaggaattttgc

SEQ ID NO: 6849 - DNA, 20 bp, Artificial Sequence
  Description of Artificial Sequence: Synthetic oligonucleotide
  Target: PCSK9; (-) strand; PAM type: NNNNGHTT; PAM sequence: GAATGCTT
attgccatctgtcaactctt

SEQ ID NO: 6850 - DNA, 20 bp, Artificial Sequence
  Description of Artificial Sequence: Synthetic oligonucleotide
  Target: PCSK9; (-) strand; PAM type: NNNNGHTT; PAM sequence: ACTTGATT
tggatctctaaccagctgat

SEQ ID NO: 6851 - DNA, 20 bp, Artificial Sequence
  Description of Artificial Sequence: Synthetic oligonucleotide
  Target: PCSK9; (-) strand; PAM type: NNNNGHTT; PAM sequence: TCCAGATT
tccccttccctatttgctag

SEQ ID NO: 6852 - DNA, 20 bp, Artificial Sequence
  Description of Artificial Sequence: Synthetic oligonucleotide
  Target: PCSK9; (-) strand; PAM type: NNNNGHTT; PAM sequence: CTGGGCTT
agatcgtgtcgctggtcaca

SEQ ID NO: 6853 - DNA, 20 bp, Artificial Sequence
  Description of Artificial Sequence: Synthetic oligonucleotide
  Target: PCSK9; (-) strand; PAM type: NNNNGHTT; PAM sequence: CAAAGCTT
tggtctccattcatctccac

SEQ ID NO: 6854 - DNA, 20 bp, Artificial Sequence
  Description of Artificial Sequence: Synthetic oligonucleotide
  Target: PCSK9; (-) strand; PAM type: NNNNGHTT; PAM sequence: CAAAGCTT
accatttcaggattcatctg

SEQ ID NO: 6855 - DNA, 20 bp, Artificial Sequence
  Description of Artificial Sequence: Synthetic oligonucleotide
  Target: PCSK9; (-) strand; PAM type: NNNNGHTT; PAM sequence: TCAGGATT
ctctggaggggctgaccatt

SEQ ID NO: 6856 - DNA, 20 bp, Artificial Sequence
  Description of Artificial Sequence: Synthetic oligonucleotide
  Target: PCSK9; (-) strand; PAM type: NNNNGHTT; PAM sequence: TGTTGATT
ctgtgcctggtgctaaatgc

SEQ ID NO: 6857 - DNA, 20 bp, Artificial Sequence
  Description of Artificial Sequence: Synthetic oligonucleotide
  Target: PCSK9; (-) strand; PAM type: NNNNGHTT; PAM sequence: CTTAGCTT
ggttcatgtgtggcaaagtt

SEQ ID NO: 6858 - DNA, 20 bp, Artificial Sequence
  Description of Artificial Sequence: Synthetic oligonucleotide
  Target: PCSK9; (-) strand; PAM type: NNNNGHTT; PAM sequence: TCTTGTTT
gctacctcttgtgtataaaa

SEQ ID NO: 6859 - DNA, 20 bp, Artificial Sequence
  Description of Artificial Sequence: Synthetic oligonucleotide
  Target: PCSK9; (-) strand; PAM type: NNNNGHTT; PAM sequence: CTGAGCTT
gaggtgtgtgcagttacctt

SEQ ID NO: 6860 - DNA, 20 bp, Artificial Sequence
  Description of Artificial Sequence: Synthetic oligonucleotide
  Target: PCSK9; (-) strand; PAM type: NNNNGHTT; PAM sequence: GTCAGTTT
cacggtcactgacaactaca

SEQ ID NO: 6861 - DNA, 20 bp, Artificial Sequence
  Description of Artificial Sequence: Synthetic oligonucleotide
  Target: PCSK9; (-) strand; PAM type: NNNNGHTT; PAM sequence: GGCCGATT
agtgaggccgatcttaagat

SEQ ID NO: 6862 - DNA, 20 bp, Artificial Sequence
  Description of Artificial Sequence: Synthetic oligonucleotide
  Target: PCSK9; (-) strand; PAM type: NNNNGHTT; PAM sequence: AGATGTTT
actgccaattttttggatga

SEQ ID NO: 6863 - DNA, 20 bp, Artificial Sequence
  Description of Artificial Sequence: Synthetic oligonucleotide
  Target: PCSK9; (-) strand; PAM type: NNNNGHTT; PAM sequence: ACAGGCTT
gtacaacagtgacagttatg

SEQ ID NO: 6864 - DNA, 20 bp, Artificial Sequence
  Description of Artificial Sequence: Synthetic oligonucleotide
  Target: PCSK9; (-) strand; PAM type: NNNNGHTT; PAM sequence: ACTTGATT
ttttcactttgctggtaacc

SEQ ID NO: 6865 - DNA, 20 bp, Artificial Sequence
  Description of Artificial Sequence: Synthetic oligonucleotide
  Target: PCSK9; (-) strand; PAM type: NNNNGHTT; PAM sequence: CATCGTTT
tatattgttgctgcaatgac

SEQ ID NO: 6866 - DNA, 20 bp, Artificial Sequence
  Description of Artificial Sequence: Synthetic oligonucleotide
  Target: PCSK9; (-) strand; PAM type: NNNNGHTT; PAM sequence: TGTTGCTT
atattatacgcttcagatca

SEQ ID NO: 6867 - DNA, 20 bp, Artificial Sequence
  Description of Artificial Sequence: Synthetic oligonucleotide
  Target: PCSK9; (-) strand; PAM type: NNNNGHTT; PAM sequence: ATACGCTT
gatcgtccaccgtgtatatt

SEQ ID NO: 6868 - DNA, 20 bp, Artificial Sequence
  Description of Artificial Sequence: Synthetic oligonucleotide
  Target: PCSK9; (-) strand; PAM type: NNNNGHTT; PAM sequence: TAAAGCTT
agcacctgccgtcctcactg

SEQ ID NO: 6869 - DNA, 20 bp, Artificial Sequence
  Description of Artificial Sequence: Synthetic oligonucleotide
  Target: PCSK9; (-) strand; PAM type: NNNNGHTT; PAM sequence: AAGAGATT
tctccgcccacatcctcacc

SEQ ID NO: 6870 - DNA, 20 bp, Artificial Sequence
  Description of Artificial Sequence: Synthetic oligonucleotide
  Target: PCSK9; (-) strand; PAM type: NNNNGHTT; PAM sequence: TACTGTTT
tacgtgaatacttcctgtcc

SEQ ID NO: 6871 - DNA, 20 bp, Artificial Sequence
  Description of Artificial Sequence: Synthetic oligonucleotide
  Target: PCSK9; (-) strand; PAM type: NNNNGHTT; PAM sequence: ATTGGTTT
ttgaaatgtgatgttctacc

SEQ ID NO: 6872 - DNA, 20 bp, Artificial Sequence
  Description of Artificial Sequence: Synthetic oligonucleotide
  Target: PCSK9; (-) strand; PAM type: NNNNGHTT; PAM sequence: TGCAGTTT
tcagacggttccaatggtct

SEQ ID NO: 6873 - DNA, 20 bp, Artificial Sequence
  Description of Artificial Sequence: Synthetic oligonucleotide
  Target: PCSK9; (-) strand; PAM type: NNNNGHTT; PAM sequence: GAGGGTTT
tcttttcattctctggcagt

SEQ ID NO: 6874 - DNA, 20 bp, Artificial Sequence
  Description of Artificial Sequence: Synthetic oligonucleotide
  Target: PCSK9; (-) strand; PAM type: NNNNGHTT; PAM sequence: GTCAGATT
ggaagtgccaggttttcact

SEQ ID NO: 6875 - DNA, 20 bp, Artificial Sequence
  Description of Artificial Sequence: Synthetic oligonucleotide
  Target: PCSK9; (-) strand; PAM type: NNNNGHTT; PAM sequence: CCAGGTTT
ctagggagccttaggaagtg

SEQ ID NO: 6876 - DNA, 20 bp, Artificial Sequence
  Description of Artificial Sequence: Synthetic oligonucleotide
  Target: PCSK9; (-) strand; PAM type: NNNNGHTT; PAM sequence: CCCTGTTT
tgaattgctcacattttcgg

SEQ ID NO: 6877 - DNA, 20 bp, Artificial Sequence
  Description of Artificial Sequence: Synthetic oligonucleotide
  Target: PCSK9; (-) strand; PAM type: NNNNGHTT; PAM sequence: AGAGGTTT
tcccttttatggtgtggggg

SEQ ID NO: 6878 - DNA, 20 bp, Artificial Sequence
  Description of Artificial Sequence: Synthetic oligonucleotide
  Target: PCSK9; (-) strand; PAM type: NNNNGHTT; PAM sequence: TTAAGATT
actgaaaagtcagtcaaggt

SEQ ID NO: 6879 - DNA, 20 bp, Artificial Sequence
  Description of Artificial Sequence: Synthetic oligonucleotide
  Target: PCSK9; (-) strand; PAM type: NNNNGHTT; PAM sequence: CAAGGTTT
attaacactgaaaagtcagt

SEQ ID NO: 6880 - DNA, 20 bp, Artificial Sequence
  Description of Artificial Sequence: Synthetic oligonucleotide
  Target: PCSK9; (-) strand; PAM type: NNNNGHTT; PAM sequence: ATTTGTTT
tgcagagaaggaatttgaga

SEQ ID NO: 6881 - DNA, 20 bp, Artificial Sequence
  Description of Artificial Sequence: Synthetic oligonucleotide
  Target: PCSK9; (-) strand; PAM type: NNNNGHTT; PAM sequence: GTGAGTTT
tgagttggtacacactgctt

SEQ ID NO: 6882 - DNA, 20 bp, Artificial Sequence
  Description of Artificial Sequence: Synthetic oligonucleotide
  Target: PCSK9; (-) strand; PAM type: NNNNGHTT; PAM sequence: CACTGCTT
taactatttgagttggtaca

SEQ ID NO: 6883 - DNA, 20 bp, Artificial Sequence
  Description of Artificial Sequence: Synthetic oligonucleotide
  Target: PCSK9; (-) strand; PAM type: NNNNGHTT; PAM sequence: TTTTGCTT
tgtgatctgcaatcgtttgc

SEQ ID NO: 6884 - DNA, 20 bp, Artificial Sequence
  Description of Artificial Sequence: Synthetic oligonucleotide
  Target: PCSK9; (-) strand; PAM type: NNNNGHTT; PAM sequence: GTTTGCTT
aaatcatgtgatctgcaatc

SEQ ID NO: 6885 - DNA, 20 bp, Artificial Sequence
  Description of Artificial Sequence: Synthetic oligonucleotide
  Target: PCSK9; (-) strand; PAM type: NNNNGHTT; PAM sequence: AATCGTTT
tcttaaatcatgtgatctgc

SEQ ID NO: 6886 - DNA, 20 bp, Artificial Sequence
  Description of Artificial Sequence: Synthetic oligonucleotide
  Target: PCSK9; (-) strand; PAM type: NNNNGHTT; PAM sequence: TAATGCTT
acttcacagaattatctttt

SEQ ID NO: 6887 - DNA, 20 bp, Artificial Sequence
  Description of Artificial Sequence: Synthetic oligonucleotide
  Target: PCSK9; (-) strand; PAM type: NNNNGHTT; PAM sequence: CTGAGTTT
cactttaagatataatttta

SEQ ID NO: 6888 - DNA, 20 bp, Artificial Sequence
  Description of Artificial Sequence: Synthetic oligonucleotide
  Target: PCSK9; (-) strand; PAM type: NNNNGHTT; PAM sequence: AACAGATT
aagttatgagttgttcccca

SEQ ID NO: 6889 - DNA, 20 bp, Artificial Sequence
  Description of Artificial Sequence: Synthetic oligonucleotide
  Target: PCSK9; (-) strand; PAM type: NNNNGHTT; PAM sequence: ATTAGATT
gaagatatttttctgatata

SEQ ID NO: 6890 - DNA, 20 bp, Artificial Sequence
  Description of Artificial Sequence: Synthetic oligonucleotide
  Target: PCSK9; (-) strand; PAM type: NNNNGHTT; PAM sequence: ATAAGCTT
tctagatgagaaccctatgc

SEQ ID NO: 6891 - DNA, 20 bp, Artificial Sequence
  Description of Artificial Sequence: Synthetic oligonucleotide
  Target: PCSK9; (-) strand; PAM type: NNNNGHTT; PAM sequence: AGCTGCTT
ttatattttaagaaaaagca

SEQ ID NO: 6892 - DNA, 20 bp, Artificial Sequence
  Description of Artificial Sequence: Synthetic oligonucleotide
  Target: PCSK9; (-) strand; PAM type: NNNNGHTT; PAM sequence: TTTGGTTT
gatgctacaaaagaaattcc

SEQ ID NO: 6893 - DNA, 20 bp, Artificial Sequence
  Description of Artificial Sequence: Synthetic oligonucleotide
  Target: PCSK9; (-) strand; PAM type: NNNNGHTT; PAM sequence: TGTTGCTT
tacaagagtgagcataaagc

SEQ ID NO: 6894 - DNA, 20 bp, Artificial Sequence
  Description of Artificial Sequence: Synthetic oligonucleotide
  Target: PCSK9; (-) strand; PAM type: NNNNGHTT; PAM sequence: TGGAGATT
tatgtggattcacatttctg

SEQ ID NO: 6895 - DNA, 20 bp, Artificial Sequence
  Description of Artificial Sequence: Synthetic oligonucleotide
  Target: PCSK9; (-) strand; PAM type: NNNNGHTT; PAM sequence: TGTGGATT
tcccgggagcgtggtctata

SEQ ID NO: 6896 - DNA, 20 bp, Artificial Sequence
  Description of Artificial Sequence: Synthetic oligonucleotide
  Target: PCSK9; (-) strand; PAM type: NNNNGHTT; PAM sequence: AGCTGTTT
aagccactagaaggtttggg

SEQ ID NO: 6897 - DNA, 20 bp, Artificial Sequence
  Description of Artificial Sequence: Synthetic oligonucleotide
  Target: PCSK9; (-) strand; PAM type: NNNNGHTT; PAM sequence: GAAGGTTT
aaagcatttttaagccacta

SEQ ID NO: 6898 - DNA, 20 bp, Artificial Sequence
  Description of Artificial Sequence: Synthetic oligonucleotide
  Target: PCSK9; (-) strand; PAM type: NNNNGHTT; PAM sequence: TGGAGATT
tcgaaccctttggaagagcc

SEQ ID NO: 6899 - DNA, 20 bp, Artificial Sequence
  Description of Artificial Sequence: Synthetic oligonucleotide
  Target: PCSK9; (-) strand; PAM type: NNNNGHTT; PAM sequence: TGATGATT
gcagggttcagaatctccca

SEQ ID NO: 6900 - DNA, 20 bp, Artificial Sequence
  Description of Artificial Sequence: Synthetic oligonucleotide
  Target: PCSK9; (-) strand; PAM type: NNNNGHTT; PAM sequence: ACATGTTT
cattaagttgccagatgaag

SEQ ID NO: 6901 - DNA, 20 bp, Artificial Sequence
  Description of Artificial Sequence: Synthetic oligonucleotide
  Target: PCSK9; (-) strand; PAM type: NNNNGHTT; PAM sequence: ACATGTTT
aaatgagatcatagaaatgt

SEQ ID NO: 6902 - DNA, 20 bp, Artificial Sequence
  Description of Artificial Sequence: Synthetic oligonucleotide
  Target: PCSK9; (-) strand; PAM type: NNNNGHTT; PAM sequence: GGTTGTTT
tgactttagacaagtcgctg

SEQ ID NO: 6903 - DNA, 20 bp, Artificial Sequence
  Description of Artificial Sequence: Synthetic oligonucleotide
  Target: PCSK9; (-) strand; PAM type: NNNNGHTT; PAM sequence: CCCAGCTT
caatggccatcaatgcctct

SEQ ID NO: 6904 - DNA, 20 bp, Artificial Sequence
  Description of Artificial Sequence: Synthetic oligonucleotide
  Target: PCSK9; (-) strand; PAM type: NNNNGHTT; PAM sequence: GAACGATT
tggcacacggtgagtattca

SEQ ID NO: 6905 - DNA, 20 bp, Artificial Sequence
  Description of Artificial Sequence: Synthetic oligonucleotide
  Target: PCSK9; (-) strand; PAM type: NNNNGHTT; PAM sequence: CTCAGCTT
ctactcacccccaactctca

SEQ ID NO: 6906 - DNA, 20 bp, Artificial Sequence
  Description of Artificial Sequence: Synthetic oligonucleotide
  Target: PCSK9; (-) strand; PAM type: NNNNGHTT; PAM sequence: CTGGGATT
tgcctcagcctcccaagtag

SEQ ID NO: 6907 - DNA, 20 bp, Artificial Sequence
  Description of Artificial Sequence: Synthetic oligonucleotide
  Target: PCSK9; (-) strand; PAM type: NNNNGHTT; PAM sequence: CAGCGATT
tacctccttctcccaggttc

SEQ ID NO: 6908 - DNA, 20 bp, Artificial Sequence
  Description of Artificial Sequence: Synthetic oligonucleotide
  Target: PCSK9; (+) strand; PAM type: NNNNGHTT; PAM sequence: TGTTGTTT
ggtctgtaccttaaatctta

SEQ ID NO: 6909 - DNA, 20 bp, Artificial Sequence
  Description of Artificial Sequence: Synthetic oligonucleotide
  Target: PCSK9; (+) strand; PAM type: NNNNGHTT; PAM sequence: TGCTGTTT
attgaaatgggatcataaca

SEQ ID NO: 6910 - DNA, 20 bp, Artificial Sequence
  Description of Artificial Sequence: Synthetic oligonucleotide
  Target: PCSK9; (+) strand; PAM type: NNNNGHTT; PAM sequence: GAATGTTT
aaatctgtccctccattgat

SEQ ID NO: 6911 - DNA, 20 bp, Artificial Sequence
  Description of Artificial Sequence: Synthetic oligonucleotide
  Target: PCSK9; (+) strand; PAM type: NNNNGHTT; PAM sequence: TTTGGATT
tgtccctccattgatgaatg

SEQ ID NO: 6912 - DNA, 20 bp, Artificial Sequence
  Description of Artificial Sequence: Synthetic oligonucleotide
  Target: PCSK9; (+) strand; PAM type: NNNNGHTT; PAM sequence: GAGAGTTT
acaccctggcagatcaaagt

SEQ ID NO: 6913 - DNA, 20 bp, Artificial Sequence
  Description of Artificial Sequence: Synthetic oligonucleotide
  Target: PCSK9; (+) strand; PAM type: NNNNGHTT; PAM sequence: CTGGGCTT
cttcccaccccaccacatgt

SEQ ID NO: 6914 - DNA, 20 bp, Artificial Sequence
  Description of Artificial Sequence: Synthetic oligonucleotide
  Target: PCSK9; (+) strand; PAM type: NNNNGHTT; PAM sequence: AGCTGTTT
tcagtctttactgagtcaga

SEQ ID NO: 6915 - DNA, 20 bp, Artificial Sequence
  Description of Artificial Sequence: Synthetic oligonucleotide
  Target: PCSK9; (+) strand; PAM type: NNNNGHTT; PAM sequence: CAGAGCTT
tgagcacacccattttacag

SEQ ID NO: 6916 - DNA, 20 bp, Artificial Sequence
  Description of Artificial Sequence: Synthetic oligonucleotide
  Target: PCSK9; (+) strand; PAM type: NNNNGHTT; PAM sequence: GCTAGATT
tgtacatcgctggggtcctt

SEQ ID NO: 6917 - DNA, 20 bp, Artificial Sequence
  Description of Artificial Sequence: Synthetic oligonucleotide
  Target: PCSK9; (+) strand; PAM type: NNNNGHTT; PAM sequence: CTCCGTTT
ctccacacactttagttgct

SEQ ID NO: 6918 - DNA, 20 bp, Artificial Sequence
  Description of Artificial Sequence: Synthetic oligonucleotide
  Target: PCSK9; (+) strand; PAM type: NNNNGHTT; PAM sequence: CAATGATT
ttagttgctctccgtttgca

SEQ ID NO: 6919 - DNA, 20 bp, Artificial Sequence
  Description of Artificial Sequence: Synthetic oligonucleotide
  Target: PCSK9; (+) strand; PAM type: NNNNGHTT; PAM sequence: CACAGTTT
gtcagtatatagcacatttt

SEQ ID NO: 6920 - DNA, 20 bp, Artificial Sequence
  Description of Artificial Sequence: Synthetic oligonucleotide
  Target: PCSK9; (+) strand; PAM type: NNNNGHTT; PAM sequence: GGGAGTTT
aattagatgtagagtcgcaa

SEQ ID NO: 6921 - DNA, 20 bp, Artificial Sequence
  Description of Artificial Sequence: Synthetic oligonucleotide
  Target: PCSK9; (+) strand; PAM type: NNNNGHTT; PAM sequence: AAAAGATT
gtggaagccaagatattaaa

SEQ ID NO: 6922 - DNA, 20 bp, Artificial Sequence
  Description of Artificial Sequence: Synthetic oligonucleotide
  Target: PCSK9; (+) strand; PAM type: NNNNGHTT; PAM sequence: ATAAGTTT
agtcatgaaataaaaggctg

SEQ ID NO: 6923 - DNA, 20 bp, Artificial Sequence
  Description of Artificial Sequence: Synthetic oligonucleotide
  Target: PCSK9; (+) strand; PAM type: NNNNGHTT; PAM sequence: AATAGATT
aatcaatcaacaaactggaa

SEQ ID NO: 6924 - DNA, 20 bp, Artificial Sequence
  Description of Artificial Sequence: Synthetic oligonucleotide
  Target: PCSK9; (+) strand; PAM type: NNNNGHTT; PAM sequence: AATTGTTT
aaagacaaacaaatgtagat

SEQ ID NO: 6925 - DNA, 20 bp, Artificial Sequence
  Description of Artificial Sequence: Synthetic oligonucleotide
  Target: PCSK9; (+) strand; PAM type: NNNNGHTT; PAM sequence: GTGTGATT
ctcctccttctgggcacttg

SEQ ID NO: 6926 - DNA, 20 bp, Artificial Sequence
  Description of Artificial Sequence: Synthetic oligonucleotide
  Target: PCSK9; (+) strand; PAM type: NNNNGHTT; PAM sequence: TGCAGTTT
ttctgggcacttggtgtgat

SEQ ID NO: 6927 - DNA, 20 bp, Artificial Sequence
  Description of Artificial Sequence: Synthetic oligonucleotide
  Target: PCSK9; (+) strand; PAM type: NNNNGHTT; PAM sequence: TCTCGCTT
accttaggtgtggtcatgtg

SEQ ID NO: 6928 - DNA, 20 bp, Artificial Sequence
  Description of Artificial Sequence: Synthetic oligonucleotide
  Target: PCSK9; (+) strand; PAM type: NNNNGHTT; PAM sequence: CTTTGCTT
gaagctgcatggagtcacct

SEQ ID NO: 6929 - DNA, 20 bp, Artificial Sequence
  Description of Artificial Sequence: Synthetic oligonucleotide
  Target: PCSK9; (+) strand; PAM type: NNNNGHTT; PAM sequence: GGTTGCTT
tcagcaatgttctgaatgat

SEQ ID NO: 6930 - DNA, 20 bp, Artificial Sequence
  Description of Artificial Sequence: Synthetic oligonucleotide
  Target: PCSK9; (+) strand; PAM type: NNNNGHTT; PAM sequence: CTGAGATT
acctttgacatttcaagccc

SEQ ID NO: 6931 - DNA, 20 bp, Artificial Sequence
  Description of Artificial Sequence: Synthetic oligonucleotide
  Target: PCSK9; (+) strand; PAM type: NNNNGHTT; PAM sequence: GATGGATT
agcagaacctagcctattct

SEQ ID NO: 6932 - DNA, 20 bp, Artificial Sequence
  Description of Artificial Sequence: Synthetic oligonucleotide
  Target: PCSK9; (+) strand; PAM type: NNNNGHTT; PAM sequence: CTTGGATT
gataaggacagacatggcaa

SEQ ID NO: 6933 - DNA, 20 bp, Artificial Sequence
  Description of Artificial Sequence: Synthetic oligonucleotide
  Target: PCSK9; (+) strand; PAM type: NNNNGHTT; PAM sequence: TGTGGTTT
agtagatgtatgtgtaccag

SEQ ID NO: 6934 - DNA, 20 bp, Artificial Sequence
  Description of Artificial Sequence: Synthetic oligonucleotide
  Target: PCSK9; (+) strand; PAM type: NNNNGHTT; PAM sequence: CCGAGATT
gtaccagtgtggtttttatt

SEQ ID NO: 6935 - DNA, 20 bp, Artificial Sequence
  Description of Artificial Sequence: Synthetic oligonucleotide
  Target: PCSK9; (+) strand; PAM type: NNNNGHTT; PAM sequence: GTCAGATT
gattagggctaggttaagac

SEQ ID NO: 6936 - DNA, 20 bp, Artificial Sequence
  Description of Artificial Sequence: Synthetic oligonucleotide
  Target: PCSK9; (+) strand; PAM type: NNNNGHTT; PAM sequence: AGTAGTTT
tgggttaaagagcccatcca

SEQ ID NO: 6937 - DNA, 20 bp, Artificial Sequence
  Description of Artificial Sequence: Synthetic oligonucleotide
  Target: PCSK9; (+) strand; PAM type: NNNNGHTT; PAM sequence: ACAAGTTT
actttcctggggctgttata

SEQ ID NO: 6938 - DNA, 20 bp, Artificial Sequence
  Description of Artificial Sequence: Synthetic oligonucleotide
  Target: PCSK9; (+) strand; PAM type: NNNNGHTT; PAM sequence: GCTGGCTT
taacaagtttctacaaattt

SEQ ID NO: 6939 - DNA, 20 bp, Artificial Sequence
  Description of Artificial Sequence: Synthetic oligonucleotide
  Target: PCSK9; (+) strand; PAM type: NNNNGHTT; PAM sequence: CCTTGCTT
agctctaggggaggaacatt

SEQ ID NO: 6940 - DNA, 20 bp, Artificial Sequence
  Description of Artificial Sequence: Synthetic oligonucleotide
  Target: PCSK9; (+) strand; PAM type: NNNNGHTT; PAM sequence: CTTGGCTT
tttgggggctcctggcattc

SEQ ID NO: 6941 - DNA, 20 bp, Artificial Sequence
  Description of Artificial Sequence: Synthetic oligonucleotide
  Target: PCSK9; (+) strand; PAM type: NNNNGHTT; PAM sequence: AGGTGTTT
cggcgcctccattgttacat

SEQ ID NO: 6942 - DNA, 20 bp, Artificial Sequence
  Description of Artificial Sequence: Synthetic oligonucleotide
  Target: PCSK9; (+) strand; PAM type: NNNNGHTT; PAM sequence: ATTGGATT
tttctcttctgatatcagtc

SEQ ID NO: 6943 - DNA, 20 bp, Artificial Sequence
  Description of Artificial Sequence: Synthetic oligonucleotide
  Target: PCSK9; (+) strand; PAM type: NNNNGHTT; PAM sequence: ACACGATT
tagacttatctttttggggg

SEQ ID NO: 6944 - DNA, 20 bp, Artificial Sequence
  Description of Artificial Sequence: Synthetic oligonucleotide
  Target: PCSK9; (+) strand; PAM type: NNNNGHTT; PAM sequence: AGTGGTTT
aacccactaccgtgggtaac

SEQ ID NO: 6945 - DNA, 20 bp, Artificial Sequence
  Description of Artificial Sequence: Synthetic oligonucleotide
  Target: PCSK9; (+) strand; PAM type: NNNNGHTT; PAM sequence: TCACGTTT
tgtatatcctttcaaactat

SEQ ID NO: 6946 - DNA, 20 bp, Artificial Sequence
  Description of Artificial Sequence: Synthetic oligonucleotide
  Target: PCSK9; (+) strand; PAM type: NNNNGHTT; PAM sequence: CCAAGTTT
agcaatggtggctgcagact

SEQ ID NO: 6947 - DNA, 20 bp, Artificial Sequence
  Description of Artificial Sequence: Synthetic oligonucleotide
  Target: PCSK9; (+) strand; PAM type: NNNNGHTT; PAM sequence: GGATGCTT
ttagagggaggaagccttga

SEQ ID NO: 6948 - DNA, 20 bp, Artificial Sequence
  Description of Artificial Sequence: Synthetic oligonucleotide
  Target: PCSK9; (+) strand; PAM type: NNNNGHTT; PAM sequence: GCCAGATT
ggtaggtgatccctgcggag

SEQ ID NO: 6949 - DNA, 20 bp, Artificial Sequence
  Description of Artificial Sequence: Synthetic oligonucleotide
  Target: PCSK9; (+) strand; PAM type: NNNNGHTT; PAM sequence: AGAGGCTT
ggtggaggggaggccccaga

SEQ ID NO: 6950 - DNA, 20 bp, Artificial Sequence
  Description of Artificial Sequence: Synthetic oligonucleotide
  Target: PCSK9; (+) strand; PAM type: NNNNGHTT; PAM sequence: CCCTGATT
cagaagaggcttctgactta

SEQ ID NO: 6951 - DNA, 20 bp, Artificial Sequence
  Description of Artificial Sequence: Synthetic oligonucleotide
  Target: PCSK9; (+) strand; PAM type: NNNNGHTT; PAM sequence: GGCTGCTT
tggtacctctcaggggagct

SEQ ID NO: 6952 - DNA, 20 bp, Artificial Sequence
  Description of Artificial Sequence: Synthetic oligonucleotide
  Target: PCSK9; (+) strand; PAM type: NNNNGHTT; PAM sequence: GGGTGCTT
tccatctgtcgcagagccca

SEQ ID NO: 6953 - DNA, 20 bp, Artificial Sequence
  Description of Artificial Sequence: Synthetic oligonucleotide
  Target: PCSK9; (+) strand; PAM type: NNNNGHTT; PAM sequence: ACAGGCTT
acatccatgtccctctgtgc

SEQ ID NO: 6954 - DNA, 20 bp, Artificial Sequence
  Description of Artificial Sequence: Synthetic oligonucleotide
  Target: PCSK9; (+) strand; PAM type: NNNNGHTT; PAM sequence: CCTAGATT
atcaactttggactccagca

SEQ ID NO: 6955 - DNA, 20 bp, Artificial Sequence
  Description of Artificial Sequence: Synthetic oligonucleotide
  Target: PCSK9; (+) strand; PAM type: NNNNGHTT; PAM sequence: CTTTGTTT
agggaggatcataaattcgc

SEQ ID NO: 6956 - DNA, 20 bp, Artificial Sequence
  Description of Artificial Sequence: Synthetic oligonucleotide
  Target: PCSK9; (+) strand; PAM type: NNNNGHTT; PAM sequence: AGGTGTTT
cctcctgcctggtacacaat

SEQ ID NO: 6957 - DNA, 20 bp, Artificial Sequence
  Description of Artificial Sequence: Synthetic oligonucleotide
  Target: PCSK9; (+) strand; PAM type: NNNNGHTT; PAM sequence: GGATGCTT
gtacacaataggtgtttact

SEQ ID NO: 6958 - DNA, 20 bp, Artificial Sequence
  Description of Artificial Sequence: Synthetic oligonucleotide
  Target: PCSK9; (+) strand; PAM type: NNNNGHTT; PAM sequence: AGTTGATT
tgtttactggatgcttgtcc

SEQ ID NO: 6959 - DNA, 20 bp, Artificial Sequence
  Description of Artificial Sequence: Synthetic oligonucleotide
  Target: PCSK9; (+) strand; PAM type: NNNNGHTT; PAM sequence: CTGAGCTT
aaattgaatcttctggaaag

SEQ ID NO: 6960 - DNA, 20 bp, Artificial Sequence
  Description of Artificial Sequence: Synthetic oligonucleotide
  Target: PCSK9; (+) strand; PAM type: NNNNGHTT; PAM sequence: CTAAGTTT
gaggccggagggggtccagg

SEQ ID NO: 6961 - DNA, 20 bp, Artificial Sequence
  Description of Artificial Sequence: Synthetic oligonucleotide
  Target: PCSK9; (+) strand; PAM type: NNNNGHTT; PAM sequence: GTAGGATT
tgggcagcgaggagtccaca

SEQ ID NO: 6962 - DNA, 20 bp, Artificial Sequence
  Description of Artificial Sequence: Synthetic oligonucleotide
  Target: PCSK9; (+) strand; PAM type: NNNNGHTT; PAM sequence: GATTGATT
cagcgaggagtccacagtag

SEQ ID NO: 6963 - DNA, 20 bp, Artificial Sequence
  Description of Artificial Sequence: Synthetic oligonucleotide
  Target: PCSK9; (+) strand; PAM type: NNNNGHTT; PAM sequence: TTAGGATT
cggcctgccttccagcccag

SEQ ID NO: 6964 - DNA, 20 bp, Artificial Sequence
  Description of Artificial Sequence: Synthetic oligonucleotide
  Target: PCSK9; (+) strand; PAM type: NNNNGHTT; PAM sequence: GGGAGTTT
ttccagcccagttaggattt

SEQ ID NO: 6965 - DNA, 20 bp, Artificial Sequence
  Description of Artificial Sequence: Synthetic oligonucleotide
  Target: PCSK9; (+) strand; PAM type: NNNNGHTT; PAM sequence: CGCTGTTT
tccctctgcgcgtaatctga

SEQ ID NO: 6966 - DNA, 20 bp, Artificial Sequence
  Description of Artificial Sequence: Synthetic oligonucleotide
  Target: PCSK9; (+) strand; PAM type: NNNNGHTT; PAM sequence: TAATGTTT
ctccagtccgggggttccgt

SEQ ID NO: 6967 - DNA, 20 bp, Artificial Sequence
  Description of Artificial Sequence: Synthetic oligonucleotide
  Target: PCSK9; (+) strand; PAM type: NNNNGHTT; PAM sequence: GAAGGTTT
cgtcaagcacccacacccta

SEQ ID NO: 6968 - DNA, 20 bp, Artificial Sequence
  Description of Artificial Sequence: Synthetic oligonucleotide
  Target: PCSK9; (+) strand; PAM type: NNNNGHTT; PAM sequence: CCAGGATT
cagcggctcccagctcccag

SEQ ID NO: 6969 - DNA, 20 bp, Artificial Sequence
  Description of Artificial Sequence: Synthetic oligonucleotide
  Target: PCSK9; (+) strand; PAM type: NNNNGHTT; PAM sequence: TGCTGTTT
ccgcagccgggacggtgcgg

SEQ ID NO: 6970 - DNA, 20 bp, Artificial Sequence
  Description of Artificial Sequence: Synthetic oligonucleotide
  Target: PCSK9; (+) strand; PAM type: NNNNGHTT; PAM sequence: CTCAGTTT
ggtgctgtttcctctcgggc

SEQ ID NO: 6971 - DNA, 20 bp, Artificial Sequence
  Description of Artificial Sequence: Synthetic oligonucleotide
  Target: PCSK9; (+) strand; PAM type: NNNNGHTT; PAM sequence: CTTCGCTT
agtgcaggtcgccgagggct

SEQ ID NO: 6972 - DNA, 20 bp, Artificial Sequence
  Description of Artificial Sequence: Synthetic oligonucleotide
  Target: PCSK9; (+) strand; PAM type: NNNNGHTT; PAM sequence: CCCAGATT
agcactgccaggatatcctg

SEQ ID NO: 6973 - DNA, 20 bp, Artificial Sequence
  Description of Artificial Sequence: Synthetic oligonucleotide
  Target: PCSK9; (+) strand; PAM type: NNNNGHTT; PAM sequence: CCCAGTTT
aggatatcctgcccagattt

SEQ ID NO: 6974 - DNA, 20 bp, Artificial Sequence
  Description of Artificial Sequence: Synthetic oligonucleotide
  Target: PCSK9; (+) strand; PAM type: NNNNGHTT; PAM sequence: GCGGGCTT
ctgcaccaggcacagagaaa

SEQ ID NO: 6975 - DNA, 20 bp, Artificial Sequence
  Description of Artificial Sequence: Synthetic oligonucleotide
  Target: PCSK9; (+) strand; PAM type: NNNNGHTT; PAM sequence: TTCCGATT
gggcttgccattatagtggg

SEQ ID NO: 6976 - DNA, 20 bp, Artificial Sequence
  Description of Artificial Sequence: Synthetic oligonucleotide
  Target: PCSK9; (+) strand; PAM type: NNNNGHTT; PAM sequence: TTTGGTTT
gccattatagtgggttccga

SEQ ID NO: 6977 - DNA, 20 bp, Artificial Sequence
  Description of Artificial Sequence: Synthetic oligonucleotide
  Target: PCSK9; (+) strand; PAM type: NNNNGHTT; PAM sequence: ATCTGTTT
aactcatgctctagtattcc

SEQ ID NO: 6978 - DNA, 20 bp, Artificial Sequence
  Description of Artificial Sequence: Synthetic oligonucleotide
  Target: PCSK9; (+) strand; PAM type: NNNNGHTT; PAM sequence: GCGAGTTT
gtctgccgaccgtgtgcggg

SEQ ID NO: 6979 - DNA, 20 bp, Artificial Sequence
  Description of Artificial Sequence: Synthetic oligonucleotide
  Target: PCSK9; (+) strand; PAM type: NNNNGHTT; PAM sequence: GCCAGCTT
cgagtttgctcaacaactct

SEQ ID NO: 6980 - DNA, 20 bp, Artificial Sequence
  Description of Artificial Sequence: Synthetic oligonucleotide
  Target: PCSK9; (+) strand; PAM type: NNNNGHTT; PAM sequence: GGAAGCTT
cttctggccctcaggctgtg

SEQ ID NO: 6981 - DNA, 20 bp, Artificial Sequence
  Description of Artificial Sequence: Synthetic oligonucleotide
  Target: PCSK9; (+) strand; PAM type: NNNNGHTT; PAM sequence: ACTAGCTT
cttcttcccggggcgagacc

SEQ ID NO: 6982 - DNA, 20 bp, Artificial Sequence
  Description of Artificial Sequence: Synthetic oligonucleotide
  Target: PCSK9; (+) strand; PAM type: NNNNGHTT; PAM sequence: CCCAGCTT
ttggctgaggttctgtgtcc

SEQ ID NO: 6983 - DNA, 20 bp, Artificial Sequence
  Description of Artificial Sequence: Synthetic oligonucleotide
  Target: PCSK9; (+) strand; PAM type: NNNNGHTT; PAM sequence: CTTGGCTT
agtcagatgtggggttgaat

SEQ ID NO: 6984 - DNA, 20 bp, Artificial Sequence
  Description of Artificial Sequence: Synthetic oligonucleotide
  Target: PCSK9; (+) strand; PAM type: NNNNGHTT; PAM sequence: TGGTGCTT
tggcttcctctcactagctg

SEQ ID NO: 6985 - DNA, 20 bp, Artificial Sequence
  Description of Artificial Sequence: Synthetic oligonucleotide
  Target: PCSK9; (+) strand; PAM type: NNNNGHTT; PAM sequence: TGCAGTTT
caagccccggggggatcact

SEQ ID NO: 6986 - DNA, 20 bp, Artificial Sequence
  Description of Artificial Sequence: Synthetic oligonucleotide
  Target: PCSK9; (+) strand; PAM type: NNNNGHTT; PAM sequence: CCACGCTT
tgccactcacagctgcctgc

SEQ ID NO: 6987 - DNA, 20 bp, Artificial Sequence
  Description of Artificial Sequence: Synthetic oligonucleotide
  Target: PCSK9; (+) strand; PAM type: NNNNGHTT; PAM sequence: GGATGTTT
cacctgaaccaagcccttga

SEQ ID NO: 6988 - DNA, 20 bp, Artificial Sequence
  Description of Artificial Sequence: Synthetic oligonucleotide
  Target: PCSK9; (+) strand; PAM type: NNNNGHTT; PAM sequence: GGAAGTTT
gaggatgtttcttctctggt

SEQ ID NO: 6989 - DNA, 20 bp, Artificial Sequence
  Description of Artificial Sequence: Synthetic oligonucleotide
  Target: PCSK9; (+) strand; PAM type: NNNNGHTT; PAM sequence: CTGGGTTT
tcaccccaggtgcattagaa

SEQ ID NO: 6990 - DNA, 20 bp, Artificial Sequence
  Description of Artificial Sequence: Synthetic oligonucleotide
  Target: PCSK9; (+) strand; PAM type: NNNNGHTT; PAM sequence: CTAGGATT
ggtgtcatgagaattttatt

SEQ ID NO: 6991 - DNA, 20 bp, Artificial Sequence
  Description of Artificial Sequence: Synthetic oligonucleotide
  Target: PCSK9; (+) strand; PAM type: NNNNGHTT; PAM sequence: TGGAGTTT
tttttcttttttttttgaga

SEQ ID NO: 6992 - DNA, 20 bp, Artificial Sequence
  Description of Artificial Sequence: Synthetic oligonucleotide
  Target: PCSK9; (+) strand; PAM type: NNNNGHTT; PAM sequence: CTGGGATT
tgcctcagcctcccaagaag

SEQ ID NO: 6993 - DNA, 20 bp, Artificial Sequence
  Description of Artificial Sequence: Synthetic oligonucleotide
  Target: PCSK9; (+) strand; PAM type: NNNNGHTT; PAM sequence: AGGGGTTT
ttttgtatttttagtagaga

SEQ ID NO: 6994 - DNA, 20 bp, Artificial Sequence
  Description of Artificial Sequence: Synthetic oligonucleotide
  Target: PCSK9; (+) strand; PAM type: NNNNGHTT; PAM sequence: AAAAGTTT
tgtaaaatgttacgaaaacc

SEQ ID NO: 6995 - DNA, 20 bp, Artificial Sequence
  Description of Artificial Sequence: Synthetic oligonucleotide
  Target: PCSK9; (+) strand; PAM type: NNNNGHTT; PAM sequence: TTGTGATT
acgaaaaccaaaagtttttt

SEQ ID NO: 6996 - DNA, 20 bp, Artificial Sequence
  Description of Artificial Sequence: Synthetic oligonucleotide
  Target: PCSK9; (+) strand; PAM type: NNNNGHTT; PAM sequence: ATGAGATT
agcacctgacgtgaactgac

SEQ ID NO: 6997 - DNA, 20 bp, Artificial Sequence
  Description of Artificial Sequence: Synthetic oligonucleotide
  Target: PCSK9; (+) strand; PAM type: NNNNGHTT; PAM sequence: CATAGATT
catattcatatattttgctg

SEQ ID NO: 6998 - DNA, 20 bp, Artificial Sequence
  Description of Artificial Sequence: Synthetic oligonucleotide
  Target: PCSK9; (+) strand; PAM type: NNNNGHTT; PAM sequence: TCCAGATT
catagattacagtatgcagc

SEQ ID NO: 6999 - DNA, 20 bp, Artificial Sequence
  Description of Artificial Sequence: Synthetic oligonucleotide
  Target: PCSK9; (+) strand; PAM type: NNNNGHTT; PAM sequence: CTCTGATT
tccagattcttccaagcaga

SEQ ID NO: 7000 - DNA, 20 bp, Artificial Sequence
  Description of Artificial Sequence: Synthetic oligonucleotide
  Target: PCSK9; (+) strand; PAM type: NNNNGHTT; PAM sequence: AACCGTTT
aaacaagttctgaggttcaa

SEQ ID NO: 7001 - DNA, 20 bp, Artificial Sequence
  Description of Artificial Sequence: Synthetic oligonucleotide
  Target: PCSK9; (+) strand; PAM type: NNNNGHTT; PAM sequence: TAAGGCTT
gttcaaaaccgttttggccc

SEQ ID NO: 7002 - DNA, 20 bp, Artificial Sequence
  Description of Artificial Sequence: Synthetic oligonucleotide
  Target: PCSK9; (+) strand; PAM type: NNNNGHTT; PAM sequence: TGGAGTTT
gtaggggccaaggaggagca

SEQ ID NO: 7003 - DNA, 20 bp, Artificial Sequence
  Description of Artificial Sequence: Synthetic oligonucleotide
  Target: PCSK9; (+) strand; PAM type: NNNNGHTT; PAM sequence: ACTTGATT
aggaggagcatggagtttgg

SEQ ID NO: 7004 - DNA, 20 bp, Artificial Sequence
  Description of Artificial Sequence: Synthetic oligonucleotide
  Target: PCSK9; (+) strand; PAM type: NNNNGHTT; PAM sequence: ATTTGTTT
catagatagtggctgctata

SEQ ID NO: 7005 - DNA, 20 bp, Artificial Sequence
  Description of Artificial Sequence: Synthetic oligonucleotide
  Target: PCSK9; (+) strand; PAM type: NNNNGHTT; PAM sequence: AGGTGTTT
tggaagtggggcctaatggg

SEQ ID NO: 7006 - DNA, 20 bp, Artificial Sequence
  Description of Artificial Sequence: Synthetic oligonucleotide
  Target: PCSK9; (+) strand; PAM type: NNNNGHTT; PAM sequence: AAAGGCTT
atgggggaggaacccctgtg

SEQ ID NO: 7007 - DNA, 20 bp, Artificial Sequence
  Description of Artificial Sequence: Synthetic oligonucleotide
  Target: PCSK9; (+) strand; PAM type: NNNNGHTT; PAM sequence: CTATGATT
ataatgagtaagttctcccg

SEQ ID NO: 7008 - DNA, 20 bp, Artificial Sequence
  Description of Artificial Sequence: Synthetic oligonucleotide
  Target: PCSK9; (+) strand; PAM type: NNNNGHTT; PAM sequence: GGCTGATT
ccgctatgatttcccttgaa

SEQ ID NO: 7009 - DNA, 20 bp, Artificial Sequence
  Description of Artificial Sequence: Synthetic oligonucleotide
  Target: PCSK9; (+) strand; PAM type: NNNNGHTT; PAM sequence: AAGAGCTT
cttgaaggctgattattaaa

SEQ ID NO: 7010 - DNA, 20 bp, Artificial Sequence
  Description of Artificial Sequence: Synthetic oligonucleotide
  Target: PCSK9; (+) strand; PAM type: NNNNGHTT; PAM sequence: TCTTGCTT
tggcacctccctctcttctc

SEQ ID NO: 7011 - DNA, 20 bp, Artificial Sequence
  Description of Artificial Sequence: Synthetic oligonucleotide
  Target: PCSK9; (+) strand; PAM type: NNNNGHTT; PAM sequence: ATGTGATT
ctcttgcttcttctcttgcc

SEQ ID NO: 7012 - DNA, 20 bp, Artificial Sequence
  Description of Artificial Sequence: Synthetic oligonucleotide
  Target: PCSK9; (+) strand; PAM type: NNNNGHTT; PAM sequence: AGCAGCTT
caccttctgccatcagtgaa

SEQ ID NO: 7013 - DNA, 20 bp, Artificial Sequence
  Description of Artificial Sequence: Synthetic oligonucleotide
  Target: PCSK9; (+) strand; PAM type: NNNNGHTT; PAM sequence: CCATGCTT
accagaagcagatgctggtg

SEQ ID NO: 7014 - DNA, 20 bp, Artificial Sequence
  Description of Artificial Sequence: Synthetic oligonucleotide
  Target: PCSK9; (+) strand; PAM type: NNNNGHTT; PAM sequence: GAGAGCTT
tgctggtgccatgcttcctg

SEQ ID NO: 7015 - DNA, 20 bp, Artificial Sequence
  Description of Artificial Sequence: Synthetic oligonucleotide
  Target: PCSK9; (+) strand; PAM type: NNNNGHTT; PAM sequence: GGGAGATT
catttgtagagcatctggat

SEQ ID NO: 7016 - DNA, 20 bp, Artificial Sequence
  Description of Artificial Sequence: Synthetic oligonucleotide
  Target: PCSK9; (+) strand; PAM type: NNNNGHTT; PAM sequence: CACGGTTT
ttggagctggaattcaggtc

SEQ ID NO: 7017 - DNA, 20 bp, Artificial Sequence
  Description of Artificial Sequence: Synthetic oligonucleotide
  Target: PCSK9; (+) strand; PAM type: NNNNGHTT; PAM sequence: CCATGATT
cggtttcctggctccaaagc

SEQ ID NO: 7018 - DNA, 20 bp, Artificial Sequence
  Description of Artificial Sequence: Synthetic oligonucleotide
  Target: PCSK9; (+) strand; PAM type: NNNNGHTT; PAM sequence: ATTTGCTT
tggcctatatgagttcttta

SEQ ID NO: 7019 - DNA, 20 bp, Artificial Sequence
  Description of Artificial Sequence: Synthetic oligonucleotide
  Target: PCSK9; (+) strand; PAM type: NNNNGHTT; PAM sequence: TAGGGTTT
ggggtgagataaagtacacc

SEQ ID NO: 7020 - DNA, 20 bp, Artificial Sequence
  Description of Artificial Sequence: Synthetic oligonucleotide
  Target: PCSK9; (+) strand; PAM type: NNNNGHTT; PAM sequence: CTGGGTTT
taaagtacacctagggtttg

SEQ ID NO: 7021 - DNA, 20 bp, Artificial Sequence
  Description of Artificial Sequence: Synthetic oligonucleotide
  Target: PCSK9; (+) strand; PAM type: NNNNGHTT; PAM sequence: CCTGGCTT
atgtcttccatggccttctt

SEQ ID NO: 7022 - DNA, 20 bp, Artificial Sequence
  Description of Artificial Sequence: Synthetic oligonucleotide
  Target: PCSK9; (+) strand; PAM type: NNNNGHTT; PAM sequence: CTGTGCTT
cactgcatatacactgggga

SEQ ID NO: 7023 - DNA, 20 bp, Artificial Sequence
  Description of Artificial Sequence: Synthetic oligonucleotide
  Target: PCSK9; (+) strand; PAM type: NNNNGHTT; PAM sequence: ACTGGCTT
gggtaccaagcacagtaact

SEQ ID NO: 7024 - DNA, 20 bp, Artificial Sequence
  Description of Artificial Sequence: Synthetic oligonucleotide
  Target: PCSK9; (+) strand; PAM type: NNNNGHTT; PAM sequence: TAGTGCTT
tattctcctcaccctggccc

SEQ ID NO: 7025 - DNA, 20 bp, Artificial Sequence
  Description of Artificial Sequence: Synthetic oligonucleotide
  Target: PCSK9; (+) strand; PAM type: NNNNGHTT; PAM sequence: AAACGTTT
tagtgcttcaaatcttaaaa

SEQ ID NO: 7026 - DNA, 20 bp, Artificial Sequence
  Description of Artificial Sequence: Synthetic oligonucleotide
  Target: PCSK9; (+) strand; PAM type: NNNNGHTT; PAM sequence: TTGTGCTT
tcttaaaaaaacgtttttat

SEQ ID NO: 7027 - DNA, 20 bp, Artificial Sequence
  Description of Artificial Sequence: Synthetic oligonucleotide
  Target: PCSK9; (+) strand; PAM type: NNNNGHTT; PAM sequence: CCTCGTTT
ctgcaccaccttctagccca

SEQ ID NO: 7028 - DNA, 20 bp, Artificial Sequence
  Description of Artificial Sequence: Synthetic oligonucleotide
  Target: PCSK9; (+) strand; PAM type: NNNNGHTT; PAM sequence: CACTGATT
gagagcgtgtgtcattttca

SEQ ID NO: 7029 - DNA, 20 bp, Artificial Sequence
  Description of Artificial Sequence: Synthetic oligonucleotide
  Target: PCSK9; (+) strand; PAM type: NNNNGHTT; PAM sequence: CGGTGCTT
ctgattctccacatggcagg

SEQ ID NO: 7030 - DNA, 20 bp, Artificial Sequence
  Description of Artificial Sequence: Synthetic oligonucleotide
  Target: PCSK9; (+) strand; PAM type: NNNNGHTT; PAM sequence: CAGGGATT
caaggcctgtggcgccatga

SEQ ID NO: 7031 - DNA, 20 bp, Artificial Sequence
  Description of Artificial Sequence: Synthetic oligonucleotide
  Target: PCSK9; (+) strand; PAM type: NNNNGHTT; PAM sequence: ACACGTTT
cttccatcagtctgctcaac

SEQ ID NO: 7032 - DNA, 20 bp, Artificial Sequence
  Description of Artificial Sequence: Synthetic oligonucleotide
  Target: PCSK9; (+) strand; PAM type: NNNNGHTT; PAM sequence: TTGAGCTT
acacagctcaggcctttccc

SEQ ID NO: 7033 - DNA, 20 bp, Artificial Sequence
  Description of Artificial Sequence: Synthetic oligonucleotide
  Target: PCSK9; (+) strand; PAM type: NNNNGHTT; PAM sequence: AATAGCTT
tctgaagggtaaggagaggg

SEQ ID NO: 7034 - DNA, 20 bp, Artificial Sequence
  Description of Artificial Sequence: Synthetic oligonucleotide
  Target: PCSK9; (+) strand; PAM type: NNNNGHTT; PAM sequence: AAGCGATT
aacctctgcctcccgggttc

SEQ ID NO: 7035 - DNA, 20 bp, Artificial Sequence
  Description of Artificial Sequence: Synthetic oligonucleotide
  Target: PCSK9; (+) strand; PAM type: NNNNGHTT; PAM sequence: TGGGGTTT
ttttgtatttttaatagaga

SEQ ID NO: 7036 - DNA, 20 bp, Artificial Sequence
  Description of Artificial Sequence: Synthetic oligonucleotide
  Target: PCSK9; (+) strand; PAM type: NNNNGHTT; PAM sequence: CTGGGATT
cacctcggcctcccaaagtg

SEQ ID NO: 7037 - DNA, 20 bp, Artificial Sequence
  Description of Artificial Sequence: Synthetic oligonucleotide
  Target: PCSK9; (+) strand; PAM type: NNNNGHTT; PAM sequence: GGAAGCTT
cccattggctgagcccaact

SEQ ID NO: 7038 - DNA, 20 bp, Artificial Sequence
  Description of Artificial Sequence: Synthetic oligonucleotide
  Target: PCSK9; (+) strand; PAM type: NNNNGHTT; PAM sequence: TGCAGTTT
ctttgcaagggagctggtgc

SEQ ID NO: 7039 - DNA, 20 bp, Artificial Sequence
  Description of Artificial Sequence: Synthetic oligonucleotide
  Target: PCSK9; (+) strand; PAM type: NNNNGHTT; PAM sequence: TCATGATT
gaattgccagtgctgttatg

SEQ ID NO: 7040 - DNA, 20 bp, Artificial Sequence
  Description of Artificial Sequence: Synthetic oligonucleotide
  Target: PCSK9; (+) strand; PAM type: NNNNGHTT; PAM sequence: CTGAGCTT
ttaggcatggagtccagggc

SEQ ID NO: 7041 - DNA, 20 bp, Artificial Sequence
  Description of Artificial Sequence: Synthetic oligonucleotide
  Target: PCSK9; (+) strand; PAM type: NNNNGHTT; PAM sequence: ACAGGTTT
tgctgggctgggatgtgggg

SEQ ID NO: 7042 - DNA, 20 bp, Artificial Sequence
  Description of Artificial Sequence: Synthetic oligonucleotide
  Target: PCSK9; (+) strand; PAM type: NNNNGHTT; PAM sequence: CTGTGTTT
caggtaaggccaggctgtgg

SEQ ID NO: 7043 - DNA, 20 bp, Artificial Sequence
  Description of Artificial Sequence: Synthetic oligonucleotide
  Target: PCSK9; (+) strand; PAM type: NNNNGHTT; PAM sequence: AATGGCTT
gctgtgtttgctgctgtcca

SEQ ID NO: 7044 - DNA, 20 bp, Artificial Sequence
  Description of Artificial Sequence: Synthetic oligonucleotide
  Target: PCSK9; (+) strand; PAM type: NNNNGHTT; PAM sequence: TCTGGCTT
aagcagagtcccccggcctc

SEQ ID NO: 7045 - DNA, 20 bp, Artificial Sequence
  Description of Artificial Sequence: Synthetic oligonucleotide
  Target: PCSK9; (+) strand; PAM type: NNNNGHTT; PAM sequence: AGCGGATT
gagcatcccgtggaacctgg

SEQ ID NO: 7046 - DNA, 20 bp, Artificial Sequence
  Description of Artificial Sequence: Synthetic oligonucleotide
  Target: PCSK9; (+) strand; PAM type: NNNNGHTT; PAM sequence: GGTGGTTT
cctggcctggcctccctgct

SEQ ID NO: 7047 - DNA, 20 bp, Artificial Sequence
  Description of Artificial Sequence: Synthetic oligonucleotide
  Target: PCSK9; (+) strand; PAM type: NNNNGHTT; PAM sequence: GGGGGCTT
ctggtggtttccacttctcg

SEQ ID NO: 7048 - DNA, 20 bp, Artificial Sequence
  Description of Artificial Sequence: Synthetic oligonucleotide
  Target: PCSK9; (+) strand; PAM type: NNNNGHTT; PAM sequence: TCTTGTTT
atcctcttttccttcttttc

SEQ ID NO: 7049 - DNA, 20 bp, Artificial Sequence
  Description of Artificial Sequence: Synthetic oligonucleotide
  Target: PCSK9; (+) strand; PAM type: NNNNGHTT; PAM sequence: TCCTGTTT
tgggatgcctctgcctacct

SEQ ID NO: 7050 - DNA, 20 bp, Artificial Sequence
  Description of Artificial Sequence: Synthetic oligonucleotide
  Target: PCSK9; (+) strand; PAM type: NNNNGHTT; PAM sequence: CTCCGTTT
gctgctccacctgcctccag

SEQ ID NO: 7051 - DNA, 20 bp, Artificial Sequence
  Description of Artificial Sequence: Synthetic oligonucleotide
  Target: PCSK9; (+) strand; PAM type: NNNNGHTT; PAM sequence: TTTGGCTT
tccacctgcctccagctccg

SEQ ID NO: 7052 - DNA, 20 bp, Artificial Sequence
  Description of Artificial Sequence: Synthetic oligonucleotide
  Target: PCSK9; (+) strand; PAM type: NNNNGHTT; PAM sequence: TTAAGTTT
agggttctagttggactgtg

SEQ ID NO: 7053 - DNA, 20 bp, Artificial Sequence
  Description of Artificial Sequence: Synthetic oligonucleotide
  Target: PCSK9; (+) strand; PAM type: NNNNGHTT; PAM sequence: CAGAGCTT
tgcaacatggtgccaggacg

SEQ ID NO: 7054 - DNA, 20 bp, Artificial Sequence
  Description of Artificial Sequence: Synthetic oligonucleotide
  Target: PCSK9; (+) strand; PAM type: NNNNGHTT; PAM sequence: CTCAGCTT
gacgcagagcttggggtgaa

SEQ ID NO: 7055 - DNA, 20 bp, Artificial Sequence
  Description of Artificial Sequence: Synthetic oligonucleotide
  Target: PCSK9; (+) strand; PAM type: NNNNGHTT; PAM sequence: ATGAGCTT
ttgggaagccactttcttct

SEQ ID NO: 7056 - DNA, 20 bp, Artificial Sequence
  Description of Artificial Sequence: Synthetic oligonucleotide
  Target: PCSK9; (+) strand; PAM type: NNNNGHTT; PAM sequence: AGATGCTT
caatgagttgaaggatgtgc

SEQ ID NO: 7057 - DNA, 20 bp, Artificial Sequence
  Description of Artificial Sequence: Synthetic oligonucleotide
  Target: PCSK9; (+) strand; PAM type: NNNNGHTT; PAM sequence: AAGGGTTT
tggtgggctgggtgtggaga

SEQ ID NO: 7058 - DNA, 20 bp, Artificial Sequence
  Description of Artificial Sequence: Synthetic oligonucleotide
  Target: PCSK9; (+) strand; PAM type: NNNNGHTT; PAM sequence: GTTAGTTT
gagaagatcttgccccctaa

SEQ ID NO: 7059 - DNA, 20 bp, Artificial Sequence
  Description of Artificial Sequence: Synthetic oligonucleotide
  Target: PCSK9; (+) strand; PAM type: NNNNGHTT; PAM sequence: AGTTGATT
ccaccccctcggttggaaca

SEQ ID NO: 7060 - DNA, 20 bp, Artificial Sequence
  Description of Artificial Sequence: Synthetic oligonucleotide
  Target: PCSK9; (+) strand; PAM type: NNNNGHTT; PAM sequence: AGAAGCTT
tctcccggggggctccaggg

SEQ ID NO: 7061 - DNA, 20 bp, Artificial Sequence
  Description of Artificial Sequence: Synthetic oligonucleotide
  Target: PCSK9; (+) strand; PAM type: NNNNGHTT; PAM sequence: ATTGGATT
gtctcataaggacacttgtc

SEQ ID NO: 7062 - DNA, 20 bp, Artificial Sequence
  Description of Artificial Sequence: Synthetic oligonucleotide
  Target: PCSK9; (+) strand; PAM type: NNNNGHTT; PAM sequence: CATGGATT
tttcttccccataggatgcc

SEQ ID NO: 7063 - DNA, 20 bp, Artificial Sequence
  Description of Artificial Sequence: Synthetic oligonucleotide
  Target: PCSK9; (+) strand; PAM type: NNNNGHTT; PAM sequence: TCCCGCTT
tgcccatggattgcccccct

SEQ ID NO: 7064 - DNA, 20 bp, Artificial Sequence
  Description of Artificial Sequence: Synthetic oligonucleotide
  Target: PCSK9; (+) strand; PAM type: NNNNGHTT; PAM sequence: AAGGGCTT
accccttctggagtcatatc

SEQ ID NO: 7065 - DNA, 20 bp, Artificial Sequence
  Description of Artificial Sequence: Synthetic oligonucleotide
  Target: PCSK9; (+) strand; PAM type: NNNNGHTT; PAM sequence: AGCAGCTT
gcaggctggctgggcccagc

SEQ ID NO: 7066 - DNA, 20 bp, Artificial Sequence
  Description of Artificial Sequence: Synthetic oligonucleotide
  Target: PCSK9; (+) strand; PAM type: NNNNGHTT; PAM sequence: GGCTGTTT
tgataaccctcactctgggg

SEQ ID NO: 7067 - DNA, 20 bp, Artificial Sequence
  Description of Artificial Sequence: Synthetic oligonucleotide
  Target: PCSK9; (+) strand; PAM type: NNNNGHTT; PAM sequence: CTGTGATT
gtcaggtattgagtgaggtg

SEQ ID NO: 7068 - DNA, 20 bp, Artificial Sequence
  Description of Artificial Sequence: Synthetic oligonucleotide
  Target: PCSK9; (+) strand; PAM type: NNNNGHTT; PAM sequence: TAACGTTT
cttttcttaccattcaataa

SEQ ID NO: 7069 - DNA, 20 bp, Artificial Sequence
  Description of Artificial Sequence: Synthetic oligonucleotide
  Target: PCSK9; (+) strand; PAM type: NNNNGHTT; PAM sequence: AGAAGATT
cttcccccaacagtgtatcc

SEQ ID NO: 7070 - DNA, 20 bp, Artificial Sequence
  Description of Artificial Sequence: Synthetic oligonucleotide
  Target: PCSK9; (+) strand; PAM type: NNNNGHTT; PAM sequence: CACAGATT
cttaaacaaatgctacttga

SEQ ID NO: 7071 - DNA, 20 bp, Artificial Sequence
  Description of Artificial Sequence: Synthetic oligonucleotide
  Target: PCSK9; (+) strand; PAM type: NNNNGHTT; PAM sequence: AAAGGATT
tatccagcagaaggatcagg

SEQ ID NO: 7072 - DNA, 20 bp, Artificial Sequence
  Description of Artificial Sequence: Synthetic oligonucleotide
  Target: PCSK9; (+) strand; PAM type: NNNNGHTT; PAM sequence: CGTGGATT
tgtccaagcagtggaatgaa

SEQ ID NO: 7073 - DNA, 20 bp, Artificial Sequence
  Description of Artificial Sequence: Synthetic oligonucleotide
  Target: PCSK9; (+) strand; PAM type: NNNNGHTT; PAM sequence: CTGAGCTT
aggaagaacttggccacagt

SEQ ID NO: 7074 - DNA, 20 bp, Artificial Sequence
  Description of Artificial Sequence: Synthetic oligonucleotide
  Target: PCSK9; (+) strand; PAM type: NNNNGHTT; PAM sequence: CAGAGCTT
ctctcacctgccagaggcca

SEQ ID NO: 7075 - DNA, 20 bp, Artificial Sequence
  Description of Artificial Sequence: Synthetic oligonucleotide
  Target: PCSK9; (+) strand; PAM type: NNNNGHTT; PAM sequence: GGGGGTTT
tagcagcccctgcctcaccc

SEQ ID NO: 7076 - DNA, 20 bp, Artificial Sequence
  Description of Artificial Sequence: Synthetic oligonucleotide
  Target: PCSK9; (+) strand; PAM type: NNNNGHTT; PAM sequence: GGGGGCTT
aagcccaaggatgttcctgt

SEQ ID NO: 7077 - DNA, 20 bp, Artificial Sequence
  Description of Artificial Sequence: Synthetic oligonucleotide
  Target: PCSK9; (+) strand; PAM type: NNNNGHTT; PAM sequence: CCATGCTT
gcccacctgccctctgctgg

SEQ ID NO: 7078 - DNA, 20 bp, Artificial Sequence
  Description of Artificial Sequence: Synthetic oligonucleotide
  Target: PCSK9; (+) strand; PAM type: NNNNGHTT; PAM sequence: CCGAGCTT
gaaggtgtggggctgcctcc

SEQ ID NO: 7079 - DNA, 20 bp, Artificial Sequence
  Description of Artificial Sequence: Synthetic oligonucleotide
  Target: PCSK9; (+) strand; PAM type: NNNNGHTT; PAM sequence: TGTGGCTT
cttctgctcgatgtgcgttg

SEQ ID NO: 7080 - DNA, 20 bp, Artificial Sequence
  Description of Artificial Sequence: Synthetic oligonucleotide
  Target: PCSK9; (+) strand; PAM type: NNNNGHTT; PAM sequence: GGCTGCTT
agctctgagggaaaaccttg

SEQ ID NO: 7081 - DNA, 20 bp, Artificial Sequence
  Description of Artificial Sequence: Synthetic oligonucleotide
  Target: PCSK9; (+) strand; PAM type: NNNNGHTT; PAM sequence: CATGGCTT
tctgctaggagcagactgag

SEQ ID NO: 7082 - DNA, 20 bp, Artificial Sequence
  Description of Artificial Sequence: Synthetic oligonucleotide
  Target: PCSK9; (+) strand; PAM type: NNNNGHTT; PAM sequence: CACTGTTT
ggttcctctagggtggcgag

SEQ ID NO: 7083 - DNA, 20 bp, Artificial Sequence
  Description of Artificial Sequence: Synthetic oligonucleotide
  Target: PCSK9; (+) strand; PAM type: NNNNGHTT; PAM sequence: TGGAGCTT
gtgcccacgggactgatcag

SEQ ID NO: 7084 - DNA, 20 bp, Artificial Sequence
  Description of Artificial Sequence: Synthetic oligonucleotide
  Target: PCSK9; (+) strand; PAM type: NNNNGHTT; PAM sequence: TCTGGATT
agcatctcaagatggcatca

SEQ ID NO: 7085 - DNA, 20 bp, Artificial Sequence
  Description of Artificial Sequence: Synthetic oligonucleotide
  Target: PCSK9; (+) strand; PAM type: NNNNGHTT; PAM sequence: GGGAGATT
ctttatgagagaaaggcaga

SEQ ID NO: 7086 - DNA, 20 bp, Artificial Sequence
  Description of Artificial Sequence: Synthetic oligonucleotide
  Target: PCSK9; (+) strand; PAM type: NNNNGHTT; PAM sequence: TGGAGATT
gggccacgtggagacagagg

SEQ ID NO: 7087 - DNA, 20 bp, Artificial Sequence
  Description of Artificial Sequence: Synthetic oligonucleotide
  Target: PCSK9; (+) strand; PAM type: NNNNGHTT; PAM sequence: AGCAGTTT
tcaggagaccctggggcagg

SEQ ID NO: 7088 - DNA, 20 bp, Artificial Sequence
  Description of Artificial Sequence: Synthetic oligonucleotide
  Target: PCSK9; (+) strand; PAM type: NNNNGHTT; PAM sequence: CTCTGATT
tgacagcccagagggctgcc

SEQ ID NO: 7089 - DNA, 20 bp, Artificial Sequence
  Description of Artificial Sequence: Synthetic oligonucleotide
  Target: PCSK9; (+) strand; PAM type: NNNNGHTT; PAM sequence: CCCTGCTT
ccctctgattccacctgagg

SEQ ID NO: 7090 - DNA, 20 bp, Artificial Sequence
  Description of Artificial Sequence: Synthetic oligonucleotide
  Target: PCSK9; (+) strand; PAM type: NNNNGHTT; PAM sequence: GAGAGTTT
agtcttcctttggcctggct

SEQ ID NO: 7091 - DNA, 20 bp, Artificial Sequence
  Description of Artificial Sequence: Synthetic oligonucleotide
  Target: PCSK9; (+) strand; PAM type: NNNNGHTT; PAM sequence: AGGTGCTT
tgagacctgcgctggagcgg

SEQ ID NO: 7092 - DNA, 20 bp, Artificial Sequence
  Description of Artificial Sequence: Synthetic oligonucleotide
  Target: PCSK9; (+) strand; PAM type: NNNNGHTT; PAM sequence: CCTTGCTT
tggagcggaggtgcttcctt

SEQ ID NO: 7093 - DNA, 20 bp, Artificial Sequence
  Description of Artificial Sequence: Synthetic oligonucleotide
  Target: PCSK9; (+) strand; PAM type: NNNNGHTT; PAM sequence: TGCAGCTT
gactcccccagtgagtctct

SEQ ID NO: 7094 - DNA, 20 bp, Artificial Sequence
  Description of Artificial Sequence: Synthetic oligonucleotide
  Target: PCSK9; (+) strand; PAM type: NNNNGHTT; PAM sequence: GCCTGCTT
cttgcagcttttaccccagt

SEQ ID NO: 7095 - DNA, 20 bp, Artificial Sequence
  Description of Artificial Sequence: Synthetic oligonucleotide
  Target: PCSK9; (+) strand; PAM type: NNNNGHTT; PAM sequence: GACTGTTT
gtgtagggtaggcgctcggt

SEQ ID NO: 7096 - DNA, 20 bp, Artificial Sequence
  Description of Artificial Sequence: Synthetic oligonucleotide
  Target: PCSK9; (+) strand; PAM type: NNNNGHTT; PAM sequence: GAACGCTT
ctggtatcttgtggagtgga

SEQ ID NO: 7097 - DNA, 20 bp, Artificial Sequence
  Description of Artificial Sequence: Synthetic oligonucleotide
  Target: PCSK9; (+) strand; PAM type: NNNNGHTT; PAM sequence: TGCAGCTT
gacatacatcctgtccgagc

SEQ ID NO: 7098 - DNA, 20 bp, Artificial Sequence
  Description of Artificial Sequence: Synthetic oligonucleotide
  Target: PCSK9; (+) strand; PAM type: NNNNGHTT; PAM sequence: AGGGGCTT
gagctgtgaaaggctataat

SEQ ID NO: 7099 - DNA, 20 bp, Artificial Sequence
  Description of Artificial Sequence: Synthetic oligonucleotide
  Target: PCSK9; (+) strand; PAM type: NNNNGHTT; PAM sequence: TGAGGATT
atagaataggatgtagtgtg

SEQ ID NO: 7100 - DNA, 20 bp, Artificial Sequence
  Description of Artificial Sequence: Synthetic oligonucleotide
  Target: PCSK9; (+) strand; PAM type: NNNNGHTT; PAM sequence: AGGCGCTT
taaacgagtgaatatattta

SEQ ID NO: 7101 - DNA, 20 bp, Artificial Sequence
  Description of Artificial Sequence: Synthetic oligonucleotide
  Target: PCSK9; (+) strand; PAM type: NNNNGHTT; PAM sequence: TGTAGTTT
ccagtgcctgggatgtgctc

SEQ ID NO: 7102 - DNA, 20 bp, Artificial Sequence
  Description of Artificial Sequence: Synthetic oligonucleotide
  Target: PCSK9; (+) strand; PAM type: NNNNGHTT; PAM sequence: ACCCGCTT
atgtgcccgaggaggacggg

SEQ ID NO: 7103 - DNA, 20 bp, Artificial Sequence
  Description of Artificial Sequence: Synthetic oligonucleotide
  Target: PCSK9; (+) strand; PAM type: NNNNGHTT; PAM sequence: TGCTGATT
cgttcatccatccagccacc

SEQ ID NO: 7104 - DNA, 20 bp, Artificial Sequence
  Description of Artificial Sequence: Synthetic oligonucleotide
  Target: PCSK9; (+) strand; PAM type: NNNNGHTT; PAM sequence: GGTGGCTT
catctggacctggcctggga

SEQ ID NO: 7105 - DNA, 20 bp, Artificial Sequence
  Description of Artificial Sequence: Synthetic oligonucleotide
  Target: PCSK9; (+) strand; PAM type: NNNNGHTT; PAM sequence: TTCTGCTT
ctaagcaaactttttctatc

SEQ ID NO: 7106 - DNA, 20 bp, Artificial Sequence
  Description of Artificial Sequence: Synthetic oligonucleotide
  Target: PCSK9; (+) strand; PAM type: NNNNGHTT; PAM sequence: AGCAGCTT
gaaaactgtcagctctgggc

SEQ ID NO: 7107 - DNA, 20 bp, Artificial Sequence
  Description of Artificial Sequence: Synthetic oligonucleotide
  Target: PCSK9; (+) strand; PAM type: NNNNGHTT; PAM sequence: GCCTGTTT
ctggcagaggcagcccacta

SEQ ID NO: 7108 - DNA, 20 bp, Artificial Sequence
  Description of Artificial Sequence: Synthetic oligonucleotide
  Target: PCSK9; (+) strand; PAM type: NNNNGHTT; PAM sequence: ACAGGTTT
ctgagactttcctacagagt

SEQ ID NO: 7109 - DNA, 20 bp, Artificial Sequence
  Description of Artificial Sequence: Synthetic oligonucleotide
  Target: PCSK9; (+) strand; PAM type: NNNNGHTT; PAM sequence: TTCAGTTT
acagagtacaggttttgatg

SEQ ID NO: 7110 - DNA, 20 bp, Artificial Sequence
  Description of Artificial Sequence: Synthetic oligonucleotide
  Target: PCSK9; (+) strand; PAM type: NNNNGHTT; PAM sequence: AGGTGATT
ccatttcctcctctgtaagc

SEQ ID NO: 7111 - DNA, 20 bp, Artificial Sequence
  Description of Artificial Sequence: Synthetic oligonucleotide
  Target: PCSK9; (+) strand; PAM type: NNNNGHTT; PAM sequence: AGGTGCTT
cacagagataagcacacagc

SEQ ID NO: 7112 - DNA, 20 bp, Artificial Sequence
  Description of Artificial Sequence: Synthetic oligonucleotide
  Target: PCSK9; (+) strand; PAM type: NNNNGHTT; PAM sequence: AATCGCTT
ttgggaggctaaggcaggag

SEQ ID NO: 7113 - DNA, 20 bp, Artificial Sequence
  Description of Artificial Sequence: Synthetic oligonucleotide
  Target: PCSK9; (+) strand; PAM type: NNNNGHTT; PAM sequence: GCGAGATT
aatccagcctgagtgataga

SEQ ID NO: 7114 - DNA, 20 bp, Artificial Sequence
  Description of Artificial Sequence: Synthetic oligonucleotide
  Target: PCSK9; (+) strand; PAM type: NNNNGHTT; PAM sequence: GTGAGATT
ctcctaggaggagcatggct

SEQ ID NO: 7115 - DNA, 20 bp, Artificial Sequence
  Description of Artificial Sequence: Synthetic oligonucleotide
  Target: PCSK9; (+) strand; PAM type: NNNNGHTT; PAM sequence: CGGAGCTT
aatggcgtgaacccgggagg

SEQ ID NO: 7116 - DNA, 20 bp, Artificial Sequence
  Description of Artificial Sequence: Synthetic oligonucleotide
  Target: PCSK9; (+) strand; PAM type: NNNNGHTT; PAM sequence: CCGAGATT
gaggcggagcttgcagtgag

SEQ ID NO: 7117 - DNA, 20 bp, Artificial Sequence
  Description of Artificial Sequence: Synthetic oligonucleotide
  Target: PCSK9; (+) strand; PAM type: NNNNGHTT; PAM sequence: CCCTGTTT
acaatcctgggagcaactgt

SEQ ID NO: 7118 - DNA, 20 bp, Artificial Sequence
  Description of Artificial Sequence: Synthetic oligonucleotide
  Target: PCSK9; (+) strand; PAM type: NNNNGHTT; PAM sequence: TCAAGTTT
gtgggcagccaagactctgt

SEQ ID NO: 7119 - DNA, 20 bp, Artificial Sequence
  Description of Artificial Sequence: Synthetic oligonucleotide
  Target: PCSK9; (+) strand; PAM type: NNNNGHTT; PAM sequence: AGACGCTT
tcccctgagttcgtatattc

SEQ ID NO: 7120 - DNA, 20 bp, Artificial Sequence
  Description of Artificial Sequence: Synthetic oligonucleotide
  Target: PCSK9; (+) strand; PAM type: NNNNGHTT; PAM sequence: GCTAGTTT
cagagaagggcccggggttg

SEQ ID NO: 7121 - DNA, 20 bp, Artificial Sequence
  Description of Artificial Sequence: Synthetic oligonucleotide
  Target: PCSK9; (+) strand; PAM type: NNNNGHTT; PAM sequence: GTTTGATT
gaagggcccggggttggcta

SEQ ID NO: 7122 - DNA, 20 bp, Artificial Sequence
  Description of Artificial Sequence: Synthetic oligonucleotide
  Target: PCSK9; (+) strand; PAM type: NNNNGHTT; PAM sequence: TCCAGTTT
tggtgtaattgctaatatct

SEQ ID NO: 7123 - DNA, 20 bp, Artificial Sequence
  Description of Artificial Sequence: Synthetic oligonucleotide
  Target: PCSK9; (+) strand; PAM type: NNNNGHTT; PAM sequence: AAGAGTTT
accagtaggatgtatatatt

SEQ ID NO: 7124 - DNA, 20 bp, Artificial Sequence
  Description of Artificial Sequence: Synthetic oligonucleotide
  Target: PCSK9; (+) strand; PAM type: NNNNGHTT; PAM sequence: AACTGATT
tctgttctcttaaggccttc

SEQ ID NO: 7125 - DNA, 20 bp, Artificial Sequence
  Description of Artificial Sequence: Synthetic oligonucleotide
  Target: PCSK9; (+) strand; PAM type: NNNNGHTT; PAM sequence: TTCTGATT
gtaacctgccttactccgtc

SEQ ID NO: 7126 - DNA, 20 bp, Artificial Sequence
  Description of Artificial Sequence: Synthetic oligonucleotide
  Target: PCSK9; (+) strand; PAM type: NNNNGHTT; PAM sequence: ACTGGCTT
attttcgcagcagcatttcc

SEQ ID NO: 7127 - DNA, 20 bp, Artificial Sequence
  Description of Artificial Sequence: Synthetic oligonucleotide
  Target: PCSK9; (+) strand; PAM type: NNNNGHTT; PAM sequence: CTTGGCTT
aggtctccccaaggggtgac

SEQ ID NO: 7128 - DNA, 20 bp, Artificial Sequence
  Description of Artificial Sequence: Synthetic oligonucleotide
  Target: PCSK9; (+) strand; PAM type: NNNNGHTT; PAM sequence: TGGAGTTT
ggctttgttcctcccaggcc

SEQ ID NO: 7129 - DNA, 20 bp, Artificial Sequence
  Description of Artificial Sequence: Synthetic oligonucleotide
  Target: PCSK9; (+) strand; PAM type: NNNNGHTT; PAM sequence: GCGGGCTT
gagggagggcgggcgggcag

SEQ ID NO: 7130 - DNA, 20 bp, Artificial Sequence
  Description of Artificial Sequence: Synthetic oligonucleotide
  Target: PCSK9; (+) strand; PAM type: NNNNGHTT; PAM sequence: GTGGGCTT
aggcgggcttcttgtggcac

SEQ ID NO: 7131 - DNA, 20 bp, Artificial Sequence
  Description of Artificial Sequence: Synthetic oligonucleotide
  Target: PCSK9; (+) strand; PAM type: NNNNGHTT; PAM sequence: TCTGGCTT
gttcctggaggccgaaccct

SEQ ID NO: 7132 - DNA, 20 bp, Artificial Sequence
  Description of Artificial Sequence: Synthetic oligonucleotide
  Target: PCSK9; (+) strand; PAM type: NNNNGHTT; PAM sequence: CAAGGCTT
ctaggtcccccctggcctat

SEQ ID NO: 7133 - DNA, 20 bp, Artificial Sequence
  Description of Artificial Sequence: Synthetic oligonucleotide
  Target: PCSK9; (+) strand; PAM type: NNNNGHTT; PAM sequence: CTCAGTTT
acacatctctgccttgtcct

SEQ ID NO: 7134 - DNA, 20 bp, Artificial Sequence
  Description of Artificial Sequence: Synthetic oligonucleotide
  Target: PCSK9; (+) strand; PAM type: NNNNGHTT; PAM sequence: AATAGTTT
tagaaccacttgatacaccg

SEQ ID NO: 7135 - DNA, 20 bp, Artificial Sequence
  Description of Artificial Sequence: Synthetic oligonucleotide
  Target: PCSK9; (+) strand; PAM type: NNNNGHTT; PAM sequence: GTCAGATT
gccagagttctgcctgggca

SEQ ID NO: 7136 - DNA, 20 bp, Artificial Sequence
  Description of Artificial Sequence: Synthetic oligonucleotide
  Target: PCSK9; (+) strand; PAM type: NNNNGHTT; PAM sequence: ACCTGCTT
gtgcctccagcgactgcagc

SEQ ID NO: 7137 - DNA, 20 bp, Artificial Sequence
  Description of Artificial Sequence: Synthetic oligonucleotide
  Target: PCSK9; (+) strand; PAM type: NNNNGHTT; PAM sequence: GGGAGCTT
tggaggagggacatttgatc

SEQ ID NO: 7138 - DNA, 20 bp, Artificial Sequence
  Description of Artificial Sequence: Synthetic oligonucleotide
  Target: PCSK9; (+) strand; PAM type: NNNNGHTT; PAM sequence: CAAGGCTT
gccgataagacagcaactac

SEQ ID NO: 7139 - DNA, 20 bp, Artificial Sequence
  Description of Artificial Sequence: Synthetic oligonucleotide
  Target: PCSK9; (+) strand; PAM type: NNNNGHTT; PAM sequence: GGCGGCTT
ctcactgagtaaggactgca

SEQ ID NO: 7140 - DNA, 20 bp, Artificial Sequence
  Description of Artificial Sequence: Synthetic oligonucleotide
  Target: PCSK9; (+) strand; PAM type: NNNNGHTT; PAM sequence: GAGAGCTT
aggcggcttaccttcgagaa

SEQ ID NO: 7141 - DNA, 20 bp, Artificial Sequence
  Description of Artificial Sequence: Synthetic oligonucleotide
  Target: PCSK9; (+) strand; PAM type: NNNNGHTT; PAM sequence: GTGTGTTT
agcttagtgtctgtgtgcac

SEQ ID NO: 7142 - DNA, 20 bp, Artificial Sequence
  Description of Artificial Sequence: Synthetic oligonucleotide
  Target: PCSK9; (+) strand; PAM type: NNNNGHTT; PAM sequence: TGGGGCTT
cagggtgggcaagtccaggc

SEQ ID NO: 7143 - DNA, 20 bp, Artificial Sequence
  Description of Artificial Sequence: Synthetic oligonucleotide
  Target: PCSK9; (+) strand; PAM type: NNNNGHTT; PAM sequence: ATAGGATT
ggaggatgacgccaccttaa

SEQ ID NO: 7144 - DNA, 20 bp, Artificial Sequence
  Description of Artificial Sequence: Synthetic oligonucleotide
  Target: PCSK9; (+) strand; PAM type: NNNNGHTT; PAM sequence: ACGTGTTT
ggctgtgcaatattttcata

SEQ ID NO: 7145 - DNA, 20 bp, Artificial Sequence
  Description of Artificial Sequence: Synthetic oligonucleotide
  Target: PCSK9; (+) strand; PAM type: NNNNGHTT; PAM sequence: TAAAGATT
tcctctctcctaccatgaac

SEQ ID NO: 7146 - DNA, 20 bp, Artificial Sequence
  Description of Artificial Sequence: Synthetic oligonucleotide
  Target: PCSK9; (+) strand; PAM type: NNNNGHTT; PAM sequence: AGCTGTTT
ggccctttttgcaggttggc

SEQ ID NO: 7147 - DNA, 20 bp, Artificial Sequence
  Description of Artificial Sequence: Synthetic oligonucleotide
  Target: PCSK9; (+) strand; PAM type: NNNNGHTT; PAM sequence: TCCAGTTT
atgaggagctgctgagctgc

SEQ ID NO: 7148 - DNA, 20 bp, Artificial Sequence
  Description of Artificial Sequence: Synthetic oligonucleotide
  Target: PCSK9; (+) strand; PAM type: NNNNGHTT; PAM sequence: GTAAGCTT
ctccagactccagctcttct

SEQ ID NO: 7149 - DNA, 20 bp, Artificial Sequence
  Description of Artificial Sequence: Synthetic oligonucleotide
  Target: PCSK9; (+) strand; PAM type: NNNNGHTT; PAM sequence: AAGGGTTT
ctggagagagccacagcggg

SEQ ID NO: 7150 - DNA, 20 bp, Artificial Sequence
  Description of Artificial Sequence: Synthetic oligonucleotide
  Target: PCSK9; (+) strand; PAM type: NNNNGHTT; PAM sequence: GATGGATT
gaggctgcaggacagtgctg

SEQ ID NO: 7151 - DNA, 20 bp, Artificial Sequence
  Description of Artificial Sequence: Synthetic oligonucleotide
  Target: PCSK9; (+) strand; PAM type: NNNNGHTT; PAM sequence: TCTGGCTT
agtgaggaggggcaggcatt

SEQ ID NO: 7152 - DNA, 20 bp, Artificial Sequence
  Description of Artificial Sequence: Synthetic oligonucleotide
  Target: PCSK9; (+) strand; PAM type: NNNNGHTT; PAM sequence: CCTTGCTT
tggagtggagctggctggat

SEQ ID NO: 7153 - DNA, 20 bp, Artificial Sequence
  Description of Artificial Sequence: Synthetic oligonucleotide
  Target: PCSK9; (+) strand; PAM type: NNNNGHTT; PAM sequence: CCTGGATT
ctggatccttgctttggcct

SEQ ID NO: 7154 - DNA, 20 bp, Artificial Sequence
  Description of Artificial Sequence: Synthetic oligonucleotide
  Target: PCSK9; (+) strand; PAM type: NNNNGHTT; PAM sequence: CTGTGTTT
atctccattttgaaaccact

SEQ ID NO: 7155 - DNA, 20 bp, Artificial Sequence
  Description of Artificial Sequence: Synthetic oligonucleotide
  Target: PCSK9; (+) strand; PAM type: NNNNGHTT; PAM sequence: GGGTGCTT
cctggcagggacactgatga

SEQ ID NO: 7156 - DNA, 20 bp, Artificial Sequence
  Description of Artificial Sequence: Synthetic oligonucleotide
  Target: PCSK9; (+) strand; PAM type: NNNNGHTT; PAM sequence: CTGTGTTT
tgatcctgtctagtcccttt

SEQ ID NO: 7157 - DNA, 20 bp, Artificial Sequence
  Description of Artificial Sequence: Synthetic oligonucleotide
  Target: PCSK9; (+) strand; PAM type: NNNNGHTT; PAM sequence: AGCAGATT
gttttcaaagcccattctaa

SEQ ID NO: 7158 - DNA, 20 bp, Artificial Sequence
  Description of Artificial Sequence: Synthetic oligonucleotide
  Target: PCSK9; (+) strand; PAM type: NNNNGHTT; PAM sequence: CAACGCTT
aagctggtctgccgggccca

SEQ ID NO: 7159 - DNA, 20 bp, Artificial Sequence
  Description of Artificial Sequence: Synthetic oligonucleotide
  Target: PCSK9; (+) strand; PAM type: NNNNGHTT; PAM sequence: CTGGGCTT
acgtcctcacaggtaggagg

SEQ ID NO: 7160 - DNA, 20 bp, Artificial Sequence
  Description of Artificial Sequence: Synthetic oligonucleotide
  Target: PCSK9; (+) strand; PAM type: NNNNGHTT; PAM sequence: CGAGGCTT
ccttatgcacccactgcccg

SEQ ID NO: 7161 - DNA, 20 bp, Artificial Sequence
  Description of Artificial Sequence: Synthetic oligonucleotide
  Target: PCSK9; (+) strand; PAM type: NNNNGHTT; PAM sequence: CTCAGCTT
gtgaccttacttctcctcat

SEQ ID NO: 7162 - DNA, 20 bp, Artificial Sequence
  Description of Artificial Sequence: Synthetic oligonucleotide
  Target: PCSK9; (+) strand; PAM type: NNNNGHTT; PAM sequence: AGGTGCTT
gcactggcctggagtatcgc

SEQ ID NO: 7163 - DNA, 20 bp, Artificial Sequence
  Description of Artificial Sequence: Synthetic oligonucleotide
  Target: PCSK9; (+) strand; PAM type: NNNNGHTT; PAM sequence: CTCGGTTT
gggctgaaaggagggcagac

SEQ ID NO: 7164 - DNA, 20 bp, Artificial Sequence
  Description of Artificial Sequence: Synthetic oligonucleotide
  Target: PCSK9; (+) strand; PAM type: NNNNGHTT; PAM sequence: CTTAGCTT
gaaatgatgagtgctaagca

SEQ ID NO: 7165 - DNA, 20 bp, Artificial Sequence
  Description of Artificial Sequence: Synthetic oligonucleotide
  Target: PCSK9; (+) strand; PAM type: NNNNGHTT; PAM sequence: TATTGTTT
taaattctagctatcgttac

SEQ ID NO: 7166 - DNA, 20 bp, Artificial Sequence
  Description of Artificial Sequence: Synthetic oligonucleotide
  Target: PCSK9; (+) strand; PAM type: NNNNGHTT; PAM sequence: CGTTGCTT
ttactattgttttcatcacc

SEQ ID NO: 7167 - DNA, 20 bp, Artificial Sequence
  Description of Artificial Sequence: Synthetic oligonucleotide
  Target: PCSK9; (+) strand; PAM type: NNNNGHTT; PAM sequence: AGTTGATT
gcctggaataagaggctcag

SEQ ID NO: 7168 - DNA, 20 bp, Artificial Sequence
  Description of Artificial Sequence: Synthetic oligonucleotide
  Target: PCSK9; (+) strand; PAM type: NNNNGHTT; PAM sequence: GAGGGTTT
gcacgtccaggggaaccact

SEQ ID NO: 7169 - DNA, 20 bp, Artificial Sequence
  Description of Artificial Sequence: Synthetic oligonucleotide
  Target: PCSK9; (+) strand; PAM type: NNNNGHTT; PAM sequence: CCTGGCTT
gctccgtcaggttcaggggt

SEQ ID NO: 7170 - DNA, 20 bp, Artificial Sequence
  Description of Artificial Sequence: Synthetic oligonucleotide
  Target: PCSK9; (+) strand; PAM type: NNNNGHTT; PAM sequence: GTCAGTTT
cgatgagctcacaggcacat

SEQ ID NO: 7171 - DNA, 20 bp, Artificial Sequence
  Description of Artificial Sequence: Synthetic oligonucleotide
  Target: PCSK9; (+) strand; PAM type: NNNNGHTT; PAM sequence: TGGGGCTT
gcacatgccaggctccatgc

SEQ ID NO: 7172 - DNA, 20 bp, Artificial Sequence
  Description of Artificial Sequence: Synthetic oligonucleotide
  Target: PCSK9; (+) strand; PAM type: NNNNGHTT; PAM sequence: TGTGGTTT
acagtgtccctgtgagtagg

SEQ ID NO: 7173 - DNA, 20 bp, Artificial Sequence
  Description of Artificial Sequence: Synthetic oligonucleotide
  Target: PCSK9; (+) strand; PAM type: NNNNGHTT; PAM sequence: TTAGGTTT
gtagctaagtaaccactatt

SEQ ID NO: 7174 - DNA, 20 bp, Artificial Sequence
  Description of Artificial Sequence: Synthetic oligonucleotide
  Target: PCSK9; (+) strand; PAM type: NNNNGHTT; PAM sequence: CCCGGCTT
ctgaggtggttcagacagac

SEQ ID NO: 7175 - DNA, 20 bp, Artificial Sequence
  Description of Artificial Sequence: Synthetic oligonucleotide
  Target: PCSK9; (+) strand; PAM type: NNNNGHTT; PAM sequence: GGGAGTTT
ctgcatagggaggggctggg

SEQ ID NO: 7176 - DNA, 20 bp, Artificial Sequence
  Description of Artificial Sequence: Synthetic oligonucleotide
  Target: PCSK9; (+) strand; PAM type: NNNNGHTT; PAM sequence: TGGTGTTT
tccatctctgggtggaaaga

SEQ ID NO: 7177 - DNA, 20 bp, Artificial Sequence
  Description of Artificial Sequence: Synthetic oligonucleotide
  Target: PCSK9; (+) strand; PAM type: NNNNGHTT; PAM sequence: AGTTGTTT
agcatctctttttttctttg

SEQ ID NO: 7178 - DNA, 20 bp, Artificial Sequence
  Description of Artificial Sequence: Synthetic oligonucleotide
  Target: PCSK9; (+) strand; PAM type: NNNNGHTT; PAM sequence: CTAGGTTT
tttttttctttgagttgttt

SEQ ID NO: 7179 - DNA, 20 bp, Artificial Sequence
  Description of Artificial Sequence: Synthetic oligonucleotide
  Target: PCSK9; (+) strand; PAM type: NNNNGHTT; PAM sequence: GCTGGCTT
tcccagcatttcacatctga

SEQ ID NO: 7180 - DNA, 20 bp, Artificial Sequence
  Description of Artificial Sequence: Synthetic oligonucleotide
  Target: PCSK9; (+) strand; PAM type: NNNNGHTT; PAM sequence: CCACGCTT
ggccacagggaggccagcat

SEQ ID NO: 7181 - DNA, 20 bp, Artificial Sequence
  Description of Artificial Sequence: Synthetic oligonucleotide
  Target: PCSK9; (+) strand; PAM type: NNNNGHTT; PAM sequence: CACAGCTT
ggtgctgcgtgtctctcctg

SEQ ID NO: 7182 - DNA, 20 bp, Artificial Sequence
  Description of Artificial Sequence: Synthetic oligonucleotide
  Target: PCSK9; (+) strand; PAM type: NNNNGHTT; PAM sequence: GTCAGTTT
ctcctgcacagcttttctgt

SEQ ID NO: 7183 - DNA, 20 bp, Artificial Sequence
  Description of Artificial Sequence: Synthetic oligonucleotide
  Target: PCSK9; (+) strand; PAM type: NNNNGHTT; PAM sequence: GGCGGTTT
ataccgccatgcatcagggt

SEQ ID NO: 7184 - DNA, 20 bp, Artificial Sequence
  Description of Artificial Sequence: Synthetic oligonucleotide
  Target: PCSK9; (+) strand; PAM type: NNNNGHTT; PAM sequence: GGCAGCTT
tttgccaggtagatgctgtg

SEQ ID NO: 7185 - DNA, 20 bp, Artificial Sequence
  Description of Artificial Sequence: Synthetic oligonucleotide
  Target: PCSK9; (+) strand; PAM type: NNNNGHTT; PAM sequence: GTCTGTTT
atgtgtctctgtgtggctgg

SEQ ID NO: 7186 - DNA, 20 bp, Artificial Sequence
  Description of Artificial Sequence: Synthetic oligonucleotide
  Target: PCSK9; (+) strand; PAM type: NNNNGHTT; PAM sequence: TTTTGCTT
ctctgtgtggctgggtctgt

SEQ ID NO: 7187 - DNA, 20 bp, Artificial Sequence
  Description of Artificial Sequence: Synthetic oligonucleotide
  Target: PCSK9; (+) strand; PAM type: NNNNGHTT; PAM sequence: TAAGGTTT
tttgcttttgtccagatcag

SEQ ID NO: 7188 - DNA, 20 bp, Artificial Sequence
  Description of Artificial Sequence: Synthetic oligonucleotide
  Target: PCSK9; (+) strand; PAM type: NNNNGHTT; PAM sequence: TATTGATT
aaatgcaatatgcatgcatt

SEQ ID NO: 7189 - DNA, 20 bp, Artificial Sequence
  Description of Artificial Sequence: Synthetic oligonucleotide
  Target: PCSK9; (+) strand; PAM type: NNNNGHTT; PAM sequence: TTGGGATT
ggtctcagcctccccaagtg

SEQ ID NO: 7190 - DNA, 20 bp, Artificial Sequence
  Description of Artificial Sequence: Synthetic oligonucleotide
  Target: PCSK9; (+) strand; PAM type: NNNNGHTT; PAM sequence: CCGAGATT
caaggcaagaaaaggccctg

SEQ ID NO: 7191 - DNA, 20 bp, Artificial Sequence
  Description of Artificial Sequence: Synthetic oligonucleotide
  Target: PCSK9; (+) strand; PAM type: NNNNGHTT; PAM sequence: GTCAGTTT
cactcttaaatgaactcaga

SEQ ID NO: 7192 - DNA, 20 bp, Artificial Sequence
  Description of Artificial Sequence: Synthetic oligonucleotide
  Target: PCSK9; (+) strand; PAM type: NNNNGHTT; PAM sequence: TGTTGATT
agttttaaaatgcaagtctg

SEQ ID NO: 7193 - DNA, 20 bp, Artificial Sequence
  Description of Artificial Sequence: Synthetic oligonucleotide
  Target: PCSK9; (+) strand; PAM type: NNNNGHTT; PAM sequence: ATCAGTTT
atggggcaggctatggggcc

SEQ ID NO: 7194 - DNA, 20 bp, Artificial Sequence
  Description of Artificial Sequence: Synthetic oligonucleotide
  Target: PCSK9; (+) strand; PAM type: NNNNGHTT; PAM sequence: ATGAGTTT
gggccatcagtttcagaggg

SEQ ID NO: 7195 - DNA, 20 bp, Artificial Sequence
  Description of Artificial Sequence: Synthetic oligonucleotide
  Target: PCSK9; (+) strand; PAM type: NNNNGHTT; PAM sequence: ACGTGTTT
caggcatgaagcaggagctc

SEQ ID NO: 7196 - DNA, 20 bp, Artificial Sequence
  Description of Artificial Sequence: Synthetic oligonucleotide
  Target: PCSK9; (+) strand; PAM type: NNNNGHTT; PAM sequence: ATGTGCTT
ggtcccgggccacgctagac

SEQ ID NO: 7197 - DNA, 20 bp, Artificial Sequence
  Description of Artificial Sequence: Synthetic oligonucleotide
  Target: PCSK9; (+) strand; PAM type: NNNNGHTT; PAM sequence: CTGAGCTT
gggagggtcaagggctgggg

SEQ ID NO: 7198 - DNA, 20 bp, Artificial Sequence
  Description of Artificial Sequence: Synthetic oligonucleotide
  Target: PCSK9; (+) strand; PAM type: NNNNGHTT; PAM sequence: GGATGCTT
ggcctggcacgaggggatgg

SEQ ID NO: 7199 - DNA, 20 bp, Artificial Sequence
  Description of Artificial Sequence: Synthetic oligonucleotide
  Target: PCSK9; (+) strand; PAM type: NNNNGHTT; PAM sequence: GCAGGATT
ctcaggtctccaccaaggag

SEQ ID NO: 7200 - DNA, 20 bp, Artificial Sequence
  Description of Artificial Sequence: Synthetic oligonucleotide
  Target: PCSK9; (+) strand; PAM type: NNNNGHTT; PAM sequence: CCCTGATT
tggagaagcccctgggggct

SEQ ID NO: 7201 - DNA, 20 bp, Artificial Sequence
  Description of Artificial Sequence: Synthetic oligonucleotide
  Target: PCSK9; (+) strand; PAM type: NNNNGHTT; PAM sequence: GGAGGCTT
ctgggggctccctgattaat

SEQ ID NO: 7202 - DNA, 20 bp, Artificial Sequence
  Description of Artificial Sequence: Synthetic oligonucleotide
  Target: PCSK9; (+) strand; PAM type: NNNNGHTT; PAM sequence: CTTAGCTT
ggctccctgattaatggagg

SEQ ID NO: 7203 - DNA, 20 bp, Artificial Sequence
  Description of Artificial Sequence: Synthetic oligonucleotide
  Target: PCSK9; (+) strand; PAM type: NNNNGHTT; PAM sequence: CTTGGTTT
ctggtggtcacaggctgtgc

SEQ ID NO: 7204 - DNA, 20 bp, Artificial Sequence
  Description of Artificial Sequence: Synthetic oligonucleotide
  Target: PCSK9; (+) strand; PAM type: NNNNGHTT; PAM sequence: CGCAGATT
agcaggaactgagccagaaa

SEQ ID NO: 7205 - DNA, 20 bp, Artificial Sequence
  Description of Artificial Sequence: Synthetic oligonucleotide
  Target: PCSK9; (+) strand; PAM type: NNNNGHTT; PAM sequence: GCCTGATT
ctttttccgttatcacccag

SEQ ID NO: 7206 - DNA, 20 bp, Artificial Sequence
  Description of Artificial Sequence: Synthetic oligonucleotide
  Target: PCSK9; (+) strand; PAM type: NNNNGHTT; PAM sequence: AGATGCTT
ctgattcactggcctggcgg

SEQ ID NO: 7207 - DNA, 20 bp, Artificial Sequence
  Description of Artificial Sequence: Synthetic oligonucleotide
  Target: PCSK9; (+) strand; PAM type: NNNNGHTT; PAM sequence: ACCTGTTT
tttacagccaacttttctag

SEQ ID NO: 7208 - DNA, 20 bp, Artificial Sequence
  Description of Artificial Sequence: Synthetic oligonucleotide
  Target: PCSK9; (+) strand; PAM type: NNNNGHTT; PAM sequence: TTTTGCTT
agccaacttttctagacctg

SEQ ID NO: 7209 - DNA, 20 bp, Artificial Sequence
  Description of Artificial Sequence: Synthetic oligonucleotide
  Target: PCSK9; (+) strand; PAM type: NNNNGHTT; PAM sequence: CTGGGTTT
gtaacttgaagatatttatt

SEQ ID NO: 7210 - DNA, 20 bp, Artificial Sequence
  Description of Artificial Sequence: Synthetic oligonucleotide
  Target: PCSK9; (+) strand; PAM type: NNNNGHTT; PAM sequence: CCTTGCTT
cttgactgcctagggtgatg

SEQ ID NO: 7211 - DNA, 20 bp, Artificial Sequence
  Description of Artificial Sequence: Synthetic oligonucleotide
  Target: PCSK9; (+) strand; PAM type: NNNNGHTT; PAM sequence: GTAAGTTT
ttgcttatactaggaactgg

SEQ ID NO: 7212 - DNA, 20 bp, Artificial Sequence
  Description of Artificial Sequence: Synthetic oligonucleotide
  Target: PCSK9; (+) strand; PAM type: NNNNGHTT; PAM sequence: AGATGCTT
acggaataagttacagtgcc

SEQ ID NO: 7213 - DNA, 20 bp, Artificial Sequence
  Description of Artificial Sequence: Synthetic oligonucleotide
  Target: PCSK9; (+) strand; PAM type: NNNNGHTT; PAM sequence: CATGGCTT
taatgagccagtgctaagtc

SEQ ID NO: 7214 - DNA, 20 bp, Artificial Sequence
  Description of Artificial Sequence: Synthetic oligonucleotide
  Target: PCSK9; (+) strand; PAM type: NNNNGHTT; PAM sequence: TCATGATT
tgctaagtccatggcttttt

SEQ ID NO: 7215 - DNA, 20 bp, Artificial Sequence
  Description of Artificial Sequence: Synthetic oligonucleotide
  Target: PCSK9; (+) strand; PAM type: NNNNGHTT; PAM sequence: CTCAGATT
gatttaaaattcagaacagt

SEQ ID NO: 7216 - DNA, 20 bp, Artificial Sequence
  Description of Artificial Sequence: Synthetic oligonucleotide
  Target: PCSK9; (+) strand; PAM type: NNNNGHTT; PAM sequence: GGAGGATT
tactttgggaggctgaggca

SEQ ID NO: 7217 - DNA, 20 bp, Artificial Sequence
  Description of Artificial Sequence: Synthetic oligonucleotide
  Target: PCSK9; (+) strand; PAM type: NNNNGHTT; PAM sequence: GATTGCTT
ttgggaggctgaggcaggag

SEQ ID NO: 7218 - DNA, 20 bp, Artificial Sequence
  Description of Artificial Sequence: Synthetic oligonucleotide
  Target: PCSK9; (+) strand; PAM type: NNNNGHTT; PAM sequence: TTGTGTTT
ggctgaggcaggaggattgc

SEQ ID NO: 7219 - DNA, 20 bp, Artificial Sequence
  Description of Artificial Sequence: Synthetic oligonucleotide
  Target: PCSK9; (+) strand; PAM type: NNNNGHTT; PAM sequence: AAAAGATT
ccgtctctataaaaaaattt

SEQ ID NO: 7220 - DNA, 20 bp, Artificial Sequence
  Description of Artificial Sequence: Synthetic oligonucleotide
  Target: PCSK9; (+) strand; PAM type: NNNNGHTT; PAM sequence: GGAGGCTT
ctactcaggaggctgatatg

SEQ ID NO: 7221 - DNA, 20 bp, Artificial Sequence
  Description of Artificial Sequence: Synthetic oligonucleotide
  Target: PCSK9; (+) strand; PAM type: NNNNGHTT; PAM sequence: GCTTGCTT
tcaggaggctgatatgggag

SEQ ID NO: 7222 - DNA, 20 bp, Artificial Sequence
  Description of Artificial Sequence: Synthetic oligonucleotide
  Target: PCSK9; (+) strand; PAM type: NNNNGHTT; PAM sequence: CCCAGATT
gaatctcaggcaaaattcct

SEQ ID NO: 7223 - DNA, 20 bp, Artificial Sequence
  Description of Artificial Sequence: Synthetic oligonucleotide
  Target: PCSK9; (+) strand; PAM type: NNNNGHTT; PAM sequence: AATGGCTT
ttcaagagttgacagatggc

SEQ ID NO: 7224 - DNA, 20 bp, Artificial Sequence
  Description of Artificial Sequence: Synthetic oligonucleotide
  Target: PCSK9; (+) strand; PAM type: NNNNGHTT; PAM sequence: TGTGGCTT
agggatcggggaggaagggg

SEQ ID NO: 7225 - DNA, 20 bp, Artificial Sequence
  Description of Artificial Sequence: Synthetic oligonucleotide
  Target: PCSK9; (+) strand; PAM type: NNNNGHTT; PAM sequence: AAAAGCTT
ggggaccacttgggagagcc

SEQ ID NO: 7226 - DNA, 20 bp, Artificial Sequence
  Description of Artificial Sequence: Synthetic oligonucleotide
  Target: PCSK9; (+) strand; PAM type: NNNNGHTT; PAM sequence: CTAAGCTT
cctaagttcagcatcctcct

SEQ ID NO: 7227 - DNA, 20 bp, Artificial Sequence
  Description of Artificial Sequence: Synthetic oligonucleotide
  Target: PCSK9; (+) strand; PAM type: NNNNGHTT; PAM sequence: CTCTGTTT
gaatggcggcaagactccaa

SEQ ID NO: 7228 - DNA, 20 bp, Artificial Sequence
  Description of Artificial Sequence: Synthetic oligonucleotide
  Target: PCSK9; (+) strand; PAM type: NNNNGHTT; PAM sequence: ACAAGATT
ttccttttgaaattttataa

SEQ ID NO: 7229 - DNA, 20 bp, Artificial Sequence
  Description of Artificial Sequence: Synthetic oligonucleotide
  Target: PCSK9; (+) strand; PAM type: NNNNGHTT; PAM sequence: GTCTGCTT
ggtagcagaggaaaattcca

SEQ ID NO: 7230 - DNA, 20 bp, Artificial Sequence
  Description of Artificial Sequence: Synthetic oligonucleotide
  Target: PCSK9; (+) strand; PAM type: NNNNGHTT; PAM sequence: GGATGCTT
tcgtggtgagatgcccgctg

SEQ ID NO: 7231 - DNA, 20 bp, Artificial Sequence
  Description of Artificial Sequence: Synthetic oligonucleotide
  Target: PCSK9; (+) strand; PAM type: NNNNGHTT; PAM sequence: GCTTGTTT
ggtgagatgcccgctgggat

SEQ ID NO: 7232 - DNA, 20 bp, Artificial Sequence
  Description of Artificial Sequence: Synthetic oligonucleotide
  Target: PCSK9; (+) strand; PAM type: NNNNGHTT; PAM sequence: GGGAGCTT
cttaagatcggcctcactaa

SEQ ID NO: 7233 - DNA, 20 bp, Artificial Sequence
  Description of Artificial Sequence: Synthetic oligonucleotide
  Target: PCSK9; (+) strand; PAM type: NNNNGHTT; PAM sequence: CTCTGTTT
agttaattgtgcaattcctg

SEQ ID NO: 7234 - DNA, 20 bp, Artificial Sequence
  Description of Artificial Sequence: Synthetic oligonucleotide
  Target: PCSK9; (+) strand; PAM type: NNNNGHTT; PAM sequence: AAAGGTTT
tctgtttgcagaccattttg

SEQ ID NO: 7235 - DNA, 20 bp, Artificial Sequence
  Description of Artificial Sequence: Synthetic oligonucleotide
  Target: PCSK9; (+) strand; PAM type: NNNNGHTT; PAM sequence: TGAAGCTT
tacacggtggacgatcctga

SEQ ID NO: 7236 - DNA, 20 bp, Artificial Sequence
  Description of Artificial Sequence: Synthetic oligonucleotide
  Target: PCSK9; (+) strand; PAM type: NNNNGHTT; PAM sequence: CGTTGTTT
ggtgctaggggtgcggaagg

SEQ ID NO: 7237 - DNA, 20 bp, Artificial Sequence
  Description of Artificial Sequence: Synthetic oligonucleotide
  Target: PCSK9; (+) strand; PAM type: NNNNGHTT; PAM sequence: TCCTGATT
actagaagtggcaatttcac

SEQ ID NO: 7238 - DNA, 20 bp, Artificial Sequence
  Description of Artificial Sequence: Synthetic oligonucleotide
  Target: PCSK9; (+) strand; PAM type: NNNNGHTT; PAM sequence: TGAAGTTT
gcaagaccattggaaccgtc

SEQ ID NO: 7239 - DNA, 20 bp, Artificial Sequence
  Description of Artificial Sequence: Synthetic oligonucleotide
  Target: PCSK9; (+) strand; PAM type: NNNNGHTT; PAM sequence: GTCCGTTT
gaagtttgccactcgcctct

SEQ ID NO: 7240 - DNA, 20 bp, Artificial Sequence
  Description of Artificial Sequence: Synthetic oligonucleotide
  Target: PCSK9; (+) strand; PAM type: NNNNGHTT; PAM sequence: GTGTGTTT
ctggcccttccatcttctca

SEQ ID NO: 7241 - DNA, 20 bp, Artificial Sequence
  Description of Artificial Sequence: Synthetic oligonucleotide
  Target: PCSK9; (+) strand; PAM type: NNNNGHTT; PAM sequence: AATTGCTT
gactaaatggatggttattc

SEQ ID NO: 7242 - DNA, 20 bp, Artificial Sequence
  Description of Artificial Sequence: Synthetic oligonucleotide
  Target: PCSK9; (+) strand; PAM type: NNNNGHTT; PAM sequence: AAGGGTTT
cttcatatacaaccaatacc

SEQ ID NO: 7243 - DNA, 20 bp, Artificial Sequence
  Description of Artificial Sequence: Synthetic oligonucleotide
  Target: PCSK9; (+) strand; PAM type: NNNNGHTT; PAM sequence: TTATGTTT
aataccaagggtttcagtaa

SEQ ID NO: 7244 - DNA, 20 bp, Artificial Sequence
  Description of Artificial Sequence: Synthetic oligonucleotide
  Target: PCSK9; (+) strand; PAM type: NNNNGHTT; PAM sequence: AAACGATT
attatgttttaagcaaaagc

SEQ ID NO: 7245 - DNA, 20 bp, Artificial Sequence
  Description of Artificial Sequence: Synthetic oligonucleotide
  Target: PCSK9; (+) strand; PAM type: NNNNGHTT; PAM sequence: ACATGATT
aaagcaaacgattgcagatc

SEQ ID NO: 7246 - DNA, 20 bp, Artificial Sequence
  Description of Artificial Sequence: Synthetic oligonucleotide
  Target: PCSK9; (+) strand; PAM type: NNNNGHTT; PAM sequence: TACAGTTT
cagatcacatgatttaagac

SEQ ID NO: 7247 - DNA, 20 bp, Artificial Sequence
  Description of Artificial Sequence: Synthetic oligonucleotide
  Target: PCSK9; (+) strand; PAM type: NNNNGHTT; PAM sequence: AAGTGCTT
ctcagtaaaattatatctta

SEQ ID NO: 7248 - DNA, 20 bp, Artificial Sequence
  Description of Artificial Sequence: Synthetic oligonucleotide
  Target: PCSK9; (+) strand; PAM type: NNNNGHTT; PAM sequence: TGCTGTTT
atcttaaagtgcttttattt

SEQ ID NO: 7249 - DNA, 20 bp, Artificial Sequence
  Description of Artificial Sequence: Synthetic oligonucleotide
  Target: PCSK9; (+) strand; PAM type: NNNNGHTT; PAM sequence: ATCTGTTT
tttattttgctgtttttaaa

SEQ ID NO: 7250 - DNA, 20 bp, Artificial Sequence
  Description of Artificial Sequence: Synthetic oligonucleotide
  Target: PCSK9; (+) strand; PAM type: NNNNGHTT; PAM sequence: AAGAGCTT
tatatcagaaaaatatcttc

SEQ ID NO: 7251 - DNA, 20 bp, Artificial Sequence
  Description of Artificial Sequence: Synthetic oligonucleotide
  Target: PCSK9; (+) strand; PAM type: NNNNGHTT; PAM sequence: CCAAGCTT
tggtaacctttcatcaagat

SEQ ID NO: 7252 - DNA, 20 bp, Artificial Sequence
  Description of Artificial Sequence: Synthetic oligonucleotide
  Target: PCSK9; (+) strand; PAM type: NNNNGHTT; PAM sequence: TCCTGTTT
catcattttaaattggatat

SEQ ID NO: 7253 - DNA, 20 bp, Artificial Sequence
  Description of Artificial Sequence: Synthetic oligonucleotide
  Target: PCSK9; (+) strand; PAM type: NNNNGHTT; PAM sequence: GCAAGATT
tattcctgtttaatattact

SEQ ID NO: 7254 - DNA, 20 bp, Artificial Sequence
  Description of Artificial Sequence: Synthetic oligonucleotide
  Target: PCSK9; (+) strand; PAM type: NNNNGHTT; PAM sequence: AGCAGCTT
tttgcccccacatatctaaa

SEQ ID NO: 7255 - DNA, 20 bp, Artificial Sequence
  Description of Artificial Sequence: Synthetic oligonucleotide
  Target: PCSK9; (+) strand; PAM type: NNNNGHTT; PAM sequence: GCTTGCTT
cccccacatatctaaaagca

SEQ ID NO: 7256 - DNA, 20 bp, Artificial Sequence
  Description of Artificial Sequence: Synthetic oligonucleotide
  Target: PCSK9; (+) strand; PAM type: NNNNGHTT; PAM sequence: AACAGCTT
tgtagcatcgtagagaaagc

SEQ ID NO: 7257 - DNA, 20 bp, Artificial Sequence
  Description of Artificial Sequence: Synthetic oligonucleotide
  Target: PCSK9; (+) strand; PAM type: NNNNGHTT; PAM sequence: AGTGGCTT
aaacagctcccaaaccttct

SEQ ID NO: 7258 - DNA, 20 bp, Artificial Sequence
  Description of Artificial Sequence: Synthetic oligonucleotide
  Target: PCSK9; (+) strand; PAM type: NNNNGHTT; PAM sequence: AAATGCTT
caaaccttctagtggcttaa

SEQ ID NO: 7259 - DNA, 20 bp, Artificial Sequence
  Description of Artificial Sequence: Synthetic oligonucleotide
  Target: PCSK9; (+) strand; PAM type: NNNNGHTT; PAM sequence: AGCAGCTT
acacgatccgcccaagtcac

SEQ ID NO: 7260 - DNA, 20 bp, Artificial Sequence
  Description of Artificial Sequence: Synthetic oligonucleotide
  Target: PCSK9; (+) strand; PAM type: NNNNGHTT; PAM sequence: TCGAGATT
tccaggctcttccaaagggt

SEQ ID NO: 7261 - DNA, 20 bp, Artificial Sequence
  Description of Artificial Sequence: Synthetic oligonucleotide
  Target: PCSK9; (+) strand; PAM type: NNNNGHTT; PAM sequence: TTCTGATT
ctcttccaaagggttcgaga

SEQ ID NO: 7262 - DNA, 20 bp, Artificial Sequence
  Description of Artificial Sequence: Synthetic oligonucleotide
  Target: PCSK9; (+) strand; PAM type: NNNNGHTT; PAM sequence: GGGAGATT
ctcaactcaccaatcatcat

SEQ ID NO: 7263 - DNA, 20 bp, Artificial Sequence
  Description of Artificial Sequence: Synthetic oligonucleotide
  Target: PCSK9; (+) strand; PAM type: NNNNGHTT; PAM sequence: AAAGGTTT
aaagttcatacggttagaga

SEQ ID NO: 7264 - DNA, 20 bp, Artificial Sequence
  Description of Artificial Sequence: Synthetic oligonucleotide
  Target: PCSK9; (+) strand; PAM type: NNNNGHTT; PAM sequence: CAATGTTT
cttcatctggcaacttaatg

SEQ ID NO: 7265 - DNA, 20 bp, Artificial Sequence
  Description of Artificial Sequence: Synthetic oligonucleotide
  Target: PCSK9; (+) strand; PAM type: NNNNGHTT; PAM sequence: TCATGATT
tacatctaatatttgacaat

SEQ ID NO: 7266 - DNA, 20 bp, Artificial Sequence
  Description of Artificial Sequence: Synthetic oligonucleotide
  Target: PCSK9; (+) strand; PAM type: NNNNGHTT; PAM sequence: GCCCGCTT
gaggcattgatggccattgt

SEQ ID NO: 7267 - DNA, 20 bp, Artificial Sequence
  Description of Artificial Sequence: Synthetic oligonucleotide
  Target: PCSK9; (+) strand; PAM type: NNNNGHTT; PAM sequence: TTTGGCTT
ctgttaccatctgtgtggcc

SEQ ID NO: 7268 - DNA, 20 bp, Artificial Sequence
  Description of Artificial Sequence: Synthetic oligonucleotide
  Target: PCSK9; (+) strand; PAM type: NNNNGHTT; PAM sequence: AGTCGCTT
tcagaaaatgggccaggcac

SEQ ID NO: 7269 - DNA, 20 bp, Artificial Sequence
  Description of Artificial Sequence: Synthetic oligonucleotide
  Target: PCSK9; (+) strand; PAM type: NNNNGHTT; PAM sequence: GTGAGATT
gagaaggaggtagcagtgag

SEQ ID NO: 7270 - DNA, 20 bp, Artificial Sequence
  Description of Artificial Sequence: Synthetic oligonucleotide
  Target: PCSK9; (-) strand; PAM type: NRG; PAM sequence: GAG
gaccccaaatggaattataa

SEQ ID NO: 7271 - DNA, 20 bp, Artificial Sequence
  Description of Artificial Sequence: Synthetic oligonucleotide
  Target: PCSK9; (-) strand; PAM type: NRG; PAM sequence: AAG
cagaccccaaatggaattat

SEQ ID NO: 7272 - DNA, 20 bp, Artificial Sequence
  Description of Artificial Sequence: Synthetic oligonucleotide
  Target: PCSK9; (-) strand; PAM type: NRG; PAM sequence: TGG
tttaaggtacagaccccaaa

SEQ ID NO: 7273 - DNA, 20 bp, Artificial Sequence
  Description of Artificial Sequence: Synthetic oligonucleotide
  Target: PCSK9; (-) strand; PAM type: NRG; PAM sequence: CAG
acaacataagatttaaggta

SEQ ID NO: 7274 - DNA, 20 bp, Artificial Sequence
  Description of Artificial Sequence: Synthetic oligonucleotide
  Target: PCSK9; (-) strand; PAM type: NRG; PAM sequence: AGG
cataaacaacataagattta

SEQ ID NO: 7275 - DNA, 20 bp, Artificial Sequence
  Description of Artificial Sequence: Synthetic oligonucleotide
  Target: PCSK9; (-) strand; PAM type: NRG; PAM sequence: AAG
gcataaacaacataagattt

SEQ ID NO: 7276 - DNA, 20 bp, Artificial Sequence
  Description of Artificial Sequence: Synthetic oligonucleotide
  Target: PCSK9; (-) strand; PAM type: NRG; PAM sequence: AAG
tgtctctgcataaacaacat

SEQ ID NO: 7277 - DNA, 20 bp, Artificial Sequence
  Description of Artificial Sequence: Synthetic oligonucleotide
  Target: PCSK9; (-) strand; PAM type: NRG; PAM sequence: TGG
atgatcccatttcaataaag

SEQ ID NO: 7278 - DNA, 20 bp, Artificial Sequence
  Description of Artificial Sequence: Synthetic oligonucleotide
  Target: PCSK9; (-) strand; PAM type: NRG; PAM sequence: AAG
gttatgatcccatttcaata

SEQ ID NO: 7279 - DNA, 20 bp, Artificial Sequence
  Description of Artificial Sequence: Synthetic oligonucleotide
  Target: PCSK9; (-) strand; PAM type: NRG; PAM sequence: CAG
caacatcaataacttttaaa

SEQ ID NO: 7280 - DNA, 20 bp, Artificial Sequence
  Description of Artificial Sequence: Synthetic oligonucleotide
  Target: PCSK9; (-) strand; PAM type: NRG; PAM sequence: AAG
ggtttatatattgacatgga

SEQ ID NO: 7281 - DNA, 20 bp, Artificial Sequence
  Description of Artificial Sequence: Synthetic oligonucleotide
  Target: PCSK9; (-) strand; PAM type: NRG; PAM sequence: TGG
tggaggtttatatattgaca

SEQ ID NO: 7282 - DNA, 20 bp, Artificial Sequence
  Description of Artificial Sequence: Synthetic oligonucleotide
  Target: PCSK9; (-) strand; PAM type: NRG; PAM sequence: AGG
tggtaaaaagaaataaatgg

SEQ ID NO: 7283 - DNA, 20 bp, Artificial Sequence
  Description of Artificial Sequence: Synthetic oligonucleotide
  Target: PCSK9; (-) strand; PAM type: NRG; PAM sequence: GAG
ctggtaaaaagaaataaatg

SEQ ID NO: 7284 - DNA, 20 bp, Artificial Sequence
  Description of Artificial Sequence: Synthetic oligonucleotide
  Target: PCSK9; (-) strand; PAM type: NRG; PAM sequence: TGG
agctggtaaaaagaaataaa

SEQ ID NO: 7285 - DNA, 20 bp, Artificial Sequence
  Description of Artificial Sequence: Synthetic oligonucleotide
  Target: PCSK9; (-) strand; PAM type: NRG; PAM sequence: AAG
gatatttggcagctggtaaa

SEQ ID NO: 7286 - DNA, 20 bp, Artificial Sequence
  Description of Artificial Sequence: Synthetic oligonucleotide
  Target: PCSK9; (-) strand; PAM type: NRG; PAM sequence: TGG
atggtgggatatttggcagc

SEQ ID NO: 7287 - DNA, 20 bp, Artificial Sequence
  Description of Artificial Sequence: Synthetic oligonucleotide
  Target: PCSK9; (-) strand; PAM type: NRG; PAM sequence: CAG
tcatatggtgggatatttgg

SEQ ID NO: 7288 - DNA, 20 bp, Artificial Sequence
  Description of Artificial Sequence: Synthetic oligonucleotide
  Target: PCSK9; (-) strand; PAM type: NRG; PAM sequence: TGG
tgttcatatggtgggatatt

SEQ ID NO: 7289 - DNA, 20 bp, Artificial Sequence
  Description of Artificial Sequence: Synthetic oligonucleotide
  Target: PCSK9; (-) strand; PAM type: NRG; PAM sequence: GGG
ttttagtctgttcatatggt

SEQ ID NO: 7290 - DNA, 20 bp, Artificial Sequence
  Description of Artificial Sequence: Synthetic oligonucleotide
  Target: PCSK9; (-) strand; PAM type: NRG; PAM sequence: TGG
attttagtctgttcatatgg

SEQ ID NO: 7291 - DNA, 20 bp, Artificial Sequence
  Description of Artificial Sequence: Synthetic oligonucleotide
  Target: PCSK9; (-) strand; PAM type: NRG; PAM sequence: TGG
cagattttagtctgttcata

SEQ ID NO: 7292 - DNA, 20 bp, Artificial Sequence
  Description of Artificial Sequence: Synthetic oligonucleotide
  Target: PCSK9; (-) strand; PAM type: NRG; PAM sequence: TAG
atcaatggagggacagattt

SEQ ID NO: 7293 - DNA, 20 bp, Artificial Sequence
  Description of Artificial Sequence: Synthetic oligonucleotide
  Target: PCSK9; (-) strand; PAM type: NRG; PAM sequence: CAG
aacattcatcaatggaggga

SEQ ID NO: 7294 - DNA, 20 bp, Artificial Sequence
  Description of Artificial Sequence: Synthetic oligonucleotide
  Target: PCSK9; (-) strand; PAM type: NRG; PAM sequence: GGG
tccaaacattcatcaatgga

SEQ ID NO: 7295 - DNA, 20 bp, Artificial Sequence
  Description of Artificial Sequence: Synthetic oligonucleotide
  Target: PCSK9; (-) strand; PAM type: NRG; PAM sequence: AGG
atccaaacattcatcaatgg

SEQ ID NO: 7296 - DNA, 20 bp, Artificial Sequence
  Description of Artificial Sequence: Synthetic oligonucleotide
  Target: PCSK9; (-) strand; PAM type: NRG; PAM sequence: GAG
aatccaaacattcatcaatg

SEQ ID NO: 7297 - DNA, 20 bp, Artificial Sequence
  Description of Artificial Sequence: Synthetic oligonucleotide
  Target: PCSK9; (-) strand; PAM type: NRG; PAM sequence: TGG
gcaatccaaacattcatcaa

SEQ ID NO: 7298 - DNA, 20 bp, Artificial Sequence
  Description of Artificial Sequence: Synthetic oligonucleotide
  Target: PCSK9; (-) strand; PAM type: NRG; PAM sequence: CAG
ttgaatttcttccaggggtt

SEQ ID NO: 7299 - DNA, 20 bp, Artificial Sequence
  Description of Artificial Sequence: Synthetic oligonucleotide
  Target: PCSK9; (-) strand; PAM type: NRG; PAM sequence: GGG
tcttattgaatttcttccag

SEQ ID NO: 7300 - DNA, 20 bp, Artificial Sequence
  Description of Artificial Sequence: Synthetic oligonucleotide
  Target: PCSK9; (-) strand; PAM type: NRG; PAM sequence: GGG
ctcttattgaatttcttcca

SEQ ID NO: 7301 - DNA, 20 bp, Artificial Sequence
  Description of Artificial Sequence: Synthetic oligonucleotide
  Target: PCSK9; (-) strand; PAM type: NRG; PAM sequence: AGG
gctcttattgaatttcttcc

SEQ ID NO: 7302 - DNA, 20 bp, Artificial Sequence
  Description of Artificial Sequence: Synthetic oligonucleotide
  Target: PCSK9; (-) strand; PAM type: NRG; PAM sequence: CAG
tgctcttattgaatttcttc

SEQ ID NO: 7303 - DNA, 20 bp, Artificial Sequence
  Description of Artificial Sequence: Synthetic oligonucleotide
  Target: PCSK9; (-) strand; PAM type: NRG; PAM sequence: GGG
actctcactttgatctgcca

SEQ ID NO: 7304 - DNA, 20 bp, Artificial Sequence
  Description of Artificial Sequence: Synthetic oligonucleotide
  Target: PCSK9; (-) strand; PAM type: NRG; PAM sequence: AGG
aactctcactttgatctgcc

SEQ ID NO: 7305 - DNA, 20 bp, Artificial Sequence
  Description of Artificial Sequence: Synthetic oligonucleotide
  Target: PCSK9; (-) strand; PAM type: NRG; PAM sequence: CAG
aaactctcactttgatctgc

SEQ ID NO: 7306 - DNA, 20 bp, Artificial Sequence
  Description of Artificial Sequence: Synthetic oligonucleotide
  Target: PCSK9; (-) strand; PAM type: NRG; PAM sequence: CAG
cttagctctccccgctccac

SEQ ID NO: 7307 - DNA, 20 bp, Artificial Sequence
  Description of Artificial Sequence: Synthetic oligonucleotide
  Target: PCSK9; (-) strand; PAM type: NRG; PAM sequence: TAG
ctgcaacatgttgattcact

SEQ ID NO: 7308 - DNA, 20 bp, Artificial Sequence
  Description of Artificial Sequence: Synthetic oligonucleotide
  Target: PCSK9; (-) strand; PAM type: NRG; PAM sequence: TGG
tcttggggtggtatgagtcc

SEQ ID NO: 7309 - DNA, 20 bp, Artificial Sequence
  Description of Artificial Sequence: Synthetic oligonucleotide
  Target: PCSK9; (-) strand; PAM type: NRG; PAM sequence: GAG
cctgcctcttggggtggtat

SEQ ID NO: 7310 - DNA, 20 bp, Artificial Sequence
  Description of Artificial Sequence: Synthetic oligonucleotide
  Target: PCSK9; (-) strand; PAM type: NRG; PAM sequence: TGG
ctgcctcctgcctcttgggg

SEQ ID NO: 7311 - DNA, 20 bp, Artificial Sequence
  Description of Artificial Sequence: Synthetic oligonucleotide
  Target: PCSK9; (-) strand; PAM type: NRG; PAM sequence: GGG
gcgctgcctcctgcctcttg

SEQ ID NO: 7312 - DNA, 20 bp, Artificial Sequence
  Description of Artificial Sequence: Synthetic oligonucleotide
  Target: PCSK9; (-) strand; PAM type: NRG; PAM sequence: GGG
tgcgctgcctcctgcctctt

SEQ ID NO: 7313 - DNA, 20 bp, Artificial Sequence
  Description of Artificial Sequence: Synthetic oligonucleotide
  Target: PCSK9; (-) strand; PAM type: NRG; PAM sequence: TGG
ctgcgctgcctcctgcctct

SEQ ID NO: 7314 - DNA, 20 bp, Artificial Sequence
  Description of Artificial Sequence: Synthetic oligonucleotide
  Target: PCSK9; (-) strand; PAM type: NRG; PAM sequence: TGG
atggctcctcagtgcccttc

SEQ ID NO: 7315 - DNA, 20 bp, Artificial Sequence
  Description of Artificial Sequence: Synthetic oligonucleotide
  Target: PCSK9; (-) strand; PAM type: NRG; PAM sequence: CAG
gagctgtggccatggctcct

SEQ ID NO: 7316 - DNA, 20 bp, Artificial Sequence
  Description of Artificial Sequence: Synthetic oligonucleotide
  Target: PCSK9; (-) strand; PAM type: NRG; PAM sequence: TGG
gccacagggagctgtggcca

SEQ ID NO: 7317 - DNA, 20 bp, Artificial Sequence
  Description of Artificial Sequence: Synthetic oligonucleotide
  Target: PCSK9; (-) strand; PAM type: NRG; PAM sequence: TGG
ctgggagccacagggagctg

SEQ ID NO: 7318 - DNA, 20 bp, Artificial Sequence
  Description of Artificial Sequence: Synthetic oligonucleotide
  Target: PCSK9; (-) strand; PAM type: NRG; PAM sequence: GAG
ccgctgctgggagccacagg

SEQ ID NO: 7319 - DNA, 20 bp, Artificial Sequence
  Description of Artificial Sequence: Synthetic oligonucleotide
  Target: PCSK9; (-) strand; PAM type: NRG; PAM sequence: GGG
tcccgctgctgggagccaca

SEQ ID NO: 7320 - DNA, 20 bp, Artificial Sequence
  Description of Artificial Sequence: Synthetic oligonucleotide
  Target: PCSK9; (-) strand; PAM type: NRG; PAM sequence: AGG
gtcccgctgctgggagccac

SEQ ID NO: 7321 - DNA, 20 bp, Artificial Sequence
  Description of Artificial Sequence: Synthetic oligonucleotide
  Target: PCSK9; (-) strand; PAM type: NRG; PAM sequence: CAG
ggtcccgctgctgggagcca

SEQ ID NO: 7322 - DNA, 20 bp, Artificial Sequence
  Description of Artificial Sequence: Synthetic oligonucleotide
  Target: PCSK9; (-) strand; PAM type: NRG; PAM sequence: GAG
gcatctggtcccgctgctgg

SEQ ID NO: 7323 - DNA, 20 bp, Artificial Sequence
  Description of Artificial Sequence: Synthetic oligonucleotide
  Target: PCSK9; (-) strand; PAM type: NRG; PAM sequence: GGG
ttgcatctggtcccgctgct

SEQ ID NO: 7324 - DNA, 20 bp, Artificial Sequence
  Description of Artificial Sequence: Synthetic oligonucleotide
  Target: PCSK9; (-) strand; PAM type: NRG; PAM sequence: TGG
tttgcatctggtcccgctgc

SEQ ID NO: 7325 - DNA, 20 bp, Artificial Sequence
  Description of Artificial Sequence: Synthetic oligonucleotide
  Target: PCSK9; (-) strand; PAM type: NRG; PAM sequence: TGG
tggggtgggaagtttgcatc

SEQ ID NO: 7326 - DNA, 20 bp, Artificial Sequence
  Description of Artificial Sequence: Synthetic oligonucleotide
  Target: PCSK9; (-) strand; PAM type: NRG; PAM sequence: AAG
cagacatgtggtggggtggg

SEQ ID NO: 7327 - DNA, 20 bp, Artificial Sequence
  Description of Artificial Sequence: Synthetic oligonucleotide
  Target: PCSK9; (-) strand; PAM type: NRG; PAM sequence: GGG
gcccagacatgtggtggggt

SEQ ID NO: 7328 - DNA, 20 bp, Artificial Sequence
  Description of Artificial Sequence: Synthetic oligonucleotide
  Target: PCSK9; (-) strand; PAM type: NRG; PAM sequence: TGG
agcccagacatgtggtgggg

SEQ ID NO: 7329 - DNA, 20 bp, Artificial Sequence
  Description of Artificial Sequence: Synthetic oligonucleotide
  Target: PCSK9; (-) strand; PAM type: NRG; PAM sequence: GGG
ggaagcccagacatgtggtg

SEQ ID NO: 7330 - DNA, 20 bp, Artificial Sequence
  Description of Artificial Sequence: Synthetic oligonucleotide
  Target: PCSK9; (-) strand; PAM type: NRG; PAM sequence: GGG
aggaagcccagacatgtggt

SEQ ID NO: 7331 - DNA, 20 bp, Artificial Sequence
  Description of Artificial Sequence: Synthetic oligonucleotide
  Target: PCSK9; (-) strand; PAM type: NRG; PAM sequence: TGG
taggaagcccagacatgtgg

SEQ ID NO: 7332 - DNA, 20 bp, Artificial Sequence
  Description of Artificial Sequence: Synthetic oligonucleotide
  Target: PCSK9; (-) strand; PAM type: NRG; PAM sequence: TGG
gtataggaagcccagacatg

SEQ ID NO: 7333 - DNA, 20 bp, Artificial Sequence
  Description of Artificial Sequence: Synthetic oligonucleotide
  Target: PCSK9; (-) strand; PAM type: NRG; PAM sequence: CAG
tgaacagggtataggaagcc

SEQ ID NO: 7334 - DNA, 20 bp, Artificial Sequence
  Description of Artificial Sequence: Synthetic oligonucleotide
  Target: PCSK9; (-) strand; PAM type: NRG; PAM sequence: AAG
aagactgaacagggtatagg

SEQ ID NO: 7335 - DNA, 20 bp, Artificial Sequence
  Description of Artificial Sequence: Synthetic oligonucleotide
  Target: PCSK9; (-) strand; PAM type: NRG; PAM sequence: AGG
gtaaagactgaacagggtat

SEQ ID NO: 7336 - DNA, 20 bp, Artificial Sequence
  Description of Artificial Sequence: Synthetic oligonucleotide
  Target: PCSK9; (-) strand; PAM type: NRG; PAM sequence: TAG
agtaaagactgaacagggta

SEQ ID NO: 7337 - DNA, 20 bp, Artificial Sequence
  Description of Artificial Sequence: Synthetic oligonucleotide
  Target: PCSK9; (-) strand; PAM type: NRG; PAM sequence: GGG
gactcagtaaagactgaaca

SEQ ID NO: 7338 - DNA, 20 bp, Artificial Sequence
  Description of Artificial Sequence: Synthetic oligonucleotide
  Target: PCSK9; (-) strand; PAM type: NRG; PAM sequence: AGG
tgactcagtaaagactgaac

SEQ ID NO: 7339 - DNA, 20 bp, Artificial Sequence
  Description of Artificial Sequence: Synthetic oligonucleotide
  Target: PCSK9; (-) strand; PAM type: NRG; PAM sequence: CAG
ctgactcagtaaagactgaa

SEQ ID NO: 7340 - DNA, 20 bp, Artificial Sequence
  Description of Artificial Sequence: Synthetic oligonucleotide
  Target: PCSK9; (-) strand; PAM type: NRG; PAM sequence: AAG
aaacagcttctgactcagta

SEQ ID NO: 7341 - DNA, 20 bp, Artificial Sequence
  Description of Artificial Sequence: Synthetic oligonucleotide
  Target: PCSK9; (-) strand; PAM type: NRG; PAM sequence: CAG
tcttaaaacagcttctgact

SEQ ID NO: 7342 - DNA, 20 bp, Artificial Sequence
  Description of Artificial Sequence: Synthetic oligonucleotide
  Target: PCSK9; (-) strand; PAM type: NRG; PAM sequence: CAG
ggtgtgctcagctcttaaaa

SEQ ID NO: 7343 - DNA, 20 bp, Artificial Sequence
  Description of Artificial Sequence: Synthetic oligonucleotide
  Target: PCSK9; (-) strand; PAM type: NRG; PAM sequence: CAG
tgctgtaaaatgggtgtgct

SEQ ID NO: 7344 - DNA, 20 bp, Artificial Sequence
  Description of Artificial Sequence: Synthetic oligonucleotide
  Target: PCSK9; (-) strand; PAM type: NRG; PAM sequence: GGG
aagaagctctgctgtaaaat

SEQ ID NO: 7345 - DNA, 20 bp, Artificial Sequence
  Description of Artificial Sequence: Synthetic oligonucleotide
  Target: PCSK9; (-) strand; PAM type: NRG; PAM sequence: TGG
taagaagctctgctgtaaaa

SEQ ID NO: 7346 - DNA, 20 bp, Artificial Sequence
  Description of Artificial Sequence: Synthetic oligonucleotide
  Target: PCSK9; (-) strand; PAM type: NRG; PAM sequence: AAG
gcagcacgcttttccgtaag

SEQ ID NO: 7347 - DNA, 20 bp, Artificial Sequence
  Description of Artificial Sequence: Synthetic oligonucleotide
  Target: PCSK9; (-) strand; PAM type: NRG; PAM sequence: AAG
acagcagcacgcttttccgt

SEQ ID NO: 7348 - DNA, 20 bp, Artificial Sequence
  Description of Artificial Sequence: Synthetic oligonucleotide
  Target: PCSK9; (-) strand; PAM type: NRG; PAM sequence: CAG
ggacaaagggtccaggacag

SEQ ID NO: 7349 - DNA, 20 bp, Artificial Sequence
  Description of Artificial Sequence: Synthetic oligonucleotide
  Target: PCSK9; (-) strand; PAM type: NRG; PAM sequence: CAG
gatggacaaagggtccagga

SEQ ID NO: 7350 - DNA, 20 bp, Artificial Sequence
  Description of Artificial Sequence: Synthetic oligonucleotide
  Target: PCSK9; (-) strand; PAM type: NRG; PAM sequence: AGG
ccaggatggacaaagggtcc

SEQ ID NO: 7351 - DNA, 20 bp, Artificial Sequence
  Description of Artificial Sequence: Synthetic oligonucleotide
  Target: PCSK9; (-) strand; PAM type: NRG; PAM sequence: CAG
cccaggatggacaaagggtc

SEQ ID NO: 7352 - DNA, 20 bp, Artificial Sequence
  Description of Artificial Sequence: Synthetic oligonucleotide
  Target: PCSK9; (-) strand; PAM type: NRG; PAM sequence: GGG
aatggcccaggatggacaaa

SEQ ID NO: 7353 - DNA, 20 bp, Artificial Sequence
  Description of Artificial Sequence: Synthetic oligonucleotide
  Target: PCSK9; (-) strand; PAM type: NRG; PAM sequence: AGG
caatggcccaggatggacaa

SEQ ID NO: 7354 - DNA, 20 bp, Artificial Sequence
  Description of Artificial Sequence: Synthetic oligonucleotide
  Target: PCSK9; (-) strand; PAM type: NRG; PAM sequence: AAG
ccaatggcccaggatggaca

SEQ ID NO: 7355 - DNA, 20 bp, Artificial Sequence
  Description of Artificial Sequence: Synthetic oligonucleotide
  Target: PCSK9; (-) strand; PAM type: NRG; PAM sequence: TGG
gctggcccaatggcccagga

SEQ ID NO: 7356 - DNA, 20 bp, Artificial Sequence
  Description of Artificial Sequence: Synthetic oligonucleotide
  Target: PCSK9; (-) strand; PAM type: NRG; PAM sequence: AGG
tggagctggcccaatggccc

SEQ ID NO: 7357 - DNA, 20 bp, Artificial Sequence
  Description of Artificial Sequence: Synthetic oligonucleotide
  Target: PCSK9; (-) strand; PAM type: NRG; PAM sequence: CAG
ctggagctggcccaatggcc

SEQ ID NO: 7358 - DNA, 20 bp, Artificial Sequence
  Description of Artificial Sequence: Synthetic oligonucleotide
  Target: PCSK9; (-) strand; PAM type: NRG; PAM sequence: TGG
tgaggctggagctggcccaa

SEQ ID NO: 7359 - DNA, 20 bp, Artificial Sequence
  Description of Artificial Sequence: Synthetic oligonucleotide
  Target: PCSK9; (-) strand; PAM type: NRG; PAM sequence: TGG
ttcaaggatgaggctggagc

SEQ ID NO: 7360 - DNA, 20 bp, Artificial Sequence
  Description of Artificial Sequence: Synthetic oligonucleotide
  Target: PCSK9; (-) strand; PAM type: NRG; PAM sequence: GAG
accattcaaggatgaggctg

SEQ ID NO: 7361 - DNA, 20 bp, Artificial Sequence
  Description of Artificial Sequence: Synthetic oligonucleotide
  Target: PCSK9; (-) strand; PAM type: NRG; PAM sequence: TGG
ccaccattcaaggatgaggc

SEQ ID NO: 7362 - DNA, 20 bp, Artificial Sequence
  Description of Artificial Sequence: Synthetic oligonucleotide
  Target: PCSK9; (-) strand; PAM type: NRG; PAM sequence: AGG
acacccaccattcaaggatg

SEQ ID NO: 7363 - DNA, 20 bp, Artificial Sequence
  Description of Artificial Sequence: Synthetic oligonucleotide
  Target: PCSK9; (-) strand; PAM type: NRG; PAM sequence: GAG
tacacccaccattcaaggat

SEQ ID NO: 7364 - DNA, 20 bp, Artificial Sequence
  Description of Artificial Sequence: Synthetic oligonucleotide
  Target: PCSK9; (-) strand; PAM type: NRG; PAM sequence: AGG
cgatgtacacccaccattca

SEQ ID NO: 7365 - DNA, 20 bp, Artificial Sequence
  Description of Artificial Sequence: Synthetic oligonucleotide
  Target: PCSK9; (-) strand; PAM type: NRG; PAM sequence: AAG
gcgatgtacacccaccattc

SEQ ID NO: 7366 - DNA, 20 bp, Artificial Sequence
  Description of Artificial Sequence: Synthetic oligonucleotide
  Target: PCSK9; (-) strand; PAM type: NRG; PAM sequence: CAG
atataatctagcaaggaccc

SEQ ID NO: 7367 - DNA, 20 bp, Artificial Sequence
  Description of Artificial Sequence: Synthetic oligonucleotide
  Target: PCSK9; (-) strand; PAM type: NRG; PAM sequence: AGG
ggccctaatataatctagca

SEQ ID NO: 7368 - DNA, 20 bp, Artificial Sequence
  Description of Artificial Sequence: Synthetic oligonucleotide
  Target: PCSK9; (-) strand; PAM type: NRG; PAM sequence: AAG
aggccctaatataatctagc

SEQ ID NO: 7369 - DNA, 20 bp, Artificial Sequence
  Description of Artificial Sequence: Synthetic oligonucleotide
  Target: PCSK9; (-) strand; PAM type: NRG; PAM sequence: TAG
gtggaggccctaatataatc

SEQ ID NO: 7370 - DNA, 20 bp, Artificial Sequence
  Description of Artificial Sequence: Synthetic oligonucleotide
  Target: PCSK9; (-) strand; PAM type: NRG; PAM sequence: AGG
agagcaactaaagtgtgtgg

SEQ ID NO: 7371 - DNA, 20 bp, Artificial Sequence
  Description of Artificial Sequence: Synthetic oligonucleotide
  Target: PCSK9; (-) strand; PAM type: NRG; PAM sequence: GAG
gagagcaactaaagtgtgtg

SEQ ID NO: 7372 - DNA, 20 bp, Artificial Sequence
  Description of Artificial Sequence: Synthetic oligonucleotide
  Target: PCSK9; (-) strand; PAM type: NRG; PAM sequence: TGG
cggagagcaactaaagtgtg

SEQ ID NO: 7373 - DNA, 20 bp, Artificial Sequence
  Description of Artificial Sequence: Synthetic oligonucleotide
  Target: PCSK9; (-) strand; PAM type: NRG; PAM sequence: AAG
gtgcaaacggagagcaacta

SEQ ID NO: 7374 - DNA, 20 bp, Artificial Sequence
  Description of Artificial Sequence: Synthetic oligonucleotide
  Target: PCSK9; (-) strand; PAM type: NRG; PAM sequence: GAG
gaaatcattgtgcaaacgga

SEQ ID NO: 7375 - DNA, 20 bp, Artificial Sequence
  Description of Artificial Sequence: Synthetic oligonucleotide
  Target: PCSK9; (-) strand; PAM type: NRG; PAM sequence: GAG
tagaaatcattgtgcaaacg

SEQ ID NO: 7376 - DNA, 20 bp, Artificial Sequence
  Description of Artificial Sequence: Synthetic oligonucleotide
  Target: PCSK9; (-) strand; PAM type: NRG; PAM sequence: CGG
tatagaaatcattgtgcaaa

SEQ ID NO: 7377 - DNA, 20 bp, Artificial Sequence
  Description of Artificial Sequence: Synthetic oligonucleotide
  Target: PCSK9; (-) strand; PAM type: NRG; PAM sequence: TAG
acaaagaggtactaatgata

SEQ ID NO: 7378 - DNA, 20 bp, Artificial Sequence
  Description of Artificial Sequence: Synthetic oligonucleotide
  Target: PCSK9; (-) strand; PAM type: NRG; PAM sequence: AGG
aattaggcaagtggacaaag

SEQ ID NO: 7379 - DNA, 20 bp, Artificial Sequence
  Description of Artificial Sequence: Synthetic oligonucleotide
  Target: PCSK9; (-) strand; PAM type: NRG; PAM sequence: GAG
taattaggcaagtggacaaa

SEQ ID NO: 7380 - DNA, 20 bp, Artificial Sequence
  Description of Artificial Sequence: Synthetic oligonucleotide
  Target: PCSK9; (-) strand; PAM type: NRG; PAM sequence: AAG
aataattaggcaagtggaca

SEQ ID NO: 7381 - DNA, 20 bp, Artificial Sequence
  Description of Artificial Sequence: Synthetic oligonucleotide
  Target: PCSK9; (-) strand; PAM type: NRG; PAM sequence: TGG
taaggaaataattaggcaag

SEQ ID NO: 7382 - DNA, 20 bp, Artificial Sequence
  Description of Artificial Sequence: Synthetic oligonucleotide
  Target: PCSK9; (-) strand; PAM type: NRG; PAM sequence: AAG
tcctaaggaaataattaggc

SEQ ID NO: 7383 - DNA, 20 bp, Artificial Sequence
  Description of Artificial Sequence: Synthetic oligonucleotide
  Target: PCSK9; (-) strand; PAM type: NRG; PAM sequence: AGG
tttatcctaaggaaataatt

SEQ ID NO: 7384 - DNA, 20 bp, Artificial Sequence
  Description of Artificial Sequence: Synthetic oligonucleotide
  Target: PCSK9; (-) strand; PAM type: NRG; PAM sequence: TAG
atttatcctaaggaaataat

SEQ ID NO: 7385 - DNA, 20 bp, Artificial Sequence
  Description of Artificial Sequence: Synthetic oligonucleotide
  Target: PCSK9; (-) strand; PAM type: NRG; PAM sequence: AGG
tttcttaggaatttatccta

SEQ ID NO: 7386 - DNA, 20 bp, Artificial Sequence
  Description of Artificial Sequence: Synthetic oligonucleotide
  Target: PCSK9; (-) strand; PAM type: NRG; PAM sequence: AAG
atttcttaggaatttatcct

SEQ ID NO: 7387 - DNA, 20 bp, Artificial Sequence
  Description of Artificial Sequence: Synthetic oligonucleotide
  Target: PCSK9; (-) strand; PAM type: NRG; PAM sequence: AGG
acctagctatttgatttctt

SEQ ID NO: 7388 - DNA, 20 bp, Artificial Sequence
  Description of Artificial Sequence: Synthetic oligonucleotide
  Target: PCSK9; (-) strand; PAM type: NRG; PAM sequence: TAG
gacctagctatttgatttct

SEQ ID NO: 7389 - DNA, 20 bp, Artificial Sequence
  Description of Artificial Sequence: Synthetic oligonucleotide
  Target: PCSK9; (-) strand; PAM type: NRG; PAM sequence: TAG
aaatgtgctatatactgacc

SEQ ID NO: 7390 - DNA, 20 bp, Artificial Sequence
  Description of Artificial Sequence: Synthetic oligonucleotide
  Target: PCSK9; (-) strand; PAM type: NRG; PAM sequence: TAG
cctttaatatctctagtcag

SEQ ID NO: 7391 - DNA, 20 bp, Artificial Sequence
  Description of Artificial Sequence: Synthetic oligonucleotide
  Target: PCSK9; (-) strand; PAM type: NRG; PAM sequence: CAG
gtacctttaatatctctagt

SEQ ID NO: 7392 - DNA, 20 bp, Artificial Sequence
  Description of Artificial Sequence: Synthetic oligonucleotide
  Target: PCSK9; (-) strand; PAM type: NRG; PAM sequence: TAG
ttttgtacctttaatatctc

SEQ ID NO: 7393 - DNA, 20 bp, Artificial Sequence
  Description of Artificial Sequence: Synthetic oligonucleotide
  Target: PCSK9; (-) strand; PAM type: NRG; PAM sequence: TGG
tgcgactctacatctaattc

SEQ ID NO: 7394 - DNA, 20 bp, Artificial Sequence
  Description of Artificial Sequence: Synthetic oligonucleotide
  Target: PCSK9; (-) strand; PAM type: NRG; PAM sequence: TAG
cctgattagaaatgacgtct

SEQ ID NO: 7395 - DNA, 20 bp, Artificial Sequence
  Description of Artificial Sequence: Synthetic oligonucleotide
  Target: PCSK9; (-) strand; PAM type: NRG; PAM sequence: TAG
actcattttttctccctgat

SEQ ID NO: 7396 - DNA, 20 bp, Artificial Sequence
  Description of Artificial Sequence: Synthetic oligonucleotide
  Target: PCSK9; (-) strand; PAM type: NRG; PAM sequence: TAG
gttatttttctccagaaggc

SEQ ID NO: 7397 - DNA, 20 bp, Artificial Sequence
  Description of Artificial Sequence: Synthetic oligonucleotide
  Target: PCSK9; (-) strand; PAM type: NRG; PAM sequence: AGG
tgaggttatttttctccaga

SEQ ID NO: 7398 - DNA, 20 bp, Artificial Sequence
  Description of Artificial Sequence: Synthetic oligonucleotide
  Target: PCSK9; (-) strand; PAM type: NRG; PAM sequence: AAG
gtgaggttatttttctccag

SEQ ID NO: 7399 - DNA, 20 bp, Artificial Sequence
  Description of Artificial Sequence: Synthetic oligonucleotide
  Target: PCSK9; (-) strand; PAM type: NRG; PAM sequence: CAG
ggagtgaggttatttttctc

(The sequence listing continues in the following parts.)

1. A method for editing a Proprotein Convertase Subtilisin/Kexin Type 9 (PCSK9) gene in a cell by genome editing comprising the step of introducing into the cell one or more deoxyribonucleic acid (DNA) endonucleases to effect one or more single-strand breaks (SSBs) or double-strand breaks (DSBs) within or near the PCSK9 gene or PCSK9 regulatory elements that results in one or more permanent insertions, deletions or mutations of at least one nucleotide within or near the PCSK9 gene, thereby reducing or eliminating the expression or function of PCSK9 gene products.

2. An ex vivo method for treating a patient having a PCSK9 related condition or disorder comprising the steps of:
(a) isolating a hepatocyte from a patient;
(b) editing within or near a Proprotein Convertase Subtilisin/Kexin Type 9 (PCSK9) gene or other DNA sequences that encode regulatory elements of the PCSK9 gene of the hepatocyte; and
(c) implanting said genome-edited hepatocyte into the patient.

3. The method of claim 2, wherein the editing step comprises introducing into the hepatocyte one or more deoxyribonucleic acid (DNA) endonucleases to effect one or more single-strand breaks (SSBs) or double-strand breaks (DSBs) within or near the PCSK9 gene or PCSK9 regulatory elements that results in one or more permanent insertions, deletions or mutations of at least one nucleotide within or near the PCSK9 gene, thereby reducing or eliminating the expression or function of PCSK9 gene products.

4. An ex vivo method for treating a patient having a PCSK9 related condition or disorder comprising the steps of:
(a) creating a patient specific induced pluripotent stem cell (iPSC);
(b) editing within or near a Proprotein Convertase Subtilisin/Kexin Type 9 (PCSK9) gene or other DNA sequences that encode regulatory elements of the PCSK9 gene of the iPSC;
(c) differentiating the genome-edited iPSC into a hepatocyte; and
(d) implanting said hepatocyte into the patient.

5. The method of claim 4, wherein the editing step comprises introducing into the iPSC one or more deoxyribonucleic acid (DNA) endonucleases to effect one or more single-strand breaks (SSBs) or double-strand breaks (DSBs) within or near the PCSK9 gene or PCSK9 regulatory elements that results in one or more permanent insertions, deletions or mutations of at least one nucleotide within or near the PCSK9 gene, thereby reducing or eliminating the expression or function of PCSK9 gene products.

6. An ex vivo method for treating a patient having a PCSK9 related condition or disorder comprising the steps of:
(a) isolating a mesenchymal stem cell from the patient;
(b) editing within or near a Proprotein Convertase Subtilisin/Kexin Type 9 (PCSK9) gene or other DNA sequences that encode regulatory elements of the PCSK9 gene of the mesenchymal stem cell;
(c) differentiating the genome-edited mesenchymal stem cell into hepatocyte; and
(d) implanting the hepatocyte into the patient.

7. The method of claim 6, wherein the editing step comprises introducing into the mesenchymal stem cell one or more deoxyribonucleic acid (DNA) endonucleases to effect one or more single-strand breaks (SSBs) or double-strand breaks (DSBs) within or near the PCSK9 gene or PCSK9 regulatory elements that results in one or more permanent insertions, deletions or mutations of at least one nucleotide within or near the PCSK9 gene, thereby reducing or eliminating the expression or function of PCSK9 gene products.

8. An in vivo method for treating a patient with a PCSK9 related disorder comprising the step of editing the Proprotein Convertase Subtilisin/Kexin Type 9 (PCSK9) gene in a cell of the patient.

9. The method of claim 8, wherein the editing step comprises introducing into the cell one or more deoxyribonucleic acid (DNA) endonucleases to effect one or more single-strand breaks (SSBs) or double-strand breaks (DSBs) within or near the PCSK9 gene or PCSK9 regulatory elements that results in one or more permanent insertions, deletions or mutations of at least one nucleotide within or near the PCSK9 gene, thereby reducing or eliminating the expression or function of PCSK9 gene products.

10. The method of any one of claims 8-9, wherein the cell is a hepatocyte.

11. The method of claim 10, wherein the one or more deoxyribonucleic acid (DNA) endonuclease is delivered to the hepatocyte by local injection, systemic infusion, or combinations thereof.

12. A method of altering the contiguous genomic sequence of a PCSK9 gene in a cell comprising contacting said cell with one or more deoxyribonucleic acid (DNA) endonuclease to effect one or more single-strand breaks (SSBs) or double-strand breaks (DSBs).

13. The method of claim 12, wherein the alteration of the contiguous genomic sequence occurs in one or more exons of the PCSK9 gene.

14. The method of any one of claims 1-13, wherein the one or more deoxyribonucleic acid (DNA) endonuclease is selected from any of those listed in SEQ ID NOs: 1-620, and variants having at least 70% homology to any of those listed in SEQ ID NOs: 1-620.

15. The method of claim 14, wherein the one or more deoxyribonucleic acid (DNA) endonuclease is one or more protein or polypeptide.

16. The method of claim 14, wherein the one or more deoxyribonucleic acid (DNA) endonuclease is one or more polynucleotide encoding the one or more DNA endonuclease.

17. The method of claim 16, wherein the one or more deoxyribonucleic acid (DNA) endonuclease is one or more ribonucleic acid (RNA) encoding the one or more DNA endonuclease.

18. The method of claim 17, wherein the one or more ribonucleic acid (RNA) is one or more chemically modified RNA.

19. The method of claim 18, wherein the one or more ribonucleic acid (RNA) is chemically modified in the coding region.

20. The method of any one of claims 16-19, wherein the one or more polynucleotide or one or more ribonucleic acid (RNA) is codon optimized.

21. The method of any one of claims 1-20, wherein the method further comprises introducing into the cell one or more gRNAs or one or more sgRNAs.

22. The method of claim 21, wherein the one or more gRNAs or one or more sgRNAs comprises a spacer sequence that is complementary to a DNA sequence within or near the PCSK9 gene.

23. The method of claim 21, wherein the one or more gRNAs or one or more sgRNAs comprises a spacer sequence that is complementary to a sequence flanking the PCSK9 gene or other sequence that encodes a regulatory element of the PCSK9 gene.

24. The method of any of the claims 21-23, wherein said one or more gRNAs or one or more sgRNAs is chemically modified.

25. The method of any one of claims 21-24, wherein said or more gRNAs or one or more sgRNAs is pre-complexed with the one or more deoxyribonucleic acid (DNA) endonuclease.

26. The method of claim 25, wherein the pre-complexing involves a covalent attachment of said one or more gRNAs or one or more sgRNAs to the one or more deoxyribonucleic acid (DNA) endonuclease.

27. The method of any one of claims 14-26, wherein the one or more deoxyribonucleic acid (DNA) endonuclease is formulated in a liposome or lipid nanoparticle.

28. The method of any one of claims 21-26, wherein the one or more deoxyribonucleic acid (DNA) endonuclease is formulated in a liposome or lipid nanoparticle which also comprises the one or more gRNAs or one or more sgRNAs.

29. The method of any one of claim 12, or 21-23, wherein the one or more deoxyribonucleic acid (DNA) endonuclease is encoded in an AAV vector particle, where the AAV vector serotype is selected from the group consisting of any of those listed in SEQ D NOs: 4,734-5,302 and in Table 2.

30. The method of any of the claims 21-23, wherein the one or more gRNA or one or more sgRNA is encoded in an AAV vector particle, where the AAV vector serotype is selected from the group consisting of any of those listed in SEQ ID NOs: 4,734-5,302 and in Table 2.

31. The method of any of the claims 21-23, wherein the one or more deoxyribonucleic acid (DNA) endonuclease is encoded in an AAV vector particle which also encodes the one or more gRNA or one or more sgRNA, where the AAV vector serotype is selected from the group consisting of any of those listed in SEQ ID NOs: 4,734-5,302 and in Table 2.

32. A single-molecule guide RNA comprising at least a spacer sequence that is an RNA sequence corresponding to any of SEQ ID NOs: 5,305-28,696.

33. The single-molecule guide polynucleotide of claim 32, wherein the single-molecule guide polynucleotide further comprises a spacer extension region.

34. The single-molecule guide polynucleotide of claim 32, wherein the single-molecule guide polynucleotide further comprises a tracrRNA extension region.

35. The single-molecule guide polynucleotide of claim 32-34, wherein the single-molecule guide polynucleotide is chemically modified.

36. The single-molecule guide RNA of any one of claims 32-35, pre-complexed with a DNA endonuclease.

37. The single-molecule guide RNA of claim 36, wherein the DNA endonuclease is a Cas9 or Cpf1 endonuclease.

38. The single-molecule guide RNA of claim 37, wherein the Cas9 or Cpf1 endonuclease is selected from the group consisting of S. pyogenes Cas9, S. aureus Cas9, N. meningitides Cas9, S. thermophilus CRISPR1 Cas9, S. thermophilus CRISPR 3 Cas9, T. denticola Cas9, L. bacterium ND2006 Cpf1 and Acidaminococcus sp. BV3L6 Cpf1, and variants having at least 70% homology to said enzymes.

39. The single-molecule guide RNA of claim 38, wherein the Cas9 or Cpf1 endonuclease comprises one or more nuclear localization signals (NLSs).

40. The single-molecule guide RNA of claim 39, wherein at least one NLS is at or within 50 amino acids of the amino-terminus of the Cas9 or Cpf1 endonuclease and/or at least one NLS is at or within 50 amino acids of the carboxy-terminus of the Cas9 or Cpf1 endonuclease.

41. A DNA encoding the single-molecule guide RNA of any one of claims 31-34.
